United States Patent Application Publication US 2011/0277190 A1 - sequence listing, part 4

SEQ ID NO: 12998 - protein, 478 aa, Nocardioides sp. JS614
MTQRVRPGLTTGAEAPRLARMVATATPGHDVSALHPELRPMYEKVVSRNPGEREFHQAVFEVMQSVGPIAEERSDYAQWSILQRICEPERQIIFRVPWVADDGKVEINRGFRVEFNSALGPFKGGLRFHPSVNLSIIKFLGFEQVFKNALTGMPIGGGKGGADFDPKGRSDGEVMRFCQSFMTELYRHVGEYTDVPAGDIGVGGREIGYLFGQYKRITNRYESGVITGKGLTWGGSQVRTEATGYGTVFFVEQMLQARGEHLEGKRVVVSGAGNVAIYAVEKAQALGAVVVAVSDSGGYVVDEAGIDLELLKEIKEVERGRLTEYVERRSGATHVTDGCIWDVPCDIALPCATQNELDESAAKTLAANGVTLVAEGANMPSTPAAVQLFQAAGVLFAPGKASNAGGVATSALEMQQNASRDSWHFDETEARLQEIMSEIHDTCLATSDHYGAPGNYVVGANLAGYVRVADAMVALGVI

SEQ ID NO: 12999 - protein, 677 aa, Bifidobacterium longum DJO10A
MSVINSFTQHTINLTRKALRLGSDFVHPVHDDTPDEPDYLSNADVPVETNIALPHSDDWDDGHLTVTDIDPATGLLTTSTEGNPPLDEGTSIYDLYADRAERMGDEPLYTYKSGNDWVTVTANEFLADVRAVAKGLIHYGLKKGDAVAFMCRTSYDWDLTDAAIMACGGVLATIYDTDSAEQIRNIVNNSDARLLIVQDTDMRKKADGAVEECPSLEHIITIETGGLDEIKAYGTTVSDEELDERIDSVKKTDLCSIVYTSGSTAAPKGVEMTHEHYCQTALNLPAYMPDLLHDKRNTILLFLPQAHSFARAINYIVVSSNVRIYIATGIKTLISDLQVAKPTLMIVVPRVLEKVYNAASQKAGHGPKGVVFASAVVAAQNYMKEVSANGKAGALTRTRRAAFDPIVYSSLREVLGGRAKWIVAGGAPLDPELLAFFRGAGVPVYEGYGLTETTAPCAFSPLGTPFHAGSVGIAFPGFSLRIAEDGEIQVKGRAVFPRYHKNDEATELSFTEDGWYVTGDLGRIDNDGFLYITGRKKDLIITAGGKNVSPGPIEEVIQRCEFVSQALVLGDKRPFISALVTLDEESLRPWLAAKGLDENMPLEDAAKNAAVRAEVQKWVDQANEGVSRAESVRKFIILPEEFTQENGLMTASMKVIRPKVIKRYSTLLNTQMYTKRK

SEQ ID NO: 13000 - protein, 313 aa, Schizosaccharomyces pombe
MSNTHITDWSSKDGEFRRQVSSFRERISPEHKYFQPEKDRYHLYVSYACPWAHRTLIVRKLKGLENVIPVHVVGWLMGPNGWNFDKENDSTGDPLYNSPYLRNLYFRADPNYNMRFTVPVLWDSKYNTIVNNESAEIIRMFNDAFNEVIEDEEKRVVDLYPSSLRTKIDELNDYFYDTVNNGVYKTGFATTAEAYEKNVRVVFQGLDRLEQVLKESKGPFLLGDHLTETDVRLYTTIVRFDPVYVQHFKCNIGTIRHNYPHINQWLKRLYWKHPAFHETTDFKHIKCHYTQSHTQINPLGITPLGPIPNVEYF

SEQ ID NO: 13001 - protein, 914 aa, Magnaporthe grisea
MDGHSNFTQPSDTSHASHTIPSSSSSQRRRLTKKPPPSTSARHHHSSLSIDSRVDAQSLVGKRSSTSLRRAPSAPPARTPTSTHASNSSSPRNPSSSTRLNNHSPIIPAASEFAASSLSPSARDRDSDPARNDHGHQLQNNNNYYYSAFTNAHHHNQYSAASHRRSNSYGHPHGPQSSNSLTFNHSEDFIGAPFDGSAILNRIEATKASPTLGSGAFPHISNPIPVGAAAPAQYSRGSPALEQSFTFPSAAMREKSQQVRGMEAQLPTSKRYSDETKEPKPGVLRKKSGFSGFMSGLVGTPKKPLISAPENPVHVTHVGYDSATGQFTGLPKEWQRLISESGITEKERRENPETLVNVIKFYKETTEKPAEDQVLEKFHDARPGLPSAPSAGSMISPGLAPHHYNPMSPMISPPASPRFPQVGHEGNFENPRSPPPVPKNKDVTLMPSRPAPRPPVSLPTRTAPHAPYAAKDSGIDMPPQHDDLTPTTYQPPKESQPILPEEHRSRSNSRVNGNTAYPASQQSPAVQAAYQQQLMQQQQEQALAQAQASMSGSMSRAPSKRQPQAQQPTPPQSQHQYSRPTDANGAQQTQRPQQPQIGPVPQSRPRHRSRQSNGLDVVAALKRICSEGDPREIYRSFTKIGQGASGGVYTGHERGSNRLVAIKQMNLEQQPKKDLIINEILVMKDSSHPNIVNFIDSYLCGGELWVVMEFMEGGSLTDVVTFNIMTEGQIASVCRETLLGLQHLHSKGVIHRDIKSDNILLSMEGNIKLTDFGFCATINEAQNKRTTMVGTPYWMAPEVVTRKEYGRKVDIWSLGIMAIEMIEGEPPYLTESPLRALWLIATNGTPQIKDEGNMSPVFRDFLYFALKVDPDKRASAHDLLRHEFMNLCVDLSHLSPLVRAAREARAQEKARKGQ

SEQ ID NO: 13002 - protein, 753 aa, Nocardioides sp. JS614
MLHVPSRRHVVDMCRTLLERGYLKATEGNISVRVPGHDRFAVTPSNYDYAKMRPEDICILDFEGKVVAEAGGSDLPPTVESGLHAAVYRERPDVHAVVHTHQPYASALAFLRRPIPALTDEQVRFLGREVAIIDYAPAGTSFLAKNVAKRLGSSANAFIIANHGILAVGTDPDRAIFNMALLEKVCLAYLLALTTETGRVYTIPSAIREIALTKLKSDQKRIAAQVEQFVPVDRDLVEEPLPSADAVAERVRTAPGAGPEVAAPGAAPGAADLGYAISDYPDVDAVMRRIKALTGQPVRGLRHDALLDVLAWFDTKCAASKELTDRAKARIPGGVQHNLAFNYPFPLAIDRADGAHLTDRDGNVYVDFLQAGGPTILGSNYGPVNEQVAEVIRESGPVTGLFHEYELKLAESINRYLPHIEMYRSLGSGTEAVMAAVRAARVKTGKHMVIKVGGAYHGWSDSMVYGLRVPGTFRMNAKGIPFGATAGTRESFPHDVGQLRRKLIENRARGGTAAVIVEPLGPESGTRPAPRDYNARVRELCDEFGALLIFDEVVTGFRVGMGGAAGYFGVTPDLTVLGKAVAGGYPMAGGVGGSAEVMSVFGSGLDGKNGAHVLVGGTLSANPLSCAAGHFAIEEMARTNAPVVAGAAGDRLARGLQRLIDHYGLPYVAYNQGSIVHLQSSGVLLLDMRNPVKLLKESKPRKHLMEQLGAAYAAHGIITLAGSRLYTSMADTDEVIDDALERFDRVFALVEGV

SEQ ID NO: 13003 - protein, 395 aa, Nicotiana paniculata
MASASLLKTSPAIGKTDFIKGQALRQPSVSVRCHPAPPSGLTVRASSYADELVKTAKTVASPGRGILAMDESNATCGKRLASIGLENTEANRQAYRTLLVSAPGLGQYISGAILFEETLYQSTVDGKKIVDVLHEQNIVPGIKVDKGLVPLAGSNDESWCQGLDGLASRSAAYYQQGARFAKWRTVVSIPNGPSALAVKEAAWGLARYAAISQDNGLVPIVEPEILLDGEHNIDRTFEVAQKVWAEVFFYLAENNVMFEGILLKPSMVTPGAECKERATPDQVADYTLKLLQRRIPPAVPGIMFLSGGQSEVEATLNLNAMNQSPNPWHVSFSYARALQNTCLKTWGGRPENVQAAQEALLIRANANSLAQLGKYTGEGESEEAKKGMFVKGYVY

SEQ ID NO: 13004 - protein, 789 aa, Hordeum vulgare subsp. vulgare
MKMMAMAEAPCLCARPFLAARAWRPGPAPRLRRWRPNATAGKGVGEVCAAAVEAATKAEEEEDEEEEPVAEDRYALGGACRVLAGMPAPLGATALAGGVNFAVYSGGATAAALCLFTPEDLKADRVSEEVPLDPLMNRTGDVWHVFLEGELHGMLYGYRFDGTFAPHCGHYFDVSNVVVDPYAKAVISREEYGVPAHGNNCWPQMAGMIPLPYSTFDWEGDLPLRYPQKDLVIYEMHLRGFTKHDSSNVEHPGTFIGAVSKLDYLKELGVNCIELMPCHEFNELEYATSSSKMNFWGYSTINFFSPMTRYTSGGIKNCGRDGINEFKTFVRESHKRGIEVILDVVFNHTAEGNENGPILSFRGVDNTTYYMLAPKGEFYNYSGCGNTFNCNHPVVRQFIVDCLRYWVMEMHIDGFRFDLASIMTRGSSLWDPINVYGAPIEGDMITTGTPLVTPPLIDMISNDPILGGVKLIAEAWDAGGLYQVGQFPHWNVWSEWNGKYRDIVRQFIKGTDGFAGGFAECLCGSPQLYQAGGRKPWHSINFVCAHDGFTLADLVTYNNKYNLPNGEDNRDGENHNLSWNCGEEGEFARSSVKRLRKRQMRNFFVCLMVSQGVPMFYMGDEYGHTKGGNNNTYCHDSYVNYFRWDKKEEHSDLHRFCCLMTKFRKECEGLGLEDFPTAEQLQWHGHQPGKPDWSEKSRFVAFSMKDETKGEIYVAFNTSHLAAVVELPERIGHRWEPVVDTGKPAPYDFLTDDLPDRALTVQQFSHFLNSNLYPMLSYTSVILVSRPDV

SEQ ID NO: 13005 - protein, 428 aa, Hordeum vulgare
MKMMAMAEAPCLCARPFLAARAWRPGPAPRLRRWRPNATAGKGVGEVCAAAVEAATKAEEEEDEEEEPVAEDRYALGGACRVLAGMPAPLGATALAGGVNFAVYSGGATAAALCLFTPEDLKADRVSEEVPLDPLMNRTGDVWHVFLEGELHGMLYGYRFDGTFAPHCGHYFDVSNVVVDPYAKAVISREEYGVPAHGNNCWPQMAGMIPLPYSTPDWEGDLPLRYPQKDLVIYEMHLRGFTKHDSSNVEHPGTFIGAVSKLDYLKELGVNCIELMPCHEFNELEYATSSSKMNFWGYSTINFFSPMTRYTSGGIKNCGRDGINEFKTFVRESHKRGIEVILDVVFNHTAEGNENGPILSFRGVDNTTYYMLAPKGEFYNYSGCGNTFNCNHPVVRQFIVDCLRYWVMEMHIDGFRFDLASIMTRGSR

SEQ ID NO: 13006 - protein, 332 aa, Guillardia theta
QTPSAEEMFKAIPEISKGKNIATREAGSIVINHISDLVPQFLSGSADLHGSNKNYIKNGGNFGRGFDKTYAGKNFYFGIREHGMGAIMNGISFHGLFRPSGATFLVFVDYMRATIRVAALAELPTTYILTHDSIGVGEDGPTHQPVETVSSLRVFPNLDVIRPADPEETVGAYVHSQQRQDGPTAIILTRQNVKTLDEIPVQTRREGVLKGAYVAKKESGALKMIIMASGSEVQHAMAAAEQLGDGIRVVSMPSMNLFNKQSKEYRDSVLPPSCLKRVAMEAGVGSMWYQYVGLDGKVVSVERFGFSAPGDIVMSELGMTAENLIKECKAYM

SEQ ID NO: 13007 - protein, 544 aa, Debaryomyces hansenii CBS767
MPDMSNAIVAQDEMGRPFIIVRDQGKRQRKHGIEATKSHILAARSVASIVKTSLGPRGLDKILISQDGEITITNDGATILSQMDVDNEIAKLLVELSRSQDDEIGDGTTGVVVLAGALLDQALELIEKGIHPIKIANGYDEACKIACQQLDEIADEISIKNESTDTNLLKSAKTSLGSKIVSKSHNQFAQMAVDAVLAVADFERKDVDFELIKMESRVGGSIEDSSLIRGVLVDKDFSHPQMPKRIEDCKIAILTCPFEPPKPKTKHKLDISTVEEFQVLQEYEQKKFQEMIDHVKASGANVVACQWGFDDEANHLLLANGLNAIRWIGGSELELLAIATNGRIVPRFEDLSPEKLGRAGTIRELEFGTTRDRMLVVEDCSNTKAVTCFVRGSNEMIVAEGIRSLHDSICVVRNLIRDNRVVYGGGAAELTCSLAVSEAADNQIGIDQYAFRAFANSLDTIPMTLAENSGLDPIETLSSLKSKQVIEKSSHLGVDCLGKGTNDMKELFVIDPLIGKKQQLLLATQLTRMILKINDVIISGKDEY

SEQ ID NO: 13008 - protein, 586 aa, Pyrobaculum aerophilum str. IM2
MRRAETLEEIVKRRLLYWPSSEIYGGVGGFYDYGPLGVQLRRNIVEKWRKVFVLPYQDLIIEVETPIIMPEPVFKASGHLDHFTDYLVTCTKCGRKYRADHLVEEELAKRGLKISTEGMSASDLERLISEHKIVCPHCGGPLGRVETFNLLFKTTIGPYSENAGYLRPETAQGMFVAFPRLAEYVGRRHPFGVAQIGRVARNEISPRGGLMRLREFTQMEIELFFDPQNPKCPYFAEVESFEIPIVPEEFVAKGQTEPVYLTAREVVERGHANEWMAFFMALAAKFLKELGVPIERQKFLGKLPHERAHYSAKSYDQMVLTERFGWVEVSGHAYRTDYDLSGHSKFSSREMYLERRLSTPKEVEVVRLYPNPNAIRERYGDKIGEVIKAIKEHEGRVIEAFNRGMSEVALGEYVISRDMVYIKLEKRKTDLEKFIPHVVEPSFGLDRIMYVVLESAVVEEEGRVYLRLPPDIAPVKACILPIVKRADYVEIGRTLWRSLARQGFVVLYEDEGTIGSRYASCDEIGTPLAVTIDEKTPVDGTVTIRDRDTKRQVRVKLGDVVTFVSMVAGGASFDDAARALGAAPVQ

SEQ ID NO: 13009 - protein, 365 aa, Bacillus licheniformis ATCC 14580
MKKQRIVIKIGSSSLTNSKGSIDEEKINDHVRAIAALKKEGHEVIFISSGAVAAGFLQLGYPARPVTLKGKQAAAAVGQSLLMQTYIEHFADHDIKPAQILLTRNDFAKRERYRNAYATVMELIERGLVPIINENDSVSVEELTFGDNDMLSALVSGLIHADKLIILTDINGLYDSNPAEHPDARRFDYIPEITDELLGCAASAGSKVGTGGMKSKLLAAKTALSLGVNVFIGAGEGDDKLIQILKGNGDGTYIGQSDLSSVNNHRQWIAFHSPVSGKITVDEGAELAITENGGSLLPAGVTAISGDFPKGAVVEVYGPNGLAGKGQTLYSAAELEEVKGKRSDEFHHEEGIEVIHRNDWVSIKE

SEQ ID NO: 13010 - protein, 382 aa, Pseudomonas syringae pv. syringae B728a
MRESLSTSPAQLGIGLIGTGFMGRAHALAFGNANAALDLPARIRLCALADADSARAEQCASAWGFDRSHADWQQLIDDPHVQIVAITTPNHLHFPMAMAAIAAGKAVYCEKPLAVNLAEADEMRRSAKAAGVVTQVGYNYQHNPMIGLAREMIEAGELGEIVSFQGEFSEDFMGDPASPWSWRCEAAHAGGALADLGSHLLAMARHLLGDIEAVCADASTVHRERPASIGSQQLRAIAVDDQTHALLRFANGARGTFSSSWLKHGYKNHLSFEISGTKGTLAFDQERLNELRLYRTGAAGRDGFQRLLAGPAQPGYAAFCPAPGHQLGYNELKALEVQALIQAVYGQRSRGPDFEEAWQIERLATAIRVAAAEQRWVALTDI

SEQ ID NO: 13011 - protein, 415 aa, Bacillus licheniformis ATCC 14580
MSEVIEKAKKAKVAKEELVHQPTERKNEALSFIAEAIRFKQDEILAENEKDIVRGKEKGFSPALLDRLALTPERLNDIADAVMLLTKLEDPVGETLETIRKDNGLFIENVRVPLGVVGMIYEARPNVTVDAATLCLKTGNAVILRGSSSAINSNKALVRVIREALERSALPEDAVQLIEDTSKETAKQLFTLNDGLDVLIPRGGKNLIDMVVRESTVPVLETGAGNCHIFIDESAQPDMAEQVVINAKTQRPSVCNAIETVLIHKGWAEEHTKALLQKLEEAGVEIRGDEAVCTMLPSAVPARETDWGTEFLAPVVSIKTVAGIDEAIRHIRQYGTRHSEAILTENQENARYFLTSVDAAAVYHNASTRFTDGFEFGYGAEIGISTQKLHARGPMGLKALTSSKYIIKGNGQIRI

SEQ ID NO: 13012 - protein, 432 aa, Cryptococcus neoformans var. neoformans JEC21
MSHTPTSTSSGNAPTTDKKPSLTGVRIKQRKGQAKATAKFEPEAFRDALLLHLALLPHPITKDALVAKLVQAGSTLEFLKYSEQLFELLFVGGLLQPGGSYLDDKRSPVYILQPDDAPDAFKDGVKGMIEVLKRVMQRYKYLQKPLEENFLPGVLSYLPKWDVKSREKLAEATALLTIELQISSRCLQSLAKEHVVKDNVALNFLTAFIKTYLSRQSIDQFGSTLRRSGLKSILAVFPLQIRDRKHLEAHFREENLQVVNDWYAKLALGEVKDETVQAVERMINDDETSDQIIEALKLQQSERPVSEADLSEWIWLALMGTVDWTARSDQIDTFVISHITRYASILETFCQSAKAQVNLINAVQVYCYTDTRIIKSFVQILKVLYNADVVSDQAIIYWHQKGAKPNGKGHFLKVAEPLVKFLSEQESDSEEE

SEQ ID NO: 13013 - protein, 348 aa, Pyrococcus horikoshii OT3
MSEKMVAIMKTKPGYGAELVEVDVPKPGPGEVLIKVLATSICGTDLHIYEWNEWAQSRIKPPQIMGHEVAGEVVEIGPGVEGIEVGDYVSVETHIVCGKCYACRRGQYHVCQNTKIFGVDTDGVFAEYAVVPAQNIWKNPKSIPPEYATLQEPLGNAVDTVLAGPISGKSVLITGAGPLGLLGIAVAKASGAYPVIVSEPSDFRRELAKKVGADYVINPFEEDVVKEVMDITDGNGVDVFLEFSGAPKALEQGLQAVTPAGRVSLLGLYPGKVTIDFNNLIIFKALTIYGITGRHLWETWYTVSRLLQSGKLNLDPIITHKYKGFDKYEEAFELMRAGKTGKVVFMLK

SEQ ID NO: 13014 - protein, 291 aa, Allium cepa
MANKEVDVPETKDTQFTAKDYTDPPPAPLFDMGELTKWSLYRAVIAEFVATLLFLYITVATVIGYSHQSDATIPGNTDAHCSGVGVLGIAWAFGGMIFVLVYCTAGISGGHINPAVTFGLFLARKVSLIRALLYMIAQCLGAICGVGFVKAFQSAYYSRYGGGANTLNAGYSKGTGLAAEIIGTFVLVYTVFAATDPKRSARDSHVPVLAPLPIGFAVFMVHLATIPITGTGINPARSFGAAVIYNKDKAWDDQWIFWVGPFIGAAIAAAYHQYVLRAGAVKALGSFGSNA

SEQ ID NO: 13015 - protein, 195 aa, Escherichia coli
RADERPGKINLGIGVYKDETGKTPVLTSVKKAEQYLLENETTKNYLGIDGIPEFGRCTQELLFGKGSALINDKRARTAQTPGGTGALRIAADFLAKNTSVKRVWVSNPSWPNHKSVFNSADLEVREYAYYDAENHTLDFDALINSLNEAQAGDVVLFHGCCHNPTGIDPTLEQWQTLAQLSVEKGWLPLFDFAYQ

SEQ ID NO: 13016 - protein, 169 aa, Arabidopsis thaliana
MAASSEPKSLYDFTVKDAKGNDVDLSIYKGKVLLIVNVASQCGLTNSNYTELAQLYEKYKGHGFEILAFPCNQFGNQEPGTNEEIVQFACTRFKAEYPIFDKVDVNGDKAAPVYKFLKSSKGGLFGDGIKWNFAKFLVDKDGNVVDRFAPTTSPLSIEKDVKKLLGVTA

SEQ ID NO: 13017 - protein, 200 aa, Prototheca wickerhamii
YYALSFVRTADVIYELKDWLARQGATGTSAIGVLAKIESADSVANLEAILDAVDGAMVARGDLGAELPVEEVPYWQSKIVKGCRKRGKPVIVATNMLESMIKCPTPTRAEVSDIAIAVREGADAVMLSGETAHGSFPFKALDVMTTVAKRTELSMLRYEGARRYGSEESDAIDWILPPARRMNSLADVGISEMFAYHAVT

SEQ ID NO: 13018 - protein, 331 aa, Trichodesmium erythraeum IMS101
MARMYYDSDANLDILNDKTIAIIGYGSQGHAHALNLKDSGSKVIVGLYSGSKSATKAKDAGLDVYPVDEAAEKADLIMILLPDEVQKTVYKNQIEPHLKEGKILAFAHGFNIHFGQIIPPENVDVVMVAPKGPGHLVRRTYEQGEGVPCLFAIFQDASGQGRDRAMAYAKGIGGTRAGILETTFREETETDLFGEQVVLCGGLSALIKAGFETLVKAGYQPELAYFECLHEVKLIVDLVVEGGLANMRDSISNTAEFGDYTRGPRIVTDETRAQMQKILSEIQSGQFAREFVMENQTGKPVFTAMRRQEAEHSIEEVGKDLRAMFSWLKKR

SEQ ID NO: 13019 - protein, 764 aa, Candida glabrata CBS138
MIPAEDAYITVEKSWKQSTLPPCSDMFPWAHEFYVNSPRPSYAGSAIILRSKTTRDKTIDNIARFRGSVDLADVFMSWPNVTDMSTNDISLEDEILSLNIGFTKQMVDLCKHAGVMPFLKTDVPAYSQFHLKRMRNRVMNRHHSASLSSASCRSSRSPESNINPLRRFDLQCAKMIEIAQHILVYCLHFENGRDHLQCKTCQMVTDIIKLALFHLRAKINIEQTDLGYNQIIDYIGFSSFADLPTGFLVVPLNHVRDVIISQNNETRQHQLISQYDILRFNNWDSDLKYHENMELAIFTSATNIDDTIWVGNHQDNVNYRKQFALRELGKYQKPKTVMNAPSVDRSIINVDAISYDDSSLCSEKLYYIPSIEVPWILFIKCNESSSLPSSEILENTLTSILNAHTDEGEFTPRKSKSLDFPSSGSIALGQLNIASVEVLLNTCYLIYQVYASTKFQALLYCSNGYTETSLLLIAYLIFLWDIPLEETLLRLHKEYGRPYFLFHADLQILGHLQSILREFSPNRKSNSTKYLESVKTYLVTQDPKDLLRLSITSEMFSNIFLFKLPSSSNFTNLKGPLPSKILDHLYLGSLEHAEKPELLKKLGITHILSVGERLSWVFNHESKRSKCEEWYSNWKIIEKQGIQICWIQNLEDNGVDPIINQLTHALEFIDTCYKQNGKILVHCMVGVSRSATVCIAECMKRLKCDVMRAYLYVRVRRLNIIIQPHLMFMYELEKWAEEYTEQKTPKTEWHLLCREISKLNCKYD

SEQ ID NO: 13020 - protein, 262 aa, Triticum aestivum
  misc_feature (155)..(155): Xaa can be any naturally occurring amino acid
  unsure (1)..(262): unsure at all Xaa locations
SFPPSRSNFIVFKQSAMLLWVLDPVGRDATILNQALNSDITDLRAATEVICSRTPSQLQIMKQTYRARFGCYLEHDITERTYGDHQKLLLAYLGVRRNEGPEVDPSAVTDDARELYQAGEKRVGTDERAFIRIFSERSWAHMVSVANAYQHMYAXLACTPGSLEKAVKSETTGNFQFGLLTILRCADTPAKYFAKVLHKAMKGLGTSNAALIRAAVTRTEVDMKYIKAEYHNKYKGSLAEAIHSETSGNYRTFLLSLVGRDR

SEQ ID NO: 13021 - protein, 450 aa, Nocardioides sp. JS614
MAETYDLVVVGAGMAGVAAANKCASSGWRVAIVDALPYGGTCALRGCDPKKILRRGAEIIDGARLMRGKGIDGQGLRIDWADLMRHKRGFTDPVPDNLERDLAGHGVETLHGNARFLGGNTVEIAGASVESRHFLVATGARPRALAFPGHEHLIDSTDFLDLERLPARILFVGGGFISFEFAHIATRAGSATTVVDRGPRPLRGFDPDLVDLLLGRSRQAGIAVRPATTVTAIAKDKAGYQVTLETPEGSETIECDLVVHGAGREADLAGLDLEAAGVEWSPRGVRVAGHLQSTTNPAVYAAGDSADTPGMPLTPVAVFEGRVAASNMVNGTTRAPDYAGVPTAVFTIPELARVGLLEREARERGLDVDVRFNDTSGWYSNYRTGETTAAAKILVDRATDRVVGAHLLGPEYAELINVLGLAIKLGLTTRQLKSTTAAYPTVGSDLGSML

SEQ ID NO: 13022 - protein, 234 aa, Brassica napus
  misc_feature (82)..(82): Xaa can be any naturally occurring amino acid
  unsure (1)..(234): unsure at all Xaa locations
MAVEDTSKPVVVAEEANPNPTDRPIDRYHEEGDDAEEGEIAGGEGDGDESSKSAVPQSHPLEHSWTFWFDNPSVKLKQATWXSSLRSVFTFSTVEEFWSLFNNMKGPSKLAGGADFYCFKHNIEPKWEDPICANGGKWTMNFPKEKSDKPWLYTLLALIGEQFDHGDEICGAVVNVRGKQERISIWTKNASNEAAQVSIGKQWKEFIDYNNSIGFIIHEDAKKLDRGAKSAYTA

SEQ ID NO: 13023 - protein, 416 aa, Bifidobacterium longum DJO10A
MKVDILTREYPPHVYGGAGVHAEELSKVLAERIDVTVRAFDGKRTEADIPAIPNAADAKGSLKVVGYDTPSELADANPALKTFGVDLQIANDVDADIIHAHTWYACLAGYMAKMLHGTPLVITAHSLEPFRPWKREQLGGGYNLSSWAEKDAYEHADRVIAVSGGMRKDILTAYPNLDPNKVVVVYNGITMADFATPAPDDPGWKVFERYHIDRSKPTLLFVGRITRQKGLPYLLKALHLISKDIQVVLCAGAPDTPEIAEEVKIAFAKLDEERGNIVWIEEMLPKPELNALEHGCDAFICPSIYEPLGIVNLEAMACGLPVVASATGGIPEVVVDGETGYLVPIDQLHDGTGTPTDPDKFVHDMAAAIDRIMADPELAKKMGQAGYERARDVFSWETIADKTVEVYQSVLDEQKK

SEQ ID NO: 13024 - protein, 440 aa, Thermobifida fusca YX
MSVDPRESQPNPQGSRIDPYVDAYAARAAGMVASEVRALFAVASRPEVVSLAGGMPNISALPLDALGELAQQVVVEQGRTALQYGSAQGDPVLRQQICEVMALEEIDASPDDVIVTVGSQQALDLVTKVFVDPGDVVLTEGPTYVTAINTFAAYQAHIEHIPMDDDGVIPEALEERLAALTRQGKRVKFFYTVPTFNNPAGVTLAPERRHRVLEICERFNLLVVEDNPYGLLRYEGDPVRPLRAESERNVIYLGSFSKTLSPGFRIGWALAPAAVRDKLILAVESAMLSHSNFNQAIVGRYLATQPWPEQIKEFNEMYRARRDAMLSSLDALMPPECSWTRPSGGFFVWATLPEGINSKAMLPRAVNERVAYVPGTGFYYGGGGERNMRLSFCYPTPEQIREGVRRLVSVLESEIELRDTFGGVPSSTGRGGEAPAPDLP

SEQ ID NO: 13025 - protein, 406 aa, Azoarcus sp. EbN1
MVRKSAKLANVCYDIRGPVLIKAKQMEDEGHKIIKLNIGNLAAFGFDAPEEIQLDMIRNLPNSAGYSESKGIFAARKAVMHYTQQKHIKGVTLEDIYIGNGVSELIVMAMNALLNIGDEVLVPAPDYPLWTAAVSLSGGTPVHYICDEANEWLPDLDDMRARITPNTRAIVVINPNNPTGALYPDHILQGIVDIAREHGLIVYADEVYDKVLYDGATHRSMGSFSEDVLTILFNGLSKNYRSCGYRAGWMVVCGDKRHAQDYIEGLNMLASMRLCANVPGQYAIQTALGGYQSIDDLVAEGGRMRRQRDLAHELISAIPGVSCVKPKATLYMFPKLDPKLYPIEDDQAFIAELLEEERVLLVQGSGFNWPHPDHFRLVFLPHEDDLRDAIGRIARFLEQYRKRHAA

SEQ ID NO: 13026 - protein, 341 aa, Legionella pneumophila str. Paris
MQDEEEPIKDKEFKEEEWSEPDDDSLLSEEDIEPDIEKMEEELDELPEFTDDEAFPSFQRGKNIAKALDATQLYLGEIGFSPLLTAEEEIHYATLALKGDMEARKKMIESNLRLVVKIARRYLNRGLPLLDLIEEGNLGLMKSVEKFDPKRGFRFSTYATWWIRQTIERAIMNQTRTIRLPIHVVKELNVYLRAARQLTQKLDHEPSPEEIAEMVDKPLEDVQKLLGLNDKVASVDTPIGFDETKSLLDTIADENSLNPAELLTNENLRQHIESLLDKLTENQQQVIARRFGLRGFEKATLEDVGKEIDLTRERVRQIQVEALKTLRTLLERVGLTQEDLF

SEQ ID NO: 13027 - protein, 296 aa, Saccharomyces cerevisiae
MITTPLVHVASVEKGRSYEDFQKVYNAIALKLREDDEYDNYIGYGPVLVKLAWHISGTWDKHDNTGGSYGGTYRFKKEFNDPSNAGLQNGFKFLEPIHKEFPWISSGDLFSLGGVTAVQEMQGPKIPWRCGRVDTPEDTTPDNGRLPDADKDAGYVRTFFQRLNMNDREVVALMGAHALGKTHLKNSGYEGPWGAANNVFTNEFYLNLLNEDWKLEKNDANNEQWDSKSGYMMLPTDYSLIQDPKYLSIVKEYANDQDKFFKDFSKAFEKLLENGITFPKDAPSPFIFKTLEEQGL

SEQ ID NO: 13028 - protein, 420 aa, Debaryomyces hansenii CBS767
MPSSNLLRKLHIGKSNNNAKNNTTSEITVNSLGNIESMDQYNQYQSPQSQPQQLNPLPGQAQGFSLDQTQNLATGQQLTAEQQRVDDAIKRSLLPERSTVSKGKYSLADFRILRTLGTGSFGRVHLVRSAHNGRYYAIKVLKKQQVVKMKQVEHTNDERRMLKLVEHPFLIRMWGTFQDSRNLFMVMDYIEGGELFSLLRKSQRFPNPVAKFYAAEVTLAVEYLHSHDIIYRDLKPENILLDRNGHIKITDFGFAKEVSTVTWTLCGTPDYIAPEVITTKPYNKSVDWWSLGVLIFEMLAGYTPFYDSTPMKTYEKILSGKIHFPSFMGPDVIDLLSKLITADLTRRLGNLMNGPSDIRNHPWFLEVVWEKLLAKDIETPYEPPITAGVGDSSLFDHYPEEKLDYGTVGEDPYAQYFLEF

SEQ ID NO: 13029 - protein, 178 aa, Glycine max
  misc_feature (26)..(26): Xaa can be any naturally occurring amino acid
  unsure (1)..(178): unsure at all Xaa locations
MGASASVTEKSIHEFMVKKSLLMVGXDAKGRDVNLSTYKGKVLLVVNVASKCGFTNSNYTQLTELYSKYKDRGLEILAFPCNQFLKQEPGSSQEAEEFACTRYKAEYPIFGKVRVNGPDTAPVYKFLKANKTGFLGSRIKWNFTKFLVDKEGHVLARYGPTTSPLSIENDIKTALGEA

SEQ ID NO: 13030 - protein, 235 aa, Brassica napus
  misc_feature (120)..(120): Xaa can be any naturally occurring amino acid
  unsure (1)..(235): unsure at all Xaa locations
MGKKRKATATSLDEVDRTVYASFRTAANSLSQLYTQSMNHQKLSFQAGERHGLEKLYQWIWRQQEGGSRVTSMDIINYIQNELECCTEEPPISPRAPPTQPAMNVTSSGLMASSGTSCPXVFSNALSSPVRRSLRTRLVPPPGHVPGAAACSAPNSPSDAPTSLAAPVAVHAAGDPILLVLPLLRWCCILSNTGVVFHSRSMGCPLEGGLLVFWLAFLMVTCTSLCLGFISLLTS

SEQ ID NO: 13031 - protein, 762 aa, Bacillus licheniformis ATCC 14580
MTNVKTSSLGFPRIGLNREWKKSLEAYWKGNTDRETFLKEMDEQFLAALQTQLDQQIDIIPVSDFTMYDHVLDTAVMFNWIPDRFKDINDPLDTYFAMARGTKDAVSSEMTKWFNTNYHYIVPEYEKGAQYRVTRNKPLQDYQRAKAALGTETKPVILGLYTFVALAKGYEQQDIKDIYNQMTPLYIQVLKELEQEGVKWVQIDEPALVTASPEEAAAVKEIYQTITEEVSELNILLQTYFDSVDAYEELISFPVAGIGLDFVHDKGKNFEHLKAHGFPKDKVLAAGILDGRNIWKANLEERLDLTLELIQRAGVDEVWIQPSNSLLHVPVAKHPGEHLADDLLNGLSFAKEKLLELTLLKNGLVSGKAAIQAEIDEAHGHLQDLKQYGAATNSAFAEERGKLTEEDFKRPTAFEERLRIQNDSLGLPLLPTTTIGSFPQTADVRSARQKWRKKEWSDEQYEAFIQEETKKWIDIQEDLGLDVLVHGEFERTDMVEYFGEKLGGFAFTKYAWVQSYGSRCVRPPVIYGDVEFKEPMTVKETVYAQSLTSKKVKGMLTGPVTILNWSFARYDLPRKEIAFQIACALRKEVEALEKAGIQIIQVDEPALREGLPLKERDWDEYLKWAAEAFRLSTSSVEDTTQIHTHMCYSNFEDIVDAIEDLDADVITIEHSRSHGGFLDYLEQHPYLKGLGLGVYDIHSPRVPSSDEMLTIIEDALKVCPADRFWVNPDCGLKTRQPEETIAALKNMVEAAKQARGKLAQTV

SEQ ID NO: 13032 - protein, 236 aa, Glycine max
RAEAAATGRRKRRRTKSAKNKEEIENQRMTHIAVERNRRKQMNEYLAVLRSLMPPSYVQRGDQASIIGGTINFVKELEQLLQCMKGQKKRTKEGSGFSDSSPFSEFFMFPQYSTRATQSSSSSSSKGYPGTCEANNNMARNPSSWAVADIEVTLVDGHANMKILCKKRPGMLLKMVVGLLSLGLSILHLNVTTVDDMVLTSVSVKVEEGCQLNTVDEIAAAVHQLSRTVQEEAVFS

SEQ ID NO: 13033 - protein, 585 aa, Candida glabrata CBS138
MSLPTLIRNLTRPKTPIVGVAKSRFYNKRWVQVLGLSVGTSCILYETNENFHNTVRHGYISFKRIGVVTIALSRCVIQYKKVLSLNDTIDDEDQKDENLRQCHLKAANITLKALEKNGGVFIKLGQHIGAMSYILPLEWTQTMVPLQDHCPESSLDDIDRMFAKEIPGEDLTTYFEWIDDEPLGVASLAQVHRAKLKQGTKEVVAVKFQHPQLQEFVSVDVMMTKFVFATLDKVFPQYSLVWLADELHSSIYDEINFNKEAQNAELTAKFFNKNKKLKRATSVRVPKVLLHKDRVLIMEYIGGARLDDPTYLEDHNIKRNEVSESLAHIFNSMIFTKDAGIHCDPHMGNLSIRTCKPTKENGYHNYEIVLYDHGLYRYPDLKTRRNYAKFWLSLLRHDQNEMRKWSYELAGITDDEFPLFAAAITGRSVESALNYDIDSVRGNDEIEIMRKRMLDKASMPADLEGTSTQGEENKLLKQLMKILAHIPRIVILLLKTNDLTRYLDESLRNPLGPARGFLILTSYCSSLVLQEDLETAAAMWKDNIYIKAATQYIAAWYKYIATAYVRTTAYEIILFSRDCYKKLAH

SEQ ID NO: 13034 - protein, 427 aa, Haemophilus somnus 2336
MSKLTAKLTLSDGREFDLNVQQGTLGYDAVDVQPLVKNKLFTFDPGFMSTASCVSEITYIDGDNGILLHRGYPIADLAKNADYLEVAHLLLFGERPNKEEYANFIKLVKNHTLVHEQISRFFHGFRRDSHPMAIMCGVSGALAAFYHDSLDINDIEHRELTAIRLLAKMPTLAAMCYKYSIGQPFMFPLNKLSYAGNFLYMMFATPCEPYEVNPVLEKAMDRIFILHADHEQNASTSTVRTAASSGANPFACIAAGIASLWGPAHGGANEACINMLEEIGSVDRIPEYIARAKDKNDPFRLMGFGHRVYKNYDPRAKVMRQTCHEVLKELNIQTPLFDVAMELERIALNDPYFIDHKLYPNVDFYSGIILKAIGIPTSMFTVIFALARTVGWIAHWKEMFKPGNMKIVRPRQLYKGHTERKFDAIEK

SEQ ID NO: 13035 - protein, 210 aa, Candida glabrata CBS138
MIRLFQLYEHQLKVRPKLTNSIMTGALFGIGDVSAQLLFPSGPDTLPPSAQTNDVKRGKYDIPRTVRAVVYGSMIFSFIGDRWYRFLTKVKFSNKPAKHWSNMVLRVCVDQLGFAPLGLPFYFGCMSLLEGHGLGAAREKIKLQWWDTLKTNWCVWPLFQMVNFSLVPLQHRLLAANVVAIFWNTFLSYTNSQIPVGGHKLTVQYPPTVQ

SEQ ID NO: 13036 - protein, 65 aa, Lolium perenne
LSYLPPLSAEALLKQIDFLIRSKWVPCLEFSKVGFIFREFGSTPGYYDGRYWTMWKLPMFGCTDA

SEQ ID NO: 13037 - protein, 257 aa, Archaeoglobus fulgidus DSM 4304
MTTSEKIRIALAQQRILPDREVNIMKGMSLIKRAIQVRADMVILPEVFNTGFYKHNYETVEPLEEELSLLLKISEQKDIMIITGVAEREGDDLYNSAVIIHKGKIIGKYRKTHLFPLTNEKKYFKAGDKLEVFETHLGKIGLLICYEVRFPELSRKLVKMGAEIIVIPAEFPKERIDHWRVLLQARAIENQVFVAGVNCVEGDLDYGGHSMLIDPMGTVLIEASEYQEVMMSDIRLGDVYEVRKKFPFLNDLREELL

SEQ ID NO: 13038 - protein, 247 aa, Gnetum gnemon
MGRGKIEIKRIENTTNRQVTFCKRRNGLLKKAYELSVLCDAEVALIVFSSRGRLYEFANNSVKRTIERYRKTCADNNQGGAIAESNAQYWQQEAVKLKQQIDVLNNQIRHYMGECLQSMTIKELKQLEGKLEKGLGRVRSKRNEKLLEDIDTLQRREDNLIRENEYIRNKIAECQSHQHANMLTAAAVEYDAIPAAYDSRNFMHANLIEAAAAHHHYAQQEQTALHLGSEHKYSVHYPDPQAHKFQT

SEQ ID NO: 13039 - protein, 1070 aa, Physcomitrella patens
MSFDSTFGSPGSRKTMKKGNRGSLEVFGGAPRLMQAGIYGGLAVPQEDELPEATNILDNISGPLTNRGLGATDVSSAPAPVLPKVNSTLRQSSRKIAEVEKSLSERAMVVEGLLPSRGSSMSQSRRESLSSRKDDREAMKPVKENSGEPKLSQQELMAERIAEWGLVLNSTKAGKPQDVNTRRSEDMRMSMKSGEYHRPSESYRRFSEEYQKSEYVPTSRGPSKRNSQVSEDVPVQVSEELLDALSSFKQTFVVSDATKPDCPIVYASAGFFTMSGYSAKEIIGHNCRFLQGPDTDPADVEKIRHAVKNGKNFCGRLLNYRKDGSTFWNLLTITPIKDENDKVVKFIGMQVEVSKYTEGAKAVARRPNGLPESLIRYDARQKDKATESVTELVGAFKKPQPPPTPALQSIPADGSLVSPLPSQTISTAIHSNKVQGHRRSTEPYTSSRAQKLSGVSELGDTGRSKRTSGFLSLLGIGQKSERIMEEGNLESDLEADLLVLDRPESRDDFDRTLGIRRGIDLATTLERIEKNFVITDPRLPDNPIIFASDEFLELTEYTREEILGRNCRFLQGPDTDQNTVQKIRDAIKENRDITVQLLNYTKSGKPFWNLFHLQAMRDHKGELQYFIGVQMDGSEYVEPTRHRLSDKTEKASAMLVQETARNIDTAVRELPDANTTPEDLWANHSKSVMPKPHMGGTPEWQSILKVRTAGKKLGLKNFKPIKPLGCGDTGSVHLVELRGTDHVFAMKAMDKTVMMDRNKVHRACVERQILDLMDHPFLPTLYASFQTATHVCLITDFCPGGELFLVLERQPKKHFREDSARFYAAEVVLALEYLHCKGVIYRDLKPENILVTESGHIQLTDFDLSFITTPRVQLIPPAIPKTSTWDRARGAKKKAQQPQTKDIPRPIFFAAPVTPSNSFIGTEEYIAPEIISGQGHSSAVDWWGLGILIYEMLFGRTPFRGKNRQTTFANVLEKELCFPAHIPVSLEAKTLIRDLLIRDPLKRLGSYRGANDIKNHPFFRGIKWPLIRNMTPPSLEVPLLITSSVPELDDKGAELEWDDMEAASNFGDTF

SEQ ID NO: 13040 - protein, 352 aa, Prochlorococcus marinus str. MIT 9312
MSSNNVLVTGGIGYIGIHTCFTLLERGYNVYVLDSLINSSEKTLEIIKEYSKSLNSKGFKNIFKFYKGDIRNIKNIENVFSDALLNSKPIGGVIHFAGKKSVNESINFPMEYWETNLLGTINLIRVMNSYSCFNFIFSSSASVYGKNSISPIKEFERIEPINPYGNTKATIEKFLIDVFNSKPNSWRIILLRYFNPIGSHPSGLIGESPLEESTNIFPKICEVAIRENNAFKIYGNDWPTKDGTCIRDYIHIMDLVEGHICSYNHLLSHDPEINAFNLGTGKGTSVLELLSIFQEVNKCKIFYEYEQPRKGDVGVCFADNTKAKKIMNWYPKKSINEMCKDGWRWYKSNFKN

SEQ ID NO: 13041 - protein, 1354 aa, Arabidopsis thaliana
MVSTNPPVLPISTTATDTTNQPPIVTAVVESQPPVVRAFVNGVTETVCGGLSRSRPWSELLDRSAFTKPDSLSEAGTRFRKNSSYFRVNYVCIVALILGFSLLAHPFSLILLLCLAASWLFLYLFRPSDRPLILFGRSFSEYETLGGLILSTIAVIFFTSVGSVLISALMIGIATICVHGAFRAPDDLFLDEQDHAASGFLSFIGVPAIPSVAPSASSAASPVGDGFRWEVAGRILQSVSDSTPTKALESTAPLPSMADLLLQGCSKLIEREESMPGEIPMFRTGLGKSVVLKESSIAKAKSILAENVAYSDLQNTNCSIPQTRQVDTAETMPMFRTALGKTVPLKESSIAKPLSILGSDMIIDSDNVLPRESGFGVPNSLFQTASNKKVNVSSAGLARAKALLGLEEDDLNGFNHVNQSSSSLQQHGWSGLKTHEEFDATVVKHHSGTPGQYENYVSGKRSEILNPSLKVPPTKFQTAGGKSLSVSAEALKRARNLLGDPELGSFFDDVAGGDQFFTPQKDERLSDIAINNGSVNTGYIAHEEKTSNKHTSNSFVSPLHSSSKQFRSVNLENLASGGNLIKKFDTAVDETNCALNISKPATHGLSNNRPLASDMAVNNSKGNGFIPRARQLGRPADQPLVDITNRRDTAYANNKQDSTQKKRLGKTVSVSPFKRPRISSFKTPLKKNAQQASSGLSVVSCDTLTSKKVLSTRYPEKSPRVYIKEFFGMHPTATTRMDYVPDHVRRIKSSNADKYVFCDESSSNKVGAETFLQMLAESGASLQHASRKWIVWKLACYDIYYPAKCRGNFLTITNVLEELKYRYEREVNHGHCSAIKRILSGDAPASSMMVLCISAINPRTDNGSQEAHCSDNCSNVKVELTDGWYSMNAALDVVLTKQLNAGKLFVGQKLRHAYVLISYLKILGAGLSGWATPTSPLESFVQPNFQAVISSTICLLLNINGTYRAHWADRLGFCKEIGVPLAFNCIKCNGGPVPKTLAGITRIYPILYKERRSALVEGIMCEYQRGINGVHSQNDTDSEEGAKVFKLLETAAEPELLMAEMSLEQLTSFTTYKAKFEAAKQMQMEKSVAKALEDAGLGERNVTPFMRIRLVGLTSLSNEGEHNPKEGIVTIWDPTERQRTELTEGKIYIMKGLVPMNSDSETLYLHARGSSSRWQPLSPKDSENFQPFFNPRKPISLSNLGEIPLSSEFDIAAYVVYVGDAYTDVLQKKQWVFVTDGSTQHSGEISNSLLAISFSTPFMDDSSVSHISHNLVGSVVGFCNLIKRAKDVTNEIWVAEAAENSVYFINAEAAYSSHLKTSSAHIQTWAKLSSSKSVIHELRQRVLSIIGACKSPSC

SEQ ID NO: 13042 - protein, 1095 aa, Physcomitrella patens
MDEFGRVSSGSSGVDRKQQEFSEHFRMPSLEPSTSFPTFGSYAGNNKKPMDRGNRGSLEVFGGAPRLMQAGVYGGPAVAENIEPQEGSPNLLQSVSGSLSSWSGVDVESPQHSLGPKVTSTVPALAQSSRKLAEIEKSLSERAMVVEGLTSKMNSARNSRSNSQSSRGNDHASDRDVMKPVKENSLSQELMAERVAEWGLVLRSSVDGQSQGVTTRKSEEMRMRRSSENYQRPSGSYRRFSEEYQKSEYIPRTRPGSRAHSEVSEEVPVRVSEDLLDALSSFKQTFVVSDATKPDYPIMYASAGFFSMTGYSPKEVIGYNCRFLQGPDTDPMEVEKIRQAVRTGKPFCGRLLNYRKDGTQFWNLLTITPIKDENDKVIKFIGMQVEVSKYTEGAKAVARRPNGLPESLIRYDARQKDKATESVTELVGAFKKPPPVTPPTQAIAADSFVSPLPGIHSISSPKFSNVKEHSHRGSSEPHPSLRHQKLSGVSEHDLMSTTRSKRTSGFLSLLGIGKSQRLMHEDIPESEFDPEVVMLGYERPESQDDFDRTLGIRRGIDLATTLERIDKNFVITDPRLPDNPIIFASDEFLELTEYTREEVLGRNCRFLQGQDTDQNTVQQIRDAIKENRDITVQLLNYTKSGKPFWNLFHLQAMRDQRGELQYFIGVQLDGSQYVEPVRHRLSDNTEKASAKLVRETARNIDVAVRELPDANTSPEDLWANHSEFVKPKPHMGGTAAWKALIKVRSSGQKLGLKHFKPIKPLGCGDTGSVHLVSLRGTGHVFAMKAMDKTVMLDRNKVHRACAERLILDLVDHPFLPTLYASFQTMTHVCLITDFCPGGELFLVLERQPKKHFQEDSARFYAAEVVLALEYLHCIGVVYRDLKPENILVTASGHVQLTDFDLSFVSSPRVEMVTPPKPKKKSRKKSKNVPRPVIFAEPVTSSNSFVGTEEYIAPEIISGLGHSSAVDWWALGILLYEMLFGRTPFRGKNRQNTFSNILEKELYFPSSIPVSLEAKLLIRDLLNKDPLKRLGSYRGANDIKNHPFFKDINWPLIRIMTPPPLEVPLNLTSSLPDFEDKDAELEWDDLEADSTFNDTF

SEQ ID NO: 13043 - protein, 482 aa, Pseudomonas fluorescens PfO-1
MSIPSLKSYLSIFATVLVLGQAVPAVHAAEAASPANLPDFTQLVEQASPAVVNISTTQKLPDRKVNQQMPDLEGLPPMLREFFERGMPPQQRSPRGDRQREAQSLGSGFIISPDGYILTNNHVIADADEILVRLADRSEMKAKLIGTDPRSDVALLKIEGKDLPVLKLGKSQDLKAGQWVVAIGSPFGFDHTVTQGIVSAVGRSLPNENYVPFIQTDVPINPGNSGGPLFNLNGEVVGINSQIYTRSGGFMGVSFAIPIDVAMDVSNQLKSGGKVSRGWLGVVIQEVNKDLAESFGLDKPAGALVAQIQDDGPAAKGGLQVGDVILSMNGQPIVMSADLPHLVGALKAGAKANLEVIRDGKRKNVELTVGAIPDEDKELDALPKSGAETNSNRLGVSVAELSAEQKKTYDLKGGVVIKEVQDGPAALIGLQPGDIITHLNNQAIGSSKEFAEIAKALPKNRSVSMRVLRQGRASFITFKLAE

SEQ ID NO: 13044 - protein, 150 aa, Nicotiana tabacum
MGDILNQDQIVELQEAFSLFDRDGDGCITVEELATVIRSLDQNPTEEELQDMITEVDSDGNGTIEFTEFLNLMAKKMKDTDAEEELKEAFKVFDKDQNGYISANELRHVMINLGEKLTDEEVEQMIKEADLDGDGQVNFDEFVKMMMNVG

SEQ ID NO: 13045 - protein, 350 aa, Schizosaccharomyces pombe
MRKGAGDKYLLILALVFLYTKENSIYFTLHRVNRELQIMRAISHPNIIKLIAFFHTHNPSKDETHLCLLLEYMPETVFDDMRWYTRRRKSIPNLSIKLYAFQLFRALAYLHSTGVCHRDIKPQNLLVDYKTGILKLCDFGSAKVLVPSEPNVSYICSRYYRAPELVFGATHYTTKIDVWSAACVIAELFIGRPLFPGDSSVEQLVEIIRVLGTPSYHEISVMNPNYVNHSLPNVRPHTLESVMPHNCTKNAMDLLHKMLTYVPSKRISAIEVLTHPFFDELRDPNCMYHCSRDEGTIERHLPPLFNFNLAELSIRPNLNKAILPPHVYESLDVDINNFEPIVVKQADADS

SEQ ID NO: 13046 - protein, 411 aa, Medicago sativa
MASGGVAPASGFIDKNASSVGVEKLPEEMNDMKIRDDKEMEAATIVDGNGTETGHIIVTTIGGKNGQPKQTISYMAERVVGHGSFGVVFQAKCLETGETVAIKKVLQDKRYKNRELQTMRLLDHPNVVSLKHCFFSTTEKDELYLNLVLEYVPETVSRVIRHYNKMNQRMPMIYVKLYSYQICRALAYIHNSIGVCHRDIKPQNLLVNPHTHQLKICDFGSAKVLVKGEPNISYICSRYYRAPELIFGATEYTTAIDIWSAGCVLGELLLGQPLFPGESGVDQLVEIIKVLGTPTREEIKCMNPNYTEFKFPQIKAHPWHKIFHKRMPPEAVDLVSRLLQYSPNLRSTALEALVHPFYDDVRDPNTRLPNGRFLPPLFNFKVNELKGVPAEMLVKLVPPHARKQCALFGSS

SEQ ID NO: 13047 - protein, 1133 aa, Physcomitrella patens
MEEQDPASSIDRSKVTAAASGASRGRSKYIAAPRSERKSLEVFGGAPASARYLPGAGNAFGGNSVAEEEEETAAVPSPRIDPPWVVPKIGPKPSQNVQPASTLPMSSSASKPAPLPQIPPAVPQSYMSETTKAKAPLPWDINLEIPDYKPKPVIGAEETKTKPVIRHHRSSSDTMTNTLPDLKEERKSAIEKLKQQAEVDAKRDIAKKAKDDGARSPDRKEMSDDVMKGRAAEWGLVLKSDAETGKTQGVTIRKSGDRRSGGSESAGRVSMTLPTVTASIRTSEASDAGSDASHPSNLPKVSREVKEALSTFQQTFVVSDATQPDFPILYASAGFFNMTGYTPKEVIGRNCRFLQGAGTDNADVARIREALKEGKSFCGRLLNYKKDGSAFWNLLTITPIKDDDGKVLKFIGMQVEVSKHTEGKKEKSLRPNGLPESLIRYDARLQDKATAAVGDLVGAFKNPVAPSTPPDTLNTGPKSPPSLPPDLQLVDSATESKLASKSSLHDSTRRRSTGTNIMTRSDSRLSNLPENGQPAYPRRNRRSSGFLSIFGLGKPEPKSPDPEMDPQLRMLEDEDRPESFEVDLERSKEIRRGIDLATTLERIAKNFVITDPRLPDNPIIFASDEFLELTEYTREEILGRNCRFLQGPDTDLAVVDQIRDAIAARRDITVQLLNYTKSGKPFWNLFHLQAMRDHDGELQYFIGVQLDGSEYLEPERRRLSEKTEKEGAKVVQETANNIDDAVRELPDANLKPEDLWSKHSLPVHPKPHNKVSRAWDAIHKMKINGQGLGLKDFRPIKPLGSGDTGSVHLVELRETGLVFAMKAMDKSVMMQRNKVHRARAERDILALMDHPFLPTLYSTFQTQTHICLVTDFCPGGELFLLLERQPRKVFTEDVVRFFAAEVVIALEYLHCLGVVYRDLKPENVLLRADGHIQLTDFDLSFLTSAKPRLVEQDLPPGRRRKPKRPPSPIFVAEPVTPSNSFVGTEEYIAPEIITGQGHSSAVDWWALGILIYEMLYGRTPFRGKNRQRTFTNVLQRDIIFPASIPVSISARQLMRDLLQRNPLKRLGSHRGASDVKNHPFFRGINWPLLRHTTPPPLETPALLITPDVEPTKADEDLEWDEEEAAPISTFQEF

SEQ ID NO: 13048 - protein, 555 aa, Thermobifida fusca YX
MLGRGGRLPPGKCRVGPAHWPSRLSSAEVSPTTRALSRHTGTSGPAPSRSLPAISTIKETDLTETNEALSTASNATGSTLDSGAPAASDRNSLSVGSNGPLLLHDVRLVETLAHFNRERVPERNPHAKGAGAFGVFETTEDVSQYTKAALFQKGARTEMLARFSTVAGEQGSPDTWRDVRGFALKFYTSEGNYDLVGNNTPIFFVRDPMKFPHFIRSQKRMPDTGLRDNNMQWDFWTLNPETAHQVTYLMGDRGLPRTWRHMNGYGSHTYMWINAKGEKFWVKYHFKTDQGIENMTNEEAERLAGVDADFHRRDLVEAIERGDYPSWTLYVQVMPYEDAKTYRFNPFDLTKVWPHSDYPLIKVGKMTLNRNPENFFAEIEQAAFAPSNLVPGIGVSPDKMLLGRVFAYADAHRARIGTNYFQLPVNKPRVKVNSYTFDGHMTYEHSGKAPVYAPNSYGRPWSDQTGPVEDSWEADGELVRSAYELHAEDDDFSQAGTLVREVFDDAQRDRLVETVADHLSKGVVEPVLSRAFQYWKNIDETIGERIEKRYHEIAR

SEQ ID NO: 13049 - protein, 1171 aa, Physcomitrella patens
MEGLNPISSDLKPQEPPKSQEPPRTQEPLNPVGAPRGRGKFYAIPRSERKSIEVFGGAPTTTRYLPGVAANFGVSSAVAPKESKGKATPSSRIDPPWANPKFAPAELPPAWLAPKPAPNSPPLRPTPSSLPESWNKPPHMLDSLEKSPPWSKPDATKPSASKALLSGEMSLDIPAYKPKRVVGGEEAAPKPVVRHQRSSSDTMTNTLPDLQEERQSAINKLKQQAEEDSKRELAKKARNDGVKSPERKEMTTTVMADRAAEWGLVLKSDAETGKTQGVTIRRSGDNRRSGDRRSSDGENAPGRVSMTLPTVPASRTSETSDAGSDTSHPSNLPKVSREIKDALSTFQQTFVVSDATQPDFPILYASAGFFNMTGYTPKEVIGRNCRFLQGPGTDPEDVTRIRDALKEGRSFCGRLLNYKKDGSAFWNLLTITPIKDDDGKVLKFIGMQVEVSKHTEGKKEKALRPNGLPESLIRYDARLQVKATEAVGDLVGVFKKPTIPTSPRDSQLRKPLLEEEKKLAQQDFAHGSKGAHKRDAARRKSTGTDFVKRNETGQSNVPEGIANEHLAPGNPPRRNRRSSGFLSLLGWTKPEPKLDPELDPELRMLDYEERPESFEVDVERSKEIRRGIDLATTLERIAKNFVITDPRLPDNPIIFASDEFLELTEYTREEILGRNCRFLQGPDTDRAVVDQIRDAIAARRDITVQLLNYTKSGKPFWNLFHLQAMRDHNGELQYFIGVQLDGSEYLEPERRRLSEKTEKEGAKVVQETANNIDGAVRELPDANMKPEDLWSKHSLPVHPKPHSINSPSWEAIRKFRKSGVTLGLKDFRPIKPLGSGDTGSVHLVELRGTGLVFAMKAMDKSVMMQRNKVHRARAERDILALMDHPFLPTLYATFQTQTHICLISDFCLGGELFLLLERQPRKVFTEDVVRFYAAEIVIALEYLHCVGVVYRDLKPENVLLKEDGHIQLTDFDLSFLTSAKPLLVEPDVPPSRRKKPKRPPPPIFFAEPVTPSNSFVGTEEYIAPEIITGQGHSSAVDWWTLGILIYEMLYSRTPFRGKNRQKTFTNVLQKDVIFPASIPVSLQVRQLMRGLLQRNPMKRLGSNRGASDVKTHPFFRGISWPLLRNMKPPPLESPLELISEEVESIKSTPAEDLEWNEHEAAAATTFTSDVF

SEQ ID NO: 13050 - protein, 622 aa, Prochlorococcus marinus str. MIT 9312
MCGITGIISFQSSIDPQNIHNMNETLMHRGPDHRDIWINEYSTVFLGHTRLSILDLSDNGNQPFHSKDGRFHLTFNGEIYNYKNLKDYLKTNGISNFKSNSDTEVLIELIALRGITNASKMLNGMFAFAVWDSLEKKIHLVRDRFGEKPLFYTLQKDTLYFGSEIKSILKIPTISKIINKEALSHYLRFNYIKNPLTIYKDIYKLEPGHILSIDQNITYKKYSYKNKNKKTIKLANQKEAEDLLQNQIIKSCLSRTISDVPIACFLSGGIDSSLVTSIIQRNSKQRIKTFTIGFDDQSIDESNYAEKIANFLGTDHTTINIEEKELLNNIDLQSEIYGEPFADQSSIATNILCKYASRDVKVCLSGDGGDEMFIGYDRYYKVNQLRLFLKAIKFYKKFKTIDRILEVLIHKIESNKNFSIKIDKIIKLISLLSDANDDNIYEKFNSLYRDQYFPLTPQNNQKHYIYKDLKNIQEMCEYDFETYLPDCILTKVDRASMHNSLEVRAPFLDHEIPEIIDSINPTYKKKLLNRKFILKKLLNKYLPKNIYERPKKGFSAPLNNWIKGPLKELTLDYLSIESLKKHNLLDIDIIERIKYEHYSGIRSWHNQIWNLLIFQQWYNKNF

SEQ ID NO: 13051 - protein, 576 aa, Brassica napus
MAASFSVPSMIMEEEGRFEAEVAEVQTWWSSERFKLTRRPYTARDVVALRGHLKQGYASNEMAKKLWRTLKSHQVNGTASRTFGALDPVQVTMMAKHLDTIYVSGWQCSSTHTSTNEPGPDLADYPYDTVPNKVEHLFFAQQYHDRKQREARMSMSREERAKTPFVDYLKPIIADGGTGFGGTTATVKLCKLFVERGAAGVHIEDQSSVTKKCGHMAGKVLVAVSEHINRLVAARLQFDVMGTETVLVARTDAVAPTLIQSNIDSRDHQFILGVTNPNLRGKSLSSLLAEGMAVGNNGPALQAIEDQWLSSARLMTFSDAVVEALKRMNLSENEKSRRVTEWLIHARYENCLSNEQGRELAAKLGVTDLFWDWDLPRTREGFYRFQGSVTAAVVRGWAFAQIADLIWMETASPDLNECTQFAEGVKSKTPEVMLAYNLSPSFNWDASGMTDQQMMEFIPRIARLGYCWQFITLAGFHADALVVDTFAKDYARRGMLAYVERIQREERSNGVDTLAHQKWSGANYYDRYLKTVQGGISSTAAMGKGVTEEQFKETWTRPGAAGMGEGTSLVVAKSRM

SEQ ID NO: 13052 - protein, 83 aa, Arabidopsis thaliana
MIVSKKKKIDGLKDHAAQNVNDKMMSNAGHIFPHNTPNTKEAYYYRMIFERFFPQNSARLTVPGGATVACSTAKAVDQLASHS

SEQ ID NO: 13053 - protein, 468 aa, uncultured bacterium 578
MIKTQVLVIGSGPGGYTAAFRAADLGKEVVLVEKYKSLGGVCLNVGCIPSKSLLHTAQIINEAKHASQLGISFGDTKIDINGVRKNKESIVNKLTAGIQALAKARKVKVVTGHAKFLSKNQVGLEGTDEVIEFEHCIIAAGSRVTKLPMFPFNDERVMDSTDALMLDDIPKRLLVVGGGIIGLEMATIYDALGSEITIVELEGQIIPAADKDIVSPLLKRIKKNYANIFLNTKVTKMTASKKRIKVNFEGKDAPKTDTFDKVLVAVGRSPNGQMIGAENAGVNVDQNGFISANNQMQTNVDNIFAIGDIVGQPMLAHKATHEAKVAAEVICGQKSGFDALTIPSVAYTDPEVAWTGKTEKELTEEGIKFDKGVFPWAASGRSLSIGRSEGVSKGLFDAKSGKILGMGICGTNAGDLISEASLAIEMGCDMSDIALTIHAHPTLSETTAFAAEMVEGTITDLMPPKKKK

SEQ ID NO: 13054 - protein, 176 aa, Brassica napus
  misc_feature (113)..(113): Xaa can be any naturally occurring amino acid
  misc_feature (149)..(149): Xaa can be any naturally occurring amino acid
  misc_feature (170)..(170): Xaa can be any naturally occurring amino acid
  unsure (1)..(176): unsure at all Xaa locations
MNDAETNLGRRFSDDTYSGFDLPDLYLSDEWMDDDLVSAVSGMNHSYGYQTRDSAHAAAFFSGSSSGFGHPESPCANTSVAAATATASVEKQIKKEKKKVKERIAFKTQSEVXVLDDGFKWRKYGKKMVKNSPNPRNYYKCSADGCPVXKRVERDGDDPSFVITTYEGFXNHSSMN

SEQ ID NO: 13055 - protein, 766 aa, Vigna radiata
MGAAILPDLGTEILIPVCAVIGIAFALFQWLLVSKVKLSAVRDASPNAAAKNGYNDYLIEEEEGINDHNVVVKCAEIQNAISEGATSFLFTEYKYVGIFMVAFAILIFLFLGSVEGFSTSPQACSYDKTKTCKPALATAIFSTVSFLLGGVTSLVSGFLGMKIATYANARTTLEARKGVGKAFITAFRSGAVMGFLLAANGLLVLYIAINLFKIYYGDDWGGLFEAITGYGLGGSSMALFGRVGGGIYTKAADVGADLVGKVERNIPEDDPRNPAVIADNVGDNVGDIAGMGSDLFGSYAESSCAALVVASISSFGLNHELTAMLYPLIVSSVGILVCLLTTLFATDFFEIKAVKEIEPALKKQLVISTVLMTIGVAVVSFVALPTSFTIFNFGVQKDVKSWQLFLCVAVGLWAGLIIGFVTEYYTSNAYSPVQDVADSCRTGAATNVIFGLALGYKSVIIPIFAIAISIFVSFTLAAMYGIAVAALGMLSTIATGLAIDAYGPISDNAGGIAEMAGMSHRIRERTDALDAAGNTTAAIGKGFAIGSAALVSLALFGAFVSRASITTVDVLTPKVFIGLIVGAMLPYWFSAMTMKSVGSAALKMVEEVRRQFNTIPGLMEGTAKPDYATCVKISTDASIKEMIPPGALVMLTPLVVGILFGVETLSGVLAGSLVSGVQIAISASNTGGAWDNAKKYIEAGASEHARSLGPKGSDCHKAAVIGDTIGDPLKDTSGPSLNILIKLMAVESLVFAPFFATHGGLLFKIF

SEQ ID NO: 13056 - protein, 628 aa, Arabidopsis thaliana
MDPGIANHTLPEEFEEVVVPEMLEKEVGAKVDVKPTLTTSSPAPSYIELIDPGVHNIEIYAEMYNRPIYRVALFFSLFLIAYAYGLDGNIRYTFQAYATSSYSQHSLLSTVNCIKTVIAAVGQIFFARLSDIFGRFSIMIVSIIFYSMGTIIESQAVNITRFAVGGCFYQLGLTGIILILEVIASDFSNLNWRLLALFIPALPFIINTWISGNVTSAIDANWKWGIGMWAFILPLACIPLGICMLHMRYLARKHAKDRLKPEFEALNKLKWKSFCIDIAFWKLDIIGMLLITVFFGCVLVPFTLAGGLKEEWKTAHIIVPEVIGWVVVLPLYMLWEIKYSRHPLTPWDLIQDRGIFFALLIAFFINFNWYMQGDYMYTVLVVAVHESIKSATRITSLYSFVSVIVGTILGFILIKVRRTKPFIIFGISCWIVSFGLLVHYRGDSGAHSGIIGSLCLLGFGAGSFTYVTQASIQASAKTHARMAVVTSLYLATYNIGSAFGSSVSGAVWTNILPKEISKRISDPTLAAQAYGSPFTFITTYTWGTPERIALVMSYRYVQKILCIIGLVFCFPLLGCAFMLRNHKLTDSIALEGNDHLESKNTFEIEEKEESFLKNKFFTHFTSSKDRKD

SEQ ID NO: 13057 - protein, 821 aa, Bdellovibrio bacteriovorus HD100
MPGDFLHLHRIITRQKSSQYTTSLDEGKGPKLTLRIGATMQKALAKELTSLVNWAVTELGHVIEAELGGKQFQRIENIRRFVKSKDGGQLKGLLKLKGDMEVLSPAQRFEIAHSFALMLELINACESAYRTHRLLEEKTAPLSEETHAYGRIIHVLTAHPTESRNSDIIFYFRKVHQLLLQRLTAERHNQTAELHALLRMAWQLPMSKQRKPSVMDEAEYIYSLVLQDDIIEIYLQQRHAQIPFYIRTWVGGDKDGHPGVNEKTMLGSLSMSRARLHSWVKTQFAAYLADLAPLSRSGLRQKNDIRKLQRHAVAVKRNLTKTRRISTGDANRVHALNKSVHDLATEQHRLFGAESPTLNRIRYLLKIFPSLVVPLEIREDSSLVHEALDDSRFRMNISRMLKTLARLSPDHSPRNYVRGFILSQCESAKDIEAGIRLSSKILNGPRLPVVPLFESSHSLKNSTEIIRTFLGVKKNKSLIKKHWSAQLEVMLGYSDSAKENGSFPSRFLIQSAMQGLEATIEKQGLVPIFFHGSGGSIERGGGSIQEQTEWWPLSALKNVKMTVQGEMIYRSYNSPAILQRQLNLLVQNRDARKQAPATHTSAINRKALQKLSDSVQQSYQQILQQPDFLELIEKATPYSFMKDLRMGSRPSKRQGPVQLKSLRAIPWVLCWTQTRALFPTWWGLGSHWKNLTASEKSQYRKAFKESAMFRSYIKAVGFTLEKIEMDVFFMYLRSSRLNKETITKYENSFRQEFAQTVKCIREITREKSLLWYRPWLETSIGLRSPLIHPLNVLQLVALETTDIKLLRETVTGIASGMLTTG

SEQ ID NO: 13058 - protein, 396 aa, Methanococcoides burtonii DSM 6242
MKAVILAAGEGTRMRPLTSSIPKVMLPVANKPMLEHIVDSAIEAGIDGFVFITGYHEEVIEQYFGNGDRWNVTIDHVHQEEQLGTANAIGYAKGHVKEKFIVLNGDVLVSSDHIEHMIERKEDAVITVKRVDNPSDFGVIETDGNKVINIIEKPEFPPTDLANAGIYLFSEAIFDLIEQTTLSPREEYEITDSLQMLINSDADVGYEILEEEWIDIGRPWDMLDANAVLLNQMEPSVKGVIEPNATLIGDVSVGRGTLIRNGAYIIGPVIIGNDCDIGPNCFIRPSTAIGNDVHIGNAVEVKNSIIMDGTNIGHLTYLGDSIIGRKCNFGAGTKVANLRHDGKNIKVKIKGKLTDSGRRKLGVIMGDDVHTGINSSINVGTVMESGSYTRPGEVVR

SEQ ID NO: 13059 - protein, 338 aa, Debaryomyces hansenii CBS767
MSTNDLPSTQKVVLFEENSDSVDVIKYTDFDTPKIAAPNEIIIKNKFAGVNFIDSYFRKGIYPSQKPHIFGREAVGVVAAVGDKVTKFSVGDKVAYLSGSTFAQYTKLTDSYVQILKLDPSTSDESLKFYAAALLQGLTALTFIHEAYAVKKGDYVLVWAAAGGVGKILTQLISQQGAHVIAIASTEEKLALAKKYGAEYGVNHLTDDIVEKVKEITDGKGVNASFDSVGKDSAEISLTSLARKGTFVSYGNSSGVVPPLSINRLSPKNLTVLRPQLLGYLTTSEEWEHYVRLLFKLIDSGDLKIDILKTYPLSEYKQATSDLEGRKTTGKLVLEVPQ

SEQ ID NO: 13060 - protein, 296 aa, Saccharomyces cerevisiae
MITTPLVHVASVEKGRSYEDFQKVYNAIALKLREDDEYDNYIGYGPVLVLLAWHISGTWDKHDNTGGSYGGTYRFKKEFNDPSNAGLQNGFKFLEPIHKEFPWISSGDLFSLGGVTAVQEMQGPKIPWRCGRVDTPEDTTPDNGRLPDADKDAGYVRTFFQRLNMNDREVVALMGAHALGKTHLKNSGYEGPWGAANNVFTNEFYLNLLNEDWKLEKNDANNEQWDSKSGYMMLPTDYSLIQDPKYLSIVKEYANDQDKFFKDFSKAFEKLLENGITFPKDAPSPFIFKTLEEQGL

SEQ ID NO: 13061 - protein, 620 aa, Candida albicans SC5314
MIFNQFILWLISIPLILASGTIHRFDWNVSYVMANPDGIHPRRMIGINNQWPNPTIRSKKNDRVIINLTNELPDKNVSLHFHGLFQRGYNDQDGPAFVTQCPISPGVTFTYDFNVTDQSGTYWYHSHMGSQYGDGLRGLFIIEYDNDDEYNKEFPYEYDEDVTLSVGDHYHLESPEIVKNFMTRFNPTGAEPIPQNGLFNETKNVTWQVNPDTTYLLRIVNMGLFTSHYVYIEDHTFTIVEVDGVVVEPYETDSLYVAVAQRYVVLMKTKKSADKNFRFVNVLDQDMLDFLPSDLQIVSTNWIVYDKSLELPPALPFNQFHKTIKSLVGFDDFDLRPLRKVNLLDEPDYTIQVNLTMEVLGDGVTYAMFNGKTFRPPKVPSLYTVLSTHGNTNLTTNELIYGTNTNSFVLQGDEVVEIILNNMDPGKHPFHLHGHNFQVISRFDTDDEDNQLVFDPTNETYTNYPEFPMVRDTVEVGPNGFIVLRFKADNPGVWFFHCHVDWHLEQGLAILLVEDPLELLSSNTTIPQNHIDACNAIGMPIKGNAAGNDIDLLDLYGENIQPNPLPAGFTNKGYLAITCCTLIAIYGLWSIYNYGMEDISKDNAEDVIEKLYKILDDYDK

SEQ ID NO: 13062 - protein, 405 aa, Methanococcoides burtonii DSM 6242
MKAVILAAGEGLRCRPLTLTRSKVMLPVANKPIIEHVIDSLAKNEIKDLILVVGYEKERIMDYFEDGIDFGINITYVHQKAQLGTAHAIKQVAELMGEEDETFLVLNGDNVIEANTIKDLLDNHNGNATILTARKENTRGYGVIVCDGKKVKKIVEKPTAEVSHVINTGIYMFDQNIFERIEQTPISQMGEFAITDTLQQMIDDGLQVDHTITNSLWIDAVFSWDILKDNSIVLDRSKDYGIKGTVEEGAIIRGNVSIGNNTIIRSGCYIVGPAIIGDNCEIAPTVVILPSTTIGDNVTIGSFSHLQNSIIMNNTRIGNHSHISNSVIGMNNSIGPYFITEDKENIKIELEDDIQTAEKLGTITGDDTIIGHGVLVKAGVMISSNCNIDSGKIISRNLPENSIVI

SEQ ID NO: 13063 - protein, 302 aa, Streptomyces coelicolor A3(2)
MIVVAGEALIDLVPQGTGALAALRPALGGGPYNTAVALGRLGSPVAFCSRVSYDGFGEALLDRLRETGVDVSPVQRGAEPTTLAVASLDADGSAAYSFYVEGTADRMFALPAALPSGTRAVSFGTCSLVLEPGASAYEELLRETAARGVFTALDPNIRAGLIPDPDAYRARFKSWLPSVSLLKLSAEDAEWLGGTPREWLAAGPAAVVVTRGGDGLTAFTRDGGEYTVPGERVEVVDTIGAGDTVNAALLHGLAARGALRDADLAALGPDGWAGLLGFAARAAAVTCSRAGAEPPYAHEVAA

SEQ ID NO: 13064 - protein, 542 aa, Triticum aestivum
  misc_feature (407)..(407): Xaa can be any naturally occurring amino acid
  unsure (1)..(542): unsure at all Xaa locations
MAYGLKPKAPSVPPPGEENDQPIDRPRPKPLSIRGRPPLHSGFGEAAHGIWPVKMDGNTRGGGHSEALKNYNLGKTLGHGTFGKVMIAEHKLTGQKVAIKILNRHQMEIMEMVEKAKREIKILRSFIDFIHPHIIRVYEVIETPKDIFVVMEYCQNGDLLDYIVEKGRLQEDVARRIFQQIISGVEYCHTNMVVHRDLKPENLLLDSKYNVKLADFGLSNVMHDGHFLKTSCGSINYAAPEVISGELYAGPEVDVWSCGGGFYILPNHLSDLAMDLIPRMLIVDPMKRITICEIRDHPWFQNRLPPRRAVPPPDTAQQAKMEIDEDTLQEVANLGYDKDHVCESLCNRLQNEATVAYYLLLDNRFRATSGYLGADYLQSMGRSFNQFTSSESASPSTRQYLPASNGXSKAVALRPYYPVQRKWALGLQSPAHPREIMIEVLKALQELNVRWKKNGHHNMKCRWCPGFPQVSDMLDANHSFVDGSTIMDIGDANGRLPAVIKFEIQLYKTKDDKYLLDMQRVTGPQLLFLEFCAAFLTNLRVL

SEQ ID NO: 13065 - protein, 677 aa, Xanthomonas campestris pv. campestris str. 8004
MATWLILVGELLVSLGLMVAILLRPQVSHTRRLIGMLLDYTCTGAIMAIQGEPASPLYAVCMWVTIGNGLRYGSNYLRAATAMGSLCFLGAILISPYWKANPYLSWGLLLGLIAVPLYFDSLLRAMTRAVREARHANQAKSRFLANMSHEFRTPLNGLSGMTEVLATTRLDAEQKECLNTIQASARSLLSLVEEVLDISAIEAGKIRIDRRDFSLREMIGSVNLILQPQARGRRLEYGTQVADDVPDLLKGDTAHLRQVLLNLVGNAVKFTEHGHVLLRVTRVSGSAEDAVRLRFDVEDTGIGVPMDMRPRLFEAFEQADVGLSRRYEGTGLGTTIAKGLVEAMGGSIGFKENQPSGSVFWFELPMAIGEPLKSSTVRVPTGALVDAPEELESSNIIAFSNPFLRHRARVRSMRMLVADDHEANRMVLQRLLEKAGHKVLCVNGAEQVLDAMAEEDYDAVIVDLHMPGMNGLDMLKQLRVMQASGMRYTPVVVLSADVTPEAIRACEQAGARAFLAKPVLAAKLLDTLADLAVSTRQLATPATTVQVATSFEGVLDSSVLDELAALGMGEEFERQFVRQCLDDAQNCVGDIERDGTCSDWEQLRESAHALRGVASNLGLAQVASSGGELMRMADWQLQAEWRLRLSTLREQLKAGKDALDARVQGVKDGECSPRSNE

SEQ ID NO: 13066 - protein, 657 aa, Desulfovibrio vulgaris subsp. vulgaris str. Hildenborough
MSESILLVDDEEGIRKVLGITLADAGYRVTTAADGEEAMRRFAEERPDIVLTDIKMPGMSGLELLESIKSRDSEVEVIMLTGHGDMELAIQSLKRDATDFITKPINDDVLDIALGRARERITMRRRLREYTENLEDMVAKQSARLVAAERQLAALQVMDGIASGVQTLSRMLDQAGIFNELPCFVSMHSRYLEIVATNDLYKERLGHKVGQPSWEVYKGREGSGNGCPVWKVIETGEGQRSNEILIDKHGQEIPVIVHTAPILDNDGEIEMVLEISVDVSKVRRLQDELRITRERYRQLFDEAPCYIAVIDRSLKVVDANRRFHHDFGEPAARHCHDIFAHRLAACQGCPVERSFDDGKPHQYETVVTTGDGRQANVLVWTSPLRDAAGNITEVMEMSTDITQVRQLQDRLSQLGLLLGSTAHGIKGLLTALDGGVYRLGSGLDRNDEARVRDSFEDIRHLTGRLRKMVLDILYYAKKRDLNWEVVVAERFATETAELIEGKAVNRGVGFQLEIAAESGTFEADAGALSAALVNLLENAVEACAAERSRPEHSVTFSVGGDANHVEFSVRDDGVGMDRETREKLFTLFFSSKGSAGTGIGLFVANQVVQQHGGHIAVASEPGHGTTFTVSLPRRLPDVARCPAPQNGQPEGDEADDN

SEQ ID NO: 13067 - protein, 501 aa, Arabidopsis thaliana
MFYYVIVLPLALFLLAYKLFFTSKTKRFNLPPSPPYSLPILGHHNLLKPPVHRLFHRLSKTHGPIFSLQFGSRRAVVISSSSLATQCFTGQNDIILSNRPCFLTAKYVAYNYTTVGTAPYGDHWRNLRRICSLEILSSNRLTNFLHIRKDEIHRMLTRLSRDVKKEIELEPLLSDLTFNNIVRMVTGKRYYGDEVHNEEEANVFKKLVADINDCSGARHPGDYLPFMKMFGGSFEKKVKALAEAMDEILQRLLEECRRDKDGNTMVNHLLSLQQNEPEYYTDVTIKGLMLGMMIAGTDTSAVTLEWAMSSLLNHPEALEKAKLEIDEKIGQERLIDEPDIANLPYLQNIVSETFRLYPAAPLLVPRSPTEDIKVGGYDVPRGTMVMVNAWAIHRDPELWNEPEKFKPERFNGGEGGGRGEDVHKLMPFGNGRRSCPGAGLGQKIVTLALGSLIQCFDWQKVNGEAIDMTETPGMAMRKKIPLSALCQSRPIMSKLQAHLKG

SEQ ID NO: 13068 - protein, 200 aa, Candida albicans SC5314
MATNITWHANLTHQERAELRKQKGVTVWLTGLSASGKSTIACALEQSILARGLNSYRLDGDNIRFGLNKDLGFSEADRNENIRRISEVAKLFSDSCCITVTSFISPYRADRRLARELHEKDNLPFVEVYIDVPLEVAEQRDPKGLYKKAREGIIKEFTGISAPYEAPEKAEIHVKNHSGLSVEQAAEQIIDYLLEKGYIN

SEQ ID NO: 13069 - protein, 143 aa, Zea mays
  misc_feature (122)..(122): Xaa can be any naturally occurring amino acid
  unsure (1)..(143): unsure at all Xaa locations
MAFFRGLTAVSRLRSRMDLKSQLRELIPEQQDRLKKLKSEHGKVQLGNITVDMVLGGMRGIIGMLWETSLVDPEEGIRFRGLSIPECRKVLPTAVEGGEPLPEGLLWLLLTGKCSPILPLFXVPTKDQVDALSKELLARSTVP

SEQ ID NO: 13070 - protein, 454 aa, Haemophilus somnus 2336
MTIKTPVQATLASNQYFLDRQDIMESNVRSYPRKLPFAYQKAQGVWVTDVEGNEYLDFLAGAGTLALGHNHPKLIQAIKDVLDSGLPLHSLDITTPLKDAFTEELLSFFPKDKYILQFTGPSGADANEAAIKLAKTYTGRGNVIAFSGGFHGMTHGALSLTGNLGAKNAVQGLMPGVQFMPYPHEYRCPFGIGGEAGVKAVEHYFENFIEDVESGVVKPAAVILEAIQGEGGVVPAPISFLQKVREVTQKHGILMIVDEVQAGFCRSGKMFAFEHANIEPDIVVMSKAIGGSLPLAVLAIKKEFDAWQPAGHTGTFRGNQLAMATGYVSLKIMREENLAQNAKERGEYLTKALTELSQEFPCIGNVRGKGLMMGIDIVDEHQAKDATGAYPRDCDLAVAIQKYCFKNKLLLERGGRGGNVVRVLCAVNITQAECEEFIKRFKQSVAEAVKAVRG

SEQ ID NO: 13071 - protein, 346 aa, Polaromonas sp. JS666
MKAAVLRAPKVLQLSDIATPEAAPGELVLRVRAAMVCGTDLRILTGRKTKGVRFPSVIGHEFAGEVVQVGDGVTQFKTGDRVCMDPVIPCRACAYCKTGHENVCLHRQAMGYEFDGAFAEYIRIPAIALTAGNVFMMPAQMSFESAALAEPLACCINGQRNAGVQVGDTVVVLGAGPIGLMHAALARLSGARQVIVSEPNAARRQAAVDRGVEHMCDPSTESVMEFVKARTDGLGADVVILAIGVPQLANESLNLVRKGGHVNLFAGFSAGETSNIDVNLIHYNEIVVTGASALRRRDYELALNMLSAGQIDANSLITHRYEVADSLAAFDEAGSGRALKVAIHNV

SEQ ID NO: 13072 - protein, 311 aa, Methanocaldococcus jannaschii DSM 2661
MVAMITTVVGSYPVVKKEETFLDKVKKVFGLYDEYKYAIERAVKDQVKAGVNIISDGQVRGDMVEIFTNNMYGFDGKRVVGRVEFIKPITLKDILYAKSIAKKLNPNVEIKGIITGPCTIASSVRVESCYSDNRDENLIYDIAKALRKEVEALKKHVPIIQIDEPILSTGMYDFDVARKAIDIIVDGLNIKFAMHVCGNVYNIIDELNKFNVDILDHEFASNKKNLVILESMEKKVGFGCVNTKVKKVESVEEIKSLIEEGIEILKNNEKLNKNLSDNILIDPDCGMRLLPIDVAFNKLKNMVEATKLIKI

SEQ ID NO: 13073 - protein, 257 aa, Triticum aestivum
  misc_feature (54)..(54): Xaa can be any naturally occurring amino acid
  misc_feature (106)..(106): Xaa can be any naturally occurring amino acid
  unsure (1)..(257): unsure at all Xaa locations
NQREPPQGLLPEGNGVCLKRAALLRSRCPPCRFALLFLVGSASLAIGAMANHVXLGGKRGDPPPAHSLETDGLARLPVDEHTKRETALLEFVRVVEAKEQTWPGTXHHLTVEALEAGRKKVYEAKVWVKPWLDFKELQEFRHTGDATSFTISDLGAKRGGHEPGWRDVPVHDPVVKDAASHAVKSIQQRSNSLLPYELVEIVRAKAEVVEDFAKFDILMKLKRGTKEEKMKAEVHKNLEGAFVLNQMQPEHDESSSQ

SEQ ID NO: 13074 - protein, 429 aa, Pirellula sp. 1
MIMDLNNTIALILGGGRGTRLFPLTKIRAKPAVPLAAKYRLIDIPISNCINSGLNRAYVLTQFLSESLHRHLRQTYTFDHFSGGFVELLAAQQTVNSGTDWYQGTADAVRKNLVHLRESWIKHVLILSGDQLYRMDFRDMMKTHIESGAAATIAGIPVTRKDASALGIMQVDDTGRVTGFVEKPQTEEEIAKVRMEPSWIDARGIESQGRDLLASMGLYIFDKDLMVDMLENSLHSDFGKEVFPEAINTHKVQLHLFDGYWEDIGTIRSFYEANLSLASKNPPFDIRNRHSPIYSRPRFLPPTIMGDAKITGSLIADGCRIGDNVTIENSVIGLRTVIGDNVTIKDSVVMGADFIEMRGAERDGKLPVGVGAGSVIQGAILDKNCRVGENVRILNEAKVDHQGEDDDLQIRDGISIVIKDGQIPDGFSC

SEQ ID NO: 13075 - protein, 400 aa, Xanthomonas campestris pv. vesicatoria str. 85-10
MSFFANVEQVPGDPILGLTEAYNADSRPNKVNLGVGIYYDENGRIPLLRAVHKIEQQLAQDAKPRGYLPIDGLAAYDKATQELLFGADSALVTCGRVATSQTVGGSGALRVGADLLKKLLPTATIAISNPSWENHRAVFGAAGFEVVDYTYFDAAIHGLNFDGMLADLAKLEPGTVVLLHACCHNPTGADLSKEQWKQVAGLLKERNLFPFVDIAYQGFDKGIEADAYAVRLLAAEGIDSYVVASSYSKSFSLYGERVGALSVVSATAAEAKAVQSQVKRIIRTIYSSPSTHGAALVAGVLTSPELRDLWEQELTDMRERIHSLRAGLVEKLATLGAPEFDFIQRQAGMFSYSGLTKTQVDRLRDEFAIYAVGTGRICVAALSQRNLDYVAQAVATVSRV

SEQ ID NO: 13076 - protein, 466 aa, Ehrlichia canis str. Jake
MQNYDIVIIGGGPGGYKCAIRASQLGLKVACIDKNKILGGTCLRVGCIPSKALLHFSHEYYHLKNNLSEVGITFDNLNFDLNKIMSFKDKNIAELGSGISQLFSSYKIDYLCGAGKIKSVGSNDFIIAINGDNAEQQITSKNIVIATGSDVSSFPGITIDEENIVSSTAALSFKEPPKRLVVIGAGAIGLEMSSVWSRFGSEVTVVEFLDKIAPSMDGDISKALLTSLKKQCINFKLSTKVVSIDNKGSNLTVHLESVKDGKSEVIEADKVLVSIGRVPYTKGLIDNNLIECDSRGFIKVNSRYETNIPGIFAIGDVIGGAMLAHKAEEEGIAVAELISGHIPHVDYEIIPSVIYTHPAVASIGKTEESLKNANYSYSVGKSNFAANGRSRITNNAVGFVKVLTSKVNNAILGVHIIGTYADTMINEAAIAMAYRASSEDVFRICHSHPDVNEAFRDACEAAFLNH

SEQ ID NO: 13077 - protein, 365 aa, Nicotiana tabacum
MESSTKSQIPTQSEEERNCTYAMQLLSSSVLPFVLHSTIQLEVFEILAKSNDTKLSASQIVSQIPNCKNPDAATMLDRMLYVLASYSLFTCSIVEDEENNGGQKRVYGLSQVGKFFVRDEDGASMGPLLALLQDKVFINSWFELKDAVLEGGVPFDRVHGVVHAFEYPKSDPKFNDVFNKAMINHTTVVMKKILENYKGFENLKTLVDVGGGLGVNLKMITSKYPTIKGTNFDLPHVVQHAPSYPGVEHVGGDMFESVPEGDAIFMKWILHDWSDSHNLKLLKNCYKALPDNGKVIVVEAILPVKPDIDTAVVGVSQCDLIMMAQNPGGKERSEEEFRALATEAGFKGVNLICCVCNFWVMEFCK

SEQ ID NO: 13078 - protein, 467 aa, Azoarcus sp. EbN1
MLQKSSPGGAPVDIGRILDHGPFTSMQMLAVMLAAFAIVMDGFDGQLIGFAIPALIKEWGITRAAFAPAVAAGLVGMAVGSACAGIVADRIGRRLVVAASVFLFGIATCAIGFAPDVVTISLLRFIAGLGIGGALPSASTMTAEFTPARHRTLAVTSTIVCYPLGGMLAGLFASAILPVFGWRGLFWIGGALPIAYSFVLLATLPESPRYLARKPNHWPALKKLLARMARPTSPDTTFVDAAERAAEQRAGFASLFAGGLARDTLAIWCGFFMVMLATYTAFSWLPAMLASEGLPAALASSGLTAYNLGGVVGSLGCAVAITRFGSRWPLILCSIGAAASAFLLKYVDIAENGTWLMIGLGVHGMFVIAVQATMYALCAYVYPTIVRATGTASALSFGRLGAILSSFAGAAVITSGGASSYLSMLGFTMVLTLVALALVKRHIPSVNAQPPVAAPAAPAAATAKGYA

SEQ ID NO: 13079 - protein, 404 aa, Streptococcus pneumoniae TIGR4
MKEYNKSSKLEHVAYDIRGPVLEEAMRMRANGEKILRLNTGNPAEFGFTAPDEVIHDLIMNARDSEGYSDSKGIFSARKAIMQYCQLKKFPNVDTDDIYLGNGVSELIVMSMQGLLDNGDEVLVPMPDYPLWTAAVSLAGGNAVHYICDEAVEWYPDIDDIKSKITSNTKAIVLINPNNPTGALYPKELLLEIIEIARQNDLIIFADEIYDRMVMDGHVHTPVASLAPDVFCVSMNGLSKSHRIAGFRVGWMVLSGPKTHVKGYIEGLNMLSNMRLCSNVLAQQVVQTSLGGHQSVDELLLPGGRIYEQRNFIYNAIQDIPGLSAVKPKAGLYIFPKIDRNMYRIDDDEQFVLDFLKQEKVLLVHGRGFNWQEPDHFRIVYLPRVDELAQIQEKMTRFLKQYRR

SEQ ID NO: 13080 - protein, 520 aa, Zea mays
MAAAPPPKADELQPFPPKEQLPGVAFCITSPPPWPEAILLGFQHFVVMLGTTVIIPSALVPQMGGGNEEKARVVQTILFVAGINTLFQTLFGTRLPVVMGGSYVFVGPTISIVLAGRYSNEADPHEGALLVASTIQIILGFSGLWRNVVKLLSPLAAVPLVSLVGFGLYELGFPGVAKCVEVGLPELLLLVVFSQYLPQVLDFGKSVFSRFSVLFTVAIVWLYAYILTIGGAYKNSPPKTQVHCRVDRSGLISGAPWISVPYPFQWGAPTFDAGEAFAMMMTSFIALVESTGAFIGASRYASATMIPPSIISRGVGWQGIGLLLDSFFGTANGTSVSVENIGLLALTRIGSRRVVQISAGFMIFFSVLGKFGALFASIPLPVFAGMYCLFFAYVGGVGLSLLQFCNLNSFRTKFIMGFAFFMGLSVPQYFNEYTAVASYGPVHTGARWFNDMINVPFTSKPFVAGLVAYILDNTLQVKESAVRKDRGNHWWEKFRSFKKDARSQEFYSLPFNLNKFFPSV

SEQ ID NO: 13081 - protein, 272 aa, Legionella pneumophila str. Paris
MNRIDKTLEKLKANRKKMLSPYITAGDPYPELTVSLMHQLVKSGADVLELGIPFSDPMAEGPVIQRAMERALAHSIHCDDVLNMVRQFRKTDTETPVILMGYLNPIEQYGYDLFAQQAVEAGADGTILVDLPPEEADGVSRVWQKHGLYSIYLCSPTTSAERMNFINQHANGYLYYVSLKGVTGSDALKLPELKAQYLQRKAQSKLPLMVGFGIKTPEMAAQVAEFADGVIVGAALINEIIEAYEAKKDPLQASGALLSSMRQAIDNIGSMV

SEQ ID NO: 13082 - protein, 472 aa, Thermobifida fusca YX
MSTTGEAPSSGEVNIAHVVMIAAAAAMGGFLFGYDSAVINGAVSAIQDTFRVGSTVIGFTVAAALIGSAVGAAIAGALADRIGRIRVMQLAAVLFAASAVGSALPFTVWDLAWWRVVGGVAIGIASVIAPTYIAEVSPPAFRGRLASLQQLAIVLGIATSQLVNYGLAAAVGGSALHRLGPLQAWQWMLGIEVLPAATYFVLTLVIPESPRHLVRIGRDARARRVLAEVEGGDVDGRVAEIRRVLGRERRPRLRDLRGRYGLLAIVWVGMALSAFQQLVGINVIFYYSAVLWQSVGIAETDSLLLSLFTSIVNIVGTLIAIGLVDRVGRKPLLLAGSAGMTVALAFTAFAFSHARGEGDDVVLSTAWALTALVSASTFVLFFALSWGVVTWVLLGEMFPLRIRAAAMAVATATQWITNWLVTVTFPSLRDWSLPGTYLVYTAFALLSFGFVLRFVRETKGRTLESMDELAGQ

SEQ ID NO: 13083 - protein, 244 aa, Triticum aestivum
  misc_feature (152)..(152): Xaa can be any naturally occurring amino acid
  misc_feature (224)..(224): Xaa can be any naturally occurring amino acid
  unsure (1)..(244): unsure at all Xaa locations
LAWSRPRYNVKAKIQDKEGIPPDQQRLIFAGKQLEDGRTLADYNIQKESTLHLVLRLRGGMQIFVKTLTGKTITLEVESSDTIDNVKAKIQDKEGIPPDQQRLIFAGKQLEDGRTLADYNIQKESTLHLVLRLRGGMQIFVKTLTGKNITLXEVESSDTIDNVKAKIQDKEGIPPGQQRLIFAGQQLEDGRTLAGYNIQKGSTLHLGLRLRGGMQISVKTLAGXTITPEVGASDHMDNGEAKIQ

SEQ ID NO: 13084 - protein, 484 aa, Zea mays
MAPLRLRAGAAAPMAAAAATVVLAAILALFGCCAAAASAAATDVTAAAELDRIDRLPGQPPVNFSMYSGYVTVDAAAGRALFYWLMEASGVPAGSAPLVLWLNGGPGCSSLGYGAMEELGAFRVNPDGATLSLNPYAWNNVANVLFLDSPAGVGYSYTNTTDDLYAAGDNKTAHDSYAFLINWLERFPQYKHRDFYITGESYGGHYVPQLSWLVYQNNKGIKNPTLNFKGFMVGNAVIDDYHDYMGTFEYWWTHGLISDETYAKLWEDCKNDVSENPSEECQKIYEVAEAEQGNIDLYSIYTPTCKKTSLQKRRLIRGRMPWLPRGYDPCTELYITKYCNLPEVQDAFHANVTGIPYAWVGCSDPIYEYWKDSPRSMLPIYRELISAGLRIWVFSGDTDSVVPLTATRYSIDALSLPTITKWYPWYYDEEVGGWCQVYEGLTLVTVRGAGHEVPLHRPPQGLKLFEHFLRGEPMPKPVESVQSF

SEQ ID NO: 13085 - protein, 229 aa, Saccharophagus degradans 2-40
MTDQKVIMIRHAQSEWNAKGLFTGWADPVLTPLGRKEAAEAASNLAKLGLKFDRIYTSVLQRATETASIIAKSLNCQVPLTKSWQLNERHYGVLQGKSKEALAKQVGAEQVWRWRRGFEDMPPPMPLASPMHARFDTKYDGVEPTSLPSVESLKHTQIRAVNYWQKEVLPSIRNNSSVLVAAHGNTLRALIMYLANMSVQEVEGFEIPTGIPIELNINKHGRCSSWRYI

SEQ ID NO: 13086 - protein, 1296 aa, Arabidopsis thaliana
MVFKNKLFFSSKKSGSSSPDSSNSPRSVGSNSPIRSDKKKSKSASKDEPPIPIPGFVGVGCKQTQIKDGLKKKDGSSKGKQLSSEVQAHSIGKSNLSPSSEVKKPPPPEVKEGPAFVSPIMASSLGLNRIKTRSGPLPQERVFNYRNDPATSNLSKMGADGGDLGSGSATSGSGSGNRKKEAGSSKLGLEENMDRTRPSDNKSDRDSLSPDTGPPRSLSPTLPPSGSRLQNVASSSGTGRSEMSSGRSGPLRNSDFCTPENSYEWENPKESESPRYQALLRMTSAPRKRFPGDIKSFSHELNSKGVRPFPLWKPRRSNNVEEVLNLIRAKFEKAKEEVNSDLAVFAADLVGVLEKNAESHPEWEETFEDLLILARSCAMTTPGDFWLQCEGIVQDLDDRRQELPPGVLKQLHTRMLFILTRCTRLLQFHKESWGEEEQVVQLRQSRVLHSIEKIPPSGAGRSYSAAKVPSTKKAYSQEQHGLDWKEDAVVRSVPPLAPPENYAIKESESPANIDRMSSWKKLPSPALKTVKEAPASEEQNDSKVEPPNIVGSRQGRDDAAVAILNFPPAKDSHEHSSKHRHNISWGYWGEQPLISEESSIMCRICEEEVPTTHVEDHSRVCTLADKYDQKGLSVDERLMAVAGTLDKIAETFRHKDSLAAAESPDGMKVSNSHLTEESDVLSPRLSDWSRKGSEDMLDCFPEADNSIFMDDLRGLPLMSCRTRFGPKSDQGMTTSSASSMTPRSPIPTPRPDPIEQILGGKGTFHDQDDIPQMSELADIAKCAADAIPGDDQSIPFLLSCLEDLRVVIDRRKFDALTVETFGTRIEKLIREKYVHMCELMDDEKVDLLSTVIDEDAPLEDDVVRSLRTSPVHPRDRTSIDDFEIIKPISRGAFGRVFLAKKRTTGDLFAIKVLKKADMIRKNAVESILAERDILINVRNPFVVRFFYSFTCRDNLYLVMEYLNGGDLYSLLRNLGCLEEDIVRVYIAEVVLALEYLHSEGVVHRDLKPDNLLIAHDGHIKLTDFGLSKVGLINSTDDLAGPAVSGTSLLDEEESRLAASEEQLERRKKRSAVGTPDYLAPEILLGTGHGATADWWSVGIILFELIVGIPPFNAEHPQQIFDNILNRKIPWPHVPEEMSAEAHDIIDRFLTEDPHQRLGARGAAEVKQHIFFKDINWDTLARQKAAFVPASESAIDTSYFRSRYSWNTSDEQFFPSGEVPDYSDADSMTNSSGCSSNHHEEGEAEECEGHAEFESGIPVDYSFSNFSFKNLSQLASINYDLLSKGWKDEPQQIPHHK

SEQ ID NO: 13087 - protein, 103 aa, Oscillatoria sp. NKBG091600
  misc_feature (41)..(41): Xaa can be any naturally occurring amino acid
  misc_feature (95)..(96): Xaa can be any naturally occurring amino acid
  unsure (1)..(103): unsure at all Xaa locations
MAAVSLSVSTVKPLGDRVFVKVNASEEKTAGGILLPDTAKXKPQVGEIAAVGPGRRNDDGSRQEVEVKVGDKVLYSKYAGTDIKLSGEEYVLLSXXDILAVVV

SEQ ID NO: 13088 - protein, 399 aa, Pyrobaculum aerophilum str. IM2
MNIGDLVSSRTQYMTASEIRELLRWATADVISFGGGMPDPSTFPVEDIAKIVAYVLEAYPHRALQYGSTEGVMELRQEIAKFSEFFRGIKAKPENVIITVGSQEALELLGRVFIDPGDVVITENPTYLAALQAWRVYQPRLVGIPMDEHGMMVDVLEEKVKQLKAEGARIKFIYTIPTAQNPSGLTMTQDRRKYLLEIAEKYDLLVVEDDPYSYFLFEQIEVSPIKALDKSDRVIYLSTASKIFAPGFRLGWVIANEEVIKWFNLAKQSLNLNTSNFVQYIFLEGLRRNVVLKNLPHVRDLYKRKRDAMLAALETYMPPGVSWTKPSGGMFIWVTTLQHIDTRELLKIAVTQYKVAFVPGHGFFVDQSVRNAMRLNFTYPSFEQINEGIRRLALAIKGA

SEQ ID NO: 13089 - protein, 465 aa, Chlamydia muridarum
MNEAFDCVVIGAGPGGYVAAITAAQAGLKTALIEEREAGGTCLNRGCIPSKALLASAEIVAQIRHADQFGIHINGFSIDYPAMVQRKDTVVRSIRDGLNGLIRSNKITVFSGRGSLISSTEVKILGETPSVIKAQSIILATGSEPRAFPGVPFSQQSPRILCSTGVLNLKEIPQKMAIIGGGVIGCEFASLFHTLGSEVSVIEASQQILALNNPDISKTMFDKFTRHGIRFMLGASVSSIEDMGDRVRLTINGNIEEYDYVLVSIGRRLNTENIGLDKAGVICDERGVIPTDSTMRTNVPNIYAIGDITGKWQLAHVASHQGIVAARNIAGHKDEIDYSAVPSVIFTFPEVASVGLSPTSAQQQGIPVKVTKFPFRAIGKAVAMGESDGFAAIISHETSQQILGAYVIGPHASSLISEITLAIRNELTLPCIYETIHAHPTLAEVWAESALLAVDTPLHMPPTRK

SEQ ID NO: 13090 - protein, 434 aa, Leptospira interrogans serovar lai str. 56601
MRRNIVHSGADALIYEIRQIVAVAKKLEALGLQITYENIGDPILKGESIPDWMKEIVSNLILKDKSWAYTATQGYEPTRKFLAEKVNERRGAQITADDLLFFNGLGDAVAKIFGFMRREARVLGPSPAYSTISSAEAAHSGYEHLTYNLLPEHNWMPDLEDMENKVKYNDSIAGILLINPDNPTGAVYDKNLMKKIVAICEKYDLMLICDETYAHVNYSDHGPLHLSEVIGDKVPGMALRSISKEFPWPGGRCGWLEIFNKEKDPVFSRYVKSLLDAKMLEVCSTTLPQMAIPEVYSHPDFIPHLKRRNEKFKKRAHVATEYFAELRGVKVVEPKGAFYLTVAFDDDVLNSSMKLEIENKKADEFIQPLLASAANDRRFVYYLLASTGICVVPLSAFCTLKDGFRVTLLEEDEEKFNWIYKTLRDKIGEYIASA

SEQ ID NO: 13091 - protein, 203 aa, Ustilago maydis 521
MADTEATKPTVDATEQAGSGSGAAAEEAESDAHFEPVIKLEKLVEVKTHEEDEEVTFKMRAKLFRFDKDAKEWKERGTGDVRLLEHKQTHKVRLVMRRDKTLKVCANHYVTSDMKLSPNVGSDRSWVYNVAADVADGEATAETLAIRFANSENANGFKDAFEQAQKKNAGSSTTDAPAPPQESSKDDEKPAATEQKNDEAKNE

SEQ ID NO: 13092 - protein, 378 aa, Leptospira interrogans serovar lai str. 56601
MFIEVKKLNLGSNMEWIRSLPVFNGILLAVLILILIFPKDCSLSSIFYGKKPISPREQKNAIEIQNSFRNVYRLAKDSVVSIRTKKSESITSPYHYFDFRNERLASFGSGFFVHEKGYIVTNYHVIEDAESIEVITSNGSIHPAKYIGSHERADIALLKIREGSGLRAVVFGDSDRIEVGDWAIAIGSPFGLERSFSVGVVSAKYREDLDETGQAHIQTDSMINPGSSGGPLLNIYGEVIGINRLIRSETGRNSGISFAIPSNYALKIIRMIESNQGRHIRSAILGVMATVPLPDHRIALGIPESWNGVLVYDMDPQSSAELGGIRRYDFILEANGTPIKNINDLREQVGIVGLGGKIKLRIYREKSMQELSIKLIQK

SEQ ID NO: 13093 - protein, 432 aa, Methanocaldococcus jannaschii DSM 2661
MRNPIIDVGAKELSYEIREIVDVAKKIEEFGINITWENIGDPVAKGEKIPDWIKDIIAEIVKNDCSYAYCPTKGLLETREFLAEQVNKRGGVQITAEDIIFFNGLGDAIAKIYGLLKRQVRVINPSPSYSTHSSAEASHAGSPPVTYFLDPYNYWYPDIDDLEKRIKYNPAVSGILVINPDNPTGAVYPKKILNEIVDLANEYDLFIICDEIYCNLVYNGKKQHLLCEVIDDVCGLSLKGISKELPWPGARCGWIEIYNADKDEEFKKYVESIYKAKLIEVCSTTLPQMAIPRIMGHRNYKKYLEERNRFFEKRSNTAYKKLKDLDGVIANKANGAFYMSVVFEDNYLNGNNSIKIENEKLKEFIEHQIKDASIDKKFVYYLLASTGICVVPLTSFCSQLNGFRVTLLERDDEKFEWIFDTLAEKIDEFLKT

SEQ ID NO: 13094 - protein, 496 aa, Desulfovibrio vulgaris subsp. vulgaris str. Hildenborough
MNGARLLLVDDEEGIRTVLSLVLADMGHDVRTAANGNEALALLHDRPADVVLTDVRMPGMDGLALLAAVREAWPDTGVIMLTGHGDMELAVKSLRLGATDFLTKPVGDEALSVALDRAFERRRLRMALRAHTEHLEALVEARTRELVEAERLAGMGETAAMLAHAIKNIASSLEGGLFVLGKGIELGRRDYLEDGWGLVREHVARVRDLALHLLNLGKPLTGDAAPVDPDAPVREVVQLLTARARERGVALSMAYGAGPTPLVLDGEAVRRVLTDLILNAIEAFSLPEGRSGEAAVHVSSFRAEWLDGRAAVRYVVRDNGPGLPMRLRPERREEAVAALLAGCLAGHGDLSPSVVPSQGEDCAPVDAAGTGKGTGTGMGALSAEASTGTHPVADVAMGGGDAALQLSPVSDDGIVLGGGGGASVFPSPGDDPARWGVDAVTGEALRGRLQTTKQGGSGVGLLTVRRIVHELGGEFRLGDAEGGGCEATVALPVAHS

SEQ ID NO: 13095 - protein, 859 aa, Vibrio harveyi
MTTTRSNIKKRRSLATLITKIIILVLAPIILGIFIQSYYFSKQIIWQEVDRTKQQTSALIHNIFDSHFAAIQIHHDSNSKSEVIRDFYTDRDTDVLNFFFLSIDQSDPSHTPEFRFLTDHKGIIWDDGNAHFYGVNDLILDSLANRVSFSNNWYYINVMTSIGSRHMLVRRVPILDPSTGEVLGFSFNAVVLDNNFALMEKLKSESNVDNVVLVANSVPLANSLIGDEPYNVADVLQRKSSDKRLDKLLVIETPIVVNAVTTELCLLTVQDNQSVVTLQIQHILAMLASIIGMIMIALMSREWIESKVSAQLESLMSYTRSAREEKGFERFGGSDIEEFDHIGSTLESTFEELEAQKKSFRDLFNFALSPIMVWSEESVLIQMNPAARKELVIEDDHEIMHPVFQGFKEKLTPHLKMAAQGATLTGVNVPIGNKIYRWNLSPIRVDGDISGIIVQGQDITTLIEAEKQSNIARREAEKSAQARADFLAKMSHEIRTPINGILGVAQLLKDSVDTQEQKNQIDVLCHSGEHLLAVLNDILDFSKIEQGKFNIQKHPFSFTDTMRTLENIYRPICTNKGVELVIENELDPNVEIFTDQVRLNQILFNLVSNAVKFTPIGSIRLHAELEQFYGAENSVLVVELTDTGIGIESDKLDQMFEPFVQEESTTTREYGGSGLGLTIVKNLVDMLEGDVQVRSSKGGGTTFVITLPVKDRERVLRPLEVSQRIKPEALFDESLKVLLVEDNHTNAFILQAFCKKYKMQVDWAKDGLDAMELLSDTTYDLILMDNQLPHLGGIETTHEIRQNLRLGTPIYACTADTAKETSDAFMAAGANYVMLKPIKENALHEAFVDFKQRFLVERT

SEQ ID NO: 13096 - protein, 328 aa, Ralstonia metallidurans CH34
MGLLVNGEWQDRWYDTTSTGGRFVRKNAAFRNWVTCDGAAGPTGIGGFRAEVGRYHLYVSLACPWAHRTLIMRELKGLEDMISFSVVHWLMREEGWTFADGPGVIPDSVSGARVLHQVYTLANPNYTGRVTVPVLWDRQQATIVSNESSEIIRMMNSAFDRLGARLGDYYPLDLRAQIDAINARIYDTVNNGVYKAGFATSQAAYEESVRSLFDTLDWLEAQLSQQRWLVGNRFTEADIRLFTTLIRFDAVYVGHFKCNLRRIVDYPALSAYLRDIYQRPGIAGTVDFLHIKGHYYESHRMLNPTGIVPLGPMLDLSSPHGRERLGQD

SEQ ID NO: 13097 - protein, 588 aa, Mycobacterium leprae
MPGRDGETQPASCGRPSRALHPASVSNGGCRHPVTLASFLIRRNHFAMAKTIAYDEEARRGLERGLNSLADAVKVTLGPKGRNVVLEKKWGAPTITNDGVSIAKEIELEDPYEKIGAELVKEVAKKTDDVAGDGTTTATVLAQALVKEGLRNVAAGANPLGLKRGIEKAVDKVTETLLKDAKEVETKEQIAATAAISAGDQSIGDLIAEAMDKVGNEGVITVEESNTFGLQLELTEGMRFDKGYISGYFVTDAERQEAVLEEPYILLVSSKVSTVKDLLPLLEKVIQAGKSLLIIAEDVEGEALSTLVVNKIRGTFKSVAVKAPGFGDRRKAMLQDMAILTGAQVISEEVGLTLENTDLSLLGKARKVVMTKDETTIVEGAGDTDAIAGRVAQIRTEIENSDSDYDREKLQERLAKLAGGVAVIKAGAATEVELKERKHRIEDAVRNAKAAVEEGIVAGGGVTLLQAAPALDKLKLTGDEATGANIVKVALEAPLKQIAFNSGMEPGVVAEKVRNLSVGHGLNAATGEYEDLLKAGVADPVKVTRSALQNAASIAGLFLTTEAVVADKPEKTAAPASDPTGGMGGMDF

SEQ ID NO: 13098 - protein, 428 aa, Streptomyces coelicolor A3(2)
MSPRHAAGPAPGERAAVVTGLGLTTSLGGDVPSTWRALLDGGCGVERVDFGEPAGPAQVYLAAPAAVDPGTVLSSAKAAHCDRSAQFALVAAREAVRDAGFPDPSALAGDGSRVAVVVGVGLGGLTSVLEQDHRLRTQGAGRVSPRTIPVMLPNHAAAEVGLMVGAKAGVHAPVSACAAGAEALAQALGMIRDGRADIVVAGGTEAALHPLVLAGFARLRALSRRHDDPKGASRPFDADRDGFVMGEGAGMLVVESAAHAAARGARVHGRLTGAGITNDSHHVAQPAPGGPGCAAAVDAALRDAGLVPEQIQHVNAHATATPLGDLGEAQALHSVFAKGVDDVTVSATKGAFGHTLGAAGAIEAVLTVLALRDRTAPPACSLERVDPEIGLNVVGRDPATLPCGPLAAVSTSMGFGGHNVALAFADAS

SEQ ID NO: 13099 - protein, 613 aa, Xanthomonas axonopodis pv. citri str. 306
MCGIVALRSFVAEAPLQALAERALDALSRRGPDAQGLLCLEQPVPTALGHRRLAILDLSAAATQPMRCAETGNVLVFNGEIYNFLELRRELEGLGHQFRTDSDTEVILHGWRAWGEGLFPRCNGMWALVLLEQASGDLIYCRDRLGVKPLYLHHDGRQLVLASEIRAIAASLGGYPPPNPAAVFDFLVTGLSDHTSDTFYAGIRAVPPGWLYRVSPAGHSRRTPYHQWPLPGAVAPLDAQATMELLEDSTRLRLRSDAPTVSLLSGGLDSSILTTLSVQAGALPRTCFAGAFTYGYDDTEQAGFDETEAAASLMQTLGQSERHFVHRARAIPDEEELLALVAAQEEPFCTPSILASFRMYRAIRAAGYKVVLNGEGADELFGGYVRLYLALSARSALHQARLPTAIRLLSTGAVDPRLLLNRLAWDLPAGALGALLRRQRPSVACMSSALWHDQAARLQSLQVDRRVDIEARLRRDVLSTNLPMVLRMTDRNSMSAGIEVRAPFLDYRVVERALSTPALQRMGDYHGKAMLRHAFAERLPARVTTQRKSTGFGHAEQFLVDRMPLQQALATLPEGVNELLNVARLRREFASGRSHSTLWFAVSVALWYRSVYA

SEQ ID NO: 13100 - protein, 230 aa, Ralstonia eutropha JMP134
MIDVYSWATPNGHKVHIMLEECGLEYKVHPINIGAGDQFSEAFLKISPNNKIPAIVDPDGPDGEPISLFESGAILLYLAGKTGKFLPEDVRGKYEALQWLMFQMGGVGPMLGQAHHFRIYAPEKIEYAVNRYTNEAKRLYGVIDTQLSRHEWLAGDQYTIADIATFPWLRSWHNQGVELDEYPNLKRWFNTIAERPAVKRGVEVLASARKPLQDDKAREILFGATQYKRH

SEQ ID NO: 13101 - protein, 79 aa, Glycine max
  misc_feature (68)..(68): Xaa can be any naturally occurring amino acid
  unsure (1)..(79): unsure at all Xaa locations
PCLCLAYGHGVLRQTDPKYTCGREFAFKHSANDPYFQLRSKTKDGDASVFTKLGKVKNPLPNVDAHSXMLLNLYGLTLE

SEQ ID NO: 13102 - protein, 514 aa, Triticum aestivum
  misc_feature (165)..(165): Xaa can be any naturally occurring amino acid
  unsure (1)..(514): unsure at all Xaa locations
MQPDASGNAGGGANPRPKLPPVAAAPAPSGRPASVLPHKTANVRDHYRIGKKLGQGQFGTTYLCVAKEDGGEFACKSIPKRKLLCREDYEDVWREIQIMHHLSEHPNVVRIRGAYEDALFVHIVMELCAGGELFDRIVAKGHYTERAAAQLIRTIVGVVEACHSXSAVMHRDLKPENFLFASTAEDAPLKTTDFGLSMFYKPGDKFSDVVGSPYYVAPEVLQKCYGPEADVWSAGVILYILLCGVPPFWAETEAGIFRQILRGKLDFESEPWPSISDSAKDLVRTMLCRDPTKRLSAHEVLCHPWIVDDAVAPDKPIDSAVLSRLKHFSAMNKLKKMALRVIAESLSEEEIGGLRELFKMIDADNSGTITFDELKDGLKRVGSELTEHEIQALMDAADIDNSGTIDYGEFIAATLHMNKLEREENLVSAFSFFDKDGSGFITIDELSHACRKFGLDDVHLEDMIKDVDQNNDGQIDYSEFTAMMRKGNAGATGRRTMRNSLNLNLGDILNPSNS

SEQ ID NO: 13103 - protein, 205 aa, Oryza sativa
  misc_feature (16)..(16): Xaa can be any naturally occurring amino acid
  misc_feature (186)..(186): Xaa can be any naturally occurring amino acid
  unsure (1)..(205): unsure at all Xaa locations
AIVCTRIGIWRDVRTXELFASVIERGQKIDENVQREIMNHRSLRHPNIVRFKEVVLTPTHLAIVMEYAAGGELFERICSAGRFSEDEARFFFQQLISGVSYCHSMQICHRDLKLENTLLDGSIAPRVKICDSGYSKSSVLHSQTKSTVGTPAYIAPEVLARKEYDGKVGDVWTCGVTLYVMLVGAXPFEEPVETRKTFGEQLLGI

SEQ ID NO: 13104 - protein, 260 aa, Zea mays
  misc_feature (216)..(216): Xaa can be any naturally occurring amino acid
  misc_feature (247)..(247): Xaa can be any naturally occurring amino acid
  unsure (1)..(260): unsure at all Xaa locations
FGTRPRTVPQRQPWCSRTRAPAGTAQQIISDELMLDGNPRLNLASFVTTWMEPECDKLIMDSINKNYVDMDEYPVTTELQNRCVNMIAHLFNAPIKEDETAIGVGTVGSSEAIMLAGLAFKRKWQNKRKEQGKPCDRPNIVTGANVQVCWEKFARYFEVELKEVKLSEGYYVMDPVKAVEMVDENTICVAAILGSTLTGEFEDVKQLNDLLTEKNXETGWDVPIHVDAASGGFIAPFLYPELEWDFXLPLVKSINVSGHK

SEQ ID NO: 13105 - protein, 94 aa, Streptococcus bovis
MLKPLGDRVVLKVEEEKEQTVGGFVLAGASKERTQVATVVAVGDGARTLTGELVAPSVAAGDKVIIENGVGIEVKDDDNTVTIVREADILAILA

SEQ ID NO: 13106 - protein, 548 aa, Spirodela punctata
MGVCFSKASKPSGNGYQPPPPQPYKPPPPPAARPAQPSVQIPQTHHTQQRQQSDHQSASQAAPSPAKQHLPSPRNSPAAAVSAATPATVLGKPFEDVKAKYTIGKVLGRGQFGVTYLCTCNSTGAKYACKSISKRKLVNRNDREDVKREIQIMQHLSGQENIVEFKGAYEDRHSVHVVMELCAGGELFDRIIAKGHYSERAAAAMCRSIVNVVNICHFMGVMHRDLKPENFLLSTKDPGAALKATDFGLSVFIEEGKVYRSIVGSAYYVAPEVLMRSYGKEIDVWSAGIIVYILLSGVPPFWGETEKKIFDSIMKDDIDFQSDPWPSISASAKDLVSKMLTRDPKKRITAAQVLDHPWIRVDGEASDKPIDSAVLSRMKQFRAMNKLKKMALKVIAESLSEEEIKGLRQMFQNMDTDQSGTITYEELKTGLARLGSRLSEAEVKQLMDAADVDGNGSIDYIEFITATMHRHKLEREEHLYSAFSYFDKDNSGYITRDELKQALEEHGMGDADSIREIISEVDTDNDGRINYDEFCAMMRSGTHPPGRP

SEQ ID NO: 13107 - protein, 411 aa, Arabidopsis thaliana
MALLLNSTITVAMKQNPLVAVSFPRTTCLGSSFSPPRLLRVSCVATNPSKTSEETDKKKFRPIKEVPNQVTHTITQEKLEIFKSMENWAQENLLSYLKPVEASWQPQDFLPETNDEDRFYEQVKELRDRTKEIPDDYFVVLVGDMITEEALPTYQTTLNTLDGVKDETGGSLTPWAVWVRAWTAEENRHGDLLNKYLYLSGRVDMRHVEKTIQYLIGSGMDSKFENNPYNGFIYTSFQERATFISHGNTAKLATTYGDTTLAKICGTIAADEKRHETAYTRIVEKLFEIDPDGTVQALASMMRKRITMPAHLMHDGRDDDLFDHYAAVAQRIGVYTATDYAGILEFLLRRWEVEKLGMGLSGEGRRAQDYLCTLPQRIRRLEERANDRVKLASKSKPSVSFSWIYGREVEL

SEQ ID NO: 13108 - protein, 132 aa, Glycine max
VCDLQVVVDERKKKRKQSNRESARRSRMRKRKHLDELTKQVSQLAKGNGEILGTIDITTQHYLNVEAENSILRAQMEELSQRLQSLNDIVDGIINLTNATTAYERDCYLTSAQNITTKNNTLCLNQQAVFQW

SEQ ID NO: 13109 - protein, 425 aa, Xylella fastidiosa Ann-1
MMSNSPQTPLVTRQRLSEVRYEIRGELARRARELEAEGRKLIKLNIGNPGAFGFRAPEHLQRAIADDMGRTDPYTHQQGLPIAREAIAAAYARRHYPDADADRVFVGNGVSELIDLSLRALLNPGDEVLVPSPDYPLWSAATILNDGRPVYYRCAPENGFQPDAVEIETLVSSRTRAIVLINPNNPSGANYSQELLERIAAIAVKHHLLLLVDEIYDQILYDGAVFVPVAPLAGTHPCITFSGLSKVHRACGWRVGWALLSGSSIQVDNLRNAMDLLGALRLCANVPGQYAIDAAVNGPDTITPLCSPGGPLYETRRAVIDACAASEHLSLVVPAGALYAFPSVVGPAARHFDDYAFALELMNEEGVLVVPGSSFNVPYRDHFRVTLLPDAGLIREVFSRIDRALSRRAEVAEKVVPLKLRSAAA

SEQ ID NO: 13110 - protein, 251 aa, Nicotiana tabacum
MIRNPVVSLMDEPKTVKFSQHIVTKNKHVPEQNENSNFHSKFLQRVVRIILTDADATDSSDDEGQDTVRRVKRHVTEINLMPSPNLICEKKRRLVSPDTDVTRRKKFRGVRQRPWGRWAAEIRDPTRGKRVWLGTYDTPEEAAIVYDAAAVKLKGPDAVTNFPKVLTADITEMESVTDRGEKSENDFALSPTSVLRNDDFTPSDDLGFCEVDAFGFDVDSLFRLPEFGLSEKYYGDEFGEFDFDDFALEAR

SEQ ID NO: 13111 - protein, 459 aa, Cryptococcus neoformans var. neoformans
MGKDKLHVNVVVIGHVDSGKSTTTGHLIYKCGGIDKRTIEKFEKEAQELGKSSFKYAWVLDKLKAERERGITIDIALWKFETPRYQVTVIDAPGHRDFIKNMITGTSQADCAILIIATGIGEFEAGISKDGQTREHALLAFTLGVRQLIVACNKMDTCKWSEDRFNEIVKETNGFIKKVGYNPKAVPFVPISGWHGDNMLEETTNMPWYKGWTKETKSGVSRGKTLLEAISASRPHTRPTDKPLRLPLQDVYKIGGIGTVPVGRVETGVIKAGMVVKFAPTNVTTEVKSVEMHHEQIPEGLPGDNVGFNVKNVSIKDIRRGNVCGDSKNDPPMEAASFNAQVIVLNHPGQIGAGYTPVLDCHTAHIACKFAELIEKIDRRTGKVMEAAPKFVKSGDAAIVKLVAQKPLCVETYADYPPLGRFAVRDMRQTVAVGVIKSVDKTEKGGKVTKAAEKAAKKK

SEQ ID NO: 13112 - protein, 89 aa, Glycine max
MANRWLRPEVYPLFAAVGAAVGICGFQLVRNICINPEVRVNKEGRKAGVLENFAEGEKYAEHFLRKYVRNRTPEIMPSINSFFADPSRN

SEQ ID NO: 13113 - protein, 485 aa, Arabidopsis thaliana
  misc_feature (53)..(53): Xaa can be any naturally occurring amino acid
  misc_feature (215)..(215): Xaa can be any naturally occurring amino acid
  misc_feature (226)..(226): Xaa can be any naturally occurring amino acid
  misc_feature (234)..(234): Xaa can be any naturally occurring amino acid
  misc_feature (358)..(358): Xaa can be any naturally occurring amino acid
  unsure (1)..(485): unsure at all Xaa locations
MAEKITRETSLPKERSSPQALILGRYEMGKLLGHGTFAKVYLARNVKTNESVXIKVIDKEKVLKGGLIAHIKRGGAVLRRVRHPNIVQLFEVMATKAKIYFVMEYVRGGELFNKVAKGRLKEEVARKYFQQLISAVTFCHARGVYHRDLRPENLLLDENGNLKVSDFGISAVSDKIRQDGLFHTFCGTTAYVALEVLDREGYDDAKVDIWSCGVXILFVLMIGYLXVNDRGVLXLYRGLQGELGRRGENEATSFFELWRRIRETFTSPKLCRILVKKGLKHIKSNVEDDKLCNVVDDDELESDSVESDRDSAASESEIEYLEPRRRVGGLPRPASLNAFDIISFSQGFDLSGLFDDDXGEGSRSAPRAPVPKIISKLEEIAKVVSFTVRKKDCRVSLEGSRQGVKGPLTIAAEIFELTPSLVVVEVKKKGGDKTEYEDFCNNELKPKLQNLTADDVVAEPVAVSAVDETAIPNSPTISFLPSDTE

SEQ ID NO: 13114 - protein, 288 aa, Mesorhizobium loti MAFF303099
MGVFKAAAVQMRSGESPERNAVDLERLVREAAGQGATYIQTPEMTGALIRDKQARAASFTSEDKDIIVATARGLARELGVFLHIGSTAILRADGKLANRALLFGPDGATLATYDKIHMFDVDLDNGESWRESAAYEPGTEAVVTEVAGARLGFAVCYDLRFPQLFRTEALAGADVLTVPAAFTRQTGEAHWHVLLRARAIENGAFVVAAAQGGLHEDGRETYGHSLIVDPWGRVLAEAAHDEPAVVVAEIDPAQSLAARKKIPNLKNARDFTINAGAVDAPRLRGAAS

SEQ ID NO: 13115 - protein, 670 aa, Synechocystis sp. PCC 6803
MVVATQSLDELSINAIRFLAVDAIEKAKSGHPGLPMGAAPMAFTLWNKFMKFNPKNPKWFNRDRFVLSAGHGSMLQYALLYLLGYDSVTIEDIKQFRQWESSTPGHPENFLTAGVEVTTGPLGQGIANGVGLALAEAHLAATYNKPDATIVDHYTYVILGDGCNMEGISGEAASIAGHWGLGKLIALYDDNHISIDGSTDVAFTEDVSKRFEAYGWHVLHVEDGNTDLAAIAKAIEEAKAVTDKPSMIKVTTIIGYGAPNKSDTAGIHGAALGTDEVAATRKNLGWDYAPFEVPQEVLDYTRKAIERGASYEAEWNQAFAQYKTKYPTEAAAFERQLSGALPEGWDKTLASFTPDQKGLATRKYSEECLNALAPVLPELIGGSADLTHSNLTELHCSGDFQKGAYQNRNVHFGVREHAMGAICNGIALHGSGLLPFGATFLIFTDYMRAAIRLSALSEAGVIWVMTHDSIGQGEDGPTHQPIEVLASLRAIPNLTVIRPADGNETSGAYKVAIAKAKENAPTLLSLTRQAVPNLPGTSIDAVAKGAYTIVDSEGVPELILIGTGSEVQLCVAAAEKLAAQGKKVRVVSMPSWELFETQDAAYKESVLPKAVTKRLSVEAATNFGWHKYVGTEGDTVSIETFGASAPGGVCLEKFGFSVDNVLAKAKTLLS

SEQ ID NO: 13116 - protein, 416 aa, Synechocystis sp. PCC 6803
MANLEKKRVVVTGLGAITPIGNTLQDYWQGLMEGRNGIGPITRFDASDQACRFGGEVKDFDATQFLDRKEAKRMDRFCHFAVCASQQAINDAKLVINELNADEIGVLIGTGIGGLKVLEDQQTILLDKGPSRCSPFMIPMMIANMASGLTAINLGAKGPNNCTVTACAAGSNAIGDAFRLVQNGYAKAMICGGTEAAITPLSYAGFASARALSFRNDDPLHASRPFDKDRDGFVMGEGSGILILEELESALARGAKIYGEMVGYAMTCDAYHITAPVPDGRGATRAIAWALKDSGLKPEMVSYINAHGTSTPANDVTETRAIKQALGNHAYNIAVSSTKSMTGHLLGGSGGIEAVATVMAIAEDKVPPTINLENPDPECDLDYVPGQSRALIVDVALSNSFGFGGHNVTLAFKKYQ

SEQ ID NO: 13117 - protein, 128 aa, Glycine max
LGESEKCVEDDESRVPIHIVTAASQLPVDFLEPSPQSKLVIDFDCEGVDLCRKGTLCVMQLAFSDAVYLVDAIEGGEELSIACKLALESNYITKVIHDCKRDSEALYFQFGIKLNNVVDTQELMKHWV

SEQ ID NO: 13118 - protein, 384 aa, Pyrobaculum aerophilum str. IM2
MKEGRLVLYTGLGWMFDALDVLILSYLLVAMSNELKLDSQAKNWIVLANNLGMLIGAMLFGRLADRVGRKKVFMSTLLTYSIATAISAFARNWQEFAVIRFFVGLGLGGELPVVATYVSENSPPERRGRNVVLLESFWSLGAILAAAISLFLFTTIGWRSSLLLMGATAFYVFVIRFTLPESQRWLELREQRGGLFETRIIGEFVRRLTLVGAVWFLLAFGYYGAFLWLPTMLVRERGFTQVGTYEFMFLTTLAQLPGYFSAAYLVEKAGRRPVGSLYFALSALSAAFFISSNSYAELLLWALALNFFNLGVWGVVYAYTPELFPTSVRGIATGLAGSAARIGMILGPLLYPLYASTALLIIAIAWLVASALILLLPETRGRVV

SEQ ID NO: 13119 - protein, 190 aa, Populus balsamifera subsp. trichocarpa x Populus deltoides
MATSTTNPALDPDLGQPDNPNHEFAQFGAGCFWGVELAFQRLHGVVKTEVGYSQGNVPDPTYKLVCTKTTNHVEVVRVQFDPEVCPYTNLLSLFWSRHDPTTLNRQGGDVGTQYRSGIYYYNEAQAKLAQESKEAKQLGLTDNTVVTEILPAKRFYRAEEYHRQYLEKGGGRSAKQSAEKGCNDPIRCYG

SEQ ID NO: 13120 - protein, 485 aa, Medicago truncatula
MYPSLTDSVGGSSSLSSSSSGPILIPKRFVWPYGGTRVYLIGSFTRWSEHIPMSPMEGCPSVFQVICSLMPGYHQFKFNVDGQWRYDEQQPFVNGNYGIVNTIYLVREPDILPAILSAETSSRSHMEVDNDVFGHAEANPRMSPSDLEVSRRRISKFLSEHTAYDLLPESGKVIALDVNLPVKQAFHVLYEQDVSMAPLWDFCKSQFVGVLSAMDFILILKELGTHGSHLTEEQLETHTIAAWKEGKSKQRRALDNNEGSNPHCFVHAGPKECLKDVALKVLQNKVSTVPIISLEDGSFPQLLHLASLSGILKCICRHFEHSAGSLPILQLPIASIPLGTWVPNVGDPNGQPLIRLRPNASLGDALSMFVQAKVSSIPIVDENDSLLDIYSRSDITALAKDKAYARISLDETNIHQALILGQDANSPYGLNNGHRCHMCLRSDSLHKVMERLAKPGVRRLVIVEAGSKRVEGIISLSDVFRFLLG

SEQ ID NO: 13121 - protein, 641 aa, Xanthomonas axonopodis pv. citri str. 306
MSDFAGVWRLDGAPVAPGDIQRLGQALDARGIGPVRVWQDGPVAIVHRQHVFTPQDADEAMPWVGASGAVLAADVRLAARQELASALQHPANVTLPDGVLLLEALQCWDTAALPRLHGCYALALYRPDRHRLLLARDPIGLRSLFVHRGPHLIAFATRLRALLALPQVPKDLDERALADKLIMDRARPERTIYRAIDRVPMAHAVVLTPEATHCQRWWSPPEAGSLRLRNDAEVEAAAAEVLDRAVADALRARGPVATCLTGGLDSGSITLSAARQQAPSPLLVLTRQPLPATAAATATHYYDESPRARRLAASHPGIDWHLVGDDDADWGEHDPACWWREGAQPVRSPSNMAWFFPLYRFLHARGSQVMLGGELGNAFFSYDGLLRLPQLARQRQWRVLAGQVGALAGSLGLSRRKTVQRYLLRPFAPVALLRLWHGLPAAVWEAQAALQPALAQSLGMQQSLDRSRYRLRLGGGHTSLPTFREWMLGDAGPMDLVNTLRAVSGVDTRYPLADRRVIEFFGSLPLDQFLRDGVSRSLPRRLLAARGAPPEIHANRAVGVQQGDWFARLNAQRDALHAQLSQARTSPLANRVVDLQRLQALLDHWPQDAAAAEARRFEYLQLLASGLQMAGFLAWHERGGA

SEQ ID NO: 13122 - protein, 119 aa, Triticum aestivum
MAKSSFKLEQPLERRQAEANRIREKYSDRIPVIVEKAGKSDIPDIDKKKYLVPADLTVGQFVYVVRKRIKLSAEKAIFIFVKNTLPPTAALMSAIYEENKDEDGFLYMTYSGENTFGLL

SEQ ID NO: 13123 - protein, 513 aa, Triticum aestivum
MVLPIRPVEDGSISSWVEREGERTEYSRPQLLEDIWCHIHSLLPMRDAARAACVSRAFLSLWRCHPNLTFSMEALGMNMNPCGEDEIGNFTKKVDHILKNRSRIGVKTLRIVFRYSNAMVSNVDRWLQTAVTPEIEELTVQLTPGIEELTVQLTPGIEVLTVQLSSASGTYYNFPWSLLANGNGNSMQHLRLSHCVFSPSVELGLKKMTRIDLCYVCITEEQLGCLLHNCFVLQWMRLSQCSPLTCLKIPFHLQQLRYLKVFECRSLQVIGIEAPNLVSFNFHDSHQVQISFEVALQLKKLGMSHPGAVCYARADLPLSLPNVEDLSLSSCSEMVDTPMLPSKFLHLKYLSVSLCTVTFSPAYDYCSLISFFDAAPSLETFFVNVLQKDMKHESIVGDHSNLRQVPGHRHDNLKTVKIIGFSSAKSLVELTCHIIENATSLECLTLDTTRGHPWASCSSNSTGKCLLLHLDFLAEARKGLSAIRTYVEPKVPSRVKLNAVEPCRRCHDLEPTP

SEQ ID NO: 13124 - protein, 296 aa, Oryza sativa
MEMEMEMEELILHIRKEVEKGKLPADVAANLEELYYNYKDANPFTFPPYHKAVREPFDYYMFGQNYIRPLVDYRNSYVGNISIFQDMEQKLQQGHNVVLMSNHQTEADPAIIALLLERSNPWISENIVYVAGDRVVTDPLCKPFSMGSGGSQIIWIAPSGGRDRPDPLTGEWHPAPFDASAVDNMRRLLEHSGVPGHIYPLSLLCYEVMPPPQKVEKEIGEQRVISFHGVGLSVTEEIKYSDITVHTQNVDECREKFSESLYNSVVDQYNALKSAIFRGRGADSSDSAISLSQPWR

SEQ ID NO: 13125 - protein, 94 aa, Streptococcus bovis
MLKPLGDRVVLKVEEEKEQTVGGFVLAGAGKERTQTATVVAVGTGARTLTGELVAPSVAAGDKVIIENGAGVEVKDGEDTVTIVREAEILAVLA

SEQ ID NO: 13126 - protein, 493 aa, Schizosaccharomyces pombe
MAPQFKRPELFGFDKSHAQSFVQGKWISSPNNKTFEVDNPATGEIIGKVADVSVEETKKAISAANEAFKTYKNFTHVQRSQLLERWAELIMENKDDLVKMLTLENGKPLSQAEMEVTTCSGYLKWYAAEAVRTFGDVAPSSLQSQNFLISIKQPVGVSALITPWNFPAAMIARKGGAALAAGCTAIFLPAFRTPYVCLGLVRLAQEAGFPDGVLNVITSSDASAHGKELTTNPIVRKVSFTGSTNVGKILMGQSASTIKKVSMELGGNAPFIVFPDFPIDQAVESFCTIKFNSCGQVCVCPNRVYVHKNVYDEFVSKLTEKVKTIKVGDGFDSSSAVGPLISQDGCKKVSKHIEDAVSKGAKITVGGKEISSSKGYFFEPTVLSGVTQDMLVASEETFGPLASVFKFDDTEEVIEWANDSDVGLAGYVFTNNLSTMIHVAKELEVGLVGANIEMVDEPFISFGGIKQSGFGKEAGRLGVQEFMVVKEINLKTL

SEQ ID NO: 13127 - protein, 245 aa, Thermobifida fusca YX
MPYHPTTTPPAAILFSVDDTLVDDYNAVSQGVRVLMERLGHPSFSAARVLWDVQGILSTSAYRAGRIPLAEKRRQLVRALATQAGHSHISDQHCDELYQRYLDAHRAAWRTFDDVAPTLTQLAQRNIRLGVITNGDQNRQHDKLSTLNLAHHFGAVVCAEAAGTSKPDPRIFLLACQQLGVAPHQTWYVGDQMYEDAIGALNAGLYPVLCDRHRLLPATEITTIHTLTELSALTTGTRSPGASLL

SEQ ID NO: 13128 - protein, 602 aa, Deinococcus radiodurans R1
MTPRSGPRPAASARRDARQRDPRQLRRLLAYARPYRLPFVLGVLATLISSGLGLVFPRLFGTLIDASFLKVGSTDTGPLDRTVLSLLGIFALSACFGAAQAYLLARVGAGVVADLRRALFSHLLSLSPRFFGNHRTGDLTSRLTSDVGTVQAVTSTALAQLASQGFTLIGSVLLLVQTSPRLSLLTLAIIPLVIGTAVTIGRRIRRVSREVQDAVAAANGQAEEAISGVRVVQSFTAEGLEEERYGQGVLASFRAALRRARLQALMTGVMSFLTFGALALVLWFGGRQVMSGALTPGNLVTFLFYALQVGGTVAALTGVFNQFQEALGASSRIFELLDERSDLPGPAAPRPLSRAEGRVRFVDVGFTYAGAPALQDITFDVPAGQVVALVGPSGAGKTTLVNLIPRFWDVTAGRVEVDGHDVRAYALADLRRQVGLVPQETLLFSGTVAENILYGRPGASQAEVEAAAHAAHAHEFICELEGGYGAVVGERGVKLSGGQRQRVAIARAILKDPRILILDEATSALDNESEALVQAALERLMVGRTTFVVAHRLSTIRSADRILVMDAGRVVADGTHEGLMAAGGLYRELYELQFRQQQEARR

SEQ ID NO: 13129 - protein, 309 aa, Clostridium tetani E88
MAKISILGSINMDIVLKVDRMAKVGETLLTRSLDKVAGGKGANQGVAAARLGSKVYMIGKLGKDDNGDILYRNIENDNINVEYILKDDKEPTGMAIVTVDKDGNNSIVVVSGANMSLKKEDIYQFKEAIKDSNILITQFETPIDVAEDAFKLAKSFGVTTILNPAPAKEITENLLKNTDIIIPNEMEAFEITKIKIKNENDIKKSAQVFLERGIKFVIITLGEKGAAIISKYKFEIIPAYKVNAIDTTAAGDSFIGALAHKLGEKELSFENIKEGVLYGNKVSSIVVQKEGAQSSIPYLSEVKEVFKEN

SEQ ID NO: 13130 - protein, 252 aa, Thermobifida fusca YX
MKRFEGKVAVVTGASRGIGFAVARRIVDEGGRVVVTARGAEALAEAVTQLGGPEHALGIAGRAHDQAHRAEVVQRTLDTFGRVDVLVNNTGINPVFDSILKVDEAAMAKIFEVNVIAAVGWVREVYNAWMGEHGGAIVNVASLAGQHPSPGIGIYGASKAALINLTQQLAYELAHRRIRVNAVAPAVVKTRFAEALYAENEEKVAAGYPLGRLGEPDDIAAAVAYLASSDASWVTGQVITLDGGKTLRAGVE

SEQ ID NO: 13131 - protein, 465 aa, Mycobacterium avium
MTSHYDVVVLGAGPGGYVAAIRAAQLGLSTAIVEPKYWGGVCLNVGCIPSKALLRNAELAHIFTKEAKTFGINGEATFDYGAAFDRSRKVAEGRVAGVHFLMKKNKITEIHGYGRFTDPHTLAVELNDGGTETVTFDNAIIATGSSTRLVPGTSLSANVVTYEEQILSRELPESIIIAGAGAIGMEFGYVLHNYGVEVTIVEFLPRALPNEDADVSKEIEKQFKKLGVKILTGTKVESISDDGSQVTVVVSKDGNSQELKAAKVLQAIGFAPNVEGYGLEAAGVALTDRKAIGITDYMRTNIEHIYAIGDVTGKLQLAHVAEAQGVVAAETIAGAETLALGDYRMMPRATFCQPNVASFGLTEQQARDEGHDVVVAKFPFTANGKAHGVGDPSGFVKLIADAKYGELLGGHLVGHDVSELLPELTLAQKWDLTATELARNVHTHPTMSEALQECFHGLTGHMINF

SEQ ID NO: 13132 - protein, 251 aa, Zea mays
  misc_feature (187)..(187): Xaa can be any naturally occurring amino acid
  unsure (1)..(251): unsure at all Xaa locations
MEPSSQPQPMMGVGSQPYPAAAPYVPVPGSLAVPPGSQPAAAFPNPTQLSAQHQMVYQQAQQFHQQLQQQQEQQLREFWTTQMDEIKQANDFKIHTLPLARIKKIMKADEDVRMISAEAPVVFAKACEVFILELTLRSWMHTEENKRRTLQKNDIAAAITRTDIYDFLVDIIPRDEMKEGGLGLIPXVGLPPAMGAPADHGSHPYYYVPAQQVQGAGMMYGGQQGHPVTYMWQTPQGQAAEPPEEEQQQSA

SEQ ID NO: 13133 - protein, 428 aa, Pseudomonas aeruginosa
MADKKAQLIIEGSAPVELPVLSGTMGPDVVDVRGLTATGHFTFDPGFMSTASCESKITYIDGDKGVLLHRGYPIEQLAEKSDYLETCYLLLNGELPTAAQKEQFVGTIKNHTMVHEQLKTFFNGFRRDAHPMAVMCGVIGALSAFYHDSLDITNPKHRQVSAHRLIAKMPTIAAMVYKYSKGEPMMYPRNDLNYAENFLHMMFNTPCETKPISPVLAKAMDRIFILHADHEQNASTSTVRLAGSSGANPFACIASGIAALWGPAHGGANEAVLRMLDEIGDVSNIDKFVEKAKDKNDPFKLMGFGHRVYKNFDPRAKVMKQTCDEVLQELGINDPQLELAMKLEEIARHDPYFVERNLYPNVDFYSGIILKAIGIPTSMFTVIFALARTVGWISHWQEMLSGPYKIGRPRQLYTGHTQRDFTALKDRG

SEQ ID NO: 13134 - protein, 894 aa, Oryza sativa (japonica cultivar-group)
MPPWWGKSFSKDAKKTTKENLIDTFHRLISPNDQKGSTKSKRSCRRGNDSSVEKSCRSTTVSRPTSPSKEVSRCQSFSADRPHAHPLPIPGVRPPVTRTVSDITESKPILEKRGKPPLLLPLPKPNRPPRRHGNSEVVSEIVVASPSSNCSDSDDHGDSQLQSPVGNDAENATLVTLKNKSSNARKECPGPITAKNMKEIHRPANQVHGSHILSTSPRGVAADSYQSNLQNPRPLVLDSAPNSLMSSPSRSPRRICPDHIPTSAFWAVKPHTDVTFVGSGQCSSPGSGQTSGHNSVGGDMLAQLFWQPSRSSPECSPIPSPRMTSPGPSSRVHSGSVSPLHPRSGGMAPESPTNRHDDGKKKQTHKLPLPPLSISHSSFHPNNSTPTSPISVPRSPGRTENPPSPGSRWKKGKLIGRGTFGHVYVGFNSDSGEMCAMKEVTLFLDDPKSKESAKQLGQEISLLSRLQHPNIVQYYGSETVDDKLYIYLEYVSGGSIHKLLQEYGQLGEQAIRSYTQQILSGLAYLHAKNTVHRDIKGANILVDPSGRVKLADFGMAKHINGQQCPFSFKGSPYWMAPEVIKNSNGCNLAVDIWSLGCTVLEMATSKPPWSQYEGIAAMFKIGNSKELPPIPDHLSEPGKDFIRKCLQRDPSQRPTAMELLQHPFVQKAVSLEKSVLSEPLEHLAVISCRSSAKMAAHTRNISSLGLEGQTIYQRRGAKFSSKHSDIRIRSNISCPVSPCGSPLLKSRSPQHSNGRMSPSPISSPRTTSGTSTPLSGGNGAIPFNHLKQSTYSNEGFAIPSRSPDDLFASRPTDPDLGQFIRVHQVSQGLQERVVSEADILSPQFGKRLGNVFDLRDKLSPSERFTHHAFVDHVKLNPSLDLTSGSPHLGLKHGN

SEQ ID NO: 13135 - protein, 443 aa, Anaerobranca gottschalkii
MQQEILYFIMVDRFFQGIKDKEFDDIDKSHPRKFHGGDIKGIIEKLDYIQELGATALWITPIFKNDPDGYHGYWAQDFFSVDPHFGILEDFKELVQKAHRKGLKVILDIVVNHTGKTHPLLKEKPHWFHPLVPIKDWDNQKEVEEKCLGMLPDLNQDLPEVSSYLINMCKWWIVQTGLDGFRIDTVKHVPREFWRKFCQEMKGVKEDIILLGEVWHPDPCYLAPYQKDGINSLVDFPLYYAITKVFAKDEPMDKISSILLQDHLYQNPYLLGTFIDNHDVPRFLSVVKDRGKERLKLALDFLFSVRGVPIIYYGTETGMDGGDDPHNRKDMDFEGDLELRKYVKDLITLRKKYLSLSLGSLKVLKVTDDGMVFIRECGEEQVVIFINNSFDSQTFVVRLPDELQRKSWKLVWGKGTYQYSYEIASCIIPPKSSAYFQLFAPEK

SEQ ID NO: 13136 - protein, 466 aa, Legionella pneumophila str. Paris
MSKIRINNMITRIKLFIASLLVFFIPVADAAQDLTNMPSLAPVLKNAMPAIVNVAVQGYLPNNMASGNADDDDGENSKQPSRIPEKGRKFESIGSGVIIDPKNGIIITNDHVIRNANLITITLQDGRRLKARLIGGDSETDLAVLKIDAKNLKSLVIGDSDKLEVGDYVVAIGNPFGLNSFGNSQSATFGIVSALKRSDLNIEGVENFIQTDAAINPGNSGGALVNAKGELIGINTAIISPYGGNVGIGFAIPINMVKDVAQQIIKFGSIHRGLMGIFVQHLTPELAQSMGYAEDFQGALVSQVNENSPAQLAGLKSGDVIVQINDTKITQATQVKTTISLLRAGSTAKIKILRDNKPLTLDVEVTDIKKHEQKLQSNNPFLYGLALRNFEQESPPHGNVVGVQVVGASETSAGWRAGLRPGDIIISANKTPVKDIKSLQAVAHDKKKQLLVQVLRGAGALYLLII

SEQ ID NO: 13137 - protein, 540 aa, Debaryomyces hansenii CBS767
MIHTIVTPAFSSTLSGVGATGLLKEHLLHPVVEEMASIDSDTGDLSTSPSSVSSDLPVTSKTMLQKAVEGLTQNVDPCSLKHHSDCLLDDFNESLSENSKLTMLPNYNISPTGNEEGNYLIIDVGGSTLRVAVIRIDPFVNESEDRSERVHIIIEKKWHISDSSKTIDSEFFRWVSSKVYETLEEQDLIRAEDLVINTGISWSFPLEQVSHNSGKIVYVGKGYTIASDIYNQDLKFILEKSLSDNYNITIDIKTIINDSLAVYSAGSFMDKHMKLALVLGTGFNMCCSLRTGNLHEQKKLNQDAILLNTELSLFGHTLISDLANKYDSKIDKRFDFKGGDLNFKPHMTVDPLTNDIFQPCELMTSGRYLSELTRLILIDLIEAKEIFAELDDNDLCPIFKNYEGITGQLMCYISEVEDEVLITEKVCEEFGWNKSLITLSDISKLKVVVNSVIQRAAFIVAITMVSFIKLLDHHNGCYGQDLLTIGYVGSVLLHFKNYRKLILKYVNDNEDIKRLNIKIDFKSIDNSSIVGAAIGAAYYK

SEQ ID NO: 13138 - protein, 658 aa, Zea mays
MEIKVMSLKLQLEKEAINNGTSPGQAHDIDIPPPRPKRKANSPYPRKSGLSSETPTKELPSDKSTKPNMPLSNENVLMAGDASLQKFQRKELSGKESCSEVLNLFRDAPSPSFSSVNKSSSNHGAPIEASKTKIRDMTIMENSSLNPNMQEDVKEINDQEMERLNGTQISSKCEHSHEGYLDISMQQMKLKPESVETTYVDKQTARASHSLAERTGTTSIPVTATEETHSVLTSDQVGINGSMNPSIHPMFPADPKFDSSATPQPFPHNYAAFAPMMQCNCNQDTYRSFTNMSSTFSSMLVSTLLSNPAIHAAARLAASYWPAAEGNTPIDPNQENPADGVQGRNIGSPPSMVSIVAATVAAASAWWATQGLLPFFAPPVAFPFVPAPSAAFPTVDVPRPSEKDRDCPAENAQIECQEARKQVQFEGLRVAASSESDGSGKGEVSLHTELKLSPAQNADATPTTGAGTNDAFRNKKKQDRSSCGSNTPSSSDVDAGNVPEEDNANEKAKQASCSNSSAGDTNHRRFRSNGSTSDSWKEVSEEGRLAFDALFSREKLPQSFSPPQAVDSKEVAKEEEDEVTTVAVDLNKNATSIDHDDLDTMDEPRASFPNELSHLKLKSRRTGFKPYKRCSVEAKENRVPASDMVGTKRIRLDSEAST

SEQ ID NO: 13139 - protein, 532 aa, Anaerobranca gottschalkii
MTSKILRVLLVFLLIFAIVGCTSDKQGPQETYKNIDDTVTHGQNYDGSFSREGIQEVTFENGVFYQIFVYNFRDSTGDGVGDLGGIIESLDYIESLGVNGIWLTPITHGASYHKYDVVDYYAVDPEFGTMEDFETLISEAHKRGIKVIIDLVINHTSDRHPWFKAAASDPNSKFRDYYIWAAHDEPRPGSGWRHLSGTTWFYLAHFWERMPDLNFDNPAVREEVKRIAKFWLDKGVDGFRLDAAKHLYSDPAKNHQFWNEFYQYLRTLKEDVYLVGEIWDSPEVIAPYFANGLNANFNFQIGGRVASSINSGVDNLGKELDRIYKLYREHNPDFIDAPFLSNHDTRRIMSEFDYDFEKMKMAANVLLSLPGDPYIFAGEEIGMISNDNHMDIREPFKWYKDTGPGQTTWRPNAFNSTEKWSPSVEEQDKDPNSLLNHFRKMVNLRNSHYPLRYGNDFQLVENNNLTVLSFIREYQGERVLVVHNFYSQPQTITVTVEGTFTNFKGTKSGANFTQRGNEITITIPPLSSMFIY

SEQ ID NO: 13140 - protein, 258 aa, Thermobifida fusca YX
MAVPTVTLNNGVTMPQLGFGTWQVGYDAVAAALAAGYRCFDTAEMYRNETAVAAALADSGLDRSDVFITTKLWNNHHGFQPALDAFHASRRRLGLDVIDLYLIHWPNASDAVNVETWRALEQLYAEGVVRAIGVSNFSPAQLAVLLEACDVVPAVNQIELNPSRPRLEERVYHARHGIATQAWAPLAKGGALLTHPVITEIAEAHQKTPAQVVLRWHLQHGILVIPRSATPERIRSNFAVTDFSLAPQEMAAVDALGA

SEQ ID NO: 13141 - protein, 118 aa, Zea mays
  misc_feature (82)..(82): Xaa can be any naturally occurring amino acid
  unsure (1)..(118): unsure at all Xaa locations
VLRKTDPRYSCQREFALKHLPEDPLFQLVSKLYEVVPPILTELGKVKNPWPNGDAHSGVLLNHFGLSEARYYTVLFGVSRSXGIGSQLIWDRALGLPLERPKSVTMEWLENYCKNKAA

SEQ ID NO: 13142 - protein, 410 aa, Methanosarcina mazei Go1
MFFNSMKAIILAAGEGLRCRPLTLTRSKVMLPVANRPILEHVISSLEKNEIKEIILVVGYEKERIMNYFEDGLNFGVNISYVEQKAQLGTAHAIEQAKKLIGPEDSEFLVLNGDNLVEPKTIADLLNNYEGDASLLTVRMEDTAGYGVVLKEKKKVTQILEKRPGGLSRLVNTGIYIFTPQVFETIEKTPISENGEYAITDTLQLMIDEGKMVTSIPTESKWLDAVHSWDLLKANATVLNASKNLKQEGELEEGVIIRGNVAIGKNTIIRSGTYIVGPVVIGENCDIGPNVVILPSTTIGDNVSIRSFTEIQNSIIMNDCRISSHGQISNSIIGSNNTLGPGFTAEEKENLEININCKVHKAPKLGTILGDDNRIGGRVLVKAGVMIAVNCQVESGNTIYRDLSRDSVVL

SEQ ID NO: 13143 - protein, 148 aa, Methanococcoides burtonii DSM 6242
MTDLTNQKRLAAKVLGCGVHRVWLNPEASSDIAVAITREDIRGLIASGSIKAEAVKGVSRGRARARDAKRRYGHRKGHGSRKGTKGARNPRKEQWMKKIRALRRKLKELRADGTLDKSAFCKAYRKAKGGEYKNLAHMETHLNIAKKE

SEQ ID NO: 13144 - protein, 397 aa, Methanosarcina mazei Go1
MKAVVLVAGKGTRMEPLTSDCPKVMLQVANKPVLEHILDSAVEAGIEGFVFITGYLEDQIKTHFGDGSRWGVSIEYVQQKEQLGTANAIGYARGHVEGAFLVLNGDMLIEKSDLQSLLERKEEAVICVKEVENPSDFGVLETEGERVIRIIEKPKNPPTKLANAGIYLFRESIFGFIDRTELSVRKELEITDSIQMLIDSGAPAGYSLLGDSWIDIGYPWDLLKANEHLLKTLKGYCRGNVEPNVTLRGEVAIGKGSLIRSGAYIEGPVVIGDYCDIGPNCFIRPSTAIGNKVRIGNAVEVKNTIVMEGTHIGHLSYVGDSVIGRRCNFGAGTKVANLRHDGKNIKVMLKGRIIDSGRRKLGVIMGDDVHTGINTSINIGVVMGKGRATVPGEVVKH

SEQ ID NO: 13145 - protein, 221 aa, Arabidopsis thaliana
MGRRPARCYRQIKGKPYPKSRYCRGVPDPKIRIYDVGMKRKGVDEFPFCVHLVSWEKENVSSEALEAARIACNKYMVKSAGKDAFHLRIRVHPFHVLRINKMLSCAGADRLQTGMRGAFGKALGTCARVAIGQVLLSVRCKDNHGVHAQEALRRAKFKFPGRQKIIVSRKWGFTKFNRAEYTKLRAMKRIVPDGVNAKFLSNHGPLANRQPGSAFISATSE

SEQ ID NO: 13146 - protein, 661 aa, Geobacter metallireducens GS-15
MNLETWRIRNWRLFTKIFLMSTVAVFVIIAGLLGFFLPLLESKLIHERTDNASHIVDAARSIAAHYHSLQLRGELSEPEARRLAVNTLRALRYNVNGYVWVHDLENRMVMHPLQPELEGHYLTRLADARGKPLFLTMNNLVRREGKGEVDYLWPRPGEQEPSRKVSYVSLFEPWQWVLGSGVYLDDVQDEISMLEARVITGALVTLLLSVVFSAYAAYRINRPLRQALFCAAAAMGHDTSVVEDKSHDETHQVLHTIERMVNDLKRSRDEAESASRMKGEFLANMSHEIRTPMNAIIGMTELTLETPLSPSQRENLEIIGSSAESLLGLLNDILDFSRIEAGRLLLEKVPFDLRNTVEGALDVVAPQAHGKGLELILDVARDLPEAFIGDPTRLRQVLINLLSNAVKFTAKGEVGLKVERAPSSGTDDGVMLLFTVSDTGIGIPADKLSLIFESFTQADGSTTRKYGGSGLGLAICRALVSMMGGDISVKSAVGVGSTFRFTARLGTCALQNREIRQAGIPRFGREVKILLAEDNPMNLKVSRLLLEMMGCQVVAVENGGDVVSAMKGERFDVVLMDIQMPVLDGLEATRVIRSGSERGIDQTTPVIAMTAHALKGYEKVCHEAGMNDFISKPVRAGELYNVILRNLPPAPGGGGVTPSAL

SEQ ID NO: 13147 - protein, 141 aa, Halomicrobium mukohataei
ERTFVMVKPDGVQRGLIGDIVSRFEDRGLKLVGAKFMQIDRKLAEEHYGEHEGKPFFEGLVEFITSGPVFAMVWEGQDAVRQVRSMMGETDPAESAPGTIRGDFGLDLGRNVIHGSDHEDEGSNEREIELFFDDAELVDWD

SEQ ID NO: 13148 - protein, 449 aa, GIBBERELLA ZEAE PH-1
MREVISINVGQAGCQIANSCWELYCLEHGIQPDGYLTEERKAQDPDQGFSTFFSETGNGKHVPRAIYCDLEPNVVDEVRTGAYRNLFHPEMMITGKEDASNNYARGHYTVGKELIDGVLDKIRRVADNCAGLQGFLVFHSFGGGTGSGFGALLMERLSVDYGKKSKLEFCVYPAPQTATSVVEPYNSILTTHTTLEHSDCSFMVDNEAIYDICRRNLGLERPNYENLNRLIAQVVSSITASLRFDGSLNVDLNEFQTNLVPYPRIHFPLVAYSPVISAAKAAHEANSVQEMTMSCFEPNNQMVKCDPRHGKYMATCLLYRGDVVPNDAHAAVATLKTKRTIQFVDWCPTGFKLGICYQAPENVPNGDLAKVSRAVCMLSNTTAIAEAWSSLSLKFDLMHSKRAFVHWYVGEGMEEGEFSEAREDLAALERDYEEVATDSMGDEELEAEY

SEQ ID NO: 13149 - protein, 388 aa, Pyrococcus horikoshii OT3
MLVKSMNFDPLKEAEKIKDEIISWRRDFHMHPELGFEEERTSKIVEEHLREWGYKIKRAGTGIIADIGDGGKTIALRADMDALPIQEENDVPYKSRVPGKMHACGHDAHTAMLLGAAKIIAEHSSELENKVRLIFQPAEEGGNGALKMIEAGALEGVDAIFGIHVWAELPSGIVGIREGPFLAGVGKFIAKIIGKGGHGAAPHFSIDPIPAAADAVLALQRIVAREVDPLESAVVTVGKIQGGTAFNVIPQYVELEGTFRFFTQELGKFLERRIREIIENTAKAHNCKAEVNTEILGPPTINDEKMVKFVAETAKALGLKVGEVRKTLGGEDFAYYLEKVPGAFIALGIRNEEKGIIYPHHHPKFDVDEDVLYLGTALEVALAFNFKG

SEQ ID NO: 13150 - protein, 141 aa, Haloarcula sinaiiensis
ERTFVMVKPDGVQRGLIGDIVSRFEDCGLKMVGGKFMQIDQELAEEHYGEHEDKPFFDGLVDFITSGPVFAMVWEGQDATRQVRTMMGETDPAESAPGTIRGDYGLDLGRNVIHGSDHEDEGANEREIELFFDDAELVDWD

SEQ ID NO: 13151 - protein, 97 aa, Arabidopsis thaliana
MQHLGQVKAWTELLNAFCTSGSLELELIHKVQTQCYEDAKLMKLFPEIIRTLYDQDVLAEDTIVLWFRKGSNPKGRQSFVKALEPFVKWLEEAEEEE

SEQ ID NO: 13152 - protein, 141 aa, Haloarcula vallismortis
ERTFVMVKPDGVQRGLIGDIVSRFEDRGLKMVGGKFMQIDQELAEEHYGEHEDKPFFDGLVDFITSGPVFAMVWEGQDATRQVRTMMGETDPAESAPGTIRGDYGLDLGRNVIHGSDHEDEGANEREIELFFDDAELVDWD

SEQ ID NO: 13153 - protein, 493 aa, Trichodesmium erythraeum IMS101
MQIQTPEWVKQAVFYQIFPDRFAKAQPTTETGKGIDKGWYPSSLEPWDEYPTPQGYKGGNLWGVIKKLDYLQELGITAIYFTPIFQSTCNHRYHTHDYYRVDPILGGNEALRVLIDTAHDRNIKVVLDGVFNHASRGFYFFNDILENGPYSPWLHWFKIENWPLSAYDGSLPANYVGWLDNRALPVFNHDNPEVKEYIMEIGEYWLKFGIDGWRLDVPFEVKTPGFWQEFRDRVKAINPEAYIVGEVWSNCAQWLDGTQFDGVMNYLFTGPTIAFTVGDRVDLEQIEGRDYVAYPAISAVEYGQKMQELLQLYPWEIQLTQLNLLDSHDTARVLSIAKGDKASVELATLLLMTFPGAPSIYYGDEVGLPGKFDPDCRRSFPTTEKWDREVLEYHKQLIAIRKEYSALRTGNYEVLFAEGNVYIFARILEEEEIIVAVNIGIEAAKVNVIFNKLKSQPNKVVYGSCKISWQGGDEASKLELYLPGRKGCILVKD

SEQ ID NO: 13154 - protein, 547 aa, GIBBERELLA ZEAE PH-1
MSSSILNNRSARSTPAGANPAFNPPAEASSSSTQSGVPYIRENSPEAESIPSNPAMTPIITHGDSLASPGGRNSEADTVVPLQPAVSQDAIRSRPGSRTGNFVTPKAARFSQDGAEPIMQYSSGSVKSARRRTREREDYDFDQAADYAPMSEYERYYRNEGRNDRDRYTRRGPYPPPTFMNRRRAPPLDSDEEFYSSDDPRIPPNDRRRMMDEEAGYPGRPHAFRRTSTLNGFNITTGKLQWNELSRQEKSEIMRLPLTQWMNSNFKNHFVAGVGEFIGTTMFLFFAFAGTEVANIQADTTNRTTTGESTGSLNVSKLLYISIIFGFSLMVNVWVFFRISGGLFNPAVTMAMLMVKAISVTRAIVLFLAQILGSMLASVVVRYLFPETFNVRTTLGGGASLVQGVFIEALLTAELVFTIFMLAKEKHRATFIAPVGIGLALFIAEMVGVQFTGGSLNPARSFGPCVITGSFDTEHWIYWVGPAIGSLIAVCFYWFIKTLEYEMANPGADGDDLNDPTKNPEKRAEIQASKPVPTAAFGSGKTASILS

SEQ ID NO: 13155 - protein, 197 aa, Chenopodium rubrum
PSWAFGGMIFALVYCTAGISGGHINPAVTFGLLLARKLSLTRAVFYMVMQCLGAICGAGVVKGFQPTPYDVLGGGANKVNHGYSKGDGLGAEIVGTFVLVYTVFSATDAKRSARDSHVPILAPLPIEFAVFLVHLATIPITGTGINPARSLGAAIIYNKERSWNDHWIFWVGPFIGAALAAVYHQIVIRAIPFKSKG

SEQ ID NO: 13156 - protein, 1286 aa, Nostoc sp. PCC 7120
MGILKNKSRSFSMFNCTTSLTPSELKSAIIRDPLIIKPETTVMDAIAQMSGVRVMCDTAKLDEVHLEARSSCVLIVAAGRLLGIFTERDVVKLCSQRRCLENLAIREVMIHPVVTLRESEFTDLFFAVNLLQQYRIRHIPILDEQERVVGLLTNESLRHTSRSVDLLRLRLVSEVMTCEVICATPDSSMLAIAQQMTENRVSSVMIVQLGQFQDKPQEIPVGIVTERDIVQFQALGLNLETCQVQTVMSSPIFAVRPDDSLRFVQQIMEQRLIRRLAVTGDQGELLGIVTQSSLLQALNPLEVYKLAQMLEEKVVRLETEKVQLLENRTVELEQLVADRTASLKAKAGREQIVSDISRQIRSSLSLQTILDTTVEQVRQLLGCDRVNIWYFETEWESIVMAESTTSSTSLLGERIEELCFQQHSAEIYRQGRIRVVPDIYTIEMTDCHREFLIRLQTRAKILVPLLCGDELWGLLNVSESQHPREWQTEEVELLQGLSVHLAIAIHQATTHQKLQEQLIALQQRSDQLRGSEQRYITLSQNLEAKIEERTAELQAREAQLQKTSDRLSISLKSGAIGCWDWDIVENNIFWDERMYELYGVTKTSDSRLVYDTWANRLHPDDRANIEVLVQQAILGQAEYDTEFRVIHPDGSIHFIKAYGVVVRDAEGNPQKMIGVHFDISDRKKSEEIIRQQVEREKLLREITQRIRQSLDLQTIFDIACQEICQVIQADRVGIFKFYPESNFNDGEFVAESVVKEFPSVIAIRVHDHCFGENYSSLYALGRSYVVDDIYHSDMTTCHTDILAQFHVRANVIMPLLCGAELWGLLCIHQCATTRHWQQSEIDFTQQLATQLAIAIQQASLVEQLQQELAERHQAELKLTQSNQQLAISNQELARATRLKDEFLANMSHELRTPLNAILGMTEGLQEGVFGMINNKQFKALETIERSSSHLLDLINDILDVAKIEAGQIKLDCTTISVANLCESSLVFIKQQALQKRIQVEIKIPFNLPDLFVDERRIRQVLINLLNNAVKFTPEAGRISLEVTQLSPDISTVQNFLQIAVIDTGIGIMQENINKLFQPFIQIDSALNRQYEGTGLGLALVKKIVELHGGRVGLTSELGIGSCFTIELPCIPSTPASPDLIRDLLTTPTPELDSPTADEAVSLAPVILLAEDNKANIKTFSSYLSAKGYDILLATNGQQAIELATIHQPDLILMDIQMPGIDGLEAIRQIRLDPQLVNIPIVALTALAMTGDRDRCLQAGANDYLTKPVKLKQLATTIQQLLITTKK

SEQ ID NO: 13157 - protein, 616 aa, Porphyromonas gingivalis W83
MKHFFSAIRRFVPPYKKYVAWSVVANTLSALLNLLSFSLIMPILRILFRIDRQVTTYMPMDGIDWGSMDGWKAAGAALSNNFSWYVSQLIEVRGASFTLIMLGIYLVVMTFLKVASMYLGFYSMIPLRTGVVRDIRNQINDKILGLPLSFFSEERKGDIMARISGDVNEIETSVISSLDMLLKNPILISIYLIGMILISWQLTLFVFILLPIAGGLMGKVGKTLKRKSLEGQNQWGSLMSQIEETLGGLRIIKAFNAEKKMQDRFHRANEQFRRTTMKVFRRQQLAHPMSEFLGTATIAIVLWYGGTLILNNTSEIDASTFIYYLVIFYSLINPVKELSKASYAIEKGLASMSRVDKILMAENDIKDPEQPHPVVFEEEVVYDHVWFRYGEDWVLRDVCLTIPKGKTVALVGQSGSGKSTIVDLLPRFYDLQQGRVLLDGTDVRDVKLHELRELIGNVNQEAILFNDTVFNNIAFGKENATAEEVEHAARIANAHDFIMQMPEGYQSNIGDRGGKLSGGQRQRISIARAILKNPPILILDEATSALDTESERLVQNAIEKLMANRTAIVIAHRLTTIRNADIICVLHEGRIVEQGRHDELYALGGYYTKLCDMNAE

SEQ ID NO: 13158 - protein, 383 aa, Thermobifida fusca YX
MGGEGTRAPAGGIADQEEGRGICMDQQHTASSDPSPATLRRWRRMLADEREEARAYRELAYRRDGEEREILLALAEAEARHVAYWERLLGDRVGKPRRGSWRMRALAFLARYLGWVLALALLQRAEHRIPYEAPDVPERIVADERIHAEVVRGLAVRSRSRLSGRLRAAVFGINDGLVSNIALVLGVVGGGATADTVLLTGLAGLLAGALSMAAGEYVSVSSQRELLAASVPDEAARESIPRLDAEDNELALVYRARGVPADEAQHRATTMLRLSRTGPPPELPGTTDPEVVGTGMSAAASSFVFFAVGAALPVLPFLAGMSGLAAVAVACTVTGIALLAVGAVVGVLSGSSPLRRALRQLTIGVGAAAATYLLGLLFNTVAT

SEQ ID NO: 13159 - protein, 201 aa, Arabidopsis thaliana
MSTARFIKCVTVGDGAVGKTCMLISYTSNTFPTDYVPTVFDNFSANVVVDGSTVNLGLWDTAGQEDYNRLRPLSYRGADVFLLAFSLISKASYENIHKKWLPELKHYAPGIPIVLVGTKLDLRDDKQFLKDHPGAASITTAQGEELRKMIGAVRYLECSSKTQQNVKAVFDTAIRVALRPPKAKKKIKPLKTKRSRICFFL

SEQ ID NO: 13160 - protein, 133 aa, Anaplasma marginale str. St. Maries
MSYSDAVLDRCKNPQNVGSLPKDDLNVGTGLVGAPSCGDVMKLQIKVDENGTIVDAKFKTFGCGAAIAASSLATERIKGKTIEEACMLKNTVLAKELSLPPVKIHCSLLAEDAVKAAVHDYKSKQQIAKGDKC

SEQ ID NO: 13161 - protein, 533 aa, Oryza sativa (japonica cultivar-group)
MGNCFTKTYEIPITSGTMRRPASTAERSKARGGDEPGTWRRPSFPRHGAPPHRPPTGSSSAAGALSRRASGGGGEMGPVLQRAMVSVRSLYQLDRKLGSGQFGTTYLCTERATGNRYACKSVSKRKLVRRTDVDDVRREITILQHLSGQPNIAEFRGAYEDNDHVHLVMEFCSGGELFDRITAKGSYSERQAAAVCRDILTVVHVCHFMGVIHRDLKPENFLLASADDDAPLKAIDFGLSVFIEEGKVYKDIVGSAYYVAPEVLQRNYGKEADIWSAGVILYILLCGTPPFWAETEKGIFDAILVNQVDFSTSPWPSISESAKDLIRQMLHRDPQKRITASQALEHRWLKEGGASDRPIDSAVLSRMKQFKAMNKLKQLALKVIAENLSPEEIKGLKQMFNNMDTDRSGTITVEELKVGLTKLGSRISEAEVQKLMEAVDVDKSGSIDYSEFLTAMINKHKLEKEEDLLRAFQHFDKDNSGYITRDELEQAMAEYGMGDEANIKQVLDEVDKDKDGRIDYEEFVEMMRKGIQT

SEQ ID NO: 13162 - protein, 204 aa, Photobacterium profundum SS9
MAEEYIMDLAKYKGIIFDMDGTLVDSMPAHLNAWQETCEAFDIPFDREWFYTLGGMPTIKTAYAINEKYQLDCDPVLLAESKLRVFDDIPHKGDVIPATFNVLKQQKALSKKIAIGTGCQRRHADELLEVTGLMPYLDAVVTSNDVENHKPNPDTFLEAAKRIGIEPKDCIVFEDTELGRSAAISAGMDCYLVTDGQISEFKSA

SEQ ID NO: 13163 - protein, 319 aa, Oryza sativa
MASLAVVVVVVAVVCAAGVAAAGKFDDVVEPSWANDHVVYEGDLLKLRLDSSSGGGFASKSKFLYGKATADLKLVAGDSAGVVTAFYLSSGGDKHNEFDFEFLGNVTGEPYLVQTNLYIDGVGNREQRIDLWFDPTADFHTYAVLWNPSQVVFLVDDTPIRVYENKNATAAVKGHHRHAAAANGTSNATSAAASVPPFPSPQPMSVYSSIWNADDWATQGGRVKTDWSHAPFVATFRDVRVEGCAWAANATDSDAGEVARCTGSSWGKEGRYWWKEKDMEELTVHQNHQLVWARAHHLVYDYCVDTDRFPVQPPECAGR

SEQ ID NO: 13164 - protein, 470 aa, Mesorhizobium sp. BNC1
MPDTYDVVVIGTGPGGYVCAIKAAQLGLKTAVVEKRTNHGGTCVNVGCIPSKALLHATEMFAEAGHSFADLGIDVGTPKLDLKKMLAHKEKTVDQNVKGLDFLFKKNKIDVFRGAGRIAAAGKVVVTGEDGKEQTVETKNIVIATGSDVAGIPGVDVDFDERVIVSSTGALELPAVPARMVVVGGGVIGLELGSVWSRLGAKVTVIEYLDTILGGMDGEVAKQFQRMLAKQGFGFKLGAKVTGIAKTEGGASVTFEPAKGGEAETIDADVVLVATGRKPYIDGLGLKEAGVEVDERGRVKTDGHLRTNVPGIYAIGDVITGPMLAHKAEDEGVAVAEIIAGQAGHVNYDVIPSVVYTSPEVASVGKTEEELKKAGIEYNAGKFPFSANGRARSMLHTDGFVKVLADKKTDRVLGVHILGFGAGEMIHEAAVLMEFGGSSEDLARTCHAHPTMSEAVKEAALATFYKPIHS

SEQ ID NO: 13165 - protein, 660 aa, Xylella fastidiosa 9a5c
MIARMVNVKRAFDWSEASTSVDALPVPETVTYSDNKRMQSVIADLKQQEIKPLLRFITCGSVDDGKSTLIGHLLYDSQCLAEDQLADLMVDSQRYGTQGEHIDYALLLDGLAAEREQGITIDVAYRYFDTEKRKFIVADCPGHAQYTRNMATGASTADAAVVLVDARKGLLTQTRRHSYIVALLGIRHVVLAVNKMDLVGYDQETFEAIASDYLALAAKLGINQVQCIPLSALEGDNLSKRSARMPWYVGPSLLEYLEALEPADVDLAAAMCLPVQWVNRPDSQFRGFTGTLAAGRVRPGDAVVVLPSGCVSRVVRVFNGDTEVHEAVAGQAVTLTLADEIDISRGDVIAALDDPPEVADQVTAYVLWMDDTALLPGRRYWLKLGARMVAASVSDIKHRVDVNTQEQRVAQRLQLNEVGYCQLSLDAPVAFVPYARNRVLGSFILIDRHSNATVGAGTLDSGVHRASNVHWQPLDIDHVARARIKGQTPKVLWFTGLSGAGKSAIANIVDKRLHALGYHTFILDGDNVRHGLNRDLSFTVEDRVENIRRVAEVARLMVDAGLVVLVSFISPFRDERQLARERFAANEFVEVFVDVPLAVAEARDVKGLYAKARAGLITDFTGIDSPYEPPPHPELHLRADQGTPEQLASQVLSFLGVEAN

SEQ ID NO: 13166 - protein, 967 aa, Zea mays
MAALGPKMERLSSIDAQLRMLVPGKVSEDDKLIEYDALLLDRFLDILQDLHGDDLKEMVQECYEVAAEYETKHDLQKLDELGKMITSLDPGDSIVIAKSLSHMLNLANLAEEVQIAYRRRIKLKKGDFADENSAITESDIEETLKRLVVDLKKSPAEVFDALKSQTVDLVLTAHPTQSVRRSLLQKHSRIRNCLVQLYSKDITPDDKQELDEALQREIQAAFRTDEIRRTQPTPQDEMRAGMSYFHETIWKGVPKFLRRVDTALKNIGINERVPYNAPLIQFSSWMGGDRDGNPRVTPEVTRDVCLLARMMASNLYCSQIEDLMFELSMWRCSDELRMRADVLHLSTKKDAKHYIEFWKKVPPNEPYRVILSDVRDKLYNTRERSRELLSSGHSDIPEEATLTNVEQLLEPLELCYRSLCACGDSVIADGTLLDFLRQVSTFGLSLVRLDIRQESDRHTDVLDAITTYLGIGSYREWTEERRQEWLLSELNGKRPLFGSDLPKTEEISDVLDTFHVIAELPSDNFGAYIISMATAPSDVLAVELLQRECHVKTPLRVVPLFEKLADLEAAPAALARLFSIDWYRQRINGKQEVMIGYSDSGKDAGRLSAAWQLYKAQEELIKVAKDFGVKLTMFHGRGGTVGRGGGPTHLAILSQPPDTIHGSLRVTVQGEVIEQSFGEEHLCFRTLQRFTAATLEHGMHPPNAPKPEWRALLDEMAVVATEEYRSIVFKEPRFVEYFRLATPETEYGRMNIGSRPSKRKPSGGIDSLRAIPWIFAWTQTRFHLPVWLGFGAAFKNVLQKDIRNLHMLQEMYNEWPFFRVTIDLVEMVFAKGNPGIAALYDKLLVSEELHPLGEKLRANYEETQKLLLQVAGHRDLLEGDLYLKQRLRLRDAYITTLNVCQAYTLKRIRDPDYHVALRPHLSKEIMDSTKAAADVVKLNPGSEYAPGLEDTLILTMKGIAAGLQNTG

SEQ ID NO: 13167 - protein, 287 aa, Lycopersicon esculentum
MASSSSKLVLVMCFMISAFGIAIGAKFDQEFDITWGDGRAKILNNGDLLTLSLDKISGSGFQSKNEYLFGKIDMQLKLVPGNSAGTVTAYYLSSQGPTHDEIDFEFLGNLSGDPYTLHTNVFSQGKGNREQQFHLWFDPTADFHTYSITWNPQRIIFYVDGTPIREYKNSESIGVSYPKNQPMRIYSSLWNADDWATRGGLVKTDWSQAPFSASYRNFSANACIPTSSSSCSSNSAASTSNSWLNEELDNTSQERLKWVQKNYMVYDYCTDSKRFPQGFPADCVQNI

SEQ ID NO: 13168 - protein, 230 aa, Arabidopsis thaliana
  misc_feature (124)..(124): Xaa can be any naturally occurring amino acid
  unsure (1)..(230): unsure at all Xaa locations
MSSNFIVESCSVDSEEGVKLHTRIFKPRNEGEEVSDDENLVIVLVHPFSLLGGCQALLKGIASELASKGFKSVTFDTRGAGKSTGRATLTGFAEVKDVVAVCRWLCQNVDAHRILLVGSSAGKXAPIAGSAVEQVEQVVGYVSLGYPFGLMASILFGRHHKAILSSPKPKLFVMGTQDGFTSVSQLKKKLKSAVGRTETHLIEGVSHFQMEGPEYDSQVTDIICKFISSL

SEQ ID NO: 13169 - protein, 336 aa, Desulfitobacterium hafniense DCB-2
MSKCGILKDGSKPKVLIARQVPQEVEEWIGRHCEYSKWEGSGDIPRSELLKQLGDVDGLLINREKIDGELLDAAPKLKIVANISVGYNNFDIGEMQARKVLGTHTPNVLDDTVADLVFGLMLSTARRLCELDRYVKAGRWNETVTPDLFGMDVHHQTLGIIGMGRIGRALAQRGKWGFDMNILYHNRSRHPEAEQRFDARYCTLEELLQRSDFVVLLAPLSPQTVNLMSGREFGLMKRSAVFISASRGETVDEEALVEALREGRILGAGLDVYRKEPIPPDHPLLRFKNVVTLPHLGSATTRTRLAMARMAAENLLIGLKREIPPQCVPELKHLVL

SEQ ID NO: 13170 - protein, 181 aa, Xanthomonas campestris pv. campestris str. ATCC 33913
MSQSIHDIPVTDINGGATSLAAHRGKVLLVVNVASKCGLTPQYEGLEALYRDKQAQGLEVLGFPANDFNGQEPGSEAEIAQFCQLTYDVTFPLFSKIAVTGAEIHPLYQALTSAQPQATGDGPMREKLAGYGIAANPAPGVLWNFEKFLIGRDGQVIERFAPDVAADDVRLRQAVDAALAH

SEQ ID NO: 13171 - protein, 141 aa, Halobacterium salinarum
ERTFVMVKPDGVQRGLIGDIVTRLETKGLKMVGGKFMRIDEELAHEHYAEHEDKPFFDGLVSFITSGPVFAMVWEGADATRQVRQLMGATDAQDAAPGTIRGDYGNDLGHNLIHGSDHEDEGANEREIALFFDDAELVDWD

SEQ ID NO: 13172 - protein, 404 aa, Magnaporthe grisea 70-15
MVFEAIQPGPPDPMNLLKTTADADTSPDKVDLGVGIYRNEKGNYQELASVREAKVQLLQNDPGHDYECTTGNVDFIKHAAGVMFGRDSALLAAGKIASVQTISGTGAVHLAAQFISRFVHPSPTVYVGTPTWGNYKPLCELVGLQIVEFQQYDSEKRTLDFPAILAAVRSAPRASVFIFQACCHNPTGMDPTRAQWDELRAAVRDMGHFPVFDNAYQGLGDGLDEDAYVVRSWAAEGIEMFVCQSFSKNFALYGERCGVLHAFCPAGAGAARNVHDQLRCLIRWEFSSSPAYGSRLVTRILSSEELRSKWENELSVMRQRLKGNRELLFKLLTEEYKTPGNWQHILEEKGLFSYFRLSPAQCRALVDKHHIYLPTNGRINISGLNDANAKRVASKIDEVVRDTQ

SEQ ID NO: 13173 - protein, 332 aa, Oryza sativa (japonica cultivar-group)
MAASNIGMMDGAYFVGRNEILAWINTTLQLGLSKVEEAASGAVACQLMDAAHPGAVPMHKVNFDAKTEYEMIQNYKVLQDVFNKLKITKHIEVNKLTKGRPLDNLEFMQWMKRYCDSVNGGFMNSYNASERRESSKGGKETNRRTSVPSQAPAKSSSATHKAQASSHGAKKANGHAPNAPPSRSAKPSPANSAGPAYDEQITELKLLVDSLEKERDFYFSKLRDVEILCQSPEVEHLPIVNAIHKVLYAAEDDPSMVAEAQAMISQQQQSEQPMLSPILEASEERPAKQEAHKRKSISDLELEEFGMASSSRQRLSDISDVQLCGSPLTSFT

SEQ ID NO: 13174 - protein, 141 aa, Halogeometricum borinquense
ERTFVMVKPDGVQRGLIGEIVSRFEDRGLKMVAGKFMQIDEELAHEHYGEHKDKPFFDGLVDFITSGPVFAMVWEGQDATRQVRRMMGETDPAESAPGTIRGDYGLDLGRNVIHGSDHEDEGANEREISLFFDDAELVDWD

SEQ ID NO: 13175 - protein, 290 aa, Lycopersicon esculentum
MSSKFSSTLLLLISILMSIQLLASAGNFYRDVDITWGEGRGKIQEGGRGLALSLDKLSGSGFQSKNEYLFGRFDMQLKLVPKNSAGTVTTFFLSSQGEGHDEIDFEFLGNVSGQPYTIHTNVYTQGKGNKEQQFHLWFDPTAAFHTYTIVWNPHRIVFLVDNSPIRVFNNHESMGIPFPKSQAMKVYCSLWNADEWATQGGRVKTDWALAPFTAYYRNINIDGCAVSSGASTCKSIGSTNNAKPWQTHELDGKGRNRLRWVQTKHMVYNYCADSKRFPQGFSAECKSSRF

SEQ ID NO: 13176 - protein, 568 aa, Zymomonas mobilis
MSYTVGTYLAERLVQIGLKHHFAVAGDYNLVLLDNLLLNKNMEQVYCCNELNCGFSAEGYARAKGAAAAVVTYSVGALSAFDAIGGAYAENLPVILISGAPNNNDHAAGHVLHHALGKTDYHYQLEMAKNITAAAEAIYTPEEAPAKIDHVIKTALREKKPVYLEIACNIASMPCAAPGPASALFNDEASDEASLNAAVEETLKFIANRDKVAVLVGSKLRAAGAEEAAVKFADALGGAVATMAAAKSFFPEENPHYIGTSWGEVSYPGVEKTMKEADAVIALAPVFNDYSTTGWTDIPDPKKLVLAEPRSVVVNGIRFPSVHLKDYLTRLAQKVSKKTGALDFFKSLNAGELKKAAPADPSAPLVNAEIARQVEALLTPNTTVIAETGDSWFNAQRMKLPNGARVEYEMQWGHIGWSVPAAFGYAVGAPERRNILMVGDGSFQLTAQEVAQMVRLKLPVIIFLINNYGYTIEVMIHDGPYNNIKNWDYAGLMEVFNGNGGYDSGAGKGLKAKTGGELAEAIKVALANTDGPTLIECFIGREDCTEELVKWGKRVAAANSRKPVNKLL

SEQ ID NO: 13177 - protein, 141 aa, Halorubrum saccharovorum
ERTFVMVKPDGVQRGLIGEIVSRFEERGLKLVGGKFMQIDEDLAHEHYGEHEGKPFFDGLVDFITSGPVFAMVWEGADATRQVRAMVGETDPAESAPGTIRGDFGLDLGHNVIHASDHEDEGANEREIDLFFDDAELVDWD

SEQ ID NO: 13178 - protein, 273 aa, Ralstonia eutropha JMP134
MQAPAPFRVAAIQTVTGTSLDANLARAESLIAEAARGGAELVLLPEYFCMMGQRESDKIAIREQDGDGPVQRFLADAAKRHRVWLVGGTLPMWCGDDDRVYNTSLAFDPRGERVARYDKIHLFGFTRGAESYDESRTILAGNTPVSFDAPCGRVAMSVCYDLRFPELYRGLAGGDGASLILMPAAFTYTTGQAHWEILLRARAIENQCYVLAAAQGGKHENGRRTWGHSMLVDPWGEVLAMLPEGEGVVSGVIDPARLAEVRQNLPALRHRVL

SEQ ID NO: 13179 - protein, 407 aa, Flaveria trinervia
MESRVLSSGATAISGVPRLTKPAGRITTTTVAVAFPARLNATGGNVVWGRQLRPSLLNLDHSSPVSLVTKPVKRDVLKPCSATASDSAGDAAPVGFLAKYPFLVTGFFFFMWYFLNVIFNILNKKIYNYFPYPYFVSVIHLAVGVVYCLGSWTVGLPKRAPVDSNILKLLIPVGFCHALGHVTSNVSFAAVAVSFTHTIKALEPFFNAAASQFVLGQSIPISLWLSLAPVVIGVSMASLTELSFNWLGFISAMISNISFTYRSIYSKKAMTDMDSTNLYAYISIIALLFCIPPAVLFEGPQLLKHGFNDAIAKVGMIKFISDLFWVGMFYHLYNQIATNTLERVAPLTHAVGNVLKRVFVIGFSIIVFGNKISTQTAIGTSIAIAGVAIYSLIKARIEEEKRRMKSA

SEQ ID NO: 13180 - protein, 700 aa, Triticum aestivum
TSMNPYFVGLLVPIAVSLLLQKRRKVEKKRGVPVDVGGEPGYAIRNHRFERPVETHWEGVNTLAELFEHACKEYLYMPLLGTRKLISREIESSPDGRSFEKLHLGEYEWKCYAEAFKSVCNFSSGLVNLGRQDNESVAIFAETQAEWQIALQACFRQNITVVTIYSSLGEEALCHSLNETEVTTVICGRKELKKLIDIGWQLDTVKRVIYINEEGISAEVSIAQNSTSWSVKSFEEVGKLGAEAPVDANMPLPSDVAVIMYTSGSTGLPKGVMMTHRNVLATLSAVMTIVPELGKKDIYMAYLPLAHILELAAETLMAAVGASIGYGSALTLTDTSSKIKKGTLGDASALRPTLMTAVPAILDRVRDGVRKKVDAKGGVAKKLFDIGYSRRLAAINGSWLGAWGVEKLLWDRLVFTKVRAILGGNIRFVLSGGAPLSGDTQRFINICLGAPIGQGYGLTETCAGGTFSEYDDTSVGRVGAPLPCSYIKLIDWAEGGYLTTDSPMPRGEIVIGGPNVTKGYFKNEAKTSEVYKDDERGLRWFYSGDIGRFHPDGCLEIIDRKKDIVKLQHGEYVSLGKVEAALAMSPYVENIMIHADPFHSYCVALVVAAQNELERWALQQGLAYTDFADLCQKQEAVVEVLESLTKAAKQARLEKFETPAKVKLIPDPWTPESGLVTAALKLKREVIRKTFEDDLAQLYA

SEQ ID NO: 13181 - protein, 141 aa, Natrialba asiatica
ERTFVMVKPDAFARGLVGEVISRLEDRGLKLVGIKVENMPRGRAEEHYSEHEDKPFYDDLVDFITGGPVVPMVWEGQDATRQVRQMIGETDPLEAAPGTIRGDYALDLGRNVVHAADHEDEGANEREISIHFDDAELVDWD

SEQ ID NO: 13182 - protein, 255 aa, Triticum aestivum
  misc_feature (186)..(186): Xaa can be any naturally occurring amino acid
  misc_feature (217)..(217): Xaa can be any naturally occurring amino acid
  unsure (1)..(255): unsure at all Xaa locations
MQIFVKTLTGKTITLEVESSDTIDNVKAKIQDKEGIPPDQQRLIFAGKQLEDGRTLADYNIQKESTLHLVLRLRGGMQIFVKTLTGKTITLEVESSDTIDNVKAKIQDKEGIPPDQQRLIFAGKQLEDGRTLADYNIQKESTLHLVLRLRGGMQIFVKTLTGKTITLEVESSDTIDNVKAKIQDKXEGIPPDQQRLIFAGKQLEDGRTLADYNIQKXESTLHLGAASFEGGMQIFWEPPLGKNHYTLEGGVLRTP

SEQ ID NO: 13183 - protein, 351 aa, Alkaliphilus metalliredigenes QYMF
MKKLNVGMIGFGMSGRVFHGPMITSMDEFNFNKIVCSREATVKAARESYPEVQIISDVDELMADDTIDLIIVATPNLSHFKLAQKALLANKHVIVEKPFTVTSAEADELIELAKKQEKIVTVYQNRRWDSDFQTIKQVIENGLLGNIVEYEAHFDRFRNYIKAGWREEQLPGSGMLYDLGSHLIDQAQYLFGLPKEIRADIRVQRKCAKCDDNFELVLDYGQVKVTLKSGMLVREALPHFIVLGDQGSFLKYGMDTQEEMLKKGETPKTMENWGAEPESIWGTINTDVNGLHIKGKIESLNGDYRGFYHNVYKAIMGKEELIVKPEEARNTIKIIELAMKSNKEKRTIEFK

SEQ ID NO: 13184 - protein, 237 aa, Nostoc sp. PCC 7120; identical to SEQ ID NO: 1358

SEQ ID NO: 13185 - protein, 498 aa, Magnetospirillum magnetotacticum MS-1
MCGIAATIGLSDATAFTSLFGAIGHRGPDESGIRESGDIRIGMHRLAIVGRMGDSVPLIGADGLVLAFNGEIYNHQALRADFPDYPFAGQSDAEVLFPLLKRHGLGGLDRLRGMFAFVLTDMESGEFLAVRDPFGIKPLYYAETGGGFAFASEMKAFAAMGITPRFLPPGHLLTRHGLRRWYRVPGRFRLSRRPNLRALLERAVASHLPPEGPCGVFLSGGLDSSLVAALAARSRPDMVAYSVVLPGSPDEEPAALMAAHLGIRHKVLRATADDIRAALPEVIGALESFNPIMVRNAVPLYLLSKMAAKDCKVVLGGDGADELFAGYDYLSRVPRRFWPQAMDYGFSNLHRTELQRVDRMTMAHGLELRVPFLDREVAEAAVNLPLSAKFGIKDGTPMPKLALREAAEGLLPPSIQWRRKLPLADGSGFGGLDLGAGRDKADPVPGWDVGDEDAVAFFPLWRVRFPLARPDSAIWRDCGRYHDFEECHGRPLLELFRR

SEQ ID NO: 13186 - protein, 272 aa, Pseudomonas aeruginosa UCBPP-PA14
MSAAEPFFATRLPRLVMFDLDGTLVDSVPDLTAAVDSMLASLGRPPAGIEKVRQWIGNGARVLVRRALAGSIEHDGIGEEETEAALALFMEAYADSHALTEVYPGVVDTLKWLKRNGVEMALITNKPERFVAPLLDEMKLGRYFRWIIGGDTLPQQKPDPAALLFVMKMAGIEPEDALFVGDSRNDVLAAKAAGVRCAALTYGYNHGRPIAEEAPTLVIDNLRDLLPCADQAAEIVLPDDSLSPSDQRDQAVAVSKLWMKVIKALARWRWRA

SEQ ID NO: 13187 - protein, 423 aa, Frankia sp. EAN1pec
MTLPALELAERTDESRPRPRRTRRSASPVRNTPSRTLAAVPDELDELDVSAIAELIARGRETGELSRSELREALEAADIGVELLPALISRLGAAGIDLVEEEEERVTPGAPAAGRTVADHAGTADLVRMYLREIGKVPLLNAAQEVELSKRVEAGLFAEHKLDTDQDLADDLRRDLGVLVTDGQAAKQQLVSANLRLVVSVAKKYSGRGMTLLDLVQEGNLGLIRAVEKFDYAKGYKFSTYATWWIRQAIGRALADQARTIRIPVHVVEQINKITRLQRQLVSTLGREPTDEELALELDMPIEQVVELRRYAQDTVSLETSVGDDGDSVLGDFIEDSDATSPADAASYGAMQDEIDNVLGALNPREREVMRLRFGLADGKQHTLAEVGNRLGLTRERIRQIERDTLRELRKPAVAGRLREFLD

SEQ ID NO: 13188 - protein, 409 aa, Zea mays
MAAMPGGAHAAGAADQMQVDQPLPAAAAHGPAVAKHAGSMIEGNDPVTGHIISTTIGGKNGEPKKTISYMAERVVGTGSFGIVFQAKCLETGETVAIKKVLQDKRYKNRELQIMRSMDHCNAVSLKHCFFSTTSRDELFLNLVMEFVPESLHRVLKHYSNMNQRMPLIYVKLYTYQIFRGLAYIHTVPGVCHRDVKPQNLLVDPLTHQVKICDFGSAKMLVKGEANISYICSRYYRAPELIFGATEYTTSIDIWSAGCVLAELLLGQPLFPGESAVDQLVEIIKVLGTPTREEIRCMNPNYTEFRFPQIKAHPWHKIFHKRMPPEAIDLASRLLQYSPNLRCTALEACAHPFFDELREPHARLPNGRPFPPLFNFKQELANASPELINRLIPDHARRHLGLTLLPTAGP

SEQ ID NO: 13189 - protein, 384 aa, Bradyrhizobium japonicum USDA 110
MRSIQTARLSPYVAALNALNEDKRLRCLKPRVGIDFASNDYLALGNASRIKKAMVAALEAGTPVGAGGSRLLRGNCEEHERLETEAAQFFGAEAALFFGGGYIANFALLTTLPQRGDLLVLDSLVHASIHEGARAGRAECRIHAHNDPQSVEDAIRAWRNKGGAGRVWIVAESLYSMDGDFAPLEELVAIADRQDAFLIVDEAHATGAYGHQGRGLTAPYDKRENLIVVHTCGKALGAAGALVTASGILRDFMVNRCRPFIFATAPSPLMAVAVREALLTLQKEPERQQRLAKLVAFAHRQITSLGLRTPSTSQIVPYIVGDNAHAMRLASALQARGFDIRGIRPPTVPAGTARLRISLTLNVGEADVRAMLDALVEVTRGSFR

SEQ ID NO: 13190 - protein, 408 aa, Flaveria pringlei
MESRVLSSGATTISGIPRLTRPAGRTTTTTVVAVASPAKLNTNGGNLVWGRQLRPSLLNLDHSSPVSLVTKPVKRDVLKPCTATASDSAGDAAPVGFFAKYPFLVTGFFFFMWYFLNVIFNILNKKIYNYFPYPYFVSAIHLAVGVVYCLGGWAVGLPKRAPMDSNLLKLLIPVAFCHALGHVTSNVSFAAVAVSFTHTIKSLEPFFNAAASQFILGQSIPITLWLSLAPVVIGVSMASLTELSFNWLGFISAMISNISFTYRSIYSKKAMTDMDSTNLYAYISIISLLFCIPPAIILEGPQLLKHGFSDAIAKVGMTKFISDLFWVGMFYHLYNQLAINTLERVAPLTHAVGNVLKRVFVIGFSIIVFGNKISTQTAIGTSIAIAGVAVYSLIKAKIEEEKRGLKSA

SEQ ID NO: 13191 - protein, 1116 aa, Xanthomonas campestris pv. vesicatoria str. 85-10
MNAVASLQADAEQSAVVADQRWYKDAIIYQVHVKSFFDSNDDGIGDFPGLISKLDYIAELGVDTIWLLPFYPSPRRDDGYDIAEYMAVHPDYGSIEDFEQLVAQAHARGIRIVTELVINHTSDQHPWFQRARNAPAGSPERDFYVWSDTDQEYEGTRIIFCDTEKSNWTWDPVAGQYFWHRFYSHQPDLNFDNPAVLEAVLEVMRFWLDRGVDGLRLDAVPYLIERPGTSNENLPETHAILRKIRATLDAEYPDRMLLAEANMWPEDTQQYFGQNADECHMAFHFPLMPRMYMAIAREDRFPITDIMRQTPEIPESCQWAIFLRNHDELTLEMVTDSERDYLWQTYAADRRARINLGIRRRLAPLLERDRRRIELMTSLLLTMPGTPVLYYGDEIGMGDNIHLGDRDGVRTPMQWSIDRNGGFSRADPAQLVLPPVMDPLYGFQAVNVEAQMRDQHSLLTWTRRVLSVRKRYQAFGRGSLRFLYPGNRRMLAYLRCYQDETVLCVANLSHTLQAVELDLSEFEGRVPVDIIGGGSFPPIGRLTYLLTVPPFGFYAFQLVSEGTLPDWHVPSPVPLPDYRTLVLRSDADESAALLPHLPTLEGEILPAWLSARRWFSAKDQALRSVRIARRTPLPGDEPMTLLELEVELEDGRHERYMLPVGIVWEREQPSTLAEQLALARVRQGREVGYLTDAFALKPMVRGVIDALRSNAALDFCDGDDASQQGQVCFEATPALATLDIPQDPEIRWLSAEQSNSSLVVADKAVFKLLRHVAVGANPEIEIGRRLTEMGYANAAPLLGSVSRIDAQGTVTTIALLQGFIRNQGDAWRWTLDHLARSFDEYATAQTDEARAEAVAGYDAFAAVVGKRLAELHEALSRATDDADFAPQRIDLPTANDVVAGVGRQVEEMWDTVNARLAGSEDSAEREALEAVLAERPQLDALLAQAPSVLADSLLTRVHGDFHLGQILVAFDDVVLIDFEGEPAKPLAERRAKASPLRDVAGFLRSLDYASEVSARGEEGTAARAGVGVDTHLDEFLVQFRRRSTQAFLDAYHAVLDASAHPWIAPAAFNAATLLFLVEKACYEVRYEAANRPGWLMVPIEGLRRILQRARAGAGDT

SEQ ID NO: 13192 - protein, 77 aa, Wolbachia endosymbiont of Drosophila tristis
EEKQGRIVLPSSAEKKPTKGEVIAIGEGSRNSSGERVTLTVKAGDKVFYRQWAGTEIEHNNEKLIVMKESDILAVIK

SEQ ID NO: 13193 - protein, 766 aa, GIBBERELLA ZEAE PH-1
MVQSAILGFPRMGVNRDLKKATEAYWGGKISQSDLLAEAKRLRLAHWKIQQDAGVDIIPSNDFALYDHVLHQIQDFGAVPERYTKDGLDPIDQYFAMGRGHQKEGVDVPSLEMVKWFDSNYHYVKPTLQDGQTFKLAESPKAVADFKEAKDAGISTRPVLVGPVSFLHLGKADRDQKVDPIDLLEKLLPVYEQLLTQLKEAGAETVQIDEPVLVFDLPQKTKDAFKPAYEKFASLGDKIPKVVFTTYFGDIVHNLDLLPKDVYGLHIDLVRNPEQLDKVLGAIGSNTILSAGVVDGRNIWKTNLKRAIEIVETAVQKLGKDRVIAATSSSLLHTPHTLASEKKLDTEIADWFSFATEKASEIALIAKAVTEGPATVREQLEANAKSIKARADSPRTNDPQVKDRQSKVTQKDYERKSEFTTRISQQQKKLNLPLFPTTTIGSFPQTKEIRIQRNKFTKGEITVEEYDRFIEKEIEENVKIQEELDLDVLVHGEPERNDMVQFFGERFQGYAFTTHAWVQSYGSRCVRPPIIVGDISRPNPMTVKESKYAVSVSKKPMKGMLTGPVTCLRWSFPRDDVHQSVQAEQLALALRDEVVDLEKAGIDVIQVDEPALREGLPLRSGEERDAYLKWAVQAFRLSTAGVEDATQIHSHFCYSEFQDFFHAIAALDADVLSIENSKSDAKLLRVFVDSEYPRHIGPGVYDIHSPRVPSEQEIKDRIEEMLQFLKPEQLWIDPDCGLKTRQWKETKEALTNMVNAAKYFRNKYAK

SEQ ID NO: 13194 - protein, 491 aa, Frankia sp. EAN1pec
MVRRVSVLRLRPRDLTLMRPGWTSVHSVAGAPGRRRPPLTRPGTAVPATAGVVRTVVRDVARSYRRRVSTSANTEPSPAAPGAGAQALLIWDRAMLDYDFGPTHPLHPVRLALTMDLAGAVGLLDAPGITVASAGMAGDDLIELVHDPAYLSAVRAASPGSRAGSLLAGRFGLGTADNPVFDRMHAAAALVTGGTLAAAEAVWKGTHQHAVSLAGGLHHAMRGSASGFCVYNDPAVAIAWLLSAGASRVAYVDIDVHHGDGVQAAFYDDPRVLTISLHQSGRSLFPGTGFAREVGTGDAEGTAVNVALPPGTGDAGWLRAFSGVVPVMLRAFRPQVLVTQHGCDTHALDPLADLRLSLDGQRASYEALHQLAHEVCGGRWLACGGGGYALDAVVPRAWTQLVAIAAHTPLDAARALPEEWAAAAPARVRAATGHDSVGAAGMPSTFGDGAPAAYHPWDAGEGDPDDPLDRSVAQTRSAVLPLHGLDPLVDR

SEQ ID NO: 13195 - protein, 211 aa, Triticum aestivum
NKFVQKSRLVPVRNSRDIVDPRVRMVLNKNIDNFFAENEQLAFCPAITVPGIHYSDDKLLQTRIFSYADTQRHRLGPNYLMLPVNAPKCAHHNNHHDGLMNFMHRDEEVNYFPSRFDPTRHAEQYPIPPRVLSGCREKCIIEKENNFKQAGERYRSFDPARQDRFLQRWVDALTDARVTHEIQGIWVSYWSQCDTSLGQKLASRLKIKPSM

SEQ ID NO: 13196 - protein, 94 aa, Streptococcus bovis
MLKPLGDRVVLKVEEEKEQTVGGFVLAGAGKESTQTATVVAVGTGARTLTGELVTPSVAAGDKVIIETGAGVEVKDGDDAVTIVHEAEILAVLA

SEQ ID NO: 13197 - protein, 661 aa, Ehrlichia canis str. Jake
MGNRYNDMVNMANAIRVLSVDAIQNAASGHPGMPLGMADVATVLFAKFLKFTPKDTSWFNRDRFVLSNGHGSMLLYSILYFLGCLDIEEIKRFRQIHSLTPGHPEYGCTPGVDATTGPLGQGLACAVGMAIAERVLSEKFGSELVDHMTYVMVGDGCLMEGISHEAASLAGHLQISKLIVLFDDNGISIDGDTSLAVSDDIKARFLSYGWDVFEIDGHDFDEIESSIENARRSSKPSLICCKTIIGKGLVSKENTSAAHSWPFSEEEVILMKEKLGWCDKPFDVPEEILQLWKSIASKSENEYKAWLNKCDDKASQSFVDVIKEGVSDSVFLSLKKLKKELCNLNLNEATRKSSGRILEVVMENTSKLIGGSADLTGSNNTKPQFASIINKDNFSGSYLHYGIREHAMAACMNGMALHGGVIPYGGTFLVFADYCRPAIRLSALMKRHVIYVMTHDSIGVGEDGPTHQPVEHVSSLRAIPNLYVFRPADAVEVLECWEIALRLTSSPSAFILSRQNVGNVRSLYVEENLSSKGAYIIREYEKDLDVTIFATGSEVEVALKAADILKGKGLDARIVSVPCWELFAQQDKKYIFSLLNNKSIKAAIEAASSFGWHKYIGEDGVFVGLDDFGLSAPCKDLYKHFGITAENLVNKILDKLKINID

SEQ ID NO: 13198 - protein, 366 aa, Prunus persica
QMGLAENQVSFDLLEKYLEEHSEASKWGSKGVPCFRENALFQDYHGLVSFRKAMASFMGQIRGGRAKFDPDRIVLTAGATAANELLTFIIADPGDALLVPTPYYPGFDRDLRWRTGVNIVPIHCDSSNNFQITPQALEAAYKDAEAKNMRLRGVLITNPSNPLGATIQRVVLEEILDFVTSKNIHLVSGEIYSGSTFSSSAFVSIAEILEARQYKNSERVHIVYSLSKDLGLPGFRIGTVYSYNDKVVATARRMSSFTLISSQTQHLLASMLSDKEFTENYIKTNRERLRKRYDMIIEGLKKAGIECLKGNAGLFCWMNLSPLLEKPTRGGELALWDSMLHEVKLNISPGSSCHCSEPGWFRVCFA

SEQ ID NO: 13199 - protein, 216 aa, Porphyromonas gingivalis W83
MRTLRSMTIDEYIATHTSAEPPLLQKLDRDAHLHLMRPRMLSGHLQGRFLSMISHLMRPRRILEIGTYTGYASLCLAEGLTPDGLLHTLERDDEMEDFIRRYLEASDFGGKIRLHIGEALDLLPDLVKNERFDLIYMDADKRQYTLYYEMIIDHLPPGALILADNTLWDGKVVAEPLPTDSQTQGILRFNEMVLLDERVENLIVPMRDGLSMIRVR

SEQ ID NO: 13200 - protein, 658 aa, Streptococcus pneumoniae TIGR4
MSNLSVNAIRFLGIDAINKANSGHPGVVMGAAPMAYSLFTKQLHINPAQPNWINRDRFILSAGHGSMLLYALLHLSGFEDVSMDEIKSFRQWGSKTPGHPEFGHTAGIDATTGPLGQGISTATGFAQAERFLAAKYNREGYNIFDHYTYVICGDGDLMEGVSSEAASYAGLQKLDKLVVLYDSNDINLDGETKDSFTESVRDRYNAYGWHTALVENGTDLEAIHAAIETAKASGKPSLIEVKTVIGYGSPNKQGTNAVHGAPLGADETASTRQALGWDYEPFEIPEQVYADFKEHVADRGASAYQAWTKLVADYKEAHPELAAEVEAIIDGRDPVEVTPADFPALENGFSQATRNSSQDALNVVAAKLPTFLGGSADLAHSNMTYIKTDGLQDDANRLNRNIQFGVREFAMGTILNGMALHGGLRVYGGTFFVFSDYVKAAVRLSALQGLPVTYVFTHDSIAVGEDGPTHEPVEHLAGLRAMPNLNVFRPADARETQAAWYLAVTSEKTPTALVLTRQNLTVEDGTDFDKVAKGAYVVYENAADFDTILIATGSEVNLAVSAAKELASQGEKIRVVSMPSTDVFDKQDAAYKEEILPNAVRRRVAVEMGASQNWYKYVGLDGAVLGIDTFGASAPAPKVLAEYGFTVENLVKVVRNLK

SEQ ID NO: 13201 - protein, 309 aa, Vibrio vulnificus YJ016
MKTIAVIGSNMVDLISYTDRMPKEGETLEAPSFKMGCGGKGANQAVAAAKMGADVVMVSKVGDDMFADNTIRNFQSYGINTQYVSKVPQTSSGVAPIFVNSTSQNSILIIKGANEFLKPDDIDKAESTLVECSLIVLQLEVPLETVYAAIEFGNKHSIPVLLNPAPAVPELDIEYACRCDFFVPNETELEILVNKPVETVEQIKEAATILLNKGLNNIIVTMGSKGALWLSKDGKDVFIEPTKVNAVDTSGAGDAFIGCFSHYFMQTGDVQKSLEKASLFAAFSVTEKGTQFSYPSIEQFEEFETKHSK

SEQ ID NO: 13202 - protein, 346 aa, Escherichia coli
MSDNIRVGLIGYGYASKTFHAPLIAGTPGQELAVISSSDETKVKADWPTVTVVSEPKHLFNDPNIDLIVIPTPNDTHFPLAKAALEAGKHVVVDKPFTVTLSQARELDALAKSLGRVLSVFHNRRWDSDFLTLKGLLAEGVLGEVAYFESHFDRFRPQVRDRWREQGGPGSGIWYDLAPHLLDQAITLFGLPVSMTVDLAQLRPGAQSTDYFHAILSYPQRRVILHGTMLAAAESARYIVHGSRGSYVKYGLDPQEERLKNGERLPQEDWGYDMRDGVLTRVEGEERVEETLLTVPGNYPAYYAAIRDALNGDGENPVPASQAIQVMELIELGIESAKHRATLCLA

SEQ ID NO: 13203 - protein, 366 aa, Prunus persica
QMGLAENQLCFDLIEEWVLKNPEASICTAAGVNEFKDIAIFQDYHGLPEFRNAVANFMGKTRGNQVTFDPDRIVMSGGATGAHEMIAFCLADPGDAFLVPVPYYPGFDRDLGWRTGVQLIPVACVSSNGFKVTRAALEAAYEKAQKDNIRVKGLLITNPSNPLGTVLDRETLRSLVAFINEKKIHLVCDEIYAATVFSQPSFISIAEIIEEDIGCDRNLVHIVYSLSKDMGFPGFRVGIVYSYNDAVVNCARKMSSFGLVSTQTQHLIASMLSDNDFVDRFIAQSAKRLKARHMRLTMGLAQVGTSCLKSNGGLFVWMDLRQLLKEQTFEAEMALWHTIIHEVKLNVSPGSSFHCPEPGWFRVCFA

SEQ ID NO: 13204 - protein, 219 aa, Anaplasma marginale str. St. Maries
MKIFLDTVDTESMSVLCKTGIVDGVTTNPLLLSRAEKPSRELLAEICKLVAGPVSVEVIATDADGMVNEGLQLAQIAENVVVKLPMTFDGICACKTLSSVHKVKVNVTLCFSVTQAILAAKAGAYFVSPFMGRIDDLGGSGASLIEDISCVYSQYGFATQILAASVRSPMHVVEAAKAGADIVTVPVAVFKQLFLHPLTDRGLEDFLKAWGNSGKSYLA

SEQ ID NO: 13205 - protein, 315 aa, Escherichia coli [sequence omitted]

SEQ ID NO: 13206 - protein, 394 aa, Legionella pneumophila str. Paris
MTDVYVVDVLRTPVGKAPRGVFKNTLPDDLLAHTIKCLIHRHQNIDWQEIADVVIGCAMPEAEQGMNVARIASLLADLPQSVPAMTINRFCSSGIQSIVTAADTIRNQEAHLALGGGVESMSMVPMGGNKYTANPSIFNDEHVAIAYGMGITAENVAKRWEITREQQDEFAIESHKKAIAAQERLDFNAEISPIEISIRYPDLKTSKVEIKKKLINKDEGPRADTSYEAISKLKPVFALNGTVTAGNSSQTSDGAGVALLASEKALKQYDLKPLGRLMSYAVAGVPPEIMGIGPVKAIPMALKRAGITLDQLDWIELNEAFAAQALAVIKDLDLPREKVNPLGGAIALGHPLGATGTIRTATLLHGLRRIKGRYGMVTMCIGTGMGAAAIFEAL

SEQ ID NO: 13207 - protein, 483 aa, Arabidopsis thaliana
MFVNFKYFSFFIRTKMDGVTGGGTNIGEAVTAPPPRNPHPATLLNANSLPPPFLSKTYDMVEDPATDAIVSWSPTNNSFIVWDPPEFSRDLLPKYFKHNNFSSFVRQLNTYGFRKVDPDRWEFANEGFLRGQKHLLKKISRRKSVQGHGSSSSNPQSQQLSQGQGSMAALSSCVEVGKFGLEEEVEQLKRDKNVLMQELVKLRQQQQTTDNKLQVMVKHLQVMEQRQQQIMSFLAKAVQNPTFLSQFIQKQTDSNMHVTEANKKRRLREDSTAATESNSHSHSLDASDGQIVKYQPLRNDSMMWNMMKTDDKYPFLDGFSSPNQVSGVTLQEVLPTTSGQSQAYASVPSGQPLSYLPSTSTSLPDTIMPETSQIPQLTRESINDFPTENYMDTEKNVPEAFISPSPFLDGGSVPIQLEGIPEDPEIDELMSNFEFLEEYMPESPVFGDATTLENNNNNNNNTNGRHMDKLIEELGLLTSETEH

SEQ ID NO: 13208 - protein, 511 aa, Oryza sativa
  misc_feature (110)..(110): Xaa can be any naturally occurring amino acid
  unsure (1)..(511): unsure at all Xaa locations
MGLLGLNRLMSIQREQRCRQIEANRLLASTDKRKGSPCKQDNSRCSKRERYSQPDLPEDIWRHIHSLLSLQDAARAACVSRAFLCLWRCRPHLTFSLQTLGLSEWHVKRXGIARDYNKKVDRILKKHSGTGMKKFEIEFYGPSNANTYYHLNNWLEIAITSGIEELTLRLTPDVTKYNFPCSLLSDGRGDLIQSLHLSHCSFRPTVEVVSLRSLTSLDLCLVRITDRELGILLSNSLVLEKLGIKYCDKINCLKIPCVLERLSSLEVFECYSLQMVESKAPNLCSFCFGGEQVQFSIGEPLQMKNLQVIFPNSISFGRAELPFSMPNLETLNISSRCEMSHTPTAPGKFLHLRYLSITFAGWRFSRAYDYFSLVSFLDASPLLETFILCILQKGKHDLTLRDPIYPRQMSERQHDSLKNVKINGFSSTKSLVELTCHILQNTTSLECLTLDTTRIEFRCSDSSVDVCLPSDRDAIKGAHKALLAIRTYIEGIVPATVKFSVLEPCRRCYAW

SEQ ID NO: 13209 - protein, 188 aa, Arabidopsis thaliana
  misc_feature (177)..(177): Xaa can be any naturally occurring amino acid
  unsure (1)..(188): unsure at all Xaa locations
MANNDEITTSSHASPAVNHESISRAKQRIKDGLATRRSWRVMFDLHSTGLPHGVSDVFSRIKTNLAYFRSNYAIVILNVIFFSLIWHPTSLIVFTGLVFLWIFLYFLRDVPLKVFRFQIDDRAVLIGLSVITIVLLLLTNATFNIVAALMAGAVLVLIHAVIRKTDDLFLDEEAATXETSGLTSHPSS

SEQ ID NO: 13210 - protein, 336 aa, Photobacterium profundum SS9
MKVLVTGGMGYIGSHTCVQMINAGLEPIILDNLSNSNSAVLERVHALTGVTPLFYEGDVRNQTILSQIFSEQKIDSVIHFAGLKAVGESVEKPLEYYDNNVHGTLVLVDEMAKANVKSLVFSSSATVYGDPSEMPINESTPTGDVTNPYGRSKYMVEECLRDIHFADPTWSITLLRYFNPVGAHPSGSMGEDPQGIPNNLMPFIAQVAVGRREYLSVFGDDYPTPDGTGVRDYIHVMDLSDGHVAALNVVGQQSGLHIYNLGTGQGSSVLEMVNAFSLACGHDIAYKICPRRSGDIAECWANTQKAEQELGWKARYKVADMAQDTWRWQSENPQGY

SEQ ID NO: 13211 - protein, 216 aa, Pyrococcus abyssi GE5
MVRAILFDLDETLISERPLVLFILPQVYEILAKRLNVSKSEAREIFLGEIERMRGRYEWHDWNYFFRRFSLPFKFEELILSYPEKITVLPGVRDTLEILREKYRLAIVTSGPRYQILKLKVSGLLDYFDAVITRDDVKAIKPNPKIFIAALERLKVEPNKAVMVGDSLEQDVLGAKALGIKTVWINQKGDNGYNLPDFEISSISELLEVLEDEGDI

SEQ ID NO: 13212 - protein, 377 aa, Synechococcus sp. CC9605
MPSKPRRTGGTRERRSSGTTDLLRLYLQDIGRVDLLTNEEEVTLARLVQRREALLSQQQKLAESDAAIGELHRLEELQRREANQHSHWPTKQEWARAADLPLPELQQRIDRGYQAWAEQAQLEAKDLKLALRNGRRAKDHMIQANLRLVVAVAKKYQQRGMEILDLVQEGTLGLERAVEKFDPTRGFRFSTYAYWWIRQGITRAIATQSRTIRLPVHVTEKLNRIKRVQQEIASNEGRIASIADLARELGISEDTVRQTLARVPRSVSLDTRVGREQDTQLGDLIEDGHATPEQTLTHDELHNDLEHLLDELTSREAAVLRRRFGLEDDTPQTLAQIGEELKLSRERVRQIETRALLKLRQPQRRSKIRDYIQSLDS

SEQ ID NO: 13213 - protein, 296 aa, Saccharum officinarum
MSGGGQDLQLPPGFRFHPTDEELVMHYLCRRCASLPIAVPIIAEIDLYKFDPWQLPRMALYGEKEWYFFSPRDRKYPNGSRPNRAAGSGYWKATGADKPVGTPKPLAIKKALVFYAGKAPKGEKTNWIMHEYRLADVDRSARKKNSLRLDDWVLCRIYNKKGGLEKPAAASSGDHKPMVFAAGAVSSPPEQKPFVATPGGLPPAAFTADLAAYYDRPSDSMPRLHADSSCSEQVLSPEQLACDREVQSQPKISEWERTFASDPVNPAGSMLVDPVVGGHAGDPLLQDILMYWGKPF

SEQ ID NO: 13214 - protein, 549 aa, Synechococcus sp. CC9605
MAKFVFITGGVVSSIGKGIVAASLGRLLKSRGYNVSILKLDPYLNVDPGTMSPFQHGEVFVTEDGAETDLDLGHYERFTDTAMSRLNSVTTGSIYQSVINKERRGDYNGGTVQVIPHITGEIRERIHRVASNSNADVVITEIGGTVGDIESLPFLEAIREFREDVGRNDLAYIHVTLLPFIGTSGELKTKPTQHSVKELRSIGIQPDVLICRSDRDISDDLKRKIGGFCGVPTRAVIPSLDADSIYAVPLILEQEGLCREVLDVLNLTDHDSDMAAWEQLVNKLRNPGPSVKIALVGKYVQLNDAYLSVVEALQHACIAQDASLDLHWVCAEQIEADGADTLLRGMDAVVVPGGFGNRGVDGKIAAIRCAREQRVPFLGLCLGMQTAVIEWARNQAGLTGATSAELDENTPHPVIHLLPEQQDVVDLGGTMRLGVYPCRIAPGTLAQRLYGDEVVYERHRHRYEFNNSYRNLFLESGYVVSGTSPDGRLVELIELKGHPFFTACQYHPEFLSRPGQPHPLFRGLIEAAQQRLPDSPAEALRQQGDIAIP

SEQ ID NO: 13215 - protein, 377 aa, Cryptococcus neoformans var. grubii H99
MSFRAPNLIRSTVGRRAGQTLNLRSQVIRRRFATEGGPEITKPSAPRSSNTGYIFAGLGVAAVGAAYYFYGTGRTEHDSTNKADTVVREAVATVEAKTGLRRGKDEYQKVYNRIAETLDKEGYDDGSLAPVLLRLAWHASGTYSKADGTGGSNFATMRFKPEAEHSANNGLHVAREHMEKIKQEFPWISYGDLWTLGGVCAIQESGGPTIPWRPGRIDGYAAQVTPDGRLPDATQAQDHLRFIFNRMGFNDQEIVALSGAHAMGRCHPNRSGFDGPWTFSPVTFSNQYFALLRDEPWQWKKWTGPAQFEDKKTKTLMMLPTDMALVKDKSFKKYVDIYADNEEKFFSDFAKAFSKLIELGVPERQWAGEPWTMATSD

SEQ ID NO: 13216 - protein, 559 aa, Candida albicans SC5314
MSSLQQPIPPNSTLATTASSNQSGSNDFVKKLFLMLQEDSYKEVVRWTVKGDSFVVINTNEFTKDILPKHFKHSNFASFVRQLNKYDFHKVKISNEAKASYPYGEDAWEFKHPEFRINDAEALENIKRKGPTAKKSASNVTIKTEANNNGTQPTCNHNYSQLVSATNHLKEQVESLKNDKHSLYQEISVLERKYKTVVENIVAINTFNERYYRSMNVLINSIVQNGMKLPPLDFPPPVQLGPDSGIGSNLGPISSDTALPSISHHLSSPLPHHQQLLNRTIRPISSPIDGIPLVKLQQQSLGQNLQAPIGTPSAVPFSEEASSSIQAATPAPLAQPVAQPINQPPPPPPPPATQQQPLPPPPPPATATSQIPSAPPPPTQQQVGTSSSSVPTISPKSQGIVVSNSASPTTSAQISTTSVPNPKFHVLLVEDDNVCIQLCRKFLVKYGCSVTVVTDGLNAISTVEHTKYDLVLMDIVMPNLDGATATSVIRSFDTKTPIIAMTGNIEDNDLVTYLQNGMSDILAKPFTKDDLYAILSKHLLDPKENKQDNEPTVKKQKLS

SEQ ID NO: 13217 - protein, 356 aa, Alkaliphilus metalliredigenes QYMF
MLKKLFIPGPVTVSEDVLEKMGTQMIGHRSKDASVLQRSVSDKMRQLMYTKNEILLSTSSGSGLMEGAIRSCTQKRAAVFSVGAFGDRWFKMAKANGVPADKFSSEMGQPTTPEMVEAALSTGKYDLITITHNETSTGVMNPVAEIAEVIKRYPDVIFCLDTVSSLAGTKIPVDELGVDICIASTQKCLGLPPGLAVCSFSQKALDAARKVENRGLYFDLVELYDYIQKKDYQYPSTPSISHMYALDYQLTKILDEGLDKRFARHLEMAKYVREWAAENFALLPEEKYASNTLTTIKNTKEISIKDLNGKLGEKGYAISNGYGDLKDKTFRIAHMADTTLDEIKELLTIIDEIMKE

SEQ ID NO: 13218 - protein, 421 aa, Bradyrhizobium japonicum USDA 110
MKTAKRSPIWHPFTQHALQRDMTKVVRGEGAYLYTEDGRRLIDAISSWWVVTHGHCHPCIVNAIREQAGKLNQVIFAGYTHDPAEQVATELLKVTSPALEHVFFSDSGSTSVEVALKMALGYWRNTGRERTKIVVMQHSYHGDTIGAMSVGSRGIFNAAYGALMFEVTSIPFPARDCEQRALDALENACRNEHPAAFIVEPLILGAGGMLMYSPSVLREMKRICEAFDVLFIADEVMTGWGRTGTLFACEQADVTPDIACYSKGLTAGALPLAVTLCRADIFDAHYSEDRTRTFFHSSSYTANPVACAAAKANLDLWQDQEYRWRLASLARMQEQALAPFRLDSRFANVRRTGTVTAVELNTRDAGYLADIGPRLLAFFQARDLLLRPLGNTIYVMPPYCVTAADLDEIYTAIRDAADLLM

SEQ ID NO: 13219 - protein, 575 aa, Synechococcus sp. CC9605
MQPPRDETLRTLLGDLYPVDSSGDGQELSSQLLQILSESSGDGDKAEPTERWDGRDVVLITYADTIGDEGGPGLQALKSFVNRHLQPFAAVIHVLPFLESTSDGGFAVASHTKLEQRFGDWSDLAALSQGRRLMADLVLNHVSASHPWVQQFMRDEQPGRSCVLEAAPDPCWADVVRPRSSNLFTQLRGAKGSRQVWTTFGPDQVDLNWRSVEVLLGFARLMQRMARHGVRWIRLDAVGFVWKEPHTSCIHLPQAHQLVRVLRLLLDQVGPDGVVVTETNVPEQENLSYLRSGDEAHLAYNFPLPPLLLEASVSGRADLLNAWLSRWPDLPPQTGLLNFTACHDGVGLRPLEGLMPQKRLLQLLIGCEQRGGLVSHRMLSSGEEVPYEINISWWSAMADGGIDPTHLQRERFLLTQLLILALPGVPAFYLPALLAAPNDLTRFRRTGHRRDLNRPQFTAQALERRLADPDSDVFALLPVLRRALAERAVHPALHPDAPMTVLSTDRSDCVILRRSRGGETLVAVHNVTSARLSFRLRGLGGDLNQPWADCLSGHVFEPHQSHSLEPYAVHWLVQP

SEQ ID NO: 13220 - protein, 325 aa, Yarrowia lipolytica CLIB122
MSSNSLEQLKAAGTTVVTDTGEFESIAKYKPQDATTNPSLILAASKKPEYAKLIDEAVSFAKTKSSDPKEQVNIALDQLLIEFGSEILKIVPGRVSTEVDARLSFDKDATIKKALQLIDLYKAKGISSDRILIKIASTYEGIQAAKELESKHGIHCNLTLLFSFVQAVACAEAKVTLISPFVGRILDWHKAATGKTYDAAEDPGVISVKNIFDYYKKFDYKTIVMGASFRNTGEIKELAGCDFLTISPGLLEELLNSTDPVPQKLFADKAKSLDIEKKAYLDEEPIFRRDFNEDQMATEKLSDGIRKFAADAVTLSKLIETKLSA

SEQ ID NO: 13221 - protein, 98 aa, Zea mays
  misc_feature (65)..(65): Xaa can be any naturally occurring amino acid
  unsure (1)..(98): unsure at all Xaa locations
TAALRSPAVVGSALGRAAARATAYRHLCTSETADEAAAVERRLWRGGMGGILDYGIEDAEDGHTXDRNAVRFASAVDSSGLLTTGLASVSIKITCALY

SEQ ID NO: 13222 - protein, 222 aa, Saccharomyces cerevisiae
MSNEDYGYDYDYLFKIVLIGDSGVGKSNLLSRFTTDEFNIESKSTIGVEFATRTIEVENKKIKAQIWDTAGQERYRAITSAYYRGAVGALIVYDISKSSSYENCNHWLTELRENADDNVAVGLIGNKSDLAHLRAVPTDEAKNFAMENQMLFTETSALNSDNVDKAFRELIVAIFQMVSKHQVDLSGSGTNNMGSNGAPKGPTISLTPAPKEDKKKKSSNCC

SEQ ID NO: 13223 - protein, 268 aa, Haemophilus influenzae R2866
MSRFETQFATLNAKNEGAFVPFVTLCDPTFDHSFEIICTLVDNGADALELGFPFSDPLLDGPVIQAANNRALTAGHSSEDSFKLLEKVRSKYPEIPISLLLCANLIFAKGLDAFYQRCAEVGVDAVLVADIPLLAKGDYVQTAKKHGIQPVFICPPNADEETIQGVAKNSEGYTYLVSRAGVTSAENQAHAANLDTLVEQLKAHNAPPILQGFGIAQPEQVKEALSLGAAGAISGSATVKIIERNLDNHEQCLTELAEFVQTMKAATK

SEQ ID NO: 13224 - protein, 454 aa, Asparagus officinalis
MGPPDVVPSEHVEFDFSDVFGPSPTPTSTGVNVFASDGSTPAASDDIVYTEPAVILARSHSLVGPTALVCQSPRLRKHILHEADLELVECPSGVEGEQDKPFSCVAEEHEVPSSENVERVGLEDFDFLKVVGQGAFGKVFQVMKKGTSEIYAMKVVRKDTILEKNHSEYMKAERDILTKIDHPFIVQLRYSFQTKYRLYLVLDFVNGGHLFYQLYHQGLFREDLARIYTAEIVSAVSHLHANGIMHRDLKPENILLDADGHVMLTDFGLAKEFEENTRSNSLCGTIEYMAPEIIQGKGHDKVADWWSVGILLFEMLTGKPPFIGGNRDKIQQKIVKDKLKLPAYLTSEAHSLLKGLLQKEASKRLGGGPAGSNEIKNHKWFKLINWRKLEAREIQPSFKPNVAGKICVANFEERWTSMPLTVSPVASPVAGSGNFSGFTYVKPSVFLQKPSPLG

SEQ ID NO: 13225 - protein, 355 aa, Zea mays
  misc_feature (6)..(6): Xaa can be any naturally occurring amino acid
  unsure (1)..(355): unsure at all Xaa locations
MSAYCXKYKDELIKNAGYIGTPGKGILAADEPTGTIGKRLSSINVENVEENRRALRELLFCCPGALQYISSVILFEETLYQKTKDGKPFVDVLKEGGVLPGIKVDKGTIDVAGTDKGTTTQGHDDLGKRCAKYYEAGARFAKWRAVLKIGPNEPSQLAIDLNAHGLARYAIICQENGLVPIVEPEILVDGPHDIDRCAYVTETVLAACYKALNEHHVLLEGTLLKPNMVTPGSDSKKVTPEVIAEYTVRTLQRTVPAAVPAVVFLSGGQSEEEATRNLNAMNKLSTKKPWSLSFSFGRALQASTLKAWAGKVENLEKARAAFLARCKANSEATLGTYKGDAAADTESLHVKDYKY

SEQ ID NO: 13226 - protein, 612 aa, Arabidopsis thaliana
MKMDKKTIVWFRRDLRIEDNPALAAAAHEGSVFPVFIWCPEEEGQFYPGRASRWWMKQSLAHLSQSLKALGSDLTLIKTHNTISAILDCIRVTGATKVVFNHLYDPVSLVRDHTVKEKLVERGISVQSYNGDLLYEPWEIYCEKGKPFTSFNSYWKKCLDMSIESVMLPPPWRLMPITAAAEAIWACSIEELGLENEAEKPSNALLTRAWSPGWSNADKLLNEFIEKQLIDYAKNSKKVVGNSTSLLSPYLHFGEISVRHVFQCARMKQIIWARDKNSEGEESADLFLRGIGLREYSRYICFNFPFTHEQSLLSHLRFFPWDADVDKFKAWRQGRTGYPLVDAGMRELWATGWMHNRIRVIVSSFAVKFLLLPWKWGMKYFWDTLLDADLECDILGWQYISGSIPDGHELDRLDNPALQGAKYDPEGEYIRQWLPELARLPTEWIHHPWDAPLTVLKASGVELGTNYAKPIVDIDTARELLAKAISRTREAQIMIGAAPDEIVADSFEALGANTIKEPGLCPSVSSNDQQVPSAVRYNGSKRVKPEEEEERDMKKSRGFDERELFSTAESSSSSSVFFVSQSCSLASEGKNLEGIQDSSDQITTSLGKNGCK

SEQ ID NO: 13227 - protein, 1191 aa, Synechocystis sp. PCC 6803
MSPIALNLLQSTPYQVGGSLAANHPSYSQREADRELLAQLRAGKFCYVFNCRQMGKSSLRVRAMHQLQQDGVVCVSIDITSLGTEADPQKWYNGIITQLYLGLPLAGKVALKPWLREREQLSPIQKLREFVETIILQTIGDRQIVIFIDEIDKVLSLPFSLDDFFSYIRFCYNQRADDHEYNRLSFALFGVATPSDLIDNKTQTPFNIGQAIALTGFTLTEALPLSAGLPVDEVSAREILGEILAWTGGQPFLTQKVCELVAEALQKGDLDCQSQTIATTIAQLIEEKIIRHWESNDEPVHFRTIGDRLLKDQARSGQLLGLYQEILHKGAIPADDSVEQTVLRLTGLVVKVKGQLRPYNPIYQAIFNAQWVSKELNKLRPYGTNLQAWINSNYQDSSRLLRGEALREALAWASSKNLSGVDYRYLNASQNQEQEASLAANQILTQANVKAKRMISFGIVVLMMSLGGSAIALSQAYFATLKQQRSQQGTELQRLGTSAQRQFTFDQIPGLVTALEAGNQLHHLVKADETLSQYPATSPLVSLQQILSQIAEKNVLTGHRDGVTSVAISSHKNLIASASRDGTVHLWTPQGEFLREFTGHTGSIYRVDFSPNGKIFATAGQDQTVKIWDLDGNLLQTLKGHQDSVYSVSFSPDGEILASTSRDRTVRLWHWRSGKTLAVLGGHTKSVDDAQFSPDGQTLVSVCRDGQIRLWDLDGNLIRQFGLPEVAFFGVNWHPNGNLLAVAADDGTVRLWTPQGEIKATLSGHDEFVTRVVFTPDGKQLFSSSSNGSVIHWSTSGKMLKKYQGYPEAIFGLALASNGALLAIGAENNLVKVWDMSPKSDLVNLNLPAVLGAVAENAKTNTIALAMENEPLILFNTKNRSRQFLSDASQNLDRLKFSADGQWLLGQRGRQWQLWQLQTKSQLLKTWRTDISRVYDVDLRTTPTSPQWAIAMATGSGEVQLWQGTKNNQTSGNQSQGVPIELNDPIVLALGNSIQRKEPIRSVSLHPTLPQLAAGDEQGNLTLWNFDGTLIRSIVAHGDRLNQLQYSPNGKYLLSAGREGTAKIWSVEGQLLHTLKSDPLPIDQIAISPDSQWIATAASDGMVRLWDQQGNLRGEFTSTSGSLLGLDFNRQGQWLLAVAQNGDLQSWPVTPEKERLRQLVEQGCDWLRDYLATEKQPAQTYSLEFCQPTGN

SEQ ID NO: 13228 - protein, 357 aa, Prochlorococcus marinus str. MIT 9312
MLTNQNFIKVFFLETHVERISNLQDIKKAKLDRETGLFLYEDMTLGRRFEDKCAEMYYRGKMFGFVHLYNGQEAISTGVIGAMRKKHDWFCSTYRDHVHALSAGVPSFEVMSELFGKATGCSKGRGGSMHLFSKEHHLLGGYAFIGEGIPVALGAAFSSKYKKEVAGNNSSDSVTAAFFGDGTCNNGQFFECLNMAQLWKLPIIFVVENNKWAIGMAHDRATSNPEIWRKASAFGMHGEEVDGMDVLAVRGAAQRAIERARAGEGPTLLECLTYRYRGHSLADPDELRSEREKEFWSKRDPIKKLAHEIINGKFATEEELKIIEKKIDTEISESVKNALEAPEPPSQELTKYIWAED

SEQ ID NO: 13229 - protein, 270 aa, Nocardia farcinica IFM 10152
MKVALAQLASPDAETAAHRLERVRQSLAAFRADADLIVLPELWRVGYNHFADYQAAAETLDGPTVQVLAAVARERRCYLHIGSIVERADGDRLRNTAVLLDPDGRIAHRYSKIHVFGYRSEEARLLQPGRQIRVADTAFGRTAAITCYDLRFPGLWSELVDAGAEIVVVPAAWPAARLAHWRLLTGARAVDNQVIVIACNAVGTHNGVELGGHSRVVDPWGEVLGEAGAEEGFTVVDIDPAVVARTRAEFPVLADRLDDYRGLNRCEVPA

SEQ ID NO: 13230 - protein, 313 aa, Prochlorococcus marinus str. MIT 9312
MVSTLGVPAEPPKRRGNDPISWYLQNIGRVPLLTPAEEIELGNQVQKMMILTEDGQLNEKIKEFTTQQKRIIKIGRRAKERMMKANLRLVVSVAKKYQGKGLELLDLVQEGSLGLERAVEKFDPTRGYKFSTYAFWWIRQSMTRAIACQSRTIRLPVHLSERLAAIRKVSRELAHKLGAMPSRIEIAEAMDIDVEELDSVLRQALSTSSLDAPVNGDDGRSFLGDLIADSNTEEPLDKVEQKMHQEQLGKWLSHLSEQEQHVLKLRFGLDGNERHTLAEIGRLLEVSRERVRQVELKALRKLRNLTRKLPSGI

SEQ ID NO: 13231 - protein, 151 aa, Triticum aestivum
MSIVRRSNVFNPFADLWADPFDTFRSIVPAISGGNSETAAFANARVDWKESPEAHVFKADLPGVKKEEVKVELEDGNVLVVSGERTKEKEDKNDKWHRVERSSGKFVRRFRLPEDAKVEEVKAGLENGVLTVTVPKAEVKKPEVKAIQISG

SEQ ID NO: 13232 - protein, 396 aa, Sesamum indicum
MALKLNAINFQSPKCPSFALPPVASVRSPKFFMASTLRSGSKEVETVKRPFNPPREVHVQVTHSMPPQKIEIFKALEDWADNNILVHLKPVEKCWQPQDFLPDPSSDGFDDQVKELRERAKEIPDDYFVVLVGDMITEEALPTYQTMLNTLDGVRDETGASPTSWAIWTRAWTAEENRHGDLLNKYLYLSGRVDMRQIEKTIQYLIGSGMDPRTENSPYLGFIYTSFQERATFISHGNTARLAREHGDLKLAQICGTIAADEKRHETAYTKIVEKLFEIDPNDTVLAFADMMRKKISMPAHLMYDGRDDNLFDHFSSVAQRLGVYTAKDYADILEHLVARWKVANLTGLSADGRKAQDYVCGLPPRIRRLEERAQGRAKQAPKIPFSWIHDREVQL

SEQ ID NO: 13233 - protein, 284 aa, Mesorhizobium sp. BNC1
MQEDVRRKLIKAAMKAPYLGREEEHELALQWKERQDQQALHRMIMAHMRLVIAMAGKFRNFGLSMSDLIQEGHVGLLEAAARFDPEREVRFSTYATWWIRASMQDYILRNWSIVRGGTSSAQKALFFNLRRLRMKLQKAGGTTPSEDVYREVAQALRVSESDVAMMDSRLAAADASLNAPLRSDSDPTSERIDFLICDKPQPDELVREAIDGERKAQWLHQALGTLNGRELTIVRERRLSEEGATLEALGASLGISKERVRQIESRALEKLRTALVKHHPELAA

SEQ ID NO: 13234 - protein, 336 aa, Glycine max
MLMPPSSFTLLLTLLLLFLTYEAESGETPPPTPPPPFRPGIAVLVCVLTTIISLTSLLLLYIKHCNGGIPDGGGGNSAPWTVAPFSGRKNSGIDRSVVESLPVFRFGALRGQKEGLDCAVCLNKFEAAEVLRLLPKCKHAFHVECVDTWLDAHSTCPLCRYRVDPEDILLVEDAKPFRQSHQQQRNKEEERVRLNLDLEKQEIVESRRRHSSVGVGEGETTEEQQQSRRWTTSFRRSLDSISATSRKKNESVGVGCFVRPRKDGMLLTQETERASVERRLEHRIIVSPGQGPGPGPGPGPCGLEQRWSDLQASDLLYLTSEMIMMRDSWNGRGSGV

SEQ ID NO: 13235 - protein, 472 aa, Propionibacterium acnes
MRTWKKGTAVASTSTLDNVINLCKRRGFVFPCGEIYGGTRAAWDYGPFGVELKENIKRQWWRAMVTRRDDVVGLDSSVILPREVWVASGHVGVFNDPLTECLSCHKRMRADHLQEGHAAKHGIADPDSISLEEVNCPNCGNKGQWTEPRDFNMMLKTYLGPVEDKSGLHYLRPETAQGIFVNFQNVLTSARKKPPFGIAQTGKSFRNEITPGNFIFRTREFEQMEMEFFVEPGTDEEWHQYWIDVRTAWYTDLGINPDNLRHYEHPKEKLSHYSKRTVDVEYKFGFSGSDWGELEGIANRTDFDLGNHSRHSGKDLSYYDQANNKRYLPYVIEPAAGLTRSLMAFMVDAYTEDEAPNAKGGVDKRTVLKLDPRLSPVKAAVLPLSRNSDLSPKARDLAARLREHWNVDFDDAQAIGKRYRRQDEIGTPFCITVDFDSLEDDAVTIRERDTMAQQRVSIDKVEEYLGGKLLGC

SEQ ID NO: 13236 - protein, 164 aa, Zea mays
  misc_feature (48)..(48): Xaa can be any naturally occurring amino acid
  misc_feature (111)..(111): Xaa can be any naturally occurring amino acid
  misc_feature (126)..(126): Xaa can be any naturally occurring amino acid
  unsure (1)..(164): unsure at all Xaa locations
MLISAAVLAITAARSSYQQVVAMPGLSSALQLVADAALTKLHGEDLQXDVQTDAIMPRLHNEKSTVRSLHLSMHRGAINISPHHARIFYEFHLQMPPHDDIANNGCLDDGXLHLIPNHRGKLDSHXLLHIVDCNINFRLTTPYIIYFAAAARDDPIIPQQLPPP

SEQ ID NO: 13237 - protein, 215 aa, Bacteroides thetaiotaomicron VPI-5482
MDTTKTIAALFDFDGVIMDTETQYTVFWDEQGRKYLNEEDFGRRIKGQTLTQIYEKYFSDLPEAQQEITAGLNIYEKSMSYEYIPGVEAFIADLRKHGAKIAVVTSSNEEKMQNVYNAHPEFKGMVDRILTGEMFARSKPAPDCFLLGMEIFGATPENSYVFEDSFHGLQAGMTSGATVIGLATTNTREAITGKAHYIIDDFSEMTFEHLLALHR

SEQ ID NO: 13238 - protein, 599 aa, Burkholderia vietnamiensis G4
MNDVNDHLSRRRAPVVGRLAPHADVQAQARRNLMSSVTHSSLPNGGNGGLGSPELPRFAHIMRAFIEAGWAHYVQRLHLGRNVSGIASQAGHTSDDDAKRFRETLERLGPAFVKFGQLLSLRRDMLPEIYIEELQKLQDNVAPFSGAQARAIVESGLGRPVHELFLEFDESPLAAASIGQVHAARLFDGTSVVVKVQRPGIEPIIQADLNVLRFLARRLERYVPESRRFGPLDLVEEFAQIITEELDYRTEGRNGDHLREDLQDDPGVFVPRIYWDFTSSRVLTMERSLGHKMAEQTDADPADRKRLAANLMASFLKQVFEHGFFHGDPHPGNVFVRADGRLCFHDFGIMGRLSAHDQESLGQLILAVGSADVPWMVDAYFDMGVAASEVNREAFTRDVYGALGAYYEAAGKGYSFGEIVRQFAHLSQRHQIRLPRQFLLVSKAFMLVESQAITLDASFNAIKALQDYAPHLVSRRILRGFTPLSELSRGFRALHSIHHAIDRFPDILNRAVDVLGSGTATVHVQHEQLQGLEKHIDRASNRLSLSLIIASIVVGSSIVMAFHGGPHYAGIPILGLVGFVVAAVMGLAWAIAILRSGKF

SEQ ID NO: 13239 - protein, 546 aa, Bacillus licheniformis
MKKYRVNVQGMTCTGCEEHVAVALENMGAKRIEVDYRRGEAVFELPNGLEVETAKKAIAEAKYQPGEAEEVQSQELIQLGDEGDYDYIIIGSGGAAFSSAIEAVKYGAKVAIIERGTVGGTCVNIGCVPSKTLLRAGEINHLAKNNPFVGLHTSADDVDLAPLIKQKNELVTDLRNSKYVDLIDDYGFELIKGERKFVDEKNVEVNGIQLSAKRFLIATGASPAVPNIPGLDEVDYLTSTTLLELKKVPKRLTVIGSGYIGMELGQLFHNLGSEVTLIQRSERLLKEYDPEISEAITKALTEQGINLVIGAIYERVEQDGDMKKVHIEINGKKRIIEAEQLLIATGRKPNTESLNLHAAGVEVGSRGEIIIDDYLKTTNSRIYAAGDVTLGPQFVYVAAYEGGVAAGNAIGGMNKKLNLEVVPGVTFTTPAIATVGLTEQQAKEKGYEVKTSVLPLDAVPRALVNRETTGVFKLVADAKTLKVLGAHIVAENAGDVIYAATLAVKFGLTVEDLRGTMAPYLTMAEGLKLASLTFDKDVSKLSCCAG

SEQ ID NO: 13240 - protein, 407 aa, Brassica napus
  misc_feature (124)..(124): Xaa can be any naturally occurring amino acid
  misc_feature (371)..(371): Xaa can be any naturally occurring amino acid
  unsure (1)..(407): unsure at all Xaa locations
MARKMLADGELDNAAAAEEATEAHYDFDLFVIGAGSGGVRAARFSANNGAKVGICELPFHPISSEEIGGVGGTCVIRGCVPKKILVYGATYGGELEDARNYGWEINENVDFTWKKLLQKKTDEXILRLNNIYKRLLANAAVKLYEGEGRIVGPNEVEVRQIDGTKISYTAKHILIATGSRAQKPNIPGHELAITSDEALSLEEFPKRAVVLGGGYIAVEFASIWRGMGGTVDLFFRKELPLRGFDDEMRALVARNLEGRGVNLHPQSGLTQLTKTDEGIKVTSSHGEEFMADVVLFATGRNPNTKRLNLEAVGVELDQAGAVKVDEYSRTNIPSIWAVGNATNRLNLTPVALMEATCFANTVFGGNPTKAXYTNVACAVFCIPPLAVVGLIEEDAVEKATGDILVFT

SEQ ID NO: 13241 - protein, 236 aa, Triticum aestivum
  misc_feature (112)..(112): Xaa can be any naturally occurring amino acid
  misc_feature (135)..(135): Xaa can be any naturally occurring amino acid
  misc_feature (138)..(138): Xaa can be any naturally occurring amino acid
  misc_feature (146)..(146): Xaa can be any naturally occurring amino acid
  misc_feature (152)..(152): Xaa can be any naturally occurring amino acid
  misc_feature (161)..(161): Xaa can be any naturally occurring amino acid
  misc_feature (179)..(179): Xaa can be any naturally occurring amino acid
  misc_feature (189)..(190): Xaa can be any naturally occurring amino acid
  misc_feature (193)..(194): Xaa can be any naturally occurring amino acid
  misc_feature (196)..(196): Xaa can be any naturally occurring amino acid
  misc_feature (202)..(207): Xaa can be any naturally occurring amino acid
  unsure (1)..(236): unsure at all Xaa locations
MEDERSTQSYQGGEAAEQVEVTDRGLLGNLLGKKKAEEDKEKKEEELVTGMEKKETLFSKLHRSSSSSSSSSDEEEEEVIDDNGEVIKRKKKKGLKEKLQEKLPGLKDTEGXEHATQAYPHRRAPASVQTHHDTXVVXSRRLTTVXVKTEAXPAVPEGGEXGRLLGPGSEEYRLPGGHXEARVTLLRWXXLFXXHXRVEDTXXXXXXDIMDKLPGYHKTGEEDKAAAATGEHKPSA

SEQ ID NO: 13242 - protein, 263 aa, Brassica napus
  misc_feature (26)..(26): Xaa can be any naturally occurring amino acid
  unsure (1)..(263): unsure at all Xaa locations
MLAIFQKAFAHPPEELNSPASHSSAXISPKLPGETLSDFLSLHKDTAFSMTFGDSAVLAYSRPQSSLRQRLFCGIDGIYCTFLGALTNLCTLNRQYGLTGKNTSEAMFVIEAYRTLRDRGPYPADQVLRGLEGSFAFVVYDTQTSSVFSALSSDGGESLYWGISGDGSVVMSDDVKIIKQGCAKSFAPFPTGCMFHSETGLKSFEHPRNEMKAMPRIDSEGVLCGANFKVDACSKVNGIPRRGSEANWALANSRSNFFYFKLF

SEQ ID NO: 13243 - protein, 340 aa, Coprinopsis cinerea
MSQVNVGINGFGRIGRIVLRNALQHGKINVVAVNDPFIDLEYMVYMFKYDSVHGRFKGHVEAKDGKLWVEGKPISVFQEKDPANIPWGSVGADYIVESTGVFTTTEKASAHLKGGAKKVIISAPSADAPMFVVGVNLESYDPKYTVISNASCTTNCLAPLAKVINDKFGIVEGLMTTVHSTTATQRTVDGPSHKDWRGGRAVGNNIIPSSTGAAKAVGKVIPSLNGKLTGLAFRVPTIDVSVVDLVVRLEKPASYDEIKQAVKEASEGPLKGILEYTDEKVVSTDFTGSTSSSIFDAEAGIALNKNFVKLISWYDNEWGYSRRVCDLITYAAAKDKEAGV

SEQ ID NO: 13244 - protein, 368 aa, Magnaporthe grisea 70-15
MSFLQRRQDPGTDAPAPDPSVCTMDETANDWYGVRIASIFVILIGSLLGAAIPIYLVRYRNSERMGFSKLAFFISKYFGTGVIVATAFMHLISPANEILGMDCLKPLLGDYDWSMGIVLMTVMAMFFIEMIGAWFENRSNDKAGHSDALAVSKKSDEEDGSSKEATGTGVKDAGAPADGGMPSNIRGEDHLGHGRAHNEGDTHLAFAGKMTSIIILEAGVILHSVFIGLTLAVSSEFIILFVVLVFHQTFEGLGLGSRLATFDWPADKRRWTPWIFALMYGLTTPIAIAAGLGVKDALQAAPTTRYMVEGISNAISGGILLYTGLVELLAHEFIFNPEMDRASLRYKLFAFGCIAAGAGLMALLAKWA

SEQ ID NO: 13245 - protein, 688 aa, GIBBERELLA ZEAE PH-1
MPSPRHIAAALVATATTASALYVNGTVVAPCDSPIYCHGDILEQVELARPFSDSKTFVDMPAIRPLSDIQEAFDKLEKPLRNNSALADFLDENFDDAGNELEEVSRDDLDTDPKFLDNINDTVIREFTEKVIDIWPDLTRRYDQDAKNCSDCPNSFIPVNRSFVVAGGRFREPYYWDSYWIILGLLRTGGSFIEIAKNTIENFLDFIEEYGFVPNGARIYYLNRSQPPLLSQMIKAYVEYTNDTDILERALPLLVQEHEFFMNNRSVPVYINNETYYLNTYNVSNTRPRPESYREDYITAENTSYYSPESGKVYKGGEELSFKQKEALYGNLASGAESGLDYTVKWIARPEDAIRDNYFPLRYLNTRNIIPVDLNSILYGNEIAIADFYEQTGNNSASEQWREVAANRSYAMHGFLWNETLWSYFDYNLTSKAQQIYFPVDENTTVVDTEDAPKGQQVFFSPTQFYPFWLGAAPDYLKNNPFAVYTAYKRVEYYLDNRDGGIPASNVETGQQWDQPNVWPPLMHILMAGLERVPPTFGIRDPSFVEVRRLALRLGQRYLDSTFCTWYATGGSTSETPKLQSTSDEEEGIMFEKYADNATNVAGGGGEYEVVEGFGWTNGVLIWAVDEFKNRLTRPKCDNLESAHSNDKRDPSAVMLNARDAKRVKKFGRRKRAAEKAAKKRSSRVFYF

SEQ ID NO: 13246 - protein, 398 aa, Ralstonia eutropha JMP134
MSLFSAVEMAPRDPILGLNEAFNADTRATKVNLGVGVYFTDEGKIPLLRAVQEAEKARLTTATPRGYLPIEGIAAYDQAVQSLLFGKESPLITEGRVVTAQALGGTGALKIGADFLKRLYPTSKVAISDPSWENHRALFEAAGFEVVNYAYYDAPTHGLNFAGMVESLKSYPANTIVVLHACCHNPTGVDLSADQWKEVVALIKERNLIPFLDMAYQGFADGIDPDGAAVRLFADSGLPFFVSSSFSKSFSLYGERVGALSIVTTGKEEAQRVLSQVKRVIRTNYSNPPTHGGTVVATVLNSPELRAMWEEELAEMRDRIKLMRHALVDKLAAKGVKTDFSFVKAQRGMFSYSGLTSAQVDRLRNEHGIYAVGTGRICVAALNSRNIDAVVDAIAAVL

SEQ ID NO: 13247 - protein, 675 aa, Porphyromonas gingivalis W83
MNDKKLMNKAADNIRVLAAAMVEKAKSGHPGGAMGGADFVNVLFSEYLIFDPKNPQWAGRDRFFLDPGHMSPMLYAQLALTGKYSMDDLKAFRQWGSITPGHPEVDVMHGVENTSGPLGQGHTYAVGAAIAAKFLAHRFGWMMSQTIYAYISDGGIQEEVSQGAGRIAGHLGLNNLIMFYDSNDVQLSTTVKEVASEDVAMKYRAWGWKVIEIAGNDADEIRKALTEAKGEGERPTLIIGHTLMGKGAVGEDGSSYENMVSTHGQPLSAAGASFAETVKNLGGNPEEPFAIFPEVREMYAARLAELEQIMAERREEEQRWRSTHPDLAAKFDAWFAGQTPQIDWKAIEQKPNQATRSASATVLGTLAGEVENMIVTSADLSNSDKTDGFLKKTHAMKKGDFSGAFLQMGVSELTMACLCIGMALHGGVIPACGTFFVFSDYMKPAVRMAALMELPVKFIWTHDAFRVGEDGPTHEPVEQEAQIRLMEKLHNHSGRRSMLVLRPADVQETTVAWKMAMENTHTPTALILSRQNITDLPANDSRYEEALQAEKGAYIVNTDQNIEVVLLASGSEVSTLVEGAELLRKRGVKLRIVSVPSEGLFRSQSAEYQEEVLPIGIRRFGLTAGLPVNLEGLVGESGAVWGLNSFGFSAPYKVLDEKLGFTAENVYEQVLKILH

SEQ ID NO: 13248 - protein, 919 aa, Corynebacterium glutamicum
MTDFLRDDIRFLGQILGEVIAEQEGQEVYELVEQARLTSFDIAKGNAEMDSLVQVFDGITPAKATPIARAFSHFALLANLAEDLYDEELREQALDAGDTPPDSTLDATWLKLNEGNVGAEAVADVLRNAEVAPVLTAHPTETRRRTVFDAQKWITTHMRERHALQSAEPTARTQSKLDEIEKNIRRRITILWQTALIRVARPRIEDEIEVGLRYYKLSLLEEIPRINRDVAVELRERFGEGVPLKPVVKPGSWIGGDHDGNPYVTAETVEYSTHRAAETVLKYYARQLHSLEHELSLSDRMNKVTPQLLALADAGHNDVPSRVDEPYRRAVHGVRGRILATTAELIGEDAVEGVWFKVFTPYASPEEFLNDALTIDHSLRESKDVLIADDRLSVLISAIESFGFNLYALDLRQNSESYEDVLTELFERAQVTANYRELSEAEKLEVLLKELRSPRPLIPHGSDEYSEVTDRELGIFRTASEAVKKFGPRMVPHCIISMASSVTDVLEPMVLLKEFGLIAANGDNPRGTVDVIPLFETIEDLQAGAGILDELWKIDLYRNYLLQRDNVQEVMLGYSDSNKDGGYFSANWALYDAELQLVELCRSAGVNVRLFHGRGGTVGRGGGPSYDAILAQPRGAVQGSVRITEQGEIISAKYGNPETARRNLEALVSATLEASLLDVSELTDHQRAYDIMSEISELSLKKYASLVHEDQGFIDYFTQSTPLQEIGSLNIGSRPSSRKQTSSVEDLRAIPWVLSWSQSRVMLPGWFGVGTALEQWIGEGEQATQRIAELQTLNESWPFLPSVLDNMAQVMSKAELRLAKLYADLIPDTEVAERVYSVIREEYFLTKKMFCVITGSDDLLDDNPLLARSVQRRYPYLLPLNVIQVEMMRRYRKGDQSEQVSRNIQLTMNGLSTAVRNSG

SEQ ID NO: 13249 - protein, 364 aa, Prochlorococcus marinus subsp. marinus str. CCMP1375
MMQSTNVTNQETTNNISLRSAHAERVSKLSTQEPAQVNRETGLKIFRDMTLGRRFEDKCAEMYYRGKMFGFVHLYNGQEAVSSGVICAMQQKHDWFCSTYRDHVHALSAGVPAREVMSELFGKESGCSKGRGGSMHLFSKEHHLLGGYAFIGEGIPVALGSAFTSRYKKEVFNEKGSNSVTAAFFGDGTCNNGQFYECLNMAQLWKLPILFVVENNKWAIGMAHDRATSDPEIWRKANAFGMKGEEVDGMDVLAVRGAAQRAIERARAGEGPTLLECLTYRFRGHSLADPDELRSAEEKDFWASRDPLKLLEKNLTEKDLVSSKELRAIEKEIDQEVADAVEFAIGSADPKPEELTKYIWAEDI

SEQ ID NO: 13250 - protein, 313 aa, Prochlorococcus marinus subsp. marinus str. CCMP1375
MVSSAPKPAESQKRRSTDPISWYLATIGRVPLLTPAEEIELGNQVQVMMNLTEDGMVNEKTKKFTSHERRSIRIGRRAKERMMKANLRLVVSVAKKYQGKGLELLDLVQEGSLGLERAVEKFDPTRGYKFSTYAFWWIRQSMTRAIACQSRTIRLPVHLSERLATIRKVSLDLAHKLGAMPNRLEIAEEMDIEVEELDSILRQALTTSSLDAPVNGDDGRSFLGDLIADSSVEEPLDKVEQSIHQEQLGRWLTHLSEQEQHVLKLRFGLEGNDRHTLAEIGRLLEVSRERVRQVELKSLRKLRNLTRKLPSGI

SEQ ID NO: 13251 - protein, 73 aa, Vanhouttea leonii
ISGTNGEVMPGQWEFQVGPSVGIEAGDHIWCSRYLLERITEQAGVVLSLDPKPIEGDWNGAGCHTNYSTKSMR

SEQ ID NO: 13252 - protein, 464 aa, Cytophaga hutchinsonii
MSTKFDVIVIGSGPGGYVAAIRASQLGKKVAVVEKAELGGICLNWGCIPTKALLKSAQVYEYIKHAKEYGINVGNAEADFTAVVKRSRDVAAGMSKGVQFLMKKNKIEIIAGFGKLVKGKQVEVTDDKGNKSLYGADHIILATGGRARELPNVKIDNNKIIGYRKAMVLESKPESMVIMGSGAIGVEFAYFYATMGTKVTIVEYLPNIVPVEDEEISKQLEKEYKKMGINIMTGAAVESVDTAGKGCKVTVKKGDATEVIECDIVLSAVGVATNLEGIGLEDVGVATDKGRVLVDDYYKTNIPGVYAIGDIVKGPALAHVASHEGIICVEKIAGLNPEPMDYGNIPGCTYCTPEIASVGLTEKAAKEKGYELKVGKFPFSASGKASAAGAKEGFVKVIYDAKYGELLGVHMIGANVTEMIAEAVVARKLEATGHEIINAVHPHPTMSEAIMEATAAAYGEVIHL

SEQ ID NO: 13253 - protein, 383 aa, Glycine max
  misc_feature (54)..(54): Xaa can be any naturally occurring amino acid
  misc_feature (69)..(69): Xaa can be any naturally occurring amino acid
  misc_feature (78)..(78): Xaa can be any naturally occurring amino acid
  misc_feature (102)..(102): Xaa can be any naturally occurring amino acid
  unsure (1)..(383): unsure at all Xaa locations
HPTLGALGSYLPNASWHNRKIQKEYNFLRFRWPSLNHHYKSIEGGCTCKKCNIXNCVKATSEKSLSLNXSSFDPKSIXDSVKNSLDAFYRFSRPHTVIGTVXALSIISVSLLAVEKISDISPLFFTGVLEAVVAALFMNIYIVGLNQLSDVEIDKINKPYLPLASGEYSFETGVTIVASFSILSFWLGWVVGSWPLFWALFVSFVLGTAYSINVPLLRWKRFAVLAAMCILAVRAVIVQLAFFLHIQTHVYKRPPVFSRSLIFATAFMSFFSVVIALFKDIPDIEGDKVFGIQSFSVRLGQKPVFWTCVILLEIAYGVALLVGAASPCLWSKIVTGLGHAVLASILWFHAKSVDLKSKASITSFYMFIWKLFYAEYLLIPFVR

SEQ ID NO: 13254 - protein, 479 aa, Prochlorococcus marinus str. MIT 9312
MTDSSFDFDLIVIGAGYGGFDAAKHAAGKGLKVAIVESSDMGGTCVNKGCVPSKALLAASGKVREIADYEHLAKFGIHASPVRFERSKIADHANNLVLNVRENLTKTLKRSGVEIILGIGRIEGNQKVGVRDKNGIDKIFTCKNIVIATGSSPFVPRGITLDNRTVFTSDDAVKLEWLPRWIAIIGSGYIGLEFADVYTALGCEVTMIEALENIMPTFDPDITKIAKKNLIQARDIDTKSNVFATKITPGCPVKIELTDAKSKEVVETLEVDAVLVATGRSPNSNNLNLESAGIETVKGFIPIDDQMRVKNGDEIIPNIWAVGDVTGKLMLAHTAAAQGTIAVDNICGGNVEINYKSIPAATFTHPEISSVGLSEAEAKEISAKENFTLGVVKSFFKANSKALAELESDGLLKLIFNKDNGKVLGAHIFGLHAADLIQEISNAISRNQDVIELSTEVHTHPTLSEVVEVAYKQAASQIK

SEQ ID NO: 13255 - protein, 123 aa, Pisum sativum
MQVWPPIGKKKFETLSYLPPLTRDQLLKEVEYLLRKGWVPCLEFELLKGFVYGEHNKSPRYYDGRYWTMWKLPMFGTTDPAQVVKELDEVVAAYPEAFVRVIGFNNVRQVQCISFIAHTPESY

SEQ ID NO: 13256 - protein, 407 aa, Clostridium tetani E88
MKSIIYKLGGNDYMVRNQINELTHKYLKEIIYIRRDIHAYPELGMNEYRTSELIYNELNKLDLEVEKGIGKTGVVALLEGEKPGKTLLLRADMDALPIEETTDLPFKSKNKGVMHACGHDVHTSILLGAAKVLVQLKSEIKGNVKFIFQPAEECNPIGGANLMIEDGVLENPKVDAAVALHVWDLPLGKIGIRHGAMMAQSDRIFIKIKGKSAHGSAPHQGTDTILTAGYVITALQSIVSRNVNPLESAVITLGIVNGGYRYNVIADEVSLEGTVRTFDKNVAEIVPIRIKEVVEGISNSMGCQCEVEYVKGYPLTYNDKELTDIIIKGLENTLGEDNVIMPEKPATGAEDFSFFNKHVPCTFMWIGCKSEENKDNCIVHNPNFICDERSIEIGIKALCASALEYLK

SEQ ID NO: 13257 - protein, 446 aa, Clostridium tetani E88
MIMYTWGDRMFKWNYINNFINDSYEEAVDIRRDIHKYAEYGWTEFRTASKIAEYLKNIGVKVEIGEQNFNKEFMFGLPKKEELERHKNRAIEQGALEKYVNKMQGGFTGVVGIVETGIPGPTTAFRFDIDANEGIESNSLDHRPVKEGFASINDGAMHSCGHDGHISIGLILAKTLMNIKDNLKGTIKFIFQPAEEGVRGAYSMVNKGVVDNIDYFLTGHIGFTANKLGQIITDTKGFLATTKLDVHFKGRSSHAGASPEKGKNALLAAATAALNLQSFSQHGEGASRVNVGVLNAGTGRNVIPEQAEMKIETRGENNNINNYLENKAREVIKGAATMYDLDYEIIVAGSADSAKSDEDFSKIINKQLERIEEVKEIINSNRFSGSEDATYMMNRVQENGGKAVYMIFGTEKSADHHNNSFDFDERVLRIAIKVYAFITIYLNGME

SEQ ID NO: 13258 - protein, 152 aa, Zea mays
MSLVRRSNVFDPFSMDLWDPFDTMFRSIVPSATSTNSETAAFASARIDWKETPEAHVFKADLPGVKKEEVKVEVEDGNVLVISGQRSREKEDKDDKWHRVERSSGQFIRRFRLPDDAKVDQVKAGLENGVLTVTVPKAEEKKPEVKAIEISG

SEQ ID NO: 13259 - protein, 153 aa, Brassica napus
MAPTVMASSATSVAPFQGLKSTAGLPVSRRSNGASLGSVSNGGRIRCMQVWPIEGIKKFETLSYLPPLSTEALLKQVDYLIRSKWVPCLEFSKVGFIFREHNASPGYYDGRYWTMWKLPMFGCTDATQVINEVEEVKKEYPDAYVRIIGFDNM

SEQ ID NO: 13260 - protein, 473 aa, Nocardioides sp.
MNTSPGAPTGVRAFVDSQPIGRRQRIIVLMVFLIMVADGMDITLASHLFPPVIRDWGVPVSAVTLVVSLGVVAMAIGALVSGPVADRWGRKGVTVVGFVLFCLATAGLGLTGDIHSFAALRIISCFGLGAVMPVALTIVADWMPKARRAQMVSIAFAGVGVGSIIGAYLAAAVIPTLGWQVMVLIAGLAPLIILPFFVALVPEPAIISVRRGIPEARIRSALALVAPDRDIAGVDLTRAGLTLGAGEVRAKALFAEILCRPLLGVTLLIWGVFFVVQGSGLLVLQYMPMLLQAPAPGLSTVESGLIVAMYGWGALIGQLTIAFILKRFDRFIALAAFIFWSVVGLLIVAAFGTGFGFFGYFTLLFAIGLSLPATAAAMQSVTTLAYEEEFRATGMGSAGFAGRLGTLTYGALGGTLIGAGFGITTVSLVLAAPLAVSIGLVFSLRALSRRAGIAPEPHQITPGNEVDDAHVST

SEQ ID NO: 13261 - protein, 142 aa, Lycopersicon esculentum
MIKPDGVQRGLVGEIISRFEKKGFSLKGLKLITVDRAFAEKHYADLSAKPFFNGLVEYIVSGPVVAMVWEGKGVVATGRKIIGATNPLESAAGTIRGDFAIDIGRNVIHGSDAVESARKEIALWFPEGIAEWQSSLHSCIYE

SEQ ID NO: 13262 - protein, 631 aa, Bacillus macroides
MKKYRVNVQGMTCSGCEQHVAVALENMGAKGIEVDFSHGEAIFELPEQVEVEAAKKAIADANYQPGEAEEVQPQQQANSMKKYRLNVQGMTCTGCEEHVAVALENAGAKGIEVDFRRGEALFELPYDVDMDIAKKAITEAKYQPGEAEEIQAQSQETEDVSLVDQGNYDYDYIIIGSGGASFSSAIEAVSYGVKVAMIERGTVGGTCVNVGCVPSKTLLRAGEINHLAKNNPFVGLHTSASNVDLAPLVKQKNELVTGMRNEKYVNLIDDYGFELIKGEAKFTNENTVEVNGNHITAKRFLIATGATSSVPNIPGLDEVDYLTSTSLLELKKVPNRLTVIGSGYIGLELGQLFHNLGANVTLVQRSERLLKEYDPEISEVITQALTEQGINLDSGATYERVEQVGDIKKVHVEINGKKRIIEAEQLLIATGRKPNTESLNLHAAGVEVGSRGEIVIDDYLRTTNSRIYSAGDVTLGPQFVYVAAYEGGLAARNAIGGLNQKVNLEVVPGVTFTSPSIATVGLTEQQAKEKGYEVKTSVLPLDAVPRALVNRETTGVFKLVADAKTLKLLGAHVVAENAGDVIYAATLAVKFGLTIENIRETLAPYLTMAEGLKLAAITFDKDVSKLSCCAG

SEQ ID NO: 13263 - protein, 310 aa, Vibrio vulnificus YJ016
MNHIKRVAVIGECMVELRRNNGVLEQGFGGDTLNTAVYLSRLTHEHGVASSYVTGLGRDAFSQQMLSAWQVEALDTEHVFISEDKLPGIYVIETAADGERSFFYWRNDSAAKYWLRGQEIPQLAHALRHHQMIYLSGISLAILPSDCCDALLELLRLLRAQGATIAFDNNYRPALWPSQQQAQSVYRQVLALTDIAFLTFDDEQALYGDETEQQAVDRTQTLGVKEIVIKRGAEPCMVVTQVGIESIASQPVEKIVDTTAAGDSFSAGYLAKRLLGGSTGESALAGHTLAGAVIQQRGALIGTDAMPTII

SEQ ID NO: 13264 - protein, 224 aa, Shewanella oneidensis MR-1
MKLLLVEDNPMLVSELEKQLKQAGYVTDITDKALEADYLVKETQYDCVILDIGLPDGNGLELLEGWRNQGISTPVIMLTARSQWHEKVEGFNAGADDYLGKPFHAQELLARIQALIHRAHGRLNNPNKQLSYGGVTLDEAEQTVSVGEQLYELTAMEFRLLKIFLMSPKKLLSKAQLTDKLYQFDDEKESNVVEVYVTHLRKKLGKTAIETRRGQGYIFHGVAA

SEQ ID NO: 13265 - protein, 278 aa, Rhodopseudomonas palustris CGA009
MTTRIDTRFGELKQQGRPALVTFVMAGDPDLDTSLQILKVLPAAGADVIEIGMPFTDPMADGPAIQAAGLRALKAGTTLKKTLGLVRDFRATDNATPLVLMGYYNPIYIYGVDAFLADAKAAGVDGLIIVDLPPEEDEELCLPAMKAGLNFIRLATPTTDEKRLPAVLANTSGFVYYVSITGITGSASADASAVGAAVQRIKRHTNLPVCVGFGIRTPDAAQAIAAQANGAVVGSALIDALKASLNAEGRATKATVGAVADLVASLAAGVRGAKQAAE

SEQ ID NO: 13266 - protein, 213 aa, Arabidopsis thaliana
MSSSPAILPVTNQQAATQSQPPINSHAFRTFLSRLSSSLRESLSQRRPWLELVDRSSFARPDSLTDSFSRIRKNLAYFKVNYSAIVSLVLAFSLLSHPFSLLVLLSLLGSWMFLYLFRSSDQPLVLFGRSFSDRETLLGLVLTTIVVVFMTSVGSLLTSALTIGIAIVCLHGAFRVPDDLFLDEQEPANAGLLSFIGNSAATSAAASVVAGRV

SEQ ID NO: 13267 - protein, 429 aa, Xylella fastidiosa 9a5c
MSDLDKVTLNAGETSLVLPVLKPTLGNGCVDIAKLTKETGLFTYDSGFTATASCKSAITYIDGEKGVLLYRGYPIEQLAEHSSFLEVAYLLMNGELPRKDEFAKFDDEITHHTMMHESLKNFLGGFHYDAHPMAMLAASVASLSAFYHDTLDLNDLEQRRLAAIRLIAKVPTLAAAAHRYSIGWPIRYPRNNLGYVERFLHMMFEVPSEPLQLNPVVTKALDLLFILHADHEQNASTSTVRLVGSTGANPYASVAAGITALWGPAHGGANEAVLKMLEEIGDAKNVDLVIAKAKTKDKNSPFRLMGFGHRVYKHFDPRAKIIREMAHTVLGELGVNDPLLEVALKLEEAALKDDYFVQRKLYPNVDFYSGIIYKAINIPLEMFTVMFAIARTAGWVSHWLEQQVDPEMKISRPRQIYTGHGERDYKDAR

SEQ ID NO: 13268 - protein, 326 aa, Ralstonia metallidurans CH34
MAKVVRMYETGGPEVLRYEDMEVGDPGPGQVRIRHVAVGLNYADTYFRNGTYPVPLPAGMGVEASGVVQAIGPDVTNVAVGDRVTYTGFLNTLGAYSTERLVPAAPLIRLPENIGFETAAAMTMRGLTSAYLMRRIYAFKRGDTILLHAAAGGVGLIVSQWAKLQGLNVIGTVSSEAKAEVARAHGCDHIINYSHEDVAKRVRELTDGVGATVVFDSVGKNTFMASLDSLKRRGLLVCVGTASGPIPPFDPVLLAMKGSVYVTRPALADYIADPGEKAELAGELFDHVGAGRIRIEINQRYALEDAVQAHRDLESRKTTGSSIFVV

SEQ ID NO: 13269 - protein, 607 aa, Neurospora crassa
MSWRNQGITGSNNIPLGSRRRFAGDGEEEDGARSVTPSAPSSVTNGDRDRDRDGPVYSNDRDVKRGRSPERSEDGPKRRKKRNRWGEATENKAAGLMGLPTAIVANMTSEQLEAYTLHLRIEEITQKLKIDDVVPADGDRSPSPAPQYDNHGRRVNTREYRYRKKLEDERHKLIEKAMKTIPNYHPPSDYRRPTKTQEKVYVPVNDYPEINFIGLLIGPRGNTLKKMETESGAKIAIRGKGSVKEGKGRSDAAHSSNQEEDLHCLIMADTEEKVNKAKKLIHNIIETAASIPEGQNELKRNQLRELAALNGTLRDDENQACQNCGQIGHRKYDCPEKQNYTANIICRVCGNAGHMARDCPDRQRGASWRNDGPGAGRTAGRIGSSGGGDAVDREYEQLMQELGGTGAAPARIEAGPGSFSNGPSGGNGDAKPWQRGPTGGPAPWRTRNMDRDHEGGPGGPPSGPSGGPAPWARDRNERRHDDRDRGDSYYGGDRRHDDYGRGSSGGGGPAPWHQPPPGAPSAPAIPTAPAYPGAYGGYPGYGAPPGMGAAPPPGLPPPPPGAPPGLSGPLNALIQQYANAAPPPPPPAAEAPPPPPMDLPPPPPPGA

SEQ ID NO: 13270 - protein, 153 aa, Glycine max
MSMSMASSSGNSSISTKSQSSGSEGDLQVVITDERKNKRKQSNRESARRSRMRKRNHLDQLTKQLSQLAKNNGEILATIDITTQHYLNVEAENSILRAQMGELSQRLQSLNDIVHDIIINTTTTYERDCYLTSAQNFTTTTYTLCLNQPVFQW

SEQ ID NO: 13271 - protein, 2110 aa, Mycobacterium tuberculosis
MESRVTPVAVIGMGCRLPGGINSPDKLWESLLRGDDLVTEIPPDRWDADDYYDPEPGVPGRSVSRWGGFLDDVAGFDAEFFGISEREATSIDPQQRLLLETSWEAIEHAGLDPASLAGSSTAVFTGLTHEDYLVLTTTAGGLASPYVVTGLNNSVASGRIAHTLGLHGPAMTFDTACSSGLMAVHLACRSLHDGERDLALAGGCAVLLEPHACVAASAQGMLSSTGRCHSFDADADGFVRSEGCAMVLLKRLPDALRDGNRIFAVVRGTATNQDGRTETLTMPSEDAQVAVYRAALAAAGVQPETVGVVEAHGTGTPIGDPIEYRSLARVYGAGTPCALGSAKSNMGHSTASAGTVGLIKAILSLRHGVVPPLLHFNRLPDELSDVETGLFVPQAVTPWPNGNDHTPKRVAVSSFGMSGTNVHAIVEEAPAEASAPESSPGDAEVGPRLFMLSSTSSDALRQTARQLATWVEEHQDCVAASDLAYTLARGRRHRPVRTAVVAANLPELVEGLREVADGDALYDAAVGHGDRGPVWVFSGQGSQWAAMGTQLLASEPVFAATIAKLEPVIAAESGFSVTEAITAQQTVTGIDKVQPAVFAVQVALAATMEQTYGVRPGAVVGHSMGESAAAVVAGALSLEDAARVICRRSKLMTRIAGAGAMGSVELPAKQVNSELMARGIDDVVVSVVASPQSTVIGGTSDTVRDLIARWEQRDVMAREVAVDVASHSPQVDPILDDLAAALADIAPMTPKVPYYSATLFDPREQPVCDGAYWVDNLRNTVQFAAAVQAAMEDGYRVFADVSPHPLLTHAVEQTGRSLDMSVAALAGMRREQPLPHGLRGLLTELHRAGAALDYSALYPAGRLVDAPLPAWTHARLFIDDDGQEQRAQGACTITVHPLLGSHVRLTEEPERHVWQGDVGTSVLSWLSDHQVHNVAALPGAAYCEMALAAAAEVFGEAAEVRDITFEQMLLLDEQTPIDAVASIDAPGVVNFTVETNRDGETTRHATAALRAAEDDCPPPGYDITALLQAHPHAVNGTAMRESFAERGVTLGAAFGGLTTAHTPRREPRRCWPRSRCPRRSGSSRAPTESTRRCWTLVSSRSARASSRYGHWWPAVAVGCAQPACLRAYPQCPLLLHAVDQGLQRRDPRWEADLDVLDEHGTVLLAVRGLRMGTGTSERDERDRLVSERLLTLGWQQRALPEVGDGEAGSWLLIDTSNAVDTPDMLASTLTDALKSHGPQGTECASLSWSVQDTPPNDQAGLEKLGSQLRGRDGVVIVYGPRVGDPDEHSLLAGREQVRHLVRITRELAEFEGELPRLFVVTRQAQIVKPHDSGERANLEQAGLRGLLRVISSEHPMLRTTLIDVDEHTDVERVAQQLLSGSEEDETAWRNGDWYVARLTPSPLGHEERRTAVLDPDHDGMRVQVRRPGDLQTLEFVASDRVPPGPGQIEVAVSMSSINFADVLIAFGRFPIIDDREPQLGMDFVGVVTAVGEGVTGHQVGDRVGGFSEGGCWRTFLTCDANLAVTLPPGLTDEQAITAATAHATAWYGLNDLAQIKAGDKVLIHSATGGVGQAAISIARAKGAEIFATAGNPAKRAMLRDMGVEHVYDSRSVEFAEQIRRDTDGYGVDIVLNSLTGAAQRAGLELLPFGGRFVEIGKADVYGNTRLGLFPFRRGLTFYYLDLALMSVTQPDRVRELLATVFKLTADGVLTAPQCTHYPLAEAADAIRAMSNAEHTGKLVLDVPRSGRRSVAVTPEQRPLYRRDGSYIITGGLGGLGLFFASKLAAAGCGRIVLTARSQPNPKARQTIEGLRAAGADIVVECGNIAEPDTADRLVSAATATGLPLRGVLHSAAVVEDATLTNITDELIDRDWSPKVFGSWNLHRATLGQPLDWFCLFSSGAALLGSPGQGAYAAANSWVDVFAHWPRAQGLPVSAIAWGAWGEVGRATFLAEGGEIMITPEEGAYAFETLVRHDRAYSGYIPILGAPWLADLVRRSPWGEMFASTGQRSRGPSKFRMELLSLPQDEWAGRLRRLLVEQASVILRRTIDADRSFIEYGLDSLGMLEMRTHVETETGIRLTPKVIATNKTARALAQYLADTLAEEQAAAPAAS

SEQ ID NO: 13272 - protein, 493 aa, Haemophilus somnus 129PT
MGNYFNTLNLRQQLDQLGRCRFMEREEFADGVNFLKGKKIVIIGCGAQGLNQGLNMRDSGLDIAYALRPEAIEEKRASFQRASENGFVVGAYQQLIPTADLVINLTPDKQHSKVVADVMPLIKQGAALGYSHGLNIVEVGEKIRQDITVVMVAPKCPGTEVREEFKRGFGVPTLIAVHPENDPKGEGLAIAKAWAAATGGHRAGVLESSFVAEVKSDLMGEQTILCGMLQAGSLVCYDKLIADGKDPAYAGKLIQYGWETITEALKQGGITLMMDRLSNSAKLRAFSLSEQIKEKLDFLFKKHMDDIISGEFSRVMMEDWANGDANLLKWREQTGKTAFENAPKGENIKISEQEYFDHGVLMVAMVKAGVELAFDTMVETGIYEESAYYESLHELPLIANTIARKRLYEMNVVISDTAEYGNYLFANVAAPILAKEIIPTLKRGDLGESTPATEIDNILLRDVNDAIRQHPIELIGQELRGYMTDMKRISSQG

SEQ ID NO: 13273 - protein, 224 aa, Triticum aestivum
  misc_feature (176)..(176): Xaa can be any naturally occurring amino acid
  misc_feature (187)..(187): Xaa can be any naturally occurring amino acid
  misc_feature (200)..(200): Xaa can be any naturally occurring amino acid
  unsure (1)..(224): unsure at all Xaa locations
MRRLWRWYQQSLSSYPVRTQVVSSGILWALGDIGAQAVTHKSASSHHHHAKNPEDKDNEFKIDWKRVGITSSFGFAFVGPVGHYWYEYLDRMVRRRYLPGSFKFVASKVAADGLLFGPLDLGLFFSYVGLASGRSLEQVKDDVKRDIIPALVLGGAIWPAVQIANFRFIPVRYQLXLYVNLVCLLDXCFLSWIEQQGDAXPWKQWFPFVPQRKSEDRKEPTPWI

SEQ ID NO: 13274 - protein, 133 aa, Ralstonia eutropha JMP134
MSYSTKVLDHYENPRNVGSFDKNDDDVGTGMVGAPACGDVMKLQIKVNEAGVIEDAKFKTYGCGSAIASSSLVTEWVKGKTVDQALEIKNTQIAEELALPPVKIHCSILAEDAIKAAVEDYKKKHPAADQKAA

SEQ ID NO: 13275 - protein, 799 aa, Neurospora crassa
MVTGVAVRRAVLLPQCGGSGAGLAALLPFQRSPTMTSSILSAKFCRPFSSVQRPSTTSFTIVSVPFSSSHPGSRPCVQSQRWTSPFGLLRQLSTSQTRLREQPAKEAAAETAEEAAKDVEKVKEYTSEEHLKVHGFTKSERAHKAAHINMSARLSKDGKSQSGTKPGFAEVWRLIKIARPEVKAMSVAFVLLLISSAVTMSIPFSIGRILDLSTQGPAGEVRLFGLTLYQFFGGLAGLLTLGATANFGRIIILRIVGERVVARLRTNLYRRTYVQDAEFFDANRVGDLISRLNSDTVVVGKSITQNVSDGLRSMVSGAAGFAAMFWLSPKLTSIILIMVPPIGLGAVLYGRNIRNLSRQIQKNVGSLMKIAEERLGNIKTSQAFAAEVQEVGRYNKQVRKIFALGRKEAIVSGVFFSSTSYAGNLAILALLIVGGNLVRSGAMSLGDLTSFMMYTVFAGSSLFGVSGFYSELMKGVGAASRLFELEDRKPAIPQTVGVKVESAQGPIKFSNVTFAYPTRPAVTIFNGLDFEIPSGTNVCIVGPSGGGKSTVASLLLRFYNPTSGSITINGIDISKMNAKSLRRRIGMVSQEPVLFSGTIAENIAYGRPRAPRTEIIAAAQKANCGFISDFPEGLETQVGARGAQLSGGQKQRIAIARALLKDPDILILDEATSALDAESETLVNSALAELLKGRSTTISIAHRLSTIKRSDKIIVLSSEGTVAEIGSYTELSANKDSHFSKLMEWQMSGGDVSPDHRPPSGDPHVSEVEEIEEEFAEAENDVDDAVEKDVKSHKEPVRE

SEQ ID NO: 13276 - protein, 480 aa, Geobacter metallireducens GS-15
MDKSSRKTKIVATLGPASSSPEMISKLMEAGADLFRLNFSHGANDQRRETIATIRRLSAARGKEIGILADLQGPKIRTGRMENGAISLRKGDPLDIVTDEVLGTPTLISTIYKALPHDVKPGSRILMDDGLIELKVHSVEGNLVRCTVVEGGTLKDLKGINLPGVHVSAPSLSEKDLRDLEFCLAEGVDYIALSFVRSAEDVEGLKRILFERGIHIPVVAKIEKPEALRNFKSILKAADGVMVARGDLGVEISAEKVPLFQKKIIRACNEAGKPVITATQMLESMISHPRPTRAETSDVANAILDGTDAVMLSGETASGQFPLEAVRTMAKVALDVERYAQMEDTLPQRRHNPSIAEAVAEAACRAAVTVDARAISVMTQSGSTAALISKFRPPLPIIAFTQSLETRRRLSLYWGVKPLPIGPMTGTDEQIAAVESTFLSAGYRKGDVIVITMGVPVEARGSTNLMKVHKLGTGKFFEIF

SEQ ID NO: 13277 - protein, 780 aa, GIBBERELLA ZEAE PH-1
MKRNVLAVMAIVNGLAQANRFSWQSEAETDVAKHGHDYEHKSNDVYKAKEDPQSVESLDDDWDDEKEEEKKQSELDYEKLKLLKEKLRAEKEKSEVKEKEKEYEHDKNKYHDYNSDLKSHKTYDHYKPTITGHHKHHGDHYDVYDYKKPIIVDGKKYDYVHKPITKHHTYTKIHEPEVKPGCYGDRCDRKPCNKCGDNWAQPGCWHCKSHEGESEVTKTTKYAPEKTDDKYQGAKTYTHKGVTVIVPKETKAPEAPKIEKPKEQPKKEEKYEDICRKVTKGHGEHKHEETICDRVKHHKGEHHKVYVEPKKEEKYEDICRKVTKGHGEHKYEETVCDRIKHHKEEKPKKEHKYEDICRKVTKGHGEHKHEETICDRVKYQKEEHPKVYVEPKKEDICDKIKGCPAPAPAPQPHYPKVEPVPAPAPQPYYPKKEDICDKIKGCPAPAPAPAPAPAPAPAPHYPKLEPGPIPAPRPKPEEIKPVPVPAPVPVNPEQISPEGKGSEEAPRVPLTVSKSGANFNTISIAGTIVVGIKVTTKYMKDNCVPLYTSHQLGKTVSNYAEQHSTALPKYLTDYHANISANRSDSNYMSSLFQSQYHTFLAKSTGAKRVLEIGVYVGFSALVWADAVGPDGLVTGLEFEPEYAELSKKVFEANNVKNIDIVVGPAAETIPKLNPSEPYDLVFMDADKTGYPGYLKQILELSKPGSTNRLLRPGALIVSDNVLRRGMVVVDNAVSDDGLPADQLDSILAVREFNEMALKSSRLETFLLPLWDGINLSRLVD

SEQ ID NO: 13278 - protein, 154 aa, Zea mays
MSLVRRSSVFDPFSVDLFDPFDSMFRSIVPPSLSSSAASETAAFASARIDWKETPEAHVFKADLPGVKKEEVKVEVEDGNVLLISGQRSREKEDKGDKWHRVERSSGQFVRRFRLPENAKTEEVRAALENGVLTVTVPKAEVKKPEVKSIQISG

SEQ ID NO: 13279 - protein, 349 aa, Chenopodium rubrum
SKTHFKMTTLETEQEQQPFSQNSPLFLDCLYCEEKYWDYDYHDEDDFGSLNSSKLHDCSLICCEDDEEIQLNALVSKEEKINFDEGDLGGNQLVMETRREALEWMIRVNYHHNFSVITLVLGVNYFDRFMLSFGFQKEMPWMTHLAAVACLSLASKVEETHVPLLLDFQVEHEQIFEAKVVQRMELLVLQHSNGKMNAVTPLSYFGHLIRKLKLKPHFHCKILTRCENIIVSVILDPRFLCYVPSVLAAASMVQTLKEIGLWSILEHQNDIMNTLKLDKVKVEDCYNFIQEVSSNEKARKRKWYNNISSANRNPNNVLELVVSSESSNNDLPSETLPKKCRTMGPPCFG

SEQ ID NO: 13280 - protein, 418 aa, Porphyromonas gingivalis W83
MELKRVVVTGLGAITPLGNSAPETWESLVAGKSGAGPITLFDASKFKTQFACEVKGFDPLQHFDRKEVRKLDRYAQLAQVAADESVKDSGLDLDQLDKNRVGVIVSAGIGGLTTFESEVRDYNPENGPRFNPFFIPKMISDIAAGQISIKYGFHGPNYSIASACASSTNALIDACHLIRLGKANVIIAGGSEASICAAGVGGFNAMNALSTRNDAPQEASRPFSASRDGFVMGEGAACIVLEELEHALKRGARIYAELVGTGLSADAYHLTASHPDGLGAKLVMTNAIEDAGLKPEDIDYVNVHGTSTPVGDISEAKAIKDVFGEHAYKLNISSTKSMTGHLLGAAGAVEAMVCVKSVHEDIVPPTINHQDDDRDPEIDYNLNFTFNEAQKRQVRVALSNTFGFGGHNASVVFKKFEK

SEQ ID NO: 13281 - protein, 481 aa, Prochlorococcus marinus subsp. marinus str. CCMP1375
MSKTKFDFDLIVIGAGYGGFDAAKHAAENGLKVGIVESRELGGTCVNRGCVPSKALLAASGKVRELANADHLALFGIHAAPVRFERQKIADHANNLVANVRNNLTKTLERAGVIILRGQGRLEGPQRVGVRESSGVDKVLTAKDVILATGSDPFVPPGIETDGRTVFTSDEAISLEWLPRWIAIIGSGYIGLEFADVYTALGCEVTMIEALERVMPTFDPDITKIASRNLIAGRDIDAKSGVLASKVKPGCPVKIELADVNTRVVVEELEVDAVLVATGRVPSSKDLNLESMSVETHKGFIPIDESMRVLVDGKPLPHLWAVGDVTGKLMLAHTAAAQGTVAVDNILGNKRKIDYRSIPAATFTHPEISSVGLSEEQAKEISAKENFSLGIIRSYFKANSKALAELESDGLMKLLFRKDNGQILGAHIYGLHAADLIQEVANALARKQSVVDLALEVHTHPTLSEVVEVAYKQAVQQMKKL

SEQ ID NO: 13282 - protein, 160 aa, Anaplasma marginale str. St. Maries
MRRVMVLFGVVIAGVKGFMLTLVSMFRPKVTLRYPSEKGPLSTRFRGEHALRRYDDGEERCIACKLCEAICPAQAITIEAAERGDGSRRTVRYDIDMTKCIYCGFCQEACPVDAIVEGPNFEYATETREELMYNKEKLLCNGDVWEEALDFRIRKNRPYY

SEQ ID NO: 13283 - protein, 229 aa, Arabidopsis thaliana
MQIFVKTLTGKTITLEVESSDTIDNVKAKIQDKEGIPPDQQRLIFAGKQLEDGRTLADYNIQKESTLHLVLRLRGGMQIFVKTLTGKTITLEVESSDTIDNVKAKIQDKEGIPPDQQRLIFAGKQLEDGRTLADYNIQKESTLHLVLRLRGGMQIFVKTLTGKTITLEVESSDTIDNVKAKIQDKEGIPPDQQRLIFAGKQLEDGRTLADYNIQKESTLHLVLRLRGGF

SEQ ID NO: 13284 - protein, 495 aa, Agrobacterium tumefaciens str. C58
MWPSSCRSLLYRLWRYNSIILMTMRNHMRGVLKYLSTGFLAALVLLPVGARAQDNKTVPASHTEMQLSFAPLVKRTAGAVVNVYAERVVQRRVSPFAGDPFFEQFFGQQMPNRTEKQSSLGSGVIVTAGGLVVTNNHVIDGADDIKVALADGREFSSKVLMKDDRVDLAVLQIDAKEQFPVLSLGDSDKIEVGDLVLAIGNPFGVGQTVTSGIVSGLARNQVTQGDFGFFIQTDASINPGNSGGALMNMAGELVGINTAIFSKGGGSNGIGFAIPANLVRVFVAAAERGDANFQRPYIGATFDPVTSDVAEALGLHRARGALVVGVTKGGPAEKAGIEPGQVVTAVNGLEVEHPDALGYRLTTAGIGKSAELTVVEKGKEKKLTIALNTAPETAPRDERLLEGRNPFAGATVANLSPKLADELRMPSQVTGVVITDVKRGSPAYRVGFQPKDVILSLNGADIGSTAAVEKALDDNPGFWRVEILRDGQRIRQFLR

SEQ ID NO: 13285 - protein, 337 aa, Enterococcus faecalis V583
MIWPERPDNWRDGGKPVQEAFTNVAKAISQFTPMNVVVSQQQFQNCRRQLPPEITVYEMSNNDAWVRDCGPSFVINDHGEIRGVDWTFNAWGGLVDGLYFPWDQDDLVAQKICEIEHVDSYRTDDFVLEGGSFHVDGQGTVLTTEMCLLSEGRNPQLSKEAIEQKLCDYLNVEKVLWLGDGIDPEETNGHVDDVACFIAPGEVACIYTEDQNSPFYEAAQDAYQRLLKMTDAKGRQLKVHKLCCPVKNVTIKGSFKIDFVEGTMPREDGDICIASYMNFLITNDGVIVPQYGDENDHLALEQVQTMFPDKKIVGVNTVEVVYGGGNIHCITQQEPKR

SEQ ID NO: 13286 - protein, 113 aa, Glycine max
  misc_feature (104)..(104): Xaa can be any naturally occurring amino acid
  unsure (1)..(113): unsure at all Xaa locations
MADETKNVHEHEAPKVATEESSTATGEVTDRGLFDFLGKKKDETKPEETIDSEFEQKVHISEPVPEVKHEEEKEEKKHSLLEKLHRSDSSSSSSSEEEGEDGVXRKKKKDKKK

SEQ ID NO: 13287 - protein, 461 aa, Arabidopsis thaliana
  misc_feature (103)..(103): Xaa can be any naturally occurring amino acid
  misc_feature (132)..(132): Xaa can be any naturally occurring amino acid
  misc_feature (274)..(274): Xaa can be any naturally occurring amino acid
  misc_feature (334)..(334): Xaa can be any naturally occurring amino acid
  misc_feature (350)..(350): Xaa can be any naturally occurring amino acid
  misc_feature (362)..(362): Xaa can be any naturally occurring amino acid
  unsure (1)..(461): unsure at all Xaa locations
MQIFVKTLTGKTITLEVESSDTIDNVKAKIQDKEGIPPDQQRLIFAGKQLEDGRTLADYNIQKESTLHLVLRLRGGIQIFVKTLTGSTITLDRGEFWQRIDNXRAKIHHKGVVFLPDQQVLIFAGKQLEACXTLADFNIQKESTLHLVLRLRGGMQIFVKTLTGKTITLEVESSDTIDNVKAKIQDKEGIPPDQQRLFFAGKFFDDGRTLADYIFQMVFTLYFVLRLRGGMQIFVKTLTGMFITLDVESSDIIDNVKAKFQEKVGIPPDQQRLXIFAGKQLEDGRTLADYNIQKESTLYLVLRLRGGMQIFVKTLTGKTITLEVESSDTIDNAXPKPPTRKAFPPDQQRXLIFAGKQLEDGXALADYNIQKESTLHLVLRLRGGMQIFVKTLTGKTITLEVESSDTIDNVKAKIQDKEGIPPDQQRLIFAGKQLEDGRTLADYNIQKESTLHLVLRLRGGF

SEQ ID NO: 13288 - protein, 1292 aa, Mucor racemosus
MKESKSTQPDDTLLRDDTADQPATQDTKSKKKETVSIFRLFQFATTRDLLLICIAGFCSCTTGAIQPISILFFGNVLKKLGEAIVEGNDLMEATMPIIKLYVYLGTGVMTAAYISNCLWVLTGENQARRIRQLYVHSILRQEMSWFDKSEEGSLTTRLSADVQLIQDGISEKFGQFLMCFAQFIAGCSVAFSKGWRLSIVMIAVTPAIACTGGVMGILVTKYTVETQDAYADAGSISEQVFAGIRTVYSFSLQNRFAKRYEEKLDKAMRAGIKRGIILGTGLGIFMFCLFAMYGLSFWYGSRLVHDHIMDGSTVLVVFLSMMMGEFSLLQLPTNLAAVSSASAAAYKIFETIKRVPDIDTSSPDGVIPSQVLGELEFKHVKFRYPTRPDTIILKDLSLKIKPGMTVAFVGPSGSGKSTSVQLLQRFYDPMSGSVSLDGKNLKELNVKWLRQQIGVVSQEPVLFNTSIRQNLMMGSENRNISMEEITAACKKANCHSFIKQLPKGYSTLVGEHGGMLSGGQKQRIAIARAILKNPAILLLDEATSALDTQSERLVQKALDEAAANRTTIVVAHRLSTVRNADLIVVMQHGDLIEQGTHDDLIAKGGVYSELVKKQQIQTSSNNTHNRKTKQEEEQEDEILLRNEAMEVNRKSCIELNRASNNASIISVPAARKSRFSVLDGFGREAASRKEAQEKHAKMKAPVWKVFMQMRPQWGWCMLGSIGACIAGTVFPLYALFFAKVITMLNENDDKDYGPMEGPNMYSFLFVILGMFAFLGFALQTVSFEIAGAKYTKTLRSMLFVSFMKQEIGYFDRDENNVGSLTSKLAVDAKNVNEMITRAWPDVVQIAFTSAIGMTIAFMHSWKLTLIIMCMTPLIVGAAGWNSKVQEGFEGSTKEANEQSAEVASEAIKEIRTVTALNKQSYFEERYYNATERPHRLAQRKAYTSSIGFALLQGTSLYTNAVAFYAGSKLITQGNLDLSDMVITMMSIMIMADGVGRSSIFVSTFAKAKIAAITTFEVLNRQPAIDSELEGIEPEGEDIDGDIDFSSIAFRYPARPDIPIFDGEFNLKGKQGQTIALVGPSGSGKSTTIGMLQRWYDPLSGTVRVDNHNVKSYTLGNLRSHMALVSQEPTLFDMTIGENIRFGVDDSKEVTQEEVEAVCKSANIHNFIVSLPKGYDQRVGDKGSQLSGGQKQRIAIARALIRKPKILLLDEATSALDSESEKLVQKALDNIIQEGGRTTITIAHRLSTITNADLICVIKDGKVIEQGNHWQLLKLDGVYKSLVQQQSLSSSSG

SEQ ID NO: 13289 - protein, 643 aa, Vibrio vulnificus YJ016
MVCISHTNSFTRLRSWIPSMDHNPQSQLKLLVIRGKEQGYLTYAEVNDHLPAEIVDSEQVEDIIQMINDMGIKVVETAPDADDLALSDETNITDEDAAEAAAAALSSVESEIGRTTDPVRMYMREMGTVELLTREGEIDIAKRIEDGINQVQSSVAEYPGTIPYILEQFDKVQAEELRLTDLISGFVDPNADETAAPTATHIGSELAESDLEDEDNTDIDDEDEDEDEDGDSSSDSEEDVGIDPEMALEKFTQLRNSYQNLQLAVNEHGRESAQTAQAHELMLDVFKEFRLTPKQFDHLVNELRTAMDRVRTQERLIMKSAVEIAKMPKKSFIALFTGNESNEEWLDQILASDKPYVEKIKLHEEDIRRSIAKLRAIEEETSLSVNNIKDISRRMSIGEAKARRAKKEMVEANLRLVISIAKKYTNRGLQFLDLIQEGNIGLMKAVDKFEYRRGYKFSTYATWWIRQAITRSIADQARTIRIPVHMIETINKLNRISRQMLQEMGREPLPEELAERMQMPEDKIRKVLKIAKEPISMETPIGDDEDSHLGDFIEDTTLELPLDSATATSLKAATKDVLAGLTPREAKVLRMRFGIDMNTDHTLEEVGKQFDVTRERIRQIEAKALRKLRHPSRSETLRSFLDE

SEQ ID NO: 13290 - protein, 615 aa, Saccharomyces cerevisiae
MSSSVVGASSNKKSGIRQSCEIIERERHSNDDTYSMTSTFFKLKENEIMSAQFDSLKYKILLISTAFVCGFGISLDYTLRSTYTGYATNSYSEHSLLSTVQVINAVVSVGSQVVYSRLSDHFGRLRLFLVATIFYIMGTIIQSQATRLTMYAAGSVFYNCGYVGTNLLLTLILSDFSSLKWRMFYQYASYWPYIIIPWISGNIITAANPQKNWSWNIAMWAFIYPLSALPIIFLILYMKYKSSKTAEWRSLKEQARKERTGGLFENLVFLFWKLDIVGILLITVSLGCILVPLTLANETSQKWHNSKIIATLVSGGCLFFIFLYWEAKFAKSPLLPFKLLSDRGIWAPLGVTFFNFFTFFISCDYLYPVLLVSMKESSTSAARIVNLPDFVAATASPFYSLLVAKTRKLKLSVIGGCAAWMVCMGLFYKYRGGSGSHEGVIAASVIMGLSGLLCSNSVIVILQAMTTHSRMAVITGIQYTFSKLGAAIGASVSGAIWTQTMPNQLYKNLGNDTLAEIAYASPYTFISDYPWGSPERDAVVESYRYVQRIIMTVGLACTVPFFAFTMFMRDPELIDKATHEEFTEDGLVVLPDEENIFSQIKALFKHNRSDKESGC

SEQ ID NO: 13291 - protein, 557 aa, Oryza sativa (japonica cultivar-group)
MDFALRLRDAANHHLSRYEPLVLLAAPLLALLAARTLHAAAAAVADRGLRTVLLALAMTAIKLLPGVSAYINAEKRKVVDQLQSGGTSTKSTLRTELPTVGLSNQVINDLETLKARDVNWQGKCSGTVYIAGSESEGHFALINKAYSMFSHTNPLHQDVFKSVAQLEAEVVAMTAALLGIKEKSSGGQICGNMTSGGTESILLAVKTSRDYMRTKKGITKPEMIIAESAHSAYDKAAQYFNIKVRRVPVNKEFLADVKGFKRCINGNTIMMVGSAPGFPHGLIDPIEELGELASRYDICLHVDLCLGGFVLPFARKLGYPIPPFDFCVKGVTSISTDVHKYGLAPKGTSIVLYKNHEIRKISWLSLHNYYSLTDMIMLQNCTKMFKQVTEWTGGLYVSPTIAGSRPGGLIAGAWAAMTSLGLNGYMENTGHIMEVSKKIQRGIEDIPGLFVIGKPDMTVVAFGSDSVDIFEVNDIMSSKGWHLNALQRPNSLHICVTLQHTVIYEEFLKDLKDSVDTVKANPGPISGGRAPIYGAAGKMPDRGMVRELLVEFMDASC

SEQ ID NO: 13292 - protein, 582 aa, Debaryomyces hansenii CBS767
MNYTDVNTTTLHFDQLNLIDKLSILAPYKLYNPSNFINSQINYEIISFVLLISIALSCVVMGAYTTISKPVNALDPNEDMQAKWDGTDNDNCNYYKSTNSDLEMLNIESIGWKHALSLPLIGSVVLYGLYYGLTHFDKDSLMVGLNWYILGMSLFPNYLTYHYLLTVFTRRIQNCFNLQPIFHRYRLTLSKDVDNFPLGVVEPIDKTKFKKVLRHLRKVGVKVIKPNLIKTENQLINCFFDLKFLLILPVSIFVSYGFYRFNPILNSQYPLNQTNWMISDILGINFAVFGINHTRISSFRVAFILLVGLFFYDIYFVFGTKVMVTVATGLDIPIKILIPRSPAIYASNVFVDLYEVLTDSRHWDTPMSILGLGDIVIPGAFVALCLRYDLFKHHEANGKSFHHLQSYPKPYFVVSIISYFIGLLLTVSVLYVYQVGQPALLYIVPCLILGVSLLSLIRGEFGQIFNYSEDIEEPTKEESGDQDSDQDPEDEDSEYSIGDDSEWERLVEEKMEIDEDFEETDLDEIDLLIADQSNPVHVPITYEFESEDDDDTFIIVSDESSDSEEEESSDEDDASVSQSDEE

SEQ ID NO: 13293 - protein, 357 aa, Triticum aestivum
  misc_feature (175)..(175): Xaa can be any naturally occurring amino acid
  misc_feature (222)..(222): Xaa can be any naturally occurring amino acid
  misc_feature (254)..(254): Xaa can be any naturally occurring amino acid
  misc_feature (279)..(279): Xaa can be any naturally occurring amino acid
  misc_feature (343)..(343): Xaa can be any naturally occurring amino acid
  unsure (1)..(357): unsure at all Xaa locations
MMGRKALDYEELNENVKKVQYAVRGELYLRASELQKEGKRIIFTNVGNPHALGQKPLTFPRQVVALCQAPFLLDDPNVGLIFPADAIARAKHYLSLAPGGLGAYSDSRGIPGVRQEVAEFIQRRDGYPSDPELIYLTDGASKGVMQMLNAIIRNERDGILVPVPQYPLYSAAISXLGGSLVPYYLEEEANWGLDLVSTRQSVAEARSKGITVRAMVIINPGXNPTGHCLKSEANIRELLNFCYQENLVLLADEXVYQQNGYQDERPFISARKVMFDMGXPPVSREGQLIPFHTVSKGYWGECGQRGGYFEMTNIPPKTVDEIYKVASIPLSPNVPGRIFMGLXEPPKPGRHSYLNIC

SEQ ID NO: 13294 - protein, 341 aa, Pyrococcus abyssi GE5
MPEKLKVGIIGCGNIFNLAHKPALKSLRTIAKVVAVMDIDEEAARKAGKELNAKVFTSLDEFLEQDMNVVEILTPTYTHAELAIEALKAGKHVIVEKPIALTVEEAEKMIKEAENQELKLFVGHVRRFDKRWIQIKDIIKSRNILPMQIRKIEVQHLPFPADYWYWDESKSGGVIVDLGVHVTDFLRWFFESEPIEVFAVGKAIRGEARVNKTHDHVVMFIKFEGGKTGIGEVSWSYPMPPKYGVFYHHLDIIGKNGRIRYTPMDTPVVGVVKSSFEMPRFSPMLSTFPQAFEAELRHFFECIKSSCEPVVTAQDALIALKIAEKAKESIKKGEPVKVEVN

SEQ ID NO: 13295 - protein, 212 aa, Glycine max
MMNASKFIKCVTVGDGAVGKTCMLICYTSNKFPTDYIPTVFDNFSANVAVDGSIVNLGLWDTAGQEDYSRLRPLSYRGADIFVLAFSLISRASYENVLKKWMPELRRFAPNVPIVLVGTKLDLREDRGYVADHMGSNVITSAEGEELRKQIGAAAYIECSSKTQQNVKAVFDTAIKVVLQPQPPRRKEMARKKRHRRSGCSFVSIMCGGCAA

SEQ ID NO: 13296 - protein, 501 aa, Arabidopsis thaliana
MEKPNPRRPSNSVLPYETPRLRDHYLLGKKLGQGQFGTTYLCTEKSSSANYACKSIPKRKLVCREDYEDVWREIQIMHHLSEHPNVVRIKGTYEDSVFVHIVMEVCEGGELFDRIVSKGCFSEREAAKLIKTILGVVEACHSLGVMHRDLKPENFLFDSPSDDAKLKATDFGLSVFYKPGQYLYDVVGSPYYVAPEVLKKCYGPEIDVWSAGVILYILLSGVPPFWAETESGIFRQILQGKIDFKSDPWPTISEGAKDLIYKMLDRSPKKRISAHEALCHPWIVDEHAAPDKPLDPAVLSRLKQFSQMNKIKKMALRVIAERLSEEEIGGLKELFKMIDTDNSGTITFEELKAGLKRVGSELMESEIKSLMDAADIDNSGTIDYGEFLAATLHINKMEREENLVVAFSYFDKDGSGYITIDELQQACTEFGLCDTPLDDMIKEIDLDNDGKIDFSEFTAMMKKGDGVGRSRTMRNNLNFNIAEAFGVEDTSSTAKSDDSPK

SEQ ID NO: 13297 - protein, 485 aa, Zea mays
  misc_feature (234)..(234): Xaa can be any naturally occurring amino acid
  misc_feature (484)..(484): Xaa can be any naturally occurring amino acid
  unsure (1)..(485): unsure at all Xaa locations
HIRSNPSSPPPISPRNRREGSLPVLKMQIFVKTLTGKTITLEVESSDTIDNVKAKIQDKEGIPPDQQRLIFAGKQLEDGRTLADYNIQKESTLHLVLRLRGGMQIFVKTLTGKTITLEVESSDTIDNVKAKIQDKEGIPPDQQRLIFAGKQLEDGRTLADYNIQKESTLHLVLRLRGGMQIFVKTLTGKTITLEVESSDTIDNVKAKIQDKEGIPPDQQRLIFAGKQLEDGRTXLADYNIQKESTLHLVLRLRGGMQIFVKTLTGKTITLEVESSDTIDNVKAKIQDKEGIPPDQQRLIFAGKQLEDGRTLADYNIQKESTLHLVLRLRGGMQIFVKTLTGKTITLEVESSDTIDNVKAKIQDKEGIPPDQQRLIFAGKQLEDGRTLADYNIQKESTLHLVLRLRGGMQIFVKTLTGKTITLEGEASGHNWTTSKPKIQDKEGIPPDQQRLIFAGKQLEDGRTLADYNIQKESTLHLVLRLRGXQ

SEQ ID NO: 13298 - protein, 739 aa, Photobacterium profundum SS9
MDRKKVVLLVTLITLIGLWFAFDLSQYFTLEQAKAQQLALQDTIAEKPFLSSLVYFAVYILVTALSLPGAAIMTLLGAALFGFWWSLLLISFASTIGATLAFLFSRFILRDWVQAKFGNRIAPINAGIEKDGPFYLFTLRLIPVFPFFLVNLLMGLTPISTRMFYLVSQLGMLAGTAVYINAGTQLGEIESLSGIISAPVLMSLALLGLFPLIAKFIMNIITQRRVYANWKRPEKFDQNMVVIGAGAGGLVSSYIAAAVKAEVTLIERHKMGGDCLNTGCVPSKAIIRAAHTMAEISRAHEFGITTDKPQVNFEKVMSRIHNVIDKIEPHDSVERYSSLGVNCISGEAQILSPWEVEVNGQRITTRNIVIATGARPLVPGISGLQDVNYLTSDSIWSLKVQPKKLLVLGGGPIGCELAQSFSRLGSDVTLVEMAEQLLIREDTDASLLVKESMHKDGVDIKLNHKATRFESITAEDGTRIQRAYLEYNGKEVIVEFDAVMLALGRVANVQGFGLEELGITTTQRGTVDVNDYLQTKYPNIYAVGDVAGPFQLTHAAAHQAWYAAVNGLFGQFKKFKADYSVLPAATYTAPEVARVGINEKEAENLNIEFDVTRYGIDDLDRAITDGEDYGFVKVITPKGKDKILGVTIVGNNASELLAEFTLAMRHGLGLNKILGTIHPYPTMSEANKYTAGVWKQANAPQALLAWVKKYHAGMRNDKSQKITQPTAPNTQAKLEEEQR

SEQ ID NO: 13299 - protein, 604 aa, Desulfitobacterium hafniense DCB-2
MSSAGKQKTGTARLLELAGTKKPLIIGAGVLSALASIVSFVPYIAIYLIVKEVLTALPDLEVLNSALMIRYGWLAFGGVVGNILLYFGALSCSHLAAFGTLYELKVNFATHLAKVPLGFHVMIGSGKLRKITDDNIEKVEGFIAHQLPDLVAAFVAPVVMIVILLAVDWRLGLAALAGVIVAFLIQMSVYGNEGSKAMMKKYQASLEDMNNASVEYVRGISVVKAFRQTVYSFRRLHDTIKAYTSMVIPYTLSWQNSFSAFVALVNNIYLFVVPVGIFIGMRTTDYIGFLSNFIFYLIFVQSVATILMKIMYVNGNAMKIIGGVEAMDRVLAEPELPQPANPQTVTQYDVNFGDVVFSYDKDKKTEALSGVSFVAKQGQITAIVGPSGGGKSTIAHLIPRFFDVSGGQITIGGVDVRQMNSHYLMEKVTFVFQDVFLFKQSVMDNIRMGNPQASDQEVREAAQAAQCHDFIMKLPQGYDTVIGTRGVHLSGGEKQRIAIARAIVKDAPIVVLDEATAFADPENEHLIQKAFERLMKDKTVIMIAHRLSTVQGADKIVVVEEGKVCEEGTHEELLARGGKYAAMWKTYMDTASWTMSQEEVFAHA

SEQ ID NO: 13300 - protein, 525 aa, Rhodopseudomonas palustris CGA009
MIAALTHVARLGRAAFVFAREGVFGVVDPALIPPAGQVPVRLARLIERRGAKSGARLSRALTRLGPAYLKLGQFLATRPDVVGVAMARDLESLQDRLPPFSQDEAEQVIAISLERPVRDLFVSLSPPVAAASIAQVHRGEIELGGVRKQVAVKVLRPNVSARFRRDLSDFFYVAEKAELYSAEARRLRLVEVINTMSRSVAMEMDLRLEAAAASEMAENTKDDPDFRVPTVDWDRTSHNVLTMEWIDGIPLNDHARLKEANVDTVELGRKVIQSFLRHALRDGFFHADMHPGNLFLDRDGKLVAVDFGIMGRLLPKERRFLAEILLGFITRNYRRVAEVHFEAGYVPPHHSVENFAQAIRAIGEPIHNRLAEEISMAKLLTLLLEVTGLFDMRTRPELILLQKTMVVVEGVARSFDPKLDIWKVADPVVREWIQRNLGPIGKVEGALAGAGELGHTLTSLPTIVSRAVTVLNQLEVMTKDGLVLAPETIAAIGRTERGRTRGRTVALWVIAATFIGVLIALSRMI

SEQ ID NO: 13301 - protein, 97 aa, Brassica napus
RTVIVHLQEKVEPCYNLILQLPIDHMGLQIETQSCRKRKNRDSSSSLSSPSCVIDSNPFNSNESSNDSWSASSSPPQQQQEPPLKKTKMEKPILHLS

SEQ ID NO: 13302 - protein, 330 aa, Lactobacillus sakei subsp. sakei 23K
MSILVLGGAGYIGSHTVDQLIERGYDVAVVDNLVTGHKAAINANARFYKGDVRDKEFMRNVFQQEDVSGVIHFAAFSIVPESMQSPLKYFDNNTYGMTALLEVMNEFGVKRIVFSSTAATYGEPKAIPIKESDPQVPTNPYGESKLMMETMMKWADKAYGIKFVALRYFNVVGAKPDGSIGEDHHPETHLLPIVLQVAAGKRDQLSIFGDDYDTPDGTNVRDYVHVLDLADAHILAFEYLKDGHDSNAFNLGSSTGFSNMEIVEAARKVTGKAIPVTMAPRRAGDPSTLIAASDKARETLGWAPKYDNMEAIIETAWNWHLNHPNGYADR

SEQ ID NO: 13303 - protein, 674 aa, Synechococcus sp. CC9605
MCGIGGVFNADRQQTVDRQLLVNMAAIQAHRGPDGFGVEVLDQAGVGFCHARLSIIDLNESRARQPFLTDDGEVLMAHNGEFYDFQRIRADLTAQGVRFSSKSDSEILLRLYQRQGLEATLPLLRGEFAFALFDRSEDCLYLVRDRFGIKPQYWAITPEGLVFGSELKVLFAHPAVERRFTSEGLFHQLMQTMVPGTTAFAGVHQVKPGHVLKVQRVNGHLEVSESTYWDVDFPRKDERDPKRTEADYIAAVRAALLEAVELRMVADVPVGCYLSGGIDSCSILGLASAVSQAPVKAFTIGFDDARYDESPIAREMAEATGAEQDLMRLSGQELYGHMERTIWHAERTIYNTLAVAKFLMSRHVNDVDYKVVMTGEGSDELFGGYPAFRRDMFLHGLDDLPQEERASWESLLQQSNALVKGAMLAENQVDDPDLDAVVGFTPSCLQPWLACAPLVPELLAESHAAALEGYSPGKAIAEQLDADQLDGRHALDKAQYVWIKTMLEGQILTWGGDRVDMANSMEARPAFLDHHLAAVAVQVPPELRIKGKTEKYVLREAMAGLLPEVLYRREKFAFMAPPAHTEPEKWGQMKQLADDYLSDEAIDSAGLLSKAGVLALFERHEDPATTDAERVQMDAVINHLLGVQMLHRMFVAEDVPALARREADRLGWRVLMPV

SEQ ID NO: 13304 - protein, 490 aa, Xylella fastidiosa 9a5c
MTLQLNKNRKTAMSEHYDVVVIGAGPAGYHAAIRAAQLGLKVACVDAALGKDGKPALGGTCLRVGCIPSKALLDSSRQYWNMGHLFNEHGISFKDAKIDVATMIARKDKIVKQFTGGIAMLFKANKITPYYGFAQLQPGNVVKVKQHEGKNIELKGANVILAAGSDSVELPFATFDGETIVDNIGALDFIKVPKRLAVIGAGVIGLELGSVWKRLGAEVTILEAMPDFLAAVDADVAKTAAKEFKQQGLDIKLGAKVSRTEISSKNNKKEVIVTYTDASGKQTFTVDKLLVAVGRKAATKGLLADGTGVQLNERGQIVVDEHCHTGVDGVWAIGDCVRGPMLAHKGFEEGIAVAELIAGLPGHVNFETIPWVIYTEPEIAWVGKTEQELKANNIPYKAGSFPFAAVGRAVAMAEPSGFVKVLAHAETDRVLGLHLIGVNVSELVHEGVLAMEFSGSADDLARICHAHPTLSEAIHDAAMAVSKRAIHKAN

SEQ ID NO: 13305 - protein, 152 aa, Neurospora crassa
MSNQEQTFIAVKPDGVQRGLVGNIISRFENRGFKLVAMKLTQPGQAHLEKHYEDLNTKPFFAGLIKYMNSGPICAMVWEGKDAVKTGRTILGATNPLASAPGTIRGDFALDMGRNVCHGSDSVENAKKEIALWFKPEELNQWNHHSAAWIFE

SEQ ID NO: 13306 - protein, 348 aa, Glycine max
  misc_feature (240)..(240): Xaa can be any naturally occurring amino acid
  unsure (1)..(348): unsure at all Xaa locations
SVCPTTLKRTRIQHGIPRWPSRKINKVNRSLKKIQTVLDSVQGMEGGLKFDPSMGAFVAGGSIIQEIDAPKSTIKDPVPVTQDAFSVPPAPCSEGENFSIKLEGKLKKTNVSSVDYSEDSKSMAINDGSCQMASLCTKVQDCPEQACLGSVLAKEHDKRILNKGGLSVEKFKHNIVGQSSKSLIVDEMDIGVDGDDGVVERNHPTSSSLTDSSNGSGSMMHSSSSGSRSFENQDQSKVKXTIIDCGSKLIVKATYREDTIRFKFDPSEGCFRLYEEVAARFKLQNGLFQLKYLDDEEEWVMLVNDADLQECIEILDDIGTRSVRFLVRDMPSVLSSSGSSNSYLGGSS

SEQ ID NO: 13307 - protein, 492 aa, Candidatus Blochmannia floridanus
MNNYFNKLTFIQKIKHLGQCRLMKKNEFSDGVRALLSKKIVIIGCGSQGLNQGLNMRDSGLNITYALRRDSIINQSQSYIRAMKYGFSVGTYDELIPEADFVINLIPDKYHESLIQKIEPLMKYKAVLGYSHGFHIVEIGVKIRQDITVIMVAPKCPGTEVRQEYQRGFGVPALIAVHEENNAYGTGMELAKSWACSIGSNKAGVLESSFVAEVKSDLMGEQTVLCGMLQVGSIFCFDKMVEDGLDSGYAGKLVQNGWEVITEALKQGGITLMMDRLSNVSKLRAFELSDQLKNILTPVFEKHMEDILDGSFSKNMMLDWINKDCKLLSYRQNNSQLLFEKAPVYCETILEQTYFDHGVLMVAIIKASVELAFDIMVKSGIKPESAYYESLHELPLIANTIARKRLYEMNMVISDTAEYGNYLFSDFVLPLLKKEFVPYLKRGDLDLSHVNNIVHIDNILLRDINEMIRTHPIEKVGVQLRSYMKDMVSLSF

SEQ ID NO: 13308 - protein, 379 aa, Arabidopsis thaliana
MTTICDLPRDLVARILSRVPLTSMRRVRFTCKRWNTISKDPSFAKTHFGKAARQFIMMSQSRVSLMSVKLHGDGKLTSLNNLDQVEISKVFHCNGLLLCLTKDKTRLTSLVVWNPYLGQTRWIKPRHAFHRLDVYALGYDKNLKNHKILRFVDSYEPAVKHSIIEHEIFDLKSNAWRVLDATPDWEIDSYQRGVSLKGNTYFFAKEKIVVEGDDVVVIEDFKDFLICFDFTKTVTLSSVREEQLAVLYQQDTCLMEIWVTNKIEPDVVSWSKVFLAVDMEPLTGSFIPFAFFAGSFFIDEEKKIAVVFDKDQEEINDRAYLIGENGYYKEVDLGYMNGYYQQQVDPRGPDPVFPLVCSYSPSLVTIPQGTRGKRKERDY

SEQ ID NO: 13309 - protein, 374 aa, Methanosarcina mazei Go1
MFRFADELGPFKIIHIYEPSIDLKAVLVVDNIARGPALGGVRIAPDVSAEECFRLARAMTLKNAAADLPYGGGKIVVYGDPKMPFEKKSQLLRALAGALRYTEEYIFAPDMGTDEICMACIKDEIGRVVGLPCEMGGIPLDEVGATGWGLFNATEVALKYCDFELKGARVVIQGFGAVGKHAARFLVRKGAVLVGVADSRGAVHNPEGLDVDSLIALKNEGKNVFEYPEGKKLASDEIVSVPCDIWIPAARPDVINGNNVHLLDTKLVVEGANIPLTGEAEKILYDKGILYVPDFIANAGGVICAASEHQKTTRSIVFGLIEEKVRSNTEQVLEASKTRGILPREAAFELAIKRVNRAMKYRRWSIFSSAPGFV

SEQ ID NO: 13310 - protein, 738 aa, Saccharomyces cerevisiae
MHKERPLNKASMIRSPVDEIYMEQTQTAEGTDLLIGDEKTNDLPFVQLFLEEIGCTQYLDSFIQCNLVTEEEIKYLDKDILIALGVNKIGDRLKILRKSKSFQRDKRIEQVNRLKNLMEKVSSLSTATLSMNSELIPEKHCVIFILNDGSAKKVNVNGCFNADSIKKRLIRRLPHELLATNSNGEVTKMVQDYDVFVLDYTKNVLHLLYDVELVTICHANDRVEKNRLIFVSKDQTPSDKAISTSKKLYLRTLSALSQVGPSSSNLLAQNKGISHNNAEGKLRIDNTEKDRIRQIFNQRPPSEFISTNLAGYFPHTDMKRLQKTMRESFRHSARLSIAQRRPLSAESNNIGDILLKHSNAVDMALLQGLDQTRLSSKLDTTKIPKLAHKRPEDNDAISNQLELLSVESGEEEDHDFFGEDSDIVSLPTKIATPKNWLKGACIGSGSFGSVYLGMNAHTGELMAVKQVEIKNNNIGVPTDNNKQANSDENNEQEEQQEKIEDVGAVSHPKTNQNIHRKMVDALQHEMNLLKELHHENIVTYYGASQEGGNLNIFLEYVPGGSVSSMLNNYGPFEESLITNFTRQILIGVAYLHKKNIIHRDIKGANILIDIKGCVKITDFGISKKLSPLNKKQNKRASLQGSVFWMSPEVVKQTATTAKADIWSTGCVVIEMFTGKHPFPDFSQMQAIFKIGTNTTPEIPSWATSEGKNFLRKAFELDYQYRPSALELLQHPWLDAHII

SEQ ID NO: 13311 - protein, 472 aa, Frankia sp. EAN1pec
MHEVDVLVIGSGPGGQKAAIAAAKLGRSVAVVDKRDMIGGVCINTGTIPSKTLREAVMYLTGLAQREVYGQSYRLKDEITVADLSARTQHVIGREIDVIRSQLTRNRVQVLSGLATFLDPNTVSVRGPGGVEERQVRANKIIIATGTRPARPDSVDFDGRTVVDSDQILDIDRIPGSMVVVGAGVIGIEYASMFAALGTKVTVVERRDRMLDFCDLEIIEALKYQLRDLAVTFRFRESVVSVERHNGGTLTTLESGKKIPADTVMYSAGRQGLTEVLQLQNAGLSADNRGRILVGPDFRTEVDHIYAVGDVIGFPALAATSMEQGRLAAYAACGEPATGMRAELMPIGIYTIPEISYVGSTEDELTERAVPFEVGIARYRELARGAILGDSYGMLKLLVSPEDGRLLGIHVFGTGATELVHIGQAVMGCGGTVNYLVDTVFNYPTLAESYKVAALDAMNKMRAVARISGRHL

SEQ ID NO: 13312 - protein, 400 aa, Xanthomonas axonopodis pv. citri str. 306
MSFFANVEQVPGDPILGLTEAYNADSRPNKVNLGVGIYYDENGRIPLLRAVHKIEQQLAQDAKPRGYLPIDGLAAYDKATQELLFGADSALVTSGRVATSQTVGGSGALRVGADLLKKLLPTATIAISNPSWENHRAVFGAAGFEVVDYTYFDAAIHGLNFDGMLADLAKLEPGTVVLLHACCHNPTGADLSKEQWKQVAGLLKERNLFPFVDIAYQGFDKGIEADAYAVRLLAAEGIDSYVVASSYSKSFSLYGERVGALSVVSATAAEAKAVQSQVKRIIRTIYSSPSTHGAALVAGVLTSPELRDLWEQELTEMRERIHSLRAGLVEKLATLGAPEFDFIQRQAGMFSYSGLTKTQVDRLRDEFAIYAVGTGRICVAALSQRNLDYVAQAVATVSRV

SEQ ID NO: 13313 - protein, 257 aa, Elymus ciliaris
CELDNIMRLTGITGIVNGMDVSEWDPTKDKFLAVNYDITTALEGKALNKEALQAEVGLPVDRKVPLVAFIGRLEEQKGPDVMIAAIPEILKDEDVQIVLLGTGKKKFERLLKSVEEKFPGKVRAVVRFNAPLAHQMMAGADVLAVTSRFEPCGLIQLQGMRYGTPCACASTGGLVDTIVEGKTGFHMGRLSVDCNVVEPADVKKVATTLKRAVKVVGTPAYQEMVKNCMIQDLSWKAPAKNWEDVLLELGVDGSEPG

SEQ ID NO: 13314 - protein, 1021 aa, Nostoc sp. PCC 7120
MVFTRGKVYKNHLNLQKSKGFSTPIKDSISECEAANSGFTPEFQSYENSILDLQEIINLLAEINPFPVAIIGLESHQILFKNKLIDNPVFQQLIPDFLADSDLWTQLNSKLAKGDFISNLVLEIKSSDKTPFLAIISGKLVNYEHKRAAFLVFTDVNTVTGTSEEQQKDTLGKLELSHLIAHTSDSRRLPTIEHSPWTAPSNLMEQVLATISNGIVLTDANQPDNPIIYVNQAFETMTGYSAGEVIGQNCRFLQTNETDQPGLWELRSALREKKECHVIIKNFRKDGTEFWNELYIAPVFDSCEQLTHFIGVQNDITQHLQVLETLQQQKEQYRRIVETASEGIWLLNQNNETTFVNQQMATMLGYTIEEMLGASLFSFMDAEGLDMAQDLLSQRRQGIQEKHKFKFRCKDGSDLWAIISCTPLFDEQRNYTGALGMLTNISDVYDELRLRKQAEASLQESKERLDGILNSLEAVIWSIAADTFEMLYLNSAVVQVYGRSVCEFYDNPKLWFDLIHPEDQQRVSQSIKPLLANGSHELEYRILRQDGQVRWLYNHSHVIYDAVGQPIRIEGVATDITERKNMEEKLVYHAFYDDLTGLPNRVLFMDRLAQTIDQAKESPNDLFAVLFLDLDRFKVVNDSLSHLVGDQLLVSFAQRLQSCLQPEDTLARLGGDEFTILLSHIQSIDDATRIAEKIHQALKLPFNLSGYEVFTTVSIGIALSTNDYVQAADLLRDADTALYCAKEQGKAWHIVFDSTMYDRAVALLQLETDLRWAIARQELYVVYQPIVSVATGKITGFEALVRWQHPERGLISPVEFIPVAEETGLIIQIGQFVLRESCQQLKQWHLEFPEFQHLSINVNLSGKQFSQPYLVEEIEQLLQEFDLDPSSIKLEITESAIMASPGQAATILQQLKTLGIQLCIDDFGTGYSSLAYLHCFPIDILKIDRSFTKRIDSDSEQLAIIRAIVTLASNLEMSVVAEGVETVNQLVQLQLLKCDQAQGYLFSKPLSSDKVSLLLAAKIEF

SEQ ID NO: 13315 - protein, 258 aa, Xylella fastidiosa Ann-1
MTQSRWRLDGRTALITGASTGIGLAVARELLGLGADVLLVARDADLLGRVRDELAEEFPERELHGLAADVADDVDRRAILDWVEDCSNGLHVLINNAGGNVTRAALEYTEDEWREIFEINLFSAFELCRYTQPLLACHASTAIVNIGSVSGLTHVRSGVPYGMSKAALHQMTRNLAVEWAEDGIRVNAVAPWYIRTRRTSEPLSDVCYYEQVIERTPMRRIGEPEEVAAAVAFLCLPASSYVTGECIAVDGGFMRYGF

SEQ ID NO: 13316 - protein, 222 aa, Triticum aestivum
HLHANGIMHRDLKPENILLDAEGHAMLTDFGLAKEFRENTRSNSMCGTLEYMAPEIIQGQGHDKAADWWSVGILLFEMLTGKPPFVGNRDKVQQKIVKEKLKLPPFLTSEAHSLLKGLLHKEAGKRLGTGPGGSDEIKKHKWFKPINWRKLDAREIQPSFRPDVAGLTCIANFDVCWTNTPVLDSPAATPVTAGGGQGNFAGFTYVRPAPFLHDLKPPSSSS

SEQ ID NO: 13317 - protein, 329 aa, Prochlorococcus marinus str. MIT 9312
MTQLFYDTDADLSLLNKKTIAIIGYGSQGHAHALNLKDSGMDVIVGLYKGSKSEGKAVSDGLKVFSVSEACEKADWIMILLPDEFQKDVYLKEIEPNLKEGKILSFAHGFNIRFGLIKPPSFVDVVMIAPKGPGHTVRWEYQNGQGVPALFAVEQDSSGNARSLAMAYAKGIGGTRAGILETNFKEETETDLFGEQAVLCGGLSELVKSGFETLVEAGYQPELAYFECLHEVKLIVDLMVKGGLSQMRDSISNTAEYGDYVSGKRLINSDTKKEMQKILKDIQDGTFAKNFVEECDKNKPLMTKLREENSKHEIEKVGKGLRSMFSWLK

SEQ ID NO: 13318 - protein, 493 aa, Thermobifida fusca YX
MTQPTGGRAVFTPGPQGLAHLELLLSGVCPLPGFMAQAEAAELDRPGPPPAGAAWPVPVTLTVPETLADVRELVLADPEGAPLAELTVTESFRDGTVRLAGPIRPAAPPAYGSHRSLRATAADVRSARDERRPLLAVVTDRPLHHRALAQIRAALATLGDADLLVLVDTPLDGEGAATVVLAARPCLPEHTRFAVLTLPTAPADGAPEWSAERRGLLAAHVAAAYGATHLMLEGVGELPGTAAELPVKPVAATEWVYDTVHERWRPADEVPPAQARPEWDTAAVDEALAQGTPLPAWLTPEPVAAALARTRPARTRRGLVLFFTGLSGSGKSTVARGVAEQIRQAGRTVTLLDGDVVRRLLSAGLTFSRADRDLNIRRIGYVAAEIARHGGVAVCAPIAPYAATRAEVRRMAEETGDFFLVYVATPLEVCEARDRKGLYAKARAGEIPAFTGISDPYEPPEDADLVLDTSTESEEESVARVVAALRAGGWLPR

SEQ ID NO: 13319 - protein, 202 aa, Saccharophagus degradans 2-40
MEVVFMNLQTLNPWNWFKHEEAAKQHAAAPAIHSAENSETSAPQLNSLIQLHQQMDKLFDDVFSSFGFPSLGARFADANLLTNRANSLLGGYRPTVDVSGDKTHYHISLDVPGLSESDISIDVSNDVLTIRGSKEEKAEQNEKHVYRMERRYGSFQRTLSLPSDANTDDITAQLKDGVLNLVIAKKDVPPEDVKRIPINSVH

SEQ ID NO: 13320 - protein, 521 aa, Rigidoporus microporus
MPSFASLKSLVVLSLTSLSLAATVALDLHILNANLDPDGTGARSAVTAEGTTIAPLITGNIDDRFQINVIDQLTDANMRRATSIHWHGFFQAGTTEMDGPAFVNQCPIIPNESFVYDFVVPGQAGTYWYHSHLSTQYCDGLRGAFVVYDPNDPHLSLYDVDDASTVITIADWYHSLSTVLFPNPNKAPPAPDTTLINGLGRNSANPSAGQLAVVSVQSGKRYRFRIVSTSCFPNYAFSIDGHRMTVIEVDGVSHQPLTVDSLTIFAGQRYSVVVEANQAVGNYWIRANPSNGRNGFTGGINSAIFRYEGAAVAEPTTSQNSGTALNEANLIPLINPGAPGNPVPGGADINLNLRIGRNATTADFTINGAPFIPPTVPVLLQILSGVTNPNDLLPGGAVISLPANQVIEISIPGGGNHPFHLHGHNFDVVRTPGSSVYNYVNPVRRDVVSIGGGGDNVTFRFVTDNPGPWFLHCHIDWHLEAGLAVVFAEDIPNIPIANAISPAWDDLCPKYNANNPDSGLA

SEQ ID NO: 13321 - protein, 484 aa, Pyrococcus abyssi GE5
MVGSMKMEDVYIWDLNAKWLGITPFQLMENAGSGVARIIEERFGKGLKVAVFCGTGNNGGDGFVTARHLSFENDVTVFLIGDETKIRSEEAKLNWSILKNLEFVKIKILKDSSQVKKLSLEEFDVIVDALLGAGTRGEPREPIRSAIEKINEYHGKAKIVSIDLPSGYPSKVRVKCDFAVTFQWDKEEYRDFDRVIVKIGYPRELYHLIGPAHVKFAFKRKGEHKGQNGKILIIGGSENYYGAPYLAGKASSYLVDLVYLLTPERVARRIDDPNLIVREVPGDNLRGEHIELALELSERVDAVVIGPGIGTKEETKEFVLEFIKKVEKPMVIDADGLKIIAEDLDALKNRKFVLTPHAGEFKLLFGVKPGGSLVEKSKLVKEKAEEINGVILLKGAYDIVSDGKVWLYNKTGNRGMTTGGTGDVLAGVVGSFLALGNEPLRAASAGAFLTGFSGDLVYEEKGEAFTALDVANKIPLALKRILEL

SEQ ID NO: 13322 - protein, 331 aa, Prochlorococcus marinus subsp. marinus str. CCMP1375
MAKLFYDSDADLQLLSQKTVAIIGYGSQGHAHALNLKDSGIDVVVGLYEGSRSASKASSDGLEVMSVADASAKADWIMILVPDEFQRDIYAKEVAPHLKPGKILSFAHGFNIRFGLIEPPSFVDVVMIAPKGPGHTVRWEFQNGQGVPALFAIEQDASGQARSLAMAYAKGIGGTRAGILETNFKEETETDLFGEQAVLCGGLSALVKAGFETLVEAGYQPELAYFECLHEVKLIVDLMVKGGLTAMRDSISNTAEYGDYVSGPRLINADTKKEMKKILADIQDGTFAKNFVAECEAGKPEMKRIREEDSLLPIEKVGKGLRAMFSWLKTD

SEQ ID NO: 13323 - protein, 97 aa, Yersinia enterocolitica
MKIRPLHDRVIVKRKEVESKSAGGIVLTGTAAGKSTRGEVLPVGNGRILDNGEIKPLDVKVGDIVIFNDGYGVKSEKIDHEEVLIMSESDILAIVEA

SEQ ID NO: 13324 - protein, 332 aa, Shewanella oneidensis MR-1
MSDLPNDYAHIHIEQPGAPEVMQLSRSSLPVVGAGQVLIRVSAAGVNGPDLKQRAGAYPPPPGASLILGLEVAGEICALGEGVTQWQLGDKVCALVPGGGYGEYTLTYAAHCLPIPKGFSMVQAAALPETFFTVWGNLFMRAGLKAGETVLIHGGSGGIGSTAIALANRLGAKVIATTGQDEKRDYCLGLGADLVVNYNSQNFVEEVMSFTQGKGVNVVFDIAGGDFINLNLQSLALDGRMVSVSTQRSPKAEVNILQLMAKRIVWTGSTLRPQTVEAKAEIARQLRERVWPLLDSQQIVPHIFATYPLIDAPKAHRLMQSGEHRGKVVLTL

SEQ ID NO: 13325 - protein, 475 aa, Triticum aestivum
  misc_feature (136)..(136): Xaa can be any naturally occurring amino acid
  misc_feature (158)..(158): Xaa can be any naturally occurring amino acid
  misc_feature (168)..(168): Xaa can be any naturally occurring amino acid
  misc_feature (455)..(455): Xaa can be any naturally occurring amino acid
  unsure (1)..(475): unsure at all Xaa locations
MSDSASMAAATEARFSNRDLIGRGSFGDVYRGFDKELSKEVAIKVIDLEEAEDDIEDIQKEISVLSQCRCPYITDYYGSYLHQTKLWIVMEYMAGGSVADLLQAGPPLDEISIACILRDLLHAVEYLHSEGKIPRXTLKAAKYPPDWKPGNVKVADFXGVSAQLTKTXMSRRKTFVGTPFWMPPEVIQNSDGYNEKADIWSLGITAIEMAKGGPPWPDIHPMRVLFMIPRENPPQLDEHFSKPMKEFVSLCLRKNPAERPSAKELLKHRFIKNARKTPKLLERIRERPKFTVKGSIDATQNGQTHIEEDDYGGTIKVDRNTRHAASPSSQGTVRKAAGWDFPDRSEGTGTVRGGLRPPQITSTKDGRFDMPQNPSTPTRTADRENQWRTSGTGSEESSSTNMSKKEAQTDHGRLESSTEYNDQSVSGSGTVVSRSPRASQVYPAGPHHSSKPPSXFSSYRLVIVFCSRARGSSRR

SEQ ID NO: 13326 - protein, 138 aa, Methylobacillus flagellatus KT
MGDTDLSGVKVMVIDDSHTIRRSAEIFLRQSGCEVFLAEDGFDALSKIASHPPDVIFVDIMMPRLDGYQTCSLIKRNPRFKSIPVIMLSSKDGLFDRARGRMAGSDQYLTKPFTQNALLDAVRQHRQHSPGELTMEQE

SEQ ID NO: 13327 - protein, 426 aa, Rickettsia typhi str. Wilmington
MSNQNINKRVVITGLGLVTPVGLNVNSSWKNIVDGVSGIKTITEFDTSKLACKIAGVIDISEHDGFKLENFTQADDINRLSKMDKFIHYGIAAATEAVEDSGWLPEDEKSRDRTGLILGSGIGGLKMIEDTSIKLYKENNGKVSPFFIPASLINLLSGLVSIKYGFSGPNQAAVTACSTGAHAIGDAMRMIKHGYADVMIAGGAEAPVTPVGVAGFVAARALCTKYNDNPEKASRPWDKGRSGFVMGEGAGIVVLEEYEHAVNRGAKIYCEVIGYGSTGDAYHMTAPHPQGRGAYRAMSEALQDAGINPSMIDYINAHGTSTTLGDMIELEATQKLFLESNPKILMSSTKSSIGHLLGAAGSVEFIFSVLTIRDQIAPPTLNLENPMDDVKIDLVKLKARETVVDYVLSNSFGFGGTNASLVIKRI

SEQ ID NO: 13328 - protein, 452 aa, Burkholderia vietnamiensis G4
MTDTISASQHEDTNLRTDAAWLDAHWMPFTANRQFKSDPRMIVSAKDAYYTDAEGRKIFDGLSGLWCTGLGHGRTEITEAVSRQIAQLDYAPAFQFGHPKSFELANKIKELTPAGLDYVFFTGSGSEAADTSLKMARAYWRAKGKGTKTRLIGREKGYHGVNFGGISVGGIGANRKLFGQGIDADFLPHTQLAENKFSRGMPDNGADLADRLLDLITLHDASNIAAVIVEPFSGSAGVVIPPKGYLKRLRDICTAHDILLIFDEVITGFGRSGAMTGADAFGVTPDIMNFAKQVTNGTQPLGGVIATKEIYDTFMAAGGPDYMLEFPHGYTYSAHPVACAAGVAALDLLVKEDAVARVRDLAPHFEAAVHGLKGQRHIADIRNYGLAAGLTIAALPGEPARRPYEIAMRCWAKGFYVRYGGDTIQLAPPFIAEKREIDNLVNALSDALNEVD

SEQ ID NO: 13329 - protein, 338 aa, Sordaria macrospora
MVVKVGINGFGRIGRIVFRNAIEHDDIQIVAVNDPFIEPKYAEYMLRYDSTHGNFKGTIAVEGSDLVVNGKKVKFYTERDPSAIPWSETGADYIVESTGVFTTTEKASAHLKGGAKKVIISAPSADAPMYVMGVNNESYDGSANVISNASCTTNCLAPLAKVIHDNFTIVEGLMTTVHSYTATQKTVDGPSSKDWRGGRTAAQNIIPSSTGAAKAVGKVIPDLNGKLTGMSMRVPTANVSVVDLTVRIEKGASYDEIKEVVKKASEGPLAGILAYTEDEVVSSDMNGNPASSIFDAKAGISLNKNFVKLVSWYDNEWGYSRRVLDLISYVAKVDASKA

SEQ ID NO: 13330 - protein, 451 aa, Solibacter usitatus Ellin6076
MRPRTHMNRYLLKSTIVAALGGLLFGFDTVVISGATSTLSDVYHLTPMLLGFTVASALLGTVLGSMVAAAPSDRYGRRQCLQALAVLYVVTAIGCAAAWNWPAFVVFRFIGGLAIGGSSVIGPMYIAEIAPAAKRGRLVGLFQFNIVAGILIAYLSNYFVGTLALGPEEWRWKLGLAALPAVLFFVTLFGIPQSPRWLIRRGFIAEAREIFRRIGEPDPDREVADVVRSVESEDRTKVEPLFQHKYRRPIFLAIAIGFFNQLSGINAILYYLNDIFKSAGFDKVSSDLQAVAIGGTNLLFTMIAMSLIDRLGRKKLLLTGAAGTAVCLAGVAVIFSTGQGEHLLVWLLIGFIGFFAFSQGAVIWVYLSEVFPNLVRAKGQSLGSFTHWIMNAIIAFTFPLVAALSRPAPFVFFAAMTVVQFVVVLFLFPETAGITLEDMEKQLERKASSGV

SEQ ID NO: 13331 - protein, 365 aa, Triticum aestivum
  misc_feature (107)..(107): Xaa can be any naturally occurring amino acid
  misc_feature (120)..(120): Xaa can be any naturally occurring amino acid
  unsure (1)..(365): unsure at all Xaa locations
TTDDPSSEVRHVKQASWETCHVQCSQRFIWKQRATAKSKKGLSSIGSSRGNAEPVQCCVFLLYQLEYICFNFPPSRERESRGLNCRIHNAPADILIAVTDELPKQSXWWTDFMNDETINXDNESAAKTQPQAGPPVQSSISVHQSASQQAGTTSVHQPPLQQIVTTQSIESSVVAAPSPSASSNTSKTRMRWTPELHERFVDAVNLLGGSEKATPKGVLKLMKADNLTIYHVKSHLQKYRTARYRPELSEGTSERLEASKEELPSIDLKGNFDLTEALRLQLELPKRLLEPLEVQRSLQLRIEEQGKCLQIMIEQQCNPAADKALDASTSVEGSKLSCDPPESSTGKDVPSSSQNGTTEQAGDKE

SEQ ID NO: 13332 - protein, 250 aa, Brassica napus
MTKSYPTVSEDYQNAIEKCKRKLRGLIAEKNCAPIMVRLAWHSAGTFDCASRTGGPFGTMRFDAEQGHGANSGIHIALRLLEPIREQFPTISFADFHQLAGVVAVEVTGGPEIPFHPGREDKPQPPPEGRLPDATKGCDHLRQVFTKQMGLSDKDIVALSGAHTLGRCHKDRAGFEGAWTSNPLIFDNSYFKELLSGEKEGLLQLVSDKALLDDPVFRPLVEKYADDEEAFFADYAEAHLKLSELGFADA

SEQ ID NO: 13333 - protein, 351 aa, Ostreococcus tauri
MITGAQGVRQTRSKTTYEVPQQQQQQSFEWGRTSQRTSHGKPRRGSVMGGTMTTAGADVDMRESYSTYLERSSAADVMTDALPDIDLYDHDNPLAVTQYVNDIYQYWYKVEPDTRVSETYMLIQGDINYKMRAILIDWLVEVHLKFKLMPETLFLTTNLIDRFLELKTVTRRNLQLVGVTAMLVASKYEEIWAPEVRDFVYISDRAYTRQQILEMEKQMLNTLGFHLTVPTPYCFLNRFFKAAGGDRQFQLYASYAVECALPEYGMLKYSGSTLAAAGVYIAIRGLQTGSWNHTMEAHTRLSESEVYPCACDMAELMRKAPTATLTAVYKKYSSEKFMKIATLPVPHDLRL

SEQ ID NO: 13334 - protein, 374 aa, Ostreococcus tauri
MNRSRTSSFSTDRSASTVALAPDGDYERERVSALASWPEYAVDALRSEQDFIVHQSAALWTHRTPALHDPDSQETQLDVAKGLLARERETHGSFVFDARAAHHCAFRSQLVEWILDVCAGERFGPTTADVAIAYTDRVLSKTVVPKTSLHLVALCCLHIAVKYEEIEERVPTMSKLRSWTSNMYSPEIIRKMELAVLIELGWDLGVLTPAHFLESFLALTNGGISDGDDIEHGDAYKERYREELRYFVCQLYSLCVQDTSLLNQPPSQIASAVIATARVHLGVKPMCSPELRAAGNVTPQQIYPLVAHMLKLWDEACAEDEAMDEVETSAEFNSLTIQVPKPIGHDIVSKMGYEHRVTENASPTCPFDMQWDEE

SEQ ID NO: 13335 - protein, 1137 aa, Colwellia psychrerythraea 34H
MYFQAGINTVFRRYNITVVVAFIVIILIAFSAASVRYFNQISQHKKQSLLELQQEAQQLNFMLEQSVQAVVGIQELAEYILKHPNEINIPMPSLLQQENLFYLNKPQHDVIKQGKRLSSNITGIGQISKFGELKKQEIAMANALTPAFIASQNILKEATWFYYISLDNFVNIYPWVDREIWQFSEKALDSQHNKAMRVLTAKNNHVIWSPPYLDAAGGGMNASLGTGVFHQDKLLGSVVIDINLSRLHASLPELESNNQGFVLYNENNDVLLSKRLGKESLSYRASWQDLLPESLQYLSAKHLATMGDTERLGDWFIEKQQLTANGWTLLKYQQYEDFSAPQYSDFIFVFAMLFIGLFAFLMLVNTMTKRTFIKPTTEFISHIEYCAQGDPGKVTPAADWLHWFQVVEDIFAQNRSLLLQLTEQNDVLDSRVIEKTKALQETSTKHQRDYALLRSVMNAIPELIVFNDPDGSLMGCNKAFERLANHSVEQMLGSNSASFMPVPLAEEIKILNALNNNVYPQQALIKAGEFIYQGFCNQFTDEQGNILGTISIFHDVTSQQATQSALVKARDQAEYANRVKIQFLANMSHEVRTPINAMQGMMDLLAHTSLDTRQLHYLVNAQSASSTLLHLVDELLDLSKIEAGKMIVSQDAVNLPIIINKALKLNITNVDHQRVKIIVDMSADVPSNVISDEMRLVQVLANLFNNAIKFTEQGQIKLTIDVLSIDDTVAKLRFRMSDTGIGIASNNQSHLFNAFSQADESMTRKYGGSGLGLSICQQIIKLLGGKIKLTSQLGQGSELSFVLPFQIVQLDTLAQQDSARANNTAQKVTEEFMTTLPAELSQPLLSDITIYAVDQTLSASFTQSIAKMNWLLHGVNSVEALCQLDIADNSILLIGEADFVKQQREQELIAPLNEFRLLCLCQPALTQLNNNTCNYLDQLSVPYLLVDMPLFRYALDQISQALFYKVEHSAQQDKNLSVIAEYSQGSQGIISKKTETTNRQECAITHDKHNLKEVSVLLVEDNLVNQLVAKELLLNMQAKVTIADNGQEALDLLAEQDFDVVLMDIQMPIMDGLTAAKHIRAQSNYQYLPIIAMTAHAREEDKQLSLAAGMNLHMPKPVTGQALLSSIKKVLTNLSAV

SEQ ID NO: 13336 - protein, 1338 aa, Kluyveromyces lactis
MSFLKKKSSTAGHSRSGSASSILNKHVDPANISEFYPSSLDHKVTSGLKNDYSFDSSSKGSRKSSGGSTNSLTSERLLFNWDVTDPSQWTMPRIIQWFRANDFNDQWITFFKRNSISGNKFLKLLAYDNFAPYEKSLQQSKSSSYERFQYLLKKTLEENVVKGNNRNGNRIINNSRSSSESAKVSQRLSTSFSTHIRSTSESALLNIENITKDSSSSEPTTSKKQEASNYSLPLRQAKTNSASALYRRSLISLRNASSTKDNASKNDIKITIPPRPLSTTENTNKSPTTPSSVSPSHTAYTGIFRRQHKTSSSESSLFTSIFGHGVVEEPEETPKPRPVENRRIPAASTVNASTSKQSINVDDKARLWDKIKRKGQLPAEPSSQPAARIIIEEVKESPKAEPPEIVIPEEIYPKRPSDSRELFIMLTKDNSTFSPFNVQPHLGTDVSELKKAVALALGLTHSNFSIHLTDFGAEFGSQIPDGLLADFQKTSFQNIPNKLYIQDLEKKANLNPRPRTETLASQHSTAASTKSKTSVKSNASAASNGEGSSSDLTSIDDQGSSHRRAYPQTPSHYYDNSTSAETDYWSFKDSVPETISDAPHITLPKSRPSLKLNSSVLNTHASEKSTFRIIRQTSDTDIDFNKRRESPYVRVAELAPKRKAPKPPVNGNPVTSGSLPSAAAKNVSESPLESPPKLDRNGKTIYQKNKPRPPPPLTTERSSRRSVSSLSGQDLNEVKESPVQSFTPASTQVMVPQPYKGALETLKPRKSSADLSIRPRMSLRQFSRSNSSLNRKVLSTSRQTLNRTNSKPLVTSSTAADIFDENDISFADAPELSDSDDYSASSDEIIWSRDRKSISNDVPEFSFNTEDTIDLVGTDTTQVSVGATEGSDTPKKMALRPSPDVVYQNLEKFFPDADLDNPILEGLTPPPSPNADSSPPSPRGFEKSLKTKSEQQPAFLSSRGESSQFLTPVKSLKPPKRTKTIRIIAQEASEARKNEVSQKLQRKNTKMWGTKVVEITDKRTISINKSRNSRGEYKEFAWIKGEIIGKGSFGAVYLALNVTTGEMLAVKQVTVPEFSSQDESAISMVEALKSEVSTLKDLNHVNIVQYLGFEEKNGIYSLFLEYVAGGSVGSLIRMYGRFDDQLIRHLTKQVLEGLAYLHSKGILHRDMKADNLLLDNDGVCKISDFGISRKSNNIYSNSDMTMRGTVFWMAPEMVDTAHGYSAKVDIWSLGCVVLEMFAGKRPWSNFEVVAAMFQIGKSKTAPPIPDDTKDLVSPAGQSFLDQCFEIDPEMRPTADSLVGHPFCKTSSSFDFPKTKLAQFIKSNDKLNSSRLRISSQEL

SEQ ID NO: 13337 - protein, 283 aa, Bacteroides fragilis NCTC 9343
MDFKELNNGVKMPIQGFGVFQIPDATECERVVTDALAVGYRLIDTASVYGNERAVGTAIRKSGIPREELFITTKAWISEMGYERTLRALDASLARLGLDYLDLYLIHMPFGDYYGAWRAMEKLYAKGRVRAIGVCNFEPDRLLDLCHNANVIPAVNQIEVHPYTPQTDAIRTMQELGIQAEAWGPLAEGRNGLFTDDILTGIARKYDKSAAQVVLRWHLQRGVVAIPKSVHRQRMQENFNIGDFMLTPEDMAAIASMNTGYNTILDLRAPEEVQRLYGIECPA

SEQ ID NO: 13338 - protein, 255 aa, Elymus dentatus
LDNIMRLTGITGIVNGMDVSEWDPTKDKFLAVNYDVTTALEGKALNKEALQAEVGLPVDRKVPLVAFIGRLEEQKGPDVMIAAIPEIVKDEDVQIVLLGTGKKKFERLLKSVEEKFPGKVRAVVRFNAPLAHQMIAGADVLAVTSRFEPCGLIQLQGMRYGTPCACASTGGLVDTIVEGKTGFHMGRLSVDCNVVEPADVKKVATTLKRAIKVVGTPAYHEMVKNCMIQDLSWKGPAKNWEDVLLELGVEGSEPG

SEQ ID NO: 13339 - protein, 81 aa, Gaertnera rosea
  misc_feature (14)..(14): Xaa can be any naturally occurring amino acid
  misc_feature (48)..(48): Xaa can be any naturally occurring amino acid
  misc_feature (54)..(54): Xaa can be any naturally occurring amino acid
  unsure (1)..(81): unsure at all Xaa locations
TPQDEMRAGMSYFXETIWKGVPKFLRRVDTALKNIGINERLPYNAPLXQFSSWXGGDRDGNPRVTPEVTRDVCLLARMMAA

SEQ ID NO: 13340 - protein, 230 aa, Lactuca sativa
MKSEEQKLIDVNKHRGVRSDGEEDEQLEEGEIVGGDADTLSSSSSSRPGTAIAQHPLEHSWTFWFDTPSAKSKQVAWGSSMRPIYTFSSVEEFWSLYNNIHRPSKLAQGADFYCFKNKIEPKWEDPVCANGGKWTMTFTKAKSDTCWLYTLLAMIGEQFDHGDDICGAVVNVRARQEKIALWTKNAANESAQLSIGKQWKEFIDYNDTIGFIFHEDAKTLDRSAKNKYTV

SEQ ID NO: 13341 - protein, 81 aa, Gaertnera schatzii
  misc_feature (37)..(37): Xaa can be any naturally occurring amino acid
  unsure (1)..(81): unsure at all Xaa locations
TPQDEMRAGMSYFHETIWKGVPKFLRRVDTALKNIGXDERLPYNAPLIQFSSWMGGDRDGNPRVTPEVTRDVCLLARMMAA

SEQ ID NO: 13342 - protein, 193 aa, Lactuca sativa
MATDGAAVDVGGEVAEQPHRLDKKWTFWFDNQSKPKQGAGWGNNLRNGYTFDTVEEFWCLYDQVFKPSKLPGNADFHLFKAGIEPKWEDPECANGGKWTVTSSRKANLETMWFETLMALIGEQFDEADEICGVVASVRQRQDKLSLWTKNAANEAAQMSIGRKWKEIIDVTDKITYNFHDDSKTRTSKGRYSV

SEQ ID NO: 13343 - protein, 206 aa, Glycine max
  misc_feature (191)..(191): Xaa can be any naturally occurring amino acid
  unsure (1)..(206): unsure at all Xaa locations
MADSKEKNRKFVETIELQIGLKNYDPQKDKRFSGSVKLPHIPRPKMKICMLGDAQHVEEAEKIGLDWMDVEALKKLNKNKKLVKKLAKKYHAFLASEAVIKQIPRLLGPGLNKAGMYCLFFGKFPTLVTHQETLESKVNESKAMVKFQLKKVLCMGVAVGNVSMEEKQIFQNVQLSVNFLVSLLKKNWQNXCLYLKSTMGKSYRVF

SEQ ID NO: 13344 - protein, 255 aa, Elymus dentatus
LDNIMRLTGITGIVNGMDVSEWDPTKDKFLAVNYDITTALEAKALNKEALQAEVGLPVDRKVPLVAFIGRLEEQKGPDVMIAAIPEIVKEEDVQIVLLGTGKKKFERLLKSVEEKFPGKVRAVVRFNARLAHQMMAGADLLAVTSRFEPCGLIQLQGMRYGTPCACASTGGLVDTIVEGKTGFHMGRLSVDCNVVEPADVKKVATTLKRAVKVVGTPAYQEMVKNCMIQDLSWKGPAKNWEDVLLELGVEGSEPG

SEQ ID NO: 13345 - protein, 371 aa, Zea mays
IAAAYRCTYSTVHNTRARADELIKTAKCLATPGKGILASDESTGTIGKRLSSINLENVESNRQALRELLFTAPGVFDYLSGVILFEETLYQKTSDGKPFVDVLIAGGVVPGIKVDKGTVEIAGTDGETTTQGLDSLGARCAKYYEAGARFAKWRAVLKVGPAGQGQPSELAVRQNAEGLARYALICQENGLVPIVEPEILTDGGHDIGTCAAATERVLAALYKSLSDHKVLLEATLLKTNMVTPGSDSPKVSAEVIAEYTVAALRRTVPPAVPGVVFLSGGQSEEEATQNLDAMNKLEVLKPWTLSFSFGRALQQSTLKKWVGKKENVAAAQATFVVRCKANSEAALGKYAGSGAGDAAASESLYVKGYKY

SEQ ID NO: 13346 - protein, 363 aa, Desulfitobacterium hafniense DCB-2
MKTKLILVGGFLGVGKTTLLGEAARRLSQTGRKVGLITNDQASELVDTVYLEQTGTEVSEVSGSCFCCNFPGFMEAIDHVNAHKPADIIIAEPVGSCTDLSATILQPLKEKFADKLSVAPLSVLVDPRQLTDILDGRTAGLHPSAAYILRKQLEEADLIVINKTDLLTPLAVEILKKRTAEEWPLASVYAISAKTGEGLAAWLHEAQQRSGAGTHLAEVDYDTYAEGEAVLGWLNATIELQSQGADWDTLGRNLLNSLRSRFGSLNAAIGHVKLLIATDQGYVIGNITGAKDSLDIRESAGTGRKAQLTLNARVQMEPDLLEEIVKEEIAKVQADKITATIAVLKCLKPGRPNPTYRYGTIVG

SEQ ID NO: 13347 - protein, 281 aa, Desulfitobacterium hafniense DCB-2
MKYQRDFLGELLGTFLLVLFGCGSVAVSVLFNSHTGLLQIGIIWGIGVSLAIYATRHLSCAHLNPAVTLAMVATKRMTVKKLPVYLMGQFLGAFCAGLLIYVLFNPSIVALESAQQIVRGTPESMSIAKMFGEYYQLPGSTAVVSMPLAIGAEIVGTFLLVLMIFSLTEGCNLGRPDNNLAPLFIGLTVTSVLCLIAPLTQAGLNPARDFGPRLVAWIFGWGAAAFPDQSGGFFFVYILAPVLGGLAAGLLFTWVLEPLMRKTESQCCEEELAERVSPSLN

SEQ ID NO: 13348 - protein, 657 aa, Synechocystis sp. PCC 6803
MKSLWDDQEANQYQGDLPQRVYTSRLLGREPSLVLHGGGNTSVKCQVTNLVGEKEDILYVKGSGWDLATIEAAGFAPVRMPHLLKLSKLTQLSDRQMVNELKTQMTLASAPSPSVETILHAILPFKYVDHTHADAVVTITNTANGEERIREIYGDHLVIIPYVMPGFDLARVCAEKFAAEAHGGTVGMVLMNHGIFSFGAIAREAYEGMISLVNEAEEYLKNQGVWQISYGQPQKSTTENRLALAQLRCDASKIAGFPLVMRQYQDEASLSFSQRPDLAHISQQGPATPDHVIRTKRLPQLGRDVADYAKKYQEYFQRNDGKSGEVKTMLDPAPRIILDRELGLLTLGTSAKSTAIAGDIYQHTMAIIQRAKGLGGYQALPESDIFVVEYWDLEQAKLKQAGNPPMFAGEVALVTGGASGIGKASVAQLLKQGAAVIALDIQPNISELHNRPDFLGIQCDLTDANAFKQALEQGIAQFGGLDMLVLNAGIFPVARAIAELSTLEWQKVLNINLDANLTLLRECYPLLKLAPKGGRVVVIGSKNVTAPGPGLAAYSASKAALNQLMRVASLEWAKDNIRLNTIHPNGVFDTGFWTEEVLEARAKHYGLTVEEYKGNNLLKVEVTSQDVAELVTAMASPLFGKITGAQLPLDGGNDRVI

SEQ ID NO: 13349 - protein, 189 aa, Triticum aestivum
MAPTVMASSVTSVVPFQGLKSTAGLPVSRRSNGASLGSVSNGGRIRCMQVWPIEGIKKFETLSYLPPLSTEALLKQVDYRIRSKWVPCLEFSKVGFIFREHNASPGYYDGRYWTMWKLPMSGCTDATQVINEVEEVKKEYPDAYVRIIGFDNMRQVQCVSFIDFKPPGCEESGKAYTDHSAWATYKVLL

SEQ ID NO: 13350 - protein, 346 aa, Rhodopseudomonas palustris CGA009
MKAAVFEKTGERLVVRDVAAPALGDNELLLKVAFTGICGSDLHAAETPGMLQSGTVMGHEFTGEIVQSTASDWPVGARVAANPYWLCDACAAGGSCSGGGDAACANGSFMGFRPDLPGAYADYVRIRAGQAIRLPDKVSLRDGALMEPLAVARHAVDVCGPMQGADVLVIGGGPIGLGVVLMARDAGAARVVVSEPDPNRRACALEVGAVAAIDPIAEDLPTALGRLGIGAPGIVFECVGAPGFLQQTIDVMALRGRAVIVGVCMTEDRVLPRAAIRKEATLKFVLGYTMADFHHVSRYLEEHAATAAAMISRVVSLSELPEIFDRLRAEKSLIKVLVRPDQGSGT

SEQ ID NO: 13351 - protein, 599 aa, Alkaliphilus metalliredigenes QYMF
MFKSIRWKFITIYFLLVFMAMVIVGVFLINQFEQYHLGVVRDNLTQIANSLRISLKDMDWQKNKEDVQENITYYEKIGMEIYVIGRDTNFTIISSTNLSYLNENATEILEPDLILSSFNGDPGEKDIVPKEEGLTSSKNMVFPLYDEHSRVTGAIYLRQNLEEIYNTLDQSINILIRATILALFITIFVGYFIAKSVTGPINDVTIKAEKMARGDFEQVVEIKSDDEIGQLGNMFNYLMARLKSVLQEMSNEKQKMDTIITYMADGLIATTMEGKVIHANPRALEMLRIQEKDILEKHFDETFKQLNERLTIEYLQNSPAKWSGSQMIEMEYGITLRANYAPYMNEKGDLDGIIVLFQDVTEYEKLENMRKEFVANVSHELKTPLTTIKSYTETLLEGAMENQELGKQFLNVIDNEADRMARLVRDLLQLSNADYQQTKWDKKEVDLNYIVEKAVLNLSVSAKNKEQELNYKGLREGVSVWADENRIEQVLLNVISNAIKYTANGGCIDVSLEETQNHATIKITDNGMGIPKEDLPRIFERFYRVDKARSREMGGTGLGLSIAKQIIDVHEGMIKVDSRESGGTAVLIELPLLQEKMCN

SEQ ID NO: 13352 - protein, 185 aa, Fagus sylvatica
SGEKGKFGLTTTQILRVVKKLEQVDMLDCLQLLHFHIGSQIPSTSLLTDGVGEAAQIYCELVRLGAQMRVIDIGGGLGIDYDGSKSSESDISVGYTLEDYASAVVQAIRFVCDRRSIKHPILCSESGRAIVSHHSVLIFEAVSTSSYESPTMSAVGFQYLADSLSDEARADYVNLYSAAIRADYE

SEQ ID NO: 13353 - protein, 550 aa, Ralstonia eutropha JMP134
MTKFVFVTGGVVSSLGKGIAAASLAAILESRGLKVTLLKLDPYINVDPGTMSPFQHGEVFVTEDGAETDLDLGHYERFVSAKMRKSNNFTTGQIYESVIRKERRGEYLGKTVQVIPHITNEIQAFIERGAAASHDGKADVALVEIGGTVGDIESLPFLEAARQMSLRMGRNRCAFVHLTLVPFIASAGELKTKPTQHSVQKLREIGISPTALLCRADRPIPDDERAKISLFANIPQDAVISVWDADSIYKIPQMLNEQGLDRLICEELRLDPKPADLSMWQKLVNAQENPEHEITIGMVGKYVDLTESYKSLIEALRHAGMHTATRVNIEYIDSEELESGHLEVLAPLDAILVPGGFGKRGTEGKIRAIQYARENKVPYLGICLGMQLAVIEFARHVAGMTDANSTEFNLETEHPVVALITEWVDREGKVEQRSAESDLGGTMRLGAQRVPVKEGTKAASIYGAEVNERHRHRYEVNNHYVPTLENAGMVISARTPTENLPEMMELPGSMHPWFVGVQFHPEFTSTPRDGHPLFKAYVEAALAGQQRKGA

SEQ ID NO: 13354 - protein, 244 aa, Triticum aestivum
  misc_feature (195)..(195): Xaa can be any naturally occurring amino acid
  misc_feature (223)..(223): Xaa can be any naturally occurring amino acid
  unsure (1)..(244): unsure at all Xaa locations
NSFYKKAGWYRSGTFPGYRRPTRPGPIMQRYCSLANESSIWLSLGGFQERGPDDSHQYNTHVLIDESGKVRSSYRKIHLFDVDVPGNMVYKESRFTTAGDTVVAVDSPFGRLGLTVCYDLRFPELYQCLRFKHQAQVLLVPSAFTKVTGEAHWEILLRARAIETQCYVIAAAQAGKHNEKRESYGDSIIIDPWGXTVIARLPDRLSTGFAVPDINLSKVEGVXTKMPISVHPQVWKPSGNPSSL

SEQ ID NO: 13355 - protein, 744 aa, Neurospora crassa
MTSQPSSGKGRGRNLSIDEYNVYDDAKTYYTTEDRHHNHRAGARTRTYSQNSLFKQFERLGLQKEPYRRGSHDESTIPQSRRFLIQVEPTLQSLQSQEDTDGNMQITIEDNGPKVLSLRTAASNGYNRFDIRGTYMLSNLLQELYLAKEYGRKQIILDEARLNENPVNRLSRLIKDHFWEGLTRRIDASSIEIAARDPKDWTDDPRPRIYIPRGAPEQHEYYTKVALDRPELRLDVQYLPEKITPEIVRDMNAKPGLLAVDMEEVVDPKTGEKTLRGRPFVVPGGRFNELYGWDSYMESLGLLVNDRVDLAKSMVQNFCFCIKHYGKILNATRSYYLCRSQPPFLTDMTLRVYDKIKHEPGALEFLRQSLLAAIKEYYSVWTAEPRLDPVTGLSRYRPEGLGVPPETEAGHFIHILEPYAKKHNMSFDEFVYAYNHGEIKEPTLDDYFMHDRAVRESGHDTTYRFEGICADLATIDLNSLLFKYETDIARTIRNVFHDKFEVPDDWLATNNPAASKLETSAMWDRRAKRRKLAIDKYLWNEEAGMYFDYNTATRKQCNYESATTFWALWAGVSNPKQAAAMVTKALPKLEAFGGLLSGTKESRGEIGLERPNRQWDYPYGWAPQQILAWTGLYRYGFNEEAERLAYKWLFMITKAFVDFNGVVVEKYDVTRPIDPHRVDAEYGNQGLDFKGVAKEGFGWVNASYVYGLQIVNAHMRRALGTLTPYETFMKAVEENRNKALSELV

SEQ ID NO: 13356 - protein, 449 aa, Pseudomonas putida
NMPEHAGASLASQLKLDAHWMPYTANRNFLRDPRLIVAAEGSWLVDDKGRKVYDSLSGLWTCGAGHTRKEIQEAVAKQLSTLDYSPGFQYGHPLSFQLAEKITDLTPGNLNHVFFTDSGSECALTAVKMVRAYWRLKGQATKTKMIGRARGYHGVNIAGTSLGGVNGNRKLFGQPMQDVDHLPHTLLASNAYSRGMPKEGGIALADELLKLIELHDASNIAAVFVEPLAGSAGVLVPPEGYLKRTREICNQHNILLVFDEVITGFGRTGSMFGADSFGVTPDLMCIAKQVTNGAIPMGAVIASTEIYQTFMNQPTPEYAVEFPHGYTYSAHPVACAAGLAALCLLQKENLVQSVAEVAPHFEKALHGIKGAKNVIDIRNFGLAGAIQIAPRDGDAIVRPFEAGMALWKAGFYVRFGGDTLQFGPTFNSKPQDLDRLFDAVGEVLNKLLD

SEQ ID NO: 13357 - protein, 481 aa, Colwellia psychrerythraea 34H
MKKKLTTNAGCPVANNQNVMTAGPRGPQLLQDVWFLEKLAHFDREVIPERRMHAKGSGAYGTFTVTHDITQYTRAKIFSEVGKKTEMFARFTTVAGERGAADAERDIRGFALKFYTEEGNWDLVGNNTPVFFLRDPLKFPDLNHAVKRDPRTNMRSAQNNWDFWTSLPEALHQITIVMSDRGLPATYRHMHGFGSHTFSMINADNERVWVKFHFESNQGIQNLTDQEAEVVIGQNRESHHADLYDSLESGDFPSWTLKIQVMTEEQAEKSPYNPFDLTKVWPHKDYPLIEVGVMELNRNPENFFAEVEQSAFNPASIVPGISFSPDKMLQGRLFSYGDAQRYRLGVNHQQIPVNAPRCPVHSYHRDGAMRVDGNHGSTIGYEPNTQGEWQEQPDFSEPPMELSGAAAHWNHREDEDYFSQPGDLFRLMDNSQQQALFDNTARSVGGASIDIQKRHISHCLKADQAYGAGVAKALGILLDTI

SEQ ID NO: 13358 - protein, 333 aa, Ostreococcus tauri
MQAAAKYVIEARASIADARASLRARGDASARDEVDAMYSTPKASTSARKTPAGQTPTTPSAQTPGEREQKGLRHFSMRVCEKVEEKMHTSYNEVANELVEELRLAAQQANTEFDEKNVRRRVYDALNVIEAVGIITKKKKEIFWSGYPPGCMKPGELPPKRAGTTGTPEATTPRTAAPTWATSEAGIEEFEKKVNHLAELVEQHDAIIALVDRNREAMAKSNGAPITGIQLPFILIQTKADAEVDVEISEDQRHVHLDFNQTPFQIHDGFHVLTKMIKQHPIRIPREDAGPSGLDTTGKSTETNEEPAVKRKTTAASPLEENTGVTGKRTKKS

SEQ ID NO: 13359 - protein, 403 aa, Alkaliphilus metalliredigenes QYMF
MYNENENRETENQEEKESQERIESSIDRPRRYVKDEDIYRSRRGAKKGYFLMALMGAVIGSLLTLSFAYVALPQILVDQGLLGQTPGQSITIEPLQDMTVYSAVTQKAMPSVVGITTVTLQRDAFFGTRRAQGLGTGVVVDERGYILTNSHVVGDGEVEEVMVLFYDGQTLPAEVLWNEKSLDLAIIQVEGSNFPVAELGNSDNLQVGELAIAIGNPLGLNLERTVTQGIISGLNRSLPTEQGQAIDNLIQTDASINPGNSGGPLLNAQGQVIGINTAKMRTAEGLGFSIPINTAKPIVDQFIEKGEFTRVYLGIRGLNVEEVEGMTGEVLQAEYGVYVFEIEANSPADQYDIRANDIIVGIGNQEVATMGQLIREIYRYRPGDEAIVHILRDGQEMSIKIGF

SEQ ID NO: 13360 - protein, 359 aa, Cicer arietinum
MSNFKSKYHDELIANAAYIGTPGKGILAADESTGTIGKRLASINVENVETNRRALRELLFTAPNVLQYLSGVILFEETLYQSTAAGKPFVDVLNEAGVLPGIKVDKGTVELAGTDGETTTQGLDGLGARCAKYYEAGARFAKWRAVLKIGPNEPSLSILSIENAYGLARYAVICQENGLVPIVELEILVDGSHDIHKCAAITERVLAATYKALSDHHVLLEGTLLKPNMVTPGSDSPKVAPEVVAEHTVRALQRTVPAAVPAVVFLSGGQSEEEATVNLNAINQVKGKKPWTLSFSFGRALQQSTLKAWSGKEENVKNAQDALLTRAKANSEATLGTYKGNSQLGEGASESLHVKDYKY

SEQ ID NO: 13361 - protein, 726 aa, Chorispora bungeana
MEELDRSRAFGKDVKRIVVKVGTAVVTGKGGRLALGRLGALCEQLAELNSDGFEVILVSSGAVGLGRQRLRYRQLVNSSFADLQKPQTELDGKACAGVGQSSLMAYYETMFDQLDVTAAQLLVNDSSFRDKEFRQQLNETVKPMLDLRVIPIFNENDAISTRRAPYQDSSGIFWDNDSLAALLALELKADLLILLSDVEGLYTGPPSDPNSKLIHTFVKEKHQDEITFGDKSRLGRGGMTAKVKAAVNAAYAGIPVIITSGYSAENIDKVLRGLRVGTLFHQDARLWAPITDSSARDMAVAARESSRKLQALTSEDRNKILHDIADALEANEKTIKAENELDVAAAQEAGFEESLVARLVMTPGKISSLAASVRKLAEMEDPIGRVLKKTEVADGLLLEKTSSPLGVLLVIFESRPDALVRIASLAIRSGNGLLLKGGKEARRSNAILHKVITDAIPETVGGKLIGLVTSREEIPDLLKLDDIIDLVIPRGSNKLVSHIKNSPKIPVLGHADGICHVYVDKSGKLDMAKRIVSDAKLDYRAACNAMGTRLVHKDLEQEGVLNELIFALQTNGVTLYGGPRASAVLSIPEARSFHHEYCSKACTVEVVEDVYGAIDHIHRHGSGHTDCIVTEDPEVAELFLRQVDSAAVFHNASTRFSDGFRFGLGAEVGISTSRIHARGPVGVEKLLTTRWLMRGNGQVVDGNNGIVYTHKDLPVLQRTEAVENGI

SEQ ID NO: 13362 - protein, 127 aa, Haemophilus somnus 2336
MAYSEKLLDHYENPRNVGSFDKKDPTVGSGMVGAPACGDVMQLQIKVNDEGIIEDAKFKTYGCGSAIASSSLITEWVKGKSLDEAQAIKNSQIAEELELPPVKVHCSILAEDAIKAAIADYKAKKAE

SEQ ID NO: 13363 - protein, 375 aa, Thermus thermophilus HB27
MVIYREEYRLYNFGPDHPFSPVRLEMLTSLLQALGVWRAPLSPPEASREEVLSVHSERLVKRVEAASRGELYPDLEHYGLGTGDTPVFPGMDRAARILVGGTLEGARRILAGEKRVLQLGGGLHHAQYDRASGFCVYNDLSVAIRHMTRAGLRVAYVDIDVHHGDGVQWIHYEEGEVLTLSLHESGRYLFPGTGHVYEIGRGAGLGKKLNLPLEPFTEDESYLEVFEALVPWALKAFRPDVLVVQAGADAHYLDPLADLLLTTRAYERLFRLLLEYAEAYAGGRVLFTLGGGYSLDGTVRVWALLYHLFHGLPLPERLPEGWLRTWEARLGKPLTPTLHDPEGAYPEIPRWEEIAKRNRLTLQRLTELVAPHLLH

SEQ ID NO: 13364 - protein, 528 aa, Thermus thermophilus HB27
MWWKEAVIYQVYPRSFQDTNGDGVGDLEGVRRRLPYLKSLGVDALWLSPFYKSPMKDFGYDVADYCDVDPVFGTLQDFDRLLEEAHALGLKVLVDLVPNHTSSEHPWFLESRASRNSPKRDWYIWKDPAPDGGPPNNWQSFFGGPAWTLDEATGQYYLHQFLPEQPDLNWRNPEVREAIYEVMRFWLRRGVDGFRVDVLWLLAEDLLFRDEPGNPDWRPGMWDRGRHLHIFTEDQPETYAYVREMRQVLDEFSEPGRERVMVGEIYLPYPQLVRYYQAGCHLPFNFHLIFRGLPDWRPENLARIVEEYESLLTRWDWPNWVLGNHDQPRLASRLGEAQARVAAMLLFTLRGTPTWYYGDEIGMKNGEIPPEKVQDPAALRQKDRLGEHNLPPGRDPERTPMQWDDTPFAGFSTVEPWLPVNPDYKTRNVAAQEQDPRSMLHLVRRLIALRKDPDLLYGAYRTYRAREGVYAYLRGEGWLVALNLTEKEKALELPRGGRVVLSTHLDREERVGERLFLRPDEGVAVRLD

SEQ ID NO: 13365 - protein, 255 aa, Elymus mutabilis
LDNIMRLTGITGIVNGMDVSEWDPTKDKFLAVNYDITTALEAKALNKEALQAEVGLPVDRKVPLVAFIGRLEEQKGPDVMIAAIPEIVKEEDVQIILLGTGKKKFERLLKSVEEKFPGKVRAVVRFNAPLAHQMMAGADLLAVTSRFEPCGLIQLQGMRYGTPCACASTGGLVDTIVEGKTGFHMGRLSVDCNVVEPADVKKVATTLKRAVKVVGTPAYQEMVKNCMIQDLSWKGPAKNWEDVLLELGVEGSEPG

SEQ ID NO: 13366 - protein, 342 aa, Synechocystis sp. PCC 6803
MVSERILPELNTAEISLDRETALVLYEDMVLGRFFEDKCAEMYYRGKMFGFVHLYNGQEAVSSGIIKAMRQDEDYVCSTYRDHVHALSAGVPAREVMAELFGKETGCSRGRGGSMHLFSSAHNLLGGFAFIGEGIPVALGAAFQTKYRREVLKDDGYDQVTACFFGDGTSNNGQFFECLNMAALWKLPILFVVENNKWAIGMAHERATSQPEIYKKASVFNMVGVEVDGMDVVAMHKVATEAVARARAGEGPTLIEALTYRFRGHSLADPDELRSAEEKQFWAARDPIKKFAAFMTEHELASNEELKAIDKRIQEVIDDALAFAESSPEPNPEDLRKYIFAD

SEQ ID NO: 13367 - protein, 801 aa, Haematonectria haematococca mpVI
VEVKGEILELKNTINQMVDRLGTFAVEVSKVAREVGTDGTLGGQAQVANVEGKWKDLTENVNTMASNLTVQVRSISTVTQAIANGDMSQKIKVEANGEIQVLKETINNMVDRLSSFCYEVQRVAKDVGVDGKMGAQADVAGLDGRWKEITTDVNTMASNLTTQVRAFSDITNLATDGDFTKLVDVEASGEMDELKRKINQMISNLRDSIQRNTQAREAAELANKTKSEFLANMSHEIRTPMNGIIGMTQLTLDTDLTQYQREMLNIVNNLANSLLTIIDDILDLSKIEARRMVIEEIPYTLRGTVFDALKTLAVKANEKFLDLTYKVDSSVPDYVIGDSFRLRQIILNLVGNAIKFTEHGEVSLTIKERVEQRNVRPGEYAVEFIVEDTGIGIAKDKLDLIFDTFQQADGSMTRKFGGTGLGLSISKRVVNLMGGDLWVISEQGKGSEFHFTCLVKLAHDDAAMIEQQIRPYRGHQVLFVDKAQSKGGASIKGMLEQIGLHPVVVESEKSPALTRLQASGSLPYDAILVDSIDTARRLRAVDDFKYLPIVLLAPVVHVSLKSCLDLGITSYMTTPCKLIDLGNGMIPALENRATPSLADNTKSFEILLAEDNTVNQRLAVKILEKYHHVVTVVGNGWEAVEAVKRKKFDVILMDVQMPIMGGFEATGKIREYERGIGTHRTPIIALTAHAMMGDREKCIQAQMDEYLSKPLQQNHLIQTILKCATLGGPLLEKNRERELALHAEAKSSKHKEGGQGLLRPALESRSFTSREPLSGNGKESPALLSPDEDPMARVYMRSLSS

SEQ ID NO: 13368 - protein, 220 aa, Xylella fastidiosa Ann-1
MHSLEHLLQNNRNWCQRINQEDPEFFARLSKQQSPEYLWIGCSDSRVPANQIIDMAPGEVFVHRNVANVVVHTDLNCLSVIQFAIDVLKVKHILVVGHYGCGGVLASLTRARLGLVDNWIRHVTDVAEKHNPYLETLGALADQHARLCELNVLEQVMNVCSTSIVRDAWSRTQPLSVHGWVYSLSNGLVHDLGIDVDRFEMLPSCYADALARIQADRVVR

SEQ ID NO: 13369 - protein, 250 aa, Bacteroides fragilis NCTC 9343
METMNEKVAMVTGASAGIGLASAEAFAKAGATVVLVDINEPKEQAGKLVSEGYKAVAYRCDVSDTRAVKEMIDWTVATYGRLDAALNNAGIQTPQRPMAEITDEEFDRTVAVDLKGVWNCMRYEIIQMLQQGGGAIVNTSSQGGVTGFPGQAAYIACKHAVIGLTRTAAIDYSAKGIRINAVCPGVIRTPMAEELIRRNPDLEKELVRDIPAGRLGKPEEIANAVLWLCSSQASFVDGYALLVDGAFSIH

SEQ ID NO: 13370 - protein, 81 aa, Morinda citrifolia
TPQDEMRAGMSYFHETIWKGVPKFLRRVDTALKNMGINERVPYNVPLIQFSSWMGGDRDGNPRVTPEVARDVCLLARMMAA

SEQ ID NO: 13371 - protein, 353 aa, Pseudomonas fluorescens
MYPKNAWYVACTPDELQGQALGPARSAAKRMVFYRAHEGRVAAVEDFCPHRGAPLSLGYVENGNLVCGYHGLVMGCDGKTVEMPGQRVRGFPCNKTFAAVERYGFIWVWPGDQALADPALIHHLEWADNDQWAYGGGLFHIQCDYRLMIDNLMDLTHETYVHASSIGQKEIDEAPPQTTVDGDQVVTARHMHNVMPPPFWRMALRGNQLADDVPVDRWQICRFSPPSHVLIEVGVAHAGHGGYDASAQYKASSIVVDFITPESDTSIWYFWGMARNFNPQDQALTESIREGQGKIFSEDLEMLERQQQNLLAQPQRSLLKLNIDAGGVQSRRVLERLIAQEPEPREALIAASR

SEQ ID NO: 13372 - protein, 255 aa, Elymus mutabilis
LDNIMRLTGITGIVNGMDVSEWDPTKDKFLAVNYDVTTALEGKALNKEALQAEVGLPVDRKVPLVAFIGRLEEQKGPDVMIAAIPEIVKDEDVQIVLLGAGKKKFERLLKSVEEKFPGKVRAVVRFNAPLAHQMMAGADVLAVTSRFEPCGLIQLQGMRCGTPCACASTGGLVDTIVEGKIGFHMGRLSVDCNVVEPADVKKVATTLKRAIKVVGTPAYHEMVKNCMIQDLSWKGPAKNWEDVLLELGVEGSEPG

SEQ ID NO: 13373 - protein, 81 aa, Morinda royoc
  misc_feature (35)..(35): Xaa can be any naturally occurring amino acid
  unsure (1)..(81): unsure at all Xaa locations
TPQDEMRAGMSYFHETIWKGVPKFLRRVDTALKNXGINERVPYNAPLIQFSSWMGGDRDGNPRVTPEVTRDVCLLARMMAA

SEQ ID NO: 13374 - protein, 355 aa, Vibrio vulnificus YJ016
MLNFLMRSVVLGLVTALLVLLAVPSLRSNVITTTLDVSPQDASSLQISFNQAVRNAAPAVVNIYSRKYVENDRSKLSTQGLGSGVIVSEKGYIITNYHVVAQADQIVVALQDGRVAAAQLVGKDRRTDIAILRIEGSNLPVIPLNSNYKAKVGDVVLAIGNPYNLGQTTTFGIISATGRSSISADGRQAFIQTDAAINEGNSGGALVNTKGELVGINTASFQQATDLETYGISFAIPFPLANKIMEKIIADGRVIRGYIGIDGQDINAVTARLLGNEHIGGIVVLGVDPNGPAANAGFEAQDIILSIDDKKIQGRQSVMDIVTDLRPGTTVDVGIIRKGQEMTLKVTIAEDNREI

SEQ ID NO: 13375 - protein, 550 aa, Yersinia enterocolitica
MAAKDVKFGNDARIKMLRGVNILADAVKVTLGPKGRNVVLDKSFGSPTITKDGVSVAREIELEDKFENMGAQMVKEVASKANDAAGDGTTTATVLAQSIITEGLKAVAAGMNPMDLKRGIDKAVIAAVEELKKLSVPCSDSKAIAQVGTISANSDSTVGELIAQAMEKVGKEGVITVEEGSGLQDELDVVEGMQFDRGYLSPYFINKPETGSIELESPFILLADKKISNIREMLPVLEAVAKAGKPLLIIAEDVEGEALATLVVNTMRGIVKVAAVKAPGFGDRRKAMLQDIATLTAGTVISEEIGLELEKTTLEDLGQAKRVVINKDTTIIIDGVGDEAAIQGRVAQIRQQIEEATSDYDKEKLQERVAKLAGGVAVIKVGAATEVEMKEKKARVEDALHATRAAVEEGVVAGGGVALIRAASAITAAGLKGDNEDQNVGIKVALRAMESPLRQIVVNAGEEASVIANNVKAGSGSYGYNAYSEEYGDMIAMGILDPTKVTRSALQYAASIAGLMITTECMITDLPRDDKGADMGAGGMGGMGGMGGMM

SEQ ID NO: 13376 - protein, 81 aa, Pagamea guianensis
TPQDEMRAGMSYFHETIWKGVPKFLRRVDTALKNIGINERLPYNAPLIQFSSWMGGDRDGNPRVTPEVTRDVCLLARMMAA

SEQ ID NO: 13377 - protein, 455 aa, Vibrio vulnificus YJ016
MKKPLLVLTALSLSLSSALAPLPATAALPFSVSGQELPSLAPMLERVTPAVVSIAVEGKQVERSRIPDQFQFFFGPDFPTEQVRERPFRGLGSGVIINANKGYIVTNYHVIKGADEIRIQLHDGREYDAELIGGDEMSDVALLKVDGAKDLTEIKLADSDKLRVGDFSVAIGNPFGLGQTVTSGIVSALGRSGLNIENFENFIQTDAAINSGNSGGALVNLNGELIGINTAILGPNGGNVGIGFAIPSNMMKNLTDQILEFGEVKRGMLGVQGGEITSELAEALGYNSSKGAFVSQVVPDSAADKAGIKAGDIIVSLNGKKIDTFSELRAKIATLGAGKEIELGVVRDGKDKRFDVTLGESQQTKAKADKMHEGLAGAELANTTSDDRIAGVKVINVADNSPAAQYQLQKDDIIIGVNRQRVKNLADFRAIVEKQTGVLALNIQRGERTIYLVIR

SEQ ID NO: 13378 - protein, 492 aa, Sorghum bicolor
MGSNAPPPPTPHVVLVPFPGQGHVAPLMQLARLLHARGARVTFVYTQYNYRRLLRAKGEAAVRPPATSSARFRIEVIDDGLSLSVPQNDVGGLVDSLRKNCLHPFRALLRRLGQEVEGQDAPPVTCVVGDVVMTFAAAAAREAGIPEVQFFTASACGLLGYLHYGELVERGLVPFRDASLLADDDYLDTPLEWVPGMSHMRLRDMPTFCRTTDPDDVMVSATLQQMESAAGSKALILNTLYELEKDVVDALAAFFPPIYTVGPLAEVIASSDSASAGLAAMDISIWQEDTRCLSWLDGKPAGSVVYVNFGSMAVMTAAQAREFALGLASCGSPFLWVKRPDVVEGEEVLLPEALLDEVARGRGLVVPWCPQAAVLKHAAVGLFVSHCGWNSLLEATAAGQPVLAWPCHGEQTTNCRQLCEVWGNGAQLPREVESGAVARLVREMMVGDLGKEKRAKAAEWKAAAEAAARKGGASWRNVERVVNDLLLVGGKQ

SEQ ID NO: 13379 - protein, 384 aa, Arabidopsis thaliana
MEGVSATMHKLRPYLLMIFLQFGAAGTYIVIMATLNQGQNRYVVIVYRNLVAALVLAPFALIFERKVRPKMTLSVLWKIMALGFLEPVLDQGFGYLGMNMTSATYTSAIMNILPSVTFIIAWILRMEKVNIAEVRSKAKIIGTLVGLGGALVMTLYKGPLIPLPWSNPNMDQQNGHTNNSQDHNNWVVGTLLILLGCVAWSGFYVLQSITIKTYPADLSLSALICLAGAVQSFAVALVVERHPSGWAVGWDARLFAPLYTGIVSSGITYYVQGMVMKTRGPVFVTAFNPLCMILVALIASFILHEQIHFGCVIGGAVIAAGLYMVVWGKGKDYEVSGLDILEKNSLQELPITTKSEDDNKLVSSISDNSNVTIPGGAHSNTSGI

SEQ ID NO: 13380 - protein, 475 aa, Wigglesworthia glossinidia endosymbiont of Glossina brevipalpis
MIDNLIWFRKDLRLNDNPALYYACVDEYKSASGILILNKKKWNEKIVSKNRIRFMYKNIFSLKRNLKKIGIELIFYTCRDFFEYTCLLYNFCYTNKVKELYFNKGIEKEDLEEDKIIIKKLKKITKCICFNGNLLIDPEKIKNKNKKTYKVYSYFLKSCISFISNNNINIIPFPKIRKNKLNLIKSYNDSIKIKKKLSPCYEEHALNKLNNFIKLKINKYHITRDFCINSTSFLSPYINIGVLSLRECINNIKNNNFDFIEKKNSGHFKWFSEIIWREFCHHLIIEYSDFFDSKKLIKWTKYIKWENKIKKIQAWKNGTTGFPIIDAAMRQLKKTGWMHNRLRMITSSFLVKDLLVDWKIGEKYFYYHLIDGNSAINNFNWQWISSSGICSSPYFRMINPITQSKKFKSIYKYIKFWIPELKNIPFNEIHEPYNWIIKNKINYPNQIIEHKTAKINFFKACKKAIYIFKSKNINK

SEQ ID NO: 13381 - protein, 392 aa, Methanosarcina mazei Go1
MKACIMCGGAGTRLRPLTFKHPKPSIPILNKPSVRHLIEHLSREGFNEIVMTLGYMGERIEEQLGDGHIFGVHIEYVYEKEKMGTAGGVKNAEEYLKNEPFIVLGGDHVLNLDLREMYRFHETNDAIVTIGLLSIDDPREFGIADMDINNRIHRFLEKPKSGQIFSNLASTGIYICDPEIFDWIPENKKYDFAKDLFPSLLAADEKINGMLVRGKWTDVGSSAAYRQAQRWMLDALPGTTIEGNFTTRNARIRGPLSIGNNVCIGSNSSLVGPIVIGENTVIGDNVLVGPYSVIGANCTIDDNAKILSSYLFDYVSIGKGSNISGSVVADETAVGEKCSLENGTVIGHRVTIGDNSTIHSGVKIWPEVIIDNDSSIEETIVNLNYDTSQEGS

SEQ ID NO: 13382 - protein, 384 aa, Sulfolobus solfataricus P2
MDKLLLHVGPTTIKEDVLVAGLENNVGFTSKEFVEALAYSLKGLRYVMGASKNYQPLIIPGGGTSAMESVTSLLKPNDKILVVSNGVFGDRWEQIFKRYPVNVKVLRPSPGDYVKPGEVEEEVRKSEYKLVALTHVETSTGVREPVKDVINKIRKYVELIVVDGVSSVGAEEVKAEEWNVDVYLTASQKALGSAAGLGLLLLSPKALSILDSQNSIAGYYLDLRNWLPVMRGAEEGKAAYFATPPVHVILQLAEAFRLIEKEGIENRIKRHTMVASAIRAGLEALGLEIVARRPESYSNTVTGVILKVADPQKVLAGTVNEGVEFAPGVHPAFKYFRIGHMGWVTPNDAIIAISVIERTLRKLGEPIRFGEGVKAVEEVLFSAR

SEQ ID NO: 13383 - protein, 1014 aa, Burkholderia pseudomallei K96243
MPGKLKELLIQPFKLNHRKALFDPRRMLAHQRLLTYGGAIGISAFILFCLLLMIRMEAMDYVSNARSEFLIQQSKLTIKLQIRRTALMRAVMHAEGLWNRRIEPSTELLSQFDAHQGYAVLHTPQGAPAALAVGIPAPGRSASAFAPYLALLETQLLMGDGQSPLPDDRVEGYSFSPDGTYLSLLWSREDQAPEAFIESHSASGLIGDAMRGIRYLRDASTIVPLRADRRTVWLPPHPDPLTGKPMIRIVQPAIDATGKLFAIYVRSLPLDMFYSNLNDAPAGSTLTIVDRKGNVILGSSNQHGGDGGATASALGIRSLGDGFGGLVERYQDGMFVTSDQLPGTDWVLVHAYSWKTIAAALALRFSLVTGLVAGIIVMLWLFAIQFDRKGLIPNYRRAQRLLESEVLNRTILRTAPVGLGLLSAQDGSVLLQNNAMLELSARTSDEPLPIRLWEAYRHAVGRSSDEDGALLQHDLAIEREGANPVYLQANVVAARYRGANVLLCTLLDISLRKESELKLKEARIAADQANKAKSTFLATMSHEIRTPLNAIIGNLELLRRSPLSEQQSERLHVVESCSNALLHIINDILDLSKVESGQMTLENIPFDIHALLQETVDAYAPLAESKGLALLSSIGEGVARHYAGDPTRIRQVLSNLIGNAIKFTERGHISIDVHRAKAARDGSAIEIWVNDTGIGIRPDRIATLFDVYTQADASIHRRFGGSGLGLPLCQRLVTIMGGSIEIDSLPDFGTTVTVALPLREARHATALSNGPAARRRNATALARPTLHVLVAEDHPANRALLRDQLEALDHRVDVVENGREALRAFGEHQYDIVLTDLGMPELDGYGFARFANKMRAGTPIVAMTAHATDEDYQRSKKVGIAEIVLKPLSLTTLEKVLQRHAMRAPAEEIVTAAGPGPAHAEPRMRALPPAVAAALRTATLQSIDKIAQALAARNFETIRQELHSIKGGFALTGNRLLIARCAATEELAEAEDLDTLRAAWRKLEASLLEALERL

SEQ ID NO: 13384 - protein, 328 aa, Synechococcus sp. CC9605
MGIPLESSATTKQSSRKEPALPSTGRRPSTRQGGRLATDSIGFYLSSIGRIPLLTAAEEIELAHHVQAMKQLQELPEEELTSRHRHKIRMGKRARDRMMAANLRLVVSVAKKYQNQGLELLDLVQEGAIGLERAVDKFDPAMGYKFSTYAYWWIRQGMTRAIDNSARTIRLPIHISEKLSKMRRISRELSHRFGRQPNRLELASAMGIEPRELEDLISQSAPCASLDAHARGEEDRSTLGELIPDPNGEEPMEGMDRSIQKEHLGGWLSQLNEREQKILKLRFGLGGEEPLTLAEIGRQINVSRERVRQLEAKAILKLRAMTNHQQAA

SEQ ID NO: 13385 - protein, 545 aa, Candidatus Blochmannia floridanus
MIFKNINRFCYIIRIILLYGLSDCIPTNRLIFPLNIGNQFLLKFFNKHSHLSLGERFRLALQELGPIWIKFGQMLSTRRDILSNSITNQLVMLQDQVKPFDGALAKLYIEQSIGNPLEKWFEDFQEIPLASASISQVHSAKLKKNGQNIIIKIIRPGIIPIIKTDINLMYKLSKWAYKLFPKRQQFKFSKIVLEYKKILFNELNLLKETANTIKLKRNFKSSNILYIPEVYVDFCRENIMVMERIYGIPIYETEKLKKQGIDMKLLAERGVEIFFTQVFRDSFFHGDMHPGNIFINYKNPQNPQYISIDCGIMGSLNKKDKYYLASNFIAFFNRDYRKIAELHLDSGWIPIDTNIEDFEYEIRTVFEPIFEKPLIDIPFSSVLLHLFNIARYFQMEIQPQLILLQKTLLYIEGIVRQLYPHLNLWQSAKPFLENWMQEQLQFSKIIHILKDKIPCWINKFPELPLLLSNELKYSFEIKKNINILTQELRIQRTRNAQALFLFGIGLILIISSIFCFMQFKKIETLPIYLCIFGIFIWIIGWKRIS

SEQ ID NO: 13386 - protein, 496 aa, Sulfolobus solfataricus P2
MIRRLLEVFFKLAPRVLAYREFRNKILKEIPIDEKEMAEEAKKFVDTLIELGPTFIKFGQILSVRPDIMPETYIKELARLQDEVPPAPFSQVSKIIDEELGNSVKILKELSSASLGQVYLGEYNGKIVAIKVNRPGIKETVNEDIQVVKKLLPLLRFVFDESFIEIIKVFLEEFSRRIFEEMDYTKEAFYLNKIKEELSDYPSLRIPSIIKATKRVLVMEYIKGYKVTSEEAKKIVDNRILAYRVFRLFMYMLLNKDYFHADPHPGNIAVDEQGNLVLYDFGMSGKIDEKTRNLLIRAYVAMIRMDADSLVRVLDELGAIQPFADRRVLAKGLRLFMQAMQGIEVSELELEDFMKLADQVFFKFPLRMPSKLVLPFRMVNVLDGTCREIDKDFDFVKSSITFLEEEGYTTKVVIEQVRELVNGIWNRFRSFLLSYSQQQELINIQSSRKGSAITNYIPQMILVITIIFYAITKDIIITLLMVILAFSISLSGRKNT

SEQ ID NO: 13387 - protein, 154 aa, Cicer arietinum
VKGLTMCYAVILVTFYSAAVSGYWVFGNKSNSNILKSLLPDSGPTLAPTWVLGLAVIFVLLQLFAIGLVYSQVAYEVMEKKSADVKQGMFSKRNLIPRLILRTIYMIFCGFLAAMLPFFGDINGVVGAVGFIPLDFVLPNDSYTTKHTSLQNHP

SEQ ID NO: 13388 - protein, 184 aa, Geobacter metallireducens GS-15
MPRPSVATMPIITDFKAIATGLFVTWKHIFRRSVTVEYPEVKRTPAPRYRARIVLTRDPEGGERCVACYLCSAACPVDCISMEATEDGNGRRYARWFRINFSRCIFCGLCAEACPTLAIQMTPDYEICERDIMELVYEKEDLLIDGCGKDPAYNFYRHAGIGVTQPRGAGEREEEPVDARGLMP

SEQ ID NO: 13389 - protein, 279 aa, Physcomitrella patens
MAKDVGVEPGFPSKDYTDPPPAPLIDASEFGQWSFYRAVIAEFVATLLFLYITIATVIGAVRNAGCDGVGLLGIAWAFGGMIFVLVYCTAGISGGHINPAVTFGLLLARKISLPRALAYMIAQCLGAICGAGLVKGFQTAFYMRYGGGANSVAAGYSIGTGLAAEIIGTFVLVYTVFSATDPKRNARDSHVPVLAPLPIGFAVFMVHLATIPITGTGINPARSFGAAVIYNRSKPWDDHWIFWVGPFVGAALAAAYHQYVLRAGPFKQLGSFRSAPSRV

SEQ ID NO: 13390 - protein, 232 aa, Triticum aestivum
  misc_feature (57)..(57): Xaa can be any naturally occurring amino acid
  misc_feature (69)..(69): Xaa can be any naturally occurring amino acid
  misc_feature (180)..(180): Xaa can be any naturally occurring amino acid
  unsure (1)..(232): unsure at all Xaa locations
MVISHASSSAGEAVYSTFSSRYVREELPRYRMPEGSIPKEAAYQIISDELMLDGNPXRLNLASFVTTWXMEPECGKLMMDSVNKNYVDMDEYPVTTELQNRCVNMIAHLFNAPIGEDETAIGVSTVGSSEAIMLAGLAFKRKWANKMKEQGKPCDKPNIVTGANVQVCWEKFARYFEVEXLKEVQLTEGYYVMDPKKAIEMVDENTICVAAILGSTLTGEYKNGKLVNDLLG

SEQ ID NO: 13391 - protein, 283 aa, Bradyrhizobium japonicum USDA 110
METSTNALTNTPKLTDRAHNIRRNALRMGEVQGQGYIAQALDISDVLAVAYFHAMRYRPEDPSWEERDRFLLSNGHYAIALYAALIEAGIVPEEELETYGSDESRLPMSGMASYTPGMEMSGGSLGLGLSIAVGMGLGLKRKKSGARVYTLFSDGELDEGSVWEAIQSAGHYKLDNLIGIVDVNNQQADGPSTQVMAFEPLVEKLQAFGWFVQRVNGNDLNAVVAAFDAAKSHPELKPRIIVADTLMGKGVPFLEQREKSHFIRVEPHEWQLALAALEAGRQA

SEQ ID NO: 13392 - protein, 476 aa, Hordeum vulgare
MRTTTRRLPPAPAAAAVLLAALTCLLLRPAAVAAAGGHAADRIVRLPGQPEVDFDMYSGYITVDEAAGRSLFYLLQEAPEEAQPAPLVLWLNGGPGCSSVAYGASEELGAFRVMPRGAGLVLNEYRWNKVANVLFLDSPAGVGFSYTNTSSDIYTSGDNRTAHDSYAFLAAWFERFPHYKYREFYVAGESYAGHYVPELSQLVHRSGNPVINLKGFMVGNGLIDDYHDYVGTFEFWWNHGIVSDDTYRRLKDACLHDSFIHPSPACDAATDVATAEQGNIDMYSLYTPVCNISSSSSSSSLSRRRTRGRYPWLTGSYDPCTERYSTAYYNRRDVQTALHANVTGAMNYTWTNCSDTINTHWHDAPRSMLPIYRELIAAGLRIWVFSGDTDAVVPLTATRYSIGALGLATTTSWYPWYDDLQEVGGWSQVYKGLTLVSVRGAGHEVPLHRPRQALILFQQFLQGKPMPGRTTNVTVA

SEQ ID NO: 13393 - protein, 211 aa, Synechocystis sp. PCC 6803
MEIFNNWQIIAKGWYIVCPSRTLRRGQAKSLALCGQKIVVFRGEDGKARALHGYCPHLGTDLGLGQVEDSWIRCNFHRWAFDETGKCRHIPCQSEIPPKAQLAPYATAEKYGFIWIFPEEIAPNDLPEFDELQGQKLVTQADKAFERKCHHHICMMNGIDAQHLKTVHHLDIKMDLSLRQNASGTQIDFTMKGNVPNTTLRESFIHYSSFK

SEQ ID NO: 13394 - protein, 323 aa, Campylobacter upsaliensis RM3195
MKQFSLWCDFVEDNFLDNEFVELLHSKINGATSNPLILKNVILTPAYKNKIANLKGKKPKEIYENIAMSDICKAADRLAYKFERGDDGFISLEIDPRIYDNASLSIGEAKRLHSAMGRQNIMMKIPATKASYEVMYELMKSGISVNATLVFSGEQNKKCFEALNEGLKAFRKMQIYSKAKEPQAVISVFVSRLDRILNERVNEPNQIGVLNAKLAYNYIMAQNEPNIRALFASTGVKGDDLTKDYYIRELYLDRALNTAPLDAIRAFNGECEFKQTLSDEELQRRLDKLVSKELLDETCSYLIDGALKNFCFEFDDLLAKLSN

SEQ ID NO: 13395 - protein, 212 aa, Cytophaga hutchinsonii
MKESYQKLLNNNKIWALGKIQDDADYFKRMKLAQTPEYLWIGCSDSRVPETEVTGTLQGQLFVHRNIANMVVHTDLNLLSVVEYAVEVLKVKHIIVCGHYGCGGVAAATKNNSFGYVDNWLRNIKEIYNKNTVELLAIENEEERINRLVELNVVEQVRNLAKTKPVQRAWKNRALEIHGWVYGLDTGIIKDLHSLYDEAEDLEPIFRYTFED

SEQ ID NO: 13396 - protein, 425 aa, Oryza sativa (japonica cultivar-group)
MGLHKEASSSSSRLDAAPLLPHHGHGGGGAGHHLSSQPKTFANVFIAVVGSGVLGLPYTFSRTGWVAGSVLLLAVAALTFHCMMLLVACRRRLAYDHPKIASFGDLGAAVCGPAGRHVVDAMLVLSQASFCVGYLIFISNTMAHLYPVGDSSPSSPLLTAKAIFIWVMLPFQLGLNSIKTLTLLAPLSIFADVVDLGAMGVVLGQDVSTWLANKPPVFASAGPTEILYGLGVAVYAFEGIGMVLPLEAEAADKRKFGGTLALSMAFIAVMYGLFGAMGYLAFGAATRDIITTNLGTGWLSVTVQLGLCINLFFTMPVMMNPVYEVAERLLCRKRYAWWLRWLLVMVVGLMAMLVPNFADFLSLVGSSVCVLLGFVLPAAFHLKVFGAEVGWPGLAGDVAVIVVGTALAVSGTWTSLAQIFSSSDV

SEQ ID NO: 13397 - protein, 395 aa, Methanosarcina acetivorans C2A
MNEQGLSEKEIFSYLENAKSEDTDYYRVLSSMCTHPHKIAVEANRLFIEANLGDLGLFAGASRLEQEVVGMLGELLHAPSIDVPFGGSCESSACGYLTTGGTESNIQAVRGMKNLVTTGKKELKGAPNIVIPESAHFSFDKVADMMGIEVRRASLDSEFRVDMASIESLIDANTIGLIGIAGNTEFGQIDPIDKLSEIALENELFLHIDAAFGGFVIPFLEKPQPFDFKLPGVTSIAVDPHKMGLSTIPSGALLFRSASFLDSLKVNTPYLTTKAQFTLTGTRSGASAAATCAVMKYLGNEGYRKNVQYCMQLTEKLVIEARKIGFEPLLEPVMNVVALKVPNPDFVREQMLERFGWNVSITRTPRALRLVLMPHNTLEDIEIFVQDLKEVTVEI

SEQ ID NO: 13398 - protein, 274 aa, Phaseolus lunatus
MAHVSAVSAAVKRLEGKVAIITGGASGIGAATARLFSEHGAHVVIADIQDDLGLSVCNELKSAVYVHCDVTKEEDVEKCVNVTVSKYGKLDIMLNNAGTCHELKDSIVDNITSEFERVISVNVVGPFLGTKHAARVMIPAKRGCIINTSSIAGCRGTGSPHAYVVSKHGLEGLTKNTAVELGQFGIRVNCVSPYLVATPMLKKYFNLDEEGVREAYSNLKGSYLVPNDVAEAALFLAGDESNYVSGHSLLLDGGYTITNAGFSPNAGFSPGQSE

SEQ ID NO: 13399 - protein, 598 aa, Debaryomyces hansenii CBS767
MTIDIVDDTSNNLKRKVGRSGSHGYNNSNYYKCFQNYYHGHNYLNPNPQYITNIKVSVNHWQLRDLIQVDQQNGKLYHTKDDSIREVNLLNNDKIGSDKHMEWDYFPKCFSHTRGGIVVTGGLLSSSSKAYSMNLPSLSSTDKTTKSFRTPKGLFSFYNPETEISETVKLGDVINNSVSVYPHASSQYKSYVCNNDSNLYVVDISGDRLSLDNKMNCELNTSLNNVCRSPTNDKLVTVTGDSSSIFLLDPSSNSKIKTIKTDHDSGFGISYHPNGHLFATAFQDGTCSLFDIRNLSSPLSEIKSTRPGHQAGAFRCCKFANSSVNDFLVILEHVGRVHLFDLRNLGNEDTNDHQVIVFPFALDQFADYKEQQLEVETKLSGEEKELQDSIEDDDKVSHKKFGIYGDSSNLFRSNEIGEIKRKSDLQFTAPLVYDYDYLTNVNPKLFKNYTYQTPPTSNGPDNLYLPPPEFNYPQWNTDSNNSSDDIPPENTRASISIPPQQPDPNFQFGHNSTIEHFSNPGSAESSSNAHTTARSNSSYDTYYQEAYQKSVNHIHGEMELAGVDWFDRQLLIGCEDGGVLNWDINVLGRRSFGSFSYV

SEQ ID NO: 13400 - protein, 620 aa, Perilla frutescens
MATANQKGVTDNLRNQLALAVRSIQWSYAVFWSFSAKQSGSLEWGEGYYNGDIKTRKTVQAVELNSDPLGLQRSDQLRELFESLSLGETSPQPKRPTAALSPEDLTDTEWYFLVCMSFVFNVGQGLPGRSFSKNDTIWLRNAHLADTKLFSRSLLAKSASLQTVVCFPHLGGVVELGTTELVAEDRNLIQHIKTSFLESSSDTVINPNHDLVYQVLDHANDPENNLDDVEVCSPDTSSDDFADNVLIEGSSLADGADGEASQLQNWQFKDDAISNGLNNSTSSSDCVSQTQGNPVTVVQQLDGKKTSDNCMPVNQECNQQKSPPGFNGSDVHYQSVLSSLLKSSHQLMLGPNRNGKQESSFISWKDRKLSSRLPQILSPQRLLKKVLFEVARMHENARIESAKQKDKCDDHSGQEADEVDRNHVLSERKRREKISERFSILVSLVPSGGKVDKVSILDHTIEYLRELERKVKDLESYKEATERESTTQSKAHDSIERTSDNYGHSKFGSITKLLGNKRKSCDTEKMAGENKRGRSSSSTDSITISITDKDVLIEMRCSWRQCVLLEVMEALTQLNLDSQSVQSSNTDGILSLSINAKSKGVKGASAGAIKQALQRIIKKC

SEQ ID NO: 13401 - protein, 448 aa, Wigglesworthia glossinidia endosymbiont of Glossina brevipalpis
MKTKGFTKKICYFDLNKNQLKIVLITIFITLAEFFDLFIISFVVSFISEKEMYKDMSDNTGIILSSSGFGIILGYLIFGYISELYGRKSTIIISIFIISFFNSLFIFINENDWMLFSFIRLMIGLGSGGINVTILPYLHEFIPYKRRGVISGISSLFVPIGLFLGSFATSYFIDKIGWKGVIILGSFPIVLLIWIYNLPESPYFLIKKNRIENAIKSYSWAFMLSREKVLKNFIKLKHKKVSIKKIIKKNKFNLIIISLGFFCFTLSSFFIQSCGQILLKNIFFIKINEISKIFLYLSLGNLSGRLLSSFISDYIKRKYVIFIFGFFGSIGYIFLFFSVFHEMNSEYDFPNIKIFIIGLFIIMIFGDGAFGVINTFGSEIFIKEAKSICLGISHGIGATAKIIGPIYFSNIYKINYFSYFDLPKYFILLSFFFLFGCIIYLFSKEIKL

SEQ ID NO: 13402 - protein, 470 aa, Solibacter usitatus Ellin6076
MPNTKIVATLGPATDAPGVLRQLLAAGVDVFRLNASHGAQDAHAARIDAVRAAAREAHVHAGILLDLQGPKIRLGRFENGGVTLVTDAIFTITTEQVMGTSERASTGYSRFAKDVKAGDRILLADGIIELIALESDGVSVQTRIVNGGPIGDHKGINLPGVQVSIPSLTEKDLADLHFGLNAGVDIVALSFVRTADDVRQLRDRLGGRPVSIVAKIEKPEGYENIEPILDVTDGVMVARGDLGVEISLERVPRIQKSIIRRARRKGRFVITATQMLESMIENPRPTRAEVSDVANAIYDGTDAVMLSAETSVGKYPVEAVRYMAKIAAESEDSIRKKGYIDPPHQPQPSNAEILADAAHHAARDSGAAAIVVFSSRGSSARLVSRYRPPVGVFAITPHDTTARQLSVSYGVTPLLAPDVSSTDEMLSQMDRVLIEGGYLQKGQLVVFVAGQPVGRPGTTNLMKLHRVGLG

SEQ ID NO: 13403 - protein, 428 aa, Streptomyces coelicolor A3(2)
MTTLSPYDSMSPVTRAAYRAKSAAADLAPLPRAAKDDALLAVADALEVRTSEIVEANAQDVAKARAAGTSEAIVDRLTLTPERVRAIASDVRDVVALPDPVGEIVRGSTLPNGIDLRQVRVPLGVVGIIYEGRPNVTVDAAALCLKSGNAVLLRGSSSAYRSNTALVRVVRDAVGGAGLPADAVQLVPGESRESVRELMRARGLVDVLIPRGGASLISTVVQESTVPVIETGTGNCHVYVDAHADLDMAVDILINSKAQRVGVCNAAETLLVHQDVAAEFLPRALAALAEAGVTVHADERVMAHAKDSGANVVEATPEDWETEYLSYDIAAAVVDSLDRAVEHIRLWTSGHTEAIVTTSQQAARRFTQLVDSTTVAVNTSTRFTDGGQFGFGAEIGISTQKLHARGPMGLPELTSTKYIVTGDGHVRR

SEQ ID NO: 13404 - protein, 159 aa, Rickettsia typhi str. Wilmington
MINYLKSFFLYEIVRGLTLTLKYFFKPKVTINYPYEKSPVSPRFKGEHALRRYENGEERCIACKLCEAVCPAQAIVIESDERDDGSRRTTRYDIDMTKCIYCGLCQEACPVDAIVEGPNFEFASLTHTALIYDKERLLYNGDKWEQELTNKLHKDYQYR

SEQ ID NO: 13405 - protein, 197 aa, Arabidopsis thaliana
MSASRFIKCVTVGDGAVGKTCLLISYTSNTFPTDYVPTVFDNFSANVVVNGATVNLGLWDTAGQEDYNRLRPLSYRGADVFILAFSLISKASYENVSKKWIPELKHYAPGVPIVLVGTKLDLRDDKQFFIDHPGAVPITTAQGEELKKLIGAPAYIECSSKTQENVKGVFDAAIRVVLQPPKQKKKKSKAQKACSIL

SEQ ID NO: 13406 - protein, 769 aa, Candidatus Blochmannia floridanus
MPVLSHILGFPRIGLYRELKHALEQYWEKKITENKLLDIGRMLRMRHWKQQINSGINLIPIGDFSWYDHVLDMSIMLNNIPTRFHILSQKKNTLNMLFSIARGDSINNTTITPSEMKKWFNTNYHYIVPEFVQNQIFKLNCTQLLAEIDEALSLNHPIKPVLLGPLTYLWIGKTKETKEFDRLSLLPSLLLVYKEIFNILSKKNIQWIQIDEPALVLELPQTWLKAYLHAYDQLYQTKIKLLLTTYFGKIYHQLPIIKQLKVNGLHIDLTNCSDNDISLLHEQLPKKWILSAGIINGKNIWKTNLYDWFLKLNTITHQRSLWIGSSCSLLHSPIDLNIESKLNNNIKNWFAFAIQKCSEIKLLCDALNSNHNDNSDQQNILKKYYNTNIQRLNSNIINNPQVQERCKNIITLDHSRKTKHITRMKLQHNRFNLPLYPTTTIGSFPQTSEIRKLRLKFKNKQINEDYYYTHIQQYIKKIIQEQEKLDLDILVHGEPERNDMVEYFGENLKGFVSSQHGWIQSYGSRCIKPPIIIGDISRPIPITIPWINYAQSLTNKPVKGILTGPITIMTWSFAREDIPRHMIALQLALAIRDEVMDLEKSGIGVIQIDEPALREGLPLKKSEQSYYLKWAINTFKITVSSVKDNTQIHTHMCYSEFNEIIDDILKLDVDVISIESSRSDLQLLQFIKTAGKKLNEIGPGIYDIHSIHQPSINEIMDKLKKLLQYIPKDRLWINPDCGLKTRSWNEIRESLNNMVIAAKTLRINNGLNN

SEQ ID NO: 13407 - protein, 425 aa, Synechococcus sp. CC9605
MTSDRGGQAFRLGLFLLPSSALLSGICLFVACVSGSRGRDRPIWQARWTQPFLVAAVLMLVGALGAETGSLAWAGLGNWLPLFWAYWAFQPHLASEQQRRQAAWMLVAGTLPVLLTGLGQMFLGWQGPWQLGGGAIIWFVAPGGQPQGRLSALFDYANIAGAWLGVVWPLMLAAVLRPDGWWRRGAALVLTLSTVLAVVLTQSRNAMGALALSVPFVMGPMQWFWLLPLLLLLASPLLLVVLPGVPSGWRQLAMALVPEPILDRLLERGGPTAWKHTRLGQWGYALELVAARPWLGWGAAAFSVLYPIYAAKRWHGHSHNLPLELAISHGLPVMLLVVGTVLLLPVVALRRGILQKAPMERAWWTATLVLVAMHATDLPLFDSRLNILGWTLLAGLAAFNQEVGQMPQPRPDRDGPAASPEPGAP

SEQ ID NO: 13408 - protein, 117 aa, Brassica napus
  misc_feature (8)..(8): Xaa can be any naturally occurring amino acid
  misc_feature (21)..(21): Xaa can be any naturally occurring amino acid
  unsure (1)..(117): unsure at all Xaa locations
MEEEYIRXINITVIGVISWGXIFILVRRIFSNYSFDFSTRIVSTLHATVAVVLATLTIQDWSCPVYPIASTSSLQQMETMAFSLSYMIYDLICSHFDQVLSIDNAVHHSVCILGFVA

SEQ ID NO: 13409 - protein, 338 aa, Xanthophyllomyces dendrorhous
MAVKVGINGFGRIGRIVLRNAIIHGDIDVVAINDPFIDLEYMVYMFKYDSTHGVFKGSVEIKDGKLVIEGKPIVVYGERDPANIQWGAAGADYVVESTGVFTTQEKAELHLKGGAKKVVISAPSADAPMFVCGVNLDKYDPKYTVVSNASCTTNCLAPLGKVIHDNYTIVEGLMTTVHATTATQKTVDGPSNKDWRGGRGAGANIIPSSTGAAKAVGKVIPSLNGKLTGMAFRVPTPDVSVVDLVVRIEKGASYEEIKETIKKASQTPELKGILNYTDDQVVSTDFTGDSASSTFDAQGGISLNGNFVKLVSWYDNEWGYSARVCDLVSYIAAQDAKA

SEQ ID NO: 13410 - protein, 374 aa, Streptomyces coelicolor A3(2)
MAGARQAVGEARRIVVKVGSSSLTTAAGGLDADRVDALVDVLAKMRGADKEVVLVSSGAIAAGLAPLGLPRRPRDLARQQAAASVGQGLLVARYTASFARYGVRVGQVLLTSDDMSRRAHHRNASRTLDKLLAMGAFPIVNENDTVATDEIRFGDNDRLAALVAHLVRADLLVLLSDVDGVYDGDPSRPGTSRLAEVRDMGDLAGVDIGSAGKAGVGTGGMVTKVEAARIAAAAGIPVVLTSAVHAADALAGGDTGTYFHATGRRSADRLLWLQHASAPQGALVLDDGAVRAVVEGRKSLLPAGIAGVEGDFAAGDPVELRDGTGRAVARGLVNFDAKEMPRLIGRSTRELARELGPAYEREVVHRDDLVILHP

SEQ ID NO: 13411 - protein, 182 aa, Zea mays
PSGNSPYPGIRMGSKASFRVTLLLLLAAAAWGPAAQADDAAELPDHRAITLKEQTSSTEIPVRLKSGSPLCSACEDFTGKAVSYISEKQTQDKVMGFLHDACSQSFSFEQKCDELMDSYATLLFAKITEIKPEAFCKQYGLCRGTALFSGVSSDSTCVFCHHLLDEVMVKLKDSDAEFEIFR

SEQ ID NO: 13412 - protein, 428 aa, Collimonas fungivorans
MTIKHEVPSYLTQHGIGPWGDYLEQIDRVTPYLGNLARWVETMKRPKRMLIVDVPIERDDGTIAHFEGYRVQHNTSRGPGKGGVRFHQDVTLSEVMALSAWMTVKNAAVNVPYGGAKGGIRVDPKTLSQGELQRMTRRYTSEIGIIIGPNKDIPAPDVNTNEQIMAWMMDTYSMNQGSTASGVVTGKPISLGGSLGRREATGRGVFVVGCEAAVKRGLDIHGAKIAVQGFGNVGGIAARLFSEAGAKVVAVQDHISTVVRSSGLDVAALQAHVNETGSVAGFKGGEEISDRAQFWAVDCDILVPAALEQQITVENAPTIRAKIILEGANGPTSPAADDILHEKGVLVVPDVIANAGGVTVSYFEWVQDFSSFFWTEDEINLRLTRIMREAFTAVWQLAEEKKVSLRTAAFIVACTRVLQAREMRGLYP

SEQ ID NO: 13413 - protein, 347 aa, Pisum sativum
MLLKNLIFQKCFFGQLVLVASWHIHNIVNSLKEGLTPLKDSSYMTNGYLETTIDWIPGIKEIRLKDIPSFIRTTQPNDLMVHFLLGECERAQKASAIILNTFDDLEHNVLEAFSSLNFPPVYSIGPLHLLLKEVTDKELNSFGSNLWKEEPECLEWLNSKEPNSVVYVNLGSITVMTNEQMIEFAWGLANSKIPFLWVIRPDLVAGENSVLPQEFLEETKNRGMLSSWCPQEEVLDHSAIGGFLTHSGWNSTLESVCGGVPMICWPFFAEQQTNCRFCCHEWGIGLEIEDAKRDKIESLVKEMVEGEKGKEMKEKALEWKKLAPNAASGPNGSSFMNLEKMFRDVLL

SEQ ID NO: 13414 - protein, 245 aa, Zea mays
MPAFPVRASASSSVVDNLAKTRHPRLIRNAAAVFTTTPSTLVAMGDAVEHLKSGFQKFKTEVYDKKPELFEPLKAGQAPKYMVFACSDSRVCPSVTLGLQPGEAFTVRNIAAMVPAYDKTKYTGIGSAIEYAVCALKVEVLVVIGHSCCGGIRALLSLQDGAPDNFHFVENWVKIGFPAKVKVKKEHASVPFDDQCSILEKEAVNVSLENLKTYPFVQEGLAKGTLKLVGAHYDFVSGNLLVWET

SEQ ID NO: 13415 - protein, 794 aa, Oryza sativa
  misc_feature (560)..(560): Xaa can be any naturally occurring amino acid
  unsure (1)..(794): unsure at all Xaa locations
MAAAAILPELAAQVVIPVAAAVGIAFAVLQWALVSKVKLTAEPRRGEAGGAAGGKSGPSDYLIEEEEGLNDHNVVSKCAEIQTAISEGATSFLFTEYKYVGLFMSIFAVLIFLFLGSVEGFSTKSQPCHYSKDKTCKPALANAIFSTIAFVLGAVTSLVSGFLGMKIATYANARTTLEARKGVGKAFITAFRSGAVMGFLLAASGLLVLYIAINLFGIYYGDDWEGLFEAITGYGLGGSSMALFGRVGGGIYTKAADVGADLVGKVERNIPEDDPRNPAVIADNVGDNVGDIAGMGSDLFGSYAESSCAALVVASISSFGINHEFTPMVYPLLVSSVGIIACLITTLFATDFFEIKAVSEIEPALKKQLIISTAFMTVGIALVSWLGLPYTFTIFNFGAQKTVQSWQLFLCVAVGLWAGLIIGFVTEYYTSNAYSPVQDVADSCRTGAATNVIFGLALGYKSVIIPIFAIAFSIFLSFSLAAMYGVAVAALGMLSTIATGLAIDAYGPISDNAGGIAEMAGMSHRIRERTDALDAAGNTTAAIGKGFAIGSAALVSLALXFGAFVSRAAISTVDVLTPKVFIGLIVGAMLPYWFSGMTMKSVGRAALKMVEEVRRQFNTIPGLMEGTTKPDYATCVKISTDASIKEMIPPGALVMLTPLIVGILFGVETLSGVLAGALDYNCIQWSVLLIRFTFSQIAISASNTGGAWDNAKKYIEAGASEHARTLGPKGSDPHKAAVIGDTIGDPLKDTSGPSLNILIKLMAVESLVFAPFFATHGGNPLQVVLNRRWVLQRP

SEQ ID NO: 13416 - protein, 230 aa, Geobacter metallireducens GS-15
MSTKSETHYAERIGWLRAAVLGANDGIISTASLVVGVAAAHAARGNVLIAGVAGLVAGTMSMAAGEYVSVSSQADTEKADLARERRELEEDHEFELKELASIYVDRGLEPQLAKQVATQLMAHDALAAHARDELGLNEIHTARPIQAALASAVTFAVGATLPLIITLLSPEQLIVPGVAGGSLVCLALLGTLAARAGGADIAVGATRVTLWGALAMAATAGVGALFGTAV

SEQ ID NO: 13417 - protein, 325 aa, Neurospora crassa
MTKVLLTGGSGFIAAHILEQLLAKGHTVVTTVRSEDKAQNIREAYPDKASSGELKVVIVPDIAKLDAFDEVVKEPGLEVVLHTASPFHFKFTPKEDPKTELIDPAVNGTTGILKAIARSAPTVRRVVITSSFAAILDENKITDPNHTFSEASWNPVTIDDIHRNPATAYRASKTLAEKAAWDFVRDPANNVKFDLATINPPMVFGPVVHHLASLSSINTSNERIVDLLQGKWKEGVPSTGAATIWIDVRDVARAHIRAGLEVPEAGGKRLFTTAGTFSNSEIAEKVRKNFPEYGDKLPEERRSRAASCRRMISGSRSITRRRMSC

SEQ ID NO: 13418 - protein, 438 aa, GIBBERELLA ZEAE PH-1
MPRDDLSIDFVKRMPQAEPLDPGIILEDWINRVQNLPEEIQFVQNEVADKDRQYNECVRIIEDRDGKIQKWIKTNGSHEPNPKEELLRAQVRENYARADQLSQEKIVLHQKMQLLMDKHLRNLDSQIKQLYDRAEPGFTDPDEVPSLLRPSAANHTAPSIRAINPASHMTTAAGPSTPLAAAAQTSSNPTLARLPNHPNVRHAQAQQHAASAPATPAASITLNRQREGSAGPATKRAPRINPALGTLPTASSGLARHSSLGPGTPKGGAPGGAGLARAGSAGPRAGSVKSAGTVIGRRGTPTGGARKKMPNKSNLSRVKKASNRNSPAATNDSELSDVDSGSGEEEEGADGRSRGTPVADGKDMDGDDIVGDADEDDEEAGDDKKYCLCHNVSYGDMVACDNDNCPYEWFHWSCVGLKSEPNGTWYCPVCAEKFKKSK

SEQ ID NO: 13419 - protein, 457 aa, Alcaligenes faecalis
MSRFEQIQSREAGLHKRLNARQMSMIAIGGAIGTGLFLGSKFAIGFAGPGVVLSYVIGGFIALVLMGCLAEMTVEHPTSGSFGAYAEFYIHPLAGFLVRYSYWACIVLAVGTEVTAVADYMKFWFPEVSPWIWIVFFSAVLIAVNAYSVKAFGSVEYWFALIKVFAIIAFIVLAIGMLTGYYQPAQVQENLLGQGGFMPNGWYGVWVGVIISIFSYLSIEMIAVAAGEAENPEQAVRQAFKATIWRLIIFYLLSLSLIVMLVPWQVLIADGTSSPFITVMQSVGIPYADSILNFIVIIAALSAMNSMLYISTRMMFSLSRAGDAPLVLGKVARNGVPLNALALSASGVGVAAVVYAYNPETAFPVMIALSMFGALFTWGMIFLTHLFFRRRVAQEGVQLRFRMPAYPIGTLLGLIGIVAILITTWFINIFHYTLLFGVPFLLTLIVIYFVRSKSRVA

SEQ ID NO: 13420 - protein, 297 aa, Sulfolobus solfataricus P2
MYEDLVERVTPSVVTIITKQIALDQFFMPQVAEGIGSGYSIGKNILITSYHVISNAEEILVISEDGFREEAQVIAINPFHDLAMLRSTIELPSLKLAKECKTGEVVLAVGNPLGLYSVSMGIISSEERAIMTPNGLPIYVVQTDAAVNPGNSGGPLINTRGEVVGTVTAMIREAQNIGFAIPSKLVDSFVKNVMKFGRYIRPYVGIGVIKLNKALATYLGVRKQNGLLVTNIDPNGSAYKYGIRRGDIILKVNNQEVKSPIDLLAVLEEMVGSQINVKMLRDSKEIELSIPVPGLST

SEQ ID NO: 13421 - protein, 637 aa, Glycine max
MLLPTSGVGMNSAMDDMNLIQQTQRHHLVVREIGEEIDLEIGAGEDDPSFGSATLIGAPMRESSVEEHGESKQMGMISQLPNDAQDMSKTQQGKRKKKVVKRWREEWADTYKWAYVDVKDGTPRIFCSVCREYGRKHRRNPYGNEGSRNMQMSALEEHNNSLLHKEALRLQMASKDKIVVDKPVYVKVAMSKTAGSILEATLKRDPHEVEFIQAVQEAVQALERVIAKNSRYINIMERLLEPERMIVFRVSWVDDRGGTCVNRGFRVQFNQSMGPCRGGIRFHPSMNLSVAKFLGFEQTLKNALSPYKLGGAAGGSDFDPKGKSDNEIMRFCQSFMSEMYRYLGPDKDLPSEEMGVGTREMGYLFGQYRRLAGHFQGSFTGPRIFWSGSSLRPEATGYGLVFFAQLMLADMNKELKGLRCAVSGSGKIAMHVLEKLIAYGALPISVSDSRGYLVDEDGFDYMKISFLRDIKAQQRSLRDYSKTYARSKYYDEAKPWSERCDVAFACTSQNEIDQSDAINLVNSGCRILVEGSNMPCTPEAVQILRKASVLIAPAMAAGAGGVVAGELELNHECSLMHWSPEDFESKLQEAMKQTYQRAMKAATDFGYQKESPEALVHGAVISAFLTIAQAMTDQGSI

SEQ ID NO: 13422 - protein, 350 aa, Cyamopsis tetragonoloba
MSSQTVLVTGGAGYIGSHTVLQLLLGGFKAVVVDNLDNSSETAIHRVKELAGKFAGNLSFHKLDLRDRDALEKIFSSTKFDSVIHFAGLKAVGESVQKPLLYYDNNLIGTIVLFEVMAAHGCKKLVFSSSATVYGLPKEVPCTEEFPLSAANPYGRTKLIIEEICRDIYRAEQEWKIILLRYFNPVGAHPSGYIGEDPRGIPNNLMPFVQQVAVGRRPALTVFGNDYTTSDGTGVRDYIHVVDLADGHIAALRKLNDPKIGCEVYNLGTGKGTSVLEMVKAFEQASGKKIPLVMAGRRPGDAEVVYASTNKAERELNWKAKYGIDEMCRDQWNWASKNPYGYGGSEDSSN

SEQ ID NO: 13423 - protein, 491 aa, Bradyrhizobium sp. BTAi1
MGGVRLVFLGLDVGTSGVKAVLEDEAGALVATASRPLTLSHPKPLWSEQNPDDWVAASVGAVDDLARLHPRETASVSGIGLSGQMHGATLLGRDGRPLRPAILWNDGRSQTECAELERRCPELHAIAGNLAMPGFTAPKLAWVAKHEPAIFAEVAKVLLPKAYVRYRLSGEMVEDMSDAAGTLWLDVGARRWSEALLAATGLDLSHMPRLVEGNAPSAVLSPDLAQRWGMANNVVIAGGAGDNAASAIGLGAITPGDAFLSLGTSGVLFRVTDRFAPAPKAAVHAFCHALGGLWHQMGVMLSAAASLAWLARILETPEAALLAPLGATVERPSPVQFLPYLDGERTPHNDAHADGAFVGLRSAAGRGDLVQAVLEGVAFAARDMLAALGRSAQPITELDLVGGGSRSVVWAQIMADVLGVRVHRVEEGEVGAAIGAARLGRLAATGAAPADVCRKPRRLQSFEPRPAQRAAYDDAYAHWRKLYPALKECTS

SEQ ID NO: 13424 - protein, 429 aa, uncultured bacterium pCosHE2
MTTDDLAFDQRHIWHPYTSMTSPLPVYPVVSAEGCELILSDGRRLVDGMSSWWAAIHGYNHPQLNAAMKSQIDAMSHVMFGGITHAPAIELCRKLVAMTPQPLKCVFLADSGSVAVEVAMKMALQYWQAKGEARQRFLTFRNGYHGDTFGAMSVCDPDNSMHSLWKGYLPENLFAPAPQSRMDGEWDERDMVGFARLMAAHRHEIAAVIIEPIVQGAGGMRMYHPEWLKRIRKICDREGILLIADEIATGFGRTGKLFACEHAEIAPDILCLGKALTGGTMTLSATLTTREVAETISNGEAGCFMHGPTFMGNPLACAAANASLAILESGDWQQQVADIEVQLREQLAPARDAEMVADVRVLGAIGVVETTHPVNMAALQKFFVEQGVWIRPFGKLIYLMPPYIILPQQLQRLTAAVNRAVQDETFFCQ

SEQ ID NO: 13425 - protein, 384 aa, uncultured bacterium pCosHE2
MSWQEKINAALDARRAADALRRRYPVAQGAGRWLVADDRQYLNFSSNDYLGLSHHPQIIRAWQQGAEQFGIGSGGSGHVSGYSVVHQALEEELAEWLGYSRALLFISGFAANQAVIAAMMAKEDRIAADRLSHASLLEAASLSPSQLRRFAHNDVTHLARLLASPCPGQQLVVTEGVFSMDGDSAPLAEIQQVTQQHNGWLMVDDAHGTGVIGEQGRGSCWLQKVKPELLVVTFGKGFGVSGAAVLCSSTVADYLLQFARHLIYSTSMPPAQAQALRASLAVIRRDEGDARREKLVSLIAHFRAGVQDLPFTLADSCSAIQPLIVGDNSRALQLAEKLRQQGCWVTAIRPPTVPAGTARLRLTLTAAHEMQDIDRLLEVLHGNG

SEQ ID NO: 13426 - protein, 690 aa, Prochlorococcus marinus subsp. marinus str. CCMP1375
MTTNNINQIEPTQEEERSDDKTSHPGLKPLINKWWDEFSLRAKLLAIATLIVSLLMSGITFFALSSIQRDAGMNDTRYARDLGLLLSGNVTELVAKGQERELFNVAEKFWRSSRNIRYIFFTDTEGIVQLGIPISATPSDSKSEFQLRKKLQLPQELKKRPQFPLVRQHLTPQGQVTDVFVALLFKGKYVGNLALGVTPNKSALASAALTREITIAVFISIWILVIIGAVFNAQTITKPIRELVSGVREIAKGNFKSRIILPMSGELGELLDGFNNMASQLEDYDAANIEELRAAQVKQQSLIATMADGAILLNEKGKIVLVNPTARRLFRWEGRNLESQDLLDELPELIANELHPNITSILNNLCESDELRCSTGEPARTLRIVLQSVRDSSGSTLKGVAITIQDLTREVELNAIQRRFISNVSHELRTPLFNIKSYVETLHDLDDKLDHKEKMEFLEVANSETDRLTRLVNDVLDLSKIETAGNVNFEAINLAPAIDQTVRTYRLNAEDKKVEISQEIEENMELILGNWDLLLQVLDNLIGNALKFSSAGGKIVLRAYTWPDTCITSSPKIDKKDAPSCEIIYPLPRLRIEIGDTGCGISEDSQLRIFERFYRVENDVHTEVGTGLGLSIVREIIEKLGSNIRMVSIPGIGTTFWFDLPLAINDADEILVESERMRLKWDRKLEEELT

SEQ ID NO: 13427 - protein, 152 aa, Nocardia farcinica IFM 10152
MEVIAVLRFDPFHDIDTVARHLLGEGTGTARAPRFMPMDLFKAGDHYVLNADLPGVDPGSVDVSVDNGTLTLRAQRSVPSEEGVQWIASERFAGTYMRQLSLGDNVDTDKISATYNNGVLSVTIPIAEKAKPRRIEITGGSEQKTIEASSNN

SEQ ID NO: 13428 - protein, 61 aa, Cucumis melo
DTLLDADLESDALGWQYISGTLPDSREFDRIDNPQLEGYKFDPNGEYVRRWLPELSRLPTE

SEQ ID NO: 13429 - protein, 162 aa, Brassica napus
MAAARQLRALQSHPENKVCVDCAQKNPQWASVSYGIFMCLECSGKHRGLGVHISFVRSVTMDSWSEIQIKKMEAGGNARLNSFLSQYGIAKETDIISKYNSNAASVYRDRIQALAEGKAWSDPPVVKEGVHKKPPLAAHGGGGGGWDRSPDVAIINTYRVYF

SEQ ID NO: 13430 - protein, 312 aa, Agrobacterium tumefaciens str. C58
MSKKIGVVGSNMVDLITYVDRMPGPGETLEAPTFEMGCGGKGANQAVAAARLGAEVMMVTRVGDDVFADNTIRNLASFGVDTRHVVKVSGKSSGVAPIFVEQSGENSILIVKGANADLLPVEVDKAAADLKECGLILMQMEVPVETVYHTIEFAAQNGIETILNPAPAAANLDPERIRQVTFLVPNESELALLSGLPTDTDEDIVRAARSLIARGIRTVIVTLGARGARMITSDEIVNIEPVKVTPRDTTGAGDAFIGSFARFYAETREVVSSLKKASLYAAHSITRPGTQKAYASIDEFEAFCRDHANGAA

SEQ ID NO: 13431 - protein, 378 aa, Glycine max
MEKERYSIYKSGVTKSWIDVKIREARKLGVAAKEKKRSRVVKKDRLSNLPDEVLHRILSSLDAKSAVQTCVLSKRWTHVWTSLPVLNFCDSSFDDSLYFQCFVDHVLSRRDSSSNVYELNFACTDELEDGHIVDSVVDHVSLTPPITIQGLYIVAECIVGKLPQLSLCQSLTTLKLAHISTETTTFDFLSLTHLHLFDCRFECGLEELLDPFRDCLNLKHLYLHRCQYYGGFQRFKIFAPKLTLLSIALMRVDEMFDSDCTIQLFTPKLQSFTYCDFDLYDFSIEGDLPFIEEVDIDMGCLAKDTYSLLQLIELFQVMGNAQFVSLSPDIIDVLATFPDLLDGRSSPFTRVRTFVLNMDTPSSSFVIPPNVMAYLSAT

SEQ ID NO: 13432 - protein, 294 aa, Lycopersicon esculentum
MDQYEKVEKIGEGTYGVVYKARDRVTNETIALKKIRLEQEDEGVPSTAIREISLLKEMQHANIVRLQDVVHSEKRLYLVFEYLDLDLKKHMDSCPEFSKDPRLVKMFLYQILRGIAYCHSHRVLHRDLKPQNLLIDRRTNALKLADFGLARAFGIPVRTFTHEVVTLWYRAPEILLGSRHYSTPVDVWSVGCIFAEMVNQPPLFPGDSEIDELFKIFRVLGTPNEDTWPGVTSLPDYKSAFPKWPPKDLAIIVPNVDGAGLDLLGKMLSLDPSKRITARNALEHEYFKDIGYVP

SEQ ID NO: 13433 - protein, 294 aa, Lycopersicon esculentum
MDQYEKVEKIGEGTYGVVYKARDRVTNETIALKKIRLEQEDEGVPSTAIREISLLKEMQHGNIVRLQDVVHSEKRLYLVFEYLDLDLKKHMDSCPEFSKDPRLVKMFLYQILRGIAYCHSHRVLHRDLKPQNLLIDRRTNVLKLADFGLARAFGIPVRTFTHEVVTLWYRAPEILLGSRHYSTPVDVWSVGCIFAEMVNQRPLFPGDSEIDELFKIFRVVGTPNEDTWPGVTSLPDFKSAFPKWPSKDLGTVVPNLGAAGLDLIGKMLTLDPSKRITARSALEHEYFKDIGFVP

SEQ ID NO: 13434 - protein, 360 aa, Bacteroides thetaiotaomicron VPI-5482
MEQNIYNAIYKVNHAGGCGSCFYLKQYDLFVTNYHVVEGFRQVAIQDNDKNSFLARVVMVNSVLDIALLSVEGDFSALPDIRLSELKEVAIGQKINVAGYPFGMPFTVTEGTVSSPRQLINNSYYIQTDAAVNPGNSGGPMFNERGELIAITASKITDADNMGFGIPVDTLKKVLENIESLDRSVFNVQCNSCDEFISEEDEYCPCCGDKLPEEIFKERGLTDLAVFCEEAIEAMGINPVLARVGYEGWKFYKGSSEIRMFVYDRSYLFATSPLNILPKKNLEPVLTYLLQTEIAPYRFGLDGNQIYLSYRVHISDIFSDYSENVKTNLTHLAFKADDLDNYLVDTFGCEFSEYANKNAI

SEQ ID NO: 13435 - protein, 219 aa, Pyrococcus abyssi GE5
MSRMPFDRQKIVEAVKEAKARAKPRNFTQSVEVAVNLKDIDLKRPENRFKLEVVLPHGRGKDVKIAVIADGAVAEAARRLGLDVISSAELEEIAQSPRQARKLAKKYDFFIAEAPLMPKIGRYLGKYLGPRNKMPVVVPPTMSNLEPIVEKLKKTVRIQLKNNPVVHAPVGTEKMSDEEIAENIETVLNAIIGKLERGESQIKSVYVKTTMGPAVKVKG

SEQ ID NO: 13436 - protein, 156 aa, Cicer arietinum
PNKANSYSVHGAALGAKEVDATRQNLGWPYEPFHVPEDVKKHWSRHTPEGAALEAEWNAKFAEYEKKYAEEAAELKAIITRELPAGWEKALPTYTPETPADATRNLSQQNLNALAKVLPGLLGGSADLASSNMTLLKSFGDFQKGTPEERNVRFGV

SEQ ID NO: 13437 - protein, 142 aa, Cicer arietinum
FDEILQEADGIILSRGNLGIDLPPEKVFLFQKSALYKCNMAGKPAVLTRVVDSMTDNLRPTRAEATDVANAVLDGSDAILLGAETLRGLYPVETISTVGRICSEAEKVFNQDLYFKKTVKYVGEPMTHLESIASSAVRAAIK

SEQ ID NO: 13438 - protein, 461 aa, Corynebacterium efficiens
MAQQSIIDTVVNLCKRRGLVYPCGEIYGGTRSAWDYGPLGVELKENIKRQWWRTMVTSRPDVVGVDTSVILPRQVWVTSGHVEVFTDPLVESLHTHKRYRADHLLEAYEEKHGHPPANGLADINDPETGQPGKWTEPKAFSGLLKTFLGPVDDEEGLHYLRPETAQGIFVNFKNVMNSSRMKPPFGIANIGKSFRNEITPGNFIFRTREFEQMEMEFFVKPGEDEEWHQHWIDARHQWYIDLGVNPDNLRLYEHPQEKLSHYSKRTVDIEYAFNFANSKWGELEGIANRTDYDLRVHSEGSGEDLSYFDQETGERWIPYVIEPAAGLGRAMMVFLMDAYHEDEAPNSKGGVDKRVVLKLDRRLAPVKVAVLPLSKKPELSGPAEKLAAELRQFWNVEYDTSGAIGRRYRRQDEIGTPFCVTVDFDTLEDNAVTVRERDTMEQIRVPLDELQGYLAQQLIGC

SEQ ID NO: 13439 - protein, 78 aa, Cicer arietinum
STHIEPLGLGQGLSMGVLNLAIVVPQIVVSLGSGPWDQIFGGGNSPAFAVAAVAALMSGLLALLAIPRTGTQKPRSRV

SEQ ID NO: 13440 - protein, 459 aa, Rickettsia typhi str. Wilmington
MEQYDVAVIGGGPGGYVAAIRAAQLKKKVVLIEKSHLGGVCLNWGCIPTKSLLKSAEVFEYIKHAKDYGIDVGIAEINIQKIVERSREIASTLACGVQLLLKKNKVTIINGVASFGENKVINVNDKPTVKANNIIIATGARPKILQGFEPDITQIWTSKEAMIPQYVPKSMIIIGSGAIGIEFASFYNSIGVDVTIIEAYNRILPSEDTEIAGIAHKIFEQKGIKILTNAKLIKQTKSQNKIEVELELEGKKQKLQATILLMAVGITANIENLGLEKTKVQVENGYIVTNGLMQTAESGIYAIGDVSGVPCLAHKASHEGIIAAESIAGLKPNSINKHNIPYCIYSSPQIASVGLTEEVAKDLGYEIKIGRFPFRANGKALVSGNSYGLIKTIFDVKTGELLGAHMIGLEVTELIQGYVVSKNLEGTELDLIHTIFPHPTLSEMMHESVLAAYDMAIHI

SEQ ID NO: 13441 - protein, 164 aa, Cicer arietinum
LVAGEAGTGIAELIALEMSKQTKTPIEETRKKIWLVDSKGLIVSSRANSLQHFKKPWAHEHEPVGTLIDAVKVIKPTVLIGSSGVGKTFTKEVIEAMTSNNEKPLILALSNPTSQSECTAEEAYTWSEGRAIFASGSPFDPVEYNGKVYYSGQSNNAYIFPGFG

SEQ ID NO: 13442 - protein, 248 aa, Oryza sativa
VDPRAEESARGPSLFSRAVSLPDPPPPPPPIIMSKLQSEVLKEAISQVVGESKEKGRKFTETVELQIGLKNYDPQKDKRFSGSVKLPHIPRPKMKVCMLGDAQHVEEAEKIGLDYMDVEALKKMNKNKKLVKKLAKKYHAFLASEAIIKQIPRLLGPGLNKAGKFPTLVTHQESLESKVNETKATVKFQLKKVLCMGVAVGNLSMEEKQIQQNIQMSVNFLVSLLKKNWQNVRCLYIKSTMGKPIRVF

SEQ ID NO: 13443 - protein, 427 aa, Escherichia coli
MADTKAKLTLNGDTAVELDVLKGTLGQDVIDIRTLGSKGVFTFDPGFTSTASCESKITFIDGDEGILLHRGFPIDQLATDSNYLEVCYILLNGEKPTQEQYDEFKTTVTRHTMIHEQITRLFHAFRRDSHPMAVMCGITGALAAFYHDSLDVNNPRHREIAAFRLLSKMPTMAAMCYKYSIGQPFVYPRNDLSYAGNFLNMMFSTPCEPYEVNPILERAMDRILILHADHEQNASTSTVRTAGSSGANPFACIAAGIASLWGPAHGGANEAALKMLEEISSVKHIPEFFRRAKDKNDSFRLMGFGHRVYKNYDPRATVMRETCHEVLKELGTKDDLLEVAMELENIALNDPYFIEKKLYPNVDFYSGIILKAMGIPSSMFTVIAAMARTVGWIAHWSEMHSDGMKIARPRQLYTGYEKRDFKSDIKR

SEQ ID NO: 13444 - protein, 148 aa, Brassica napus
  misc_feature (60)..(60): Xaa can be any naturally occurring amino acid
  misc_feature (142)..(142): Xaa can be any naturally occurring amino acid
  unsure (1)..(148): unsure at all Xaa locations
MDSVFSNVVRAPEDPILGVTVAYNNDPSPAKLNLGVGAYRTEEGKPLVLDVVRRAEQQLXVNDPSRVKEYIPIAGLADFNKLSAKLILGADSPAIQESRVATIQCLSGTGSLRVGAEFLKKHYHQSVIFIPKPTWGNHPKVXNLAGLS

SEQ ID NO: 13445 - protein, 402 aa, Lactobacillus sakei subsp. sakei 23K
MGVVAPLGNDVETFTRRILAGELGIGPITKFDATTTGVSLAAEVLDFDPALRIGKKKAKRMDLFSQYALDSALAALEQAGINDENTVPADMGVIYGSGIGGLTTIQEQVTRMVEKGADHISPLFVPKSIGNMAAANIAIEIGAQNICTTIVTACSSGANAIGEAYRQIKENRATVMVTGGSEASINEIGIGGFAALSTLSTATDPTRASLPFDADRKGFVMGEGGATLILESLEHAQARHATILGEVTGYGTNCDAYHMTSPNPNGEVAARAMQMAIDEAGITAADVDYVNAHGTGTVANELAESAALARVFGDEGTVPVSSTKSMTGHLLGAAGALEAIVTIGALQAGTLPPNVGLQNTDPDCHVNLIKTPLAAPDAQYGMSNSFGFGGHNAVLLLKKWSD

SEQ ID NO: 13446 - protein, 261 aa, Triticum aestivum
LLEQVCTKKHARTGPEFPGYRRPTRPIKNAPEGSFFLLHACAHNPTGVDPSEEQWREISHQFKVKNHFPFFDMAYQGFASGDPERDAKAIRIFLEDGHQIGCAQSYAKNMGLYGQRAGCLSILCDDEIQAVDVKSQLQQIARPMYSNPPLHGALIVSTILGDPALKSLWLKEVKGMADRIIGMRKALKESLEKLGSPLSWEHITNQIGMFCYSGMTPEQVDRLTNEFHIYMTRNGRISMAGVTTGNVAYLANAIHEVTKPI

SEQ ID NO: 13447 - protein, 175 aa, Triticum aestivum
  misc_feature (38)..(38): Xaa can be any naturally occurring amino acid
  misc_feature (50)..(50): Xaa can be any naturally occurring amino acid
  misc_feature (57)..(57): Xaa can be any naturally occurring amino acid
  unsure (1)..(175): unsure at all Xaa locations
FPGLPGSRKVTLALPLEFGNYRKGGPHTYVVDGDNLRXGLNGDLSFKAEXRTENIRXRVGEVAKLFADAGTICIASLISPYRRDRDACRALLPDSRFIEVFMDLPLELCEARDPKGLYKLARTGKIKGFTGVDDPYESPVNSEIVIKMEGGECPSPKAMAQQVLSYLEKNGYLQA

SEQ ID NO: 13448 - protein, 459 aa, Burkholderia pseudomallei K96243
MTRRFDAIIIGTGQSGPPLAARLSAAGMKVAVVERGRFGGTCVNTGCIPTKTLIASAYAAHLARRADEYGVTLGGPVAVDMKKVKARKDQVAARSNRGVEQWVRGLENGAVYHGHARFESARTVRVDEALLEAERIFIDVGGRALIPPIPGLDQVPYFTNSTMMDVDFLPEHLIVLGGSYVGLEFGQMYRRFGARVTIVEKGPRLIAREDEDVSHAVREILEGEGIDVRLDADCLSVRRDGGGIAVGLDCAAGAREVRGSHLLLAVGRVPNTDDLGLEHAGVETDARGYIRVDEQLRTNVAGIWAMGDCNGRGAFTHTSYNDYEIVAANLLDGDPRKVSDRIPAYAMFIDPPLARVGLTQAEAARSGRRLLVGTRPMTRVGRAVEKGESLGFMKVIVDADSHAILGASILGVTGDEVVHSLLDAMYAKAPYTTISRAMHIHPTVSELVPTLLQDLHPPA

SEQ ID NO: 13449 - protein, 381 aa, Triticum aestivum
  misc_feature (168)..(168): Xaa can be any naturally occurring amino acid
  misc_feature (246)..(246): Xaa can be any naturally occurring amino acid
  unsure (1)..(381): unsure at all Xaa locations
MQIFVKTLTGKTITLEVESSDTIDNVKAKIQDKEGIPPDQQRLIFAGKQLEDGRTLADYNIQKESTLHLVLRLRGGMQIFVKTLTGKTITLEVESSDTIDNVKAKIQDKEGIPPDQQRLIFAGKQLEDGRTLADYNIQKESTLHLVLRLRGGMQIFVKTLTGKTITLXEVESSDTIDNVKAKIQDKEGIPPDQQRLIFAGKQLEDGRTLADYNIQKESTLHLVLRLRGGMQIFVKTLTGRHITLGXGESSGPIDNGKAKIQDKEGISPAQRRLFPQAAWDGRTLADYNIQKESTLHLVLRLRGGMQIFVKTLTGKTITLEVESSDTIDNVKAKIQDKEGIPPDQQRLIFAGKQLEDGRTLAAYNIQKESTLHLVLRLRGGQ

SEQ ID NO: 13450 - protein, 414 aa, Arabidopsis thaliana
MAEPETLSSFVQHEYANNHQVMDFPGGKVAFTPEIQFISESDKERVPCYRVLDDNGQLITNSQFVQVSEEVAVKIYSDMVTLQIMDNIFYEAQRQGRLSFYATAIGEEAINIASAAALTPQDVIFPQYREPGVLLWRGFTLQEFANQCFGNKSDYGKGRQMPVHYGSNKLNYFTVSATIATQLPNAVGAAYSLKMDKKDACAVTYFGDGGTSEGDFHAALNIAAVMEAPVLFICRNNGWAISTPTSDQFRSDGVVVKGRAYGIRSIRVDGNDALAMYSAVHTAREMAIREQRPILIEALTYRVGHHSTSDDSTRYRSAGEIEWWNKARNPLSRFRTWIESNGWWSDKTESDLRSRIKKEMLEALRVAEKTEKPNLQNMFSDVYDVPPSNLREQELLVRQTINSHPQDYPSDVPL

SEQ ID NO: 13451 - protein, 250 aa, Oryza sativa
MEPSSQPQPAIGVVAGGSQVYPAYRPAATVPTAPAVIPAGSQPAPSFPANPDQLSAQHQLVYQQAQQFHQQLQQQQQRQLQQFWAERLVDIEQTTDFKNHSLPLARIKKIMKADEDVRMISAEAPVIFAKACEIFILELTLRSWMHTEENKRRTLQKNDIAAAITRTDMYDFLVDIVPRDDLKEEGVGLPRAGLPPLGVPADSYPYGYYVPQQQVPGAGIAYGGQQGHPGYLWQDPQEQQEEPPAEQQSD

SEQ ID NO: 13452 - protein, 606 aa, Zea mays
MDTHIGSVNGAASNQTVGCPASAPGCPMASTPAQPAATLSAGEASLGRHLARRLVQVGVNDVFAVPGDFNLTLLDHLIAEPGLRLVGCCNELNAGYAADGYARARGVGACAVTFTVGGLSVLNAIAGAYSENLPVICIAGGPNSNDYGTNRILHHTIGLPDFSQELRCFQTVTCHQAVVNNLDDAHEQIDTAIATALRESKPVYLSISCNLPGLPHPTFSRDPVPFFLTPRTSNKMGLEAAVEATVEFLNKAVKPVLVAGPKLRVAKAGKAFVDMVDASGYAYAVMPSAKGLVPETHPHFIGTYWGAVSTAFCAEIVESADAYLFAGPIFNDYSSVGYSFLLKKEKAIIVQPERVIVGNGPAFGCVMMKEFLSELAKRVNKNTTAYENYKRIFVPEGQPLESEPNEPLRVNVLFKHVQKMLTGDSAVIAETGDSWFNCQKLKLPEGCGYEFQMQYGSIGWSVGALLGYAQGANHKRVIAFIGDGSFQVTAQDVSTMLRCEQNSIIFLINNGGYTIEVEIHDGPYNVIKNWNYTGFVDAIHNGEGKCWTSKVKSEEELTAAIETALGEKKDCLCFIEVIAHKDDTSKELLEWGSRVSAANSRPPNPQ

SEQ ID NO: 13453 - protein, 162 aa, Symbiobacterium thermophilum IAM 14863
MNGVAAIAKGMATTLKVLFRKPVTVDYPYVKRPRAPRFRGRHELRTYENGLEMCVGCELCQVACPAAAITVQAAENDPDNPHSPGERYGYKYQVDLLRCIFCGMCEEACPTDCLHLTQEFELADFTRESLILQKEQLVNRNPSGFKVPMNVYPPFRRKAVNA

SEQ ID NO: 13454 - protein, 369 aa, Triticum aestivum
  misc_feature (198)..(198): Xaa can be any naturally occurring amino acid
  misc_feature (227)..(227): Xaa can be any naturally occurring amino acid
  unsure (1)..(369): unsure at all Xaa locations
MLKEDRWGGTEGIMDFRSSNGGSSSERRPADGAPLTRQGSIYSLTFEEFQSTLGGGAGVGGSDLGKDFSSMNMDELLRSIWTAEESQAMAASASGAGAGAGPPPTSLQGQGSLTLPRTLSAKTVDEVWRNLVRDDPLPVGPEGAEPQPHRQATLGEMTLEEFLVKAGVVREIPTAPAVPPPPMQPRPVPVVPKGPSLXTGNFPSANDAGAAALGFAPVAMGDLAIGXNGLMPRAVGMGGAPLVVQTAVNPVDSGSKGSEDLSSPSEPMPYSFEGIVGGRRTGGGVEKVVERRQRRMIKNRESAARSRARKQAYTMELEAEVQKLKDLNQELVRKQAEILEMQKREAPEMKDQFGRKKRQCLRRTLTGPW

SEQ ID NO: 13455 - protein, 878 aa, Arabidopsis thaliana
  misc_feature (627)..(627): Xaa can be any naturally occurring amino acid
  unsure (1)..(878): unsure at all Xaa locations
MKSSYGSSSNDLHTFVNEIKREIQLSNINLDPYSFVSPSAYDTAWLSMIEQDINVDDNELKPMFQGCLDWIMCNQNAREGFWMNSTSYTTTVADGGDEDGEEDMYILISTLACVVALQKWNIGCFHLHKGTRYIERNTEMIIGKYANEEGSYPRWFVIKFTGILELAQKLGLHFVFSSRCIEMIKGMFYQRQEIIEREKLVDDCNYIPLLAYLEVLPSKLYVTNQEDIIVKSLDSMNGSLFQSPSATASAFMLTRNTKCLAYLQNLVQKCPNGVPQKYPLNEDLIKLSMVNLIESTGLGELFGIEIEHVLEQVYRRYEEKDFERMPMSYLADQLHKDSLAFRMLRMHGRDVSPRSFCWFLNDQKTRNHLERNIDCFLLVILSVYRATDPMFPGEHDLEEARKYTRNLLEKRRSINEKMIMHELSTPWIARLKHLDHRMWIEDKNSNVLSIEKASFLRLHSSYSDKLTHLAARNFEFQQAKYCRELEELTMWVKKWGLSDIGFGREKTTYCYFATVTSLPYEYAIKFGKLAAKCAILITIADDFFDEKGSFNDLEALTKAVLRWEGEELKSYGKIIFRALDDIVRETANTCRTHHKTDIIVHLRNIWGETFESWLREAEWSKKGHTSXMDEYIRNGMISIAAHTIALSISCLMEPCFPHNKLKPGNYDSITTLLMIIPRLLNDLQSYQKEQEQGKINSVLLHMKNHPGLEIEDSIAHIEKIIDSKRKEFLEHVLVDGLSDLPKPCKEIHTSCCKVFEMFFNKKNRYDSNTEMLHDIKKALYDPINVYELSEMEPMPLMAHGDEYMILPLLLNSLPNILEFKRKDGYGAMKTSMCFGRSYRVNKRVMASQLDDQHKPLKIVASQRKPVPMMQSIFAPCFY

SEQ ID NO: 13456 - protein, 576 aa, Bacteroides fragilis NCTC 9343
MSAIRNITIGRTERLYKPVGYTMLANLVNIVPFCLSIEAIRIIFRAFNGGGQSLDTTRLWCIFGCMTGYIAVMVLAERAAYRANFRGAYEMSASGRISLAEHLRKLSLGFLGKRDPGDLSSMLITDFTMAETGISHYLPQLMGALVMPVLAFVSLLWIDWRMAVAMFVALPFAMGILWLSTSVQERLSGRQIKAKVNAGNRLEEYLQGIRVMKAYNLLGDRFVRLRDAFAELRRACIRLEALLGPFVLLAITLVRAGLTLMVLCGTYLLLGGQLSILTFVMFLVVGSRVFDPLTSALTNFTEFRHFSISGGRILSLMNEPEMKGTKEAPEDGNIIFENVSFGYQEKEVLHGISVILSRNSLTALVGPSGSGKSTVMKLCARFYDPTKGRILFGGVPVREIEPEKLMSRISMVFQDVYLFQDSIRNNIRFGKSDATDEEIVAAAKKACCHNFIMHLPHGYDTMVGEGGCTLSGGEKQRLSIARAMLKDAQIVLLDEATASLDPENEVEIQKAIDTLIKGRTVIVIAHRLKTIMGADHIVVLSDGKVEEQGTHSELMCRDGLYRKLWNIQESTLGWTL

SEQ ID NO: 13457 - protein, 285 aa, Debaryomyces hansenii CBS767
MDTTTVLDKYTQDLSNLPLEVKHLLQELKNKDVQLQEARKRYQTKDNQIHKFIRANGTLTKHPKEQQIYNKVEEDMVLVKKLQKEKILLANTALFLVSKHLSNFETDIAKLEKDELLPPVDNVMELDTPSSDMNSVINGLSDNLSGTTTPRGHSASTPVADNAANSMLRKAQKRKHALGMKGASGLTRPSKRMKSEDFEDKKYDNDSLSRPNEGPGNNGEDADNNLYCFCQRVSFGEMIGCDNDDCKFEWFHWSCVGITAPPKDDEIWYCPDCAPKMEKRKKKRK

SEQ ID NO: 13458 - protein, 458 aa, Bradyrhizobium sp. BTAi1
MPTTGRVDVQAFLDDHPFSAFQWLIFALGFSIVLLDGFDTAAIGFIAPSLLKEWGIEKSALGPVLSAALFGLAAGALLAGPVADRLGRKLVLVGSVLVFGVACLVSAFATNLTELTVLRFVTGLGLGAAMPNAVTLLSEYCPGRLRATMTNLMFCGFPLGAACGGFLAAWMIPQWGWRSVLVLGGVTPLVLTVLLIAILPESVHYLLSRGASVERVRKVMRRISQAANDIGQFVMLEPEHAETTRRVNATGIGMVLSPVLRIGSLMLWITYFMGLVIFYSLINWMPILFKDVGLNPQTATLISALFPLGGVGAVFFGFLMDRFNANRIVAVGYALTAVTIFLIGQAAGNMGFLVVIVFVAGVVMNTAQSSLPALAAAFYPTQGRATGVAWMMGIGRFGGIAGSFLVAELTARHLTFSEIFTVIAVPGLIAALALVVKQVVGPGGRASGKDVGAPVAAH

SEQ ID NO: 13459 - protein, 207 aa, Triticum aestivum
MSNIGKSTNILWHDCPIGQTERQKLLGQKGCVIWITGLSGSGKSTVACALSRELHYRGHHTYVLDGDNLRHGLNRDLSFKAEDRTENIRRVGEVAKLFADAGTICIASLISPYRRDRDACRALLPDSRFIEVFMDLPLELCEARDPKGLYKLARTGKIKGFTGVDDPYESPVNSEIVIKMEGGECPSPKAMAQQVLSYLEKNGYLQA

SEQ ID NO: 13460 - protein, 263 aa, Antithamnion sp.
MNIISESLRSHPNSCALIPFITAGYPDINTTIQALYELDSQGADIIELGIPYSDALADGSVIQHSSLIALQGGTYIDQVLHILEVVSTKLNTPIIILPYYNPILKRGIEKFIKQISLMGAKGLIVPDLPLEETDELIVICNDNQIELVLFVAPTSSMKRINSISKKSPGCIYLVSSTGVTGVRDDIDIKVMELSNYIKKVSNKFIMLGFGISTPEHIKKIMKWNIDGVVVGSAFVKKLSALKIDDRISSISSLCKSLKKATIL

SEQ ID NO: 13461 - protein, 167 aa, Arabidopsis thaliana
MMLKQAAKKALGLTSRQSTPWSVSIFRTYHENVIDHYDNPRNVGSFDKNDPNVGTGLVGAPACGDVMKLQIKVDEKTGQIVDARFKTFGCGSAIASSSVATEWVKGKAMEDVLTIKNTEIAKHLSLPPVKLHCSMLAEDAIKAAVKDYKEKRVKTNGAAAAGETTQA

SEQ ID NO: 13462 - protein, 339 aa, Kineococcus radiotolerans SRS30216
MPTQRMPAEWEPHQRTWMAFPTPNPTFGEAGGPDLTRARAAWSTVANTVARYEPVTVLVSPADRTAAREALDPRIEVVEVPLDDAWLRDSGPTFVRGAQGPVAVDWTFNGWGAQSWSRWEDDARVARFVAGRTGTPVSSSPLTQEGGGFHVDGAGTVLLTDTVQLDPGRNPGWTREQVEAEVHAQLGTTTAIWLPRGLTADYGEFGTRGHVDIVAAFTPSGAVLVHTQPDPGHPDHAVTQEVTEVLRGARDARGERLEVVELLAPERHEVDGELVDHSYVNHYVANSVVVLCAFDDPRDARARAVLAAAYPDRAVVPVDARDVFAFGGGIHCITQQQPA

SEQ ID NO: 13463 - protein, 491 aa, Raphanus sativus
MDPYKYRPASSYNSPFFTNSGAPVWNNNSSMTVGPRGPILLEDYHLVEKLANFDRERIPERVVHARGASAKGFFEVTHDISNLTCADFLRAPGVQTPVIVRFSTVIHERGSPETLRDPRGFAVKFYTREGNFDLVGNNFPVFFIRDGMKFPDMVHALKPNPKSHIQENWRVLDFFSHHPESLNMFTFLFDDIGIPQDYRHMEGSGVNTYMLINKSGKAHYVKFHWKPTCGVKSLLEEDAIRVGGTNHSHATQDLYDSIAAGNYPEWKLFVQIIDPADEDKFDFDPLDVTKTWPEDLLPLQPVGRMVLNKNIDNFFAENEQLAFCPAIIVPGIHYSDDKLLQTRVFSYADTQRHRLGPNYLQLPVNAPKCAHHNNHHEGFMNFMHRDEEVNYFPSRYDPVRHAEKYPTPPAVCSGKRERCIIEKENNFKEPGERYRSFTPERQERFIGRWIDALSDPRITHEIRSIWISYWSQADKSLGQKLASRLNVRPSI

SEQ ID NO: 13464 - protein, 363 aa, Ustilago maydis 521
MTRLTSHSQLSEHQVHPDPTATAPLLPASAPLPHQATPLHKPPRWWSPAFGAHTSSTGQSGYGLEPNSWAKLRYVYRQELAEFFGTFLILIFGAGVECQVNMHYHSGETRDVAAYGSYFQGRLAWAAGVAMAVWVSGGISGGHCNPSVTIALALFRGFPWSKVVPFIIAQTLGATFASLLVYANNVTNIDRFQGGIGGIRTVKGPGSTAGFFFTLPAKELSFCSAFFSEFLATAILLFVVFALADTANLKPPKGTQPFAMFIVLLGIGASLGYNTGYAINGARDTGPRIALWLVGYGSDVWTHDGWYWLWNPWLSSIAGGAAGAAMYDAFLYTGQDSPFNRPKKVGRSAYASLVQEHAEEEQA

SEQ ID NO: 13465 - protein, 1095 aa, Arabidopsis thaliana
MTMMSDLSLDLVEEILCRVPITSLKAVRSSCKLWNVLSKNRILCKTEARNQFLGFTIMNHRLYSMRFNLHGIGLNENSEEFIDPSIKPIGNLLNQVEISKVFYCEGLLLCVTRNHSSKLVVWNPYLGEIRWIKTRNDYHIGVTYALGYDNNKNHMILRFFSEQGYYEIYDMNSSDSWDCFYGIPNKGLKCYQPGASLNGNAYFLTEGREVMEGYDCLLGFDFTTKKFGPLLSLSFSHDFIETGRLSCVKGEKLAVLYQRCYTYEMEVWVTTKIEPNAVSWSKFLAVEMEPLTSLKFNDDSGSFFIDEEKKIVVVFDIDESERNNTAYIIGDYGCLKEVDLDEVVNPQESVEVGDRIYSFSPFVCSCSYVPSLVKFKEDAEHERKDKKRKSKRKRTNKDGYDFILCFDFTTERFGQILPLPFKHSFRDTWTLSSVKEEKLAVAVLYWKNTCVMIEIWMTIKIDPNVESWSKFLRVDRKPCIDLRFDDRNDSFFIDEEKKVVVFFSSDKVKTSTAYVIGDNRYLRTVDLEKAANSQESVEVGERVYCFSPLVCSCSYYVPSLVKINHNAGRKRKEKKTKRKSKDKQMKLSNKVYRDVDGEPIVDFDDFGNDREPSTEPLQDFDEDLADDIGDWDGEGSQTPVYDNDKVAKPRKRLVKKSSSERVTIDVPELIDEDVDDAEFDEFMGGRGGGSTDYDDKVGRKRKKEKERSSSGSGKEKRHKFPNRGERKSEEIDEMWKSIAHNPENDEEGVRTMDDDNFIDDTGLDPSERYGGDAGDRSPTHYPQAEEGEDEDEVNNLFKMGKKKKKTERNPAEIALLVENVMAELEVTAEEDAELNRQGKPAINKLKKLSLLTDVLGKKQLQTEFLDHGVLTLLKNWLEPLPDGSLPNINIRAAILRVLTDFPIDLDQYDRREQLKKSGLGKVIMFLSKSDEETNSNRRLAKDLVDKWSRPIFNKSTRFEDMRNLDEDRVPYRRPPVKNFSSCSTGDRPSNKATMESRDGDFDLEIRERKTGLTSGQSSRGDRQMTMRPEATPLDFLIRPQSKIDPDEIIARAKQVSQDQRRVKMNKKLQQLKGTKKKRLQATKVSVEGRGMIKYL

SEQ ID NO: 13466 - protein, 707 aa, Synechococcus sp. CC9605
MGIRLLHLHLHGLFRSHELELGRDADTGGQTLYVLELVRSLAQRAEVEQVDVVTRLIQDRRVDLDYSQRIEDIAPGARILRFPFGPKRYLRKELFWPHLEELADQLVEHLSQPGQRVDWIHAHYADAGLVGALVSQRLGIPLVFTGHSLGREKQRRLLAGGLDRSQLEQTYAISRRIDAEERALAQADLVITSTRQEADQQYSRYGHFEADQAEVVPPGVDASRFHPHGSSQEGSALQSLLQPFLREPGRPPLLAISRAVRRKNIPALVEAFGQSPVLRQRHNLVLVLGCRDDPRQLEKQQRDVLQQVFDLVDRFDLYGQVAYPKQHSRSQIPALYRWAASRGGLFVNPALTEPFGLTLLEAAACGLPMVATDDGGPRDIQHRCDNGLLADVTDPGALQEALELAGSDRSRWRRWSDNGVEAISRHFSWDAHVCQYLALMQQKVRVSPVRAMSVVRRSSPVSRLLALDLDSCLELPEERSLAHLRDRLHAESFAASTGLVILTGRSLDQACQRYRELHLPDPKAWICRAGTEIHHTSDRAEDPVWAQRISQAWDREAVLAAMGQLKEHIQLQDPDHQSPFKVSYLLRASNRGLIGLARQCLRRHGLQAEPQLRCHWFLDVLPQRASRSEAIRFLAQSWQLPLQQVLVVASQQGDGELLDGLPATVVPADHDPCLLGQRTQQRVYFSKRPSVGAVLDGLTHFRFSASR

SEQ ID NO: 13467 - protein, 619 aa, Synechococcus sp. CC9605
MAQELGDFIEAAGLLEYDPAAITRIYAGHPQRLIRRLWQTLVPIGLLLLGVAFDWIFQLLKDEERARGRARECAELLVDLGPAFIKAGQALSTRPDIVPPLLLEELAQLQDQLPGFDSGLAMACIEEDLGAPVDKVFEQLDRDPISAASLGQVHKGTLKGGAKVAVKVQRPGLREQITLDLYIVRNIAAWLNSNIGLIRSDLVALIDELGRRVFEEMDYLNEASNAETFAELHQHNPRIAVPTIYRNATSRRVLTMEWIDGVKLTNLDAVRELGVDPDDMVEVGVNCSLQQLLEHGFFHADPHPGNLLALEDGRLCYLDFGMMSEVSRESRTGLIQAVVHLVNRNFGKLSKDFVTLGFLAEDVNLEPIVPAFEKVFSQALEAGVNRMDFKAVTDDMSGVMYKFPFRVPPYYALIIRSLVTLEGIALSVDPNFKILGAAYPYFARRLMEDPDPQLRQSLKEMLFDGDAFRWTRLENLVSSAASQAQLDLEALLDQLLDFLFSPKAGLLRDQLVTATVDRLDALGWSTMQRLGQRLPKRLQPSALGQTPPGLSDPLMQLEPVRELIQVLQSLPGFTPDLLLRRMPRVLNEPNTRRMGFKVAQGLAERGVVRLVRVAAGVPA

SEQ ID NO: 13468 - protein, 455 aa, Mycoplasma hyopneumoniae 232
MAKIENYNFFINQLRELGFVFPSSQIYGGLANSYDYGHLGVLLRKNIENFWADFFVNSNPNAFFIDSKILLNPKVWQASGHLDNFVDLLVENKINKKRYRVDHLFEEFFPEVAFEKLSQDEIRGYLSQIQLLENTKVEWASPKKFNLLFPTYQGIIEDEKTLLYLRPETAQGIFINFKNLLRTTKNSLPLIIAQVGKSFRNEISPGNFIFRTREFVQLELEIFLKPDQSENFFQNEIEKIKNFLKKLGFARNSIRLNYHKKEKLAHYAKATVDFEYNFNFGWGELIGISNRGDYDLKNHSEKSGEKLEFVDSATGKKFLPHIIEPSMGLDRLMLAVLEECFCFDSVKNRYFLKLPFILSPYKVAVLPLLKKFNFLAEKIWKELISQKISATLVTSGSIGKRYYHQDVIGTYFCITIDQKSVENSIVTLRFRDTTEQKTLKIDEITKFIKENFVNE

SEQ ID NO: 13469 - protein, 360 aa, Triticum aestivum
MALVPSGSGSAPVIAEVEMNGGADQSATTVRATVVQASTVFYDTPATLDKAERLIAEAAGYGSQLVVFPEAFVGGYPRGSTFGFGISISITNPKDKGKGEFQKYYAAAIDVPGPEVTLLAAMAGKYKVFLVMGVIEREGYTLYCSVLFFDPLGRYLGKHRKLMPTALERIIWGFGDGSTIPVYDTPLGKIGALICWENKMPLLRTALYGKGIEIYCAPTADSRPVWQASMTHIAMEGGCFVLSANQFCRRQDYPPPSEYAFAGLGEEPSPDTVVCPGGSVIISPSGEVLAGPNYDGEALITADLDMGEIVRAKFDFDVVGHYSRPEVLSLVVDDQPHRPVSFTSAAEKAPAAKSDDTAKP

SEQ ID NO: 13470 - protein, 676 aa, Mycoplasma hyopneumoniae 232
MLKKQLKFPKQESFIDFSLLEKTQKTKKIIDKKVSSISVEEIKMENSLKKVNIEEGKKTDLTREDGIKKSKNTKKANLRERRKNSYEQIENFFSIIKTSKHQSDFLKNLEQFRAKTLLQLSQNINSTSLAQKSKKEEKSKQKTEKQLNSTLVSPKKPVKKAKTNSVKKKLTKIIPVKEPDNIDLPKKMTENKELFPQKEDFIPISNINQNSSEYEFIIEKLEQKLEQKHQKIGKNSSNLDNFSIFLSHDEIYKYIEKWNLAIEEEKLDDFFQTLIQRKIIADEVDKEDLENVSSFDFAEQINNKKSVRDKKNKKYSQDFDQSLINLDDQNFDINHNEEDDNSELNLGQSVDDSLKIQEIDDLDYITENSPNQYHKPKVYSDEVYLNKLTDTSDMIKWYMRWIGKYGKLLTAEEERELAKKMKIKGRIGKKARDTLIKRNLRLVVNSAKRYKNRGLGFIDLISEGNLGIIKAVAKYDYTRGFKFSTYATWWIRQAITRAVADQARLIRIPVHMVETINKINKVERELQQEKGLNPTAEEISERLGGEFSPDKIRYIKKINIDPISLDKAIGKEEDSSFSDFIKDENMISPVDYAIREEKAKVLLEMIDSTLDYDERDFIKRRYGVGTNDEGIPYQAHSFEELAAMRRVTKERVRQIEAKILKKLRTPHRRLSLRDFN

SEQ ID NO: 13471 - protein, 136 aa, Brassica napus
  misc_feature (14)..(17): Xaa can be any naturally occurring amino acid
  misc_feature (19)..(19): Xaa can be any naturally occurring amino acid
  unsure (1)..(136): unsure at all Xaa locations
MANPWWVESPVTSXXXXLXHRSNNPTMTLSDPRLDHDFTNNSGSPNTQTQNSQEEQTSRDELPAVEPGSGSGSTGRRPRGRPPGSKNKPKNPVVVTKESPNSLQSHVLEIASGADVAESLNAFARRRGRGVSVLSG

SEQ ID NO: 13472 - protein, 738 aa, Petunia x hybrida
MDCNCFDPQWPADELLMKYQYLSDFFIALAYFSIPVELVYFVQKSAVFPYRWVLVQFGAFIVLCGATHLINLWTSTAHTRTLAIVMTTAKVLTAVVSCATALMLVHIIPDLLSVKTRELFLKNKAAELDREMGLIRTQEETGRYVRMLTHEIRSTLDRHTILKTTLVELGRALGLEECALWMPTRTGLELQLSYTLRHQNPVGFTVPIQLPVINQVFSTNRAVKISPNSPVARLRPAGKYMPGEVVAVRVPLLHLSNFQINDWPELSTKRYALMVLMLPSDSARQWHAHVLELVEVVADQVAVALSHAAILEESMRARDLLMEQNVALDLARREAETAVRARNDFLAVMNHEMRTPMHALIALSSLLQETELTPEQRLMVETILKSSNLLATLINDVLDLSRLEDGSLQLDIGTFNLHALFREVLNLIKPIASVKKLFVTLSLSSDLPEFAIGDEKRIMQVLLNVIGNAVKFSKEGSVSVSAVAAKSESLRDPRAPEFFPVQSENHFYLRVQVKDTGSGISPQDIPKLFNKFAQNQALATKNSGGSGLGLAICKRFVNLMEGHIWIESEGLGKGCTAVFVVKLGIPGRSNESKLPFMPRLPPNHMQMIFQGLKVLVMDDNGFSRMVTKGLLVHLGCDVTTVASGDECLRVLAQEHRVVFMDVSIPGIDCYEVAVRIHEKFNKRHDRPHIVALTANTDRVIKENCMRAGMDGVILKPVSVDKMRSVLSELLEHGVVLQS

SEQ ID NO: 13473 - protein, 738 aa, Petunia x hybrida
MDCNCFDPQWPADELLMKYQYLSDFFIALAYFSIPVELVYFVQKSAVFPYRWVLVQFGAFIVLCGATHLINLWTSTAHTRTLAIVMTTAKVLTAVVSCATALMLVHIIPDLLSVKTRELFLKNKAAELDREMGLIRTQEETGRYVRMLTHEIRSTLDRHTILKTTLVELGRALGLEECALWMPTRTGLELQLSYTLRHQNPVGFTVPIQLPVINQVFSTNRAVKISPNSPVARLRPAGKYMPGEVVAVRVPLLHLSNFQINDWPELSTKRYALMVLMLPSDSARQWHAHELELVEVVADQVAVALSHAAILEESMRARDLLMEQNVALDLARREAEMAVRARNDFLAVMNHEMRTPMHAIIALSSLLQETELTPEQRLMVETILKSSNLLATLINDVLDLSRLEDGSLQLDIGTFNLHALFREVLNLIKPIASVKKLFVTLSLSSDLPEFAIGDEKRIMQVLLNVIGNAVKFSKEGSVSVSAVAAKSESLRDPRAPEFFPVQSENHFYLRVQVKDTGSGISPQDIPKLFNKFAQNQALATNNSGGSGLGLAICKRFANLMEGHIWIESEGLGKGSTAVFVVKLGIPGRSNESKLPFMPRLPPNHMQMTFQGLKVLVMDDNGFSRMVTKGLLVHLGCDVTTVASGDECLRVLAQEQSVVFMDVSIPGIDCYEVAVRIHEKFNKRHDRPLIVALTASTDRVIKENCMRAGMDGVILKPVSVDKMRSVLSELLEHGVVLQS

SEQ ID NO: 13474 - protein, 753 aa, Petunia x hybrida
MGSLLRMNRLLTSIVDSCNCIDPQLPADDLLMKYQYISDFFIALAYFPIPVELIYFVKKSAVFPYRWVLVQFGAFIVLCGATHLINLWTFSMHTRTVAVVMTTAKVLTALVSCITALMLVHIIPDLLSVKTRELFLKKKAAQLDREMGIIRTQEETGRHVRMLTHEIRSTLDRHTILKTTLVELGRTLALEECALWMPTRTGLELQLSYTLRHQNPVGLTVPIQLPVINQVFGTNRAVKISPNAPVARLRPTGKYMPGEVVAVRAPLLHLSNFQINDWPELSTKRYALMVLMLPSDSARQWHVHELELVEVVADQVAVALSHAAILEESMRARDLLMEQNVALDLARREAEMAVRARNDFLAVMNHEMRTPMHAIIALSSLLQETDLTPEQRLMVETILKSSNLLATLINDVLDLSRLEDGSLLLDIGTFNLHALFREVLSLIKPITSVKKLFATLSLSSDLPEYVIGDEKRLMQILLNVVGNAVKFSKEGSVSISAFVAKSESLRDPRAPEFFAVPSENHFYLRVQVKDTGVGINQQDIPNLFSKFAQSEALTTKNSDGSGLGLAICKRFVNLMEGHIWIESDGLGKGCTAIFIIKLGIPGRPNESKLPLMSKLTANELQMTFHGLKVLVMDDNGVSRMVTKGLLAHLGCDVTTVGSRDECLRVVSQEHKVVFMDVSMQGIDCYEVAVLIHERFGKHHGRPLVVELTGNTDSVTKENCMRVGMDGVILKPVSVDKMRSVLSELLEHGVVLQS

SEQ ID NO: 13475 - protein, 576 aa, Thermus thermophilus HB27
MPISRYYDVKRDEKGERYLEPYVTGFLLLRLPLLNKGTAFTEEERRLLGLEGLLPPHVHTLEEQKERVYRRYRLIQSPLEKHIYLRHLQDRNEVLFYALVVDHLEEMLPILYTPTVGEAVREFSHIYRYPRGFTASTKNIDRIDEALQNVPLEDVRLIVATDSSAILGIGDQGYGGMAISIGKLTLYTAAGGVGPDKTLPVELDVGTDREDLLKDPLYLGVRHRRLRGEEYFRFLDRFVEAVRRRYPKALIQWEDFAKETAFQVLERYRKVIPSFNDDIQGTGAVALAGVLSACRLKGERLSDQVVVVYGAGAGGIGVAWALVEGMKREGLSEEEAKARVLVLDSKGLLVEGRSMEDYKRPYAQRPERLWGWRFAGEYPNLLETITNARATVLLGLSGQAGSFTEPVVRAMLANTPRPVIFPLSNPTSATEALPDDLVYWTEGRALVAAGSPFPPVGFKGRTVPIGQGNNAFVFPGLGLGAVLSRAREVTDGMVLEAAYALYDYTREHFPERIYPPVGRLREVSPYVAARVMQRALEEGVAEEARVQGLTLEALLDFVKSRFWEPRYLPYRPAPVI

SEQ ID NO: 13476 - protein, 418 aa, Parachlamydia sp. UWE25
MRKMSKKRIVITGMGIVSCFGNDVDAFYQNLLAGQSGIQPITEFPCEDYPTRFAGIIPNFEAGEYLDKKQARRVDKSIAYTMVAGKKSLESANLNEENLKRLQKERCGILIGSGMGGMTMFADGVQTLVEKGPRKVSPFFVPFILTNMCGALLGIDIGFMGPNYSISTACATANNSIISAAQHIRNGEADLMLCGGVEAAVMPMGLAGFCACKALSQRNENPAKASRPWDQGRDGFVLGEGAGVLVMESLDHALAREAPILAEYLGGGLSCDAYHMTEPRSDGEGVALCIRRALQDAGIQPEEINYINAHATSTPAGDMAEVNALKKVFKNPSSIKMNATKSMIGHLLGAAGGVEAIATIKAILEHQIHPTINLENPEPNLEFDVSSEAQRFIVKRAISNSFGFGGHNASVIFAPYEP

SEQ ID NO: 13477 - protein, 347 aa, Kineococcus radiotolerans SRS30216
MKAVTVHAPGDLRVEEVDAPEPAPGEVLVRIVYGGICGSDLHYAADGRNGAYVVTEPLVLGHEVVGVVERAGPDTPAAPPAGTRVAVHPATPCAPAGAAAPTGLHLRPGGTYLGSASTHPHTQGGFTGLLAVGVERLRELPAALPLRRAVLAEPLAVALHAVGRLEGRVAGARVLVSGAGPIGVLAVAALKRAGAAHVTAADLQELPLRVATAVGADEVVDLSRGGSLPEAGFDVVVEAAGVVPSLLAAIRAVRPGGSILQLGILPAGPQPVPVGELLSKEVALFGTQRFDTELDAAVELLAADDSLDAVVTDVFGIEDAAAAFARARDSANSSKTVLRITPDPDDA

SEQ ID NO: 13478 - protein, 313 aa, Triticum aestivum
MGRPPCCDKEGVKKGPWTPEEDLVLVSYVQEHGPGNWRAVPTRTGLMRCSKSCRLRWTNYLRPGIKRGNFTDQEEKLIVHLQALLGNRWAAIASYLPERTDNDIKNYWNTHLKRKLQAGGDAAAKPAAQRPASSSKGQWERRLQTDINMARRALREALTTLDDIKPQQPDAADGVNGPAAAGADSGSPAASSSSAASLSQCSPSAAGPYVLTTANISRMLDGWASKGRSAGAAADSPSGSSASEVSYGSGAAARALGSAFEYDRKPAVLAPDQTQLNAIETWLFADDNSNNDHHGHGGGGSGLLGVAAMGYPF

SEQ ID NO: 13479 - protein, 333 aa, Ascophyllum nodosum
MVNVAINGFGRIGRLVLRAAKHNKHINVVAVNDPFVPPDYMNYMFKYDTVHGVYDGTVENDDSSIIVDGKKIKVFGEMDAANVKFGDVGADYVVESTGLFTTTESAAVHLKGGAKKVVISAPSQDAPMFVMGVNQDKYTPDMDVVSNASCTTNCLAPIAKVINDSFGLKEGLMTTVHAVTATQKTVDGPSKKDWRGGRAAGFNIIPSSTGAAKAVGKVIPELNGKLTGMSFRIPTANVSVVDLTCRLEKPASYEEIKAAMKAASEGPMHGILGYTEDSVVSSDFIGDSRSSILDANAGIALSDTFVKLVSWYDNEWGYSCRVLDLITHMDKSS

SEQ ID NO: 13480 - protein, 234 aa, Wigglesworthia glossinidia endosymbiont of Glossina brevipalpis
MSIIKLVLMRHGSSIWNDQDRFTGWTDIDLSEKGKNEVKYAGKMLKSFGYSFNFAYTSLLKRAIHSLWVILKEINQSWIPVEKSWRLNERHYGALQGFSKYEIEKKYGKNQLNEWRRGFSISPPKINEKDNYFILNDKRYLNLKTKKLLPFSESLKSTIDRIMPYWDGNIFPRLQNKEKIIIVAHGNSIRAIIKILCNLNEKEIIKINIPTGIPLIYEFDYNMVFKKKYFLFDR

SEQ ID NO: 13481 - protein, 259 aa, Pasteurella multocida subsp. multocida str. Pm70
MSKVAVVIGGGQTLGAFLSEGLAEAGYRVVVADLNGENAKQVATRINTQQGIGHAIGLQVDAADETSVETLVHATDQAFGKIDLLVYSAGTAKASPIYDFDLKDFDLSVKVNLTGYFLCAKHFSRLMIRDGIKGRIIQINSKSGKVGSKHNSGYSAAKFGGVGLTQSLALDLADYGITVHSLMLGNLLKSPMFQSLIPQYAKKLGIPEEEVEQVYIDKVPLKRGCDYQDVLNVLKFYASEEASYCTGQSINITGGQVMF

SEQ ID NO: 13482 - protein, 396 aa, Burkholderia vietnamiensis G4
MTYFANILQLARTCHPGISSDPCRESTMSDPILLTPGPLTTSATTRHAMQHDWGSWDAAFNRLTAGVCADLLAIAGGGDAYACVPLQGSGTFAVEAALGTLVPRDGVVLVPHNGAYCARILTILGRLGIDAIALPFGEDAAVDAAAVETAFAREPRITHVALVHLETSAGILNPLDAIAHLCRRHGKRLIVDAMSSFGALPIALADSGIDALISASGKCLEGVPGMGFAIVRRDALDACAGNARSLALDLHDQYRYLHQTGQWRFTPPTHVVAALRAALDQYLAEGGQPARGARYADNCRTLVEAMRALGFRPFLDPSVQAPVIVTFHAPDHPAYDFGRFYDAVRDAGFVLYPGKLTQVDTFRVGCIGAIDAGDMRRAVAAIARAVESLGIAMQRA

SEQ ID NO: 13483 - protein, 736 aa, Ustilago maydis 521
MAPIAKTVCVALAVFALASVGVQPAGAHQLNSRHAAAGGNVYHNLHSHSRRMQRKVRRDDSFSISGAGSLAASASNGDGSSSASISGSGSISGSTSNDGSSSQSNSSAKSSSISDSDPGSQSSSQSSAQSSSNSDSESDSDSNSGSHASAQSSAQSSAQSSAQSSAQSSAQSSSQSSAESSDHASSSSQASSHSDSHSSSNASSGSQSDASSNGSNSQNEGSSKVSGSDSSSASPTSTTSVSASNSLAASSTPCTDSKAGAQAQATSGSSSSTHSGTHSATASNSSTASSTHSATSSSASTASSTHSATSSSASTASSTHSATSSSARTGSASATSTNSAAAAAATASSDDASTATAAEVDTDADANGSSSSNADGNDDEDCDDGDEDEDEDENENDEEVTATSTSGSSSNSNAASGSNSAVVSSSNSSGASSASNTGSNGGSNKGSTGGSKSASSSGADVSSNSSGSASNAGAGPVSASSSSASSGSSSYGGSSDSGDDDDDCDDGETDDANDDEDCDDDDGESVNAADDDDDCDEDAGSASSSNASAAAASSASSGSSAASNQQQEPQQAVATPASSSSAAPTSTSHAAASSSSATSSASSSSSSSASRAASSAAASSSASSSASSSASSLANAITGGFATFFYQGGNAGACGKVNADSSKVAALQTSMYANGANCGKQIKIYRADDPSKSVLVTVADECPTCENKQSIDLSVGAFTAIASEAEGMVSIKWDWA

SEQ ID NO: 13484 - protein, 545 aa, Shewanella oneidensis MR-1
MAAKEVVFGNDARVKMLAGVNILANAVKVTLGPKGRNVVLDKSFGSPLITKDGVSVAKEIELEDKFENMGAQMVKEVASKANDAAGDGTTTATVLAQAIVTEGLKAVAAGMNPMDLKRGIDKAVIAAVAELKNLSQDCADSKAIAQVGTISANSDESIGQIIATAMEKVGKEGVITVEEGQALENELDVVEGMQFDRGYLSPYFINKPETGSVELDHPFVLLVDKKISNIRELLPILEGLAKTGKPLLIVAEDVEGEALATLVVNNMRGIVKVAAVKAPGFGDRRKAMLQDVAILTGGTVIAEEIGLELEKATLEDLGTAKRVVITKDNTTIIDGNGEQAQIEARVSQIKQQIEESTSDYDKEKLQERMAKLAGGVAVIKVGAATEVEMKEKKARVEDALHATRAAVEEGVVPGGGVALIRVASKIADVEVANEDQKHGVVIALRAMEAPLRQIATNAGEEASVVANNVKNGSGNYGYNAGNDTYGDMLEMGILDPTKVTRSALQFAASIAGLMITTEAMVAELPKADAPDMGGMGGMGGMGGMM

SEQ ID NO: 13485 - protein, 484 aa, Bacteroides thetaiotaomicron VPI-5482
MNNTTNEGSKLYLYSITSVAILGGLLFGYDTAVISGAEKGLEAFFLSASDFQYNKVMHGITSSSALIGCVLGGALSGVFASRLGRRNSLRLAAVLFFLSALGSYYPEVLFFEYGKPNMDLLIAFNLYRVLGGIGVGLASAVCPMYIAEIAPSNIRGTLVSCNQFAIIFGMLVVYFVNYLIMGDHQNPIILKDAAGVLSVSAESDMWTVQEGWRYMFGSEAFPAAFFGLLLFFVPKTPRYLVLVQQEEKAYTILEKINGKKKAQEILNDIKATAQEKTEKLFTYGVTVIVIGILLSVFQQAIGINAVLYYAPRIFENAGAEGGGMMQTVIMGIVNIIFTLVAIFTVDRFGRKPLLIIGSIGMAVGAFAVAMCDSMAIKGVLPVLSIIVYAAFFMMSWGPICWVLISEIFPNTIRGKAVAIAVAFQWIFNYIVSSTFPALYDFSPMFAYSLYGIICVAAAIFVWRWVPETKGKTLEDMSKLWKKNK

SEQ ID NO: 13486 - protein, 803 aa, Arabidopsis thaliana
MNTKRAYKLRILFSLISSFREFVAHSAAVNCLKIGRKSSRVLVTGGEDHKVNLWAIGKPNAILSLYGHSSGIDSVTFDASEGLVAAGAASGTIKLWDLEEAKVVRTLTGHRSNCVSVNFHPFGEFFASGSLDTNLKIWDIRKKGCIHTYKGHTRGVNVLRFTPDGRWIVSGGEDNVVKVWDLTAGKLLHEFKSHEGKIQSLDFHPHEFLLATGSADKTVKFWDLETFELIGSGGTETTGVRCLTFNPDGKSVLCGLQESLKIFSWEPIRCHDGVDVGWSNLSDMNVHEGKLLGCSYNQNCVGVWVVDLSRTEPMSGGATQSNSHPEKTSGSGRDQAGLNDNSSKVILGKLPGSQKVDPLLKETKSLGKLSVSQNSDPLPKDTKSTGRSSVSQSSDPLVKEPKPLGRFSATHSSDTVKESRTLSFVPNAAASKRNFGKANPKANPPVVNKEDYFPVIVPRTEPIIEQASESRAELDIIGRTMPYSLQSKAADSRRLSSSRNEPDLPTSSLLERSQSQPIEPITLQDGNTYPSDEGGSWDTAERTNKESKCRVFGRFNSRSLVRSPPRNHDENSDLISYNANRDSSPTESRKGGRLHSLVLNRERRGRFSNFEGPVSSSSGGNMTAPNSRPSNMLKQRGNHVPVDQGITSASEEDIVADIMGQHDQFVSSMHSRLAKLQVVRRYWERNDIKNSISSIEKMADNAVIADVLLIVNERPEILTLDTCTSLLPLLTALLGSNMDSHLSVCLDLLLKLVRMYGSQIYSSLSAPSSVGVDIEAEQRLVRASISPFIVVFDCNLLSLASQI

SEQ ID NO: 13487 - protein, 370 aa, Bacillus subtilis
MKKQRIVVKIGSSSLTNSNGSIDEAKIKEHTEAISLLKENGHEVILITSGAVAAGFSALGYPARPVTIKGKQAAAAVGQTLLMQQYMDHLKRYGLTPAQILLTRNDFSKRERYRNAYATVMELLERGVVPIINENDSTSVEELTFGDNDMLSALVSGLIHADQLMILTDINGLYDANPNENPDAKRFDYLTDITPELLGYAGSAGSKVGTGGMKSKLLAAQTALSLGVKVFIGTGAGREKLKVILDGKGDGTYIGDKELSTVNNTRQWIMFHSPISGEIIIDGGAEQAMIHNGSSLLPAGVADVCGSFPKGAVVEVRGPGGIIGKGQTHYSSDEILEAKGKRSDQLPGAKQVEVIHRNDWVNLFDEGENK

SEQ ID NO: 13488 - protein, 452 aa, Arabidopsis thaliana
MAEIRQRRVLMVPAPFQGHLPSMMNLASYLSSQGFSITIVRNEFNFKDISHNFPGIKFFTIKDGLSESDVKSLGLLEFVLELNSVCEPLLKEFLTNHDDVVDFIIYDEFVYFPRRVAEDMNLPKMVFSPSSAATSISRCVLMENQSNGLLPPQDARSQLEETVPEFHPFRFKDLPFTAYGSMERLMILYENVSNRASSSGIIHNSSDCLENSFITTAQEKWGVPVYPVGPLHMTNSAMSCPSLFEEERNCLEWLEKQETSSVIYISMGSLAMTQDIEAVEMAMGFVQSNQPFLWVIRPGSINGQESLDFLPEQFNQTVTDGRGFVVKWAPQKEVLRHRAVGGFWNHGGWNSCLESISSGVPMICRPYSGDQRVNTRLMSHVWQTAYEIEGELERGAVEMAVRRLIVDQEGQEMRMRATILKEEVEASVTTEGSSHNSLNNLVHAIMMQIDEQ

SEQ ID NO: 13489 - protein, 415 aa, Bacillus subtilis
MSEVLQKAALAKEAAAEMVMKTTAEKNEALQCIADGLRNERQLILTENQKDIEAGQKRGLTPDIIDRLTLDEKRLLDIADAVELLIGLEDPVGESLETIQKENGLSIEKIRVPLGVVGMIYEARPNVTVDAATLCLKTGNAVVLRGSSSAIHSNKALVSVMKRALGLSKLPIDAVQLIEDTSKETAKQLFTLNDGLDVLIPRGGKNLIDLVVRESTVPVLETGAGNCHVYIDESADPDMARDVVINAKTQRPSVCNAIESLLIHEKWAEVHGRKLLNQLTEKGVELRGDQMICELEPNAKQAEEADWGAEYLAPILSVKTVHDVQEAVRHIQQYGTNHSEAILTENGEHAAYFQTAVDAAAVYHNASTRFTDGFEFGYGAEIGISTQKLHARGPMGLPALTSTKIIIKGNGRIRV

SEQ ID NO: 13490 - protein, 166 aa, Glycine max
ESLTCRFGIGQPPPTDFVSFGVMLIDFVPTESRVSLAEAPGFLKAPGGAPAIVAITVSCLGGRSAFIVKLGDDEFGHMLAGILRKNGVADQGINFDTGARTALAFVTLKADGDREFMFYRNHSADMLLRPDELNLDLIRSVRKSPLSIPHDLQEIQMEVEIHSLVF

SEQ ID NO: 13491 - protein, 380 aa, Glycine max; identical to SEQ ID NO: 899

SEQ ID NO: 13492 - protein, 628 aa, Rumex palustris
MNTCDCVDTQWFADDLLIKSQYISDLFIVLAYFSIPLELIYFVQKSALFPYRWVLIQFGAFIVLCGTTHLINLFTFSMHSKTLAVVMAIAKMSTAAVSCITALMLVHIIPDLLSVKMRESILRRRADELDREMGLILSQEETGRHVRMLTHEIRSTLDRHTILKTTLVELGRTLGLEECSLWMPSQTGMTLKLSHALQNLTPVGSCVSLNLPVITEIFNNPGVVRISHTCPLVSTRPISGRYLAPEVAAIRVPLLNLSNFQINDWPDVSGRTYAVMVLVLPCDGLRKFRKHELELIEVVADQVAVALSHAAILEESMRAHDQLLEKNVALDLARQEAELAIRARNDFLAVMNHEMRSAMHAIITLSSFLLETELTPEQRVMIEIILRSSNILATLINDVLDLSRLEDGSLELDSLTFNLHAVFKKVINLLKPITCVKKLSLTLAVAPEAICVVGDEKRLVQTILNVVGNAVKFTKVGKISIIVSVAKPDSLSSWQPADVIYAAVSKGQFYLRVQVKDTGCGINPQEIPHIFDKFYQSQNCRRNSTDSGLGLAICKRFVNLMGGQIWVESEGLDKGSLVTFVVKMGICRNPDERSINQAASTGHMNQSSTDLLGDSSMSFSLKRFEKSC

SEQ ID NO: 13493 - protein, 460 aa, Lycopersicon esculentum
MDSSWEASVTDSINAIYLLFSAYLVFVMQLGFAMLCAGSVRAKNAMNIMLTNVVDAVVGSLSYYLFGFAFAFGDSNPFIGASYFALKDIPSSSYDYSFFLYQWAFAIAVAGITSGSIAERTQFTAYLVFSFFLTGFVYPVVAHWLWSSNGWLSPNSTYLLFGSGAIDFAGSGVVHLVGGIAGFWGSIVEGPRVGRFDAFGNPVKMRGHNATLVVLGTLLLWFGWFGFNPGSFNKILVAYPHMADQGNWTSVGRTAVTTTLAGSTAGIVTLFGRRLLVGHWDAMDVCNGVLGGFVAITSGCSVVEPWAAILCGFCAAWVLIGLNILALKFKFDDPLEAAQLHGGCGAWGLIFTGLFAKEEFVLQAYNSGKTQIIRPSGLILGGGWGLFGAQIVELLSIVVWVSLTMGPLFYLLQKLGILRISSDEEVAGLDISSHGGYAYDASQEESNARFYGEYLRMQQQ

SEQ ID NO: 13494 - protein, 316 aa, Ustilago maydis 521
MVEHSVAVHAGKDGNFRRQASAFRNTISKDGPHPPEKGRYILYCALICPWASRTLHTRALKQLEDIIDVAIVHYSLTPNGWSFSVTDSVETGDPVYGFENTKQLYLKADPSYTARYTVPILWDKKLGTIVNNESSEIIRILYTAFDDLLPDDSPAKGKTYYPTDNVEAIQKIDELNEWIYSDINNGVYKTGFATAQEVYDKEVDNLFLALDRLEKLLSDGREYLVPEVGLSDADIRLYPTLARFDTAYHNLFRCNVGMIRHDYPHIHRYLRRLYWNEKAFRDYTNFDHIKKGYSSVGGNKGIEPRGPLPHMLPLDA

SEQ ID NO: 13495 - protein, 402 aa, Solibacter usitatus Ellin6076
MRRVAITGMGAISALGPTSREFSEALLAGRCGIAPIQSADMSQVRFQNGAEVKQYSHTPYFDDRRADFMDRFAQFAVIAAREAVESAHIQWTPELQEIAAIITGSCVGGQATEDLGFVEIYKNAHNRVHPLTIPKTMANAGASHISIEFGIKGPAYTISTACSSAGHAIGQAYQMVRNGDTDLALTGGSEAPFSVGILKAWEAMRVVSPETCRPFSKDRRGMILGEGSAMFVLEPLEAAQARGAHIFGELVGFGMSADACHITQPSKEGAARAMRAALRSAGLAPEQIGYINAHGTATPANDPTETAAIRDVFGAHAGKLAISSTKSMHGHALGAAAALECLATAIALSSGVLPPTVNYSQPDPECDLDVIPNVARKQQVEYALSNSFAFGGLNAVLVLRAV

SEQ ID NO: 13496 - protein, 271 aa, Ulva intestinalis
MLRAIAQRARGSALQCAAPGTEWASCVRGSSGFTAYDVGESTNIKWHETMVSRGDKERLLNQRGCVLWFTGLSGSGKSTVACTLEHALNARGKMTALLDGDNVRHGLNSNLTFTAEDRTEHPPHRRSEQALCRRWRPPLRELHLRPIAPTRPVRERCAGDFVECYMKIPIELCEQRDPKGLYKKARAGLMKGFTGIDDPYEEPLEPELTITVREEGSDMNSPEAMAKQIFDYLEAKGFLKGPAVASSGGSCARVARWGGHGRRRGRQRLAW

SEQ ID NO: 13497 - protein, 149 aa, Streptococcus pneumoniae
QPNWINRDRFILSAGHGSMLLYALLHFSGFEDVSMDEIKSFRQWGSKTPGHPEFGHTAGIDATTGPLGQGISTATGFAQAERFLAAKYNREGYNIFDHYTYVICGDGDLMEGVSSEAASYAGLQKLDKLVVLYDSNDINLDGETKDSFT

SEQ ID NO: 13498 - protein, 503 aa, Glycine max
  misc_feature (265)..(265): Xaa can be any naturally occurring amino acid
  misc_feature (267)..(267): Xaa can be any naturally occurring amino acid
  unsure (1)..(503): unsure at all Xaa locations
MTVITMPPFLSYSLLSLAFFFTLKYLFQRSRKVRNLPPGPTPLPIIGNLNLVEQPIHRFFHRMSQKYGNIISLWFGSRLVVVVSSPTAYQECFTKHDVTLANRVRSLSGKYIFYDNTTVGSCSHGEHWRNLRRITSLDVLSTQRVHSFSGIRSDETKRLIHRLARDSGKDFARVEMTSKFADLTYNNIMRMISGKRFYGEESELNNVEEAKEFRDTVNEMLQLMGLANKGDHLPFLRWFDFQNVEKRLKNISKRYDTILNRILYXNXNNNDRENSMIGHLLKLQETQPDYYPLQNELFGLQAMLFGGTDSSTGTLEWALSNLVNDPEVLQKARDELDAQVGPDRLLNESDLPKLPYLRKIVLETLRLYPPAPILIPHVASEDINIEGFNVPRDTIVIINGWAMQRDPKIWKDATSFKPERFDEEGEEKKLVAFGMGRRACPGEPMAMQSVSYTLGLMIQCFDWKRVSEKKLDMTENNWITLSRLIPLEAMCKARPLASKVGSY

SEQ ID NO: 13499 - protein, 272 aa, Gossypium hirsutum
MDGGGSSSNSFRKVRNPFVTDQELEESDNVSSVTGAESPPPSTTKKGKRSMQKRVVSVPIKDVEGSRLKGEGAPPSDSWAWRKYGQKPIKGSPYPRGYYRCSSSKGCPARKQVERSRVNPTMLVITYSCEHNHAWPASRHNNTSAKQAAAAAGEASESPTKSTTAVKHDPSTSQPDTEPDSGMEDGFACLTEDSILTTGDEFAWFGEMETTSSTVLESSLFSERDNSEADDTAVISPMREEDESLFADLGELPECSFVFRHQRNVGPQVGIC

SEQ ID NO: 13500 - protein, 366 aa, Crocosphaera watsonii WH 8501
MLNKSAILSILLIFIPLSLGSEYLEWGATLTFIMAALAIVPLAAFMGQATEEIAVVVGPNLGGLLNATFGNATELILALVALKEGLIGVVKATISGSIIGNLLLVVGFSMLLGGLRYKEQEFQSVAARLNASSMNLAVIAILLPTAVQYTSTGIEEQTLQNLSVAVAVVLILVYGLTLLFSMKTHAYLYDVGVAVEDETKKEEGGNINISKWVIILLLVTLGVAVESELLVNSLEAATSSLGLTPLFTGVILLPIVGNAAEHATAVTVALKNKMDLSMSVAVGSSLQIALFVAPVLVIAGWFLGQPMDLDFNPFELVAVAVAVLITNSISSDGRSNWLKGTLLLATYAGLSFGFLFPSSWEMDFKL

SEQ ID NO: 13501 - protein, 396 aa, Thermoplasma volcanium GSS1
MINMQKYNWVDEEISALKAEGRYVPIRTIESAQGAWVKINGKQVLNMCSNNYLGFANHPETKKAAIEAIEEYGVGAGAVRSIAGTDEIHIKLEEKIASFKHSEAALVYQGGLLANLGTVPALVGKDDIIFSEELNHASIIDGTRLSPAKRIVYKHLSVDDLEKQAKENRSSGKKALVITDGVFSMDGDIAPLPEIVDIAEKYDIMTYVDDAHGEGVLGDHGRGIVNYFHLEDKVDIEMGTFSKALGSMGGFVAGSAEMIDLLKQKARPFLFSSALNPGDAAAVLKAIEILEKDDSLVKKLWENADLLKKSLADLGYNTGHSKTPITPVIIGDEKKTVELSTKLYEEKNVFASPIVYPTVPKGTARIRLMPSAVHTHEDIMTAVNAFGELGKKLHII

SEQ ID NO: 13502 - protein, 206 aa, Thermoplasma volcanium GSS1
MLSNGENMEEEMLIPEEEYQKSGVHIGTQVKSSDMKPYIFKIRNDGLYILDVKKTNSKLIAAGKMLARFDPQDILVVAQRQYAFRPVAKFAEVTGAVSITGRFNPGTLTNPSLKFYKEVKVIVVTDPLADVQAMKEAIKIGIPIIALCDANNKTDFVDLVIPTNNKGRRSLAVIYWLLAREILKNRGTITSYDQFKYTIDDFEAQI

SEQ ID NO: 13503 - protein, 618 aa, Gossypium hirsutum
MEQHIMWVFWFFLHWFCSVHSASDGDSLLSPKGVNYEVAALMSVKRELRDDKQVMDGWDINSVDPCTWNMVACSAEGFVISLEMASTGLSGMLSPSIGNLSHLRTMLLQNNQLSGPIPDEIGKLSELQTLDLSGNHFVGAIPSTLGSLTHLSYLRLSKNNLSGPIPRHVANLTGLSFLDLSYNNLSGPTPKILAKGYSITGNNFLCASSEHICTDVSYPLNGSVSSSRVSGNHHWLLSVAIGIGFAFVVSVMLLACWVHWYRSRIMLPSYVQQDYDFEIGHLKRFSYRELQIATGNFNPKNILGQGGYGVVYKGCLPNRSVVAVKRLKDPNFTGEVQFQTEVEMIGLALHRNLLRLYGFCMTPDERLLVYPYMPNGSVADRLRDACHGKPALNWSRRMHIALGAARGLLYLHEQCNPKIIHRDVKAANILLDESFEAVVGDFGLAKLLDKRDSHVTTAVRGTVGHIAPEYLSTGQSSEKTDVFGFGILLLELITGQKTLDAGNGQVQKGMILDWVRTLHEERRLEVLVDRDLQGCFDTIELETVTELALQCTRPQPHLRPKMSEVLKVLEGLVQSGTDEPQGGTNHCETSAYSFSRNYSDVHEESSFIIEAMELSGPR

SEQ ID NO: 13504 - protein, 524 aa, Gossypium hirsutum
MAEPKPEEISHPPMDQLQGLEYCIDSNPSWGEAIALGFQHYILALGTAVMIPSFLVPLMGGTDDDKVRVVQTLLFVEGINTLLQTLFGTRLPTVIGGSYAFMVPIISIIHDTTLLNIEDNHMRFLYTMRAVQGALIVASSIQIILGYSQMWAICTRFFSPLGMIPVIALVGFGLFDKGFPVVGRCVEIGIPMLILFIAFSQYLKNFHTKQLPILERFALIISITVIWAYAHLLTASGAYKHRPELTQLNCRTDKANLISSAPWIKIPYPLQWGAPTFDAGHAFGMMAAVLVSLIESTGSYKAAARLASATPPPAHILSRGIGWQGIGILLDGLFGTLTGSTVSVENVGLLGSTRVGSRRVIQISAGFMIFFSILGKFGALFASIPFTIFAAVYCVLFGIVASVGLSFMQFTNMNSMRNLFIIGVALFLGLSVPEYYREYTAKALHGPAHTRAVWFNDFLNTIFFSSPTVALIVAVLLDNTLDYKDSARDRGMPWWANFRTFKGDSRSEEFYSLPFNLNRFFPPS

SEQ ID NO: 13505 - protein, 113 aa, Zea mays
  misc_feature (33)..(33): Xaa can be any naturally occurring amino acid
  unsure (1)..(113): unsure at all Xaa locations
HTAHIIRIYTAISLFFFLDVFQLPVDGIHSTTXGPDPVYWMHDILPSNRENVMDVRITPIVTSEMLMLLLVGLKIIEVDYSVREDRALLNDAQEPLAILIAIEEAVAYVLSAM

SEQ ID NO: 13506 - protein, 386 aa, Bassia scoparia
MALNMCSLPQASTVRVRAPKFCMMTLTHSSKGVTTLKKPNSPKLEMPETQVTHSMPPEKLEIFKSLESWAEENVLMHLKPVEKCWQPQDFLPQPNSEEFYDQIKELQARAKEVPDDHYVVLVGHMVTEEALPTYQTMLNITDGIKDGTGASPTPWATWTRAWTAEENRHGNLLNKYLYLTGRVDMRAFEKTIQYLIGSGMNPKAENNPYLAFVYTSFQERATAISHGNAARLTKQHGDLKLAQICGLIAADEKRHEAGYSKIVKKLFEIDPDTTMLAFADMMRKKIAMPAHLMYDGSDDCLFDHFAAAASRLGVYSARDYADVMQFLVDYWEVEKVTSPSSEGRKAQEYVCGLPSRIKMIEQRASERAKDNNATSVAFSWVYDRNV

SEQ ID NO: 13507 - protein, 309 aa, Heterocapsa triquetra
YDSPFGCCGAPLRRGRAQGFVAPLAGSASASRVPRVVRGASATSLMASRATPSKSPPEACTASSCSRSRSSCLSENQAVAQGFVEEKVEVAQEEPSILKWVGAGVLAGLLAAVSAAPPVHATADFRVTFSPEKFTIKAAKHLEPCKDNKKYHKKIKDQIYKITNRQKKYPKDSIIYNRFEKKIAGVQRREEAYGDRFCGKKDGLPRVIASGEIVRGGVVVPALMFLYTAGWIGWAGRSYLIRTGDEMKELNIDVPLALTCMASGFSWPVAAWQDIVNGRMVVDDRTCTAASGETGGCPVLRGSVGFGCF

SEQ ID NO: 13508 - protein, 1155 aa, Candida albicans SC5314
MGYDNINLQPNFKPIDHLYDDRLRQFTDTGGQFHNLNLPKFYDIHRQEIHDLKSWKVPDDSNGKTQRPLFKDINFDEITWDNIGLGYNFGPSWKTFWVKFTLKIPEEWLKYEALEIDWDSNSEALIYNDKGLPLQAFTGGGQRNLFRIPKEYLTSDEQLFYIEVACNGMFGNGADGEPDPNRYFRLSRAHLVVPNLEARRLFWDFWILGDATREFPGGYWQKYQAADICTQIMNTFNPNDVESIGKCRKLAEQLLGDKINSDEVFHEYPNERNKRIDVYGIGNCHIDTAWEWPFAETKRKIVRSWTTQLKLADEYPEYVFVASQMQQFKWLKQYHPEILSKIHEKFATNQFIPLGGTWVENDTNLPNGESLLRQFVLGQRFLLDEFGFQSDIFWLPDTFGYSSQIPQICQLAGIYRFLTQKLSWNNINTFPLSTFNWKGIDGSQLLVHMPPANTYTAAANFGDVVRSSRQHKNLRDVPAGMLLYGHGDGGGGPTEEMIEKLRRCRGLANNSGLIPSVQLGVTVDDFYEHLLEKSDQGRKLPTWSGEIYLEYHRGTYTTQANIKKYMRLGEIKLHDLELIAGLVSIKHGDKYKYPGAEIQSLWEDLCLCQFHDVLPGSCIGMVYYDEAYPMLRKLLKQADKLILEALKVDVNSNTTSGGGVVNTLPWNRYNEIVEVSRKQSPELFEQLIKDKVGIRTPKSSQYKHDDDDDDETVKVSVDSVDGVCKINKKVDYPASVSKIRGSNGNDDDDNDGGFILTNKLLTAKISSNGVITSLFDEVNQREIIDTTATNQTSNGKNSSNVGGNQFILFDDEPLNFPAWDTELYSLEKFQFLNNGKAEILVQDELESSIIVTHEISPNSSIETIISLAGVNKYSSTSSDDSDNNFIKFSSTVNWHETYKFLKVQFPTTITTALQANYETQFGITNRSTHWNTTWDIAKFEVAHHKFMDLSEFNYGVSILNNSKYGGAIHGNLIRLSLLRSAKAPDNKADMGIHKFEYAIYPHKGPLGINTVKAGYNFNYKLIQNPYSKQTVASSYLSSAIKLKNENHKDGSLILSHIKRGENDIDVSQYKSLTKNEKSLIVRVYESLGGNNSKGQLIIDDKFLGNKIDKIFKTDGLENELEELKFTKTHGGSGDVVVTDITLRGFEIATYKILLK

SEQ ID NO: 13509 - protein, 587 aa, Triticum aestivum
  misc_feature (303)..(303): Xaa can be any naturally occurring amino acid
  misc_feature (339)..(339): Xaa can be any naturally occurring amino acid
  misc_feature (362)..(362): Xaa can be any naturally occurring amino acid
  misc_feature (404)..(404): Xaa can be any naturally occurring amino acid
  misc_feature (409)..(409): Xaa can be any naturally occurring amino acid
  misc_feature (417)..(417): Xaa can be any naturally occurring amino acid
  misc_feature (436)..(436): Xaa can be any naturally occurring amino acid
  misc_feature (463)..(463): Xaa can be any naturally occurring amino acid
  misc_feature (473)..(473): Xaa can be any naturally occurring amino acid
  unsure (1)..(587): unsure at all Xaa locations
MCGILAVLGVGDVSLAKRSRIIELSRRLRHRGPDWSGIHSFEDCYLAHQRLAIVDPTSGDQPLYNEDKTVVVTVNGEIYNHEELKAKLKSHQFQTGSDCEVIAHLYEEYGEEFVDMLDGMFSFVLLDTRDKSFIAARDAIGICPLYMGWGLDGSVWFSSEMKALSDDCERFISFPPGHLYSSKTGGLRRWYNPPWFSESIPSAPYDPLLIRESFEKAVIKRLMTDVPFGVLLSGGLDSSLVASVVSRYLAETKVARQWGNKLHTFCIGLKGSPDLKAAKEVADYLGTVHHEIHFTVQEGIDAXEEVLYHIQTYDVTTIRASPPIVSNVSGKINSWGVKXMVFSGEGSDEIFGGYLYFHKAPXQKELHEETCRKDKALPLYDCLRANKSTSAWGLEACVPFLDKXFIHVXMGLDPECXMIGVILVDRKWVRVCIYNXKSPFFQAIFKAKRNSSPNGVGYSWIMXGHANALVSNXMTNASFVYPENTPTTKEAYYYRTVFEKFYPKNAARLTVPGGPSVACSTAKAVEWDAAWSKLLDPSGRAALGVHDAAYEEEKAPASVDPVLENAFHPPAHGESTLVKSAVPAAAV

SEQ ID NO: 13510 - protein, 220 aa, Triticum aestivum
MTGYSDSGKDAGRLSAAWYLYKAQEEIVDVAEQHGVKLTIFHGRGGTVGRGGGPSHLAILSQPRNTDDGVACVTRTVDLLEMVFAKGDPGIAALYDKLLVPQDLWPFGEQLRANYAETQSLLLKVAGHEDLLESDPYLRQRLLLRDSYITALNVCQAYTLKRIRDGEFRPATRPPLSKEFIDETAESLMELNPSSEYDPGLEDTLILTMKGIAAGMQNTG

SEQ ID NO: 13511 - protein, 525 aa, Pisum sativum
MEYGTRKLSDVYEVSEILGRGGFSVVRKGTRKSNNDDEKSQSQSKSQSQSQVAIKTLRRLGTSNNLPRKKDGGENSTETMMKFPTMRQVSVSDALLTNEILVMRRIVENVSPHPNVIDLYDVYEDTNGVHLVLELCSGGELFDRIVAQDKYSETEASTVVHQIVAGLEAIHRANIIHRDLKPENCLFLDVGKDSSLKIMDFGLSSVEEFTDPVVGLFGSIDYVSPEALSQGKITTKSDMWSLGVILYILLSGYPPFIAQNNRQKQQMILNGNFSFYEKTWKGISQSAKNLISSLLTVDPAKRPSAQELLSDPWVKGEKAKDDQMDPEIVSRLQRFNARRKLRAAAIASVWSSTIFLRTKKLKSLVGSYDLKEDEIENLRMHFKKICADRDNATLCEFEEVLKAMKMPSLIPFAARIFDLFDNNRDGTVDMREILCGFSSLKNSKGEDALRLCFQARDRSGCITKEEVASMLRALPYDCLPTDITEPGKLDEIFDLMDANSDGKVTFDEFKAAMQRDSSLQDVVLS

SEQ ID NO: 13512 - protein, 399 aa, Bassia scoparia
MALKLQHPLSLQSSNSTSSFSVPRSHLLRSPNRVFMASTIGVTSKETQNGKKPYMPPKEVHVQKTHSLTPQKIEMFKSLENWAEENLLVVLKPVEKCWQPQDFLPDPASEGFEEQVQELRERTKELPDDYFVVLVGDMITEEALPTYQTMLNTLDGVRDETGASLSPWAIWTRAWTAEENRHGDLLNKYLYLSGRVDMKQIEKTIQYLIGSGMDPQTENNPYLGFIYTSFQERATFISHGNTARLAKDHGDLKLAQVCGIIAADEKRHETAYTKIVEKLFELEPDGTILALADMMRKKVSMPAHGMYDGIDDNLFDNYASVAQRIGVYTAQDYADILEFLVQRWNVSTLTGLSGEGRKAQDFVCGLAPRIRRLEERAQARAKQSSLAPFSWIFGKELTV

SEQ ID NO: 13513 - protein, 592 aa, Oryza sativa
GLHLPPSPSPSPSPPRAAGATRGGFSPLAFPHRRGPPPPRPPCAPFAPASFRGYNLLRDPRYNKGLAFNERERETHYLRGLLPPAIVSQELQERKIMHNIRQYQLPLQKYMAMMDLQEGNERLFYKLLIDNVEELLPVVYTPTVGEACQKYGSIFSRPQGLYISLKEKGKILEVLKNWPERSIQVIVVTDGERILGLGDLGCQGMGIPVGKLALYTALGGVRPSACLPITLDVGTNNEALLNDEFYIGLRQKRATAQEYADFLHEFMTAVKQNYGEKVLIQFEDFANHNAFELLAKYGTTHLVFNDDIQGTASVVLSGLVAALKLVGGSLSEHSYLFLGAGEAGTGIAELIALEISRQTKAPIEECRKKIWLVDSKGLIVSSRKETLQHFKKPWAHEHEPVGNLLDAVKTIKPTVLIGTSGKGQTFTQEVVEAISSFNERPVIFALSNPTSQSECTAEQAYTWSKGRAVFASGSPFDPVEYDGKIYVPGQANNAYIFPGFGLGVVMSGAIRVHDDMLLAASEALAQQVTQENFDKGLTYPPFSNIRKISAHIAANVAAKAYELGLASRRPRPKDLVKYAESCMYSPLYRNYR

SEQ ID NO: 13514 - protein, 444 aa, Deinococcus radiodurans R1
MPNPNALPGAAHLSGAGAAQTGSPMKTRIAGKTILAIVLAGGRGSRLSPLTDERAKPAVPFLGTYRLIDFTLSNLVHSGINDVWVIEQYLPHGLNDHLSGGRPWDLDRTRGGLVVMPPFASAENEEGEFAQGNAHALAQHAHLIREFGADLVLVLSADHVYRLDYSDVIRQHVERGASVTMVTTELADEQQATRFGNVRAAKNGKVSEFAYKPDEPLGKTVTAEVFVYDAHIMLSTLEALSKEGELGDYGEELLPALVARGDAHAFPMHGYWMDVGTLDAYLQTHRDFLDGKGFALDDPQWPFITSSISRPPTRIEKTARLDEALVCGGAVIAGEVVRSLIAPNAVVEAGAVVRDSVVQPGAVIRAGAQVSRAVVDQDAEVGPGSRVGGQTGNSRPTVVGAHAHLGPGVQVGPGQVVAPRTRVKAGEEGQKVQELDADDKAGKK

SEQ ID NO: 13515 - protein, 531 aa, Zea mays
KNERAAGSDPEAAAAPGSGNLHGPEPPATGSTTICARARARGTGRRTEAPLSSERVRPAWRRRWRGRGAAALARWRGMCSSSASAPRSAAALSSEELMRMEQDCSAHNYHPIPMVFSKGEGSHIVDPEGNKYIDFLSAYSAVNQGHCHPKVLRALIEQAERLTLSSRAFYNDKFPIFAEYLTSMFGYDMMLPMNTGAEGVETAIKLARKWGYEKKHIPKNEALLVSCCGCFHGRTLGVISMSCDNDATRGFGPLVPGHLKVDFGDIDGLKKIFEELGDRICGFLFEPIQGEAGVVIPPDGYLKGVRDLCSKHNVLMIADEIQTGIARTGKMLACDWENIRPDMVILGKALGAGVVPVSAVLADRDVMLCIRPGEHGSTFGGNPLASAVAVASLKVVRDEGLVERAAKLGQEFRDQLQKVQQKFPQILREVRGRGLLNAVDLNNDALSPASAYDICIKLKERGILAKPTHDTIIRLAPPLTISPEELAEASKALSDVLEHDLPQLQLQKQIKKPESEAEKPVCDRCGRDLYG

SEQ ID NO: 13516 - protein, 520 aa, Pisum sativum
MGYGTRKLSDVYEVSEILGRGGFSVVRKGTRKSNNDDEKSQSQSKSQSQSQVAIKTLRRLGTSNNLPRKKDGGENSTETMMKFPTMRQVSVSDALLTNEILVMRRIVENVSPHPNVIDLYDVYEDTNGVHLVLELCSGGELFDRIVAQDKYSETEASTVVHQIVAGLEAIHRANIIHRDLKPENCLFLDVGKDSSLKIMDFGLSSVEEFTDPVVGLFGSIDYVSPEALSQGKITTKSDMWSLGVILYILLSGYPPFIAQNNRQKQQMILNGNFSFYEKTWKGISQSAKNLISSLLTVDPAKRPSAQELLSDPWVKGEKAKDDQMDPEIVSRLQRFNARRKLRAAAIASVWSSTIFLRTKKLKSLVGSYDLKEDEIENLRMHFKKICADRDNATLCEFEEVLKAMKMPSLIPFAARIFDLFDNNRDGTVDMREILCGFSSLKNSKGEDALRLCFQARDRSGCITKEEVASMLRALPYDCLPTDITEPGKLDEIFDLMDANSDGKVTFDEFKAAMQRDSSLQ

SEQ ID NO: 13517 - protein, 432 aa, Deinococcus radiodurans R1 [sequence omitted]

SEQ ID NO: 13518 - protein, 363 aa, Deinococcus radiodurans R1
MRVVLKLGTSVLTAGTDRLHRPRLVDLMRDIAAVSAQGHEVVLVSSGAVTAGWEALGFPPRERTLAEKQLLAAVGQVQLMHLYTSLAELYGLRSAQLLLTADDFRERTRYLNARTTLEGCLSRGVLPVINENDTVAVEQIKVGDNDTLSAFVANLVEADLLLILTDAPGLYTADPRTHPDATLIPVVERVTPDIWALAGGAGSHRGTGGMHTKIQAAEIATRAGTPVVIAPGDLPEALRRVVDGEALGTRFLAHGTRLEARKRWILAEIAHGRLLLDGGAAQAVRERGSSLLPAGIRQVEGDFERGHTVRLLAPDGQELGRGLTRYRADDLRRVCGHHSREIEALLGYTYGEEAVHRDDLVLL

SEQ ID NO: 13519 - protein, 85 aa, Malus x domestica
NFDLVGNNFPVFFIRDGIKFPDMVHALKPNPKSHIQEFWRILDFFSHHPESLHMFTFLFDDIGVPQDYRHMDGSGVNTYTLIDKA

SEQ ID NO: 13520 - protein, 349 aa, Bacillus clausii KSM-K16
MRAAVWYKEKDIRVEEREPAKLGARDVKVRVAWAGICGSDLHEYLHGPVIIPKGEPDPITGGESPLTLGHEFAGVIEEVGTEVKSFQKGDRVVINPLFTYGNKPASVDLYDGFSFAGLATDGGFADFAVLPEKNVYKLPDNLTLEEGALVEPMAVAVQAVKEADFKFGQSVAVFGAGPIGLFTIIAAKAAGASKIIVFDLSEERLEKARLVGATHTFNSGAVDPVEKVKSLVPDGVDVSFEVAGVNATFNQSIQVAKSRGVVVVVSIFAKPIEFNPMDLTGSGVKITSTLAYEPEVFQTTIDLMAEGALNPKGVITDRIELENIVESGFEVLTNDKRQAKILVKLSGEK

SEQ ID NO: 13521 - protein, 423 aa, Thermus thermophilus HB27
MKKSKRKNAQAQEAQETEVLVQEEAEELPEFPEGEPDPDLEDPDLALEDDLLDLPEEGEGLDLEEEEEDLPIPKISTSDPVRQYLHEIGQVPLLTLEEEVELARKVEEGMEAIKKLSEITGLDPDLIREVVRAKILGSARVRHIPGLKETLDPKTVEEIDQKLKSLPKEHKRYLHIAREGEAARQHLIEANLRLVVSIAKKYTGRGLSFLDLIQEGNQGLIRAVEKFEYKRRFKFSTYATWWIRQAINRAIADQARTIRIPVHMVETINKLSRTARQLQQELGREPTYEEIAEAMGPGWDAKRVEETLKIAQEPVSLETPIGDEKDSFYGDFIPDEHLPSPVDAATQSLLSEELEKALSKLSEREAMVLKLRKGLIDGREHTLEEVGAFFGVTRERIRQIENKALRKLKYHESRTRKLRDFLD

SEQ ID NO: 13522 - protein, 315 aa, Triticum aestivum
MAPLGDAVAPAAAAAAPGLVVSFGEMLIDFVPDVAGVSLAESGGFVKAPGGAPANVACAISKLGGSSAFIGKFGDDEFGHMLVEILKQNGVNAEGCLFDQHARTALAFVTLKSNGEREFMFYRNPSADMLLTEAELNLDLIRRARIFHYGSISLITEPCRSAHVAAMRAAKSTGILCSYDPNVRLPLWPSAQAARDGIMSIWKEADFIKVSDDEVAFLTQGDATDEKNVLSLWFEGLKLLIVTDGEKGCRYFTKDDSIFYNEGQLREVLQFSNACGAICTTQKGSIPGLSTTATARELITKGGTLDPLVSPPVGV

SEQ ID NO: 13523 - protein, 255 aa, Pennisetum alopecuroides
CELDNIMRLTGITGIVNGMDVSEWDPSKDKYIATKYDVSTAIEAKALNKEALQAAAGLPVDRKIPLVAFVGRLEEQKGPDVMAAAIPQLMEEDVQIVLLGTGKKKFERMLMSAEEKYPDKVRAVVKFNAALAHQIMAGADLLAVTSRFEPCGLIQLQGMRYGTPCVCASTGGLVDTVIEGRTGFHMGRLSVDCKVVEPADVRKVASTLKRAIKVVGTPAYEEMVRNCMIQDLSWKGPAKNWENVLLSLGVAGSEP

SEQ ID NO: 13524 - protein, 327 aa, Thermus thermophilus HB27
MKAPVRVAVTGAAGQIGYSLLFRIAAGEMLGKDQPVILQLLEIPQAMKALEGVVMELEDCAFPLLAGLEATDDPKVAFKDADYALLVGAAPRKAGMERRDLLQVNGKIFTEQGRALAEVAKKDVKVLVVGNPANTNALIAYKNAPGLNPRNFTAMTRLDHNRAKAQLAKKTGTGVDRIRRMTVWGNHSSTMFPDLFHAEVDGRPALELVDMEWYEKVFIPTVAQRGAAIIQARGASSAASAANAAIEHIRDWALGTPEGDWVSMAVPSQGEYGIPEGIVYSFPVTAKDGAYRVVEGLEINEFARKRMEITAQELLDEMEQVKALGLI

SEQ ID NO: 13525 - protein, 258 aa, Lygeum spartum
CELDNIMRLTGIKGIVNGMDVSEWDPSKDKYIAVNYDAATAVEAKALNKEALQAEVGLPVDSKVPLVAFIGRLEEQKGPDVMVAAIKELMEEGSEDVQIVLLGTGKKKFERMLKSVEEEFPDNVRAVVKFNAPLAHQIMAGADVLAVTSRFEPCGLIQLQGMRYGTPCACASTGGLVDTIVEGKTGFHMGRLSVDCDVVEPADVKKVATTLKRAIKVVGTPAYQEMVKNCMAQDLSWKGPAKNWEDVLLDLGVAGSEP

SEQ ID NO: 13526 - protein, 333 aa, Wolinella succinogenes
MRRMPAEWERQSAVLMAMPHEESDWYPYLEEARENFIQIIEEITKRERCLLLVDDWKLYEERLGHLSNLIPLELLTNDTWARDFGPIGIEENGKKRLLDFGFNGWGLKFASFLDNQANRALARKGIYQVPLETKNLILEGGSIESNGAGLILTNTQCLLEANRNPEYSKEKIESILTQELGAKKVLWCHHGYLAGDDTDSHIDTLARFVGENRIVYLKCEDESDEHYKELKQMEEELKELRGVDGEPLELIPLPFTKAIYYDGERLPASYANFLFVNGAVLLPIYGDEKDQEAIRTMKRACPNHEIVPIDCRVLIRQHGSLHCVSMQLVEGMV

SEQ ID NO: 13527 - protein, 254 aa, Anomochloa marantoidea
  misc_feature (141)..(141): Xaa can be any naturally occurring amino acid
  unsure (1)..(254): unsure at all Xaa locations
CELDNIMRLTGVTGIVNGMDVSEWDPSKDKYITINYDEMTVLDAKPLNKEALQAEVGLPVDRKIPLIAFIGRLEEQKGPDIMAAAIPQLMEENVQIILLGTGKRKFERLLQSAGEKYPEKVRSITKFNAPLAHHIMAGADXFAITSRFEPCGLIQLQGQQYGTPCACASTGGLVDTVIEGKTGFHMGRLNIDCEVVLPGDVQKVASTLKRAIKVVGTPAYDEMVRNCMIQDLSWKGPAKNWEKVLLSLGVAGSE

SEQ ID NO: 13528 - protein, 255 aa, Glyceria grandis
CELDNIMRLTGITGIVNGMDVSEWDPSKDKYIAVKYDADTAVEAKALNKEALQAEVGLPVDRNIPLVAFIGRLEEQKGPDVMAAAIPEIMQEDVQIILLGTGKKKFERMLKSAEEKYPGKVRAVVKFNAPLAHYMMAGADLLAVTSRFEPCGLIQLQGMRYGTPCVCASTGGLVDTIVEGKTGFHMGRLSVDCNVVEPSDVKKVATTLKRAIQVVGTPEYREMVRNCMAQDLSWKGPAKNWEDVLLGLGVAGSEP

SEQ ID NO: 13529 - protein, 274 aa, Triticum aestivum
WFVELLVVIFCIGGVEGLQTCLVALLSRWFKPAARSFVKVPFFGAVSYLTLAVCPFCIVFAVLWAVYRRMPYAWIGQDVLGIALIVTVIQIVRIPNLKVGSVLLGCSFLYDIFWVFISKMLFHESVMIVVARGDNTDEDGVPMLLKIPRMFDPWGGYSIIGFGDILLPGLLVAFALRYDWAARKTLQSGYFLWSMVAYGSGLLITYVALNLMDGHGQPALLYIVPFTLGTFISLGKKRGELRNLWMKGQPPRVCTHSHHPLKDSADSASHVISS

SEQ ID NO: 13530 - protein, 509 aa, Pirellula sp. 1
MRLPFGNVAMRTDKPSDEPMSLDGITPIPVPSVFSSDKDAEAAMLNAAKDGMGTEWFGSAEDGDSENRDTQDHEALNSSRSDSASRELLSANLRQDEKPEGPPPPISKPPVSDRCSDSDRNQNAGQPHPILQSLTLLATMALMLLLARYSVPHIVEEIRYAWHRGEMRAENETGVEGLRNVSLDSLSRAYEMVTSAVGPTVVHIDVERSVSEEDRNLQRLLGEDSYTLSDQGSGVVIDKDGYILTNRHVIADGIAISVTLSDGRRLPAALVGSDMPTDLAVLKVDADGLIPIAWGDSDALRVGSPVWAVGSPFGLDRTITFGILSGKHRVVRAGVQHGSSARYQDFMQSDVAVNPGNSGGPLVDARGRLIGINTAIVGDTYQGVSFSIPSNVTRQIYDRIRETGKVERGWLGVLLSEVPDSMHRGDDLRVRGALISGVTGEDSPAAIAGLEIGDILLKIDGVRVSDVGHLMRLIANLGQGTLLNVELTRDGEPMTVEVRLKKRPDNLDR

SEQ ID NO: 13531 - protein, 255 aa, Hakonechloa macra
CELDNIMRLTGITGIVNGMDVSEWDPSKDKYITVKYDATTAVTAKALNKEALQAEVGLPVDRKIPLAAFIGRLEEQKGPDVMAAAIPQLMEEDVQIILLGTGKKKFERMLMSAEEKYPDKVRAVVKFNAALAHHIMAGADLLAVTSRFEPCGLIQLQGMRYGMPCACASTGGLVDTVVEGKTGFHMGRLSVDCKVVEPADVQKVATTLKRAIKVVGTPVYEEMIRNCMIQDLSWKGPAKNWENVLLSMGVAGSEP

SEQ ID NO: 13532 - protein, 319 aa, Zea mays
MASAQAVGQGERGHFVLKSGHTIPAVGLGTWRAGSDTAHSVRTAIAEAGYRHVDTAAQYGVEKEVGRGLKAAMEGGINRKDLFVTSKLWCTELAPDRVRPSLQKTLKDLQLDYLDLYLIHWPFRLKDGAHMPPEAGEVLEFDMEGVWREMEGLVKDGLVKDIGVCNYTVAKLNRLMRSANVPPAVCQMEMHPGWKNDRIFEACKKHGIHVTAYSPLGSSEKNLAHDPLVEKVANKLDKTPGQVLVRWALQRGTSVIPKSTRDERIKENIQVFGWEIPEDDFRALCGIKDEKRVLTGEELFVNKTHGPYKSATEVWDHED

SEQ ID NO: 13533 - protein, 456 aa, Bacillus licheniformis ATCC 14580
MANKELKRGLGARHIQMIALGGTIGVGLFMGSSSTIKWTGPSVLLAYAICGIFIFFIMRAMGEMLYVEPSTGSFATFGHQYIHPLAGYMTAWSNWFQWVIVGMSEIIAVGEYMKYWFPDLPAWIPGIIAMAILGGANLVSVKSFGEFEFWFAMIKIVTIVLMIAAGFGIIFFGFGNGGQAIGFSNLWSHGGFFTGGFSGFFFALSLVIAAYQGVELIGITAGEAKDPQNTLRHAIQSIIWRILIFYIGAIFVIVTVYPWDELNAIGSPFVSTFAKVGITAAAGIINFVVMTAAMSGCNSGIFSAGRMLYTLGVNGQAPKFFTKISRNGVPLYGTIAVLIGLAIGVVLNYIAPPNIFVYVYSASVLPGMIPWFVILLSHIGFRKAKGAEIDKHPFKMPFAPVTNYLTIGFLLMVLVGMWFNNDTRVSLIVGVIFLAVVAASYYVFGIGKRASADGNK

SEQ ID NO: 13534 - protein, 461 aa, Hordeum vulgare subsp. vulgare
MVHQSNGHGEAAAAAANGKSNGHAAAANGKSNGHAAAAAVEWNFARGKDGILATTGAKNSIRAIRYKISASVEESGPRPVLPLAHGDPSVFPAFRTAVEAEDAVAAALRTGQFNCYAAGVGLPAARSAVAEHLSQGVPYKLSADDVFLTAGGTQAIEVIIPVLAQTAGANILLPRPGYPNYEARAAFNKLEVRHFDLIPDKGWEIDIDSLESIADKNTTAMVIINPNNPCGSVYSYDHLAKVAEVARKLGILVIADEVYGKLVLGSAPFIPMGVFGHIAPVLSIGSLSKSWIVPGWRLGWVAVYDPTKILEKTKISTSITNYLNVSTDPATFVQEALPKILENTKADFFKRIIGLLKESSEICYREIKENKYITCPHKPEGSMFVMVKLNLHLLEEIHDDIDFCCKLAKEESVILCPGSVLGMENWVRITFACVPSSLQDGLERVKSFCQRNKKKNSINGC

SEQ ID NO: 13535 - protein, 273 aa, Gossypium hirsutum
MDSGGSSSSSFRKVRNPFVTDQELEESDNVSSVTGAESPPPSTTKKGKRSMQKRVVSVPIKDVEGSRLKGEGAPPSDSWAWRKYGQKPIKGSPYPRGYYRCSSSKGCPARKQVERSRVNPTMLVITYSCEHNHAWPASRHNNTSAKQAAAAAAGEASESPTKSSTAVKHEPSTSQPDTEPDSGMEDGFACLTEDSILTTGDEFAWFGEMETTSSTVLESPLFSERDNSEADDTAMIFPMREEDESLFADLEELPECSFVFRHQRNVGPQVGIC

SEQ ID NO: 13536 - protein, 364 aa, Bacillus sphaericus
MEIFKYMEKYDYEQLVFCQDEASGLKAIIAIHDTTLGPALGGARMWTYATEENAIEDALRLARGMTYKNAAAGLNLGGGKTVIIGDPFKDKNEEMFRALGRFIQGLNGRYITAEDVGTTVTDMDLIHEETNYVTGISPAFGSSGNPSPVTAYGVYRGMKAAAKEAFGTDMLEGRTISVQGLGNVAYKLCEYLHNEGAKLVVTDINQAAIDRVVNDFGATAVAPDEIYSQEVDIFSPCALGAILNDETIPQLKAKVIAGSANNQLQDSRHGDYLHELGIVYAPDYVINAGGVINVADELYGYNRERALKRVDGIYDSIEKIFEISKRDSIPTYVAANRLAEERIARVAKSRSQFLKNEKNILNGR

SEQ ID NO: 13537 - protein, 93 aa, Malus x domestica
WTAEEDEKLMDYIQKHGYGNWRTLPKNAGLQRCGKSCRLRWTNYLRPDIKRGRFSFEEEETIIQLHSILGNKWSAIAARLPGRTDNEIKNHWK

SEQ ID NO: 13538 - protein, 170 aa, Oryza sativa (japonica cultivar-group)
MEVATNTATRSPVKLMLVLTLSPASKVIAKGGGGVKRVHLDGGAFQCRTCGRRFSTFQALGGHRTSHKRPRVRADGLDLLLGARPGKLGAGGASTPVVHRCDMCGKVFATGQALGGHMRRHRPLVSRNGTMSTTWTAAAAAAATMSGSSSEERDDDDDDDVHNYNFIHFL

SEQ ID NO: 13539 - protein, 599 aa, Haemophilus somnus 2336
MQTVNVDIAIVGAGGGGLRSAIAAAEANPNLKIALVSKVYPMRSHTVAAEGGAAAVIKDEDSYDKHFHDTVAGGDWLCEQDVVEYFVQHSPVEMTQLERWGCPWSRKVDGDVNVRRFGGMKIERTWFAADKTGFHLLHTLFQTSIQYPQIQRFDEHFVLDILVDDGHARGMVAMNMMEGTLVQINANAVIIATGGGCRAFRFNTNGGIVTGDGLSMAYRHGVPLRDMEFVQYHPTGLPNTGILMTEGCRGEGGILVNKDGYRYLQDYGLGPETPIGKPENKYMELGPRDKVSQAFWQEWRKGNTLKTAKGVDVVHLDLRHLGEKYLHERLPFICELANAYEGVDPAKAPIPVRPVVHYTMGGIEVDFNSETRIKGLFAVGECASSGLHGANRLGSNSLAELVVLGRVAGEYAAQRAIEAQPANRSAVDAQAQDVIHRLEELYNQEGTESWSQIRDEMGDSMEEGCGIYRTQESMQQPVDKIAELKERYKHIRIADRSSVFNTNVLYTVELGYILDVAQSIANSAIERKESRGAHQRLDYTERDDVNYLKHTLAYYNADGAPRIEYSDVKITKSQPAKRVYGAEAEAQEAAAKAKEQANG

SEQ ID NO: 13540 - protein, 356 aa, Frankia sp. EAN1pec
MSSKSKSYQAEYIWIDGTEPEPLMRSKTRIVKGGKEPEIWGFDGSSTNQAPGSNSDCVLQPVFTCPDPLRGGDNVLVLCEVQLTDFTPHPTNTRAAARAVAEKYADMSPMFGIEQEYTFFQNGRPLGWPASGFPEAQGPYYCGVGGEKMPGRDIVEKHTQACLDAGLAIEGTNAEVMMGQWEFQIGVLPTPAIGDHIWVGRWLLHRIAEDFGASVSFAAKPMAGDWNGAGAHTNFSTKQTMESWDAIVAVCEALGTRVMEHVTHYGDGIELRLTGKHETAPWNKFSWGASDRGASIRIPWAVEKAKKGWIEDRRPNANMDPYVVSSLIVDTCCSALAGDKPTLFVPSQTADATVKV

SEQ ID NO: 13541 - protein, 583 aa, Oryza sativa
MDGLAAPSPSHSGATSGGGASHRKRKLPPSSLSDATADEDDDTTAPSSPSTSPSSPSRPSSPSSSHSDDDDDDSLHTFTAARLDGAPPSSSGRPPKPESSTVSAAAAAAAAAAAPKPDSASAAAGDGKEDPKGLFTDNIQTSGAYSAREEGLKREEEAGRLKFLCYSNDGVDEHMIWLVGLKNIFARQLPNMPKEYIVRLVMDRTHKSMMVIRNNIVVGGITYRPYTSQKFGEIAFCAITADEQVKGYGTRLMNHLKQHARDADGLTHFLTYADNNAVGYFVKQGFTKEITLDKERWQGYIKDYDGGILMECRIDQKLPYVDLATMIRRQRQAIDEKIRELSNCHIVYSGIDFQKKEAGIPRRTMKPEDIQGLREAGWTPDQWGHSKSRSAFSPDYSTYRQQLTNLMRSLLKASLLSSQIFLYDMQPFGLTSLDKPVLCLLPFEFFAPFLFQAYFLKPDQLDGLFNGSMIEMATFYKFNIQIFLNMNEHPDAWPFKEPVDSRDVPDYYDIIKDPIDLKTMSKRVESEQYYVTLEMFVADMKRMFSNAKTYNSPDTIYYKCASRLESFFSNKVASQLAQASTKN

SEQ ID NO: 13542 - protein, 637 aa, Pseudomonas syringae pv. phaseolicola 1448A
MSVRRTRKDDGSQWTVADSRSVYGIRHWGAGYFAINEAGRVEVRPNGPDSSPIDLYEQVDNLRKSGLSLPLLVRFPDILQDRVRQLTGAFDSNIARLEYQSQYTALYPIKVNQQEAVVENIIATQNVSIGLEAGSKPELMAVLALAPKGGTIVCNGYKDREFIRLALMGQKLGHNVFIVIEKESEVELVIEEAAELKVAPQVGLRVRLSSLASSKWADTGGEKSKFGLSAAQLLSVVERFRKAGLDQGIRLLHFHMGSQIANLADYQHGFKEAIRYYGELRKLGLPVDYIDVGGGLGVDYDGTHSRNASSINYDMDDYAGVVVGMLKEFCDAQSLPHPHIFSESGRSLTAHHAMLVVQVTDVEKHNDEVPEISDKESLPETVQWLVDLLGPTDIEMVTETYWRATHYMSDIATQYADGKISLAEKALGEQCYFAVCRRLYNSLKARQRSHRQVLDELNDKLADKYICNFSVFQSLPDTWAIGQVLPILPLHRLDEEPVRRAVLQDLTCDSDGKIKQYVDEQSIETSMPVHSLNEGEDYLLGIFLVGAYQEILGDMHNLFGDTDSVNIYQNPDGSVYHAGIETHDTIEDMLRYVHLSPEELMTHYRDKVASAKITPRERTYFLDALRLGLTRSSYLSS

SEQ ID NO: 13543 - protein, 576 aa, Zea mays
MYRAAASLASKARQAGSSSAARQVGSRLAWSRNYAAKDIKFGVEARALMLRGVEELADAVKVTMGPKGRNVVIEQSFGAPKVTKDGVTVAKSIEFKDRVKNVGASLVKQVANATNDTAGDGTTCATVLTKAIFTEGCKSVAAGMNAMDLRRGISMAVDAVVTNLKGMARMISTSEEIAQVGTISANGEREIGELIAKAMEKVGKEGVITIADGNTLYNELEVVEGMKLDRGYISPYFITNSKAQKCELEDPLILIHDKKVTNMHAVVKVLEMALKKQRPLLIVAEDVESEALGTLIINKLRAGIKVCAVKAPGFGENRKANLQDLAILTGGEVITEELGMNLENVEPHMLGSCKKVTVSKDDTVILDGAGDKKSIEERADQIRSAVENSTSDYDKEKLQERLAKLSGGVAVLKIGGASEAEVGEKKDRVTDALNATKAAVEEGIVPGGGVALLYASKELDKLQTANFDQKIGVQIIQNALKTPVHTIASNAGVEGAVVVGKLLEQGNTDLGYDAAKDEYVDMVKAGIIDPLKVIRTALVDAASVSSLMTTTESIIVEIPKEEAPAPAMGGMGGMDY

SEQ ID NO: 13544 - protein, 568 aa, Aspergillus terreus
MANSPHGGVLKDLLAGDAPRHDELAAEAETLPAIVLSERQLCDLELIMNGGFSPLEGFMTQKDFDGVCENCRLADGHLFSMPITLDASQQVISDSNLKPGSRVTLRDFRDDRNLAILTIEEKEAKLVFGGDPEHPAIKYFNTKVEDFYIGGKIEAVNKLNHYDYVALRYSPAELRVHFDKLGWTRVVAFQTRNPMHRAHRELTVRAARARQANVLIHPVVGLTKPGDIDHFTRVRAYQALLPRYPNGMAVLGLLPLAMRMGGPREAIWHAIIRKNHGATHFIVGRDHAGPGKNSKGEEFYGPYDAQHAVEKYREELGIEVVEFQQVTYLPDTDEYKPKDEVPAGIKTLDISGTELRNRLRTGAHIPEWFSYPEVVKILLRESSPPRATQGFTIFLTGYMNSGKDAIARALQVTLNQQGGRSVTLLLGDTVRHELSSELGFSAEDRHTNVQRIAFVAGELTRAGAAVIAAPIAPYERSRKAAREAVSGLGGSFFLVHVNTPLEYCEKTDKRGIYAKARRGEIKGFTGVDDPYEAPENADLVVDVSKQSVRSIVHEIILMLESEGYFDRL

SEQ ID NO: 13545 - protein, 254 aa, Streptomyces avermitilis MA-4680
MPVKAYDLTGRTAFVTGAASGIGRASAVLLAQAGATVHCADRDEQGLHETETLIKGGGGTARTHHLDVTDRARLHQAVAGCDRLDIMAAVAGIMHSSPVLETRDEDLDRVLNVNFKGVLYACQEAARRMIADGTRGSIVTMASGAVDTGGPGLLCYGAAKAAVVQLTKTLATEVGRHGIRVNAVAPGWVRTAMTDRHDGAAQAHTEAFMARLSPLGRVGEPDDIAHAVLHLASDASPFTTGQILRPNGGVAMPW

SEQ ID NO: 13546 - protein, 100 aa, Nocardia farcinica IFM 10152
MASVNIKPLEDKILVQANEAETTTASGLVIPDTAKEKPQEGTVVAVGPGRWDEDGEKRIPLDVQEGDTVIYSKYGGTEIKYQGEEYLILSARDVLAVVGK

SEQ ID NO: 13547 - protein, 506 aa, Thermus thermophilus HB27
MPASSLDELVALCKRRGFIFQSSEIYGGLQGVYDYGPLGVELKNNLKQAWWRRNVYERDDMEGLDASVLTHRLVLHYSGHEATFADPMVDNRITKKRYRLDHLLKEQPEEVLKRLYRAMEVEEGNLHALVQAMMQAPERAGGAMTAAGVLDPASGEPGDWTPPRYFNMMFKTYVGPVEDEAALAYLRPETAQGIFVNFKNVLDATSRKLPFGIAQIGKAFRNEITPRNFIFRVREFEQMEIEYFVRPGEDEYWHRYWVEERLKWWQEMGLSRENLVPYEQPPEELAHYAKATVDILYRFPHGLEELEGIANRTDFDLGSHTKDQEALGITARVLRNEHSTQRLAYRDPETGKWFVPYVIEPSAGVDRGVLALLAEAFTREELPNGEERIVLKLKPQLAPIKVAVIPLVKNRPEITEYAKRLKARLLALGLGRVLYEDTGNIGKAYRRHDEVGTPFAVTVDYDTIGQSKDGTTRLKDTVTVRDRDTMEQIRLHVDELEGFLRERLKW

SEQ ID NO: 13548 - protein, 536 aa, Nocardia farcinica IFM 10152
MAKQIEFDEKARRALERGVDKLADAVKVTLGPRGRHVVLAKAFGGPTVTNDGVTIARDIDLEDPFENLGAQLVKSVATKTNDVAGDGTTTATVLAQALVRGGLKNVAAGANPIAVGSGIAKAADAVSEALLAAATPVSGEQAIAQVATVSSRDEEIGEMVGKALTTVGKDGVVTVEESSTLQTELVVTEGVQFDKGYLSPYFITDTDTQEAVLEDAFVLLHREKISSLPDLLPLLEKIAEAGKPVLIVAEDVEGEALSTLVVNSIRKTLKAVAVKAPFFGDRRKAFLDDLAVVTAGTVVNPDLGITLREAGIDVLGKARRVVVTKDETTIIDGAGTAEDIAARAAQLRREIEATDSDWDREKLEERLAKLAGGVAVIKVGAATETALKERKYRVEDAVSAAKAAVDEGIVPGGGTALVQAATKLVELRDSLSGDEAVGVEVVRKALEAPLFWIASNAGLDGAVVVSKVAEGKEGFNAATLSYGDLLTDGVVDPVKVTRSAVVNAASVARMVLTTESAVVDKPAEEAEDHSHHGHAH

SEQ ID NO: 13549 - protein, 255 aa, Triticum aestivum
  misc_feature (123)..(123): Xaa can be any naturally occurring amino acid
  misc_feature (146)..(146): Xaa can be any naturally occurring amino acid
  misc_feature (177)..(177): Xaa can be any naturally occurring amino acid
  misc_feature (236)..(236): Xaa can be any naturally occurring amino acid
  unsure (1)..(255): unsure at all Xaa locations
MLASAGVEVARGHLNSTISGGIKLHRNMGNDPIVENMKMTLGLVDAGLRDTERESIKHKSMLLWLERLKGAVNDISHMLEDFEDETDLNLVFGNVGSWAAQLITEAGGEVVSIRDVTGAVKNXNGIDVAKLMKHSAENRRIKGSDXGDAVDPTSLLTEECDVLIPAALGGVINNKAXYIIEAKYIIEAANHPTNPEAEEILAKKGVLILPDILAKLRGVMVSYFKWWVQNIQGVMXDKEKVNSGVKKYITRALKH

SEQ ID NO: 13550 - protein, 255 aa, Chusquea exasperata
CELDNIMRLTGITGIVNGMDVSEWDPSKDKYIPVKYDKTTAMEAKTLNKEALQAEVGLPVDGKIPLVAFIGRLEEQKGPDIMAAAIPKLMEENVQIILLGTGKKKFERMLKSAEEKYPGKVRAVVKFNAPLAHQIMAGADLLAVTSRFEPCGLIQLQGMRYGTPCVCTSTGGLVDTVIEGKTGFHVGRLSVECKVVEPGDVQKVATTLKRAIKVVGTPAYKEMVRNCMAQDLSWKGPAKNWENILLGLGVAGSEP

SEQ ID NO: 13551 - protein, 486 aa, Zea mays
MVSSQPSSLTAILAQGPNHCPVNILLPMGPPDVVSSDNVEYDFSDVFGSTPVQTPTNLCGFGPESPAPTVESNEEFYSDPVVIINRSHSLVGPTSLVSRSLRLSKLSLGKNEGSSELVKCLSEEKEGDQGQLSDEDLGNAMTEDGGIGLDDLEILKLVGQGAFGKVFQVRKKNTSEIYAMKVMRKDRILEKNHSEYMKAEREILTKVDHPFIVQLRYSFQTKYRLYLVLDFINGGHLFFQLYKQGLFREELARIYTAEIVSAVAHLHANGIMHRDLKPENILLDADGHAMLTDFGLAKEFCENTRSNSMCGTLEYMAPEIVLGRGHDKAADWWSVGILLFEMLTGKPPFVGNREKVQQKIIKDKLKLPSFLSSEAHSLLRGLLHKEPNKRLGSCPGGSNEIKNHKWFKPINWRKLEARQIQPSFRPNVAGLTCIANFDECWTKTPVLDSPVSTPAGGGHSNFAGFTYVRPAPILEEVNASGSRLKD

SEQ ID NO: 13552 - protein, 255 aa, Chusquea oxylepis
  misc_feature (3)..(3): Xaa can be any naturally occurring amino acid
  unsure (1)..(255): unsure at all Xaa locations
CEXDNIMRLTGITGIVNGMDVSEWDPSKDKYIPVKYDKITAIEAKALNKEALQAEVGLPVDGKIPLVAFIGRLEEQKGPDVMAAAIPKLMEENVQIILLGTGKKRFERMLKSAEEKYPGKVRAVVKFNAPLAHQIMAGADLLAVTSRFEPCGLIQLQGMRYGTPCVCTSTGGLVDTVIEGKTGFHVGRLSVECNVVEPGDVEKVATTLKRAIKVVGTPAYKEMVRNCMAQDLSWKGPAKNWENILLGLGVAGSEP

SEQ ID NO: 13553 - protein, 407 aa, Arabidopsis thaliana
MASLPLGPQPHALAPPLQLHDGDALKRRPELDSDKEMSAAVIEGNDAVTGHIISTTIGGKNGEPKQTISYMAERVVGTGSFGIVFQAKCLETGESVAIKKVLQDRRYKNRELQLMRPMDHPNVISLKHCFFSTTSRDELFLNLVMEYVPETLYRVLRHYTSSNQRMPIFYVKLYTYQIFRGLAYIHTVPGVCHRDVKPQNLLVDPLTHQVKLCDFGSAKVLVKGEPNISYICSRYYRAPELIFGATEYTASIDIWSAGCVLAELLLGQPLFPGENSVDQLVEIIKVLGTPTREEIRCMNPNYTDFRFPQIKAHPWHKVFHKRMPPEAIDLASRLLQYSPSLRCTALEACAHPFFNELREPNARLPNGRPLPPLFNFKQELGGASMELINRLIPEHVRRQMSTGLQNS

SEQ ID NO: 13554 - protein, 111 aa, Zea mays
QIPVAQILLTRSDIADRTSYINAQNTFSELLDMGVLPVVNENDTLAVAEIKFGDNDTLSAITAAMVKADYLYLMTDVDCLYTANPRHDPNAQPIEVVSDISSLEADVSTSG

SEQ ID NO: 13555 - protein, 257 aa, Eremitis sp. Clark and Zhang 1343
CELDNIMRLTGITGIVNGMDVSEWDPSRDKYLTVKYDTATALEAKALNKEALQAEVGLPVDGKVPLVAFIGRLEEQKGPDVMAAAIPRLLEENDNVQIILLGTGKKKFESVFKSAEERYPGKVRAVVKFNAPLAHQIMAGADLLAVTSRFEPCGLIQLQGMRYGTPCVCASTGGLVDTVKEGKTGFHMGRLSVDCNVVDPGDVQKVATALKRAIKVVGTPAYEEMVRNCMAQDLSWKGPAKNWENVLLGLGVAGSQP

SEQ ID NO: 13556 - protein, 481 aa, Bradyrhizobium sp. BTAi1
MEMFIDGRWVGALGGATFDVLDPATGETIDSVPEAGPADVDAAIRSAEMAFQAWKATPVAERARLQKAAARLMRENAEQLGRLLTRELGRPLAGAITEIQRSAELLDVYAEEGLRLHAEMPLTGVAGEKIIITREPAGVVIAITPFNYPVTLLCFKLGAALMAGCTVVAKPAEDTPLSTLRLAELFRKAGYPTGCFNVVTGRGPDVGMQMIAHPTPRKIAFTGGTQAGKAIAAAAAGTMKRVTLELGGQCPAIVCADADIGAASAAIARHAFANSGQFCYRVNRVYVERPVYTRFLDALADRVLQLDVGNGLTSTCALGPLVNEKIYRNSDRQIADARASGATILTGGARLTGGLYDKGWFLPPTVIADAGPSSLIMTEETFGPVLGVAPFDHHSEALRLANATIYGLAAFVFSRNLATGLTLAERLEAGSVWINDIQRSNQRAPFGGMKQSGIGREKGRYGVEDYLEYKTIYLTYDAELR

SEQ ID NO: 13557 - protein, 247 aa, Melica cupanii
CELDNIMRLTGITGIVNGMDVSEWDPSKDKYIAVKYDAATAVEAKALNKEALQAEVGLPVDRKIPLVAFIGRLEEQKGPDVMAAAIPEIMKENVQIVLLGMGKKKFERMLKNAEEKYPSKVRAVVKFNAPLAHHIMAGADLLAITSRFEPCGLIQLQGMRYGTPCACASTGGLVDTIVEGKTGFHMGRLSVDCNVVEPSDVKKVATTVRRAVKVVGTPAYQEMVRNCMAQDLSWKGPAKNWEDVLLG

SEQ ID NO: 13558 - protein, 548 aa, Neorickettsia risticii
MANEVISGEQLQKVIRDAADLVVSSAGVTLGPEGRPVIMSKSYGGPEVTKDGYKVINNLKPEDEKIAKIVELLNQATSQANEKAGDGTTTATILVGNMIKNAHKHIAAQRSRTKLKSGMKRARDEVVKYIQSVAKKINSEEEIAQVGSISANGNSEIGNKIAEAMNKVGKEGVITVEEGKGLDEFSVSVVQGMVFDRGYVSPYFITNPEKMIVEFDNPYVLLANKKLSSIQPMVPLLETIVRSNRAVVIIAEDVEGEALTSLVLSKMRGSLKACAVKAPGFGDRRSEMLEDIRILTGAKTLVSDDLGVTVESLTVEDLGTAKSIIISKDSTTIVDGGGEKTSIDARVKQIKTQIDKTTSDYDKEKLQERLAKLAGGVAVLKVGGATEVEVKERKDRVEDALHATRAAVEEGIVPGGGATLLSAIAVLEKLSSDDDDEQAGINIVKSALKAPISQIVENAGEDASVITYNLLESKDPNRIFDARELKYVDAFKAGIIDPAKVVRVALESAVSVASVLVTTEALIVDLPTKDNGSPSMMPGGGMGGMGGF

SEQ ID NO: 13559 - protein, 309 aa, Burkholderia sp. 383
MKPELLVLIALRGDAHRDISTSFDVRYAPTSEARERAIAEHGGTIRAVLTNGSTGLTAAEIDRLTQLTFISALGAGYENIDVTHAKARGITVVTGAGTNDDCVADHAFALLLAAVRNVVQLDAKTRAGVWRDGLAMPPNVSGKKLGIVGLGKIGEKCARRAAGFDIEIGYHNRSVKDVPYRYFDRVDALAKWADFLIVATPGGAGTRHLIDRAVLDALGPGGFVVNVSRGSVVDTAALAEALHEGRIAGAGLDVYEGEPEPPRALTDLGNVVLTPHMGGWSPEALDRSVQQFIDNAVRHFAGQPVLTPV

SEQ ID NO: 13560 - protein, 362 aa, Arabidopsis thaliana
MKEEQTRSLFGISLSDKPTWQQFLICTSGFFFGYLVNGVCEEYVYNRLQFSFGWYFTFIQGFVYLFLIYLQGFTTKHIVNPMRTYVKLSAVLMGSHGLTKGSLAYLNYPAQIMFKSTKVLPVMIMGAFIPGLRRKYPVHEYISAFLLVLGLILFTLADAQMSPNFSMIGIMMITGALIMDAFLGNLQEAIFTMNPETTQARKLKKTRLTLVMCVVQMEMLFCSTVVGLPFLFVPMVLTGEVFRAWTACAQHPYVYGVLVFEAMATFIGQVSVLSLIALFGAATTALITTARKGVTLLLSYLIFTKPLTEQHGSGLLLIAMGIVLKMVPMDSKAPAKIPARPAVRIAGGDGDREEDEERKSLV

SEQ ID NO: 13561 - protein, 257 aa, Pariana radiciflora
CELDNIMRLTGITGIVNGMDVSEWDPSKDKYLTVKYDATTAIEAKALNKEALQAEVGLPVDGKVPLVAFIGRLEEQKGPDVMAAAIPRLMEENDNVQIILLGTGKKKFERVFKSAEERYPGKVRAVVKFNAPLAHQIMAGADLLAITSRFEPCGLIQLQGMRYGTPCVCASTGGLVDTVKEGKTGFHMGRLSVDCDVVDPGDVQKVATALKRAIKVVGTPAYEEMVRNCMAQDLSWKGPAKNWENLLLGLGVAGSQP

SEQ ID NO: 13562 - protein, 332 aa, Burkholderia sp. 383
MNAIQIDRFGDPSVLRPVVIERPTPAPDEVLVRVTRVGLNFAETLQRAGLYPGPAPTLPAILGSETVGTVEAVGTNVQGFRIGERVAAALFGATSGTGGYAEYVTVRAPLIVAIPDAVSDDDAVAVMLQGLVARVLLRETPVAARSVAITAAAGGVGSMLIQLARLDGARTIVGLAGSMEKLSTVRALGADQAVSYRDEAWVDRLGAATGGTGPDVVFDSIGGTVARTLVSSLAPHGRFVGYGAASGHMLTVDESLMNALIFGCRSLSGFSLHAFLADHVVRQTLGELFGLLATGALKPLIGGSYAFDAIADAHATLESGGTTGKLVLHIDR

SEQ ID NO: 13563 - protein, 260 aa, Streptococcus thermophilus LMG 18311
MTKTLTKHLQAIKDSKRGIFVPYIMAGDHAKGLDGLFETITLLENSGVSAIEVGIPWSDPVADGPIIELAGQRSLAKDVTLTAIIKKLQEKKTQVPLVIMTYINPVYQYGIEAFVKDLAETSVKGLIIPDLPNEHADFITPYLRDSDIALVPLVSLTTGIDRQKQLIDGAEGFIYAVAINGVTGKTGNYRDDLDKHLSNLTAYADIPVLTGFGVSTEEDIKRFNAVSDGVIVGSKIVRDLHDGKEEEVAEFVTFGSHFEK

SEQ ID NO: 13564 - protein, 635 aa, Pisum sativum
MMESCECIDTPYPPDELLVKYQYISDVLIALAYFSIPVELIYFVQKSAFFPYRWVLMQFGAFIVLCGATHFINLWTFSAHSKAVAVVMTIAKVSCAIVSCATALMLVHIIPDLLSVKTRELFLKNKAEELDREMGLILTQEETGRHVRMLTHEIRSTLDRHTILKTTLVELGRTLGLEECALWMPSRSGLNLQLSHTLTYHVQVGSTVPTNLPIVNEVFNSPRATRIPHTCPLARIRPLVGRYVPPEVVAVRVPLLHLSNFQINDWPDLSAKSFAIMVLILPTDSARKWRDHELELVDVVADQVAVALSHAAILEESMRARDQLMEQNVALDLARREAEMAIHARNDFLAVMNHEMRTPMHAIIALSSLLLETELTPEQRVMIETVLKSSNVLAALINDVLDLSRLEDGSLELEMGKINLHGVLEEVIELIKPIASVKKLPITLILAPDLPDNAIGDVKRLMQTLLNVVGNAVKYTKEGYVSIRASVAKPESLQDWRPPEFYPASSDGHFYIRVQVKDSGCGILPQDIPHLFTKFTQSQSGAGRSSSGSGLGLAICKRFVNLMGGHIWMESEGPDKGSTATFVVKLGICGNPDSSDHQATTRGQAYSGSGGLARFKHLVNDGDIGFSNRRNQRSF

SEQ ID NO: 13565 - protein, 464 aa, Salmonella typhimurium LT2
MKNASTASGASVSDAASKNEPTLQRGLQNRHIQLIALGGAIGTGLFLGIGPAIQMAGPAVLLGYGVAGIIAFLIMRQLGEMVVEEPVSGSFAHFAWKYWGPFAGFLSGWNYWVMFVLVGMAELTAAGIYMQYWLPDVPTWVWAAAFFIIINAVNLVNVRLYGETEFWFALIKVLAIIGMIGFGLWLLFSGHGGEHASIDNLWRYNGFFATGWHGLLLSLAVIMFSFGGLELIGITAAEARDPQKSIPKAVNQVVYRILLFYIGSLVVLLALYPWVEVKSNSSPFVMIFHNLDSNVVASALNFVILVASLSVYNSGVYSNSRMLFGLSVQGNAPKFLTRVSHRGVPVNSLILSGAITSLVVLINYLLPQKAFSLLMALVVATLLLNWIMICLAHLRFRAAMRRKGRETQFKALFYPAGNYLCIAFLALILVLMCTMDDMRLSAILLPVWIVFLFIAFTVLRRKAH

SEQ ID NO: 13566 - protein, 491 aa, Glycine max
MLETEKDFDSKLKIQGNSSSSNGGGNVQRSKSFAFRAPQENYTIQDFELGKIYGVGSYSKVVRAKKKDTGTVYALKIMDKKFITKENKTAYVKLERIVLDQLDHPGIVRLYFTFQDSFSLYMALESIRRGEIFDQITRKGRLSEDEARFYAAEVVDALEYIHNLGVIHRDIKPENLLLTAEGHIKIADFGSVKPMQDSQITVLPNAASDDKACTFVGTAAYVPPEVLNSSPATFGNDLWALGCTLYQMLSGTSPFKDASEWLIFQRIIARELRFPDYFSDEARDLIDRLLDLDPSRRPGAGPDGYAILKSHPFFKGVDWDNLRAQIPPKLAPEPGTQSPASDDVHDSSWSPSHIGDGSAASVRQPDGATSSEGTGHITRLASIDSFDSKWQQFLEPGESVLMISMVKKLQKLTSKKVQLILTNKPKLIYVDPSKLIVKGNIIWSDNPNDLSIQVASPSNFKICTPKKVMSFEDAKQRAWQWKKAIEGLQNR

SEQ ID NO: 13567 - protein, 618 aa, Gossypium hirsutum
MEQHIMWVFWFFLHWFCSVHSVSDGDSLLSPKGVNYEVAALMSVKRELRDYKQVMDGWDINSVDPCTWNMVACSAEGFVISLEMASTGLSGLLSPSIGNLSHLRTMLLQNNQLSGPIPDEIGKLSELQTLDLSGNHFVGAIPSTLGSLTHLSYLRLSKNNLSGPIPRHVANLTGLSFLDLSYNNLSGPTPKILAKGYSITGNNFLCASSEHICTDVSYPLNGSVSSSRVSGNHHWLLSVAIGIGFAFVVSVMLLACWVRWYRSQIMLPSYVQQDYDFEIGHLKRFSYRELQIATSNFNSKNILGQGGYGVVYKGCLPNRSVVAVKRLKDPNFTGEVQFQTEVEMIGLALHRNLLRLYGFCMTPDERLLVYPYMPNGSVADRLRDACHGKPALNWSRRMHIALGAARGLLYLHEQCNPKIIHRDVKAANILLDESFEAVVGDFGLAKLLDKRDSHVTTAVRGTVGHIAPEYLSTGQSSEKTDVFGFGILLLELITGQKTLDAGNGQVQKGMILDWVRTLHEERRLEVLVDRDLQGCFDTIELETVTELALQCTRPQPHLRPKMSEVLKVLEGLVQSGTEEPQGGTNHCETSAYSFSRNYSDVHEESSFIIEAMELSGPR

SEQ ID NO: 13568 - protein, 503 aa, Pectobacterium carotovorum
MSNSFCVVYKGSDTDINNIQRDFDGKGEALSNGYLFIEQNGHYQKCEMERGTAYLIGSLYNRTFLIGLAGVWEGEAYLANDAELLALLFTRLGANALALAEGDFCFFIDEPNGELTVITESRGFSPVHVVQGKKAWMTNSLKLVTAAEGEGALWFEEEALVCQSLMRADTYTPVKNAQRLKPGAVHVLTHDSEGYSFVESRTLTTPASNQLLALPREPLLALIDRYLNAPLEDLAPRFDTVGIPLSGGLDSSLVTALASRHFKKLNTYSIGTELSNEFEFSQQVADALGTHHQMKILSETEVINGIIESIYYNEIFDGLSAEIQSGLFNVYRQAQGQVSCMLTGYGSDLLFGGILKPGAQYDNPNQLLAEQVYRTRWTGEFATHGASCYGIDIRHPFWSHSLISLCHALHPDYKIFDNEVKNILREYADSLQLLPKDIVWRKKIGIHEGSSVNQAFANVLGSTVDNYQTKSRFTYRVYQAFLRGRLSITDVTPSQLKDLIKKD

SEQ ID NO: 13569 - protein, 208 aa, Solibacter usitatus Ellin6076
MLATATTPMNAYDVALENFDLAANALGLDDSIRAMIKYPERILSVSVPVRMDTGKIVRFEGYRVQHSTMRGPAKGGIRFHPNVTMDEVKALATWMTWKCAVVNIPYGGGKGGVTCNPKELSMGELERMTRRYASSILPIIGPEKDIPAPDVYTTPQIMAWDSGTPCRLEYRDIPGAPGWVGRGKGRSSLRGGSARDANKSGRPRRGCF

SEQ ID NO: 13570 - protein, 524 aa, Gossypium hirsutum
MAEPKPEEISHPPMDQLQGLEYCIDSNPSWGEAIALGFQHYILALGTAVMIPSFLVPLMGGTDDDKVRVVQTLLFVEGINTLLQTLFGTRLPTVIGGSYAFMVPIISIIHDTTLLSIEDNHMRFLYTMRAVQGALIVASSIQIILGYSQMWAICTRFFSPLGMIPVIALVGFGLFDKGFPVVGRCVEIGIPMLFLFIAFSQYLKNFLTKQLPILERFALIISITVIWAYAHLLTKSGAYKHRPELTQLNCRTDKANLISSAPWIKIPYPLQWGAPTFDAGHAFGMMAAVLVSLIESTGSYKAAARLASATPPPAHILSRGIGWQGIGILLDGLFGTLTGSTVSVENVGLLGSTRVGSRRVIQISAGFMIFFSILGKFGALFASIPFTIFAAVYCVLFGIVASVGLSFMQFTNMNSMRNLFIIGVAMFLGLSVPEYYREYTAKALHGPAHTRAVWFNDFLNTIFFSSPTVALIVAVLLDNTLDYKDSARDRGMPWWANFRTFKGDGRSEEFYSLPFNLNRFFPPS

SEQ ID NO: 13571 - protein, 478 aa, Solibacter usitatus Ellin6076
MLHYDNFINGKFTPSTGTERITCLNPSTGEPICTVPESTAADMDAAIAAAATAQKAWGKRPAIQRAQALRAIAAKIREQVEPLARLITEEQGKTLGLARVEVAFTADYMDYMAEWARRIEGEILESDRPGETILLFRQPIGVIGGILPWNFPFFLIARKAAPALVTGNTIVIKPSEETPHNAVKFCELLAQTDLPPGVINIVHGRGAGAGKTLCASPKIGMISFTGSVETGSAIMAAAAPNITKLNLELGGKAPAIVMADADLDLAVNAVTSSRVINSGQVCNCAERIYVQSKVAAEFTDKLAAAMKSSVCGNPLGEAEVAYGPLINQAGYKKVDALVRGAVAAGATLVTGGNRLPLEGGYYYEPTVLSGCTQGMEIVRREIFGPVVPIVQFDDLDQAIDFANDSDYGLTSSIYTRDLNTALRACQEIHFGETYINRENFEAMQGFHAGWRKSGVGGADGKHGLYEFTQTHVVYMQRA

SEQ ID NO: 13572 - protein, 478 aa, Gossypium hirsutum
MDSTSKSNAATSSKKDANNGQTLLLGRYEVGKLLGHGTFAKVYHARNVKSGDNVAIKVIDKEKILKSGLIAHIKREISILRRVRHPNIVQLFEVMATKSKIYFVMEYVRGGELFNKVAKGRLKEDVARKYFQQLISAVHFCHARGVYHRDLKPENLLLDENGDLKVSDFGLSAVSDQIRQDGLFHTFCGTPAFVAPEVLARKGYDAAKVDIWSCGVILFVLMAGYLPFQDQNIMAMYKKIYKGEFRCPRWFSPELIRLLTKLLDTNPETRITIPEIMEKRWFKKGFKHIKFYIEDDKLCSVEDDDNDVGSCSDQSSMSESETELETRKRVGTLPRPASLNAFDLISFSPGFNLSGLFEEGEEGSRFVSGAPVSTIISKLEEIAKVVSFTVRKKDCRVSLEGSREGAKGPLSIAAEIFELTPSLVVVEVKKKGGERGEYEDFCNRELKPGLKELMVEESQSSAAASLATSSSYLPSDTE

SEQ ID NO: 13573 - protein, 376 aa, Pectobacterium carotovorum
MPNDLYAIYNRYTSRTLFFKYCATATLTHRLTRRLSLFTLKKCLARPQGRLFSLVNSIYFGGETLEEVQSTATFLARSGIACVLDYAVEGENDETQFDKAMENTLRLIEMSQQTDSLPFVVIKPSSLGSVAVYARQSERLALDEASASAWSRIVTRFSRLFDYARSHGVHVMVDAEQTAIQPAVDRLVLDMMREFNRDSAVITLTLQFYLKDQLRFLDECYQRACQDNFLFGVKVVRGAYLEEEKRVNGGVRCFATKQETDRSYNAAVDYIALRLDRIAPFFATHNEESLALIMSSESLRAGRTWVGQLYGLGDHITYSLLQTGFRVCKYLPYGPLDKSLPYLLRRIEENAVASATFKKENKLLQKELLRRLVGGM

SEQ ID NO: 13574 - protein, 413 aa, Arabidopsis thaliana
MTTTGSNSNHNHHESNNNNNNPSTRSWGTAVSGQSVSTSGSMGSPSSRSEQTITVVTSTSDTTFQRLNNLDIQGDDAGSQGASGVKKKKRGQRAAGPDKTGRGLRQFSMKGLISFSAPIMLSSKCLSICEKVESKGRTTYNEVADELVAEFALPNNDGTSPDQQQYDEKNIRRRVYDALNVLMAMDIISKDKKEIQWRGLPRTSLSDIEELKNERLSLRNRIEKKTAYSQELEEQVMNIIDTLGLSASCLQNLIQRNEHLYSSGNAPSGGVALPFILVQTRPHATVEVEISEDMQLVHFDFNSTPFELHDDNFVLKTMKFCDQPPQQPNGRNNSQLVCHNFTPENPNKGPSTGPTPQLDMYETHLQSQQHQQHSQLQIIPMPETNNVTSSADTAPVKSPSLPGIMNSSMKPEN

SEQ ID NO: 13575 - protein, 687 aa, Kluyveromyces lactis
MSEDKYCLVTGGAGYIGSHTVVELCEAGYKCIVVDNLSNSSYESVARMELLTGQEIKFAKIDLCELEPLNKLFDDYKIDSVLHFAGLKAVGESTQIPLTYYFNNIVGTINLLECMKSHDVKKLVFSSSATVYGDATRFENMIPIPETCPTGPTNPYGKTKLTIEDMMRDLHFSDKSFSFAILRYFNPIGAHPSGVIGEAFGIPNNLLPFMAQVAIGRRPKLYVFGDDYDSVDGTPIRDYIHVVDLAKGHLAALKYLEKYAGTCREWNLGTGHGTTVLQMYRAFCDAIGFNFEYVVTARRDGDVLNLTAKCDRATNELEWKTELDVNKACVDLWKWTQDNPFGYQIKGVDSKFFGDKGDFSSRVVSLGKGTSFEVKLANLGATIVDIVVNGCSVVASLDNETEYKDQSNPFFGATVGPYANRIANGTFEINGKRIQLTVSKEDGNVVHSGINSYHSKKFLGPIVKNPEAHIWTADFKYVDEETEFPARLSTLVRYKVDSEKKTLTVEYESKVAGQGSTGANITNHTYFNLNKFNEATIKGSKVQLIDNTGLEVNNKLLPTGNLKKYTQVATFNDSPTEITEKEPVLDFCFVSGLPAKLDTRSSPLTPVFKLSNEDAKLEVEVATTEPTFQVYTGDYVDVKDKYENRAGICCEPGRYIDAVNNPEWKSSVVLPAGETYGHKLSYTFRTL

SEQ ID NO: 13576 - protein, 279 aa, Mesorhizobium loti MAFF303099
MTTRIDRRMAKLKTEGRPALVTYFMGGDPDYDTSLSIMKALPGAGSDIIELGMPFSDPMADGPAIQAAGLRALKGGQTLVKTLKMASEFRAGDNETPIVLMGYYNPIYIYGVDRFLKDALASGIDGLIVVDLPPEMDEELCIPALKAGINFIRLATPTTDDKRLPKVLQNTSGFVYYVSMTGITGSALADTGKVAAAVNRIKGHTDLPVCVGFGVKTAEQARVIGANADGVVVGTAIVNAVANVLGPKGEKTADPAEAVATLVSGLAQGVRSARLAAAE

SEQ ID NO: 13577 - protein, 309 aa, Azotobacter chroococcum (strain mcd 1)
MWDYSEKVKEHFYNPKNAGAVEGANAIGDVGSLSCGDRLRLTLKVDPETDVILDAGFQTFGCGSAIASSSALTEMVKGADLDDALKISNRDIAHFLGRLPREKMHCSVMGRERLQAAVANYRGEELRTDHEKPQLICKSFAIDEVMVRDTIRANKLSTVEDVTKHTKRGGGCSACHEGIERVLSEELAPVARSSSCADQGQEEVKVLAPSRLRSWPRRLRATPKLSNLQRIRRIETVLAAIRPTLQRDKGDVELIDVDGKNIYVKLTGACTGCQMASMTLGGIQQRLIEELGEFVKVIPVSAGPRQMEV

SEQ ID NO: 13578 - protein, 474 aa, Campylobacter lari RM2100
MKKLTNDFGNIVADNQNSLTAGSKGPLLMQDYILLEKLAHQNRERIPERAVHAKGSGAYGELKITADISKYTKAKVLQLGESTPLFIRFSTVAGEAGAADAERDVRGFAIKFYTKEGNWDLVGNNTPTFFIRDAYKFPDFIHTQKRDPRSNLRSNNAAWDFWSLCPESLHQVTILMSDRGIPASYRHMHGFGSHTYSLINDKNERFWVKFHFKTKQGIKNLTNEEAANLIANDRESHQRDLYEAIEKGDFPKWTFQIQVLKEDEAEKLGFNPFDLTKVWPHSIVPLIEVGELVLNKNVQNYFNEVEQAAFSPSNIVSGIGFSPDKMLQARIFSYPDAHRYRIGTNYHLLPVNRAKSEVNTYNVAGAMNFDTYKNGPAYYEPNSYDDSPKEDKSYLEPDLALEGNAQRYAPLDDDFYTQPRALFDIMNESQKEQLFKNIAASMNGVDEKIIARALSHFEKISSEYANGVKKALKM

SEQ ID NO: 13579 - protein, 368 aa, Pseudomonas syringae pv. phaseolicola 1448A
MTTLNSTPRADGFHMPAEWAPQTQVWMVWPERPDNWRLGGKPAQAAHVAIAKAIARFEPVTVAVSAAQYDNARARLDVPNIRVVEMSSNDAWVRDSGPTFVINERGEVRGVNWEFNAWGGFDGGLYAPWNLDSQLGSKVLEIERCPRYVTKGFVLEGGSIHVDGEGTLITTEECLLNRNRNPHLTREQIEAILGDYLAVDKVVWLPDGLFNDETDGHVDNFCCYIRPGEVLLAWTDDPEDPNYSRCHAALGILENTLDAKGRAFIVHKMPIPGPLFATEEECAGVDQVHGSQERNPSVRLAGSYVNFLIVNGGIIAPSFDDPMDEKARELLQTLFPEHEVVMAPGRELLLGGGNIHCLTQQQPAPHKA

SEQ ID NO: 13580 - protein, 553 aa, Bacillus anthracis str. A2012
MKDWHKSVVYQIYPKSFNSYYNKETGDIKGVTEKLDYLKELGVDYIWLTPIYQSPQNDNGYDVSDYYSIDPSYGTMEEFEELLEEAKARNIEIMLDIVVNHSSTEHKWFKEAKKDKNSPYRNYYIWRDEKNNWQSKFGGSAWKYDEKTKQYFLHLFDETQADLNWENEKLREEVYDMMRFWLDKGVTGFRLDVINLISKDQQFLNDDGSTATSDGRKYYTDGPRVHEYLQEMNRNVFEGKDVLTVGEMSSTTIDNCIKYSNPDRNELSMTFSFHHLKVDYPNGDKWTKADFDFIKLKEIMSNWQIEMQKGGGWNALFWCNHDQPRIVSRFGNDEKYRNESAKMLATAMHMLQGTPYIYQGEEIGMTNPNFESIEQYRDVESLNIYDIKLEEGLSKEEIIGILKQKSRDNSRTPMQWNEDVNSGFTTSTPWISVAENFKEINVEKALEDKESVFYYYKKLIELRKTYDVITEGEYAILDENDSEIWAYTRTTESEVLLVINNFYGEEITYSVPAHVQLDGMKQEVLLSNYKDSSKDIAKLNLRPYESIVYRYTK

SEQ ID NO: 13581 - protein, 1829 aa, Streptomyces avermitilis MA-4680
MESGAATRGTKTRAKGGQSLSNQRKPRTGTTAVDTAALNRLLAALVSMRDGNFRKRLTVSGDGVMSEIAAVFNEVAERNLHLTGELARVRRMVGREGKLTERLESGACEGSWAAAIDNSNALVDDLARPVSEVSRVLSAVAEGDLSPRMELRAQAADGNGHPLRGEFLKVGRTVNNLVDQLSSFTDEVTRVASEVGTEGKLGGQARVRGMSGSWKDLTDSVNTMAYRLTAQVRDIALVTTAVAKGDLSRKVTVHVAGEMLELKNTVNTMVDQLSSFSSEVTRVAREVGTEGELGGQAQVPGVAGVWKDLTDSVNLMAGNLTAQVRGIAQVTTAVANGDLSQKVTVSARGEVAQLAETINQMTETLRTFADEVTRVANEVGGEGRLGGQANVPGAAGTWKDLTDSVNTVFRNLTTQVRDIAAVTTAVANGDLSQKVTVDVAGEMLELKNTVNTMVDQLSSFGAEVTRVAREVGVEGELGGQAQVPGAAGTWKDLTDSVNTAFRNLTGQVRNIAQVTTAVANGDLSQKVTVDVSGEMLQLKNTVNTMVDQLSSFADQVTRMARDVGTEGRLGGQARVDGVSGTWKELTDSVNFMAGNLTSQVRQIAQVTTAVARGDLSQKIDVDARGEILELKNTINTMVDQLSAFADQVTRVAREVGTEGRLGGQAQVPGVAGVWRDLTDSVNGMAGNLTAQVRNIAQVATAVARGDLSQKIDVDARGEILELKNTLNTMVDQLSNFAEQVTRVAREVGTEGMLGGQAEVQGVSGTWKDLTQSVNFMANNLTIQVRNIAEVTTAVAKGDLSKKITVDAKGEILELVTTVNTMVDQLSSFAEQVTRVAREVGTEGILGGQAHVPGVTGIWKDLSNNVNLMANNLTMQVRNISQVAAAVANGDLTRTVTIEARGEVAQLADTFNTMVKTLSSFADQVTKVAREVGTDGILGGQAHVPGVAGTWKDLTESVNGMASNLTGQVRNIAMVTTAIAKGDLTKKIDIDARGEILELKTTINTMVDQLSSFAEEVTRVAREVGTEGQLGGQARVRDVDGTWRDLTESVNEMAGNLTRQVRAIARVATAVTRGDLNLKIDVDASGEIQELQDYINKMIANLRDTTIANKEQDWLKGNLARISALMQGRRDLDDVASLIMSELTPVVSAQHGAFFLAMPLVDAREGGAEQEDAYELRMCGSYGYSMGSMPTSFRPGEALIGTAAQEKRTILVENAPSGYLKISSGLGEAPPAQVIVLPVLFEGNVLGVIELASFTPFTQIQKDFLNQIAEMIATSVNTISVNTKTEVLLKQSQELTEQLRERSAELENRQKALQASNAELEEKAELLAQQNRDIEVKNTEIEEARQVLEERAEQLAVSMRYKSEFLANMSHELRTPLNSLLILAKLLADNADSNLTPKQVEFAETIHGAGSDLLQLINDILDLSKVEAGKMDVSPTRIALVQLVDYVEATFRPLTAEKGLDFSVRVSPELPATLHTDEQRLLQVLRNLLSNAVKFTDSGAVELVIRPAGADVPVAIREQLLEAGSLRDADAGLIAFSVTDTGIGIAASKMRVIFEAFKQADGTTSRKYGGTGLGLSISREIARLLGGEIHAASEPGRGSTFTLYLPLHPSELPPQGYAQMAPTMEVGELLASEPELSAPDIETPAEVKSYRDTQNGPAALFRRRRRAVTAAEERTALPGRPAQGQEQWVGAGQQEPAPQPRRGIRFDGEKVLIVDDDIRNVFALTSVLEQHGLSVLYAENGREGIEVLEQHDDVTVVLMDIMMPEMDGYATTTAIRRMPQFAGLPIIALTAKAMKGDREKAIESGASDYVTKPVDPDHLLTVMEQWMRAE

SEQ ID NO: 13582 - protein, 372 aa, Archaeoglobus fulgidus DSM 4304
MLLMIPGPVQLHERIIRAMARQMIGHRTADFSAIMEFCVEKLREIFGTKGDICLISGSGTAGMEAAIASFSRVKKIATLENGKFGERLGDIAERYTQVERVKVPWGESFELDAVKEALDNGCEAVAFVHNETSTGILNPAKEIAKLAKEYDALVIMDAITSAGGDYVKMDEWGVDVAIVGSQKCLGAPPGLAAVAVSEKAWDYYNERCPYYLDLAAYRKKLKDMQTPYTPAVPLFFALAEALKIIDEEGLENRIQRHRILSAAVRKWAVEAGLELFPNLNKYSSYSNTVTAIKMPEGVSDSELRGTLKKEYGILVSGGQGELKGKIFRIGTMGNVGKFETVSTLAALEDVLMRKNAIKPALQYAQILLRDLQ

SEQ ID NO: 13583 - protein, 206 aa, Deinococcus radiodurans R1
MGWHPLGEHGAPHNSSMTQQTNSQGTQPGAAQEQAIFAGGCFWCTEAVMQDLRGVQKVESGYIGGTVPNPDYRSVCGGQTGHAEAVRVTFDPNQISYRDLLGLFFATHDPTSLNRQGADVGTQYRSALFPLTQEQEQTAREMIEQLGTEDVFGRPIVTSIEPASTFYVAEDYHQNYYKNNPGQGYCMAVISPKVAKLRQYYGDKLR

SEQ ID NO: 13584 - protein, 167 aa, Momordica charantia
MAEESPKSIYDFTVKDIRGNDVCLSQYSGKVLLIVNVASKCGFTDSNYKELNVLYDKYKSQGFEILAFPCNQFARQEPGTNEEIQETLCTRFKAEFPIFDKVEVNGKNAAPIYKFLKLKKGGIFGDGIKWNFTKFLVNREGKVVDRYAPTTPPLNIEKDIQNLLGSA

SEQ ID NO: 13585 - protein, 450 aa, Escherichia coli
MTKHYDYIAIGGGSGGIASINRAAMYGQKCALIEAKELGGTCVNVGCVPKKVMWHAAQIREAIHMYGPDYGFDTTINKFNWETLIASRTAYIDRIHTSYENVLGKNNVDVIKGFARFVDAKTLEVNGETITADHILIATGGRPSHPDIPGVEYGIDSDGFFALPALPERVAVVGAGYIGVELGGVINGLGAKTHLFEMFDAPLPSFDPMISETLVEVMNAEGPQLHTNAIPKAVVKNTDGSLTLELEDGRSETVDCLIWAIGREPANDNINLEAAGVKTNEKGYIVVDKYQNTNIEGIYAVGDNTGAVELTPVAVAAGRRLSERLFNNKPDEHLDYSNIPTVVFSHPPIGTVGLTEPQAREQYGDDQVKVYKSSFTAMYTAVTTHRQPCRMKLVCVGSEEKIVGIHGIGFGMDEMLQGFAVALKMGATKKDFDNTVAIHPTAAEEFVTMR

SEQ ID NO: 13586 - protein, 165 aa, Brassica napus
RHQEKTTPLESEVEHKAQITEEPALVAKHEEEEHKPTLLEQLHQKHEEEEENKPSLFQKLHRSNSSSSSSSEEEGEDGQKRKKKIVEGEEKKGVMEKIKEKLPGLSEKPDDSQVVNTEAAVPVSDETAEHAEEKKGILEKIKEKLPGYHAKSSEEEEKKEKESDA

SEQ ID NO: 13587 - protein, 253 aa, Pharus lappulaceus
  misc_feature (251)..(251): Xaa can be any naturally occurring amino acid
  unsure (1)..(253): unsure at all Xaa locations
CELDNIMRLTGITGIVNGMDVSDWDPSKDKYITTNYDATTVLEAKPLNKEALQAEVGLPVNRNVPLVAFIGRLEEQKGPDIMARAIDQLMEENVQIILLGTGKKKFERLFMSAEEKYPNKVRAVVKFNGALAHQIMAGADLLAITSRFEPCGLIQLQAMQYGTPSACASTGGLVDTVIEGKTGFHMGRLNVNCEVVEPADVQKVVTTVKRAINVVGTPAYNEMVKNCMVQDLSWKGPAKNWEKVLLSLGVXGS

SEQ ID NO: 13588 - protein, 506 aa, Glycine max
  misc_feature (149)..(149): Xaa can be any naturally occurring amino acid
  unsure (1)..(506): unsure at all Xaa locations
MASLSCSANDLAPLFNDTAAANYLCAQFDSISRKLNVTTYAVDNTYLLFSAYLVFAMQLGFAMLCAGSVRAKNTMNIMLTNVLDAAAGGLSYYLFGFAFAFGGPSNGFIGRHFFGLRDYPMGSSPSGDYSFFLYQWAFAIAAAGITSGXSIAERTQFVAYLIYSSFLTGFVYPIVSHWFWSSDGWASATRSHGNVLFGSGVIDFAGSGVVHMVGGIAVLWGALIEGPRIGRFDRSGRSVALRGHSASLVVLGSFLLWFGWYGFNPGSFLTIAKGYGSGGYYGQWSAIGRTAVTTTLAGSTAALTTLFSKWLLAGHWNVIDVCNGLLGGFAAITSGCAVVEPWAAIVCGFVAAWVLIWLNKLAAKVEYDDPLEAAQLHGGCGAWGVFFTGLFAKKVYVEEIYGVGRPFGALMGGGGRLLAAQVIQILVVCGWVTATMAPLFYGLHKMKLLRISRDDETAGMDLTRHGGFAYAYHDDEDGSSRGVGFMLRRIEPAASTTPSPPAAPQV

SEQ ID NO: 13589 - protein, 481 aa, Rhodobacter sphaeroides 2.4.1
MTDFRREKILVGGDWIQADAGGRIEVTNPATGAVIGTVPDAGAAETARAVAAAEAAFGPWRALTAAERATHLRRLAQAILDHREALAELLTEEQGKPLAEARGEVGMSAAYIQWFAEEARRVYGEVIPSPWPDRRLLVTRQPVGVVAAITPWNFPSSMLARKIGPALAAGCTVVAKPASQTPFSGLAWGVLGEMAGLPAGVLNIVTGSARAIGGELTANPSVRKITFTGSTPVGKVLLAQAAGTVKKMSMELGGNAPFLVFDDADLDRAVEGAIAAKFRNAGQTCVCTNRFYAQAGIHDEFVKRLAAATAALKVGPGAQDGSEIGPLIDAAAVAKTEEMVADATAKGGRIVTGGRRHTAGAGFYEPTVIADATDAMTFAREEIFGPVAPVFRFETEEEAIRRANATEYGLACYFYTSDLGRAFRVSEALDYGIVGVNEGLVTTEVAPFGGVKESGFGSEGSHHGMQDYLTLKYTAMGGLGR

SEQ ID NO: 13590 - protein, 292 aa, Fagus sylvatica
MASVLVKLLLLLTILASSVLVIAYAGNLHQDFDITWGDGRAMILNNGELLTLSLDKASGSGFQSKNQFLFGKIDTQIKLVPGNSAGTVTAYYLSSKGSTWDEIDYEFLGNLSGDPYTIHTNIYTQGKGNREQQFHLWFDPTANFHTYSILWNPQAIIFSVDGTPIREFKNSESIGVPIPKKQPMRLYSSLWNADDWATRGGLLKTDWARTPFTASYRNFNARACLWSSGESTCTANSQSSTSNNNAWLKEDLDFTRQERLKWVQKNYMIYNYCTDTKRFPQGFPPECAATKA

SEQ ID NO: 13591 - protein, 299 aa, Rhodobacter sphaeroides 2.4.1
MNVRVACVGGAVLDRVYEVAALPGTDGKSRASSYREFGGGMAGNAAVAIARLGGQARWWGRVGDDAIGAGVLAGLAAEGVATAEARVVEGAVSSHSLVLSDAEGRRAIVLYRSDGLDPDASWLPLAAVGGLDAVLADNRWIDGAVAALTAARAAGLPAVLDADAGADPRSREAVQAASHAIFSEPGLAEIYGTSDPDEGLRHAAADAPFVAVTLGEAGLRWRDARGGLASLPAFPVRAVETVGAGDVFHGAFALALAEGQPPEDALRFAAATAALKCRGSGGRASYPGRTAVEDLLRQG

SEQ ID NO: 13592 - protein, 406 aa, Streptomyces coelicolor A3(2)
MPEAVIVSAARSPIGRAFKGSLKDLRADDLAATIIQAALAKVPELDPRDIDDLMLGCGLPGGEQGNNLGRIVAVEMGMDHLPGCTVTRYCSSSLQTSRMALHAIKAGEGDVFISAGVEMVSRFAKGNSDSLPDTRNPLFAEAEARTAEVAQQEGTTWHDPREDGLVPDPYIAMGQTAENLARAKGITRQDMDEFGVRSQNLAEEAIKNGFWEREITPVTLPDGTVVSKDDGPRAGVTLEGVQGLKPVFRPDGLVTAGNCCPLNDGAAALVIMSDTKARELGLTPLARIVSTGVSGLSPEIMGLGPVEASKQALSRAGLGVGDIDLVEINEAFAAQVIPSYRDLGIPLEKLNVNGGAIAVGHPFGMTGARITGTLINSLRTHDKQFGLETMCVGGGQGMAMVIERLS

SEQ ID NO: 13593 - protein, 79 aa, Fagus sylvatica
MSCCGGNCGCGTGCKCGSGCGGCKAYPDLSYTEKTTTETLIVGVAPQKAHSEGSEMGVGAENGGCKCGSNCTCDPCNCK

SEQ ID NO: 13594 - protein, 250 aa, Kineococcus radiotolerans SRS30216
MTEAAHTLVLLRHGESEWNALNLFTGWVDVALSEKGRAEAAAGGRMLVENGVLPDVVHTSVLRRAITTAFLALDAADRHWIDVKRSWRLNERHYGALQGKDKKQTLAEFGEEQFMLWRRSYDTPPPAIEAGSEFSQDGDPRYAGLGDDMPATECLADVVARMLPYWTESVVPDLRAGRTVLLAAHGNSLRALVKHLDGVSDADIAGLNIPTGIPLVYRLDADLKPLVPGGEYLDPAAAAAAAAAVANQGR

SEQ ID NO: 13595 - protein, 552 aa, Coxiella burnetii
MAAKVLKFSHEVLHAMSRGVEVLANAVKVTLGPKGRNVVLDKSFGAPTITKDGVSVAKEIELEDKFENMGAQMVKEVASRTSDDAGDGTTTATVLAQAILVEGIKAVIAGMNPMDLKRGIDKAVTAAVAELKKISKPCKDQKAIAQVGTISANSDKSIGDIIAEAMEKVGKEGVITVEDGSGLENALEVVEGMQFDRGYLSPYFINNQQNMSAELENPFILLVDKKISNIRELIPLLENIAKSGRPLLVIAEDIEGEALATLVVNNIRGVVKVAAVKAPGFGDRRKAMLQDIAVLTGGKVISEEVGLSLEAASLDDLGSAKRVVVTKDDTTIIDGSGDAGDIKNRVEQIRKEIENSSSDYDKEKLQERLAKLAGGVAVIKVGAATEVEMKEKKARVEDALHATRAAVEEGVVPGGGVALIRVLKSLDSVEVENEDQRVGVEIARRAMAYPLSQIVKNTGVQAAVVADKVLNHKDVNYGYNAATGEYGDMIEMGILDPTKVTRTALQNAASIAGLMITTECMVTEAPKKKEESMPGGGDMGGMGGMGGMGGMM

SEQ ID NO: 13596 - protein, 778 aa, Heterocapsa triquetra
MPSMSKESRRTQRVVLAAGASAAVAAVGSTANGFVTGPALRTLPTQTTTQQSGYVASAGEAAPQSNSALLSGGCFALAASAVAVRSGARKARRSAVATRATAVSTETATDCINAIRFLAVDAINKSNSGHPGAPMGQAPIGFCLFAETMDFNPANPDWINRDRFVLSSGHGCMFQYSVLHLTGYKSVSMDDIKQFRQWGSKTPGHPENFETAGIEVTTGPLGMGVSNAVGLAAAEAHNAAVYNKPGMPLIDHYTYCIMGDGCCQEGISHESCAYAGHLGLGKLIVFYDDNGITIDGHTELSFTEDVGKRYEAYGWQVLTVTDGNTDVDAIRQAITDAKACTDKPTLIKVKTVIGYGSPNKADSHDAHGAPLGKDEGQATRDQLGWKYGEFEVPDHVYETYRAHGARGAKKEEEWNKMWGEYKKAHPELAEQFQRIVVDKKLPANWSDCLPKATPETAGKATRLHSQDCLNAIANTLPELIGGSADLAPSNMTLMKCTGDFLKGTYDGRNMRFGIREFGMGAVANAISLDRTGLVPYCATFTIFSDYMRNAIRVAALAKAGTIFVTTHDSIAVGEDGPTHQPIETIPSLRMIPDLLVMRPADCNESSGAYKVAVELSKNESRPTFMAFTRQALPNLPNSSIENTEKGAYAVLDPADPDIVLIGTGSEVSVCWEAAKEMKDKKVKVVSMPCWELFRAQPQSYKDQILPKGVPTMSVEAAVTMGWGEWSDAHVGINCFGASAPGNTCMDKFGFNVPNVVSCANRLLKGEKGVLSDGSQGKH

SEQ ID NO: 13597 - protein, 552 aa, Coxiella burnetii
MAAKVLKFSHEVLHAMSRGVEVLANAVKVTLGPKGRNVVLDKSFGAPTITKDGVSVAKEIELEDKFENMGAQMVKEVASRTSDDAGDGTTTATVLAQAILVEGIKAVIAGMNPMDLKRGIDKAVTAAVAELKKISKPCKDQKAIAQVGTISANSDKSIGDIIAEAMEKVGKEGVITVEDGSGLENALEVVEGMQFDRGYLSPYFINNQQNMSAELENPFILLVDKKISNIRELIPLLENIAKSGRPLLVIAEDIEGEALATLVVNNIRGVVKVAAVKAPGFGDRRKAMLQDIAVLTGGKVISEEVGLSLEAASLDDLGSAKRVVVTKDDTTIIDGSGDAGDIKNRVEQIRKEIENSSSDYDKEKLQERLAKLAGGVAVIKVGAATEVEMKEKKARVEDALHATRAAVEEGVVPGGGVALIRVLKSLDSVEVENEDQRVGVEIARRAMAYPLSQIVKNTGVQAAVVADKVLNHKDVNYGYNAATGEYGDMIEMGILDPTKVTRTALQNAASTAGLMITTECMVTEAPKKKEESMPGGGDMGGMGGMGGMGGMM

SEQ ID NO: 13598 - protein, 450 aa, Hebeloma cylindrosporum
MVKPFEPEFQQALDELTTSLQPFLDANPQYKKALEIVQVPERVLQFRVVWEDDQGVAQVNHGFRVQYNSALGPYKGGLRLHPSVNLSILKFLGFEQTFKNALTGLSMGGGKGGSDFDPKGKSDSEIRRFCFSFMGELFRHIGSDTDVPAGDIGTGGREIGFLFGAYKKLRNEFTGMLTGKGLTWGGSFIRPEATGYGLIYFVEHMIAKACPEYSLDKPSTLVAISGSGNVAQFTALKVIELGATVLSLSDSKGSLISDKGYTKEFIRKVADLKLKGGSLASLANEEGYTYHAGARPWTLIPTIHIALPGATQNEVSAEEAEALLKAGVRIVAEGSNMGCTADAIDIFESSRKAGPGGVWYAPGKASNCGGVAVSGLEMAQNSQRLAWTTQEVDSKLKDIMAECYGICLTAGTKWSGEELTDEVLPSLLSGANVAGFIKVADAMKAQGDWW

SEQ ID NO: 13599 - protein, 142 aa, Frankia sp. EAN1pec
MTDQPTTDADEKVVRSDTEWRQLLDPQRYAILRQDATEAPFSGTYTYDKTSGTYRCGACGAPLFTSDTKYDSGSGWPSFYQPVTADAVTLITDRSHGMTRTEVRCARCDSHLGHVFDDGPAPTGQRYCMNSLALDLDNTDAS

SEQ ID NO: 13600 - protein, 148 aa, Brassica napus
LSCLFPDRIFAAPHKMPLSGSLLSRRFSISSRDHQGHTPTEPESPMLPPSSNVTGSSWSAMLPELLSEIIRRVEDTEDHWPLRRDVVACACVSKKWREITQETVRSPRNSGKITFPSCLKLPGPRDFSNQCLIKRNKRTCTFYLYLPL

SEQ ID NO: 13601 - protein, 394 aa, Campylobacter lari RM2100
MINALGLDKDSSFKAICDGKSGVDKITLFDATDFPVQIAAEVKNFDPLSVCDAKEVKKIDRFIQLGIKAAKEAMEDAKFDETLNKEEFGVVSAAGIGGLPNIEKNSVTCAQRGPRKITPFFIPSALVNMLGGIISIEHGLQGPNISCVTACAAGTHAIGEAYKSIALGNADKMLVVGAEAAICAVGIGGFAAMKALSTRNDDPAKASRPFDKERDGFVMGEGAGALVFEEYEAAKKRGAKIYAELVGFGESADAHHITSPTLEGPLRAMKKALKMAGNPKVDYINAHGTSTPVNDKNETAAIKELFKDQIPLVSSTKGQTGHCLGAAGAIEAVISLMALDQGVLPPTINQIVADENCDLDYIPNTARKSEVNVVMSNSFGFGGTNGCVIFKKVD

SEQ ID NO: 13602 - protein, 561 aa, Acinetobacter sp. ED45-25
MTTLKITGMTCDSCAAHVKEALEKVPGVQSALVSYPKGTAQLAIEAGTSSDALTTAVAGLGYEATLADAPPTDNRAGLLDKMRGWIGAADKPSGNERPLQVVVIGSGGAAMAAALKAVEQGAHVSLIERGTIGGTCVNVGCVPSKIMIRAAHIAHLRRESPFDGGIAATVPAIDRSKLLAQQQARVEELRHAKYEGILDGNPAITVVHGEARFKDEQSLVVRLNDGGERVVAFDRCLVATGASPAVPPIPGLKESPYWTSTEALVSDTLPERLAVIGSSVVALELAQAFARLGSQVTILARNTLFFRDDPAIGEAVTAAFRAEGIKVLEHTQASQVAHVDGEFVLTTGYGEIRADKLLVATGRTPNTRSLALDAAGVTVNAQGAIVIDQGMRTSNPNIYAAGDCTDQPQFVYVAAAAGTRAAINMTGGDAALDLTAMPAVVFTDPQVATVGYSEAEAHHDGIETDSRTLTLDNVPRALANFDTRGFIKLVIEEGSGRLIGVQAVAPEAGELIQTAVLAIRNRMTVQELADQLFPYLTMVEGLKLAAQTFSKDVKQLSCCAG

SEQ ID NO: 13603 - protein, 246 aa, Archaeoglobus fulgidus DSM 4304
MTMTLAKRFTAEVVGTFILVFFGPGAAVITLMIANGADKPNEFNIGIGALGGLGDWFAIGMAFALAIAAVIYSLGRISGAHINPAVTIALWSIGRFPGREVVPYIVAQFIGAALGSLLFLACVGPAAATVGGLGATAPFPGIGYGQAILTEAIGTFLLMLVIMGVAVDERAPPGFAGLVIGLTVGGIITTIGNITGSSLNPARTFGPYLGDSLMGINLWQYFPIYVIGPIVGAVAAAWLYNYLAKE

SEQ ID NO: 13604 - protein, 540 aa, Lactococcus lactis
MRAHEILNNPFLNKGTAFTMKERQELGLIGLLPPTVQTIEEQAVQTYEQYLTKPSDLEKRHFLMEIFNTNRTLFYYLFNKHIVEFNPVVYDPTIADTIENYSHLFVDPQYAAYLDINHPENITETLKSAAGDREIRLIVVTDAEGILGIGDWGTQGVDISVGKLMIYTAAAGIDPASVLPVVIDAGTNRKELLEDHLYLGNHQERIYGDQYYSFVDQFVETAESIFPKLYLHWEDFGRSNAATILNNYKTKIPTFNDDIQGTGIVVLGGIFGSLDITGEKLTDQVYLCYGGGSAGAGIAGRVHAEMVSEGLSEEEAYKHFFMIDQQGLLFDDMEDLTPAQKPFAKKRADYKDAGDMTDLLNVVKTVKPTILVGTSTNPGAFTKEVVEAMCANTERPVIFPISNPTKKMETTAEQVIEWSDGKAFVATGVPSGTISYKGVDYQIGQANNSLIHPGLGLGMLASEAKLLTDEMIGAAAHSLSGLVDPGKPGAPVLPPFEFVADVSIKVAEAVAKKAQEQGLTESKETDMAKAVRDLKWYPEY

SEQ ID NO: 13605 - protein, 475 aa, Bacillus anthracis str. A2012
MQQTTNEKLHRTMKSRHLFMIALGGVIGTGFFLGSGYTINQAGPGGAILSYLVGGFIMYLTMLCLGELTVAMPVSGSFQKYATKFIGPGTGFMIGWLYWLGWAVTVGLELTSIGLMMKRWFPNVDVWVWCLVFGVILYASNAISAKSYAELEFWFSSIKVITILAFVVLGGSALLGFISYDGKEAAPLFSNFVSEGGLFPNGLAAVLLTMITVNFSFQGTELIGIAAGESENPEKTIPRAIRNTVWRIMLFFILTMTILVGLISWKEAGVIESPFVVVFDKIGIPYAADIMNFVIITALLSVANSGLYAATRILWSLANEGMAPTSFQKVNKRGIPITALVVTIAVAGLSLFTSFLAEDTVYMYLLSIAGLSAVSSWIIIALSQLRFRSQYIKGGGKLEDLKYRTPLYPIVPILALITNSIVVISLAFIPEQRMALYCGIPFIIFCYIYYYINKKRQKPMKVEMEKANETNNQTR

SEQ ID NO: 13606 - protein, 344 aa, Saccharomyces cerevisiae
MSAGIGESRTELLTWLNGLLNLNYKKIEECGTGAAYCQIMDSIYGDLPMNRVKFNATAEYEFQTNYKILQSCFSRHGIEKTVYVDKLIRCKFQDNLEFLQWLKKHWIRHKDESVYDPDARRKYRPIITNNSATKPRTVSNPTTAKRSSSTGTGSAMSGGLATRHSSLGINGSRKTSVTQGQLVAIQAELTKSQETIGSLNEEIEQYKGTVSTLEIEREFYFNKLRDIEILVHTTQDLINEGVYKFNDETITGHGNGNGGALLRFVKKVESILYATAEGFEMNDGEDELNDKNLGEHGTVPNQGGYANSNGEVNGNEGSNHDVIMQNDEGEVGVSNNLIIDEETF

SEQ ID NO: 13607 - protein, 387 aa, Zea mays
ALLAVAVVACPACSSNSPRAADAESWQVARKEGRREGKQAMALEAVVFPKEHLAGTAKARSASSLACGFRTEEVEDNGGVVLQGEASDAPGAGAATTWECWDAALCPCSTPPAGAVEECWDDVRHRLSASPPLPPAPSAAVAAPSSGHGKAAAAARRRRRQRPKAVKNTEEVESQRRNHIAVERNRRRQMNEYLSVLRSALPPSYPQRGDQASIVAGAINFVKELEHLLQSLEAQKRRRQGCTEPPAPAPFAGLFTFPQYSTAATGVVAGSGDGAGSGGRRLRGGGAAGRGRHRGGRGGEPREREGGHAAAAQAAAEDGGGAAVPRPHRAPPQRDHHRRPAGLVLSQPQDGGPVPAVVGRRHRRRGERHTRQDLRRARQPSPSSRVV

SEQ ID NO: 13608 - protein, 188 aa, Brassica napus
  misc_feature (43)..(43): Xaa can be any naturally occurring amino acid
  misc_feature (155)..(155): Xaa can be any naturally occurring amino acid
  misc_feature (160)..(160): Xaa can be any naturally occurring amino acid
  misc_feature (174)..(174): Xaa can be any naturally occurring amino acid
  unsure (1)..(188): unsure at all Xaa locations
STQRVRCERICGVLLIEELGLENEAEKPSNALLTRAWSPGWSXADKILTEFIEKQLIDYAKNSKKVVGNSTYLLSPYLHFGEISVRRVFQCARMKQIIWARDKNGQGVESAVLFLRGIGLRDYSRYICFNFPFTHEQSLLSHLRFFPWDADVEKXKAWRXGRTGYSEVDAGMRXELWATGLMHNRIRV

SEQ ID NO: 13609 - protein, 327 aa, Glycine max
  misc_feature (22)..(22): Xaa can be any naturally occurring amino acid
  unsure (1)..(327): unsure at all Xaa locations
MASSSSLHLSQALLARAVYLHXSSSSVRVSLSFPSFSGLKSHSTCKAASATSSRRRGACPSTNVVRAAAVETLDQTTEVSLVEKSVNTIRFLAIDAVEKANSGHPGLPMGCAPMGHILYDEIMRYNPKNPAWFNRDRFVLSAGHGCMLQYALLHLAGYDTVQEQDLKEFRQWGSRTPGHPENFETLGVEVTTGPLGQGIANAVGLALAEKHLAARFNKPDNEIVDHYTYVILGDGCQMEGISNEACSLAGHWGLGKLIALYDDNHISIDGDTEVAFTENVDQRFEALGWHVIWVKNGNTGYDEIRAAIKEAKAVKDKPTLIKVTTTI

SEQ ID NO: 13610 - protein, 406 aa, Haemophilus influenzae Rd KW20
MRRTVITGFGIISSIGNNKEEVLASLKAGKSGIEVVPEFVEMNMRSHVAGTIKLNPSEHIDRKVFRFMGDAAAYAYLSMREAIEDAGLTEDQVSNDRTGLVIGAGTGSAHNQLVACDAVRGPRGVKAIGPYAVTKTMASSVSACLATPYKIRGVNYSMSSACATSAHCIGHAVELIQLGKQDVVFAGGAEELSWECATEFDAMGAVSTKYNETPEKASRAYDANRDGFVIAGGGAVVVVEELEHALARGAKIYAEIVGYGATSDGYDMVAPSGEGAERCMKQAMATVDTPIDYINVHGTSTPVGDVKELGAIKNVFGDKIPAISSTKSMTGHSLGAAGAHEAIYTLLMLDNDFIAPSINIETLDEAAEGCNIVTETKENAGLQTVMSNSFGFGGTNATLIFKRYNG

SEQ ID NO: 13611 - protein, 484 aa, Parachlamydia sp. UWE25
MKQLSIFTKLCLLATGAALIGSSFTNPNLIEAATQEQNRTEDIKRLPGKETVVDFRGVAKKAIPAVVSIKVKGQKKGPLFGDENSLEDYFGENGDFWNFFGLPKRDSRQQLLSGQATGVIVSPEGYILTNSHVVHDMTTIAVQLHDGRELAAKLLGEDPSSDLALIKIDAKDLPYLTLGNSDDLEVGQWVAAVGNPFGLQATLTVGVVSAKSRNNLDIARYEDFIQTDASINRGNSGGPLLTLNGEIVGINTAIATNASAGYIGIGFAIPSNMAKHVMDEILSQGKVSRGFLGVSLQSIDYNLAQSFGLDKVEGALVTNIVKNSPAEKAGIQVEDIILKLNGRSIESAASLRNAIYRMKPGTKVNLTILRKEKQIDLSLTIGDFTEETVAAASSHKSQLGIEVANIPSEMKSDEQGVMITKVYPGSVANFAGLKKGAIILGINHQKIENVEQFNNALKNSSADKPILLQVKQGNAYLFVSLRSE

SEQ ID NO: 13612 - protein, 610 aa, Nocardioides sp. JS614
MASTTPTHDDTRPEPAASLARMFYDRIAATPDQEAFRFPDGAGWRSVTWRQTGETVRTLAAGLLALGIRPEERVAILSNTRVEWLEADLAIMCAGAATTTVYPTTSADDVAFILGDSGSRIAFAEDDTQVAKLRSRRDHLPDLIRVVTFDGQADGEWVLSLRDLVALGARHLVEHPGAVDQAVAAIGPEDLATLIYTSGTTGQPKGVELPHRCWTYIGSAADRLGILSAADVQFLWLPLSHSFGKMLEAVQLQIGFPTAVDGRLERIVENLAEVRPTFMAGPPRIFEKVHAKVVQTVEEEGGVKHRLFNWAFRVGDRVARARLEGRRPSTFDAAQHAVADRLVLAKIRERLGGRIRFLVSGSAALSPDVGRWFHAADLLVLEGYGLTETSAGTCMVLPDDAVFGAVGRPLDGTELRIASDGEIFVRGPGVMRGYHHLPEATAEVLSADGWLATGDVGELDHRGRLRITDRKKDLIKTSGGKYIAPQAIEIIFKAVCPLASQMLVHADGRSYATALITLDPDALAQWGRAQGMPVTDYSALAASPEVHGYVAACVEELNGRLNRWETIKQFRILDHDLSVEGGELTPSMKVRRKVIETTYHDLLDSMYVPA

SEQ ID NO: 13613 - protein, 331 aa, Bradyrhizobium sp. BTAi1
MGTKGAILIAGGAGYIGAHCSKAVADAGFTPICYDNLTLGHRSFVQWGPLVVGDIADSIKVASTIRQYDVQAVMHFAASSAVGESVADPQKYYLNNVAGTLGLLQGMREAGCTRLVFSSTGAVYGNAGREPIPESAAGPTVNPYGRSKYMIEQILSDYRAAYGFSAIALRYFNACGADASGAIGELRDPETHLIPRALMAILGHVPDFAIFGTDYETPDGTAVRDYIHVDDLAAAHIAAIGRLMEGHRGGAYNLGTGSGYSVREIVDAIRNETGEQVPLVYRERRPGDPPVLVADPRRAEQELGFKPRRSDLGHIIRSAWAWHQKAHPRIA

SEQ ID NO: 13614 - protein, 492 aa, Prunus mume
MGSSSATANRFLLSKIATSEGHGENSPYFDGWKAYDRNPFHPTKNPEGVIQMGLAENQLSFDSIEDWIKKNPKASICTPEGVEEFKNVAIFQDYHGFPEFRKAVAMFMSKARGGRVTFDPNRVVMSGGATGANELVMFCLADPGDAFLVPSPYYPAFFRDLGWRTGVQIVPVDCDSSNNFKITKEALEAAYEKAQKNNINVKGLIITNPSNPLGTTLDRNTLESLVEFINQKNIHLVCDEIYAATVFSSPTFTCISEVIQNMNCNPNLIHIVYSLSKDMGLPGLRVGIVYSYNDDVVNIGRKMSSFGLVSSQTQHMLPSMLLDEEFVARFLETSPKRLAKRHGVFTKGLEEVGINCLKSNAGLFCWMDLRRLLEDQTFDGEMVLWRVIVNEVGPNVSPGSSFKCVEPGWFRVCFANMDDETLEVALKRIRTFVRQGKKAQDQVVQVKSPKRWKSNLRLSFSSSSTRRFDQESVNVLSPHMMSPHSPLVRAKT

SEQ ID NO: 13615 - protein, 1074 aa, Nostoc punctiforme PCC 73102
MTPTVSQSHTKIISQAIEQLRSFCQVNLQSSWLYQESNLIITDVVAADLSHWQPVQLNAKEHIAWTGGKNVLWLVQRLVVPQDLQGYPLAGLSLRLALVWWADSAEIYVNGELVLEGDLFDCSPRVLLSQGVTPGEEFIVALRLVSPGHCDGALVRSLLVYESTVDNNPDPGFVADELAVVQLYLERFAPEKLDALVEVVEEVTNRRGAEGTEKGELAKSFLSLRQNLIQSDILAEGWGDQKSKIFLLGHAHLDLAWLWPVSETWNAAQNTFESVLKLQEDFPELIFCHSTPALYAWIEEHRPDLFQAIQAQVAAGRWEVVGGMWVEPELNLIAGESIVRQLLYGQRYIQEKFGQFSTMVWVPDTFGFCATLPQFFANAGIEYFVTQKLRWNDTTKFDYGAFWWRSPDGSEVFSLMSAPIGENIDPVKMASYALEWQSQTGLSESFWLPGVGDHGGGPTRDMLETAQRWQKSPFFPDLEFTTAEKYLQQIVETRWIASVSNYNSPPASPAPPAFPTWDDELYLEFHRGCYTTHADQKRWNRRCENLLYEAELFATLATISCGATYPKAEIEAAWKQVLFQQFHDILPGSSITQVYTDALPQWQQVEKVGMKILQESLLAIASHITLSEPPKPNSLPIFVFNSLNWQRSEVVSVALPTSQEWQIYDTSGKQLVSQLSEPSTLLFLATEIPPVGYRIFWLSPSSPSFPPSPSLLSDWILENEFLRVVIDPDTGDLSSVFDKTYQRELLSGAGNQLQAFKDSGQYWDAWNIDPNYAQHPLPSTNLQSIQWLEEGPVQSRVRVVRQLGESEFCQDYILQAGSPLLKITTTVNWQENHVLVKAAFPLNIEADFATYEIPCGAIRRTTKPQTPAEEAKWEVPALRWADLTGETQEGIHGVSLLNDCKYGYDSKPNQLRLTLLRSPNWPDSEADKGFHEFTYTLYPHAGSWESAHTVRRGYELNIPLQVILNPPNENPPLSTGKDGLGVSFLDLSAENLILMALKPSEDNPQQLILRCYECHGETAELSLQSNLGLNLGDTVDLLERSSTTEFSSRQQILTIQPWKIASFKVIPAINSRLE

SEQ ID NO: 13616 - protein, 809 aa, Arabidopsis thaliana
MERRNEALMIRKSKWQYPQVGSPTPRILQLPRRHSVRRNASKGLKTTVSSSSQKDRRVKLEVLFHQERTFDRGASIVMVNDNGGEKKDEEEGRRRGKVADGREIGVSGLSSSSAVDEVEEAKWRFQAEMLRSECNLLRIEKEIALKKMERRKKRMERTLRSAVLTLLSGKERISEGTKESKVLEDEISYLVEKLNELKSPKVKDMEARNFKHNFDKQASVLRRELERFDEAVSEEVCVKGIQKMAEASFSVHSDQNALRNNNGNIDTLSSKMEALSKGVLLERMEKEYGSSLVAPSSSSVQDMYCKGIKAHEEKKDCSRHCKVVMRKIADEVRAEAEQWSQMQEMLNQVRKEMEELQSCRDFWQNRALEADSEIQNLHSSVEGWRRKALSSEAKLKNLQAEVCGLQEEIKRLRKEDKLEPEKNKLPSESEKRVLICRLKENRHSNNGDWSKYSEGRTTKPSSSRPPLREVKNSSVIARQRNSNIMKIEEEKTVCVTGASGYIASWIVKLLLLRGYTVKASVRDPNDPRKTEHLLALEGAEERLKLFKANLLEEGSFDSAIDGCEGVFHTASPFYHDVKDPQAELLDPAVKGTINVLSSCLKTSSVKRVVLTSSIAAVAFNGMPRTPETIVDETWFADPDYCRASKLWYVLSKTLAENAAWKFAKENNLQLVSINPAMVIGPLLQPTLNTSAAAVLSLIKGAQTFPNATFGWVNVKDVANAHIQAFENPDADGRYCLVERVAHYSEVVNILHDLYPDFQLPEKCADEKIYIPTYKVSKEKAESLGVEFVPLEVSIKETVESLRDKGFIRF

SEQ ID NO: 13617 - protein, 496 aa, Synechococcus sp. CC9605
MGAGQSSFVILYHRTPFDESKDKNGKRIWVDQKSPNGIIPTLRNLFRSCEKGTWIAWRRVNDQSNEGTERFEMDNPSPFTLCRIPLEDEQISSFYHITSKECFWPILHTFPTYFNVNNANWKIFEEVNKRFAMAACAEAAEGATVWVHDYNLWLAPGYIRAERPDLKIAFFHHTPFPGNDVFAILPWREQILESLLCCDVVGFHIPRYTENFARAATTLVGAKRGPKVPVDEKFIEVGTALSEGTVTSHLEHNGRTIQLLSSPVGTSPDLIQELCWSPSVESHGELIVQDTKKGRKLILSASRVDYTKGNEELLLAFERLLERRKDLHGQVVLMLACVAAASGMKIYEDTQRSIEEMAGRINGRFSQIDWVPIRFSTRRIPYDEMIAWFCHADVCWITPLRDGLNLVAKEYAAARRNRGGVLVLSEFTGASVVLDGAVLTNPYSNRRMDEAIESALEMDEDEQRDRMSRMTDAVESYTVSDWADEQMSGLSPSTPQ

SEQ ID NO: 13618 - protein, 134 aa, Saccharomyces cerevisiae
MARTKQTARKSTGGKAPRKQLASKAARKSAPSTGGVKKPHRYKPGTVALREIRRFQKSTELLIRKLPFQRLVREIAQDFKTDLRFQSSAIGALQESVEAYLVSLFEDTNLAAIHAKRVTIQKKDIKLARRLRGE

SEQ ID NO: 13619 - protein, 150 aa, Betula pendula
GVKCLLDDEAIRVGGANHGHATKDLYVSIGAGNYPEWKLYIQIIDPDHEDKFDFDPLDVTKIWPEDILPLQPVGRLVLNKNIDNFFAENEQLVFCPSIVVPGVYYSDDKLLQTRIFSYSDTQRHRLGPNYLQLPANAPKCAHHNNHHEGF

SEQ ID NO: 13620 - protein, 590 aa, Candida tropicalis
MSLPFSSSSSTATTSRPPPPSHHISSFSFECIQSTTSSTANNSRSNSINSLLYLNSSNSSMGSNLSDSSASIAATATSNSTPANNLHHLHSIAMPSAQQQEKDDVLHEPDHSQPNHTPTLLSTASYTLQRPPGLQHDYQSSISSISSTSSNSTSSSISPGLINYSPKHSRKPSSLTMNRNMKNLSLNLQESTNGYTKTLPKLASTSTSSLVSNRSKIPNIDSPIKKNVPLLSQNYYNLDSTALQTPTITETPKMPPSLQQQDPLSAGSSYKFPPIINNPTSTQQQLINDRVYNGATDSDSDAGSVSMKRIAKNNIIPPAPPPFALQSKSSPLSTPPRLQSPLGGLDNSSKVVTASPTQSIDQRFNGISINSPAEAMFQTHSNNNSTTLLSTPQNLVYNSKKFNVPEELQESTSINAYPNGPRSVLDNLIYLYSVSSMRILDVSQFDLVINVAKECKNLTRSYDKQVPEQREYHYIPWSHNSSISKDLFDITTTIEQFYNKGLKVLVHCQCGVSRSACVVVAFFMKKFQLGVNEAYELLKNGNVELNIEACDRICPNMSLIFELMEFGDRLNNNEISTQQLLMNSPPTINI

SEQ ID NO: 13621 - protein, 409 aa, Hortaea acidophila
PGVSQCPIAPGETYTYRFRADQFGSSMYHAHYSAQYTAGVYGAMITYGPTQLDYDIDVGPVIVSDWNHIPYFSIVQNVMTMNMSEYPTYSDSGLINGRGRFDCSKPSYGQSFNDSNWLASNYPSTLQWSCVDDAQRSQFRFQSGKTHRLRLMNVGADGFQRFSIDGHTMTVIALDYVPVQPYTTDSIMLGISQRADVLITADASSTSSFWMRSELLNAATCGGLAPPGINEFPIFAEVYYEDADTTLEPVSTTTVKSTSCNNAPIDITQPEYVIPPSTQPFYQDLVLTMTVNDTGSWEWEINGQTYRADYNNPLLYDAADGQTSFPSDPQYNLYNFASNTSVVLNITNATPFPHPIHMHGHNFYVLNVGGVGAPWDGSTVNPTNPLRRDVQIVPPLGFIAIQFEANNPG

SEQ ID NO: 13622 - protein, 192 aa, Brassica napus
  misc_feature (15)..(15): Xaa can be any naturally occurring amino acid
  misc_feature (31)..(32): Xaa can be any naturally occurring amino acid
  unsure (1)..(192): unsure at all Xaa locations
MAKYRQMIWQGRVLXSQFTDEELRSQGRCPXXPEEMGLLLAAFGFDFNTRLYLASHKVYGGEARISALRQVFPRMEDKRSLASSAERARIKGKASLLAALDYYVSMHSDIFISASPGNMHNALVGHRTFENLKTIRPNMALIGQLFLNKSITWVDFQQALGEGHVNRQGQIRLRKPKQSIYTYPAPDCMCHV

SEQ ID NO: 13623 - protein, 225 aa, Bacillus anthracis str. A2012
  misc_feature (181)..(181): Xaa can be any naturally occurring amino acid
  unsure (1)..(225): unsure at all Xaa locations
MIDILLVDDEPRMLELLTLYLTPIGYNCICARSGEEAISHIENQNFKFILLDIMMPKMDGWETCKKIRSFSNVPIIMVTARDQTIDVVQGLKLGADDYVTKPFHEEELFARIEAVLRRTNQHAQIQYHGILWNEAKHSASVHNEELLLTPIEFSLLGLFLRHVNYVLSRDQLIERIWGLNXNTEDRTVDSHIRNLRDKLRKVNFPIDNHLKTVYGVGYRWIDIEH

SEQ ID NO: 13624 - protein, 140 aa, Glycine max
MASFDPSVDSSNSDTLRESNHKKRRKIGDHAAADQNSAAASPWRSEEEQRIYSRRLVEALRRTASSAAKPRAAGQVRETADRVLAATARGRTRWSRAILSRWRKLRTQHKKAKKKEASSINCLKRTRIGNGERRNRLPAV

SEQ ID NO: 13625 - protein, 110 aa, Peptostreptococcus micros
VQGFGNVGSNTAKHLERMSGNILSISEYDKEKGVYTIYNENGFNISELISHFEKYNTLYNYKNAKHISIDQFYSLDVDVIIPCALENSITEDEAQKIRAKLIVEGANGPT

SEQ ID NO: 13626 - protein, 371 aa, Archaeoglobus fulgidus DSM 4304
MAIYAFPEFDGESRRASRIYASARYPSRQEGNVFFDSEEVPNLKYADEMPLKIRNFYSVVAFRPSHIFLSRDVLGGRPLYYGSDMSISSFKSYIDGEVYEVMPGEVVKMDYTGEILERRKYAFEDVFRVGREDVNEMADRILNSLSSYKPRVGCIAFSGGVDSSLLAALYDAPLVSVTASDAEEEWLKTAARMLGKEIEILKVGESAIREVVDTVRKTIETGDFLQLSIAVPVYLTMQFAKSLGFTEIIFGQGADELFGGYKRYEGLSEHELEDALVKDLKSIGESNLVRDCKLAYKNEIKLVTPYLCWDVIDAALKIPPEYKVRREGGKVVRKYILRKIAEKFLPEEIAWRDKKAIQYSTGIAKILKKCL

SEQ ID NO: 13627 - protein, 509 aa, Oryza sativa (japonica cultivar-group)
MEGNARGGGHSEALKNYNLGRTLGIGSFGKVKIAEHKLTGHRVAIKILNRRQMRNMEMEEKAKREIKILRLFIHPHIIRLYEVIYTPTDIYVVMEYCKFGELFDYIVEKGRLQEDEARRIFQQIISGVEYCHRNMVVHRDLKPENLLLDSKYNVKLADFGLSNVMHDGHFLKTSCGSPNYAAPEVISGKLYAGPEVDVWSCGVILYALLCGTLPFDDENIPNLFKKIKGGIYTLPSHLSALARDLIPRMLVVDPMKRITIREIREHQWFQIRLPRYLAVPPPDTAQQAKMIDEDTLQDVVNLGYEKDHVCESLRNRLQNEATVAYYLLLDNRFRATSGYLGADYQESLERNLNRFASSESASSNTRHYLPGSSDPHASGLRPHYPVERKWALGLQSRAQPREIMIEVLKALEDLNVCWKKNGQYNMKCRWSVGYPQATDMLDVNHSFVDDSIIMDNGDVNGRLPAVIKFEIQLYKSRDEKYLLDMQRVTGPQLLFLDFCAAFLTKLRVL

SEQ ID NO: 13628 - protein, 678 aa, Saccharomyces cerevisiae
QFTDIDKLAVSTIRILAVDTVSKANSGHPGAPLGMAPAAHVLWSQMRMNPTNPDWINRDRFVLSNGHAVALLYSMLHLTGYDLSIEDLKQFRQLGSRTPGHPEFELPGVEVTTGPLGQGISNAVGMAMAQANLAATYNKPGFTLSDNYTYVFLGDGCLQEGISSEASSLAGHLKLGNLIAIYDDNKITIDGATSISFDEDVAKRYEAYGWEVLYVENGNEDLAGIAKAIAQAKLSKDKPTLIKMTTTIGYGSLHAGSHSVHGAPLKADDVKQLKSKFGFNPDKSFVVPQEVYDHYQKTILKPGVEANNKWNKLFSEYQKKFPELGAELARRLSGQLPANWESKLPTYTAKDSAVATRKLSETVLEDVYNQLPELIGGSADLTPSNLTRWKEALDFQPPSSGSGNYSGRYIRYGIREHAMGAIMNGISAFGANYKPYGGTFLNFVSYAAGAVRLSALSGHPVIWVATHDSIGVGEDGPTHQPIETLAHFRSLPNIQVWRPADGNEVSAAYKNSLESKHTPSIIALSRQNLPQLEGSSIESASKGGYVLQDVANPDIILVATGSEVSLSVEAAKTLAAKNIKARVVSLPDFFTFDKQPLEYRLSVLPDNVPIMSVEVLATTCWGKYAHQSFGIDRFGASGKAPEVFKFFGFTPEGVAERAQKTIAFYKGDKLISPLKKAF

SEQ ID NO: 13629 - protein, 219 aa, Burkholderia sp. 383
MRDVIDGFLRFQRDIYPQRVELFKQLATSQNPKALFVTCSDSRVVPELLTQREPGELFVIRNAGNIVPSYGPEPGGVSATVEYAVAVLGVRDIVICGHSDCGAMGAISRCTCLDNLPAVANWLRHADAAKVINAAHEYDTPRAKLDGLVRENVIAQLANLRTHPSVALALEQGRMNLHGWVYDIETGGIDALDGATRSFVSLAESPTVVAVDSRNRGSI

SEQ ID NO: 13630 - protein, 322 aa, Parachlamydia sp. UWE25
MSQLTILIVGGAGYIGSHVNKMLNLMGYHTIVVDNLSRGSIKTVLHGTFVQGDLCDPLFLNQLFQKYSIDAVMHFAAYIDVGESVVNPAKYYQNNVVNTLNLLTAMVKSQVKTFIFSSTAAIFGYPLSNKIGESHPCHPINPYGETKWVVEKMLRDFEQAYGLKYSCLRYFNAAGGDPEGKIKNYQTKSSNLIPLILKSLQHETESITIYGTDYATPDGTCIRDYIHIQDLGHAHIKALEQLLNGSSSTSYNLGNGSGFSVKEVIQTVEKVLNKKVSFIEGARRPGDPPILLADTQKAASLLNWHPQFSLAKMIDHAWTAYH

SEQ ID NO: 13631 - protein, 307 aa, Oryza sativa (japonica cultivar-group)
MGRPPCCEKEGVKKGPWTPEEDMVLASYVQEHGPGNWRAVPPRTGLLRCSKSCRLRWTNYLRPGIRRGGFSHHEERLILHLQALLGNRWAAIASYLPHRTDNDVKNFWNTHLKKKLALTSSSSSPPTPTTPLVARGQWERKLQTDIDLARRALRDALSVDDAASPAMISSGPPAPAAAAAYALSERNISVMLSGWAAPPPARKGLSACNPAAATTTPGGAAAESASTAGTSLELTADCCSGGGDSSASNCLPSSMLLACDDGDATATAAGVAPLSAIESWLLLDDSGEPQLALDEQLLDVALRNYAF

SEQ ID NO: 13632 - protein, 336 aa, Yersinia enterocolitica
MTILVTGGAGYIGSHTVLTLLENGEDVVVLDNLSNASAESLLRVSKITGRTPVFYQGDILDRNCLKKIFFEHKIDSVIHFAGLKSVGESVVKPIEYYQNNVTGSIILLEEMVISGVKKLIFSSSATVYGDPEFVPLTEDARIGGTTNPYGSSKVMIEQILKDFAFAYPDFSIRALRYFNPVGAHISGLIGEDPNGKPNNLLPFITQVAIGKLPKLAVYGNDYPTVDGSGVRDYIHVMDLAEGHLCALNNLTHGFKVYNLGSGIGHSVLEMIAEFELISGKKIPYEIVARRPGDIAECWASPELAFKELKWKAKRNLTYMLKHAWNWQQSNPNGYVR

SEQ ID NO: 13633 - protein, 506 aa, Lotus corniculatus var. japonicus
MAAAFTCSAADLHPLLGTGANATAAAEFICSRFGAISNKFTDTAYAVDNTYLLFSAYLVFAMQLGFAMLCAGSVRAKNTMNIMLTNVLDAATGGIFFYIFGFALAFGTPSNGFIGKHFFGLNEFPSPSFDYGFFLYQWAFAIAAAGITSGSIAERTQFVAYLIYSSFLTGLVYPIVAHWFWSSDGWGSPARTENLLFGSGVIDFAGSGVVHLVGAVAGFWGAFIEGPRMGRFDHAGKPVPLRGHSGTLVVLGTFLLWFGWYGFNPGSFITILKSYGESGSGNYYGQWSAIGRTAVTTTLAGCSAALTTLFGKRLQTGHWNVTDVCNGLLGGFAAITSGCSVVDPWAAIICGFVAAWVLIGCNVLAEKFHYDDPLEAAQLHGGCGTWGIIFTALFAKKQYVNEVYAGLPDRPYGLLMGGGWRLLAAHVVQILTIAGWVSVTMGAVFFVLHKLNLLRISPEEEMAGLDMTSHGGLAYEYHEDVGSVQKALKFVFDFYCKGNYYKTLLE

SEQ ID NO: 13634 - protein, 350 aa, Staphylococcus epidermidis RP62A
MKAAVWYGQKDVRVEDREPKAIKDNEVQVKVSWAGICGTDLHEYLEGPIFISTDQPDPLLGQTAPVTLGHEFSGVVENVGKDVSRFKKGDRVVVNPTVSKREKPENVDLYDGYSFIGLGSDGAFAEFTNAPETNVYHLPDNVSAREGALVEPTAVAVQAVKEGELLFGDTVAVFGAGPIGLLTIVAAKAAGASKIFVFDLSEERLAKAKSVGATHVYNSGNVDPVQTVYEHTDNGVDVSFEVAGVGITLQQSIEVTRPRGTAVIVSIFGHPVEFNPLLQMNKGVKLTTTIAYTPTTFQQTIDLIANGSLNVKDVVTDQIELDNIVESGFNQLVNDKSQAKILVRLNGDQK

SEQ ID NO: 13635 - protein, 492 aa, Oryza sativa
MDPYKGRPSSSFNGPLWSTNSGAPVWNNNNSLTVGSRGPILLEDYHLVEKLANFDRERIPERVVHARGASAKGFFEVTHDITHLTCADFLRAPGVQTPVIVRFSTVIHERGSPETLRDPRGFAIKFYTREGNWDLVGNNFPVFFIRDGMKFPDMVHSLKPNPKSHVQENWRILDFLSHHPESLHMFTFLFDDIGIPADYRHMDGSGVNTYTLVNRAGKSHYVKFHWKPTCGVKSLLDDEAVTVGGTNHSHATQDLYDSIAAGNFPEWKLFIQTIDPDHEDRFDFDPLDVTKTWPEDIVPLQPVGRMVLNRNIDNFFSENEQLAFCPGSSCRGSTTPTTSCCRRGSSPTPTRSATGWDQNYLVVPANAPKCAHHNNHYDGFMNFMHRDEEVDYFPSRYDPAKHAPRYPIPSATLTGRREKVVIAKENNFKQPGERYRSWDPARQDRFIKRWIDALSDPRLTHEIRSIWLSYWSQADRSLGQKLASRLSAKPSM

SEQ ID NO: 13636 - protein, 136 aa, Hortaea acidophila
GLSFHWHGLSMRGANEMDGAVGITNDPIPVNGSFIYDFRVEDGQSGTFWYHSHNHLQRAEGLYGGLIVHKPKPWWESRDEAAEHLVMLGDWYHRTAGEALKFFSHPGAFGNEAVPDSILVNGHGAYNCSDAVAARP

SEQ ID NO: 13637 - protein, 473 aa, Burkholderia sp. 383
MPAATAPASAAARLERLPFSGYHKRIFFIIAIAFFFDSVDLGTMTFVLGSIRKEFGLSTAAAGLVASASFFGMVLGAAVAGLLADRFGRRPVFQWSMVLWGAASYLCSTAQSVDALIVYRVLLGIGMGMEFPVAQTLLSEFVPTEKRGRLIALMDGFWPLGFITAGIVAYFVLPQFGWRTVFALLAIPAVFVLVVRRIVPESPRWLEHAGRHAEADTVMHTIEAKVMRSAGVTTLPAPSRLAEPVVARGRGALREIWSGAYRRRTVMVWLLWFFALLGFYGLTSWLGALLQQAGFEVTKSVFYTVLISLGGVPGFLCAAWLVERWGRKPTCIASLIGGGVMAFAYGQSALYGGSMALLIGTGLAMQFFLFGMWAALYTYTPELYGTGARATGSGFASAIGRVGSLIGPYVVGVVLPVFGQGGVFTLGALSFVAAAVAVWTLGIETKGLALEQLAAGDEAGGGGRYAAAADKVS

SEQ ID NO: 13638 - protein, 230 aa, Triticum aestivum
  misc_feature (113)..(113): Xaa can be any naturally occurring amino acid
  unsure (1)..(230): unsure at all Xaa locations
MQIFVKTFTGKTITLEAESSDTIDNVKAKIQDKEGIPPDQQRLIFAGKQLEDGRTLADYNIQKESTLHLVLRLRGGMQIFVKTLTGKTITLEVESSDTIDNVKAKIQDKEGIXPPDQQRLIFAGKQLEDGRTLADYNIQKESTLHLVLRLRGGMQIFVKTLTGKTITLEVESSDTIDNVKAKIQDKEGIPPDQQRLIFAGKQLEDGRTLADYNIQKESTLHLVLRLRGGQ

SEQ ID NO: 13639 - protein, 420 aa, Triticum aestivum
  misc_feature (26)..(26): Xaa can be any naturally occurring amino acid
  misc_feature (52)..(52): Xaa can be any naturally occurring amino acid
  unsure (1)..(420): unsure at all Xaa locations
AWEKSDVEYKDSWVEKGCYVCIIGYXQGGVSEAIKRTNGTYFSEEKLCKWLXQLLMALDYLHTNHILHRDVKCSNIFIARDQTIRLGDFGLAKILTSDDLASSVVGTPSYMCPELLADIPYGSKSDIWSLGCCIYEMTALRPAFKAFDMQALINKITKSIVSPLPTKYSGPFRGLIKSMLRKSPEHRPSAGELLKHPQLQPYVFQVQLKSSPTRNIHPINESLTDKVKKMTVPDDVPDSARRRMVRRNSLGSHRIVTFSKPSPERNSVSSTRSIKEYTTTQSCKELSIDSSQAEDDEVTSKAMITKTSSILRTPKSNPAKTFTSRNRLETPKTSYNRTNRAEPPSVTPVNKSARLARRVSLPLSTYETPIKRSISILDQLGSPDVSMNAPRIDRIAEFPLASSEDPFHSIHKLSSAHGSC

SEQ ID NO: 13640 - protein, 615 aa, Oryza sativa
  misc_feature (377)..(377): Xaa can be any naturally occurring amino acid
  unsure (1)..(615): unsure at all Xaa locations
KARSSSCSCLPFFSSSFVLAPLCTQRIGSRLCLLLSEISLSFVLSLHCSGSWTPCSWFLHFFSLVGLCLSHFCWVLGGGGGWPGGGAAPPPKQEELQPHQVKDQLPSVSYCITSPPPWPEAVILGFQHYIVMLGTSVIIPSALVPQMGGGNEEKARVIQTLLFVAGINTLCQSFFGTRLPAVMGGSYTIVAPTISIILAGRYSNEADPHEKFLRTMRGTQGALIIASTIQIILGFSGLWRNVVRLLSPLSAVPLISLAGFGLYELGFPGVAKCVEIGLPEIILLLVFSQYLPHVIHVAKPVFDRFAVIFTIAIVWLYAYILTASGAYKNARPKTQVHCRVDRSGIISGAPWIRVPFPFQWGAPTFDAGESFAMMMAXSFVALVESTGTFIAVSRYASATMIPPSVLGRGIGWQGIGTLIGAFFGTANGTAVSVENAGLLALTHVGSRRVVQISAGFMIFFSILGKFGAIFASIPLPIFAALYCIFFAYIGACGLSFLQFCNLNSFRTKFIVGFSFFMGLSVPQYFNEYTSVAGYGPVHTGARWFNDMINVPFASKPFVAGLIAYFLDNTIQRRDNGVRRDRGYHWWDKFRSFKTDTRSEEFYSLPFNLNKFFPSV

SEQ ID NO: 13641 - protein, 554 aa, Mesorhizobium loti MAFF303099
MQSALKASSNPDLAIDRDWWRGAVIYQIYPRSYQDSNGDGIGDLKGIIERLPYIAALGADAIWISPFFKSPMKDFGYDVSDYCDVDPMFGTLADFDALTAEAHRLGLKVMIDEVLSHTADIHPWFKESRSSRSNPKADWYVWADARPDGTPPNNWLSIFGGSAWQWDTSRQQYYLHNFLAEQPDLNFHNREVQDALLDVTRFWLERGVDGFRLDTINFYFHSQGLENNPPLPPEERNDQTAPAVNPYNYQDHLYDKSRPENLGFLERFRALLDEYPATAAVGEVGDSQRGLEVVAAYTAGGKRVHMCYSFDFLAPEKISAAKVRSVLEAFGKVASDGWSCWAFSNHDVMRPASRWAAGEADPVAYLKVISALLMSLRGSVCIYQGEELGLGEAELRFEDLQDPYGIRFWPEFKGRDGCRTPMVWDGDAKNGGFSQAKPWLPVPAKHLAQAVNVQQGDQASLLEHYRRFLSFRRAHPALAKGDITFIESEGDTVAFTRRAGNEQVVCVFNLGAKPAKVDLGSRSLQPLPGHGFSGQARPGSIELGGYGAWFGRID

SEQ ID NO: 13642 - protein, 566 aa, Erwinia carotovora subsp. atroseptica SCRI1043
MVAVNDGVSAHPVWWKEAVFYQVYPRSFKDSDGDGIGDLKGLTEKLDYLKALGINAIWINPHYDSPNTDNGYDIRDYRKIMKEYGTMDDFDRLIAEMKKRDMRLMIDVVVNHTSDEHEWFVESKKSKDNPYRDYYIWRDGKDGTQPNNYPSFFGGSAWQKDNATQQYYLHYFGVQQPDLNWDNPKVREEVYDMLRFWIDKGVSGLRMDTVATFSKNPAFPDLTPKQLQNFAYTYTQGPNLHRYIQEMHQKVLAKYDVVSAGEIFGVPLEEAAPFIDQRRKELDMAFSFDLIRLDRAVEERWRRNDWTLSQFRQINNRLVDMAGQHGWNTFFLSNHDNPRAVSHFGDDRPEWRTRSAKALATLALTQRATPFIYQGDELGMTNYPFTSLSEFDDIEVKGFWQDFVETGKVKPDVFLENVKQTSRDNSRTPFQWSNTAQAGFTTGTPWFRINPNYKNINAEEQTQNPDSIFHFYRQLIELRHATPAFTYGTYQDLDPNNNEVLAYTRELNQQRYLVVVNFKEKPVHYVLPKTLSIKQSLLESGQKDKVEPNATTLELQPWQSGIYQLN

SEQ ID NO: 13643 - protein, 110 aa, Peptostreptococcus anaerobius
VQGFGNVGAFTVKNIQKLGGKVVALAEWCKEVGPYAIFKEDGLDFQDMWDYRAEKGNLVDFPGAKMISMDEFWSSQVDVVVPAALENAITAEVAEKIQAKLVCEDANGPT

SEQ ID NO: 13644 - protein, 459 aa, Bacteroides fragilis NCTC 9343
MKQTRGYLLLICIVSAMGGLLFGYDWVVIGGAKIFYEPYFGIENSAALRGWAMSSALIGCLAGALLSGIWSDKYGRKKMLVIASFLFALSAWGTGAVDHFSYFIFYRIVGGLGIGIASNISPVYIAEVSPAHVRGKFVSLNQLTIVLGILLAQLANWQIGEYYTQGSDILSETSVQWAWRWMFWAELIPAGIFFLLSFIIPESPRWLATVHQQEKAQKTLTRIGGETYARQTLEELNQLTQSQGNRQNNEWKSVFRPEMRKVLIIGIVLAIFQQWCGINVIFNYAHEIFSSAGYAVSDVLMNIVVTGITNVIFTFVAIYTVDKWGRRTLMLIGSAGLALIYLILGTCYFLDVNGLPMLLLVVLAIACYAMSLAPVVWVVLSEIFPVKIRGMAIAISTFFLWVACFILTYTFPVLNESIGAEGTFWLYGGICLAGFLFIRQNLPETKGKTLEEIEKELIK

SEQ ID NO: 13645 - protein, 110 aa, Peptoniphilus indolicus
VQGFGNVGQFTVKNIERQGGKVCAIAEWDRNEGNYALYNANGLDFKELAAYKAEHKTLIGFPGAERITEEEFWTKEYDIIVPAALENVITGERAKTINAKLICEGANGPT

SEQ ID NO: 13646 - protein, 110 aa, Peptoniphilus asaccharolyticus
VQGFGNVGTFTVKNIERQGGKVCAIAEWDRNEGNYALYNENGIDFKELLAYKEANKTLIGFPGAERITDEEFWTKEYDIIVPAALENVITGERAKTINAKLVCEDANGPT

SEQ ID NO: 13647 - protein, 301 aa, Triticum aestivum
  misc_feature (268)..(268): Xaa can be any naturally occurring amino acid
  unsure (1)..(301): unsure at all Xaa locations
GTSAKLTFPISLKQPGPKDGTLKCFIRRNRTTQTYYLYIGLTEALADDGKFLLAARKCRKPTYTDYLIYLDMGDMSKGSSTYIGKLRSNFLGTKFTVYDAHPPYDGAIVSKSRSARVIGLNQVSPRVPAGNYPVSHISYELNVLGSRGPRRMNCVMSSIPASAVEEGGKAPTQTEFPLGNLDSFPSIPFFRSKSARIDSAPAQAQDEEKLVLKNKSPRWHEQLQCWCLNFRGRVTVASVKNFQLVASDENGAAGQEHDKVILQVWERXGKDLFTMGLPAPISAFQSFAICLSSFDTKIACE

SEQ ID NO: 13648 - protein, 110 aa, Anaerococcus vaginalis
QGFGNVGSFTLKYLVEEGAKVKYLSIRDENEECGRSALYSEDGFDYESLQKYRDENKTLVGYPKAKKISDKEFWQTKFDILIPAALENIITEKIAKNLDVKLIAEDANGP

SEQ ID NO: 13649 - protein, 319 aa, Zea mays
  misc_feature (302)..(302): Xaa can be any naturally occurring amino acid
  unsure (1)..(319): unsure at all Xaa locations
MPGLVPSTSTSHLFCRSLAAARTLSAAAGHSSSSTSSSSVKMARSALDEVTDTGAFDRTPSTFRSFVSRDASARFPAVAGRYHLYVSYACPWASRCLAYLKLKGLDHAISFSSVKPIFERTRESDDHLGWVFPASAGEVPGADPDPFNGAKSVRDLYEIASTNYTGKPTVPVLWDKQLKTVVNNESSEIIRMLNSEFNGIAENPGLDLNPAHLQASIDEVNGLVYDAINNGVYKCGFAKKQGPYDEAVTTLYEALDKCEEILGKQRYMCGNQLTEADVRLFVTLIRFDEVYAVHFKCNKKLXLREYPNLFHYTKDMYQI

SEQ ID NO: 13650 - protein, 100 aa, Peptoniphilus lacrimalis
VQGFGNVGTFTVKNIARQGAKVVALAEWDKSKGNFALYNEDGINYEELFAYKNEHHTVLGFPGAKEISADEFWTGKYDVLVPAALENVITYDVAKKLDVK

SEQ ID NO: 13651 - protein, 387 aa, Dechloromonas aromatica RCB
MIEDHLNTELAEIASAGLTRRRRVLETPCGRMATVDGTNLLNFASNDYLGLAGNADIARVLADGALQWGAGSGASHLVSGHLGPHELLEKEIAEFTGFPRTLTFSTGYLANLAVTPTLAGRGDAVFADKLNHASLIDAMQLAKANGAEVQRYPHNDVAALEKMLAASTAAHKIIVTDAVFSMDGDLAPLPLIFALAERYDAWLVIDDAHGFGVLGPHGEGSLGHFNLPASPRILLMGTLGKAAGVGGAFVAGSETAIEYLLQKGRSYIFTTAQPPAIACALAKSLQLIRDGDALRANLMDRIGQLRDGLAGLPMKLLPSPTAIQPLIVGDNDAAVALSKALWERGLWVPAIRPPTVPKGTARLRISVSAAHTEADIAQLIAALKELA

SEQ ID NO: 13652 - protein, 528 aa, Kluyveromyces lactis NRRL Y-1140
MLSVRVNLKTRISSGMIRVNAPALKSTMPSVTSLTQLRFSTTVKPAPKLSLDDVNENVLKAKYAVRGRIPMRAEELRDQLKKDPSSLPFSKIISANIGNPQQLDQKPLTFYREVLSLLQHPELLEEADEALQTLYKTDSIKRAKRLLSEVGGSVGAYSQSQGVQGIRETVADFITKRDDGEISYPEDIYLTAGASAAVSYILSILCKGPNTGVLIPIPQYPLYTASLALNNSRPLPYYLREEQNWSTDPEEIEQVVLDAIQKGIKPTCLVVINPGNPTGAILSEQSIQKIFEVAAKYGIVVIADEVYQENVFKGSKFYSMKKVLRNLQKTYHGQYDNIQLASLHSTSKGVSGECGQRGGYMELVGFNHDIRQVFLKLASISLCPVVTGQALVDLMVSPPQPGDESYEQDQQEREDIHDALDERASKLFETFSRLEGIECRKPQGAMYLYPKLDLPYKVIQEAQHLEMEPDEFYCKALLENTGICTVPGSGFGQVPGTYHLRTTFLPPGTEWVETWEKFHKAFFDKYRD

SEQ ID NO: 13653 - protein, 430 aa, Haemophilus influenzae Rd KW20
MVDEQSLLAFDTQHIWHPYSSVSSDMPLYAVERADGVMITLKDGRRLIDGMSSWWAALHGYNHPRLNAAAQNQLAKMSHIMFGGFTHDPAVELAQLLVQILPNGLDKIFFADSGSVAVEVAMKMAIQYQHAKGEVQRQKFATIRSGYHGDTWNAMSVCDPTTGMHHLFHHSLPVQYFLPQPNIPFNESWNDCAIEPLADLLKKKGNEIAALILEPVVQGAGGMYFYSPTYLVKAQALCKQYGILLIFDEIATGFGRTGKLFAAEHAGISPDIMCIGKALTGGYLTLSASITTTEIAQTICSGEAKCFMHGPTFMANPLACAIAAESIRLLLESPWQQNIQRIESSLKQQLSPLSEKDYVKEVRALGAIGVVEMKSAVNMKTLVPRFVEQGVWIRPFGKLVYVMPPFVIKDDELQKLTEGMILALTQEYEH

SEQ ID NO: 13654 - protein, 293 aa, Glycine max
MHIQFFNICKKFVCCSHHNIWRQAEIPVKTFHYYHPDTKGLDFAALLNDVKNAPDCSFFLLHPCAHNPTGVDPTEEQWREISYQFQVKNHFPFFDMAYQGFSSGDLDKDAIALRIFLEDGHLIGCAQSFAKNMGLSEHKAGCLSVLCQSIKQVAALKSQLQLMSHAMYSSIPFQGISLVTMILSEPDTEALWRKEIKVMAKRIQTMRTTLRHCLENLHSSFNWEHITDQVGMFCFSGLTPDQVQQMEKLFHIYMTPDGRMSMSGVTSSNVDYLANAIHQVTRIDEEALRSCYV

SEQ ID NO: 13655 - protein, 319 aa, Agrobacterium tumefaciens str. C58
MRTIYRYDICLRLKPIAPTPVKERLLPLTGLFRRPCFQQTGETPMYDVSANGANIPALGFGTFRIPEDDVRRILPEALKLGFRHVDTAQIYKNEGAVGEVIAQSGISRHDIFLTTKVWVDRYRHDDFLASVDESLAKLKTDYFDLLLLHWPKSDVPLAERMGALNAVRKAGKARNIGISNFNVALTEEAVKLSDTPLATNQIEYHPYLDQTKVISAARKHGMSVTAYYLMADGKVPNDPVLKDIGAKHGKTAAQVTLRWAVQQPDIVALSKTATESRLKENFDIFDFALSEEEMQAIHALAKPNGRIVSPGHLAPDWDD

SEQ ID NO: 13656 - protein, 175 aa, Mesorhizobium sp. BNC1
MAETATKLPVKSEKSVASPEGWAPFESLRREIDRLFDDFHPFGWRLPSRTAFDLEIPKFSRAAWQVAPAMDLVEKEKEYEITAELPGIDEKNVEIKLSNHTLTIKGEKKEEKEEKDKDYYLSERRYGSFQRSFRVPDGVDADKIEATFTKGVLTVRLPKTAQAQKADKKIEVKAA

SEQ ID NO: 13657 - protein, 159 aa, Brassica napus
MDNSAPDSLPRSETAVTYDSPYPLYAMSFSSSTHRIAVGSFLEDYNNRIDILSFDSDSMSLKPLPSLSFEHPYPPTKLMFSPPSLRRSGGGDLLASSGDFLRLWEVNEDSSSAEPVSVLNNSKTSEFCAPLTSFDWNDVEPKRLGTCSIDTTCTIWDVE

SEQ ID NO: 13658 - protein, 148 aa, Paxillus involutus
NPFTEFDRLFDDAFAARFRPPTTTSEVGHAVNSNNAVTSFRPRMDLHEANDGNTVTATFELPGMKSEDVTIDIHQGRLTVSGETTSSHAQEEGGYAVRERHYGKFSRTLQLPIGTKPDDVNAKMDDGVLRVTFPKVTAEQQRHRITVQ

SEQ ID NO: 13659 - protein, 148 aa, Paxillus involutus
NPFTEFDRLFDDAFAARFRPPTTTSEVGHAVNSNNAVTSFRPRMDLHEANDGNTVTATFELPGMKSEDVTIDIHQGRLTVSGETTSSHAQEEGGYAVRERHYGKFSRTLQLPIGTKPDDVNAKMDDGVLRVTFPKVTAEQQPHRITVQ

SEQ ID NO: 13660 - protein, 261 aa, Solanum tuberosum
MAAGRWNLEGCTALVTGGSRGIGYGIVEELASLGASVYTCSRNQKELNECLTQWRSKGFKVEASVCDLSSRSEREEFIKNVANHFDGKLNILVNNAGIVIYKEAKDYTMEDYSLIMSINFEAAYHLSVLAHPLLKASQRGNVVFISSISGASALPYEAVYGATKGAMDQLTRCLAFEWAKDNIRVNGVAPGVIASSMVEMTIQDPEQKENLDKLIDRCALHRMGEPKELAAVVAFLCFPAASYVTGQIIYVDGGFMANGGF

SEQ ID NO: 13661 - protein, 310 aa, Pseudomonas aeruginosa PAO1
MYLVCGEALFDVFSLESAARSNELGFTAIAGGSPFNVAVGLRRLGVEAALFGGLSSDYLGARLRRVLEEEGVDCGFLVPSDAPTTLAMVGLDASGSAQYQFRGEGCADRQVRLEHLPTLDGRIRGLHVGSYTLVVTPVADTLLALVRRESGRRLVSLDPNVRLDPQPDIDLWRRRVEAFASHAHLIKASEEDLALLYPGRDPGEVARGWLNPRCRLVFVTHGGAGASVHCTHGSWSRPADTALPLRDTVGAGDTFQAATLAYLRRLDADSPAGLAALSREAIDAMLAFAIRAAAVTCSRVGPDLPFAHEL

SEQ ID NO: 13662 - protein, 132 aa, Brassica napus
MAYEENFQKTSEPKYDCLLFDIDDTLYPFSSGLATLVKNNIQEYMTQKLGIEEDKVQELCLSLYKIYGTTMAGLKAVGYDFDYDDFHRFVHGRLPYATLKPDPVLRNIILSLPIRKVVFTNADKAHAAKIIA

SEQ ID NO: 13663 - protein, 216 aa, Zea mays
MAEVEAPATAVEAPAAAVATTTPEVAAPEAGAATEAKGPHKLHRQWTFWYDIQTKTKSGAAWGTSLKKAYTFDTVEEFWSMYDQIFRPSKLSGNADFHLFKAGVEPKWEDPECANGGKWTVPCNRKATFETMWLETLMALIGEQFDETEDICGIVASVRARGDKLALWTRTASNEAVQVNIGKKWKDVIDYNDKITYTFHDDSKRDKPSRGGRYTV

SEQ ID NO: 13664 - protein, 192 aa, Escherichia coli
ADERPGKINLGIGVYKDETGKTPVLTSVKKAEQYLLENETTKNYLGIDGIPEFGRCTQELLFGKGSALINDKRARTAQTPGGTGALRIAADFLAKNTSVKRVWVSNPSWPNHKSVFNSADLEVREYAYYDAENHTLDFDALINSLNEAQAGDVVLFHGCCHNPTGIDPTLEQWQTLAQLSVEKGWLPLFDFA

SEQ ID NO: 13665 - protein, 294 aa, Cryptococcus neoformans var. neoformans JEC21
MPPQPPAPPVFYSFPDTEVLVDSLANFVVKAQRDAVDKRGKFTIALSRGSLAANLRGLVGQQNVQWDKWEVFFVDEAAVPLEDEDSNYRSNYLSFLSHVPIPREQIHTIDINQLDDLEELADQYEKQLVNHFAASNAARYPTFDLMLLGIGPDGETASLFPGHEILSEKDAWVSFIDDAPRGPARRITMTFPVLNHCYRAVFVATGKEKTEMLHTILDQPEAGLPCSRVRPASPGLVFWFADAAAASATQYPPTTFRWIDNEKEAQEAVDAAKRRAARKLAEADSEAEVLKKSV

SEQ ID NO: 13666 - protein, 197 aa, Brassica napus
  misc_feature (143)..(143): Xaa can be any naturally occurring amino acid
  unsure (1)..(197): unsure at all Xaa locations
MCGILAVLGCTDDSQAKRVRVLELSRRLRHRGPDWSGIYQHGDNYLAHERLAIVDPDSGDQPLFNEDKTIVVTVNGEIYNHEELRKDLKNHKFRTGSDCDVISHLYEEHGENFVDMLDGVFSFVLLDTRDNSFMVARDAIGVXSLYIGWGLDGSVWISSEMKGLHEDCEHFEVFPPGVLYSSKSGGFKQWYNPPWYN

SEQ ID NO: 13667 - protein, 141 aa, Pinus pinaster
MAPKAAEKKPAEKKPVAEKAPAEKKPAPKAEKKLPKEGGDKKGKKKHKKSVETYKIYIFKVLKQVHPDIGISSKAMGIMNSFINDIFEKLASEASKLARYNKKPTITSREIQTAVRLALPGELAKHAVSEGTKAVTKFTSA

SEQ ID NO: 13668 - protein, 110 aa, Anaerococcus hydrogenalis
QGFGNVGSYTLKYLIEEGAKVKYLSIRDESEECGRSALYSEDGFDYESLQKYREENKTLAGYPDAEKISDETFWKTKFDILIPAALENIITEEIAKNLDVNKAAEDANGP

SEQ ID NO: 13669 - protein, 511 aa, Bacillus clausii KSM-K16
MRIVTGEEMASIDAITMNKVGLPGAVLMENAGRGIARKLLDHYGRKRRFFIVIGSGNNGGDGFVVARVLKDEGAEVQVFIVPEESRYKGDAKLHKRVFEQSGYRWKYWKDIESQWPAMLYETDIIVDALLGTGISGQVKEPYASVIASINKLKNEIVSIDLPSGVPAGSAELNHEAIKADRTLTLQWTKVSYYLEETKPYYGEVDVVPIGIPPNTLRHLASQRYIWGKNEVVNSWVMSKPNAHKGDNGRVGIIAGSEAMPGAAALAGSAAVRSGAGFTTIATVAQNVPVIASHVKEAMYTIFSEKHGYLAPTETELAAFMDNKQSIAVGPGLGRTPALTKMVAYLLVHFKGVLILDADALHCLKECGPIVQERTAPTVITPHPGEMAMLIDQSVSYVNKNRFEVAESYAEQYGVYVVLKGPNTIVAEPSGCISVNVTGNAGLAKGGSGDVLTGMVAALVARQRIQPALSSAVFFHGYAADLLAKQRHVLATITPSDIIEHLPEAFSIVDDD

SEQ ID NO: 13670 - protein, 298 aa, Bacillus anthracis str. A2012
MPNIAVVGSISMDLVAVSKKRPKAGETVIGEAFHTIPGGKGANQAVAAARLGANVAMVGAVGDDNYGTVVKRNLENERVFIDYVVPVTDAATGIAHIVLAEEDNSIVVVQGANALVNESVVNRSKDLLIKADMVVLQLEIPLETVKYVLAICQEHKIPVMLNPAPAQVLSEDILEKATYITPNEHECRIVLDDFTSPIEDLLAKYPNKLLMTEGSNGVRFHNGTEIVHVPSIAVDVVDTTGAGDTFNGALAVALSEGETLQKAIRFANIAGGLSVTKLGAQGGMPTRDRVREVQVIVG

SEQ ID NO: 13671 - protein, 168 aa, Campylobacter lari RM2100
MKKPYVIWLTGLAGSGKSTIGRALYEKLKRECENIIYLDGDELRELLGHYGYDKQGRIDVALKRSQFAKFLNDQGMIVVVTTISMFDEIYKYNRENLKNYFEIYIKCPMEELIKRDQKGLYTKALNGEIKNVVGVDIKYDEPNAHFILDNSLQDNLNEKVNMIVKQLL

SEQ ID NO: 13672 - protein, 197 aa, Arabidopsis thaliana
  misc_feature (112)..(112): Xaa can be any naturally occurring amino acid
  unsure (1)..(197): unsure at all Xaa locations
DPRVRGIESLTDAQAQILVGHDRESHGRDLFAAIEKGDFPKWKLFIQVMPELDAETYRVHPFDLTKVWPKSDYPLIEVGQFELNRNPVNWYQDVEQSAFAPSNLVPGIGPSXPDKMLQARLFPYSDAQRYPLGVNHHQIPVNAARCPVHSNHRDGAMRVDGNYGGLPHYEPNSYGQWQEQPQYREPPMKIRGDADFW

SEQ ID NO: 13673 - protein, 110 aa, Peptoniphilus harei
VQGFGNVGSFTVKNIERQGGKVYALAEWDKKEGNYALYNENGLDFKKLLDYKNEHHTLIGYPDAKQISADDFWTGEWDILIPAALDNVISGDVAQKLNVKLVCEEANGPT

SEQ ID NO: 13674 - protein, 111 aa, Anaerococcus prevotii
VQGFGNVGSFTLKYLVEEGAKVKYLSIRDENEECGRSALYSEDGFDYESLQKYRDENKTLVGYPKAKKISDKEFWQTKFDILIPAALENIIGEKIANVQGVAKAAEDANGP

SEQ ID NO: 13675 - protein, 163 aa, Zea mays
  misc_feature (117)..(117): Xaa can be any naturally occurring amino acid
  unsure (1)..(163): unsure at all Xaa locations
MSAAEGAVVFSEEKEALVLKSWAIMKKDSANLGLRFFLKIFEIAPSARQMFPFLRDSDVPLETNPKLKTHAVSVFVMTCEAAAQLRKAGKITVRETTLKRLGGTHLKYGVADGHFEXVTRFALLETIKEALPADMWGPEMRNAWGEAYDQLVAAIKQEMKPSE

SEQ ID NO: 13676 - protein, 509 aa, Glycine max
WLGRDIMATAAVIGLSGGKRLLSSSYHYSDIIEKLSYGSDFGSTHYQIVPTKSLIAAKKSSNYTPTFPASNQQNQSIKALKEHVDDAPTIADSWFQSYNSNDLEVESSEMGYSVEALLLLQKSMLEKQWNLSFEREVLTEHSSKGKKCKKVAVTCSGVSARQRRMNTKRKTAIKTCGAMQLKSKISPELLQHRLKGYVKGIVSEELLSHAEVVNLSERIKVGLSLEEHKSRLKERLGCEPSDDQMAISLKISRTELRARMIECTLAREKLAMSNVRLVMSIAQKYDNLGAEMGDLVQGGLIGLLRGIEKFDSSKGFKISTYVYWWIRQGVSRALVENSRTLRLPAHLHERLSLIRNAKFRLEERGITPTIDRIAKYLNMSQKKVRNATEAISKIISLDREAFPSLNGIQGETHHSYIADDRVENIPWNGVDEWALKDEVNRLINVTLVEREREIIRLYYGLEKECLTWEDISKRIGLSRERVRQVGLVALEKLKHAARKRQMEAMLLKH

SEQ ID NO: 13677 - protein, 215 aa, Bacillus anthracis str. A2012
MKFFIDTANINEIKEANALGVLAGVTTNPSLVAKEGVDFHERIREICNVVEGPVSAEVISLEADKMIEEGKELAKIAPNVVVKVPMTTEGLKAVKAFSDLGIRTNVTLVFSAVQALLAARAGATYVSPFLGRLDDIGHNGMDLIRQIAEIFAIHGIETEIIAASVRHSVHVTDAALNGAHIATIPANVIASLVKHPLTDQGIEKFLADWEKTQEK

SEQ ID NO: 13678 - protein, 93 aa, Peptoniphilus asaccharolyticus
SVQGFGNVGSFTVKNIERQGGKVCALAEWDKKEGNYALYNEDGMSFKELSEYKAERKTLIGFPGAQQISNDEFWEGEYDILIPAALENVIAGE

SEQ ID NO: 13679 - protein, 411 aa, Nicotiana plumbaginifolia
MNALAATNRNFKLASRLLGLDSKLEQCLLIPFREIKVECTIPKDDGSLATFIGFRVQHDNARGPMKGGIRYHPEVDPDEVNALAQLMTWKTRVANIPYGGAKGGIGCSPSDLSISELERLTRVFTQKIHDLIGVHTDVPAPDMGTNPQTMAWILDEYSKFHGYSPAVVTGKPIDLGGSLGRDAATGRGVLFAAEALLRDHGKSIAGQRFVVQGFGNVGSWAAQLITEQGGKIVAVSDITGAIKNKNGIDIASLLKHVKENRGVKGFHGADSIDPNSILVEDCDVLIPAALGGVINRDNAKDIKAKFIVEAANHPTDPEADEILAKKGVVILPDIYANSGGVTVSYFEWVQNIQGFMWDEERVNTELKDYMNRGFKDVKDMCKTHNCDLRMGAFTLGVNRVARATTLRGWEA

SEQ ID NO: 13680 - protein, 332 aa, Parachlamydia sp. UWE25
MGMVKPIVDLAKYLEKGILKPPFAAIIEHFHDSYLLATKHSCSLETSHRLFMQLFELAMKQSENPYQFEIFHQSIRSPFDYYQFGLDFIRPLINFEKSTVLGREQLAKIYQQMAQGDNVILLANHQTEPDPQILSLMLENIDKKLATEMIFIAGHRVISDPLAIPMSMGRNLLCIYSKKHISHPPEKKTQKVSHNQRTMRKMSELLSEGGRCIYVAPSGGRDRRNSEGQITIAPFDPQSLEMFWLMAQQADHPTHFYPLSLHTYDLMPPPKHVEKELGEKRTAQFTPVHLAFSSEIDMEHFSESEHLDKKTKRDKRAEFIWKIVRRNYELFN

SEQ ID NO: 13681 - protein, 148 aa, Paxillus involutus
  misc_feature (128)..(128): Xaa can be any naturally occurring amino acid
  misc_feature (132)..(132): Xaa can be any naturally occurring amino acid
  unsure (1)..(148): unsure at all Xaa locations
NPFTEFDRLFDDAFTARFRPSTTTSEVGHAFHSNNGVTSFRPRMDLHEANDGNTVTATFELPGMKSEDVTIDIHQGRLTVSGETTSSHAQEEGGYAVRERHYGKFSRTLQLPIGTKPDDVNAKMDNGXLKVXFPKVAAEQQHHRITVQ

SEQ ID NO: 13682 - protein, 114 aa, Triticum aestivum
  misc_feature (4)..(5): Xaa can be any naturally occurring amino acid
  misc_feature (13)..(13): Xaa can be any naturally occurring amino acid
  misc_feature (22)..(22): Xaa can be any naturally occurring amino acid
  unsure (1)..(114): unsure at all Xaa locations
PRQXXLRVREFTXAEIEHFVDXEDKSHPKFVDVADLEFLMFPRELQLSGESAKLTKLAIHVENQVGQYILKRIALALILHLDKEICDLLETSQGRRESGQLTTAVGRVALMLEE

SEQ ID NO: 13683 - protein, 148 aa, Paxillus involutus
  misc_feature (78)..(78): Xaa can be any naturally occurring amino acid
  misc_feature (132)..(132): Xaa can be any naturally occurring amino acid
  unsure (1)..(148): unsure at all Xaa locations
NPFTEFDRLFDDAFTARFRPSTTTSEVGHAFHSNNGVTSFRPSMDLHEANDGNTVTATFELPGMKSEDVTIDIHQGRXTVSGETTSSHAQEEGGYAVRERHYGKFSRTLQLPIGTKPDDVNAKMDNGVLKVXFPKVAAEQQHHRITVQ

SEQ ID NO: 13684 - protein, 487 aa, Nocardioides sp. JS614
MSMFKWELVDPKPGEAVAPHQRLSWGKTVGLGAQHVVAMFGATFVFPLIMGLNANLAIMMSGIATICFLLIVQGKVPSYLGTSASFVGAAAAIYAYQGGDGPGGPADVTGAILVAGIVLAIVGVIVHYLGADSVNAVLPPVVTGAVVMLIGFNLAPVATLTYMPSDPWVALITMTAVILMAVGLRGFFGRIAVFLGLIFGYLLSVVWDWIFGQSTLPLPGNPEPGPHDRVNWDAVKNADWFGFPVHTKDGLVGNQAFTDGYANVGWHMPSFSIAFILLALPAVIALVAENIGHVKAVAEMTKTDLDPVMGRAIAADGVGTVIASTVGGSPTTTYAENIGVMAATRVYSTAAYFVAAIVAILLGLVPKFGQIVNATPPAVLGGITLVLYGMIGLLGAKIWKENGVDFAKPINLVPVAAGIILAIGNADLKITDDFHLTGIALGTLVVVLGYHLARVVAPKDLDDGTMIAVGHEGVHAEDHAAPHDHHH

SEQ ID NO: 13685 - protein, 638 aa, Magnaporthe grisea 70-15
MSWRNQGITGSNNIPLGKTRRFGGEAEPEDAQPSFNSGSNSAPSQPSYSGGFNGGDRDAKRGRSPEPRSEADGPKRRKKRNRWGDATDNKAAGLMGLPTAVMANMTAEQLEAYTLHLRIEEITQKLKIDDVVPADGDRSPSPAPQYDNQGRRVNTREYRYRKKLEDERHKLIEKAIKTIPNYHPPSDYRRPTKTQEKVYVPVNDYPEINFIGLLIGPRGNTLKKMESESGAKIAIRGKGSVKEGKGRSDAAHTSNQEEDLHCLIMADTEEKVNKAKKLIHNVIETAASIPEGQNELKRNQLRELAALNGTLRDDENQACQNCGQIGHRKWECPEKQNYTTNIICRVCGNAGHMARDCPDRQRGASWRNDGPGFRSAGRIGAGPTSGAEVVDQEYEALMQEINGGPGGAAPARIEAGPGGPPTGPSGGGDNARPWQRGPTGGAAPWRQRNNDRENNDDGPRGGGFGGGSGGPAPWARDRQNRQHEDRDRGDGDQPWRNRDRGDRDHRDRDRERDRDRDRGYNSHGGDNGYSAASASAPAPWSQPAGAPGYGAYPGYGSYGGPPGMGAPGMPAPPGLPGAPPGLPGAPGLNAPPGLPSDFNVSALIAQYSGGAPPPPPPSGDAPPPPPGDQSPPPPPPGA

SEQ ID NO: 13686 - protein, 478 aa, Haemophilus influenzae Rd KW20
MSRRLRRTKIVCTMGPSTDRDNNLEKIIAAGANVVRMNFSHGTPDDHIGRAERVRSIAKKLGKTVAILGDLQGPKIRVSTFKDGKIFLNVGDKFILDAELPKGEGTQESVGLDYKTLPQDVVPGDILLLDDGRVQLKVLSTDGAKVFTEVTVGGPLSNNKGINKLGGGLSADALTEKDKADIITAARIGVDFLAVSFPRSSADLNYARELAQQAGLNAKIVAKVERAETVANDEAMDDIILASDVIMVARGDLGVEIGDPELVGVQKKLIRRSRQLNRAVITATQMMESMISNPMPTRAEVMDVANAVLDGTDAVMLSAETAAGQYPSETVAAMASVCLGAEKMPSINVSRHRMDKEFETIEESVAMSAMYAANHMKGVAAIVTLSSTGRTPLLMSRISSGLPIFALSRNQETLNLCALYRGVTPIYHGEESRTEAGAKAAPQSLKEKGYLSTGDLVLVTQGGQGATQTNVCRTLIVE

SEQ ID NO: 13687 - protein, 332 aa, Rhodobacter sphaeroides 2.4.1
MKVLVIGGCGFIGSHVVDLLLQEGCRVRVFGRRPEAFRPPLAGVDYVMGDYSDPALVFRALHDVEAVLHLASATVPATANLNPGLDIEANLLATVRLLDVMRATGKRRLVFLSSGGTVYGVPQADPVPEEHPLRPIGSYGIVKVAIESYIRMEQALYGLAPVVLRASNPYGPRQGHTGVQGIIGTHLWRAARGEPVEIWGDGQVTRDFIHVRDLAALCVATLRSDTCGFFNAGSGTGTSVAEIVAGIDRTVQASGGPPVRALRQPGRGYDVPRVVLDISRARAAFDWAPRIGLEEGLAETWRWVCTTLAHETAAEAPPPRAKLARSRRSARF

SEQ ID NO: 13688 - protein, 431 aa, Bifidobacterium longum [sequence omitted]

SEQ ID NO: 13689 - protein, 113 aa, Allium cepa
  misc_feature (112)..(113): Xaa can be any naturally occurring amino acid
  unsure (1)..(113): unsure at all Xaa locations
EKKLPAKESSTTADKKKKRKSKSVETYKIYIFKVLKQVHPDIGISSKAMGIMNSFINDIFEKLAQESAKLARYNKKPTITSREIQTSVRLVLPGELAKHAVFLGTRRWLKFXX

SEQ ID NO: 13690 - protein, 433 aa, Ralstonia eutropha JMP134
MTPSDVKATLSFSDGSPSVELPIYKGTVGPDVIDIRKLYGQTGKFTYDPGFMSTASCNSKITYIDGDKGELLYRGYPIEQLAQKCDHLETCYLLLKGELPNAKQKEEFTGHVMNHTMVHEQLQFFLRGFRRDAHPMAVLTGLVGAMSAFYHDAMDIDDPHQREISAIRLIAKMPTMVAMAYKYNIGQPYIYPQNDLSYSGNFLRMLFGTPCAPYTVNPVLERALDRIFILHADHEQNASTSTVRLAGSSGTNPFAAIAAGVACLWGPAHGGANEAALKMLEEIGSVDNIGEFIKQVKDKNSGVRLMGFGHRVYKNYDPRAKLMRETCHEVLNELGLHNDPLFKLAMELEKIALEDEYFVSRKLYPNVDFYSGIVQRALGIPTSLFTCIFALARTPGWISQWEEMITDPEYKIGRPRQLFNGAASRDVPDISKR

SEQ ID NO: 13691 - protein, 458 aa, Oryza sativa
MAGGFRVLHLVRPFLAFLPEVQSADRKIPFREKVIYTVISLFIFLVCSQLPLYGIHSTTGADPFYWMRVILASNRGTVMELGITPIVTSGMVMQLLVGSKIIEVDNSVREDRALLNGAQKLLGILIAIGEAVAYVLSGMYGSVSQLGTGNAILIILQLFFAGIIVIWLDELLSEGNIIWKAFSPTTINSGRGAEFEGAVIALFHLLITRTDKVRALREAFYRQNLPNVTNLLATVLVFLIVIYFQGFRVVLPVRSKNASGQQGSYPIKLFYTSNMPIILHSALITNLYFISQLLYRRYSGNFLVNLLGKWKESEYSGHSVPVGGLAYYVTAPSSLADVLANPFHALFYVVFMLSACALFSKTWIEVSGSSAKDVAKQLKEQQMVMPGHRESNLQKELNRYIPTAAAFGGVCIGALTVLADFMGAIGSGTGILLAVTIIYQYFETFEKERATELGFFGF

SEQ ID NO: 13692 - protein, 250 aa, Triticum aestivum
MGGCCCCFPSKPPRENPMHPIAEPLIKRKPNHTPPYHQRPPVTTHAHKGMNAVVRLKTGFERFRTNVYNKNPKLFESLRKDQSPKYMVFACADSRVSPTITLGLNPGEAFTVRNIAGMVPAYQKTRHCSVGSAIEFAVVVLKVECIVVIGHSRCGGIRELLSLKDEGPNAYHFIEDWVKIGMEAKKKVQRENRLLPFDDQCTVLEKEAVKFSLRNLKSYPFVKDRLNKGTLNLIGARYDFVHGSFETWNA

SEQ ID NO: 13693 - protein, 400 aa, Cryptococcus neoformans var. neoformans B-3501A
MCSSHATAVESVSPAPRKSQYEVKYDPDLVLKSAEFKELKQGDKELEDPKANLACAYDEKHNVKMINKPIPKARQDEVVVHIKATGICGSDVHFWKHGQIGPTMIVTDTCGAGHESAGEVVEVGPGVEQWKVGDRVAIECGVPCGQASCGPCVTGRYNACPQVVFFSTPPYHGTLTRYHAHPASWLHRLPDNLSYEEGALCEPLAVALAALERAGNRLGDPVLICGAGPIGLVTLLASHAAGCTPIVITDLQASRLEVAKKLIPTVKTVQIERSWTSKETSEAIKEAAGTGIRVAIDATGFESSITAAIYSVVFGGKVFVIGAGPSEQKYPFGYCSANEIDLQFQYRYAHQYPKALRIVSGGLINLKPLLTHTFPLNKAVEAFHVAADPTKGAIKVQIID

SEQ ID NO: 13694 - protein, 592 aa, Ralstonia eutropha JMP134
MVAVKTGLPRRRFDVVIVGAGGAGMRASLQLAEAGLNVAVLSKVFPTRSHTVAAQGGIGASLGNMSEDNWHYHFYDTIKGSDWLGDQDAIEFMCREAPKVVYELEHFGMPFDRNPDGTIYQRPFGGHTANYGEKPVQRACAAADRTGHALLHTLYQRNVRAKTHFFVEWMALDLIRDQDGDVLGVTALEMETGEVYILEAKTTLFATGGAGRIYAASTNAFINTGDGLGMAARAGVPLEDMEFWQFHPTGVAGAGVLITEGVRGEGGILRNKDGERFMERYAPTLKDLAPRDFVSRSMDQEIKEGRGCGPNGDYVLLDLTHVGAETIMKRLPSIREIGMKFANVDAIKEPIPVVPTIHYQMGGIPTNFHGQVVVPKNGNPNEVLNGFYAIGECSCVSVHGANRLGTNSLLDLVVFGRAAGNHIIAQNLKQKEHKPLPADAADLAMSRLAKLQATSSGEYTQDVANDIRKNMQSHAGVFRTQKLMDEGVERILEVSERANNIHLKDKSKVFNTALVEALEVANLVEVAKATMISAAARKESRGAHAHSDFPNRDDQNWLKHTLFYSEGNRLDYKPVKMEPLTVESVPPKARTF

SEQ ID NO: 13695 - protein, 692 aa, Cryptococcus neoformans var. neoformans JEC21
MPHHDTVPAMPPSDAAKPDDLAIQDLSREVTSTGNIRLAAKRLAQSAQAEKLRNLKERASTRPQVAPPYARWADDPEEAEYLQSNVHAQAAHVEDQVLVSDEEDEEEKEAMGHMQEVVDGLWVGDLVAANDDDELEKNGIKNILSALRPSLKFSDKYAVYPLEIDDAADTDLLSHLPSCVAWIKEILDLRQKAAEPSSQQKNGTGNGESLKRSPDIDTVAQRGKPGGVLVHCQAGMSRSASIVAAYLMTEYDIDPMEAVAMIREKRPVIEPSATFWHQLGLFYNTDGKVSLKDRSTRQYYMERTTTQFINGDGTAPSVEKMAKYPASPSPSNPPTPKDHARRKIRCKMCRRHLAVREHMMDHILDQAPAVPASRPRTPSGASISSQRASFSSNAGMRFTDVMEEAGAGLLTDRERRGSQVSDVINPLTGLPGALSRRSSAGAGSNGALSPRATQTLYERDTVTSPLSISHNNNNNNNTTHLASRRESLLRNHSEPAGTMPPPVPSPTSHSTTSVPAPAPAQRALQSADQLNARLPPQLLALRMAGMGGAGASAPASPGTNTPEKERRDQSPSSANTNGGTGAAARRLSSLAMTSKDEKEATKLYERRASAGEGMYGPPPILVNPKCSGYFVEPLTWMEPVLSKGQVAGKLVCPNEKCGVKIGNFDWAGVQCGCKEWVTPGFCIHRSKVDEVF

SEQ ID NO: 13696 - protein, 191 aa, Fragaria x ananassa
MASSTTNNPALDLDSDTPENPGHELAQFASGCFWGSELRFQRVVGVIKTEVGYSQGHVHDPNYRLVCSGTTNHSEVVRVQFDPQVCPYSDLLSVFWSRHDPTTLNCQGGDVGTQYRSGIYYYNEEQDCLAKKSKEAKQKEFKDKRVVTEILPAKRFYRAEEYHQQYLEKGGGNGNKQSAQKGCNDPIKCYG

SEQ ID NO: 13697 - protein, 494 aa, Synechococcus sp. CC9605
MVVSAGIFSRDMGQFDLNRRTKIVATIGPATESPERIKELVKAGATTFRLNFSHGDHSEHAARIATIRQVSEELGQTIGILQDLQGPKIRLGRFAEGPITLANGDPFTLTSRPVSCDKTIATVTYDKLADEVTAGSRILLDDGRVEMKVDTVDKAEQTLHCTVTVGGVLSNNKGVNFPDVQLSVRALTDKDKTDLAFGLSQGVDWVALSFVRNPSDMEEIRGLICEQGHETPVVAKIEKFEAIDQIDSILPLCDGVMVARGDLGVEMPAEEVPLLQKELIRKANSLGIPIITATQMLDSMASSPRPTRAEVSDVANAILDGTDAVMLSNETAVGDFPVEAVQTMATIARRIEKDYPQRSIDSHLPSTIPNALSGAVSTIASQLNASAILPLTRSGATARNVSKFRPAAPILAITPDRTVACRLQLVWGVTPLVIPEGERTTQTFQAAMLKAKELNLLKESDLVVQSAGTHAGVSGSTDLVKVSIVGNEAEATLI

SEQ ID NO: 13698 - protein, 246 aa, Arabidopsis thaliana
MEGGASNEVAESSKKIGRGKIEIKRIENTTNRQVTFCKRRNGLLKKAYELSVLCDAEVALVIFSTRGRLYEYANNSVRGTIERYKKACSDAVNPPTITEANTQYYQQEASKLRRQIRDIQNLNRHILGESLGSLNFKELKNLESRLEKGISRVRSKKHEMLVAEIEYMQKREIELQNDNMYLRSKITERTGLQQQESSVIHQGTVYESGVTSSHQSGQYNRNYIAVNLLEPNQNSSNQDQPPLQLV

SEQ ID NO: 13699 - protein, 480 aa, Oryza sativa
MVSSEISSVTTTHAQGPKLFRGKILLPMGPPDVVPSENVEFDFSDVFGPTAVQTPTDLSILTPDSPAPLTESSEGIYNDPLVIVKRSHSLVGPSSLVSQSLPLSKLTLHESDSALDLLECTKEKKSNQEALSDEELDDTKNENGVVGLDDFEVLKLVGQGAFGKVFQVRKKGTSEIYAMKVMRKDKILEKNHAEYMKAERDILTKVDHPFVVQLRYSFQTKYRLYLVLDFINGGHLFFQLYQQGLFREELARIYTAEIVSAVAHLHANGIMHRDLKPENILLDADGHAMLTDFGLAKEFDENTRSNSMCGTVEYMAPEIVQGRGHDKAADWWSVGILLFEMLTGKPPFVGGNRDKVQQKIVKEKIKLPAYLSSEVHSLLKGLLHKEAGRRLGCGPGGSNEIKYHKWFKSVNWKKLDSRQIQPSFRPNVAGKTCIANFDECWTSMPVLDSPVASPVAADSNFVGFSYVRPAPFLQRPSPLG

SEQ ID NO: 13700 - protein, 192 aa, Escherichia coli
DERPGKINLGIGVYKDETGKTPVLTSVKKAEQYLLENETTKNYLGIDGIPEFGRCTQELLFGKGSALINDKRARTAQTPGGTGALRIAADFLAKNTSVKRVWVSNPSWPNHKSVFNSADLEVREYAYYDAENHTLDFDALINSLNEAQAGDVVLFHGCCHNPTGIDPTLEQWQTLAQLSVEKGWLPLFDFAY

SEQ ID NO: 13701 - protein, 176 aa, Glycine max
  misc_feature (139)..(139): Xaa can be any naturally occurring amino acid
  misc_feature (146)..(146): Xaa can be any naturally occurring amino acid
  misc_feature (158)..(158): Xaa can be any naturally occurring amino acid
  misc_feature (162)..(162): Xaa can be any naturally occurring amino acid
  unsure (1)..(176): unsure at all Xaa locations
MALHCGTFCFWTVASHPPSSVKLSQPTIKASSFSSPLAPPLVKLNVRGKAFPGDGTPETKESPLVVCFGEMLIDFVPTVNGLSLAEAPAFKKAAGGAPANVAVGISRLGGSSAFIGKVGEDEFGYMLANILKGNNVNNXGMRFDPXGARTALAFVTLXSDGXREFMFYRIPVLICC

SEQ ID NO: 13702 - protein, 155 aa, Zea mays
PRVRAHIQQLDQFMRKLEEIRQEKEAAAAVTAGTAVAITATPTVNAGATTADATLKSGRSGERGRGGRKKAKVPTEQPVPVPVPLPPIDLELPVDPNEPTYCLCNQVSYGEMVACDNPNCKIEWYHYGCVGVKEQPKGKWYCPNCIGFQKKRKGK

SEQ ID NO: 13703 - protein, 194 aa, Escherichia coli
DERPGKINLGIGVYKDETGKTPVLTSVKKAEQYLLENETTKNYLGIDGIPEFGRCTQELLFGKGSALINDKRARTAQTPGGTGALRIAADFLAKNTSVKRVWVSNPSWPNHKSVFNSADLEVREYAYYDAENHTLDFDALINSLNEAQAGDVVLFHGCCHNPTGIDPTLEQWQTLAQLSVEKGWLPLFDFAYQG

SEQ ID NO: 13704 - protein, 470 aa, Erwinia carotovora subsp. atroseptica SCRI1043
MKKTKIVCTIGPKTESEEMLGNLLSAGMNVMRLNFSHGDYVEHGQRIKNLRAVMEKTGQQAAILLDTKGPEIRTMKLENGADVTLTAGQTFTFTTDQSIVGNKDRVAVTYAGFTEDLSVGNTVLVDDGLIGMQVTAVSGNDVVCKVLNNGDLGENKGVNLPGVSIQLPALAEKDKRDLIFGCEQGVDFVAASFIRKRSDVEEIRAHLKAHGGEHIQIISKIENQEGLNNFDEILEASDGIMVARGDLGVEIPVEEVIFAQKMMIEKCNLARKVVITATQMLDSMIKNPRPTRAEAGDVANAIIDGTDAVMLSGESAKGKYPLESVTIMATICQRTDSVMKSRLDTIKTPGILRITEAVCRGAVETAEKLDAPLIVVATSGGKSAKSIRKYFPNARILALTTNEVTARQLLLSKGIDTLLVKEIASTDDFYRIGKEAALKTGHAQAGDVVVMVSGALVSSGTTNTASVHRL

SEQ ID NO: 13705 - protein, 490 aa, ASPERGILLUS NIDULANS FGSC A4
MVGVGPKRPPSRKGSMSDVPQNLLEHIKHFEEIFTVDTATLKKIVDHFVNELTKGLSVEGGNIPMNVTWVLGFPDGKETGTFLALDMGGTNLRVCEITLTEEKGGFDIIQSKYRMPEELKTGEAEELWQYIVDCVEQFIQFHHENENLSKLPLGFTFSYPATQDYIDHGVLQRWTKGFDIDGVEGKDVVPPLEKVFKERGLPIKVAALINDTTGTLIASSYTDPAMKIGCIFGTGVNAAYMENAGSIPKLAHMNLPPDMPVAINCEYGAFDNEHIVLPLTKYDHIIDRDSPRPGQQAFEKMTAGLYLGEIFRLALVDILDTQPGLIFKDQDTSQLRIPYLLDSSFPAAIEEDPYENLIETAELVQNMLKIKATRSELELMRRLAELIGTRAARLSACGVAAICKKKNIESCHVGADGSVFTKYPHFKARGAQALREILDWAPSEKDKVTIHAAEDGSGVGAALIAALTLKRVKAGNTAGIRDAQAMLAMC

SEQ ID NO: 13706 - protein, 457 aa, Campylobacter lari RM2100
MGQCPFHPKPYKNKASTLTTFLLKRRSWLDGLYERSYKMMMGRVKMPGFDLYVVNDPKEVRRIMVDEVREYPKSQLLHELLEPLLGISIFTTNDRVWEKQRELLRPSFEMTRISKVFNLMSEAASDMMARFAKYEDKAIVEVDEAMTFVTADVIFRTIMSSKLDEQKGKLVLDAFVTVQEETVKTAMRRMFRFPTWLSNLLGERKRLKAGGVIRKVLSDIIKPRYDNATNDQGKYEDILSSLLMVVDADTNERFSFNEILDQVAMLFLAGHETTASSLTWTLYILSISPNEQQKAYEEIMQVAGDEEFKIEHIRAMKYLTNVFKESLRLYPPVGFFAREARNDNKMRDKLIKKGSGVVVAPWLIHRHDSFWENPHEFDPSRHEDKSKIKKDTYMPFGMGERVCIGQGFAMQETVLILANILRTYKLELEENFIPDIVGRLTIRSANGMNIRFIKRQK

SEQ ID NO: 13707 - protein, 603 aa, Arabidopsis thaliana
MDTKIGAIDTCKPTTGDIGSPPSNAVATIQDSAPITTTSESTLGRHLSRRLVQAGVTDVFSVPGDFNLTLLDHLIAEPELNNIGCCNELNAGYAADGYARSRGVGACVVTFTVGGLSVLNAIAGAYSENLPVICIVGGPNSNDFGTNRILHHTIGLPDFSQELRCFQTVTCYQAVVNNLEDAHEQIDKAIATALKESKPVYISISCNLAATPHPTFARDPVPFDLTPRMSNTMGLEAAVEATLEFLNKAVKPVMVGGPKLRVAKASEAFLELADASGYPLAVMPSTKGLVPENHPHFIGTYWGAVSTPFCSEIVESADAYIFAGPIFNDYSSVGYSLLLKKEKAIIVHPDRVVVANGPTFGCVLMSDFFRELAKRVKRNETAYENYERIFVPEGKPLKCKPGEPLRVNAMFQHIQKMLSSETAVIAETGDSWFNCQKLKLPKGCGYEFQMQYGSIGWSVGATLGYAQATPEKRVLSFIGDGSFQVTAQDISTMIRNGQKAIIFLINNGGYTTEVEIHDGPYNVIKNWNYTGLVDAIHNGEGKCWTTKVRYEEELVEAIKTATTEKKDSLCFIEVIVHKDDTSKELLEWGSRVSAANGRPPNPQ

SEQ ID NO: 13708 - protein, 363 aa, Xanthomonas axonopodis pv. citri str. 306
MLKVGSSLLAADGGGLSPRFALGLAQFVSANLAAGRELVIVSSGAVAAGRAILPKAMDVGAPIAARQALAALGQAQLIALWQRFFERPVAQVLLTHDDLRNRRRYLNARATLGELLRLGALPVINENDTVSVDELKLGDNDNLAAIVAALVDADALFIATDIDGLYSADPRSNPLARPLDDVPELTPEVLAMAGGSGSNVGTGGMRTKLEAAAKAGAAGIETYLFNGRSGEVVRALALDRLRGTRIHAARTRIAARKYWLRHAPVEAGAILIDDGAAAALTGKGASLLPGGVAGAQGDFRRGDMVEIRRRDTTGDGQCLARGVSQYSALDIRRIAGRHSREIENVLGYSYGENVVHRDDLVVL

SEQ ID NO: 13709 - protein, 325 aa, Vibrio parahaemolyticus RIMD 2210633
MKHIAIIGECMIELNGKPFGSMHQTFGGDTLNAAVYLSRGCEANSKPDKVKVSYVTALGNDPISTGMLTRWEDEGISTDLVLRDEIRTPGLYLIQLDDQGERTFLYWRNQSAARYLLQHPNFGIVKQALTQVDAVFLSGISLAILPEEDRISLLNLLVELKAQGVEIAFDSNFRPALWPQDNNQTVKNVYQAMYQLTDVALVTFDDEQLIWGDETPEQTIERLTSLGVGKCIVKLGADGCLVQDPTNQGSSAALAPQAVPTQPVAQVLDTTSAGDSFNGGFLSAYLAGADLATSCQRGNALAGAVIQHRGAIIPKAFTQPALGVV

SEQ ID NO: 13710 - protein, 110 aa, Clostridium lituseburense
VSGFGNVGSNTAKHLERMSGNILSISEYDKEKGVYTIYNENGFNISELISHFEKYNTLYNYKNAKHISIDQFYSLDVDVIIPCALENSITEDEAQKIRAKLIVEGANGPT

SEQ ID NO: 13711 - protein, 191 aa, Escherichia coli
DERPGKINLGIGVYKDETGKTPVLTSVKKAEQYLLENETTKNYLGIDGIPEFGRCTQELLFGKGSALINDKRARTAQTPGGTGALRVAADFLAKNTSVKRVWVSNPSWPNHKSVFNSAGLEVREYAYYDAENHTLDFDALINSLNEAQAGDVVLFHGCCHNPTGIDPTLEQWQTLAQLSVEKGWLPLFDFA

SEQ ID NO: 13712 - protein, 401 aa, Thiobacillus sp. KNK65MA
MAKILCVLYDDPVDGYPKTYARDDLPKIDHYPGGQTLPTPKAIDFTPGQLLGSVSGELGLRKYLEANGHTFVVTSDKDGPDSVFEKELVDADVVISQPFWPAYLTPERIAKAKNLKLALTAGIGSDHVDLQSAIDRGITVAEVTYCNSISVAEHVVMMILGLVRNYIPSHDWARKGGWNIADCVEHSYDLEGMTVGSVAAGRIGLAVLRRLAPFDVKLHYTDRHRLPEAVEKELGLVWHDTREDMYPHCDVVTLNVPLHPETEHMINDETLKLFKRGAYIVNTARGKLADRDAIVRAIESGQLAGYAGDVWFPQPAPKDHPWRTMKWEGMTPHISGTSLSAQARYAAGTREILECFFEGRPIRDEYLIVQGGALAGTGAHSYSKGNATGGSEEAAKFKKAG

SEQ ID NO: 13713 - protein, 270 aa, Frankia sp. EAN1pec
MAPARGRSTAVASSLVRRGGNGDRVEHERPAGGRSARARTGEAHPSKHSAGAGWLRPAVFGAMDGLVSNVALISGFAGGDAGRPAVVLAGLAGLASGAFSMATGEYTSVRSQNEAMRAQIEVERRELALYPQAEHAELVGFFRDQGVDAPTAESVARQLAHSPDTALRVHARNELGLDVDDLPSPLGAAGASFGAFALGALVPVAPYLAGFASFAIAAVLAGLGLFALGAAVSRFTERSAFYSGARQLLLGLVAAAATYGIGVLVDAFIA

SEQ ID NO: 13714 - protein, 443 aa, Chlamydomonas incerta
MREIVHIQGGQCGNQIGAKFWEVVSDEHGVDPTGTYHGDSDLQLERINVYFNEATGGRYVPRAILMDLEPGTMDSVRSGPYGQIFRPDNFVFGQTGAGNNWAKGHYTEGAELIDSVLDVVRKEAESCDCLQGFQVCHSLGGGTGSGMGTLLISKIREEYPDRMMLTFSVVPSPKVSDTVVEPYNATLSVHQLVENADECMVLDNEALYDICFRTLKLTTPTFGDLNHLISAVMSGITCCLRFPGQLNADLRKLAVNLIPFPRLHFFMVGFTPLTSRGSQQYRALTVPELTQQMWDAKNMMCAADPRHGRYLTASALFRGRMSTKEVDEQMLNVQNKNSSYFVEWIPNNVKSSVCDIPPKGLKMSATFIGNSTAIQEMFKRVSEQFTAMFRRKAFLHWYTGEGMDEMEFTEAESNMNDLVSEYQQYQDASAEEEGEFEGEEEEA

SEQ ID NO: 13715 - protein, 255 aa, Hordeum vulgare subsp. vulgare
MEDERSTQSYQGAEADQVEATDRGLLGNLLGKKKEEEDKKKEEELVTGMEKVSVEEPEVKEDGEKKETLFSKLHRSSSSSSSSSDEEEEEEVIDENGEVIKRKKKKGLKGKLKEKLPGHKDNEAEHVTGLPAPMAPASVQTHHDTDVVVEKIDGDAKTEATPAVPEEEKKGFLEKIKEKLPGGHKKPEDAAAVPATHAAPAPVHAPAPAAEEVSSPDAKEKKGLLGKIMDKLPGYHKTEEEDKAAAPSGEHKPRA

SEQ ID NO: 13716 - protein, 458 aa, Shigella flexneri 2a str. 301
MKNASTVSEDTASNQEPTLHRGLHNRHIQLIALGGAIGTGLFLGIGPAIQMAGPAVLLGYGVAGIIAFLIMRQLGEMVVEEPVSGSFAHFAYKYWGPFAGFLSGWNYWVMFVLVGMAELTAAGIYMQYWFPDVPTWIWAAAFFIIINAVNLVNVRLYGETEFWFALIKVLAIIGMIGFGLWLLFSGYGGEKASIDNLWRYGGFFATGWNGLILSLAVIMFSFGGLELIGITAAEARDPEKSIPKAVNQVVYRILLFYIGSLVVLLALYPWVEVKSNSSPFVMIFHNLDSNVVASALNFVILVASLSVYNSGVYSNSRMLFGLSVQGNAPKFLTRVSRRGVPINSLMLSGAITSLVVLINYLLPQKAFGLLMALVVATLLLNWIMICLAHLRFRAAMRRQGRETQFKALLYPFGNYLCIAFLGMILLLMCTMDDMRLSAILLPVWIVFLFVAFKTLRRK

SEQ ID NO: 13717 - protein, 406 aa, Buchnera aphidicola str. APS (Acyrthosiphon pisum)
MRRVVITGIGIVSSIGNNKKEVLASLYKGVSGIVSSEEMKKLGMRSAVWGNIKLESINIITQKLSRFMNNASRYSFVAMMEAIKDAKIDREYYQKNPRVGLISGSGCSFSKNTLTSDIHLMKNKHISKGISPYLAVKTMPSGISACLSTLFKIYGVTYSISSACATSAHCIGNAFELIQFGRQDLIFAGGGEEISLELAMQFDAMRALSTCFNNDPKKASRVYDVYRDGFVISGGAGMLVIEELNSALSRSAYIYAEIIGYAATSDGSNIVVPSGDGAIRCMNLARKGKNIPIDYLNVHGTGTKIGDLIELEAIRKVFLNEKKPMISATKSMTGHGLGASGVHEMIYTLLMLKYNFIAPTINIENLEPCAENMNIIQKTTNIEINTAMSNSFGFGGTNVSLIVKKY

SEQ ID NO: 13718 - protein, 316 aa, Buchnera aphidicola str. APS (Acyrthosiphon pisum)
MNQLSALKQFSIIVADTSDIKSICKYQPEDATTNPSLILQAVSSNTNQNFVDQAVQYAKKKGGLYKDQIINASDKILVDLGIEILKKIPGYISSEVDARLSFSTEASILKAKKIIDLYEEQGISRNRVLIKLAATWECIKAAEELKKDSILCNLTLLFSFAQARACAESNVFLISPFVGRIYDWYISQNLLSKSFLGKDPGVISVCKIYEYYKKYGYKTIIMGASFRNIQQILYLSGCDRLTISPVLLKELESNTAKIDRNLAPPSFISVPPVALSEEEFRWEHNQDAMAVQKLSDGIRNFGKDQLRLEKIFSKKI

SEQ ID NO: 13719 - protein, 665 aa, Buchnera aphidicola str. APS (Acyrthosiphon pisum)
MYSRKELANAIRMLSIDAVQNAQSGHPGMPMGMADIAEVLWRSFLKHNPANPNWNDRDRFILSNGHGSMLLYSLLHLTGYNLPIEELKKFRQLNSKTPGHPETGETPGVETTTGPLGQGLANAVGMAIAERTLSSYFNRPGYDIINHYTWVFVGDGCLMEGISHEVCSLAGTLNLGKLIVFYDKNGISIDGKTAHWFTDDTAKRFESYNWHVLDNIDGHDSESIERSIKQAKLITNQPSIIICNTIIGFGSPNKSGTAESHGAPLGEVEISLIREQLKWNYPPFQIPKEIYKKWNFIEEGSKLEKKWNEKFSLYQSKYPDLSTEYLRRINKKLPVEWDRVTNNYISFLQKNRQSIASRKASQNTLEKYAMILPELIGGSADLSPSNLTMWSRCNSIKDNLSGNYIHYGVREFGMTAIANGISHHGGFIPYTATFLMFVEYARNAVRMAALMCTKHIFVYTHDSIGLGEDGPTHQPVEQLSSLRITPNIDVWRPSDQVETAVAWKKAIEKTSGPTALILSRQNLDQFERSSEQLENISYGAYILYDSKKRLDIIFISTGSELNVTLIAAKKLASLGYSVRVVSMPCTSVFDRQDASYKEFVLPTYVAKRVAVEASIEDFWYKYVGINGVIIGMKTFGESAPAEDLFKKFGFTVQNIFNKSLILLKS

SEQ ID NO: 13720 - protein, 563 aa, Arabidopsis thaliana
RERGRGAFLVVLVERLIYTRKRKKKTVESEREREREREREREREMEDIQEEENGTDEEVLGSSLTMEKVAAAKQYIENHYKAQNKNIQERKERRWILERKLASSGVPKEEQINMIKDLERKETEFMRLKRNKISVDDFELLTIIGRGAFGEVRLCRERKSGNIYAMKKLKKSEMVMRGQVEHVRAERNLLAEVESHYIVKLYYSFQDPEYLYLIMEYLPGGDMMTLLMREDTLREDVARFYIAQSVLAIESIHRYNYIHRDIKPDNLLLDKDGHMKLSDFGLCKPLDCRNLPSIQENRATDDETMSEPMDVDRCFPDTDNKRSWRSPQEQLQHWQMNRRKLAFSTVGTPDYIAPEVLLKKGYGMECDWWSLGAIMYEMLVGYPPFYADDPISTCRKIVHWRNHLKFPEDAKFSSEAKDLICRLLCNVDHRLGTGGGAQQIKDHPWFKDVVWEKLYEMEAAYKPEVNDELDTQNFMKFDEVNSPAPERTRSGLSRKMLLAPKDLSFVGYTYKNFDAVKGLRHSLEMARTMSLDRSPAEAMPVELISGEAAEAQMVSSMDDPMII

SEQ ID NO: 13721 - protein, 316 aa, Gossypium hirsutum
MATLTVPTTVPSVSEDCEQLRKAFSGWGTNEGLIIDILGHRNAEQRNLIRKTYAETYGEDLLKALDKELSNDFERLVLLWALDPAERDALLANEATKRWTSSNQVLMEIACTRSANQLLHARQAYHARYKKSLEEDVAHHTTGDFRKLLLPLVSSYRYEGEEVNMNLAKTEAKLLHEKISDKAYSDDDVIRVLATRSKAQINATLNHYKNEYGNDINKDLKADPKDEFLALLRSTVKCLVYPEKYFEKVLRLAINRRGTDEGALTRVVCTRAEVDLKIIADEYQRRNSVPLTRAIVKDTHGDYEKLLLVLAGHVEN

SEQ ID NO: 13722 - protein, 327 aa, Ralstonia eutropha JMP134
MAKAPMRVAVTGAAGQIGYSLLFRIANGDMLGKDQPVILQLLDLPQAQAAVKGVVMELEDCAFPLLAGVVITDDPKVAFKDADVALLVGARPRSKGMERKDLLEANAQIFTVQGKALDEVASRNVKVLVVGNPANTNAYIAMKSAPSLPRENFTAMLRLDHNRALSQIAAKTGKPVASIEKMFVWGNHSPTMYADYRYATVDGKSVKDMINDPVWNNDVFLPTVGKRGAAIIEARGLSSAASAANAAIDHVHDWVLGTNGKVVTMGIPSNGEYGIPADTMFGYPVTCANGKYEIVKGLEIDAYSQEKINITLNELEEEKAGVQHLLG

SEQ ID NO: 13723 - protein, 524 aa, Bifidobacterium longum DJO10A
MSQPDTDTAAQSPSSQQEPQIQTDGRRSHSEQMNQPAQTSQSESSHDGKDEHALHTNLKRGMESRHLQMISLGGVIGTGLFLSSGYTIQQAGPIGTILAYSIGALIVYLVMLTLGELSVAMPVTGSFHVYAEKFIGPGTGFVIAIQYWLTWTVALGSEFTAAGLLMQRWFPDSPTWVWSAACIILIFTLNALSVRLFAEAEFWFASIKVFAICAFIVIGSLAIFGVIPVAGYQHAPMFVNLIKDGVFPNGFMPVFATILTVNFAFSGTELIGVTAGETRDPQTAVPKAIHTTLWRLVLFFIGSITVMCALIPWRKAGVGESPFVLVFNGIGIPYAGDIMNFVVLTAVLSASNSGLYASTRMVWSMGNEGMIPRWFAKTNRRGVPMLALCAAMAGGLLALLSSVIAASTVYLVLVALSGLSAVVVWIAIAYCQIVFRRRWLAAGHSTSELKYRTPGYPYVSWAAFILCTASFVLVIFDVEQRFALVAELVFIVACYGAYFLQQWVRKRKKATEADDLDTLWVARD

SEQ ID NO: 13724 - protein, 460 aa, Vibrio sp. Ex25
MDISRRRFIQSSLAISTLAVLPACTLSRQQDKNGHYIYDLTAEPSTAELVPGFNTEVLAFNGRIPAPIIRCRQGEKVTINFINKLSEPTTIHWHGLRIPIEMDGVPFLSQAPIMPGETFTYEFIPPDAGTFWYHPHMNSVKQLGMGLVGLIIVEEAEPVQFDEEHEVVLKHWHLDKQGQWKNLMVPRLSARMGTPGEWSGVNGIHEPVYTLKQNATTRLRIANVDNTITYPIAIEGTEAWVIAIDGNPVKTPYRLTQHKIGPGMRLDIGLIAPKAGERVYVRQMKGRFPFSLCEFEVVESDLPSNKKLPLLPLNPVPDLDLENAEQIDYVFEWEGAITPADKSGKAIPKFWLMNKRAWEGMSKDNIPAPLSKLELGKTYIFNLKNVTQYHHPIHLHGHTFTVLELDGKKLDEPFHTDTVLLGKNGSAKAAFVANNPGRWMYHCHVIEHMKTGLMGYIEVK

SEQ ID NO: 13725 - protein, 451 aa, Burkholderia sp. 383
MSHDPTSTPVDARLPAWQLVLFGLQHVLSMAASPITAVFLIAKVLALPAELTVQLIGATFFACGIGTLLQSLGAGPIGARMPFVMVPGGAPTMLFAGIAAQSGLPTAAGAALLASAFYWVLLPVFTRCLRLFPRIVVGAMLLLVSVNLIRIYATIVVGQPGSADFAQPRALGLALATIVATVVVAGTFRGTLGRLAVLIGLMAGATLGWALDAMPALADVWRGPLFTHPVWLPFGMPRFDVLAALPLLIFTAISMAEATAQTVAVGETCGKPISLSRDVPKTIRGDALASFAGALFGTPLIVTSAENIGVVQTTGVRSRYVTAAAGAILIVIALFAPLARLAYAIPAAVVGGTALVVFAMIGVMGIRLLASVDLHARANQYTLAAALVVGLAPILVPNLYRHFGTPVQIVLGNGMAAGTLAAIATQLAFAALARTRGQAGTVAATAPSRDA

SEQ ID NO: 13726 - protein, 338 aa, Shigella flexneri 2a str. 301
MRVLVTGGSGYIGSHTCVQLLQNGHDVIILDNLCNSKRSVLPVIERLGGKHPTFVEGDIRNEALMTEILHDHAIDTVIHFAGLKAVAESVQKPLEYYDNNVNGTLRLISAMRAANVKNFIFSSSATVYGDQPQIPYVESFPTGTPQSPYGKSKLMVEQILTDLQKAQPDWSIALLRYFNPVGAHPSGDMGEDPQGIPNNLMPYIAQVAVGRRDSLAIFGNDYPTEDGTGVRDYIHVMDLADGHVVAMEKLANKPGVHIYNLGAGVGSSVLDVVNAFSKACGKPVNYHFAPRREGDLPAYWADASKADRELNWRVTRTLDEMAQDTWHWQSRHPQGYPD

SEQ ID NO: 13727 - protein, 314 aa, Geobacter sulfurreducens PCA
MSTMIATRDAYGQTLAELGEENGSVVVLDADLSGSTKTSVFAKKFPDRFFNMGIAEANMVGTAAGLAAAGKIPFVSTFAIFAVGRAWEQVRQSLAYPKANVKVVATHGGITVGEDGGSHQSVEDIAIMRAVPNMTVIVPADGPETARAIRAAAAHRGPVYVRLGRNKVPTVTSTDTPFEIGKGVQLADGTDLTFVTTGLMTAQALAAAELLSQEGISARVIHMATIKPLDGEILQRAAQETGAIVTAEEHSIVGGLGGAAAEFLAENCPVPLKRVGINDRFGLSGKAEELLKYFGLMPADLAEAGREVLTRKRP

SEQ ID NO: 13728 - protein, 393 aa, Ralstonia eutropha JMP134
MSAANHTTPADAPQSAGPKPKKSVALSGVTAGNTALCTVGRTGNDLHYRGYDILDVADACEFEEIAHLLVHGKLPNRAELAAYKTKLKSLRGLPANVKAALEWVPASAHPMDVMRTGVSVLGTVLPEKDDHNAPGARDIADRLMASLGSMLLYWYHYSHNGRRIEVETDDDSIGAHFLHLLHGEKPSKLWERAMHTSMILYAEHEFNASTFTGRVIAGTGSDMYSAICGAIGALRGPKHGGANEVAFEIQKRYDSPDEAQADIARRVENKEVVIGFGHPVYTIADPRNQVIKETARNLSKDAGSMKMFDIAERLETVMWDIKKMFPNLDWFSAVSYHMMGVPTAMFTPLFVIARTSGWAAHIIEQRIDNKIIRPSANYTGPEDLKFVPIGKRK

SEQ ID NO: 13729 - protein, 277 aa, Geobacter sulfurreducens PCA
MDSEKIKQLEETARRLRVDIVKTLHSSQSGHTGGSLSAIDMVTALYFHEMKHDPTNPAWSERDRFVLCKGHAAPALYVALAATGYFPKEDLMMLRRLGSHLQGHPDSKQTPGVEVCTGSLGQGLSMANGMALGLRLDGSASRVYALLGDGELQEGQVWEAAMAAGHFKLDNLCALIDVNRLQIDGEVEKVMNVEPVTDKFRAFGWNVIDIDGHDMAAIVGALAQAAEVNGRPTAIVARTVKGKGVSFFENKASYHGVAPSDEELPKALECLGEQCYL

SEQ ID NO: 13730 - protein, 186 aa, Glycine max
  misc_feature (154)..(154): Xaa can be any naturally occurring amino acid
  unsure (1)..(186): unsure at all Xaa locations
MLTDFIVAIDSGVPRRPPAGKRADDQVNYPKLVELLLNSSEFSSNLLHDITGGRLGFPHPEDTNTIIDVHTTDVTSVVHAFRSGFRAALRDLQGFHIFLLTLHQKLDNLLRSFMNTIGKISSGESEKEDAVVPDSPSPTVVGSCPSPSSKERLXNDVHQDCSDSESQRTAPRTSSSSGNRDCCDLL

SEQ ID NO: 13731 - protein, 257 aa, Bromus tectorum
  misc_feature (186)..(186): Xaa can be any naturally occurring amino acid
  unsure (1)..(257): unsure at all Xaa locations
CELDNIMRLTGISGIVNGMDVTEWNPAKDKFIAVNYDATTALEAKALNKEALQAEVGLPVDSKVPLVAFIGRLEEQKGPDVLIAAIPEIVQEVDVQIVLLGTGKKKFERLLKSIEEKFPGKVRAVVRFNAPLAHQMMAGADILAVTSRFEPCGLIQLQAMRYGTPCACASTGGLVDTVVEGRTGFXMGRLSVDCLVVEPADVKKVATTLKRAVKVVGTPAYQEMVKNCMIQDLSWKAPAKNWEDVLLELGVAGNEPG

SEQ ID NO: 13732 - protein, 349 aa, Arabidopsis thaliana
MKTNSEEQMIKLFGIPLSDKPRWQQFLICSSGFFFGYLVNGICEEYVYNRLKFSYGWYFTFAQGLVYIALIYMYGFRTKQMVNPWKTYVKLSGVLMGSHGLTKGSLAYLNYPAQIMFKSTKVLPVMVMGAFIPGLRRKYPVHEYISAMLLVIGLILFTLADAHTSPNFSIIGVMMISGALIMDAFLGNLQEAIFTMNPETTQMEMLFCSTVVGLPFLLAPMILTGELFTAWNSCAQHPYVYGVLVFEAMATFIGQVSVLSLIALFGAATTAMITTARKAVTLLLSYLIFTKPLTEQHGTGLLLIFMGIILKMVPDPNPNPKSSGSGQTPGKLERVKFEKEDDEESRPLV

SEQ ID NO: 13733 - protein, 237 aa, Cutandia memphitica
  misc_feature (3)..(3): Xaa can be any naturally occurring amino acid
  misc_feature (233)..(233): Xaa can be any naturally occurring amino acid
  misc_feature (236)..(236): Xaa can be any naturally occurring amino acid
  unsure (1)..(237): unsure at all Xaa locations
IVXGMDVSEWDPSKDKYIAVNYDAATAVEAKALNKEALQAEVGLPVDSKVPLVAFIGRLEEQKGPDVMVAAIKELMEEGSEDVQIVLLGTGKKKFERMLKSVEEEFPDNVRAVVKFNAPLAHQIMAGADVLAVTSRFEPCGLIQLQGMRYGTPCACASTGGLVDTIVEGKTGFHMGRLSVDCDVVEPADVKKVATTLKRAIKVVGTPAYQEMVKNCMAQDLSWKGPAKNWEDXLLXL

SEQ ID NO: 13734 - protein, 353 aa, Cryptococcus neoformans var. neoformans JEC21
MSGLSYCPRVGGYLKLSRTPTFTILPIFNSLIMSAPTSFKLNTGASIPAIGLGTWQAKAGEVRQAVAHALKAGYRHIDGALCYQNEDEVGLGIKDSGVPRSEIFLTSKVWSSYHDRVEECLDTTLKSLQTDYLDLYLIHWPVRLAPNGTHPLFPVKPDGSRNLDWDWDQAKTWAQMEDVLKKGKAKAIGLSNAGIPIIEHIIKTGKVTPAVNQVELHPYCPQHALLKYCKEKGILLEAYSPLGSTSSPLHEDPDLLAVAKKHNVPTATVLISYQVNRGVVVLPKSVTPARIESNLKTIKLDEEDMNKLDKLAEGGKQTRFTAPPWGSDFGFPDWFGPGNKDAPEGARLLAGKA

SEQ ID NO: 13735 - protein, 131 aa, Arabidopsis thaliana
MAFSKSLVFVLLAALLISSAVAQSPAPAPSNVGGRRISPAPSPKKMTAPAPAPEVSPSPSPAAALTPESSASPPSPPLADSPTADSTALSPSAISDSPTEAPGPAQGGAVSNKFASFGSVAVMLTAAVLVI

SEQ ID NO: 13736 - protein, 159 aa, Cryptococcus neoformans var. neoformans JEC21
MQIFVKTLPGKTLARDVLPTSTVSSVKEMIASAEGIPASEQRLIFAGVQMDDERALAEYGIQKESTINMVMSLCGGGKKRKKKNYTTPKKIKHKRKKVKMAILKYYKVGSDGKIQRLRRECPAPTCGAGIFMAWHKDRQACGKCGLTYTFEPGTKPTTA

SEQ ID NO: 13737 - protein, 192 aa, Escherichia coli
ERPGKINLGIGVYKDETGKTPVLTSVKKAEQYLLENETTKNYLGIDGIPEFGRCTQELLFGKGSALINDKRARTAQTPGGTGALRVAADFLAKNTSVKRVWVSNPSWPNHKSVFNSAGLEVREYAYYDAENHTLDFDALINSLNEAQAGDVVLFHGCCHNPTGIDPTLEQWQTLAQLSVEKGWLPLFDFAYQ

SEQ ID NO: 13738 - protein, 333 aa, Bacteroides fragilis NCTC 9343
MIKVGINGFGRIGRMVFRAAVKNFGNDIQIVGINDLLDAEYLAYMLKYDSVHGRFEGEVAVEDGALIVNGNKIRLTAEMDPANLKWNEVDADVVVESTGFFLTDETARKHIQAGAKKVIMSAPSKDSTPMFVYGVNHTSYAGQDIISNASCTTNCLAPIAKVLNDKFGIVKGLMTTVHAATATQKTVDGPSKKDWRGGRGILENIIPSSTGAAKAVGKVLPVLNGKLTGMAFRVPTSDVSVVDLTVVLEKAATMAEINAAMKEASEGELKGILGYTEDAVVSTDFRGCANTSIYDSKAGISLDSNFAKVVSWYDNEWGYSNKVCEMARVIAAK

SEQ ID NO: 13739 - protein, 187 aa, Schizosaccharomyces pombe
MQIAIIAAGCFWGVQEVYLRKFIPAAAILKTSVGYTGGITADPTYKEVCTNTTNHAEALKIEFDEKLTSYDKIIEFFFAMHDPTTSNQQGNDIGTQYRSAIFTTNPEQATIAKRVMNEVQAKHYPNKKIVTQILPAGKWWDAEDYHQLYLEKNPDGYRCSSRMNIKCQVNQKVLLTHSIRFFALECF

SEQ ID NO: 13740 - protein, 291 aa, Candida glabrata CBS138
MEKLLHWSIANAQGDKEAIEKAGAPDPKLLEQLFGGGGPDDPTLMKEAMAVIMNPEADLENKLIAYDNFEMLIENLDNANNIENMKLWEPILKTLEDNEADLRASGLSVIGTAVQNNTDSQTNFLKYEGGLKILIAIAKSSEEPSDVRIKAFYALSNLLRNHIEAGKKFQALGGLDVFPVALNDPKATPKLKMRAISALSAFLSSSKIDEQLLDTLRKDGVLVSVIENLGTDNVNVIDRVLSVLSHLISSGIKFNDSELEMLQKEFEKIDSLKDRLNEDDYLAVKYVFSKK

SEQ ID NO: 13741 - protein, 186 aa, Escherichia coli
RRGKINLGIGVYKDETGKTPVLTSVKKAEQYLLENETTKNYLGIDGIPEFGRCTQELLFGKGSALINDKRARTAQTPGGTGALRVAADFLAKNTSVKRVWVSNPSWPNHKSVFNSAGLEVREYAYYDAENHTLDFDALINSLNEAQAGDVVLFHGCCHNPTGIDPTLEQWQTLAQLSVEKGWLPLF

SEQ ID NO: 13742 - protein, 1108 aa, Pseudomonas syringae pv. syringae B728a
MAKKPGDATFIKDPLWYKDAVIYQVHVKSFFDSNNDGIGDFAGLIEKLDYIAALGVNTIWLLPFYPSPRRDDGYDISEYRDVHSDYGTMADAKRFIAQAHKRGLRVISELVINHTSDQHPWFQKARNAKPGSKARDFYVWSDTDQKYDGTRIIFLDTETSNWTWDPVAGQYFWHRFYSHQPDLNFDNPHVLDAVLEVMRFWLDLGIDGLRLDAIPYLIERDGTNNENLPETHQVLKRIRAEIDANYPDRMLLAEANQWPEDTQLYFGDSKGPDGDECHMAFHFPLMPRMYMALAQEDRFPITDILRQTPEIPENCQWAIFLRNHDELTLEMVTDRERDYLWNYYAADRRARINLGIRRRLAPLVDRDRRRVELLNSMLLSMPGTPTLYYGDEIGMGDNIYLGDRDGVRTPMQWSIDRNGGFSRADPASLVLPPIMDPMYGFQSVNVEIQERDPHSLLNWNRRMLAVRKQQKAFGRGTLKMLSPSNRRILAYTREYTAPDGHSEVVLCVANVSSAAQAAELELSAYAGTVPVEMLGGSAFPPIGQLSYLLTLPPYGFYWFLLASENQMPSWHVEPAQSMPDFPTLVLKKRLEELLEEPLRSTMENTSLAVYLPKRRWFAGKDKAIEKVSIAYAVRFGEEANPVLLSEIEVTAGGQTDRYQLPFGLLAEDDISSALPQQLALARVRRNRDVGLITDAFTLETFIRAVIQGMQSDTVIPCADGELRFEQSSQLAPLGLNAESEVRYLSAEQSNSSVVVGSSLVLKLIRKVSAGTHPELEMGAFLTRAGFKNISPLLGSLVRVGKDGQPNLLMIAQGYLSNQGDAWEWTQNNLERAVRDELAHGVSGQEQHYNALLELADFSRSLGQRLGEMHQILASPTDNADFAVEVTSSQDSKASGVSVNAQLERALQLLEQRIGELDKDDQQLVNDLLAQRKQIRQRVEGLAKRSAGGLRIRVHGDLHLGQVLVVKGDAYLIDFEGEPARALEERRAKHSPFKDVSGVLRSFDYAAAMAVRSAQSVDTSPEAAGARKRVADTYLAQARETFIEGYRSATTGIAHAWKDAKGEDAALELFTLEKAAYEVIYEAENRPAWLAVPLQGLRGLLQPSDGESI

SEQ ID NO: 13743 - protein, 99 aa, Oryza sativa (japonica cultivar-group)
MGRGKIVIRRIDNSTSRQVTFSKRRNGIFKKAKELAILCDAEVGLVIFSSTGRLYEYASTSMKSVIDRYGRAKEEQQHVANPNSELKEFCSVFIYITEN

SEQ ID NO: 13744 - protein, 463 aa, Candida glabrata CBS138
MPNLSHQWESVSLKEAYARNLPAQAERLKRFKSEFGSTVIGEVTVEQALGGMRGVTGLVWEGSVLDPEEGIKFRGLTIDEVRVSLGVAGEREPQPEALFWLLLTGQIPNEDQVAQLSRELAARGELPGHVETLLDTLPRDLHPMAQLSIAVTALEGESHFARAYLAGVPRGELWEHTYEDALNLIAKLPAIAGRIYHNVFGGAQGAQGQGTQGAFVLDPQADYSENLCRALGVQPDGETEDFHNLMRLYLTIHADHEGGNVSAHTTHLVGSALSSPYLSFAAGLDGLAGPLHGRANQEVLEWLLVLKGELVREGKTVTDREAIRQYLWRTLNSGKVVPGYGHAVLRKTDPRFLAQREFGRTRFPGDELYQLVSTVYEVAPQVLKEHGKTRNPYPNVDAHSGVLLTHYGLDQPSFYTVLFGISRCFGVMAQLITDRALGAPIERPKSLSTDRYIELATRHHNKL

SEQ ID NO: 13745 - protein, 663 aa, Campylobacter lari RM2100
MNIQYSDALVIGGGLAGLRAAIEVAKSGQSVTLLSICPVKRSHSAAVQGGMQASLGNSVKGEGDNEDVHFADTVKGSDWGCDQEVARMFAQTAPKAVRELAAWGVPWTRVTKGPRTVVINAQKTTIEEKEEAHGLINARDFGGTKKWRTCYIADATGHCMLYGVANEAIKHQVKIIDRMEAVRIIHDGKKCLGAIARDLTNGELIAYVARGTMIATGGYGRIYKQTTNAVICEGTGAAIALETGLCRLSNMEAVQFHPTPIVPSGILLTEGCRGDGGILRDVDGYRFMPDYEPEKKELASRDVVSRRMMEHIRKGKGVKSPYGDHLWLDISILGRAHVEKNLRDVQDICKTFNGIDPADEGPKGWAPVLPMQHYSMGGIRTKPTGESQWLNGLFACGEAACWDMHGFNRLGGNSCSETVVAGMIVGDYFAQYCKENGNDIDTNIVKSFLSKEYDYLKSLVSKEGKHDVFEIKNRMKDIMWEKVAIFRTGQGLEEAVKELEELYQKSLDLKVHDKELKCANPELEEAYRVPRMLKIALCVAYGALLRTESRGAHYREDYPKRDDLNWMKRTNTYWVEGESMPRVEYEDLDIMKMEIPPAFRGYGAKGNIIENPLSEKRQAEVDAIREKMESEGKGRYEIQHALMPYELQAKFKAPNQRIGVDYE

SEQ ID NO: 13746 - protein, 209 aa, Oryza sativa (japonica cultivar-group)
MRKTTKRAIFNPPNTLQDNSYTKLAVLAKGGSKLETTTAQLARKSSKNRTEHPSKADRPNLQRRVNITFSSPVLSAWQLMGQDLSGLGVKELQTLENQLEMSIRCIRTKKDQLMIDEIHELNRKGSLIHQENMELYRKVNLIRQENAELYKKLYETGAENEANRDSTTPYNFAVIEEANTPARLELNPPSQQNDAEQTTPPKLGLQLHP

SEQ ID NO: 13747 - protein, 434 aa, Ashbya gossypii ATCC 10895
MAVEFNLSSKQTVEYEQEYSAHNYHPLPVVFHKASGAHVWDPEGKEYLDFLSAYSAVNQGHCHPEIVQALVDQASRLTLSSRAFSNDCFAAFAKYVTEYFGYGMVLPMNTGAEAVETALKLARRWGYMKKGIAADEAIILGASGNFHGRTFGAISLSTDEEDTRKHFGPFLKNTTAELPDGSGEQIRFGELADLERAFKHAGERIAAVILEPIQGEAGIVVPPEGYLEGVQRLCREHNALFICDEIQTGIGRTGKMLCYEHSEGVRPDIVVLGKAISGGILPVSCVLADKDIMLCFEPGSHGSTYGGNPLSSRVAVAALEVIRKENLVERARVLGEKLRAKLESLQAESNGIISEVRGKGLLSAIVIDPSKANGRTAWDLCLLMKDAGVLAKPTHEHIIRLAPPLVISEEDLMHGVDVIKSSLEKLPTVEKAAH

SEQ ID NO: 13748 - protein, 460 aa, Mesorhizobium loti MAFF303099
MHNSDSSKTPIGGISRDRIAQLRETEGAAFRKARPKSQAKVGNGLPGFFGGVPMHWMNDWPTPFPILVDSAKGAAITDIDGNRLDDFCLGDTGSMFGHSPPPVARAIRRQAGRGLTYMLPSEDALAIGPLLQQRFGLPFWQIATTATDANRFSLRVARAVTGREKILVFNGCYHGSVDETMVRLIGGKPVNRPGLAGEFRDLTRTAKVIEFNDVAALEAALKDRDVACVIAEPVLTNSCMVLADPGFHDALRRLTRETGTLLLIDETHTISTGPGGYTRKYGLEPDFFVLGKPIAGGVPASVWGMSDEVASRYADYNRTKEPGYSGMGTTLSANPLQFAAMRATLEEVMTAENYDRMDHLAERLDAGLTGVIDRYRLPWHVARVGARVEFICAPGPLRNGAEAETAHAPELEAAIHVALVNRGVLIAPFHNMMLISPATSGAQVNRLIAAFGAVAAKLAA

SEQ ID NO: 13749 - protein, 250 aa, Shigella flexneri 2a str. 301
MAVTKLVLVRHGESQWNKENRFTGWYDVDLSEKGVSEAKAAGKLLKEEGYSFDFAYTSVLKRAIHTLWNVLDELDQAWLPVEKSWKLNERHYGALQGLNKAETAEKYGDEQVKQWRRGFAVTPPELTKDDERYPGHDPRYAKLSEKELPLTESLALTIDRVIPYWNETILPRMKSGERVIIAAHGNSLRALVKYLDNMSEEEILELNIPTGVPLVYEFDENFKPLKRYYLGNADEIAAKAAAVANQGKAK

SEQ ID NO: 13750 - protein, 1112 aa, Kluyveromyces lactis NRRL Y-1140
MNGNGITTLKGDTIGPWKLGSTLGVGSTGKVVMAYNETKGQQAAVKIISKSIFNAQGSTMIGGNDPDVLPYGIEREIIIMKLLNHPNVLRLYDVWETSKDLYMVLEYVEKGELFNLLVERGPLPENEAVRFFRQIIIGISYCHALGIVHRDLKPENLLLDHKFNVKLADFGMAALESKDKLLETSCGSPHYAAPEIVSGLPYHGFESDVWSCGVILYALLTGRLPFDEEDGNIRNLLLKVQSGKFEMPGDDEISSEAQDLIARILTVDPEQRIKTREILKHPLLRKYPSIKDSKSIRNLPREDTYLNPLSLEGGNQCVDETILQNLVVLWHGRNKEDIITKLMEPGANLEKTFYALLHRFKHDNYQDQLKQQELQKKQSVSSNSLMYVGSLPSPNKSDSPVTTPKKKRTSIIVASSSHKRPVSMQKLSSQHSSPVKNGSIGKRLSKTFPSNKRISQLVSNSSSPTPAAHKRVSRINDSAAPPVPKEMLRDYKRQSKRQSKRFSLLPNMKRGSITTKLIATYAKLSEDSEWEYIEKETKRTSQDFATLMDQIFEHEKYEQIRKEKEELERKVNEAREKEEAERKERERIEREEQERLEREERKRAERQKELQDQMEDEIAKLKAEYEAVQGSSDERNTANGRSVSAPIETDRTANKRDSTFGIKNDINELINTRNFSLQTRPVSRLDPGIIAAESRLSANLEDDQASKEKTILETIRRSKFLGSQFNLNVELEKAQKDLVSKERQEQLRKYSEQTAKYEVQKLPKNAKAVATLRDDEVEPRKLSEVKVPQFTRRSKHFSSSNKRFSVLSLYSTKTSFTNLVDHLKNDNYLEPLPGQPEYSSSKVAQEPEFMFETVEELDENSKLFEVPETEEGKLASAARKESTDARKQSTNDKDINLPSLPPLQVSHDVADENGALGLGIYQPNDQTQKPHKTMLIDESIDENISSTSDVSRTEVVKKPPLNDVVRKNNNERKPLEEITPKVENKRKISFFRKFSQGSEKKLGPESFDSQLKAGVSAPKMYKALDRLLNEWTNYGLKHVESSPNDFVISGKLTSDNILSLRSTGFKITVLPGEGNGSIIQFTKKSGSTKTFNRLVKEIEKILEKEKVLVFSF

SEQ ID NO: 13751 - protein, 435 aa, Mesorhizobium loti MAFF303099
MTNDFWPHRNRRQGEARVTSEAPCSPQGALPQSSGMPIAQVAGQELWPIGLPRAKAPHTSYMEPTIPFSRPGFQGPVISRQAMSDAQTQIPVTVLTGYLGAGKTTLLNRILSENHGRRYAVIVNEFGEIGIDNDLIVESDEEIYEMNNGCVCCTVRGDLIRVVEGLMRRPGRFDAIVVETTGLADPVPVAQTFFMDDDVRSKTKLDAVVALVDAKHLPLRLKDSKEAEDQIAFADVVVLNKTDLVTPEELAKVEATIRAINPAAKIHRTTRAGVALSEVLDRGAFDLSRALENDPHFLEGHDDHDHHDHDHHDHDGHHHHDHDGHDHHHHDHPSDIHDVTVQSVSLRGGEMDPKKFFPWIEKITQMEGPNILRLKGIIALKGDDERYVIQGVHMIIEGDHQRAWKDGEKHESRLVFIGRELDAERLKKSFDACQA

SEQ ID NO: 13752 - protein, 588 aa, Shigella flexneri 2a str. 301
MKLPVREFDAVVIGAGGAGMRAALQISQSGQTCALLSKVFPTRSHTVSAQGGITVALGNTHEDNWEWHMYDTVKGSDYIGDQDAIEYMCKTGPEAILELEHMGLPFSRLDDGRIYQRPFGGQSKNFGGEQAARTAAAADRTGHALLHTLYQQNLKNHTTIFSEWYALDLVKNQDGAVVGCTALCIETGEVVYFKARATVLATGGAGRIYQSTTNAHINTGDGVGMAIRAGVPVQDMEMWQFHPTGIAGAGVLVTEGCRGEGGYLLNKHGERFMERYAPNAKDLAGRDVVARSIMIEIREGRGCDGPWGPHAKLKLDHLGKEVLESRLPGILELSRTFAHVDPVKEPIPVIPTCHYMMGGIPTKVTGQALTVNEKGEDVVVPGLFAVGEIACVSVHGANRLGGNSLLDLVVFGRAAGLHLQESIAEQGALHDASESDVEASLDRLNRWNNNRNGEDPVAIRKALQECMQHNFSVFREGDAMAKGLEQLKVIRERLKNARLDDTSSEFNTQRVECLELDNLMETAYATAVSANFRTESRGAHSRFDFPDRDDENWLCHSLYLPESESMTRRSVNMEPKLRPAFPPKIRTY

SEQ ID NO: 13753 - protein, 338 aa, Agrobacterium tumefaciens str. C58
MSDMTTTSEPFAAAEHHHIYLGQNHERNERRVWMVIALTTVMMVAEIVAGHWFGSMALTADGWHMSTHAGAMLISALAYLYARREARNPRFSFGTGKFGDLAGFASAVVLAVVALLIAVESGLRLVSPVQIDFNQAILVAVIGLVVNLVSAVLLKDDHHHDRGHGHGHGHASHAHHGHGSHAHHDHGSHAQHGAKGGRDNNLRAAYLHVLADALTSVLAIVALLLGKWNGWNFLDPLMGIVGGLVIARWSWGLIRSTATTLVDAVPLTDDLPQEIRDTVETEEDRITDLHVWQVGPGHHAAIVAIHSQAPKAPAFYKQKLAAIHELSHVTVEVSPASA

SEQ ID NO: 13754 - protein, 311 aa, Glycine max
MATHFVLNTGAKIPSVGLGTWQSDPGIVGEAVYAAVKAGYRHIDCARAYNNEKEVGLALKKLFEESVVKREDLFITSKLWCGHHAPEDVPEALGDSLDDLQLDYLDLYLIHWPFRVRKGTSIGNPENFLPPDIPATWGAMEKLHDAGKARAIGVSNFASKKLGDLLAVARIPPAVDQVECHPGWQQSKLHTFCQSAGVHLSAYSPLGSPGSTWMNGNVLKEPVVLSIAEKLGKTPAQVALRWNIQMGHSVLPKSVSEERIKQNLAVYDWSIPEDLLAKFSEIKQARLLMGNFIVNKDSVYKTHDELWDGEI

SEQ ID NO: 13755 - protein, 220 aa, Guillardia theta
RGLQGTRMGLLGSLFGGSGKREYSDLKAGTWAAEAAEYAKEGQVKSVSKAGHSIATFGGGCFWGIELVYQRVPGVVATAVGYAQGELEHPSYEMVCTGATGHTEVVQLTYNPKEVSFKQLCQVLFGKINPSLKDQVGNDRGSQYRHGIYFHTPEQKAEAEEAIQEVKAKLNGAPFYTELEAAKVFYPAEEYHQQYLEKGGRFGSKQSAAKGCNDPIRCYG

SEQ ID NO: 13756 - protein, 443 aa, Leptospira interrogans serovar lai str. 56601
MNQNKPTSKLISDFWKGKTSEELFERAKKVSPGGVHSPVRSFRSVGGTPVFFASAKGATLTDISGKEYIDYCLSFGPLILGHRDPEVEEVVRETTEIAWSFGAAEPYSLELAELISSRVPWAEKVRFVNSGTEAVMSALRVARAATGREKILKFDGCYHGHLDSLLVKAGSGLAGESSSDSAGISATSIANTLVLPLDDEASVERVFETEGKNIAALIIEPLPANYGLLIQRKEFLLKIVETARKYGTLVVFDEVISGFRVGFQGMSGLLGIWPDLVTYGKIIGGGFPVGCYAGKKDLLDLVAPSGPVYQAGTLSANPFGMRAGLATLKKVQRDSIYSVLDDRTKIFTDTMTKLLNKKSNQEWEAVIHSSLFWFRKKTQQPIRRIDLIPEGHKESFAKVFHTFLKNGIYLAPSGYEVGFLSWAHDDEIIAKTLEIADKALKTF

SEQ ID NO: 13757 - protein, 415 aa, Arabidopsis thaliana
MGSSMEEKVVAVIMVGGPTKGTRFRPLSLNIPKPLFPIAGQPMVHHPISACKRIPNLAQIYLVGFYEEREFALYVSAISNELKVPVRYLREDKPHGSAGGLYHFRNLIMEDSPSHIFLLNCDVCCSFPLPKMLEAHRGYGGIGTLLVIKVSPESASQFGELVADPVTNELLHYTEKPETFVSDRINCGVYVFTPEIFNAIGDVSTQRKDRATLKRVSSFEALQPATRIPTDFVRLDQDILSPLAGKKRLYTYETMDFWEQIKSPGMSLRCSGLYLSQFRLTSPQLLASGDGTRSAIVIGDVYIHPSAKVHPTAKIGPNVSISANARVGPGVRLMSCIILDDVEIMENAVVTNAIVGWKSSIGRWSRVQAEGVYNSKLGVTILGDSVAVEDEVVVTSSIVLPNKTLNVSVQDEIIL

SEQ ID NO: 13758 - protein, 262 aa, Brassica napus
  misc_feature (131)..(131): Xaa can be any naturally occurring amino acid
  misc_feature (138)..(138): Xaa can be any naturally occurring amino acid
  misc_feature (160)..(160): Xaa can be any naturally occurring amino acid
  misc_feature (166)..(166): Xaa can be any naturally occurring amino acid
  misc_feature (223)..(223): Xaa can be any naturally occurring amino acid
  unsure (1)..(262): unsure at all Xaa locations
MELWTEARALKASLRGEAIKHQVIVAEDLSRTSSAEDFSVECFLDFSEEGQERDEEQLVSVCSSQEEQEQDYCIFSSQPCIFDQLPSLPDEDVEELEWVSRVVDDCSSPEVSLLFTQTLKTKPSFSSSVPXKPRTKRXRNSLIDDRVWPLVSTNQHATGXQCQKKXQETAVLFQRRCSHCGTNTTPQWRTGPAGPKTLCNACGVRFKSGRLCPEYRPADSPTXSNEIHSNLHRKVMELRKSKELGEERGEATTKSDQVKFGS

SEQ ID NO: 13759 - protein, 332 aa, Triticum aestivum
  misc_feature (44)..(44): Xaa can be any naturally occurring amino acid
  misc_feature (59)..(59): Xaa can be any naturally occurring amino acid
  misc_feature (242)..(242): Xaa can be any naturally occurring amino acid
  misc_feature (262)..(262): Xaa can be any naturally occurring amino acid
  misc_feature (286)..(286): Xaa can be any naturally occurring amino acid
  unsure (1)..(332): unsure at all Xaa locations
DPRVRKSKGQRLGARNQEGFHQQESDRHTDALDAITSVLGRTQXSGILSVEWSDEHRQXGLLVGTQLGSGPLFGADLPMTEGVADVMGAFQVIAELPGDNFGAYVISMATSPSDVLAVELLQRECHIKTPLRVVPRGEGLAVLQAAPPALARLFSIDWYRQRINGKQEVMIGYSDSGKDAGRLSAAWQMYKAQEDLVEVAKQFGVKLTMFHGRGGTVGRGGGPTHLAILSHPPDTINGSLRXTVQGEVIDQSFGEEHLCFRXTLQGFTAATLEHGMRSPISPKPEXWQALLTKKACGCTAQIIGSIFFPKPRPGRSISALSTTVQHCFGQAY

SEQ ID NO: 13760 - protein, 465 aa, Xanthomonas axonopodis pv. citri str. 306
MPEPSSATAPQFQRSMQVRHLVMLSLGGVIGTGLFFNTGYIIASTGALGTVLAYLIGALVVYLVMQCLGELAVAMPQTGAFHVYAARYLGPATGYVVAWLYWLTWTVALGSSLTAAAFCMQYWFPHSLAWPWCLLFCALIFGLNTVSARWFAEGEFWFSLIKVITILVFIVLGGAAVIGLLPLADGSPAPGLRHLRANGWFAHGTLPILMTMVAVNFAFSGTELIGVAAGETAQPARAIPLAIRTTLVRLVVLFVGTVLVLAALLPARRAAVETSPFVRAFELLGIPYAADILNAVILTAILSAANSGLYAAARMLWSLANEGTLPSGLARLTGRGIPLRAVSLSMLGGLLALLTGVYAPETVFVAISAVSGFAVVVVWLSICAAHYRFRRQWLRDGAALETLAYRAPWYPWTPILGFSLCLLACIGLAFDPQQRIALWCGIPFVALCYGAYALTQWLAARRLYA

SEQ ID NO: 13761 - protein, 237 aa, Oryza sativa
MWHRPGHFTPHYDLLSSSQSTHAQAPPPPHLLGRSQQQHQQQKQMGGLSVIAPPAGDSASPAHRRARRAFLVSNYMILGAASGCGFLTLSLRLVPSVDGFLLILLHAITVAAAVAGCAVIAAPDPPRGRVYTTHMAGTVFVSILQGAAAVLTFSRTSDFLADGLKSYVREEDGAVILRMIGGLGVAIFCLEWIALALAFVLRYYAYVDRECGGNPLRRSAKVGGEDGAGTWPWPFQV

SEQ ID NO: 13762 - protein, 272 aa, Ralstonia eutropha JMP134
MGRQRTTGRVRTLIEITLTDKDGGTHLHMRHSGFPDAATRDSHDNGWQSVFNNLSDYLDAEGSAGTLTVYGDARSTYVRTVRLALEEKGVRYTLKPVPPHSDELLSHNPFGRIPAFSDGPIDFYETRAILSYINEVFGGPNLIPQTGPTARARCEQWISLINCHAYDAMVRRYVLHYVFPKGKDGQPDRAVIDAALPDIEKQLDVLEQAYGGRDFLVGNALSMADLFFAPIVEYLGRFPESAAMLETRPNIRHAHAIMRARPSYAATQPELG

SEQ ID NO: 13763 - protein, 1005 aa, Cryptococcus neoformans var. neoformans B-3501A
MTSFNPAPAQIQAAQDHTYGSMPTPTYMGMVDTGAQWDYVGRRGSSRSREPSASPQRAATESGIPRTSTHAASASASSSYAPVAGASGQASSAPHEPTIREEATAVVDRSMRAHQQTTGPSNGNGNSQPKKSKVRMVGDWQLNKTLGAGSMGKVKLATNIVTKEKCAVKIIPRYTDANRKEETTRTPEEVEKQRLKDESKEIRTIREAHISLLLHHPYICGMREFISHQNHHYMVFEFIDGGQMLDYIISHGRLRERAARKFARQIGSALNYCHQNSIVHRDLKIENILISKNGNIKLIDFGLSNLYSPSRHLSTFCGSLYFAAPELLNARPYTGPEVDVWSFGIVIYVLVCGKVPFDDQSMPALHAKIKRGVVEYPSWLSAEVKSLLSRMLVTNPAERATLAEVLSHPFMTKGYDGPPDSFLIRRELLRAEEIDMNVVEAMEGFTFGDANTIYRNLHSILTSEDYLHCVATFEAHREKLRTSSPGVSTNDPSDSPKKKRFSGFDLKKRLFKEDKKVEEAPFKEKVRDPTKGYDPLISIYFLAREKIERERVFGPGFFASSQLSLDTFNTSQGYGMAVPNLPPPASTHVMGHDSSRGPDFASEPRPRSDDVPNPVLAHPSADREQSKLADIPSAVHRRQPSLSQPPLPSSMPAAVERSADEGLTKKFSMLGRGPRPPSAGPSGPSRSASTKRESMTASPSMPIQEHRRATTVVHSDKSKQERRVSVGSFTNSVSKASGLARRASQRDRPPATPPDSRWLNAPAEAEEYHQVETSVRPSSTPREPEPDTANEPRSYDDVKPSYLKGIFSVSTTSTKPANVLIRDIAMVLDRIGIKHRPIKGGFECVHMPSIDLASVVNGDEASTSLSNVPSHASGARRKQSLRRKGSKVNMNGISSNGAGSRATSPGPHRVLTGNSSGTVSGGDVAHLSVPSGKNRHHVGTVEEDEVDAWALAQSGGAGSSLIVRFEIFVVKVPVLPLHGIQFRRVGGDGWQYQMLAKAILREMRL

SEQ ID NO: 13764 - protein, 503 aa, Muscari armeniacum
MSFTDHHYLLLILFLIPILVYTIRRKISSTKSKLPPCPPKLPLIGNLHQMGTLPHQSLHALSVKYGPLMLLKLGQIPTLIVSSADMAREIMKTHDHIFASRPSLMTAGIILYGSMDVVFAPYGEHWRQMRKLCVNHLLSPKAVQSFRRMHEEEVATMVAKISEVSSSSGVVNMSETLNLFASNAMLKAISRKLFRDERRSRVICELNEETAAILGQFSVSDFMPLLAWFDMVFGVGARAKKTARLWDRVLHEIIEDCRNRRDSEVNTDFVNVLLALLEDNDMDFSLNKDIIKAVLQDMIAAGTETSSTAMDWCMAELVRNPEAMKKLQDEVRGIANTKPMITDDDLSKMGYLKAVIKELLRLHPPVPLLIPRESMDHCEVQGFDIPKQTRVIVNAWSIGRDPNVWEAPEEFRPERFLDCAINFRGHDFELIPFGAGRRICPGMQFAVSTLELALANLVRSFDWELPDGMNNEDLGMGDGPGLSARRRQSLLLVAKPFLGLKCM

SEQ ID NO: 13765 - protein, 180 aa, Escherichia coli
PGKINLGIGVYKDETGKTPVLTSVKKAEQYLLENETTKNYLGIDGIPEFGRCTQELLFGKGSALINDKRARTAQTPGGTGALRVAADFLAKNTSVKRVWVSNPSWPNHKSVFNSAGLEVREYAYYDAENHTLDFDALINSLNEAQAGDVVLFHGCCHNPTGIDPTLEQWQTLAQLSVEKG

SEQ ID NO: 13766 - protein, 583 aa, Staphylococcus aureus
MMSRLNSVVIKLWLTIILIVTTVLILLSIALITFMQYYFTQETENAIREDARRISSLVEQSHNKEEAIKYSQTLIENPGGLMIINNKHRQSTASLSNIKKQMLNEVVNNDHFDDVFDKGKSVTRNVTIKEKGSSQTYILLGYPTKAQKNSHSKYSGVFIYKDLKSIEDTNNAITIITIITAVIFLTITTVFAFFLSSRITKPLRRLRDQATRVSEGDYSYKPSVTTKDEIGQLSQAFNQMSTEIEEHVDALSTSKNIRDSLINSMVEGVLGINESRQIILSNKMANDIMDNIDEDAKAFLLRQIEDTFKSKQTEMRDLEMNTRFFVVTTSYIDKIEQGGKSGVVVTVRDMTNEHNLDQMKKDFIANVSHELRTPISLLQGYTESIVDGIVTEPDEIKESLAIVLDESKRLNRLVNELLNVARMDAEGLSVNKEVQPIAALLDKMKIKYRQQADDLGLNMTFNYCKKRVWSYDMDRMDQVLTNLIDNASRYTKPGDEIAITCDENESEDILYIKDTGTGIAPEHLQQVFDRFYKVDAARTRGKQGTGLGLFICKMIIEEHGGSIDVKSELGKGTTFIIKLPKPE

SEQ ID NO: 13767 - protein, 181 aa, Escherichia coli
IGVYKDETGKTPVLTSVKKAEQYLLENETTKNYLGIDGIPEFGRCTQELLFGKGSALINDKRARTAQTPGGTGALRVAADFLAKNTSVKRVWVSNPSWPNHKSVFNSAGLEVREYAYYDAENHTLDFDALINSLNEAQAGDVVLFHGCCHNPTGIDPTLEQWQTLAQLSVEKGWLPLFDFA

SEQ ID NO: 13768 - protein, 1043 aa, Vibrio parahaemolyticus RIMD 2210633
MFTATNVLTPEFIGQPLDKLWSLISPLYMVDESQWLEQLLPLATPTTEEKSAITNQTTKLIEAIRADKKSIQMIDALLLEYSLDTQEGILLMCLAEALMRIPDAATADALIKDKLSVADWKSHLKNSDSVFVNASTWGLMLTGKVVGLGEQGTQSPSQAVNRLVNKFSEPVIRKAMYQAMKIMGHQFVRGRTIEEAQKNGRPMRDKGFTYSFDMLGEAALTTADANKYFKDYLMAIEAVGRETYGNDTSPAPSVSIKLSALHPRYEVANEERVMTELYETLMQLLKRAIEVDVAITIDAEEADRLELSLKLFEKIYRSDLVKGWGKFGLVVQAYSKRALPVLVWLNALAKEQGDLIPLRLVKGAYWDSEIKWSQQAGYENYPVYTRKEATDVAYLACARFLLSEGVRGNIFPQFASHNAHTVTAIAVMAQHKDFEFQRLHGMGDSLYNHVMEKYGQPVRIYAPVGSHADLLPYLVRRLLENGANSSFVHRLVDARCPISELTHHPVDALTSFATLNNDKIPMPSGIFPERKNSYGVNIDIESEAKPFEAQVESFLNNKWVAGPVINGERFAESMIKENLAEIITAPYDRRVEVGQVAFATLDHVSAAIEAAQAAFPEWKGTAIEQKAKCLETLADLMEANLAELVAICHQEAGKTIHDSIDEVREAVDFCRYYAKQAQNLQPFELEGFDGVKRISSREGLGVFVCISPWNFPLAIFLGQVTAALVAGNTVVAKPAEQTSLIAARAIDLMLEAGFPAGVIQLLPGRGGEIGHALTSHDAIAGVAFTGSTATAQRINVTLAERTAKPVPFIAETGGQNAMIVDSTALPEQVVRDVIRSAFASAGQRCSALRVLFVQEDVADRIITLIQGAMKELHVGLPYLHKTDVGPVIDRNAKQKLLAHLEQMSSTQKKVAQLQLEEACQYGDFVAPSAFEISGIDVLKEEQFGPILHIVRFKASELPNVVEQINQTGFGLTMGIHSRNETTYRWIEKHARVGNCYINRDQVGAVVGVQPFGGQGLSGTGPKAGGPHYLYRFTQHLLAQAENA

SEQ ID NO: 13769 - protein, 258 aa, Zea mays
MADPAEENVVSPPPTPAAPAVGASDPPLQPAADSASTEKVSAPAPEVRSRGFRLLGEDTSVHKSLGGELSAAADVLLWKDKKTSAVVIGGATVIWVLFEVLDYHLLTLISHVLIGVLATLFLWSKATTFIKKSPPDIPVVQVPEDLVVNVSRALCNDINRALHLFHEIAMGHDLKKFLFVIVGLWVNSVFGSSCDFLTLIYIAVLLLHTVPILYDKYQDKVDHFAGRAHTEALKQYEVLDAKVLSKIPRGPVKSKKQN

SEQ ID NO: 13770 - protein, 127 aa, Triticum aestivum
  misc_feature (43)..(43): Xaa can be any naturally occurring amino acid
  unsure (1)..(127): unsure at all Xaa locations
MASRSCTFLEILLAIILPPLGVFLHYGCCSMEFCICLLLTILXGYIPGIIYAVYVLRCARLKRSVIRDYDTLALIILQQSVCVMNSRLVFCESTPVFPSWTVYLFPVTLLMLHPPFVCLPGIIQPNI

SEQ ID NO: 13771 - protein, 612 aa, Kluyveromyces lactis NRRL Y-1140
MLIEALWIVLLFGVSQCKDLKFDISRHEDGRTIRLNENDDLIKPPLRLRNGEQLNLQIENHLDQPTAIHFHGLLLENFVGEELATGKQPAVLGDGVPGISQYEVGVNRSYWQNITVSKTTCGTFWYHSHYAVQYGEGLRGPVIVDCDQFDNHERDVAKEFGLGAHVQEQIITLSDWYKYPHDFIMDAFLQPNKGADPHVDGSLFNGKQDENQVIQVDPDTEYLRLRILNMANSNTQVFHIANHKMIVIETDGILVKPVELSTLTLATGQRYTVLVKRDENNQNARIIHGCNKMMGYITKSHVLQYYPSFSTAVSSSSVSISRLPDFTSIELYKKYEPIDWMLLPDPESNDQKFSLDYEQSTSAATKQKYHTSMFFVNGDTMGEFMNPASAVPLLISMENATKKPINVGFGGTVDIAINSIDHMRHPWHLHGHHFQVISIGESGDGPLHWDNPSSRAYAKYSEDLTYWKSSGRVPMTRDTINIAGSSFAVIRFQADSPGLWLLHCHVDWHMVKGLGVVIQEGLETLPLDSLVIREPTNIVTPKPKLNPDIELLHEESISSTPTPPPTPLPTVQADADHAINTQPETSKLKVIGIYCAVVVFLDIMLYKYMLSR

SEQ ID NO: 13772 - protein, 82 aa, Glycine max
MAPTRRMAASALLLLLLLVATEMGTTRTKTAEARDCLSQSHKFKGACLSSSNCAGVCRTENFPDGECHTHNFARKCFCKRAC

SEQ ID NO: 13773 - protein, 237 aa, Mesembryanthemum crystallinum
MDFAVMKQVKNTGLLQSEELCQYILRTSVYPREAGFLKELREANESHPDSYMSTSPLAGQLMSFVLKLVNAKKTIEVGVFTGYSLLLTALSIPDDGKITAIDFDREAYEIGLPFIRKAGVEHKINFIESDAMLALDNLLQGQESEGSYDFGFVDADKPNYIKYHERLMKLVKVGGIVAYDNTLWGGTVAQPESEVPDFMKENREAVIELNKLLAADPRIEIVHLPLGDGITFCRRLY

SEQ ID NO: 13774 - protein, 502 aa, Zea mays
  misc_feature (10)..(10): Xaa can be any naturally occurring amino acid
  unsure (1)..(502): unsure at all Xaa locations
MWKQLLSKLXPRKSPACGDSGQCSNGTGIQRTSSCGSIPPGRPASAIRRMSSAVFPSSVVAGIEPLVSFKDVPNSEKQNLFVSKLSLCCVVFDFSDPNKSSVEKDIKRQALLDLIEFVESTNARFSEAAIAACSRMCAINLFRAFPPSCRSGSSGGGEGDEEEPMFDPAWCHLQLVYELLLKFIGSSSLDAKVGKKHFDHSFIVKLLNLLDSKDPRERDCLKTILHRVYGKFMVHRPFIRKAVSNIFYQFVFETDRHNGIAELLEVFGSVISGFALPLKEEHKIFLWRVLIPLHKPKSVGVYLQQLTYCVTQFLEKDPKLASSVIIGLLRYWPITNCQKEVMFLSEIEEILESTSQAEFQKCMVPLFRRIAHCITSSHFQVAERALFVWNNDNIISLIAQNRQVIMPLVVPALEQNIQNHWNQAVLNLTVNVKKMLSEMDDDLFSSCLAKYKDEKEKRVSLEAKRRLTWEKLESAAAFQPVTGHTAVLVGHRPSANLIATMI

SEQ ID NO: 13775 - protein, 1104 aa, Kluyveromyces lactis NRRL Y-1140
MPSAQDYHVNPHFHMGDREGEHQQPPMAPATPRMMGRRVSESSAPGLMPAANIVNDTTQQPQQQPQLQTVPQSVPVPAQSFNDVVSNKPFHRKSLGDWDFLETVGAGSMGKVKLAKHRLTNEVCAIKIVNRAAKSYMHKQNQLPPPKTEEELMERKKKLEKELSRDRRTIREASLGQILYHPHICRLFEMCTMSNHFYMLFEYVSGGQLLDYIIQHGSLRERHARKFVRGIASALQYLHLNNIVHRDLKIENIMISTSGEIKIIDFGLSNLYDNKKQLHTFCGSLYFAAPELLKANPYIGPEVDIWSFGVVIYVLVCGKVPFDDENASVLHEKIKKGKVEYPQHLSIECISLLSKMLVVDPLKRASLKQVCNHQWMQRGFDFPPPSYIPHRVPLTVEMLDVNVIKEMHRLELVNDVNDALQALRDIIDSHEYKELSREYWYNVQNSNNQEDGTRAFHPLLSIYYLVDEMLKRKLAKRLQKQQQLQQQQQQQLQAGYQSKPFQGQSQPIFPSDQVDTSIPLPDQSQPKTLQQPVSVNNSDYIVRPSSIKEVSPEHTTSPAAYIPSNLERNSTVVASPVRNKELPQIMIPPKLAIPELAHTSPTRKSSDANPELDAVMSPSPAPMDYPSQQEQTKQQQANKYNMGSVKTSTTSSEKPKIGSIFRRLSQRHRHAQTINQGSLQVQEPKSVALQTNAAPKVRKTHTRTVSEHVPSTSRYADPYYSENAPRDMQGDLPALPANADVLVKQQQERLNDLKLNNELDDESETQSTKYDENQPLALLSLPKGKKLHPSARAKSVGHARRESLKYNRPPVLTTSAANTSSDGSTAPGRINTNDDGFLQSSSEGNALQIDDISPWEELTDEQIIERASKAPPGSMPSIDFPRSLFLKGFFSVQTTSSKPLPVVRYKIISTLKKLNIEFTEVKGGFICCHRQSYVSQEQPPNHGRHPSIVINETSSLESNSSTANSHRKQLSIPSRHGSIRRHGSLKQPGIPATPLAAATHERNLSVTSPRTSTGQILEEVSTASFETLNNQEDILTNSKAQDMNKVVIGNKNEAGNKERPPLKFEIHIVKVKLVGLAGVHFKKVSGNTWMYKELATHILKELNL

SEQ ID NO: 13776 - protein, 401 aa, Arabidopsis thaliana
MYVVESKAGAIGCMILSLCCLGSWPAILTLLERRGRLPQHTFLDFATANLLAAIVIAFSLGEIGKSTFLKPDFTTQLPQDNWPSVLLAVAGGVLLSIGNLATQYAFAFVGLSVTEVITASITVVIGTTLNYFLDNKINKAEILFPGVGCFLIAVFLGAAVHASNAADVKEKLKSLPSEDLYSSIENGEDKPEIEKTDVESQEKLAEKAKAGTAGFYVELENKRAIKVFGKSIMIGLFITLFAGISLSLFSPAFNLATNDQWSTLPKGVPKLVVYTAFFYFSIAGFLISLILNLIFLYRPMVGLARSSLKKYIYDSKGRGWAVFAGFLCGFGNGLQFMGGQAAGYAAADSVQALPLVSTFWGIVLFGEYRKSSKRTYALLVSMLAMFVAAVAILMASSGHRK

SEQ ID NO: 13777 - protein, 289 aa, Bifidobacterium longum DJO10A
MTNEATTPSGQPLGISHKPSKSVAMFTKFKAENKPAFIGYLPYGFPNPDVSLDAFKTMVEHGVDAVEIGLPYSDPVMDGPVIQAAASIALNNGETIKRVFEAVETVANAGGVPLIMSYWNLVYHYGVERFARDFENAGGAGLITPDLIPDEAGEWIEASDRHGLDRIFLVSPDSSTERLETVARNARGFVYAAARMGVTGERATIDASPELLVERTRQAGAENVCVGIGVSTAEQGAKVGSYADGVIVGSALVHTLLADDNKTARDPKEGLKLLAAKSEELAEGIHNAR

SEQ ID NO: 13778 - protein, 459 aa, Staphylococcus aureus subsp. aureus MSSA476
MENNELQRGLSARQIQMIALGGTIGVGLFMGATSTIKWTGPSVILAYLIAGIFLFLIMRAMGEMIYLNPTTGSFATFASDYIHPAAGYMTAWSNIFQWIVVGMSEVIAVGEYMKFWFPELPTWIPGVIAILLLMAANLFSVKAFGEFEFWFALIKVVTIILMIIAGFGLIFFGFGNGGHAVGISNLWTNGGFMPNGIVGFFFALSIVIGSYQGVELIGITAGETKDPQKNIVKAVNGVIWRILIFYLGAIFVIVSVYPWNQLGDIGSPFVATFAKIGITFAAGLINFVVLTAAMSGCNSGIFSASRMIYTLAHKGEMPKIFTKIMRNGVPLYTVIAVSLGILIGALLNVILPLYIDGAKSIFVYVYSASILPGMIPWFMILFSHLRFRKLHPEELEGHPFKMPGGAVTNYLTILFLILVLVGMVFNVETRISVLIGVIFLTIVTIYYFIRYNKNNVKAK

SEQ ID NO: 13779 - protein, 215 aa, Archaeoglobus fulgidus DSM 4304
MIVDKDKLVKSIEEAIKNGKKRRFVETVEMAVNLRNVDMKKPENRIDTVVNLPHGLGKPRKIGVFAKGDTALKAKEAGADVVITPEEIDELAKDKRRAKKLANSIDFFIAEAPLMPEIGRKLGPVLGPRGKIPQPIPPLADPKPFIDRLRNSVKIRTRDKTTFHAPIGSENMDVEKIAENAMEILKVVENKYENPTQVVKSVYVKKTMGPAVRVV

SEQ ID NO: 13780 - protein, 493 aa, Arabidopsis thaliana
MGRDFLVLSILILLLSGIVSSAPSANSPATIATRSMVKFENGYSVETVFDGSKLGIEPYSIEVLPNGELLILDSENSNIYKISSSLSLYSRPRLVTGSPEGYPGHVDGRLRDAKLNHPKGLTVDDRGNIYVADTVNNAIRKISEGGVTTIAGGKTVRNGGHVDGPSEDAKFSNDFDVVYVGSSCSLLVIDRGNKAIREIQLHFDDCAYQYGSGFPLGKLTKVPNFFLWIAVLVAAGFFGYMLALLQRRVGSIVSSHNDQEMFEADPDQKPMKHSRPSLIPAGDEQLEKQEETFVVSLGKLVSNAWESVMEILRKKQTGTSFQQYHGTTKQSAAFSTSTPWPIQESFVIRDEDGPPPVEPRNPTPRKTYAFMSKDAEKMQQLRQSRAFYSSWDAEFPNQQQQQQKQHQKHQHQQQQQQQHRRHYSSIPHTYYEQDSEKSNEIVFGAVQEQSSKRVAKPKPKPIESGDQMNNNTQQNLHYRSHSVSYPYGYYPNT

SEQ ID NO: 13781 - protein, 211 aa, Staphylococcus aureus subsp. aureus MSSA476
MYRAVIFDFDGTIIDTEQHLFNVINKHLEMHNADPISIDFYRSSIGGAATDLHDHLIKAIGSENKDKLYEEHHLTSTTLPMIDTIKSLMAFLKQRHIPMAIATSSVKAEIMPTFKALGLDDYIEVVVGREDVEQVKPDPELYLSAVQQLNYMPTQCLAIEDSVNGATAAIAAGLDVIVNTNKMTSAQDFSNVDYVAKDIDYDQIVARFFTK

SEQ ID NO: 13782 - protein, 383 aa, Arabidopsis thaliana
  misc_feature (210)..(210): Xaa can be any naturally occurring amino acid
  unsure (1)..(383): unsure at all Xaa locations
MQIFVKTLTGKTITLEVESSDTIDNVKAKIQDKEGIPPDQQRLIFAGKQLEDGRTLADYNIQKESTLHLVLRLRGGMQIFVKTLTGKTITLEVESSDTIDNVKAKIQDKEGIPPDQQRLIFAGKQLEDGRTLADYNIQKESTLHLVLRLRGGMQIFVKTLTGKTITLEVESSDTIDNVKAKIQDKEGIPPDQQRLIFAGKQLEDGRTSCXDYNIQKESTLHLVLRLRGGIQIFVKTLTGKTITLEVESSDTIDNVKAKIQAKEGIPPDQQRLIFAGKQLEDGRTLADYNIQKESTLHLVLRLRGGMQIFVKTLTGKTITLEVESSDTIDNVKAKIQDKEGIPPDQQRLIFAGKQLEDGRTLADYNIQKESTLHLVLRLRGGSF

SEQ ID NO: 13783 - protein, 470 aa, ASPERGILLUS NIDULANS FGSC A4
MINSKEDKTHINIVVIGHVDSGKSTTTGKTSSHPTGHLIYKCGGIDQRTIEKFEKEAAELGKGSFKYAWVLDKLKSERERGITIDIALWKFQTPKYEVTVIDAPGHRDFIKNMITGTSQADCAILIIASGTGEFEAGISKDGQTREHALLAFTLGVRQLIVALNKMDTCQWSEARYNEIVKETSGFIKKVGYNPKAVAFVPISGFHGDNMLEPSANCPWYKGWEKETKAGKVTGKTLLEAIDAIEPPVRPSNKPLRLPLQDVYKISGIGTVPVGRVETGVITPGMVVTFAPANVTTEVKSVEMHHQQLKEGVPGDNVGFNVKNVSVKEIRRGNVAGDSKNDPPAGAASFTAQVIVLNHPGQVGAGYAPVLDCHTAHIACKFAELQEKIDRRTGKSVESSPKFIKSGDAAIVKMIPSKPMCVESFTDYPPLGRFAVRDMRQTVAVGVVKSVEKSTAGAGKVTKAAQKAGKK

SEQ ID NO: 13784 - protein, 196 aa, Triticum aestivum
MAAPSAALSISGGAHTSAFGCKPKKLISNRNFLQLAVPSNSQNANLYGKLTVCRAESEDSKGGGGFLTGFLIGGAVFGTLGYVFAPQISKTLDTLLNDDGQDGKPDEQGVQSVPRPRNAQYYDEGLEKTRQTLGDKISQLNLAIDKAAARLKRVTGSVEKEAVKDETEIEISTLDDNGVLEGNSSEQGFVQGESAT

SEQ ID NO: 13785 - protein, 704 aa, Bacillus ohbensis
LKNLTVLLKTIPLALLLFILLSLPTAAQADVTNKVNYTRDVIYQIVTDRFSDGDPSNNPTGAIYSQDCSDLHKYCGGDWQGIIDKINDGYLTDLGITAIWISQPVENVYALHPSGYTSYHGYWARDYKRTNPFYGDFSDFDRLMDTAHSNGIKVIMDFTPNHSSPALETDPSYAENGAVYNDGVLIGNYSNDPNNLFHHNGGTDFSSYEDSIYRNLYDLADYDLNNTVMDQYLKESIKLWLDKGIDGIRVDAVKHMSEGWQTSLMSDIYAHEPVFTFGEWFLGSGEVDPQNHHFANESGMSLLDFQFGQTIRDVLMDGSSNWYDFNEMIASTEEDYDEVIDQVTFIDNHDMSRFSFEQSSNRHTDIALAVLLTSRGVPTIYYGTEQYLTGGNDPENRKPMSDFDRTTNSYQIISTLASLRQNNPALGYGNTSERWINSDVYIYERSFGDSVVLTAVNSGDTSYTINNLNTSLPQGQYTDELQQLLDGNEITVNSNGAVDSFQLSANGVSVWQITEEHASPLIGHVGPMMGKHGNTVTITGEGFGDNEGSVLFDSDFSDVLSWSDTKIEVSVPDVTAGHYDISVVNAGDSQSPTYDKFEVLTGDQVSIRFAVNNATTSLGTNLYMVGNVNELGNWDPDQAIGPMFNQVMYQYPTWYYDISVPAEENLEYKFIKKDSSGNVVWESGNNHTYTTPATGTDTVLVDWQ

SEQ ID NO: 13786 - protein, 234 aa, Saccharophagus degradans 2-40
MHALVEGGADIIEVGVPFSDPMAEGPVIQRGHERALEHNVSLKGTLALVKEFRKANSDTPVVLMGYANPVERMGYELFAAQAKAAGVDGLLTVDLPPEEAVELNKELVANGLESIFLLAPTTTEERMKKVVGLASGFLYYVSLKGVTGAGHLDVNAVKERVEKISSLTDLPVLVGFGIKDPESAKSIGANADGVVVGSVLVDAMGNAASESDEVICEKIINIVAPIRAGLDSLA

SEQ ID NO: 13787 - protein, 230 aa, Lycopersicon esculentum
DGEVSGRRSNVESGIVEDHHALNSRVPSADLMVNSPPQSPHRSASPLLFGPQVPVVPLQGGDGNPVSNQMWGNECEDASDHSLEGGIPTLITWSYGGNNVAIQGSWDNWTSRKILQRSGKDYTVLLVLPSGIYHYKFIVDGEVRYIPELPCVADETGVVFNLLDVNDNVPENLESVAEFEAPPSPDSSYAQALMGEEDFEKEPVAVPPQLHLTVLGSENSEEAPSSPKPQ

SEQ ID NO: 13788 - protein, 365 aa, Fragaria x ananassa
MGSTGETQMTPTHVSDEEANLFAMQLASASVLPMVLKAAIELDLLEIMAKAGPGSFLSPSDLASQLPTKNPEAPVMLDRMLRLLASYSILTCSLRTLPDGKVERLYCLGPVCKFLTKNEDGVSIAALCLMNQDKVLVESWYHLKDAVLDGGIPFNKAYGMTAFDYHGTDPRFNKVFNKGMADHSTITMKKILETYKGFEGLKSIVDVGGGTGAVVNMIVSKYPSIKGINFDLPHVIEDAPQYPGVQHVGGDMFVSVPKGNAIFMKWICHDWSDEHCIKFLKNCYAALPDDGKVILAECILPVAPDTSLATKGVVHMDVIMLAHNPGGKERTEQEFEALAKGSGFQGIRVCCDAFNTYVIEFLKKI

SEQ ID NO: 13789 - protein, 500 aa, Festuca arundinacea
MEFFTEYGEASQYQIQEVIGKGSYGVVAAAVDTRTGERVAIKKINDVFGHVSDATRILREVKLLRLLRHPDVVEIKHIMLPPSRREFQDLYVVFELMESDLHQVIRANDDLTAEHYQFFLYQLLRALKYIHAGNVFHRDLKPKNILANSDCKLKICDFGLACVSFNDAPSAIFWTDYVATRWYRAPELCGSFFSKYTPAVDIWSIGCIFAELLTGRPLFPGKNVVHQLDIITDLLGTPSSETLSRIRNEKARRYLSCMRKKHPVPLTQKFPNADPLAVHLLGRLLAFDPKDRPSAEEALADPYFATLSNVEREPSRNPISKLEFEFERRKVTKDDVRELIYREILEYHPQMLQEYMKGGEQLSFLYPSGVDRFKRQFAHLEEHYSKGERGSPLQRKHASLPKRRVGASNDGNNEQHPSDQELGADPGAQSPPRSQDPGQQHPSGGQNGVSPRSYQKSASISASRCVVVNPNKQREYDEEISEETEEAIAELSEKVSKMHP

SEQ ID NO: 13790 - protein, 377 aa, Candida albicans
MSADGEFTRTQIFGTVFEITNRYTELNPVGMGAFGLVCSAVDRLTGQNVAVKKVMKPFSTSVLAKRTYRELKLLKHLKHENLITLDDIFISPLEDIYFVNELQGTDLHRLLNSRPLEKQFIQYFTYQIMRGLKYIHSAGVIHRDLKPSNILINENCDLKICDFGLARLQDPQMTGYVSTRYYRAPEIMLTWQKYDTEVDLWSVGCILAEMIEGKPLFPGKDHVHQFSIITELLGSPPADVIDTICSENTLRFVQSLPHRDPIPFSERFASCTHVEPEAIDLLAKLLVFDPKKRISAVQGLTHPYMEAYHDPTDEPVCESKFDWSFNDADLPVDTWRVMMYSEILDFHQTVGVANETEGSEQPDSQVEQNNLDSANGA

SEQ ID NO: 13791 - protein, 546 aa, Cryptococcus neoformans var. neoformans JEC21
MWRPAAKTTGTNDVPLANKRRFGLPEEGPPSNSPSYAPRPAADIQYFNGRQERERDARDDRERPRDDYDRRRDDYVRDDRDRRYDDYPRDGHSDRRDERSKWDEGDRREAPRGRERSRDRGDSNEDGPRKRRSRWGDASAKVNVPGMPVAVMGNVSQTELDNYAIHVRLEEINRKLRTGDVVPPEGQRSPSPTPQYDAYGRRTNTRELRYRKKLEDERTRLIDRAVKSDPNFRPPVDFQHKRGSRPQDKVYIPVKEFPEINFFGLLVGPRGNSLKKMERESGAKISIRGKGSVKEGKGRAGNFPQDEEDELHCLITADDESKVKTCVALINKVIETAASTPEGENDHKRNQLRELASLNGTLRDDENQLCQNCGEKGHRRWECPQQRVYSANVICRICGGAGHMARDCRGRGDPSLTQNKQTAFDSEYTALMAELGEGGGSTPGSAPAAAIGAPGAIPPQSRVPPWRLPENWQTNSGGFRGPPNFQAQGYQQAAPGAAAYGQQAYPGYAGYQTGAVSGYGSPATGGADAYAAYYASMGQQAPAAAV

SEQ ID NO: 13792 - protein, 403 aa, Oryza sativa
MSFRSLIQEMRDEFGSISRHSLRSRSHRGGGGAPRVAAVGPAEAAAMQQSCWAQLPPELLREVLVRIEESEVWWPSRRDVVACASVCRSWRGITKEIVRVPEASGKLTFPISLKQPGPRDGTLKCFIRRNRTTQTYYLYIGLTEALADDGKFLLAARKCRKPTCTDYLISLDMSDMSKGSNTYIGKLRSNFLGTKFTVYDAHPPYDGAVVSKSRSARVVGLNQVSPRVPAGNYPVSHISYELNVLGARGPRRMNCIMDSIPTSAVQEGGKAPTQTEFPLSGLDSFPSISFFRSKSARIDSATSQLSTQKEEKLVLKNKSPRWHEQLQCWCLNFRGRVTVASVKIFQLVASDENGPPNQEQDKVILQFGKIGKDLFTMDYRYPISAFQSFAICLSSFDTKIACE

SEQ ID NO: 13793 - protein, 482 aa, Bordetella pertussis Tohama I
MNAMTNKTLTTAAGAPVADNNNTMTAGPRGPALLQDVWFLEKLAHFDRERIPERVVHAKGSGAYGTFTVTHDISRYTRARIFAEVGKQTPLFLRFSTVAGERGAADAERDVRGFAIKFYTDEGNWDLVGNNTPVFFIRDPLKFPDFIHTQKRDPKTNLRNATAAWDFWSLNPESLHQVTILMSDRGLPQNYRQQHGFGSHTYSFVNDAGERFYVKFHFKSQQGIACYTDGEAAELVGRDRESAQRDLFQNIEQGQFPRWTLKVQVMPEAEAATYHINPFDLTKVWPHADYPLIEVGVLELNKNPENYFAEVEQAAFTPANVVPGIGFSPDKMLQGRLFSYGDTHRYRLGINHHQIPVNAPRCPFHSFHRDGMGRVDGNGGATLNYEPNSFGEWREAKHAAEPPLALDGQAADRWNHRVDEDYYSQPGALFRLMNDDQKQQLFGNIGRHMAGVPEEIQRRQLEHFRRADPAYAAGVAKALGLK

SEQ ID NO: 13794 - protein, 586 aa, Bacillus cereus G9241
  misc_feature (37)..(37): Xaa can be any naturally occurring amino acid
  misc_feature (221)..(221): Xaa can be any naturally occurring amino acid
  unsure (1)..(586): unsure at all Xaa locations
MEVRNETKKKGSWRQFLRLIQDTNPPKGILVFALLMXLLSTGASLFIPMLTKGLVDNFSLSSISTGQIVGLVAFFIMQTVAAGLSIYLLNYIGQKIVAGLRERLWKKVLILPVSYYNQNRTGDTISRMTNDTGVVKTLISEHLSNLLTGGISIVGSLIVLFVLDWKMTLLLLTVIPLSVLILVPLGRKMYKILKALQDETASFTSVLTQVLSEIRLVKSSXTEKREYETGNTGIQKLLQFGLKEGKVQALISPVMSFVLMALLVIIVGYGGMRVSSGALTTGELVAFILYLVQIIMPMSQLSMFFTQFQKAIGATERINTILEYEVEDHETGAKVTNAKQPIVLENVHFEYNEEEQVLKNIDFTIESGKVTAIVGPSGSGKTTLFSLLERFYEPTSGAIKLGKDSITNYSLQSWRRQIGYVSQDSPLIDGTIRDNICYGVEGEVTDEEIEKVAAMAYVDAFIHDLPNGYATEVGERGVKLSGGQRQRIAIARALLRNPQILMLDEATSSLDSKSESVVQKALNNLMKGRTTLVIAHRLSTVVDADKIIFIEKGNLTGSGTHDELLRTHDMYREFATQQLKIKEAAL

SEQ ID NO: 13795 - protein, 312 aa, Triticum aestivum
  misc_feature (116)..(116): Xaa can be any naturally occurring amino acid
  unsure (1)..(312): unsure at all Xaa locations
MAESFVLSTGSRIPSVGLGVWQIQPDAANDAIYAAVKAGYRHIDCAAAYNNEEEVGLALKKLFEDGVVKRDDLFITSKLWAANHAPEDVEEGIDTTLQDLQLDYLDLYLIHGPIRXKKGTSTMTPENFLPTDIPATWAAMEKLYDSGKARAIGVSNFSCKKLHDLLAVARVPPAVNQVECHPVWQQDKLRKLCQSNGVHLSAFSPLGSPGSPWINGPSVLKNPIVVSVADKLQKTPAQVALRWGIQMGHSVLPKSANESRIKENIDIFGWSIPEDLMAKFSEIKQVRLLTAEFVVHPQAGYNTLEDFWDGEI

SEQ ID NO: 13796 - protein, 889 aa, Shewanella sp. MR-7
MAGNVADNVTDMYASLRSNVSMLGQILGDTMRTHLGDSFLEKVEQIRKLAKDSRRGDEAAREQMLELLTALPDEELVPFAKAFNQFLNLANLSEQFHTISRNCDELVCVPDPVEQLLGRMLNGRIDQTKMLDCLKTLDIDLVLTAHPTEISRRTLIQKYAAIVDCLAEQENNQLSDRERRQINLRLRQLIAQIWHTNEIRRERPTPVDEARWGLSTIEESLWHAVPDFLRQLNDQVQDRTGQQLPIDIAPVRFSSWMGGDRDGNPFVTAKVTQEVLDRNRHAAARLFLKDIVLLVGELSMEEANSELMAFTNNSCEPYRFVLRSLRQKLRDTIDYLNARIEGHNPEVDKSTLIWQESDLKAPLEMLYKSLCDCGMRLIANGLLLDILRRLACFGIHMLRLDIRQDAGRHCDVLAELTRYLGMGDFNHWDETEKQAFLLRELSNRRPLIPSNWQPSADVAEVLNTCRLIAKHPAKALGSYVISMASKPSDVLTVLLLLKETGCTHPMRVVPLFETLSDLNNAAECITALLDIDWYRGYTKGMQEVMIGYSDSAKDAGVMAAAWAQYRAQEQLVAVCQQAGVKLTLFHGRGGSIGRGGGPAHKAILSQPPGSVDGRIRVTEQGEMIRFKFGLPKLAVQSLALYTSAVLEATLLPPPEPKQEWRNCVERIAEESVSAYRGIVREEPDFVPYFRAATPEVELGKLPLGSRPAKRRVDGGIESLRAIPWIFAWSQNRLMLPAWLGAGEALQAACQRGEIGLLQDMEREWPFFSTRISMLEMVYAKAEPNLARYYETCLVPPNLHHLGETLRQRLDLGIKVVLELTKSDTLMAHTPWNRESVKLRNPYIDPLNFLQTELLARTRKETTEAPASEHVQLALMLTIAGVAAGMRNTG

SEQ ID NO: 13797 - protein, 492 aa, Zea mays
MDPYKHRPSSGSNSSFWTTNSGAPVWNNNSALTVGQRGPILLEDYHLIEKLAQFDRERIPERVVHARGASAKGFFEVTHDVSHLTCADFLRAPGVQTPVIVRFSTVVHERGSPETLRDPRGFAVKFYTREGNFDLVGNNMPVFFIRDGMKFPDMVHVFKPNPKTNLQENWRIVDFFSHHPESLHMFTFLFDDVGIPLNYRHMEGFGVNTYTLINRDGKPHLVKFHWKPTCGVKCLLDNEAVTVGGTCHSHATKDLYDSIAAGNYPEWKLYIQTIDLDHEDKFDFDPLDVTKTWPEDIIPLQPVGRMVLNKNVDNFFAENEQIAFCPAIIVPGIHYSDDKLLQTRIFSYADTQRHRLGPNYLMLPVNAPKCAHHNNHHDGFMNFMHRDEEVNYFPSRFDPARHAEKVPIPPRVLTGCREKCIIQKENNFKQAGERYRSFDPARQDRFIQRWVDALTDPRVTHEHRTIWISYWSQCDAALGQKLASRLNLKPSM

SEQ ID NO: 13798 - protein, 514 aa, Campylobacter lari RM2100
MNRRSFLKFNALSLASISSAYAMGDHSHHNMHSKHAQKDIKKIDTSFIKLENPNIKLLDEKDFPSGQTLANLKLLKNTSTKKNFFRSSIEIKESQIELVKGKKTKCFTYNGSIPGPKIEVYEGDTVEILVKNSLKEPTTIHWHGLDIPPEQDGNPHDPIMPGRERIYRFKLGENSAGTYWYHPHPHYITAKQVYKGLAGVFVVKARKDALSHLQEQDWVISDLRLDENAQIPDNNLFDWLNGREGNLVLINGQLKPKITINETQRIRIYNLCAARHLNLRIQGAEFILVGTDGGLIEKGIELDELFLSPASRVEVLIKTSKGEFKLESTYYDRDKMLVKEEPYTLMLADLKVEKTIENIPEKLREFPPLKEATSFKEVIMSEDHMQMHGISNKSEEEIKQSLASMFLINGKTFDMNRTDLTSKLNEVEEWVVKNSSHMDHPFHIHGTQFELISSQFKGKITKAKFRALQDTINVRPGEELRLRMSQNFTGIRMFHCHILEHEDLGMMGILKIKE

SEQ ID NO: 13799 - protein, 307 aa, Pseudomonas syringae pv. syringae B728a
MSLPRVALIGECMIELQQHADGSLRQSFGGDTLNTAVYLSRLLGERAKVDYVTALGDDSFSDAMCRIWADEGIGLGKVQRLPGRLPGLYCIQTDANGERRFLYWRNEAAVRDCFMTPAAEPILAALASYDVLYFSGITLAVLGEQGRAKLLEALARARQRGVRVAFDNNYRPRLWASVEQAREAYLACLQHVDLALLTEDDEQALYGYADSEQLLAAYRGRGIGEIVVKRGAQSCLVEAGGERFDIAAQKVERVVDTTAAGDSFSAGYLAARLTGQHPLQAAEAGHRLASIVIQHPGALVPKSVMPV

SEQ ID NO: 13800 - protein, 526 aa, Lentinula edodes
MLPFVYLLAAELVCLVYGAEVIRDTTTYGQTVSENLFIVNKQLAPDGFQRSTVLAGLTPSTGSFPGPLISGNKGVRFNLNVTDQLTDPSMVRSTTVHWHGLFQKTTNYADGVAFVSQCPIAANHSFLYDFQVPDQAGTFWYHSHISVQYCDGLRGPLVIYDPQDPQAYLYDVDDETTVLTIADCTELIAAAVAPLADATLINGKGRYLGGPAVPLAVINVQQGKRYRFRMISIACDANHNFSIDGHRLTVIEVDGENHEPATVDNIQIFPGQRYSFVLDATQPVDNYWVRALSSSGVGTSGFIGGLNSGILRYQGAPDADPTTTNSTGVVLTESMLHPLENPGAPGLPFPGGADEVLNLTLGFNLPATFFMNDTQYIPPTVPVLLQILSGAQSPQDLLPPGSVYTLPINKTIEINFFGNATPGGPHPFHLHGHSFDVVRSADNTTYNYENPVSCTYVVHPKQTTIRFVTDNPGPWFLHCHIDLHLEFGLAVVMAEAPSLVKATDVTTPAWDELCPIYDSLTPAQLP

SEQ ID NO: 13801 - protein, 793 aa, ASPERGILLUS NIDULANS FGSC A4
MSRDGERSSSEDEAPVQSLIQGREKRSTAGRQMSALLDAEADDELALLFEEVDDDNEFAADAAEDGAEEDDMGLDSSSDDEDDQGPNAQADDLEGERQLAKEEKEEKRKKRAREDLRYRITSKKVKIDPTATPKAPTTPASRPRKKSERVSWIPTPDEGPTRSSSRRQTMQNKELTHARLKDSEEKRIRLIATMEEAAKRKAKNKPKELTQAERLAEAERVERLNSKSLNRWEEMEKRKAEERRAKIEALQNRRLEGPVISYWSGVATWADGRLTRVGKVTITPKPEKDENSRKKSKKLDKEGKPETEQKPGDPAGPGSPQGVPVTLANSIPPTTETEQEQSVQPAKPAIDAIQTTTSGNASTGSQGEVATVPQTINTPSAAPDVQLPDASSILPGADSPQIITKETSEANEDTQAASEEPAKVINSETVQESSDRRTSQGPGSEPEAPVEKDGNTSNTEIPKVEDKPNGVAQELTVKPSSSPESASEPIPAMVTADGAASALPDGQLEGQGSAGDPMQIDQKPNTEGEPAATTADSQPADSQPAAPPAVIEHTGRCLTILENFDDKTAQSRDYSIYFNAKKPPRLTKISSSLCVITSLPSRYRDPDTSLPFANSYAYHEIRHTTAQKYTWSPMLGCYVGPAGIAARGVPDRFLDPNAKESTAKPSGTVDQPNGPDKEGDDAKPVGGGNSITPTAATKSTSAPTPTPATASAPPPPPPAATTPAPAPASTTGTAGADKSSLFYYLSALLKIVNQKRRSSPRLDLIEWFSAGVPTFSDTVDVLTIGLPTHESES

SEQ ID NO: 13802 - protein, 359 aa, Haemophilus somnus 2336
  misc_feature (7)..(7): Xaa can be any naturally occurring amino acid
  unsure (1)..(359): unsure at all Xaa locations
MLPVTEXIGGYFMKINTLSCVVKGAKSVDVISQEIEFDEQSQDQTLIQITRGSICGSDLHYYEHGKVGNFAIKHPMILGHEIIGKIVKTNAPNLFEGQKVAINPSKPCLSCAYCLSGYSNQCETMRFFGSAMYNPHVDGGFTQYKIVDNNQCIPYSQEVSDEVMVFAEPLAVTIHAAKQGGDLQGKKVFISGVGPIGCLAVAAVKALGAAEIICSDISQRCLDLALEMGATKVLHATEGNFSEYLQNKGEFDVSFEASGHISSIERCLAVTKAKGTIVQIGMGGSIPQFNMMPLISKEINWKGSFRFVEEFNTAVKWLSLGKINPLPLLSEIYPFEQLETALQRAGNKNEISKIQLNFA

SEQ ID NO: 13803 - protein, 507 aa, Haemophilus somnus 2336
MNGQPMDMGGQGHQMASGTMGGMGNMQGTGKLMPSEMMPSGQPLKDLPRLANASSQAGVFQAAITAAPVKITMAGGKETEFWAYNGQLPGPQIEVYEGDTVEITVTNRLPQPTTVHWHGLDVPNDADGNPQDPIEPGQSKTYRFILPEGSAGTYWYHPHPHNYVSEQVYKGLAGTLIVKAKNDVLAHSEQYWLISNLRLNEDGSIPPNTMLDWMNGREGEFVLINGQYRPKIKLSGNERLRIWNATSARYLRLKIKGVQWIVVGTDGGLLEKPLAPADELFLAPAERVEVFAVGQAQTTAELTSLYYDRRKMMVQEKAADLNLGEVQFTPADAALPAALRTLPALPAPVVKREVVFSEQMKPMQNTQSQGGMQGMDHGAMAGEMAGAMQNTIPQDMVGVFLVNGKTFDMKRVDFVGNEGDVEEWTLANQSHMDHPFHLHGTQFEVLQTSLNGNTAPAPYRARKDTVNLRPGETAVIRFIQGNKGLKMFHCHILEHENLGMMAMLQVK

SEQ ID NO: 13804 - protein, 526 aa, Lentinula edodes
MLPFVSLLAAELVCLVYGAEVIRDTTTYGQTVSENLFIVNKQLAPDGFQRSTVLAGLTPSTGSFPGPLISGNKGVRFNLNVTDQLTDPSMVRSTTVHWHGLFQKTTNYADGVAFVSQCPIAANHSFLYDFQVPDQAGTFWYHSHISVQYCDGLRGPLVIYDPQDPQAYLYDVDDETTVLTIADCTELIAAAVAPPADATLINGKGRYLGGPAVPLAVINVQQGKRYRFRMISIACDAYHNFSIDGHRLTVIEVDGENHEPATVDNIQIFPGQRYSFVLTATQPVDNYWVRALSSSGVGFSGFTGGLNSGILRYQGAPDADPTTTNSTGVVLTESMLHPLENPGAPGLPFPGGADEVLNLTLGFNLPATFFMNDTQYIPPTVPVLLQILSGAQSPQDLLPPGSVYTLPINKTIEINFFGNATPGGPHPFHLHGHSFDVVRSADNTTYNYKNPVSCTYVVHPKQTTIRFVTDNPGPWFLHCHIDLHLEFGLAVVMAEAPSLVKATDVTTPAWDELCPIYDSLTPAQLP

SEQ ID NO: 13805 - protein, 429 aa, Bacillus halodurans C-125
MKTFEKSSAAFNRAKPLMPGGVNSPVRAFKSVNMDPVFMERGKGANIYDIDGNEYIDYVLSWGPLILGHADDQVVEKLKETTEKGTSFGAPSELETKLAELVIERVPSIEVVRMVNSGTEATMSALRLARGYTGRNKILKFEGCYHGHGDSLLIKAGSGVATLGLPDSPGVPETVAQNTLTVPYNDLESVRYAFEQFGDDLAGVIVEPVAGNMGVVPPEPGFLEELRRLTEENGTLLIFDEVMTGFRVGYHCAQGAFGITPDLTCLGKVIGGGLPVGAYGGKREIMEQIAPSGPIYQAGTLSGNPLAMTAGYETLVQLTEANYEYFDRLGDRLAEGLSAVAKEYDIPHYTSRAGSMVGFFFTDKKVKNFADASSSDLEFFAKYFKEMLHLGVSLPPSQFEGMFLSTKHTEADIDFTVDAARQAFKRLKK

SEQ ID NO: 13806 - protein, 187 aa, Shigella flexneri 2a str. 301
MMTTILTIHLPSTPGRAWNMLVALQAGNIVARYAKLHLYDAFAIQESRHVDAGNEIAPLLEVEGMKVGLMTCYDLRFPELALAQALQGAEILVLPAAWVRGPLKEHHWSTLLAARALDTTCYMVAAGECGNKNIGQSRIIDPFGVTIAAASEMPALIMAEVTPERVRQVRAQLPILNNRRFAPPQLL

SEQ ID NO: 13807 - protein, 423 aa, Mesorhizobium sp. ZJ15B7
WGFDGSSTMQAEGRSSDCVLKPVALYPDPARTNGILVMCEVMMPDGVTPHESNSRATILDDEDAWFGFEQEYFFYKDGRPLGFPESGYPAPQGPYYTGVGYKNVGDVARKIVEEHLDQCLAAGINHEGINAEVAKGQWEFQIFGKGSKKAADQIWMARYLLLRLTETYGIDIEFHCKPLGDTDWNGSGMHCNFSTKFMREVGGKAYFEALMAQFDKNLMDHIAVYGPDNDKRLTGKHETAPWNKFSYGVADRGASIRVPHSFVKNDYKGYLEDGRPLGANEQVVEIETVPTGSLGLDIALGVGGLPRGRIIEIYGPESSGKTTLALHTVAEAQKKGGICAFVDAEHALDPVYARKLGVDLENLLISQPDTGEQALEICDTLVRSGAIDVLVVDSVAALTPRAEIEGEMGDSLPGLQARLMSQA

SEQ ID NO: 13808 - protein, 520 aa, Phlebia radiata
MHTFLRSTALVVAGLSARALASIGPVTDFHIVNAAVSPDGFSRQAVLAEGVFPGPLIAGNKGDNFQINVIDELTNATMLKTTTIHWHGFFQHGTNWADGPAFINQCPIASGDSFLYNFQVPDQAGTFWYHSHLSTQYCDGLRGPFVVYDPADPYLDQYDVDDDSTVITLADWYHTAARLGSPFPAADTTLINGLGRCGEAGCPVSDLAVISVTKGKRYRFRLVSISCDSFFTFSIDGHSLNVIEVDATNHQPLTVDELTIYAGQRYSFILTADQDVDNYWIRANPGIGITTGFAGGINSAILRYDGADVVEPTTTQATSPVVLSESNLAPLTNAAAPGLPEVGGVDLALNFNLTFDGPSLKFQINGVTFVPPTVPVLLQILSGAQSAADLLPSGSVYALPSNATIELSLPAGALGGPHPFHLHGHTFSVVRPAGSTTYNYVNPVQRDVVSIGNTGDNVTIRFDTNNPGPWFLHCHIDWHLEAGFAVVFAEDIPDVASINPVPQDWSNLCPIYNALDASDH

SEQ ID NO: 13809 - protein, 373 aa, Staphylococcus aureus subsp. aureus MSSA476
MGLKDQAVTWRRYFHQFPELSDKEFKTTQKIKDILTEHHIRILDLPLATGLVAEVGQGLSCIAVRADIDALPIQELVEQDFKSENEGVMHACGHDIHMASILATAVKLKEIEGTLTGRVKFIFQPAEELGHGAFKIIETHALKDVQAVLGFHNDPSRSVGTFAIKTGAITSAVDRFEFHIKGVGGHAAKPEQCNDPVIVLAQLINSIQSIVSRNLSAFDEAVVTIGQISCGNTWNVIADHAYVQGTVRSFDPVVRKLVETRLQDIADGLAQAYNMKINLNYTHLPGAVMNDEALTHKAIAVAQHVGYKVEMMEQPLTIGEDFSGYSQHFPSVFALIGSHSEYDLHHPQYKPDERILEKVPEYFVEFVKRLLHE

SEQ ID NO: 13810 - protein, 173 aa, Methanococcus maripaludis S2
MALRPARCYRTIERRSYTRKEYVRAVPQPKVVHYVMGNPSAEFPVQVQLVSKSDILIRHNALESSRIAGNKYILSECGRTGYLFNIRVYPHEILRENKMAAGAGADRISDGMRLSFGKAVGTAAKVKKGQEIITIGVNPEKFYAAKEALRRCSMKLPTACKIVVTKGKELIKD

SEQ ID NO: 13811 - protein, 423 aa, Mesorhizobium sp. JS5A15
WGFDGSSTMQAEGRSSDCVLKPVALYPDPARTNGILVMCEVMMPDGVTPHESNSRATILDDEDAWFGFEQEYFFYKDGRPLGFPESGYPAPQGPYYTGVGYKNVGDVARKIVEEHLDQCLAAGINHEGINAEVAKGQWEFQIFGKGSKKAADQIWMARYLLLRLTETYGIDIEFHCKPLGDTDWNGSGMHCNFSTKFMREVGGKAYFEALMAQFDKNLMDHIAVYGPDNDKRLTGKHETAPWNKFSYGVADRGASIRVPHSFVKNDYKGYLEDRRPLGANEQVVEIETVPTGSLGLDIALGVGGLPRGRIIEIYGPESSGKTTLALHTVAEAQKKGGICAFVDAEHALDPVYARKLGVDLENLLISQPDTGEQALEICDTLVRSGAIDVLVVDSVAALTPRAEIEGEMGDSLPGLQARLMSQA

SEQ ID NO: 13812 - protein, 505 aa, Bifidobacterium longum DJO10A
MNSRGLKQVDLVHAAEHRGVKMGKSHISQYVAGKTMPREDVLEFLASELDVDTNWLRGEESTTQLNSDASNSVTDGEHAATPLAMGAAKPQTDSEIPVGRRRTFGKSHKLDNVLYDVRGPVADEAMRMEANGTHILKLNIGNPAPFGFRTPDEVVYDMAHQLTDTEGYSPSKGLFSARKAIMQYAQLKNIPNVTIDDIYTGNGVSELINLSMSALLDTGDEVLVPSPDYPLWTACVNLAGGTAVHYLCDEQSEWYPDIDDIRSKITSNTKAIVIINPNNPTGALYPKEVLQQIVDIAREHQLIIFSDEIYDRLVMDGLQHISIASMAPDLFCVTFSGLSKSHMIAGYRIGWMILSGNKRIAKDYIEGLNMLANMRMCSNVPAQSVVQTALGGHQSVNDYIVPGGRVHDQRDLVYDMLNQIPGITAVKPKAAFYIFPKIDVKRFNIHSDEQFALDLLHDKHILISHGGAFNWHRPDHFRVVYLPRMGMLRETMGEISDFFSYYWQS

SEQ ID NO: 13813 - protein, 492 aa, Arabidopsis thaliana
MDPYKYRPSSAYNAPFYTTNGGAPVSNNISSLTIGERGPVLLEDYHLIEKVANFTRERIPERVVHARGISAKGFFEVTHDISNLTCADFLRAPGVQTPVIVRFSTVVHERASPETMRDIRGFAVKFYTREGNFDLVGNNTPVFFIRDGIQFPDVVHALKPNPKTNIQEYWRILDYMSHLPESLLTWCWMFDDVGIPQDYRHMEGFGVHTYTLIAKSGKVLFVKFHWKPTCGIKNLTDEEAKVVGGANHSHATKDLHDAIASGNYPEWKLFIQTMDPADEDKFDFDPLDVTKIWPEDILPLQPVGRLVLNRTIDNFFNETEQLAFNPGLVVPGIYYSDDKLLQCRIFAYGDTQRHRLGPNYLQLPVNAPKCAHHNNHHEGFMNFMHRDEEINYYPSKFDPVRCAEKVPTPTNSYTGIRTKCVIKKENNFKQAGDRYRSWAPDRQDRFVKRWVEILSEPRLTHEIRGIWISYWSQADRSLGQKLASRLNVRPSI

SEQ ID NO: 13814 - protein, 486 aa, Chromobacterium violaceum ATCC 12472
MLNLQDPSLLRQQCYLGGEWLDADGGQHIAVHNPATGEKIGQVPKMGAAEAERAVAAAARAFPAWKAKSAKERAAILRRWFDLIIAHQQDLAIILTSEQGKPLAEAKGEIAYGASYIEWYAEEAKRVYGDIVPGPAGDRRVLVTKEPIGVTAAITPWNFPSAMITRKAAPALAAGCTMVVRPASQTPLSALALAELAERAGIPAGVFSVITGGSSEIGAVLTGSDTVKKFSFTGSTEVGRKLIAQCAGTVKKVSMELGGNAPFIVFDDADLDAAVEGALISKYRNAGQTCVCANRIYVQDGVYDAFAEKFAAAVATLKVGNGLEAGVSQGPLIDHNAVAKVEEHIADALAKGGRLIAGGKRHALGHTFFEPTLIADVTRDMKVAREETFGPLAPLFRFKTEEEAIRLANDTEFGLASYFYARDVGRIFRVAEGLEYGMVAVNSGLLSNEAAPFGGVKQSGLGREGSKYGIEDYLEIKYVLLGGLDR

SEQ ID NO: 13815 - protein, 424 aa, Coxiella burnetii RSA 493
MNHRVVITGLGIIAPNANSVEHFESALRQGISGIRHHSSLQQLNFLCQVAGTPQGVEAIASRYFSEEQRLGMNSSMMYASVAAVDCWRDAGFEYSQNDDHNHIDWTTGAIIGTGIGGMDTIGGELVPGVDAGRVRRLGSTMVEQIMASASSAKVGGLLGLGGQLSNVSSACSSGTEAIASAFYALKNGRACRFLAGGVEGASPYIWGGFDAMRVLAKGFNEAPEKASRPMSASASGFVPSAGAGLLMLETLESAEQRGARIYAEILSASVNCGGQRQGGSMTAPNPLGVQRCIQSAIEYATISPSEIDAINGHLTGTMADKMELKNWATALGCKPNELPWINSTKSLIGHSLGAAGGLEAVASVLQLNKGFIHGSLNCEDIHPELEVFQDRIVQRTQEKQIDVLAKASFGFGDVNACLILKRWQ

SEQ ID NO: 13816 - protein, 472 aa, Arabidopsis thaliana
MALHLRSSFSSKSTLLNILRHNLGFGSRSHVTRHIRQILPHDPPLRGSQNPISRLCNTMAEPETLSSFVQHEYANNHQVMDFPGGKVAFTPEIQFISESDKERVPCYRVLDDNGQLITNSQFVQVSEEVAVKIYSDMVTLQIMDNIFYEAQRQGRLSFYATAIGEEAINIASAAALTPQDVIFPQYREPGVLLWRGFTLQEFANQCFGNKSDYGKGRQMPVHYGSNKLNYFTVSATIATQLPNAVGAAYSLKMDKKDACAVTYFGDGGTSEGDFHAALNIAAVMEAPVLFICRNNGWAISTPTSDQFRSDGVVVKGRAYGIRSIRVDGNDALAMYSAVHTAREMAIREQRPILIEALTYRVGHHSTSDDSTRYRSAGEIEWWNKARNPLSRFRTWIESNGWWSDKTESDLRSRIKKEMLEALRVAEKTEKPNLQNMFSDVYDVPPSNLREQELLVRQTINSHPQDYPSDVPL

SEQ ID NO: 13817 - protein, 494 aa, Arabidopsis thaliana
MDGSSEKTTNKLVSILPNYRIGKTLGHGSFAKVKLALHVATGHKVAIKILNRSKIKNMGIEIKVQREIKILRFLMHPHIIRQYEVIETPNDIYVVMEYVKSGELFDYIVEKGKLQEDEARHLFQQIISGVEYCHRNMIVHRDLKPENVLLDSQCNIKIVDFGLSNVMHDGHFLKTSCGSPNYAAPEVISGKPYGPDVDIWSCGVILYALLCGTLPFDDENIPNVFEKIKRGMYTLPNHLSHFARDLIPRMLMVDPTMRISITEIRQHPWFNNHLPLYLSIPPLDTIDQAKKIEEEIIQNVVNIGFDRNHVVDSLANRIQNEATVAYHLILDNRNQNSVPNDPFQSKFKEISDGIFNSTLPVQNITSHVGHSFSALYGLKSNVKDDKTWTLGLQSQGSPYDIMTEIFKALQNLKICWKKIGLYNIKCRWVRSFAYYKNHTIEDECAIILPTVIKFEIQLYKVREGKYLLDILRIDGPQFIFFDLCVAFLRELGVL

SEQ ID NO: 13818 - protein, 515 aa, Haemophilus somnus 2336
MKRRDFLRYGIGISLASSSLYSLANMMNHAQHGNMAMMHSVPTGLMPTEAMPSGLSLNGILPKLANQSTQAGLFKATLKAEPIKIRLADNKETEFWAYNGQLPGPQIEVFEGDTVEIEFINHLPQPSTVHWHGLDVPNEADGNPMDMVEPQGKKVYRFTLPQGSAGTYWYHPHPHDHVSEQVYKGLAGTFVVKAKNDPLAHLPEQHWVISDLRLNADGTIPANTMLDWMNGREGEFVLINGQYQPQIQVKTNERIRLWNATSARYFRLNIPGVKWIVVGTEGGLLEKPRSPVDELLLTPAERVEVIMVGETQGTANLQSGYYDRRKMMVQEQPKDLTLATIQVKSEPVQLPESLRSLPNWDEPKQVRQIRFSEKMMNHTNMPMMNHGTHHATTTLTDNPIPPMMNGMFLINGQTFDMNRIDFVTKLNEVEQWEIFNESHMDHPFHLHGTQFEVIQHTLNGKTFKPEGRALKDVVNLRPYEKVIIRFKQGHTGLKMYHCHILEHENLGMMGMFKVE

SEQ ID NO: 13819 - protein, 234 aa, Deinococcus radiodurans
MEFFIDTAIVDEIREINAWGVLSGVTTNPSLIVASGRDFKEVIGEIAELVPGGAISAEVTALDAEGMIKEGKDVAAWHKQVVVKLPLTPAGLQACKALTSEGIKTNVTLCFSVPQALLAARAGATYVSPFVGRVDDTGWDGSELIRQIKEAFVLGDIQTKVLAASIRHPQHVVQAALAGADVATIPYKVFTQMVKHPLTQAGLDSFMADWAKRQGASPETPPSEAGTNPVKKEG

SEQ ID NO: 13820 - protein, 631 aa, Yarrowia lipolytica CLIB122
MKWLTSLRNSVVGGPHLYNNDKDSCSECDSDTESVSWTRKMFDPPVKQQREDYTDSEDEAGAPSGSREMEQLTTIWTKTDLYMAWASMLLLSVAIGMMIQTVSVYSTYATSDFNQMSLLSALNVVKSVMYIATRPILAKFADVLGRFETVLICIVIFTVGFIMLSASPNIGTYFAAHIFYIFGQVGIQFMEQVFAADTSDLKNRMFFVVLPNLCYLFTPWCAAPITNAILKHSTWHWGYGMWCITVPVVSIPALTIMFRHRMKARKMGLECARSGLSNVKTAMRQFDIIGLILFTGGISLLFLAVTLVKTSKSWSQPHVLSMIIIGPILLILFPIWEKLYPKYPFLPFSALKDRTLITGCIIVALYSLAYYIYAPYYTAWLLVCKNLSVTAATNTRVTWTVASTFGSLLVAPLIRYTYRLKPTIILGGCLYMLGLGLTYRYRQPDNSLAQFIIAQVIEGLGTGMIQYPVLVLIQAVVSHKQVVAATAIFYSSISVGGVIGDAISGSMYRQQYPKRLADYAPFLSEKDIDTMVNNVNAPLKYAWGSEERTAIIAAFNNVYRHLLYGPVIVGGALILFAVTLPNVDLSQMEERVKGVVFGNTNKKETERNDDENQDLGSEKSCQKDNVVETKV

SEQ ID NO: 13821 - protein, 223 aa, Bacillus cereus G9241
MSMIEKWTAVDQYMSDVLIPKDSTLEEVLQENAAANLPAHDVSPTQGKFLQLLVQIQGARNILEIGTLGGYSTIWLARALPYGGRIVTLEASEKHAEIARSNIERANLTDKIEIRVGLALDSLQQIENEKYEPFDFIFIDADKQNNPAYFEWALKLSRPGTVIIGDNVVREGEVINNTSSDSRVQGIRRFYELIAAEPRVSATALQTVGSKGYDGFVRAVVKE

SEQ ID NO: 13822 - protein, 175 aa, Triticum aestivum
MPPPVMASSATSVAPFQGLKSTPGLPVSRRSYGASIGSVSNGGRITSMQMWPIEGIEKFETLSYLPPLSTEALLKQVDYLIRFKWVPCLEFSKVGFIFREHNASPGYYDGRYWTMWKLPMFGCTDATQVINEVEEVKKEYPDVYVRIIGFDNMRQVQCVSFIAFKPPGCAESGKA

SEQ ID NO: 13823 - protein, 316 aa, Methylomonas aminofaciens
MANLFDQLKEFTTIVADTGDVEAIKSVKPYDATTNPSLLLKASTLPQYAPLIDEAIAYAKSQSGDKAQQIEDAADKLAVLIGQEILKHIPGKISTEVDARLSFDTDAMVQKGRKLIKLYADAGISKDRVLIKLASTWEGIKAGEILEKEGINCNLTLLFSFAQARACAEAGVFLISPFVGRILDWYKAKTGENYTSETDPGVLSVRKIYAYYKEHGYKTVVMGASFRNTGEITALAGCDRLTVSPNLLERAEGYRRYLPRVLVDNGATKQRPALLTEKEFRFDQNEDAMATEKLAEGIRGFVVDQNKLEKALAEKL

SEQ ID NO: 13824 - protein, 171 aa, Oryza sativa
RLYRQRSRGFAVKFYTEDGNWDLVGNNTPIFFVRDPILFPSFIHTQKRNPATHLKDPNMVWDFFTLRPESTHQAMFLFSDRGTPDGYRFMNGYGSHTFKLINAKGEAVYCKFHLKSGQGIKNLPVDKAAKISGDDPDYSIRDLYNAINNGDYPKWNFFIQVMTFEQAEKHR

SEQ ID NO: 13825 - protein, 522 aa, Triticum aestivum
MSSMQFSSVLPLEGKACVSPVRREGSACERLKVGDSSSIRHDRASRRMCNGGRGPAATGAQCVLTSDASPADTLVLRTSFRRNYADPNEVAAVILGGGTGTQLFPLTSTRATPAVPIGGCYRLIDIPMSNCFNSGINKIFVMTQFNSASLNRHIHRTYLGGGINFTDGSVEVLAATQMPGEAAGWFRGTADAVRKFIWVLEDYYKNKSIEHILILSGDQLYRMDYMELVQKHVDDNADITLSCAPVGESRASEYGLVKFDSSGRVVQFSEKPKGDDLEAMKVDTSFLNFAIDDPAKYPYIASMGVYVFKRDVLLNLLKSRYAELHDFGSEILPRALHDHNVQAYVFTDYWEDIGQSDPSFDANMALCEQPPKFEFYDPKTPFFTSPRYLPPTKSDKCRIKEAIISHGCFLRECKIEHSIIGVRSRLNSGSELKNAMMMGADSYETEDEISRLMSEGKVPIGVGENTKISNCIIDMNARIGRDVVISNKEGVQEADRPEEGYYIRSGIVVIQKNATIKDGTVV

SEQ ID NO: 13826 - protein, 428 aa, Trichodesmium erythraeum IMS101
MKNVLSIILGGGAGTRLYPLTKLRAKPAVPLAGKYRLIDIPISNCINSEIQKIYVLTQFNSASLNRHITRTYNFSGFSDGFVEVLAAQQTKDNPEWFQGTADAVRKYIWLFKEWDIDYYLILSGDHLYRMDYRDFVQRHIDTKADITLSVLPIDEARASEFGVMKIDNSGRIVEFSEKPKGNALKAMAVDTSILGVSPEIATKQPYIASMGIYVFNKDAMIKLIEDSEDTDFGKEILPKSAQSYNLQAYPFQGYWEDIGTIKSFYEANLALTQQPQPPFSFYDEQAPIYTRSRYLPPSKLLDCEITESIVGEGCILKKCRIDHCVLGVRSRIEANCIIQDSLLMGSDFYESPTERRYGLKKGSVPLGIGAETKIRGAIIDKNARIGCNVQIINKDNVEEAQREEEGFIIRSGIVVVLKNATIPDGTVI

SEQ ID NO: 13827 - protein, 109 aa, Synechococcus elongatus PCC 7942
MKTLPKERRFETFSYLPPLSDRQIAAQIEYMIEQGFHPLIEFNEHSNPEEFYWTMWKLPLFDCKSPQQVLDEVRECRSEYGDCYIRVAGFDNIKQCQTVSFIVHRPGRY

SEQ ID NO: 13828 - protein, 516 aa, Lotus corniculatus var. japonicus
MDGPVGRGGGAGLDIYLPNYKLGKTLGIGSFGKVKIAEHVLTGHKVAIKILNRRKIKNMEMEEKVRREIKILRLFMHPHIIRLYEVIETPTDIYVVMEYVKSGELFDYIVEKGRLQEDEARNFFQQIISGVEYCHRNMVVHRDLKPENLLLDSKCNVKIADFGLSNIMRDGHFLKTSCGSPNYAAPEVISGKLYAGPEVDVWSCGVILYALLCGTLPFDDENIPNLFKKIKGGIYTLPSHLSPGARDLIPRMLVVDPMKRMTIPEIRQHPWFQARLPRYLAVPPPDTMQQAKKIDEEVVQEVVNMGFDRNQLIESLRNRIQNEGTVAYYLLLDNRFRVSSGYLGAEFQETMDSGFNQMHPGEVASSVVGHRIPGYIDYPGVGMRPQFPVERKWALGLQSRAHPREIMTEVLKALQELNVCWKKIGHYNMKCRWVAGIPGHHEGMVNNNTAHSNHYFGDDSSIIENDAVPSSNVVKFEVQLYKTREEKYLLDLQRVQGAQFLFLDLCAAFLAQLRVL

SEQ ID NO: 13829 - protein, 374 aa, Candida glabrata CBS138
MSTEADTLLIPGPVILSSKVQRALDVPSLSHTSPEFGAIFQRTLKNTRKLFKADEKEGQPFVIAGSGTLGWDIVGANLIDNNDSALVVSTGVFSEFFAECLELYGANVDKLTAEVGDVVPTEKIREKLKEKNYKLITLTHVDTSTAVLLNVKEIAEIVRQISPETYIIVDGVCSIGCEEFEFKKWGIDYCLTASQKALGAPAGLSISFASQRVVDFVKSDKYKPKSYFTSLKKWLPIMEGYENGTPKYFATPAIQSINSLDAALQEILEDGLEARWTKHAKMSTEFKDKLTKELGLKLVSKYPAESAAHGLTAIYVDEPGKVISHLKAHGVVIAGGIMPSIATKYIRVGHMGVTACDPSVDYIPTCYKLISEAK

SEQ ID NO: 13830 - protein, 159 aa, Listeria monocytogenes str. 4b F2365
MNVHDFSEKAMNGKEIALSDYKGKVLLIVNTASKCGLTPQLEGLEAMYKKLGGANFEILGFPCNQFLRQDPGSDEEILEFCQMNYGVTFQMFSKIKVKGKDASPLYKYLTEQTGGKKVEWNFAKFLIDENGEVVERFPSKMKPADFEDKVEALVAKVNN

SEQ ID NO: 13831 - protein, 637 aa, Thermoactinomyces vulgaris
AANDNNVEWNGLFHDQGPLFDNAPEPTSTQSVTLKLRTFKGDITSANIKYWDTADNAFHWVPMVWDSNDPTGTFDYWKGTIPASPSIKYYRFQINDGTSTAWYNGNGPSSTEPNADDFYIIPNFKTPDWLKNGVMYQIFPDRFYNGDSSNDVQTGSYTYNGTPTEKKAWGSSVYADPGYDNSLVFFGGDLAGIDQKLGYIKKTLGANILYLNPIFKAPTNHKYDTQDYMAVDPAFGDNSTLQTLINDIHSTANGPKGYLILDGVFNHTGDSHPWFDKYNNFSSQGAYESQSSPWYNYYTFYTWPDSYASFLGANSLPKLNYGNSGSAVRGVIYNNSNSVAKTYLNPPYSVDGWRLDAAQYVDANGNNGSDVTNHQIWSEFRNAVKGVNSNAAIIGEYWGNANPWTAQGNQWDAATNFDGFTQPVSEWITGKDYQNNSASISTTQFDSWLRGTRANYPTNVQQSMMNFLSNHDITRFATRSGGDLWKTYLALIFQMTYVGTPTIYYGDEYGMQGGADPDNRRSFDWSQATPSNSAVALTQKLITIRNQYPALRTGSFMTLITDDTNKIYSYGRFDNVNRIAVVLNNDSVSHTVNVPVWQLSMPNGSTVTDKITGHSYTVQNGMVTVAVDGHYGAVLAQ

SEQ ID NO: 13832 - protein, 441 aa, Lotus corniculatus var. japonicus
MNQPKIKRRVGKYEVGRTIGEGTFAKVKFARNSETGEAVALKILDKEKVLKHKMAEQIKREVATMKLIKHPNVVQLYEVLGSKTKIYMVLEFVTGGELFDKIVNHGRMCEDEARRYFQQLINTVDYCHSRGVYHRDLKPENLLLDACGNLKVSDFGLSALSQQIKDDGLLHTTCGTPNYVAPEVLNDKGYDGATADLWSCGVILFVLVAGYLPFDDPNLMELYKKISAAEFTCPPWLSFSARKLITRILDPNPMTRITIAEILEDEWFKKDYKPPIFQENGETNLDDVEAVFKDSEEHHVTEKKEEQPTAMNAFELISMSKGLNLENLFDVEQGFKRETRFTSKSPANEIISKIEEAAKPLGFDVQKKNYKMRLANVKAGRKGNLNVATEVFQVAPSLHMVEVRKAKGDTLEFHKFYKKLSTCLEDVVWKTEDDMQKQEAK

SEQ ID NO: 13833 - protein, 637 aa, Thermoactinomyces vulgaris
AANDNNVEWNGLFHDQGPLFDNAPEPTSTQSVTLKLRTFKGDITSANIKYWDTADNAFHWVPMVWDSNDPTGTFDYWKGTIPASPSIKYYRFQINDGTSTAWYNGNGPSSTEPNADDFYIIPNFKTPDWLKNGVMYQIFPDRFYNGDSSNDVQTGSYTYNGTPTEKKAWGSSVYADPGYDNSLVFFGGDLAGIDQKLGYIKKTLGANILYLNPIFKAPTNHKYDTQDYMAVDPAFGDNSTLQTLINDIHSTANGPKGYLILDGVFNHTGDSHPWFDKYNNFSSQGAYESQSSPWYNYYTFYTWPDSYASFLGFNSLPKLNYGNSGSAVRGVIYNNSNSVAKTYLNPPYSVDGWRLDAAQYVDANGNNGSDVTNHQIWSEFRNAVKGVNSNAAIIGEYVGNANPWTAQGNQWDAATNFDGFTQPVSEWITGKDYQNNSASISTTQFDSWLRGTRANYPTNVQQSMMNFLSNHDITRFATRSGGDLWKTYLALIFQMTYVGTPTIYYGDEYGMQGGADPDNRRSFDWSQATPSNSAVALTQKLITIRNQYPALRTGSFMTLITDDTNKIYSYGRFDNVNRIAVVLNNDSVSHTVNVPVWQLSMPNGSTVTDKITGHSYTVQNGMVTVAVDGHYGAVLAQ

SEQ ID NO: 13834 - protein, 379 aa, Ustilago maydis 521
METAAAQNLLIANSYAKVEKVGEGTYASVFLARSINTGQKVAIKKIKIVSNENGMDVTAIREVKFLKELNHPNVIKLVDVFSSGSRSPSLNLVLEFLDTNLEALIKDRTLIFTQADIKSWMAMLCRGLEYCHRYWVLHRDLKPNNLLISPQGELKIADFGLAREHGDPGARMTHQVVTRWYRPPELLLGSRAYSSAVDMWSVGCIFAELMLRVPYLPGESDADQLITIFKALGTPTDKDWPGHKSLPEYTAFEQYPKSNLADLFLAASPEALDFLQKMLLFDPLKRLSANQALHHAYFKQGPPPTPFKQLPRHPTKALDSGDPAAHPLLSDSKEKNEVREKQQNQAHGNGNVNGNSRKRPFDAKEIEERRRLARKLAFA

SEQ ID NO: 13835 - protein, 562 aa, Vibrio parahaemolyticus RIMD 2210633
MNNDKRPLYIPYAGPALMATPLLNKGSAFSAEERSSFNLEGLLPETTETIQEQVERAYQQYKSFESDMDKHIYLRNIQDTNETLFYRLVQNHISEMMPIIYTPTVGAACENFSNIYRRGRGLFISYPNRDRIDDLLNNAANHNVKVIVVTDGERILGLGDQGIGGMGIPIGKLSLYTACGGISPAYTLPIVLDVGTNNPQRLADPMYMGWRHPRITGPDYDAFVEEFIQAVQRRWPDALIQFEDFAQKNAMPLLERYKDRICCFNDDIQGTAAVTVGSLLAACKAAGTQLSKQRITFLGAGSAGCGIAEAIIAQMVSEGISDEKARSQVYMVDRWGLLQEGMPNLLDFQQRLVQKHSNTKEWENEGNGFSLLDVMRNAKPTVLIGVSGAPGLFSQEVIEEMHKHCKRPIVFPLSNPTSRVEATPNDIIRWTNGEALVATGSPFDPVVHEGRTYPIAQCNNSYIFPGIGLGVLAVNAKRVTDEMLMESSRALATCSPLAINGRGALLPPLEEIHLVSKKIAFAVAKKAIEQGVALEITDEALNDAIDQAFWQPVYRRYKRTAF

SEQ ID NO: 13836 - protein, 314 aa, Triticum aestivum
MATLKVPSNVPALADDCDNLRKAFQGWGTNEALIISILGHRDAAQRRAIRKHYADTYGEELLRSITDEISGDFERAVILWTLDPAERDAVLANETAKKWHPGNPVLVEIACARGSKQLFAVRQAYHDRFKRSLEEDVAAHVTGDFRKLLVPLVSSHRYEGPEVNTRLAHSEAKLLHEKIEHKAYGDDEVIRILTTRSKAQLLATFNNYNDTFGHPITKDLKADPKDEFLKTLRAVIRCFTCPDRYFEKVARLAIAGNGTDENSLTRVITTRAEVDLKLIKEAYQKRNSVPLEKAVAGDTSGDYESMLLALLGKE

SEQ ID NO: 13837 - protein, 1016 aa, Crocosphaera watsonii WH 8501
MLLESLQSTVEEVNIFSTSDLFLRQRLELVESLWESVLKAECGLELVDLLKKLRKISSPEGQVTDQPKTSINELIEELELNEAIRATRAFALYFQLINIVEQHYEQRDQQLNRRSTYQESEKARENYQKGEKSTNGLVGADLLEKALVGETKSQEKGGTFHWLFPQLKRLNVPPQQIQRLLEQLDIRLVFTAHPTEIVRHTIRLKQRRIATLLRRLDQAEEAFRGMGLSSSWEAESIIEQLNEEIRLWWRTDELHQFKPSVLDEVDYTLHYFDEVLCSALPQLSQRLQQALQANFPRIKPPHNTFCRFGSWVGGDRDGNPFVTTDVTWRTACYQRNLILEKYLAAVEDLTEILSSSLHWSNVSQDLLDSLERDRVAMPEIYDQLAIRYRQEPYRLKLAYIQKRLEHTRDRNNHLANPEQGQVLVEETPENIYHSGVEFEAELQLIKRNLEETGLKCQALENLIFQAQMFGFTLTQLDFRQESSRHSETIQTIASYLNILPTPYEELSEAEKVNWLVGELQTRRPLIPMEMPFDEKTIETVETMRMLRHLQQEFGIEICQTYIISMTNDVSDVLEVLLLAKEAGLYDPGTSTTTIRIVPLFETVDDLKRAPEIMEALFKLPLYRTALAGGYDYLDEDKKEQLPPPQLQPANLQEIMVGYSDSNKDSGFLSSNWEIHKAQKSLQKIAEPHNLALRLFHGRGGSVGRGGGPAYAAILAQPTGTINGRIKITEQGEVLASKYSLPELALYNLETATTAVIQGSLLGSGFDDIDPWNGIMEELASSARKAYRSLIYEQPDFLDFFLSVTPIPEISQLQISSRPARRKSGKKDLSTLRAIPWVFSWTQSRFLLPAWYGVGTALEGFLQQEPEENLKLFKYFYLKWPFFKMVISKVEMTLSKVDLQIAHHYVKELSNPEDIERFEKVFERISEEYHRTCEIILSITGQPKLLEGDAGLQRSVQLRNGTIVPLGFLQVSLLKRLRQYTRQAESGVIHFRYSKEELLRGALLTINGIAAGMRNTG

SEQ ID NO: 13838 - protein, 423 aa, Mesorhizobium sp. HN15B23
WGFDGSSTQQAEGHSSDCVLKPVAVYPDPARTNGVLVMCEVMMPDGVTPHASNKRATILDDEGAWFGFEQEYFFYKDGRPLGFPESGYPAPQGPYYTGVGYSNVGSVARQIVEEHLDLCLAAGINHEGINAEVAKGQWEFQIFGKGSKKAADQMWMARYLMQRLTEKYGIDIEYHCKPLGDTDWNGSGMHANFSTAYMREVGGKAYFEALMAAFDKNLMDHIAVYGPDNDKRLTGKHETAPWNRFSYGIADRGASIRVPHSFVKNDYKGYLEDRRPLGANEQVVEIETVPTGSLGLDIALGVGGLPRGRIIEIYGPESSGKTTLALHTVAEAQKKGGICAFVDAEHALDPVYARKLGVDLENLLISQPDTGEQALEICDTLVRSGAIDVLVVDSVAALTPRAEIEGEMGDSLPGLQARLMSQA

SEQ ID NO: 13839 - protein, 391 aa, Oryza sativa (japonica cultivar-group); identical to SEQ ID NO: 1055

SEQ ID NO: 13840 - protein, 144 aa, Paxillus involutus
MADQLSEEQISEFKEAFSLFDKDGDGTITTKELGTVMRSLGQNPTEGELQDMINEVDADGNGTIDFPEFLTMMARKMRDTDSEEEIKEAFKVFDKDGNGYISAAELRHVMTNLGEKLTDTEVDEMIREADVDGDGQINYDEFVK

SEQ ID NO: 13841 - protein, 639 aa, Methanococcus maripaludis S2
MNTIPPIKRLGTKLIIYSIITALIPIVMLGAVSTDTINTEMTKQAQEKINDDLNTAESVVNLKLDKISSLNKYIISNDNTITSLKNNNTAELKTLAISYKNTSAPDFVVFFDGQGNVVARSNSDVTGDNSYEDLFKKVVNSTGYTSIEVLDKDSIKYENVGELVNIDIKGTEDSINYSDSVQDSAMALVSIEPIYDKNGKLLGAAMAADILNKDYSIVDTVKDASKDATTIFLDGVRVSTNVQDNGGRAIGTLVSEEVYNHVVLDGKTYYGRAFVVNEWYLTAYEPIYDSDNKIIGMLFVGTPESKFLALQADVRNQTFVVGLIGLLIALIVSYLINRGIIKPLEQLKQGAEWVSNGRYDQKVIVDSDDEFGELAKAFNKMATQINISDDKLKKHAEELKISYNELKELDKLKSELIAVVSHELRTPLTSIKGYVELVLDGTMGAINDSQKKCLQVADDNIVRLRRLIESMLDLSKIERGELEMYREKVNLRSIVCDVIEYLKPLATEKNIKLNKEVEDIAIEADKDRITQVLTNLIENAIKFSPANESILVSGVLEDEHIHLKVTDRGAGIPKKDMEKIFNRFYQVDSSTKRKKGGSGLGLAVCKSIVEAHKGSIWVESELGKGSTFHIILPISAKDQ

SEQ ID NO: 13842 - protein, 291 aa, Treponema pallidum subsp. pallidum str. Nichols
MLANLQHLSDIQYRVTQQSATETPFKNEFWNSYQPGFYLDVVSGELLFLSEDKFDSGCGWPSFSAPAYARAVIEKEDRTHNMLRTEVRSRNANSHLGHVFKDGPPERGGLRYCINSAALRFVAREEGTALFAAGCFWSTEAYFRRVKGVLRVRVGYTGGTTKSPTYRNVCTGTTGHAEAVEILFDPQVISYEDLLKHFFRMHDPTSLNKQGGDVGTQYRSAIFYLSGTQKQQAETLMGRYAGAGKFTRPLVTTLEEARDFYPAEEYHQDYLTKNPGGYCHVSLHLASEPLE

SEQ ID NO: 13843 - protein, 194 aa, Avena sativa
TRASTPNGNKKLDAGYREAQEKPSECPVFLFFSVNTSGQFVGIAEMIGPVDFDKTVDYWQQDKWNGCFSIKWHIVKDIPNNILKHITLENNDNKPVTNSRDTQEVKLEQGLQMLKIFKEHVSKTSILDDFAFYENRQKLMQEKRAKQQVLQGQGGDEKEKNAANGNSAAQQQAVSKESAAPVPGGRAERLKIRC

SEQ ID NO: 13844 - protein, 406 aa, uncultured bacterium 578
MNRVVITGMGIVSSLGGNKAEVLESLKSAKSGIEFSEKYAEMGLRSHVHGSISEVDTSDIIDRKMLRFMADAAIFNAIALDEAIKQSGLSEDMVSSERTGLIMGSGGASNVNVVEAADILREKGIKRVGPYRVPRTMGSTTSACLSTLFKIKGINYSISSACSTSAHCIGNAMEQIQHGKQDVVFAGGGEELDWSTTMLFDSMGALSSKYNKTPELASRAFDANRDGFVISGGGGALILESLEHAEARGATIIAELVGYGATSDGHDMVAPSGEGARRCMEIATSTVNGTIDYINAHGTSTPVGDIKELEAIKQVFDTTSIPLIGSTKSLSGHALGAAGVNESIYSLLMLENDFVAESVNIEILDDEAEGMPIVRETKNIKLDRILSNSFGFGGTNACLVFERFNT

SEQ ID NO: 13845 - protein, 458 aa, Bacteroides fragilis YCH46
MKQYDAIIIGFGKGGKTLTAELAKRGWKVALIERSAMMYGGTCPNIACVPTKRLIHEAEKVSWLYPTDYEKQAEAYKAAIARKNEMTAASRANMFNKLSSLPNVTIYTGMASFVSKDVVKVTLPDEVIELQGKKIFINTGSTSIIPAIDGLKDSKRVYTSTSLMELDVLPRHLIIVGGGYIGLEFASMYASFGSKVTVLEGGNKFIAREDRDIADAVKETLEKKGIEIRLNARAQSIQDTADGVTLTYTDTADGNPVTIEGDAILVATGRKPMTEGLNLQAAGVEVDSHGAIVVNGYLHTTAPNIWAMGDVKGGLQFTYISLDDYRIIRDDLFGNKERTADDRNPVAYSVFIDPPLSHVGLTEEEAIKRGYSFKVSRLPASALPRARTLQQTDGILKAIVDSHSGRIMGCTLFCAESSEVINVVNMAMKTGQHYTFLRDFIFTHPSMGEGLNDLFSID

SEQ ID NO: 13846 - protein, 363 aa, Ricinus communis
ASTLKSGSKEVENLKKPFMPPREVHVQVTHSMPPQKIEIFKSLDNWAEENILVHLKPVEKCWQPQDFLPDPASDGFDEQVRELRERAKEIPDDYFVVLVGDMITEEALPTYQTMLNTLDGVRDETGASPTSWAIWTRAWTAEENRHGDLLNKYLYLSGRVDMRQIEKTIQYLIGSGMDPRTENSPYLGFIYTSFQERATFISHGNTARQAKEHGDIKLAQICGTIAADEKRHETAYTKIVEKLFEIDPDGTVLAFADMMRKKISMPAHLMYDGRDDNLFDHFSAVAQRLGVYTAKDYADILEFLVGRWKVDKLTGLSAEGQKAQDYVCRLPPRIRRLEERAQGRAKEAPTMPFSWIFDRQVKL

SEQ ID NO: 13847 - protein, 451 aa, Saccharomyces cerevisiae
MDGNDHKVENLGDVDKFYSRIRWNNQFSYMATLPPHLQSEMEGQKSLLMRYDTYRKESSSFSGEGKKVTLQHVPTDFSEASQAVISKKDHDTHASAFVNKIFQPEVAEELIVNRYEKLLSQRPEWHAPWKLSRVINGHLGWVRCVAIDPVDNEWFITGSNDTTMKVWDLATGKLKTTLAGHVMTVRDVAVSDRHPYLFSVSEDKTVKCWDLEKNQIIRDYYGHLSGVRTVSIHPTLDLIATAGRDSVIKLWDMRTRIPVITLVGHKGPINQVQCTPVDPQVVSSSTDATVRLWDVVAGKTMKVLTHHKRSVRATALHPKEFSVASACTDDIRSWGLAEGSLLTNFESEKTGIINTLSINQDDVLFAGGDNGVLSFYDYKSGHKYQSLATREMVGSLEGERSVLCSTFDKTGLRLITGEADKSIKIWKQDETATKESEPGLAWNPNLSAKRF

SEQ ID NO: 13848 - protein, 344 aa, Arabidopsis thaliana
MYVIESKGGAITCMLLALLFLGTWPAIMTLTERRGRLPQHTYLDYTLTNLLAAVIIAFTLGEISPSRPNFTTQLSQDNWPSVMFAMAGGIFLSLGTLATQYAWAFVGLSVTEVITASIAVVIGTTLNYFLDDRINRAEVLFPGVACFLIAVCFGSAVHKSNAADNKSKLQGFKSLETTSSFQMETSSIKEGKAKVGTADFLIEVEKQRAIKVFGKSTIIGLAITFFAVPKLNVYTAFFYFSISSFGVGLILNIIFLYWPILGLPRSSFKAYLNDWNGRGWSFLAGFLCGFGNGLQFMGGQAAGYAAAGAVQIENKHFGGYCCLENTKDHQEKHIHFLSVCYLCS

SEQ ID NO: 13849 - protein, 484 aa, Saccharophagus degradans 2-40
MSNKYDVIVIGSGPAGYVAAIRCAQLGLKTACIEKWKDKDGKGVNGGTCLNVGCIPSKALLDSSHRYEDAHKGFASHGIKAPNVEIDVPSMIARKDKIVKQMSGGITGLFQANKVTSLYGTGKLLAGRKVQYVALDGKEEVLEAENVILASGSIPVNIPVAPADGDVIVDSTGALEFQAVPERLGVIGAGVIGLELGSVWGRLGSKVVCLEAMDSFLAMMDQQIATEAKKILVKQGLDIRLSCRVTGTEVVEAKGKKEVIVTYTDKDGNEAKETFDKLIVCVGRRPFTDGLLSEDSGVKLDERGSIYVNDLCSTSAPGVWAVGDVVRGPMLAHKGSEEGVMVAERIAGQKTVMNYDIIPNVIYTHPEIASVGKTEEQLKADGEAYEVGTFPFLAIGRAVAADCAEGMVKMIAHADTDRVLGCHIVGPNAADLVQQVAIAMEFGATSEDIGMTVFGHPTFSEAVKEAALAVHGHAIHMPNRKKRK

SEQ ID NO: 13850 - protein, 392 aa, Staphylococcus aureus subsp. aureus COL
MNQQLIETLKSKEGKMIEIRRYLHQHPELSFHEDETAKYIAEFYKGKDVEVETNVGPRGIKVTIDSGKPGKTLAIRADFDALPITEDTGLSFASQNKGVMHACGHDAHTAYMLVLAETLAEMKDSFTGKVVVIHQPAEEVPPGGAKTMIENGVLDGVDHVLGVHVMSTMKTGKVYYRPGYVQTGRAFFKLKVQGKGGHGSSPHMANDAIVAGSYFVTALQTVVSRRLSPFETGVVTIGSFDGKGQFNVIKDVVEIEGDVRGLTDATKATIEKEIKRLSKGLEDMYGVTCTLEYNDDYPALYNDPEFTEYVAKTLKEANLDFGVEMCEPQPPSEDFAYYAKERPSAFIYTGAAVENGEIYPHHHPKFNISEKSLLISAEAVGTVVLDYLKGDN

SEQ ID NO: 13851 - protein, 359 aa, Salicornia herbacea
MSAFVGKYADELIKTAKYIATPGKGILAADESTGTIGKRLASINVENVESNRQTLRELLFTSPGALPFLSGVILFEETLYQKTSQGKPFAQLLQENGVIPGIKVDKGVVELSGTNGETTTQGFDSLGARCQEYYKAGARFAKWRAVLKIGPTEPSELSIQQNAQGLARYAIICQENGLVPIVEPEVLTDGNHDIKKCAAVTETVHAACYKALNDQHVLLEGTLLKPNMVTPGSDSPKVAAEVIAEYTVTALRRTVPPAVPGIVFLSGGQSEEEATVNLNAMIKLEVLKPWTLSFSFGRALQQSTLKTWGGKKENLSKAQSVFLVRCKANSEATLGKYVAAGNSDNGAASESLFQKDYKY

SEQ ID NO: 13852 - protein, 576 aa, Clostridium thermocellum ATCC 27405
MKTSPVFEVRTIKNLRDMIEQSSKLFANKDAFRVKTKDNSYRGITFAEFKNDIDAFGTALLDLLGTEKGFVAVIGENRYEWCVTYLATINGVGVVIPLDKELPLPELENLLKQSNANAIVYSGKFHDAIKEMSSRLSNIKYFINMNTNEHEDDKFLSFWVLLEKGKKLLESGKKDYLNAPIDENAMSAMIFTSGTTGQAKAVMLSHKNICSNMMAVSASVYMDSTDSVLSILPLHHTYECTAGFLTMIYNGATITFNEGLKYIGKNLKEAQPTILILVPLILESMYNKIWEQASKDKSLKFKLKAGLFISNLLYKVFKIDIRRKLFKSVIDNVGGKLRLVISGAAALDPEVAKGFEAMGIKVLQGYGLTEASPIVAVNRDKSYRHDSVGLPLPGLDVEIINPDKEGFGEIIVKGDSVMLGYYNNDDATKAVLKDGWLYTGDLGRMDEKGFIYITGRKKNIIVTKTGKNIFPEEVEAYLNKSPYIKESLVSGRENDKNDETIVVAQIVPDMDAIKAKLKTDTVPSPEEVYKLIKAEIRAINKNMPVYKRVVDITIRENEFAKTSSKKIKRYLEKTNV

SEQ ID NO: 13853 - protein, 372 aa, Zea mays
  misc_feature (295)..(295): Xaa can be any naturally occurring amino acid
  unsure (1)..(372): unsure at all Xaa locations
MAVARLCAAAAAARLQPALAAGARGLGTAAEVAATARWEPMGAREYYDYRRAMYGDITHKAILVDAAGTLLAPTEPMAQVRTARPRPRHPPIAARARLRFASSSAAERHVRPVACVVRRFLRSIIPGHRKRLLVSAQLCAALWRCDWNWTWSDLLFLSTLYAVYRTIGQKYGVDYSEDEILMRYRWAYAQPWGRSRLRYVNDGRPFWQYIVSSSTGCSNLEYFEELYQYYTTEKAWHLCDPDAGRVFEALRKAGVKTAVVSNFDTRLRPLLQALKCDRWFDAVAVSAEVAAEKPXNPTIFLKACELLRVKPEEVVHIGDDRRNDLWGARDAGCDAWLWGSDVYSFKEVAERIGVEHIKFMDLMIQYAKFNDR

SEQ ID NO: 13854 - protein, 448 aa, Lotus corniculatus var. japonicus
MVLRKVGKYEIGRTIGEGTFAKVKFAQNTETGESVAMKVLDRNTIIKHNMVDQIKREISIMKLVRHPYVVRLYEVLASRTKIYIILEFITGGELFDKIIRHGRLSEAESRRYFQQLIDGVDYCHSKGVYHRDLKPENLLLDSLGNIKISDFGLSALPEQGVSILRTTCGTPNYVAPEVLSHKGYNGAVADVWSCGVILYVLLVGYLPFDELDLTSLYSKIEKAEYSCPPGFPVGAKTLIHKILDPNPETRITIEQIRNDEWFQRGYVPVSLLEYEDVNLDDVNAVFDDAEEQRANQQCDHEDMGPLMLNAFDLIILSQGLNLAAIFDRGQDSMKYQTRFITQKPAKVVLSSMEVVAQSMGFKTHIRNYKMRVEGLSAKKTSHFSVMLEIFEVAPTFYMVDIQKAAGDAGEYLKFYKNFCGNLEDIIWKPPHESTKSKVSKTRSKRRSR

SEQ ID NO: 13855 - protein, 139 aa, Glycine max
  misc_feature (67)..(67): Xaa can be any naturally occurring amino acid
  unsure (1)..(139): unsure at all Xaa locations
MVPFSNILGHEKCESYLIFGGETTLGDNFRAFFYFLCLAYCFIGLSAITARFFQSMENVVKHTRKVXGGLGPGTLVGSAAFDLFPIHAVCVVVPKAGELKKIADLGVWLGELFWSFWAYIWLYIILEVWTPNVVTLWEA

SEQ ID NO: 13856 - protein, 340 aa, Bacillus halodurans C-125
MAKVFYNGDINEGVLQGKTVAIIGYGSQGHAHAQNLRDSGQEVIVGLRPGKSWDKAAEDGFQVYSVREAASRADVIMILLPDEHQPTVYKNEIEPELSEGKTLAFAHGFNVHFNQIVPPATVDVFLAAPKGPGHLVRRTYVDGAGVPGLVAVYQDATGQAKDIALAYSKMNGSARAGVIETTFQEETETDLFGEQAVLCGGTSALVKAGFETLVEAGYQPEVAYFECLHELKLIVDLMYEGGLEYMRYSISDTAQWGDFQAGPRVVTAETKQAMKDILSDIQTGKFAKGWILENQANRPEFTAINEREKNHPLEVVGRELREMMPFVKAKSKGVVGSAKN

SEQ ID NO: 13857 - protein, 227 aa, Oryza sativa
MGRGKIAIKRIDNTMNRQVTFSKRRGGLMKKARELAILCDADVGLIVFSCTGRLYDFSSSSMKSIIERYQEAGEEHCRLLNPMSEAKFWQREVTTLRQQVQNLHHNNRQLLGEEISNFTVRDLQLLQNQVEMSLHSIRNKKDQLLAEEILKLNEKGSLVQKENSELRKKFNIAHQRNIELHKKLNSGESTSSEQVTRSSKDPGESSTPRDSRVCIDLELSQKEVEDE

SEQ ID NO: 13858 - protein, 412 aa, Lotus corniculatus var. japonicus
MASVGVAPTSGVREASGCHGAAGVDRLPEEMNDMKIRDDREMEATVVDGNDVTETGHIIVTTIGGRNGQPKQTISYMAERIVGHGSFGVVFQAKCLETGETVAIKKVLQDKRYKNRELQTMRLLDHPNVVALKHCFFSTTEKDELYLNLVLEYVPETVHRVIKHYNKLNQRLPLIYVKLYTYQIFRALSYIHRCIGVCHRDIKPQNLLVNPHTHQVKLCDFGSAKVLVKGEPNISYICSRYYRAPELIFGATEYTTAIDVWSVGCVLAELLLGQPLFPGESGVDQLVEIIKVLGTPTREEIKCMNPNYTEFKFPQIKAHPWHKIFHKRMPPEAVDLVSRLLQYSPNLRCTALDALTHPFFDELREPSTRLPTGRFLPPLFNFKSHELKGVPAEILVKLVPEHARKQCPFLGL

SEQ ID NO: 13859 - protein, 607 aa, ASPERGILLUS NIDULANS FGSC A4
MPLLEPSATAYGTFGDMRPDTEDEGERLLTDGYVSDDDGSAVTSVDSVQEGVRKIEAINITWTTRSLVIAYISIFLMAFCTSLEGQTIMSLSAYATSAFSKHSLISTVLVVQNVVNAVIKPPMAKIADVFGRFEAFCVSILIYVLGYIQMAASTNVQTYASAQIFYAAGSTGLQILQQVFIADSSSLLNRALLALLPELPFLVTVWIGPTIADVVLENSSWRWGYGMWSIILPASFLPLALSLLLNQRKAKRLNLIKERPHHRRGFVAAVRRTWYDLDIFGLALLSAAVTLILVPLTLAANTKNGWKSNSIVAMIVIGVVCLILLPFWETSKKLAPKPLLSLHLLKQRTALAGCCLAFFYFMAFYFSVQPYLYSYLQVVQGYDVATAGRVTQTFAFTSTIAAFGVSILIKYTRRYRVYVTLGCVIYMTGLLLMLLYRKEGSSPLQVLGTQVIVGMGGGLLNVPVQLGVQASASHQEVAAATAMFLTSMEMGGAVGAAISGAVWTHNIPRKLNLYLPDEYKSEAGAIFGKLTKALSYEMGTPVRSAINRSYQETMNKLLVLALLATLPLIPLSLLMSNYKLDKMSESSDHDDASPRNGLGPGERAKRT

SEQ ID NO: 13860 - protein, 457 aa, Erwinia carotovora subsp. atroseptica SCRI1043
MQQYLTEARKLSALAVPVIIAQVSQTSMGVVDTIMAGAYSATDMAAVAVGTSIWLPAILFGHGLLLALTPVVAQLNGSGRRDRISHQVRQSFFLAAIISVLTMLVLYQGEYAINLMSNDSPELAAKAIGYLHALLWGVPGYLFYQVLRCQCEGLSKTYPGMMIGFIGLLINIPINYIFIHGKFGMPELGGVGCGVATASVYWIMMLLMMLYTQRASWLRDIRLHRPAFRPDFTVLKRLFGLGLPIALALLFEVTLFAVVALLVLPLGVVNVAGHQIALNFSSLMFVLPLSVGVATTIRVGHRLGEGSVDNARIAAHTGIMAGVALACCTAIFTTLLREPIALLYNQDPLVVAMASQLMLLAAVYQISDAVQVIGTGVLRGYKDTRSIFYITFVAYWVLGLPSGYLLALTDVIVPRMGPAGFWCGFIIGLTAAAVMMVTRIRFLQRQPAARILARAAR

SEQ ID NO: 13861 - protein, 547 aa, Lotus corniculatus var. japonicus
MESTRRWFSKFKAMDKTKPSKNKEDTGMAKEGLQPPTNEETPSNVTQQKVEAAKQYIENHYKKQMQSLQERKERRNMLEKKLADAEVSEEEQNNLLKYLEKKETEYMRLQRHKMGADDFEPLTMIGKGAFGEVRVCREKATGHVYAMKKLKKSEMLRRGQVEHVKAERNLLAEVDSNCIVKLYCSFQDEENLYLIMEYLPGGDMMTLLMRKDILTEDEARFYVGETVLAIESIHKHNYIHRDIKPDNLLLDRHGHMKLSDFGLCKPLDCSNLQEKDFSAMSNRSGALQSDGRPAAPKRTQQEQLQHWQKNRRMLAYSTVGTPDYIAPEVLLKKGYGVECDWWSLGAIMYEMLVGYPPFYSDEPMQTCRKIVNWRTHLKFPEEAKLSPEAKDLICRLLCNVEQRLGTKGADEIKAHPWFDGIEWDKLYQMKAAFIPEVNDELDTQNFEKFEEADKQTEPSAKAGPWRKMLPSKDINFVGYTYKNFEIVNENEIPGIAELKKKSTKSKRPSIKALFDDESAMAANQPVKGSFLNLLPPQMEVPEKNESQ

SEQ ID NO: 13862 - protein, 272 aa, Glycine max
MRTNSFTRLRGPLTKPNSFRGSIMPTHHASAAIFGIIGNMISVMVYLAPVPTFYQIYKKKCTDGFHSLPYLLSLMSSMLWLYYAFLKIHDGVVPLITINSIGCVIELIYILTYIKYAHKDARNLTYTLFAAMNIAFLTLVLSSHFALHGSHRVKVIGWICDAVSLSVFASPLSIMAKVIRTKSVQFMPFYLSFFLTLNAITWFVYGLSIQDKCIYVPNVGGFGLGLVQMVLYGIYRNGGESEKEQALAEGAINIVVVNPLGPAEVFNRRGSG

SEQ ID NO: 13863 - protein, 136 aa, Brassica napus
  misc_feature (27)..(27): Xaa can be any naturally occurring amino acid
  unsure (1)..(136): unsure at all Xaa locations
DSAGNVFGHWYGYVTPDDVPAMLDQHXAKGEIIQNLSRGKMGLIPEGEEAVKEDEHKIPNGNGVQVEKKGFTGGCCQGANGVSCCQEQTPEPVKKEGSVKKTWFRSIEKEELLLGAAAVGAVATIAVAYSISRKSG

SEQ ID NO: 13864 - protein, 185 aa, uncultured bacterium
GCTSGLDAVAEGAEMIEDGRADVVIAGATDAPISPITVACFDAIKATSPNNDDPAHASRPFDISRDGFVQGEGAAVFVLEPADQARRRRAHIYCEIAGYAQRSNAYHMTGLTADGLEMAEAIRVAMGRARLVPEDIDYINAHGSGTRQNDRHETAAFKASLGARAFEVPVSSIKSMVGHSLGAIG

SEQ ID NO: 13865 - protein, 426 aa, Lotus corniculatus var. japonicus
GRVLGQGNFAKVYHGRNLATNENVAIKVIKKEKLKKDRLVKQIKREVSVMRLVRHPHIVELKEVMATKGKIFLVMEYVKGGELFTKVNKGKLNEDDARKYFQQLISAVDFCHSRGVTHRDLKPENLLLDENEDLKVSDFGLSALPEQRRDDGMLVTPCGTPAYVAPEVLKKKGYDGSKADIWSCGVILYALLSGYLPFQGENVMRIYRKAFKAEYEFPEWISPQAKNLISNLLVADPEKRYSIPEIISDPWFQYGFMRPLAFSMKESAVGEDSTIDHFGGEEEEVPELVAAMGKPARPFYNAFEIISSLSHGFDLRSLFETRKRSPSMFISKYSASAVVAKLEGMAKKLNFRVTGKKEFTVRMQGMKEGRKGKLAMTMEVFEVAPEVAVVEFSKSAGDTLEYVKFCEEQVRPSLKDIVWSWQGDSN

SEQ ID NO: 13866 - protein, 452 aa, Candida glabrata CBS138
MREIIHISTGQCGNQIGAAFWETICGEHGLDYNGNYHGTEEIQRSRLGVYFNEASSGKWVPRSINVDLEPGTIDAVRTSNIGNLFRPDNYIFGQSSAGNVWAKGHYTEGAELVDSVMDVIRREAEGCDSLQGFQITHSLGGGTGSGMGTLLISRIREEFPDRMMATFSVLPSPKTSDTVVEPYNATLSVHQLVEYSDETFCIDNEALYEICQTTLKLNQPSYNDLNNLVSSVMSGVTTSLRYPGQLNSDLRKLAVNLVPFPRLHFFMVGYAPLTAIGSQSFRSLTVPELTQQMFDSKNMMAAADPRNGRYLTVAAFFRGKVSVKEVEDEMHKVQTKNSSYFVEWIPNNVQTAVCSVPPKDLDMSATFIGNSTSIQELFKRVGNQFNAMFNRKAFLHWYTSEGMDEMEFTEAQANMTDLVNEYQQYQEATVEEEIEEGAEYITEEQPMPETFD

SEQ ID NO: 13867 - protein, 185 aa, uncultured bacterium
GCTSGMDAVAEGAEMIEDGRADVVIAGATDAPISPITVACFDAIKATSPNNDDPAHASRPFDASRDGFVLGEGATVFVLEPADEARRRGAHIYCEIAGYAQRSNAYHMTGLKADGLEMAEAIRVAMDRARLAPGDIDYINAHGSGTRQNDRHETAAFKASLGARAYEVPVSSIKSMVGHSLGAIG

SEQ ID NO: 13868 - protein, 193 aa, uncultured bacterium
VHVGAGRPGCTSGLDAVGYARDLIREGSADMMVAGATDAPISPITVACFDAIKATTPRNDDPEHALRPFDNSRNGFVLGEGSAIFVLEELEHARKRGAHLLAEIAGFASRCNAFHMTGLRPDGREMAEAIRVALHEAHMLPEDIDYVNAHGSGTKQNDRHETAAFKRSLGEHAYRTPVSSIKSMIGHSLGAIG

SEQ ID NO: 13869 - protein, 363 aa, Triticum aestivum
  misc_feature (170)..(170): Xaa can be any naturally occurring amino acid
  misc_feature (251)..(251): Xaa can be any naturally occurring amino acid
  misc_feature (313)..(313): Xaa can be any naturally occurring amino acid
  misc_feature (325)..(325): Xaa can be any naturally occurring amino acid
  unsure (1)..(363): unsure at all Xaa locations
MGSTAADMAASADEEACMYALQLVSSSILPMTLKNAIELGLLETLVAAGGKLLTPAEVAAKLPSTANPAAADMVDRMLRLLASYNVVSCTMEEGKDGRLSRRYSAAPVCKFLTPNEDGVSMAALALMNQDKVLMESWYYLKDAVLDGGIPFNKAYGMSAFEYHGTDPRFXRVFNEGMKNHSIIITKKLLEVYKGFEGLGTIVDVGGGVGATVGAIVAAYPAIKGINFDLPHVISEAPPFPGVTHVGGDMFXKVPSGDAILMKWILHDWSDEHCATLLKNCYDAAAGARQRWCSWKCILPVNPEATPKAQGVFXHVDMIMLAHNPXGAGKRYEREFEGLAKGAGFAAIKTTYIYANAFAIEFTK

SEQ ID NO: 13870 - protein, 291 aa, Saccharomyces cerevisiae
LVHVASVEKGRSYEDFQKVYNAIALKLREDDEYDNYIGYGPVLVALAWHISGTWDKHDNTGGSYGGTYRFKKEFNDPSNAGLQNGFKFLEPIHKEFPWISSGDLFSLGGVTAVQEMQGPKIPWRCGRVDTPEDTTPDNGRLPDADKDAGYVRTFFQRLNMNDREVVALMGAHALGKTHLKNSGYEGPWGAANNVFTNEFYLNLLNEDWKLEKNDANNEQWDSKSGYMMLPTDYSLIQDPKYLSIVKEYANDQDKFFKDFSKAFEKLLENGITFPKDAPSPFIFKTLEEQGL

SEQ ID NO: 13871 - protein, 144 aa, Paxillus involutus
MADQLSEEQISEFKEAFSLFDKDGDGTITTKELGTVMRSLGQNPTEAELQDMINEVDADGNGTIDFPEFLTMMARKMRDTDSEEEIKEAFKVFDKDGNGYISAAELRHVMTNLGEKLTDTEVDEMIREADVDGDGQINYDEFVK

SEQ ID NO: 13872 - protein, 762 aa, Vibrio sp. Ex25
MSHVNSKSAQEFHAELTDIGHKLIEERDVIVNRYAVEDRKNYELTTSLVDIEVAAEKLLNSSRESVWFPVTPNHKKVEDTLNLFKNRVLDTTLKLDMLIGVQVENQYALLMLFNLYQQDISTDTGKTLSGHHYFEFLNQLLLTQNVVESESEANFLDRLQASDKRIELLTNELLDHGYFVFIEDAEHRLLNIAQSEARFTWLFVFIAVMLLVSAFLYQSQYRMYNLKQLNLEIEEARNKAERAAKAKSSFLAAMSHELRTPMNGVLGLSQMIAEETNEPTTKEYVKVILDSGQHLMTILNDILDFSKVEENKLEFEQAKFNLDQVISPVCSAIKPLIDEKNIELIVENEVPEYVEFTGDCARLRQILFNLAGNAVKFTSEGHVLIRTELDKVNHCLVMIVSDTGIGIALDKQEHVFNSFEQADSSTTRKFGGTGLGLAIVKKLTGLMDGKITLKSVEGVGSQFIVELPIPWVECELPKAQEPPKTRKKTHNLQILLAEDNRVNAIVAKGFCEKLGHEVDVAENGLVAVKKARDNEYDLILMDNHMPEINGVEATRVIRQELGIKTLLFAYTADVFREAHDSFIQAGADHVLTKPLQQESFSDALKQFATRLEPKENLPLTNDNNVLQLQRKPIEKLRLTEEELSSSEMLISLQEAPEAIDELLKSIIVDFESSVDELIDYFMAEDFASLEDTLHKTKGMALNLGLPILAGQTEALENTLKAKQTPEIERLQMLINRLQVNIHQANRLLDDIQKKNVDPQQIL

SEQ ID NO: 13873 - protein, 463 aa, Iris hollandica
MAKQHFLVITIGAQGHINPARRLAARLIEAGGARVTLTVPILAYRRMFPSAAAELEPREEKDDGLLTYMPYSDGVEDGLDPAANPAEFKRRIAESLRCIAAGFVARGRPITCIVYALLLSMAAAVARDLGVPSVLFWIQSATSFAVNYHYFAGGYDKLFSEAAADPSFLVELPGLPAFRRKDLPTLLTGPRPEGTFYSFLHTLYGEVFETLRREVSAGEEKPRVILNTFRALEEDVVAGFEASIDMVTVGPLVPPSLIMTSPEETATNDLYEHDTSNYMEWLDGKEEGSVVYVSFGSYATLKEEEREEVKKGLSASGRPYIWAMAKGGSGDDGGGLGVKVEWCEQARVLSHRSVGCFVTHCGWNSVAEAMACGVPMVMLPQWTDQVTNAKLAEEEWGVGVRAEAVAGEELRRCLDVVMGGGEADDGGIVMRRRAKAWSEKAREAAGDGGSSARNLAAFVVGGN

SEQ ID NO: 13874 - protein, 215 aa, Methanococcus maripaludis S2
MKFFLDTANVEKIKEFNALGLVDGVTTNPSLIKKEGRDFYEVIKEICSIVDGPVSAEVIALDSEGMVKEARELVKLAENVVVKIPMTKEGMKAVNILSKEGIKTNVTLIFSANQALLAAKAGASYVSPFVGRLDDVGQDGMFLISEVMQVFGAYGIETEVIVASVRHPIHVLESAKMGADIATIPFDVLDKLFNHPLTDNGIAKFLSDWEAHMNR

SEQ ID NO: 13875 - protein, 231 aa, Pseudomonas fluorescens PfO-1
MSLFKRSVTELLGTFWLVLGGCGSAVIAASSPLGIGVLGVALAFGLTVLTMAFAIGHISGCHLNPAVSVGLVVGGRFPAKELPAYVIAQVLGGILAAALLYHIASGKEGFDIAAGLASNGYGEHSPGKYSMASGFVTELVMTAMFVVIILGATDKRAPAGLAPIAIGLALTLIHLISIPVTNTSVNPARSTGPALMVGGWAIAQLWMFWVAPLLGAVVGGVLYRWLGKEDS

SEQ ID NO: 13876 - protein, 450 aa, Vibrio sp. Ex25
MSHIHDTIVALQHSSPAQKEFYQAVEEVLTSLAPVIESNNKYKEQAIIQRIVEPERQIMFRVPWVDDAGNVQVNKGYRVEFNSALGPYKGGLRFHHSVNASIIKFLGFEQIFKNALTGLPIGGGKGGSNFDPKGKSDGEIMRFCQSFMNELYRHIGPVTDVPAGDIGVGAREIGYMFGQYKRLTGRYEGVLTGKSLLWGGSLVRKEATGYGTVYFAECMLNDRNDSLKGKTCLVSGAGNVAIYAIEKLYHMGATPVTCSDSRGTIYHEHGIDLQLLKQLKEVKRASLEEYLDTYPEAEYTPLGDYPNEGHAVWRYQADAAFPCATQNELTSNDALALIDNGCVLISEGANMPTTRDAANIIVDSEMAYGPAKAANAGGVATSQLEMAQNASMQNWTFEQVDSQLQTIMKNIFVNANETSREFGQPGNLVLGANIAGFRRVADAMIEQGIV

SEQ ID NO: 13877 - protein, 498 aa, Clostridium thermocellum ATCC 27405
MLELFKSVKLDKNSGTPLYMQLSDKIAEMIENGILPADLKLPSIRQMSALLNVNSVTIVSCYKHLETKGYVYSRPGSGTYVAVVLPKQSENYSDRNIILDELYQSDDLNLINNGHIKINENTINFASATPKSSLFPVENFKLVLNEVLDRDRGNAFDYQDSQGYYPLRSSVRILLEKRKIACHEENIQIISGAQQGIDIIAKALLRQGDYVITESPTYTGAIAVFKSRGAEIADVPLSCDGPNLNILEYNLKKYKPKLIYTIPSFQNPTGISYSNEKRKEILALAERYDAYIIEDDYVSGLDFENMGFATVKSMDKSDRVIFLKSFSKIFMPGLRLGFMVVPSSLKSYIIEAKHATDISTSGLIQRAFDLYIRKGMWDGHFKLMFNIYKERYYKTIEALERHLPQNVQFHKPGGGLNIWLELPANCFTGSLLKAASAENIVFAPGRIFYSSTPTNLNNIRLSFAAVDADEIERGIEKLSELILRFDRNKSLTDNIPIL

SEQ ID NO: 13878 - protein, 727 aa, Rhodobacter sphaeroides 2.4.1
MPRSLIVHENFLSRVKARDLPQGAPPTPGLAPHEMVALFRNQCLSRALDRTSRAMQKAGQGFYTIGSSGHEGMAAVAHALRPSDMAFLHYRDAAFQIARAAQLGQSIAWDMLLSFASSAEDPISGGRHKVLGSKALAIPPQTSTIASHLPKAVGAAYSLGLARRRPPEHRALPEDALVMASFGDASANHSTAQGAFNTAGWTAFQSVPLPLLFVCEDNGIGISTRTPRGWIEASFRARPGLRYFRANGLDMSETYAVAAEAAAYVRNRRKPAFLHLGTVRLYGHAGADLPTTYMSREEVETEEANDPLLHSVRLMEAAGALDPDDALAIYLETQERVDRVAAEAVTRPRLKTASDVMASLIPPARPCAPTNGPSADSRAAAFGSDLKAMAEPQPMSRLINWALTDLMLAHPEIVLMGEDVGRKGGVYGVTQKLQTRFGPDRVIDTLLDEQSILGLGIGMAHNGFLPIPEIQFLAYLHNAEDQIRGEAATLPFFSNGQYTNPMVLRIAGLGYQKGFGGHFHNDNSIAVLRDIPGLILACPSDGAEAAMMLRECVRLAREEQRLVVFLEPIALYPMRDLAEEKDGGWMRTYPDPSERLRFGEIGCHGEGRDLAIVTFGNGIYLSQQANFTLRENGVAARILDLRWLAPLPLEAMLRATQDCRAVLVVDECRRSAGGPAEALMTALAEAGRTRIARITAEDSFIATGPAYAATLPSAAGIAEAALALVRA

SEQ ID NO: 13879 - protein, 564 aa, Xanthomonas axonopodis pv. citri str. 306
MCSIFGIFGLQPGDDLQALRRQALECSQRQRHRGPDWSGVYVDTGAILVHERLAIVDPAGGSQPLLSEDGQLALAVNGEIYNHRELKAELLQPYAFQTGSDCEVINALYREDTPASYLNRLNGIFAFALWDKTEGRVIIARDPIGVVPLYWGHDREGRLRVASELKSLVDDCADAAQFPPGHWYDSATGALNRYYERAWRQYGAVEGVQVQLQELREAFERAVHRQLMTDVPYGVLLSGGLDSSLVAAVAARYARHRIEENDITEAWWPRLHSFAIGLKGSPDLAAAEVAAAALGTVHHGFEYTFDEGLDALPDVIRHIETYDVTTIRASTPMFLLARRIKAMGVKMVLSGEGSDEIFGGYLYFHKAPNAREFHEELVRKLDALNNYDCLRANKSMMAWGVEPRVPFLDREFLDVAMRMDARFKMIDKTSSGATRMEKGVLREAFAGYLPESILWRQKEQFSDGVGYGWIDGLKAHAQSQVSDRELAAADRRYPVNPPQTKEAYFYRSLFEQFFPGQAAAETVPGGKSIACSSPTAIAWDASFAAMADPSGRAIAGVHAQALAS

SEQ ID NO: 13880 - protein, 333 aa, Cryptococcus neoformans var. neoformans B-3501A
MAPASHFTFNNGKKIPSIGLGTWQSEPGQVAKAVESALKSGYRHIDCAWAYGNEKEVGEGLKASGVPREEIHITSKLFELHHHPEHVELACKDTLKNLGVEYLDLYLLHWNINFQVDAPKGTVPTFDHAVKADNGKIKLDVALADNVMPTWREMEKLVEKGLVKSIGISNFNIHRTEKLLKEAKIKPVADQVELSIQCPQHELVAYLKSKDILPQGYSPLGGTGKSNLRENDVVQKIADKYKVQTANILLSWLVMRGINPVPKSVTPERIANNLKLVDLSQEDFKELEKLAESHPPKRVCDQSEDFEPKYDIFQENDPEFSDKAQFAKLGLKL

SEQ ID NO: 13881 - protein, 331 aa, Cryptococcus neoformans var. neoformans B-3501A
MSTDKKDITSWASKDGSFKRQVSSFRDFIEPGGKFAPEKGRYHLYVSLACPWAHRTLIVRKLKGLEDFLDVSTVHPHMLEGGWHFVPKDKASAKPAPASAHDNDTFPNATSDPLFGFSHLRDLYFKAQPDYSARFTVPVVWDKKENTIVNNESSEIIRFFNTAFNGELPADKAKLDLYPEDLKKEIDELNEWVYNDINNGVYKSGFASTQEAYEAAVKSLAKALQKVEDRLSDGREFLMGDRLTEADVRLYTTIIRYDPVYYVHFKCNFGLIRHDYPNLHKWLQRLYWNHPAFKDTTDFDHIKEHYYYSHAQINPNRIVPFGPNVNIEPLK

SEQ ID NO: 13882 - protein, 82 aa, Brassica napus
KDSAAESEDGMRFLLLSRIILGKSEIVPLGSTQSCPSSPEFDSGVDDLASPSKYIVWSTHMNTHVLPEFLVCIKAPFNFNSK

SEQ ID NO: 13883 - protein, 271 aa, Magnaporthe grisea 70-15
MSSTSRFSLAGKTVAITGGGRGLGITLALAVVEAGGHVACLDILPEPAADEWEALQKTAASARGGPLGCSYHRCDVTSEAEMEKMIDSIAEEAAGRGAELAGCVACAGIQQKTPALDYPAADFERILRVNVTGVFITAKYAARVMVRRGVKGSIVLIGSMSGEIANRGLTCTAYNSSKAAVQQMCRSLAQEWGKHGIRVNTLSPGYIRTAMTDELLAAEPSLEETWMAGALLGRLGTPEDFMSPAVFLLADGSSFMTGSDLRVDGGHCASA

SEQ ID NO: 13884 - protein, 332 aa, Triticum aestivum
  misc_feature (234)..(234): Xaa can be any naturally occurring amino acid
  misc_feature (275)..(275): Xaa can be any naturally occurring amino acid
  misc_feature (282)..(282): Xaa can be any naturally occurring amino acid
  misc_feature (290)..(290): Xaa can be any naturally occurring amino acid
  unsure (1)..(332): unsure at all Xaa locations
HLFFLASSSWVSLLLGASSPQRMAVSVLAILLASCALAAASFDKEFDVTWGDGRGKILDNGQLLTLGLDKVSGSGFQSKHEYLYGKIDMQLKLVPGNSAGTVTAYYLSSQGPTHDEIDFEFLGNVTGEPYTLHTNVFTQGQGQREQQFRLWFDPTNDFHTYSILWNPKHIIFMVDDMPIRDFRNLEGKGIAFPKNQPMRLYSSLWNADDWATQGGRVKTDWSHAPFSASYRGFXADACVVTAGGKPHCGASVGTEVAPGTGAAGEWYNQELDLTXQQRMRWXQSNYMIYXYCTDPSASPRASWRVLMVSMPVNRRRRTVGNREDEACINRCQ

SEQ ID NO: 13885 - protein, 500 aa, Methanosarcina acetivorans C2A
MKYISSLRMKAIDTNCSYLGLSPLQLMENAGAAIAQSVKEKLGSGKVLFVAGRGNNGGDAFVAARHLAGIPGYIVRVILLGKDRDIGTEEAYHNYSLLKFSRVQTLEIRDSGQLAVSELFSEADLLVDAIFGTGVKGNIKEPESTAIDLINNEGKAGKIIIAVDVPSGLDPDRGNFEKAVYADLTVTFHRMKAGLLDEQAKEYTGTIKVAEIGVCADAEHYTGPGDLQMLKKRKLEAHKGNAGRILVIGGGPYSGAPALAALAALRAGADLVTVAVPESVAGIVASYSPDLIVRKLFSSVLCPEDLSILPDLINSHDVVVMGMGLGRATETLETVRKLLPFCRKAVLDADALAALSGTLFETLAGNCEIIVTPHAGEFARLRDMETPDSPETREKAVREFAAEKGVVTLLKGKVDIISDGKQTLLNRTGNPGMTVGGTGDVLAGITGSLFSRNPAFLAAACAAYINGAAGDLAFEKAGNALLATDVIGKISEIIKEAGIG

SEQ ID NO: 13886 - protein, 610 aa, Triticum aestivum
  misc_feature (175)..(175): Xaa can be any naturally occurring amino acid
  misc_feature (241)..(241): Xaa can be any naturally occurring amino acid
  unsure (1)..(610): unsure at all Xaa locations
MVENHHSKLDMPSPSQTAASENATTVPCGGGDQRRTEEEVSRLGACTGSTLIQANVPPLFCFSWFRFESKGLQGDPDRRTSTRDRRSSWGYVFILVNNCLQYSAYYGVSTNLVNFLKVQLHSGSKAAANSVTNWQGTASITPLAAGFLADSFLGRYWTITLFLFISVAGYGVVAXASAVFYAGLYLVALGGALQPVLSSFGADQFDAESDEEERRRQSSFFNWFYLSIVVGSLVGGTVLVXWVQSAHGWRLGYGIPALLSVLAVALFLAGTGAYRRHQPPGGSPLTRIAQVVVAAARKCDVEIPTDATLLHECDGDDGMSVIQGSRRLAHTDEFRFLDKAAVETAGDKARPASPWRLCTVTQVEELKCVLRLLPVWACGIIFAAAYTQMTTTFILQGDTLDPRVGSFRVPPAVLTVFDTLSVMLWVPLYDRAVVPLARRLTGHRRGFTQLARMGVGFVILTIAMLAAGTLEVARRRVVARHGTYTGEDGAGYVPMSIFWQVPQYVVVGAAEVFTFIGQMEFFYDQAPDAMRNVCSGLSSAAFALGNYASSALVAVVVRAMTRGGRPGWIPDDINDGHLDYFFWLLAMLCIGNFSVYLLVARWYTYKKTAD

SEQ ID NO: 13887 - protein, 587 aa, Saccharophagus degradans 2-40
MRTITFDGIVIGGGGAGMRAALQMAQSGFKTAVVTKVFPTRSHTVSAQGGITCAIASADPQDDWRWHMYDTVKGSDYIGDQDAIEYMCSVGPEAVFELEHMGLPFSRTENGRIYQRPFGGQSKDFGRGGQAARTCAAADRTGHALLHTLYQGNVKNNTVFLNEWFAVDLVKNQDGAVCGVIAINMEDGETVFIKSKATVLATGGAGRIFASTTNAHINTGDGVGMALRAGVPVQDIEMWQFHPTGIHGAGVLVTEGCRGEGGYLVNKDGERFMERYAPNAKDLAGRDVVARSMVLEILEGRGCGENADHVFLKLDHLGADTLNAKLPGILELSRTFAHVDPIKDPIPVVPTCHYMMGGIPTNVHGQALTQDANGNDQVVEGLYACGEVACVSVHGANRLGGNSLLDLVVFGRASGLFIEKSLREGIELRDPSATDMDAAMSRLNKVNNSTGGESAPALRTEMQGIMQNHFGVFRRGDMMEVGIAKLAEMRERIANVALEDKSNAFNTARIEALELQNLFEVAEATAIAAEVRKESRGAHARDDFQERDDKEWLCHSMYFPGEKRVGKRAVNFSPKTMEAFEPKARTY

SEQ ID NO: 13888 - protein, 743 aa, Oryza sativa
MAAHSVAAAHATIAARAGAAAPAPAPPERLGFRLSALAGRGLRSPLPPRRGAPSASASRRRHNNRVRAAAVETLEGQAATGALLEKSVNTIRFLAIDAVEKANSGHPGLPMGCAPMGHILYDEVMRYNPKNPYWFNRDRFILSAGHGCMLQYALLHLAGYDAVLEEDLKQFRQWGSKTPGHPENFETPGVEVTTGPLGQGIANAVGLALAEKHLAARFNKPDSEIVDHYTYCILGDGCQMEGISNEACSLAGHWGLGKLIAFYDDNHISIDGDTEIAFTEDVSARFEALGWHTIWVKNGNDGYDEIRAAIKEAKAVTDKPTLIKVTTTIGFGSPNKANSYSVHGSALGTKEVEATRENLGWPYEPFFVPEDVKSHWSRHVPQGAAFEADWNAKFAEYEKKYPEDAATLKSIVSGELPAGWADALPKYTPESPADATRNLSQQCLNALAKVVPGLLGGSADLASSNMTLLKMFGDFQKDTPEERNVRFGVREHGMGAICNGIALHSPGLIPYCATFFVFTDYMRAAMRISALCEAGVIYVMTHDSIGLGEDGPTHQPIEHLVSFRAMPNILMLRPADGNETAGAYKIAVLNRKRPSVLALSRQKLAQLPGTSIEGVEKGGYIVSDNSTGNKPDFIVMSTGSELEIVAKAADELRKEGKTVRVVSFVCWELFDEQSAEYKESVLPEAVTARVSLEAGSTLGWQKYVGSKGKAIGIDKFGASAPAGKIYQEYGITAENVIATAKSL

SEQ ID NO: 13889 - protein, 261 aa, Oryza sativa
MGAGWEEYKPCAAMVAAQCIYAALALWAKAVFTGGMSTMVFVVYRQAIATVFLVPIAIIANRRKKKETRLGMTGFSLIFVASLFGATVNQYVYYQGLHLGSSSMATAMSNLIPAITFVMAASVGPTLEKVDLRRVRSLAKIFGTTVCVGGAMAMAFFKGPRLLNSSSLIVDLNFLLHSSASSKWVMGALFLICSSCCWSLWLILQVPNVPICKSYMDPLTLSAWMCFLSTLQSAVLVSFLVPDINAWKIHSLFELGCCLFA

SEQ ID NO: 13890 - protein, 454 aa, Saccharophagus degradans 2-40
MADVISYNLFILLQESVMTDKKATLTVDGLDDSIELPVYSGSVGPDVIDVRALTGKGYFTYDPGFVSTASCESKITYIDGDKGVLMHRGYPIETLAEKSDYLETCYLLLHGELPSAAEYEEFKGIITHHTMVHESIARFFRGFHYDSHPMAMMCGIVGALSAFYHDSLDISNPEHRLISAHRLIAKMPTLAAMCYKHSQGQPFMYPDNNLGYAENFLHMMFGTPCDDPKVNPVIARAMDRIFLLHADHEQNASTSTVRLAGSSGANPFACIAAGIATLWGPAHGGANEAVLSMLEEIGDEKNIDAYVAKAKDKNDPFRLMGFGHRVYKNFDPRAKVMKETCDEVLTELGLENDPLLKIAKRLEQIALEDEYFIQKKLYPNVDFYSGIIMKAIGIPTDMFTVIFATGRTVGWIAHWHEMISEGFKIGRPRQLYTGSVLREFEERDSRPKANPAKF

SEQ ID NO: 13891 - protein, 493 aa, Pirellula sp. 1
MSEESKCPFQTQQFGRAVDDNQHSQTAGPRGPVLMQDVHLVEKMAHFNRERIPERVVHAKGFGAFGTFTVTNDITKYCMADLFSEVGKKTETFARFSTVGGESGSADTARDPRGFSLKFYTDQGVWDLVGNNTPIFFIRDPLKFSDFIRTQKREPQNHLQPHWRRWDFWGEVPEALHQVMFLYSDRGTPKSARFMNGYGSHTFSMYNKDGVRHWVKFHLKTEQGSENFSADEAIKMAGEAPDYSTRDLFEAIEKGDFPRWRMHIQVMPESDAADYEWHPFDLTKVWPHDDYPLIEVGVFELNRNPSNYFQDVEQAAFEPGNLVEGIGISPDRMLQNRVLSYPDAHRYRLGVNYHQIPVNQPRCPYATYHRDGTMRVDGNGGGTVDYEPNKMNGPKETGRTMEPPMPVHGDGDRYDEFACDDKDYYGQPQMFWNKVLDEGARERLCTAISNSMADSPENIREKMLAQFGKVHPDFEEGVRSRLDAPKSQPIPIA

SEQ ID NO: 13892 - protein, 377 aa, Cryptococcus neoformans var. neoformans JEC21
MSFRAPNLIRSAAGRRASQTLNLRSQVIRRRFATEGGPEITKPSSPRSSNTRYLLAGVGIAAVGAAYYFYGTGRTAHDSANKADTVVRGAVATVEAKTGLRRGKDEYQKVYNRIAETLEKEGYDDGSLAPVLLRLAWHSSGTYNKEDGTGGSNFATMRFKPEAEHSANNGLHVAREHMEKIKQEFPWISYGDLWTLGGVCAVQESGGPTIPWRPGRIDGFEAQVTPDGRLPDASQAQDHLRFIFNRMGFNDQEIVALSGAHAMGRCHTNRSGFEGPWTFSPVTFSNQYFALLRDEPWQWKKWTGPAQYEDKNTKTLMMLPTDMALLKDKSFKKYVDIYADNEEKFFSDFAKAFSKLIELGVPERQWAGEPWTLGTSD

SEQ ID NO: 13893 - protein, 397 aa, Lotus corniculatus var. japonicus
LKKERLVKQIKREVSVMRLVRHPHIVELKEVMATKTKIFMVVEYVKGGELFAKLTKGKMTEVAARKYFQQLISAVDFCHSRGVTHRDLKPENLLLDDNEDLKVSDFGLSSLPEQRRSDGMLLTPCGTPAYVAPEVLKKKGYDGSKADIWSCGVILYALLCGYLPFQGENVMRIYSKSFKADYAIPEWISPEAKNLISKLLVVDPEKRYSIDEIMRDPWFEIGFMRPLAFSMKASAVDDTVIDFNDDVVEDLDPKSDVGGGEFVEAARPSYNAFEIISSLSHGFDLRNLFETRKRSPSTFISKLSASAVVAKLEAVAKKLNLRITGKKEFMVRMQGVTEGRKGKVGMTVEVFEVAPEVAVVEFSKNAGDTLEYIKLCEDQVRPSLNDIVWSWQGQGSS

SEQ ID NO: 13894 - protein, 272 aa, Synechococcus elongatus PCC 7942
MRKLIEGLRHFRTSYYPSHRDLFEQFAKGQHPRVLFITCSDSRIDPNLITQSGMGELFVIRNAGNLIPPFGAANGGEGASIEYAIAALNIEHVVVCGHSHCGAMKGLLKLNQLQEDMPLVYDWLQHAQATRRLVLDNYSGYETDDLVEILVAENVLTQIENLKTYPIVRSRLFQGKLQIFGWIYEVESGEVLQISRTSSDDTGIDECPVRLPGSQEKAILGRCVVPLTEEVAVAPPEPEPVIAAVAAPPANYSSRGWLAPEQQQRIYRGNAS

SEQ ID NO: 13895 - protein, 184 aa, uncultured bacterium
CTSGLDAVGYARDLIREGSADMMVAGATDAPISPITVACFDAIKATTPRNDDPEHALRPFDNSRNGFVLGEGSAIFVLEELEHARKRGAHLLAEIAGFASRCNAFHMTGLRPDGREMAEAIRVALHEAHMLPEDIDYVNAHGSGTKQNDRHETAAFKRSLGEHAYRTPVSSIKSMIGHSLGAIG

SEQ ID NO: 13896 - protein, 449 aa, Haemophilus somnus 2336
MSAIVSLEDFLAKVEQRDGHQPEFLQAVREVFTSIWPFLEKNPKYRSEALLERLVEPERAFQFRVAWTDDKGQVQVNRAFRVQFNSAIGPFKGGMRFHPSVNLSILKFLGFEQIFKNALTTLPMGGGKGGSDFDPKGKSDAEVMRFCQALMSELYRHVGADTDVPAGDIGVGGREVGYLAGYMKKLSNQAACVFTGRGLSFGGSLIRPEATGYGLVYFAQAMLAEKGQSFAGKTVVVSGSGNVAQYAIEKALQLGAKVVTCSDSSGYVYDPEGFTQEKLTALLDIKNVKRGRVKDYAEQFGLQYVEGARPWGVKADIALPCATQNELELSDAQQLIANGVQLVAEGANMPTTIEATDAFLEAGVLFGPGKAANAGGVATSGLEMAQSSQRLYWTAEEVDEKLHRIMLDIHANCKKYGTVEGQKNINYVVGANVAGFVKVADAMLAQGVY

SEQ ID NO: 13897 - protein, 529 aa, Streptomyces avermitilis MA-4680
MTSFRPAPAWLADAVFYQIYPQSFADSDGDGIGDFNGIVQRLDHLVWLGVTAVWLNPCFVSPFRDAGYDVSDYLNVAPRYGSADDLAELVDEAGRRGIRVLLDLVAGHTSDEHPWFTASANDPDDHRYIWAPEGRPDGFVTSPGTRPGAYLPNFFDTQPALNFGYGRKNPAEPWRQPVDAAGPRANREALRTIMDHWLGLGLAGFRVDMAASLVKDDPGRTETARIWTELRHWLDTAHPDAVLLSEWGEPEVSVPAGFHTDFFLQFGGATDGLPLRSLWSNGDGTVNEAWDPLDCFFDASGKGSPRPFVEAWRKASDAVGATGFVSLPTANHDFSRLNCGPRTAEQLPAAFAFQLTWPTLPAIYYGDEIGMRYVGGLPDKEGSVLGPRYNRAGSRTPMQWDDGPGAGFSTAPADRLYLPLDPSPDRPTVAAQRADDGSLLHLVRRLVALRASTPALGSGGSVEVLHTGYPFVYVRGGRYLVVVNPQRNEVRCPYDATREARALEASGVRVGNGTIEAEGFSYGVFDLGR

SEQ ID NO: 13898 - protein, 329 aa, Arabidopsis thaliana
  misc_feature (126)..(126): Xaa can be any naturally occurring amino acid
  unsure (1)..(329): unsure at all Xaa locations
MRPILMKGHERPLTFLRYNREGDLLFSCAKDHTPTLWFADNGERLGTYRGHNGAVWCCDVSRDSSRLITGSADQTAKLWDVKSGKELFTFKFNAPTRSVDFAVGDRLAVITTDHFVDRTAAIHVKXRIAEDPEEQDAESVLVLHCPDGKKRINRAVWGPLNQTIVSGGEDKVIRIWDAETGKLLKQSDEEVGHKKDITSLCKAADDSHFLTGSLDKTAKLWDMRTLTLLKTYTTVVPVNAVSLSPLLNHVVLGGGQDASAVTTTDHRAGKFEAKFYDKILQEEIGGVKGHFGPINALAFNPDGKSFSSGGEDGYVRLHHFDSDYFNIKI

SEQ ID NO: 13899 - protein, 184 aa, uncultured bacterium
CTSGLDAVAEGAEMIEDGRADVVIAGATDAPISPITVACFDAIKATSPNNDDPAHASRPFDASRDGFVLGEGATVFVLEPADEARRRGAHIYCEIAGYAQRSNAYHMTGLKADGLEMAEAIRVAMDRARLAPGDIDYINAHGSGTRQNDRHETAAFKASLGARAYEVPVSSIKSMVGHSLGAIG

SEQ ID NO: 13900 - protein, 244 aa, Synechococcus elongatus PCC 7942
MENRKEKILVVDDEASIRRILETRLAMIGYEVVTAADGEEALITFRNATPDLVVLDVMMPKLDGYGVCQELRKESDVPIIMLTALGDVADRITGLELGADDYVVKPFSPKELEARIRSVLRRVEKSGANGIPSSGVIQINSIRIDTNKRQVYKGDERIRLTGMEFSLLELLVSRSGEPFSRAEILQEVWGYTPERHVDTRVVDVHISRLRAKLEDDPGNPELILTARGTGYLFQRIVEPGEEGR

SEQ ID NO: 13901 - protein, 621 aa, Candida glabrata CBS138
MLFSALLFWLFGCLASAKTHTFHFTVDWVDVKLDNGAHKKMIGFNGQWPMPDIHVMKGDRVELYLTNGFKDGMQTSLHFHGLSHNTSYGNEIQRDGPSMVTQCPIVSGQTYLYNFTVADQVGTYWYHAHEGSQYGDGFRAAFVIHDDDFPYEFDEEMTLSVADLYYKPYYEIKDTFLSRYNPTGAEPIPQMLLFNNSASGRLYFEPGKTYLLRIINMGLFVSQYLSIEDHEMTIVEVDGVYTKKNVTSMLYIATGQRMSVLIKAKTQNPKRNYAFMQLLDETMLDVIDPDLQLNVTNQLIYDKSKPDAKEYFFDSLEQATNEFYLEPYEDIDIFESYDKQITFDVRMKNLGDGVKYAFFNNITYVSPKIPTLTTALTSGKLATDPRIYGDNINVVVLEQNEIVEIVLNNYDTGKHPFHIHGHNFQIVQKSPGFHLDETFDESEQDQKTVRYNESAPLMDFPKHPIMRDTLVLEPNGHAVLRFRADNPGVWIFHCHVDWHLEQGLAAVFVESPLILQERETLSQNYKDVCSAAGMVNVGNAAGKSEDWLDMSGLPRQPKPLPDGFTAKGYFAFIICTLVGLWGLYSISNYGFSEVIPDDKAVFDSLKSVLDSNGISYSLEEH

SEQ ID NO: 13902 - protein, 349 aa, Kluyveromyces lactis NRRL Y-1140
MSKPVVLRLGQVKYAQKAWEELSKIAQVIPIDPSLTRAQFLDQCQDPESPISKAQILTRTFPSVKNTGRFDAELAKALPESVVAICHNGAGYDQIDPTPFGQRHIQISNVPELVNNSTADTHVFLLLGALRNFEYGHRLMEEGKWPSGGAAAGAPVGHDPEGKVVGVLGLGGIGRAIIERLKPFGFKKFIYHNRNRLSSDLENGCEYVSFEELLSQSDVISINIPLNAATRHMIDKEAISKMKDGVVIVNTARGAVIDEPALISALKSGKVRSAGLDVYENEPQVPQELLDLPNFIGVPHMGTHTVETIQKMEEFVVENVKSVINTGKVLTVIPELKKEGWINEAKPLV

SEQ ID NO: 13903 - protein, 185 aa, uncultured bacterium
GCTSGLDAVADGAELIEDGRADVVIAGATDAPISPITAACFDAIKATSPNNDDPAHASRPFDISRDGFVQGEGAAVFVLEPADQARRRRAHIYCEIAGYTQRSNAYHMTGLTADGLEMAEAIRVAMGRARLVPEDIDYINAHGSGTRQNDRHETAAFKASLGARAYEIPVSSIKSMVGHSLGAIG

SEQ ID NO: 13904 - protein, 362 aa, Triticum aestivum
  misc_feature (9)..(9): Xaa can be any naturally occurring amino acid
  misc_feature (42)..(42): Xaa can be any naturally occurring amino acid
  unsure (1)..(362): unsure at all Xaa locations
SARGSCARXTLTEDESSFYVAETILAIESIHKHNYIHRDTTXSADNLLLDRTGHLKLSDFGLCKPLDSSSFPNLTELDNAAGNITNTSADGDKPLSSTAVPRRTQQEQLLHWQKNRRMLAYSTVGTPDYIAPEVLLKKGYGMECDWWSLGAIMYEMLVGYPPFYSEDPMSTCRKIVNWRSHLKFPEEARLSPEAKDLINKLLCNVDQRLGMKGAHEIKAHPWFRSVEWEKLYQMEAAFIPEVIDELDTQNFENFEEAAPTMQTSSKAGPWRKMLSSKDMNFVGYTYKNFEIVNDPELPGIAELKKKNNKPKRPTIKSLFECAESDDQPEGSLLGPLPPQLELPESPSPHSSISSEDSQAQHR

SEQ ID NO: 13905 - protein, 320 aa, Triticum aestivum
  misc_feature (118)..(118): Xaa can be any naturally occurring amino acid
  misc_feature (245)..(245): Xaa can be any naturally occurring amino acid
  unsure (1)..(320): unsure at all Xaa locations
MTVSVSAAASSSLPPLFPRRRSPPASLVPVRSLRSRPRPRPRLLSSARTTPVLLPAAAMAAPAPAASSKRDLLIFDAEENLAVALAKYTADISAKFAAERGAVTVVLSGGSLIYALRXSLTEAPYLETVDWSKWHVFWVDERVVPKDHEDSNYKLALDGFLSKVPIPAGQVYAINDALSAEGAAEDYETILKQLVKNGVLAMSKTTGFPRFDLQLLGMGPDGHIASLFPGHPLVKENKKWVTHIXDSPKPPPQRITFTFPVINSSAYVAMVVTGAGKAGAVQKAISDKKTSDLLPVEMAILDDGEFTWFTDKEAVSMLQN

SEQ ID NO: 13906 - protein, 185 aa, uncultured bacterium
GCTSGMDAVGHAVGLIAEGSAEVMVAGAADAPISPITMACFDAIRATSPDNDDPEHASRPFDLNRKGFVMGEGSAVFVLEELSRARARGARVYAEIAGFASRSNAYHMTGLKPDGREMAEAIRSAMNQARVNPESIDYINAHGSGTKQNDRHETAAFKASLGDHAYRTPVSSIKSMVGHSLGAIG

SEQ ID NO: 13907 - protein, 328 aa, Polaromonas sp. JS666
MSKPKILVARAVFPEVIARLEQHFEVQANQDDQTWSKAELTERLRDKDGAFTTGGDRIDAEVLAACPRLKICANMAVGYNNFDVDAMTAARVLATNAPDVLTETTADFGFALLMATARRITESEHYLRAGKWTKWSYDMFAGSDIHGATLGILGMGRIGQGIAKRGALGFGMKVIYHNRSRLEAALEAECLASYVSKDELLKTADHLVLVLPYSLASHHTIGAAELALMKPTATLINIARGGIVDDAALAAALRDRRIAAAGLDVFEGEPKVHPDLLTVPNVVLTPHIASATVPTRLAMANLAADNLIAFFDGKKPLTPLNPAVLTVQ

SEQ ID NO: 13908 - protein, 369 aa, Wolbachia endosymbiont of Drosophila simulans
LPHIMDYERNREVIVWCSNNYLGMSQNESVIAAIQNSSVGAGGTRNISGTTKEVVELEKSLACLHKKEAALTFACGYLANQTTLSTLSSVIPGVVIFSDEKNHSSMIEGIKSGKRPKHIFKHNNVNHLEQLLKSIDKKTPKIIALESVYSMDGDIAPLEAICDLADQHNAITYLDEVHAVGMYGSHGGGIAEREGLMDRITVIQGTLSKAFGVMGGYIASSKSLVDVIRSSAPGFIFTTAMSPVLAAAAKASVEHLKSSNIEREKQKQVVEKVKNSLRNAGINFIPTETHIIPIIIGNSELSKKASKLLFDEYGIYVQHINYPTVPRGTERFRITPTPYHTDEMIEHLTESLVKVFEKLSISLACLCYS

SEQ ID NO: 13909 - protein, 185 aa, uncultured bacterium
GCTSGLDAVGYARDLIREGSADMMVAGATDAPISPITVACFDAIKATTPRNDDPEHALRPFDNSRNGFVLGEGSAIFVLEELEHARKRGAHLLAEIAGFASRCNAFHMTGLRPDGREMAEAIRVALHEAHMLPEDIDYVNAHGSGTKQNDRHETAAFKRSLGEHAYRTPVSSIKSMIGHSLGAIG

SEQ ID NO: 13910 - protein, 231 aa, Triticum aestivum
MDLQQVMEHQLFDDGAVPSCMISPLEADNGFTDELPSLQLPDVDLDFDIHEFSAPATAPAKAASSGGSGLVGSGSGSHKKLNHNAYERDRRTQLNQLYSTLRSLIPNADHTKKLSIPTTVCQVLDYIPKLQKQVEDLKKKKQELSTAKCRERLQRVKDNTCRIVSATPLDGNEIMVQVSLLSNMAASLPLSKCINVFENKGLHLISSSTFSTEVNRTFYSFHFEVRFYMRP

SEQ ID NO: 13911 - protein, 157 aa, Guillardia theta
KAARARCAARWPETNMAPKPRADSARWLELTQSGEFAKVAEPLFRLIARCINSPHFQVAERALFLWNNEYIVCLIAKSREVILPVLYPALEANTTKHWNSTVHGLTFNVQKLFMDMDARLWEECTQKHKMNMEKNAAAHLSRKQKWEQLERAVGVKG

SEQ ID NO: 13912 - protein, 271 aa, Triticum aestivum
  misc_feature (40)..(40): Xaa can be any naturally occurring amino acid
  unsure (1)..(271): unsure at all Xaa locations
VRPRVRKKLDPEPWRCRRTDGKKWRCSKEAHPDSKYCERXMHRGRIRSRKPVARKSASPAHQSQQPPLSAVTSATRDAEPLPSLPAGAKTHGLSLGGAGSSQMHVDASSYGNKYSLGAKSDVGELSFFSGASGNNNRGFTIDSPTDSSWHSMGSSLPPYQLSKPRDSGLMQGGFSYSHYEPSQELGQVTIASLSHSQEQDCRSLGGGGGGGGGGGGGLMGNVKQENQPLRPFFDEWPGRRDSWSEMDDERSNGTSFSTTQLSISIPMPRCD

SEQ ID NO: 13913 - protein, 181 aa, Lilium regale
MGRGKIEIKRIENSTNRQVTFSKRRNGIIKKARELSVLCEAHVSVVIFSSSGKMSEYCSPSTSLPKILERYQLNSGKKIWDAKHEHLSAEIDRIKKENDNMQIELRHLKGEDLNSLQPKELIPIEEALENGVRGVREKQNDVLRMLKKNERILEEDNKRLAYILHHHQLTRGEYEGHGTCM

SEQ ID NO: 13914 - protein, 457 aa, Xanthomonas campestris pv. vesicatoria str. 85-10
MDSAKRTVCSSSIFDHASARCPLRGLALSLLLAASPCHALDAVAVKRQVDGILDRDYPRWEALYRTVHQHPELGFEETATAQRLAKEMRALGFHVSAGIGRTGLVAMYHNGPGPTIMVRTELDALPMRETTGLAYASDVHLQSSDRDTYVAHTCGHDIHMAAWVGTAATLVQLRAQWRGTLMFIAQPAEEKGRGAQAMLDDGLFARFGKPDYGFALHVGPDAYGHVFYKAGAVTSNSDALEVVFQGKGGHGAMPAATIDPILIAARFVVDVQSVISREKDPAAFGVVSIGAFNAGTAGNVIPDRAQLRGTIRSHDPQVRDKLLDGVRRTALASAQMAGAPVPQIALGERGSRAVINDAALAERTGAVFAQAFGVDAERQREPSAASEDYSAFVAAGVPSFYFGIGGLDPQWLQQARQTGERIPVNHSPDFAPVPQPSIRTGVEAMTLAVMNVMPPPS

SEQ ID NO: 13915 - protein, 189 aa, Triticum aestivum
MVKQKIVLKLALDDERKRRKAFKAAVGMSGVTSATMEGDKIIIVGDGVDPITLTTMLRRSLGYAELLSVSSGDDKKKDGYGAAYGYGGGEKKDGYAAAYGYGGGEKKKDGYGYGGGDGGGSGMSFGGKEGGGSKGGGSGGGGGGYSQNTVAPMTYPAYQQYNSMPSYPVYSYPAPAYQQQEQDPGCSIM

SEQ ID NO: 13916 - protein, 124 aa, Methanococcus maripaludis S2
MSQKWGLVHIYASYNNTILHVTDLTGAETIAKVSGGMIVRNQRDESSPYAAMQAAFKIADLMRDKGIDQVHVKVRATGGQKSKNPGPGAQAAIRALSRAGIRIGRIEDATPIPHDGTTPKRKNR

SEQ ID NO: 13917 - protein, 488 aa, Coptis japonica
MEVLSIAIVSFSFLLFLFFILRDSRPKNLPPGPRPSPIVGNLLQLGDKPHAEFAKLAQKYGELFSLKLGSQTVVVASSPAAAAEILKTHDKILSGRYVFQSFRVKEHVENSIVWSECNDNWKLLRKVCRTELFTPKMIESQSEIREAKAREMVKFLRGKEGEVVKIVEVVFGTLVNIFGNLIFSKDVFDLEDPTGGSVELKEHLWKLLDMGNSTNPADYFPIMGKLDLFGQRRAVAEVLQQIYDVWGVMLKERRGTKGSESKNDFVDVLLNAGLDDQKINALLMELFGAGTETSASTIEWAITELTKKPLVVSKIRLELVNVVGDNTVKESDLPHLPYLQAFVKETLRLHPPTPLLLPRRALETCTVMNYTIPKECQIMVNAWAIGRDPKTWDDPLNFKPERFLSSDVDYKGNDFELIPFGGGRRICPGLPLASQFSNLIVATLVQNFEWSLPQGMSTSELSMDEKFGLTLQKDPPLLIVLKARASNI

SEQ ID NO: 13918 - protein, 340 aa, Schizosaccharomyces pombe
MKQSRTKRVLAIGELKFATNTLKRLSEKYHFEFIVPDPHDRSKTIEKIHEAASKSTFDACFWLFRNAAISPFTEEMLGPLLPTCKLFVTGAAGYNNVDVDWATRNGVYVANTPNGPTEGTANMNLMLFMCTLRGAREAEQSLRLGKWRQNLSLTDDPYGKRVGIIGMGAIGKSFAQKILPLGCEIVYHNRNRLEAEEEKRLGASFVSFDELLSSSDVISINCPLTPATHDLISTKEFEKMKDGVYIINTARGAIINEDAFIKAIKSGKVARAGLDVFLNEPTPNKFWLECDKVTIQPHCGVYTNFTVAKTEECVLASIETFLDTGIPTNPVNGPFGMNGC

SEQ ID NO: 13919 - protein, 231 aa, Triticum aestivum
SPDDVRGVRLEIEVMARLSGHPNVVDLKAVYEDQDSVHLVMELCAGGELFHRLQERGCFPEHEAATLFRYLMEVVAHCHSKGIVHRDLKPENILLVSKSPSSPIKLADFGLATYTQPGQRLSGTVGSPFYIAPEVLAGGYNEAADVWSAGVILYILLSGIPPFWGKTKSKIFECITSTELRFPSDPWDRVSDSAKELITGMLRRDPAQRLTAEQVLEHSWIREHADDSRDS

SEQ ID NO: 13920 - protein, 334 aa, Oryza sativa (japonica cultivar-group)
MEERYEALKELGAGNFGVARLVRDKRSKELVAVKYIERGKKIDENVQREIINHRSLRHPNIIRFKEVCLTPTHLAIVMEYAAGGELFEQICTAGRFSEDEARYFFQQLISGVSYCHSLEICHRDLKLENTLLDGSPTPRVKICDFGYSKSALLHSKPKSTVGTPAYIAPEVLSRKEYDGKVADVWSCGVTLYVMLVGSYPFEDPGDLRNFRKTISRILGVQYSIPDYVRVSSDCRRLLSQIFVADPSKRITIPEIKKHTWFLKNLPKEISEREKADYKDTDAAPPTQAVEEIMRIIQEGKVPGDMAAADPALLAELAELKSDDEEEAADEYDTY

SEQ ID NO: 13921 - protein, 161 aa, Triticum aestivum
  misc_feature (2)..(2): Xaa can be any naturally occurring amino acid
  misc_feature (13)..(13): Xaa can be any naturally occurring amino acid
  misc_feature (21)..(21): Xaa can be any naturally occurring amino acid
  misc_feature (26)..(26): Xaa can be any naturally occurring amino acid
  misc_feature (45)..(45): Xaa can be any naturally occurring amino acid
  misc_feature (50)..(50): Xaa can be any naturally occurring amino acid
  misc_feature (57)..(57): Xaa can be any naturally occurring amino acid
  misc_feature (59)..(59): Xaa can be any naturally occurring amino acid
  misc_feature (67)..(67): Xaa can be any naturally occurring amino acid
  misc_feature (72)..(72): Xaa can be any naturally occurring amino acid
  misc_feature (75)..(75): Xaa can be any naturally occurring amino acid
  misc_feature (86)..(86): Xaa can be any naturally occurring amino acid
  misc_feature (88)..(88): Xaa can be any naturally occurring amino acid
  misc_feature (101)..(101): Xaa can be any naturally occurring amino acid
  misc_feature (103)..(104): Xaa can be any naturally occurring amino acid
  misc_feature (107)..(107): Xaa can be any naturally occurring amino acid
  misc_feature (109)..(109): Xaa can be any naturally occurring amino acid
  misc_feature (111)..(111): Xaa can be any naturally occurring amino acid
  misc_feature (116)..(116): Xaa can be any naturally occurring amino acid
  misc_feature (119)..(119): Xaa can be any naturally occurring amino acid
  misc_feature (125)..(125): Xaa can be any naturally occurring amino acid
  misc_feature (127)..(128): Xaa can be any naturally occurring amino acid
  misc_feature (140)..(141): Xaa can be any naturally occurring amino acid
  misc_feature (145)..(145): Xaa can be any naturally occurring amino acid
  misc_feature (148)..(148): Xaa can be any naturally occurring amino acid
  misc_feature (150)..(150): Xaa can be any naturally occurring amino acid
  unsure (1)..(161): unsure at all Xaa locations
RXGDFFSALLKAXPQFLNDWXAKLWXRFFCLSVYITMYLNDCQRXAFYKXIGLNTKXFXMHVIYETXRTTVXIFXAVPDVENPEFXRXLDRMVYINLKIIXIXXSNXMXLXEEPEXGPXIAQLVXEXXAAYLMPLIDLAXXDFAXFEXSXSNLPKGSLAFF

SEQ ID NO: 13922 - protein, 144 aa, Triticum aestivum
MEGLQRSSSTFRRSGSSGLVWDERFLTEGAEAKAAGEGGTDEAQPEMRRSRSTGGVGMMLRRGGDDKKQQQQKKKEQQGQKKDEERDPQVFRTKEVAPDVDPPSPRVSGCILCAIFGGSGSGSGSSPAARRGRAKPKRKQRSAA

SEQ ID NO: 13923 - protein, 451 aa, Pirellula sp. 1
MSSEHFDLVVLGTGPSGGTVATKIAKAGKRVALVDSRTFGGVCALRGCNPKKVYVNAGQLVDQIHRGDGKLISDASVKIDWKQLHAFKMEFTQPVAEKKEQSFQEDGIETFHGVARFVSPDTIDVVGTKLTADRFLIGTGGRPRELSFDGAEHVTRSDEFLELESMPEHVVFIGGGYISMEFAGVVARAGSRVTVIEMNNQILSGFDPDLVNQLTDSLREHGIRFQMNAEIIGIDKSADGHLQVHLANEQSPIVCGLVVHGAGRVPNIDELCLSQGEIEHGEKGIAVNQFMQNPTNPRVFATGDCADNGMPRLTPVANEDARIAAKNLFSETLERTPDYGQVPKVAFTIPSIASVGLSEEAARDSNDNLTVLSDDISSWGSVRKTGPTVAGYKILIDSKTDAILGAHLLGPSAEETISLFALAMKFNLTATDMKSTLFAFPTFASDVRSML

SEQ ID NO: 13924 - protein, 311 aa, Bordetella parapertussis 12822
MDSLPPSPPGRHGHSFLGPAHDENAKRTRWVVLLTLAMMVGEIVAGYLTGSMALLADGFHMATHAGALGIAAIAYAYAKRNADNRAFSFGTGKVGELAGFASALMLAMVSLAIGVESAIRLVQPTDVAFGEATLIAVVGLGVNLVSALLLGGGHAGHVHAEHHHPGHARHPHGHDNNLRSAYVHVLADALTSVLAIVALLAGRYLGWIWLDPVIGMVGAVVIARWAWTLMRDTGAILLDKADRHLEAEVRGAIETAGDATIADLHIWQIGPQAHAAIVSVVAARGVTASQIRERVSSIHEVRHLTVELVPA

SEQ ID NO: 13925 - protein, 604 aa, Cucumis sativus
MEIESLRVSVDEKVLKDEEKNEKEEMKMKMKMKRKLGGVKTMPFILGNEVCDRFASSGFHSNIITYLTQDLNMPLVPASNILTNFAATSSFTSLIGALIADSFAGRFWTITIASIIYELGMVTITISAILPSLHPPPCPTQINCTQASGTQLMILYLALLLTSLGAGGIRPCVVAFAADQFDMTKVGIAGRTWNFFNWYYFCMGMATLTALTVVVYIQDNVGWGWGFGLPTIAMALSVVAFVVGSPLYNKLKPSGSPLVRLAQVVVAAFKNRKAVLPDDSKLLYRNHELDAAIAIQGRLVHTDQFKWLDKAAVITSPDSTANPPNLWRLATVHRVEELKSIIRMLPIWAAGILLVTASSHQHSFTIQQARTMNRHLTPTFQIPPATLSIFGILSMLTGLVLYDRLLVPFAKKLTHNPSGITCLQRMGVGFAINILATLVSSIVEIKRKKVAANHGLLDNPTATIPFSVFWLVPQFWLHGIAEVFMSVGHLEFMYDQSPESLRSTATALYWLAISVGNYIGTLMVYLVHKYTGEEHNWLPDRNLNRGRLEYYYWLVSGIQVMNLVYYVICAWFYTYKPLEEEKINIENKDGDQEWERCEDTIKIA

SEQ ID NO: 13926 - protein, 286 aa, Glycine max
MAFSRVALLICTVIGYFVIASAGNFYQDFDITWGDGRAKILNNGELLTLSLDKASGSGFQSKNEYLFGKIDMQLKLVPGNSAGTVTAYYLSSKGATWDEIDFEFLGNLSGDPYILHTNVFSQGKGNREQQFYLWFDPTADFHTYSILWNPQRIVFSVDGSPIREFKNMESKGVPFPKNQAMRIYSSLWNADDWATRGGLVKTDWTQAPFTASYRNFNANACTMSSGTSSCGSNNPSSSNNNVWLSEELDSTDQERLKWVQKNYMIYNYCSDTQRFPQGLPSECNTA

SEQ ID NO: 13927 - protein, 618 aa, Shewanella sp. ANA-3
MNKQVTETTESSTLPPRSLSESTMSHNAANSSIRQRAVLPWIWQFLKPYRLRVVAAIVFLLIGSLAWLSLGQGVRLMVDEGFIKDNAQRLNEIILLVLLITAVSGTAVFCRFYLMTWLGERVSADIRLTVYNQLLKLSPAFYAKVRTGEVISRFTADSTLLQTVVGSSLSMALRSGVTVIGGLAMMGITSVKMTLLVLLAVPLVLGPVGFFGRKVRTLARESQDRVADLGAYVDETLHEIHTVQAYGHEDKDRSLFNGRVEDVMIAASGRIRYRAMLISSVMFLSIAAIASVTWVGAHDVMSGKMTGGELSAFMFYAVMVAGAVATISEVVGEIQRASGAAERLIELAETEVDIPAPLEPKTLPAKVRGELQLQQLNFHYPEQTQLVLRDLELTITAGERVALVGPSGAGKSTLFQLLQRFYVPSSGSIHLDGIDIAELSPKDLRAQFALVPQDSVIFATSVLENVRYGRVDASEQEVIDACIAARAHEFISEFSEGYQTYLGERGVRLSGGQKQRIAIARVILADRPILLLDEATSALDALSEQKVKLALDELMKGKTTLIIAHRLATVINADRIIVFDKGRIVASGKHQTLIQTNALYREFASLQLLTDEVSALSE

SEQ ID NO: 13928 - protein, 488 aa, Kluyveromyces lactis NRRL Y-1140
MYLNDTGIRRCGPPRPRPRSTHPLLAQLESSACATAIKDYEKELLAYFQELQECDLPNPKMIDNQPELDWYMRPYLLDFLIDLHGILRLSEPVLFLAIQIMDRYCSKRIVFQKHYQLVTTTSLWIAAKFEDKKSRTPTLNQLISACSHIYDSYMFIQMESHILETLRWNIRTCFTTFDAIQLCFKDTDIIWPTEDVSMLQIVSIFFAELSCYDKHYMAFSSSVKATSGIILASVLLGDNCFQKHISTLLLDFLDLKCESLGLTVCHHSVVSSCKEKDPFSIICAPLLRVDENTHVDIRRCCLLYLNDIFKPLTANKDLPTALMSKYDKICLQDYITAYTSQNIDKYLHLCKLTQALLNPIYDRTRLLEQINMVTDIMVGLELCQQGPIRDELPLKIYQSVLLPSSDELKEEILKNNELHGSSRSASSTEITSPWTPASVFSAKRSLSDASSIDNELDLVDVPRAKDARALRLPTPLRKCVSSDFAPNI

SEQ ID NO: 13929 - protein, 371 aa, Listeria monocytogenes str. 4b F2365
MLNEFIAIRRELHQIPETGYKELKTQAYLLDYISKLPSEHLEVKKWRTGILVLVKGTNPEKTIGYRTDIDALPITEETGLPFASKHPGNMHACGHDLHMSIALGVLTHFASKPAKDNLLFVFQPAEEGPGGAKPIMESAEFAEWRPDSIYGLHIAPEYKVGEIAIKPGLLFANTSELFISFKGKGGHAAYPHLANDMVVAASAFVGQMQTIISRNIDPMDSAVITIGRIHGGEIQNVIAETAYLDGTIRTLSPETMEIVWTRLKQLAKGWEEAYQCEVEFHPGSDYYQVDNDPVETEAFIHFLEEQYPESYVPARSAMTGEDFGYFLSEIKGFMFWLGVDSEYSLHHAKLSPKEEAIPFAIDVLIHFLESK

SEQ ID NO: 13930 - protein, 486 aa, Streptomyces avermitilis MA-4680
MSEQSLKGEAQGAIRTGTQPSRHVDAGDAGYAKSLKSRHVNMIAIGGAIGTGLFLGAGGRLADAGPSLFVAYAVCGIFAFLVVRALGELVLYRPSSGAFVSYAREFLGEKGAYTAGWMYFLNWATTGIADITAVAVYTHYWGMFSDIPQWVIALIALAVVLTVNLISVRMFGELEFWFAIIKVSALVVFMLIGIFLLVTQHPVDGHHPGPSLITDHGGIFPHGLLPMLLIIQGVVFAYASVELVGVAAGETENPEKIMPKAINSIMWRVGLFYVGSVVLLSMLLPWNKYTAGQSPFVTVLSNIGVPAAGGVMNLVVLTAAMSSLNSGLYSTGRILRSMAMSGSAPKFTGVMSRSQVPYGGILLTSGICILGVGLNFVVPADAFEIVLNFAAIGILATWGMIMLCHLMFWRKTRTGELSRPSYRLPGSPWTEIVTIGFLVSVLVLMYADGGAGRTTVLCLPLIAAALVAGWYGVRGRVARKASGADA

SEQ ID NO: 13931 - protein, 60 aa, Triticum aestivum
  misc_feature (2)..(2): Xaa can be any naturally occurring amino acid
  misc_feature (8)..(8): Xaa can be any naturally occurring amino acid
  misc_feature (19)..(19): Xaa can be any naturally occurring amino acid
  misc_feature (23)..(23): Xaa can be any naturally occurring amino acid
  misc_feature (26)..(26): Xaa can be any naturally occurring amino acid
  misc_feature (28)..(28): Xaa can be any naturally occurring amino acid
  unsure (1)..(60): unsure at all Xaa locations
CXYSNVSXIYVLTQFNSAXLNRXLSXAXGYNIGGYKNDGFVEVSRAQQSPENPNWFQGTH

SEQ ID NO: 13932 - protein, 384 aa, Trichodesmium erythraeum IMS101
MKILLPNNSGKHQISSPDSNNKSDMADQMKQISLIVAESLHKETQNQENSSMNISATTIPVSENQQDIDDAVGALFKQMSRYPLLNQKEEIELAKLIQELVVFEKLPEKLANDLGRTPTKSEVAVAAGFTESQLDHRLHQCRTAKRRMISSNLRLVVSIAKRYLNRGVPFLDLIQEGALGLNRAAEKFDPDKGYKFSTYAYWWIRQGITRTIANQGRTIRLPVHVVEQINKLRRVYRDLRRSLNRIPNDTEIAQELEISLPQLRNLQQIRRKTLSLNHRLGTDENTELLDFLEDNENSTPEAQMNDMMMRQDILEVLNHVLSNREQDVISLRYGLITGEPHTLDEVSRMINLSRERVRQIQAKAMRKLRRPQVAERLKGWLNRF

SEQ ID NO: 13933 - protein, 259 aa, Bacillus licheniformis ATCC 14580
MKLTISCLQFDIAYGNPSENFKKAEQLIEQESRKADILLLPELWTTGYDLKNLGSIADEEGRQTKRWLQETAKANRIHIVCGSVAVKKKSGVYNIMYIADKNGHLIKEYSKAHLFQLMDEHLYLSAGSGDGRFELEGMPAAGFICYDIRFPEWIRKHTSEGAGIIFVSAEWPLARLDHWQSLLKARAIENQCFVAACNRSGKDPANEFAGHSTVIDPLGRTLAEAGRGEAVIRAEIDLRDIEKARGQIPVFEDIRKDLY

SEQ ID NO: 13934 - protein, 601 aa, Archaeoglobus fulgidus DSM 4304
MKVVKDPELKIERKESLNKMLWNTVQSHPRVSAIGYWDDGKLKYLTYEEFWERVRKLSKFLISSGLRKGDRVAIYADTRYEWEIADFAVLTAGGVVVTVHSVLNREQVEYILRDSESRVVFTEKKYAENVPEDFEVYFLEELEKLVGEVSDDEFESRWKSVEPDDLASIVYTSGTTGEPKGAMLTHWNWRFNCHSVMSITPFYPGEPHICYLPLSHVYQRLVFFAGISRAATAVFCSPQQFLETSTAVKPVGLIVVPRILERVNAGIVEKVEKSPALAKKIFYWSRGVAIECGKRMSRGEKYGFWLNIKRIIADRLVFSKIRENLGLTRIRFVCSSAAELQKELAYMFNGMGIPVIEGYGMTETAAPSNLNPVGRFKPGTVGPPIPGIEEAIAEDGEILVRGDNVMKGYWRKEAETRKTFTEDGWLKTGDLGEFDEDGYLVFLGRKKHIIVLDTGKNVSPVPIEEELLKNPLVSDAVIIGDGKPYVTTLIVPNFSMLLEFADKNGIEYDRSRTIVQRSISGEEEIVAVDENLVENNAVKELYAKIVDDVNSRLAKHETIKKFKILPEAFSLEKGEITPTLKKRRHVILKRYEKFIEEMYKR

SEQ ID NO: 13935 - protein, 185 aa, uncultured bacterium
  misc_feature (166)..(166): Xaa can be any naturally occurring amino acid
  unsure (1)..(185): unsure at all Xaa locations
GCTSGMDSVAHACDLIREGSADVVVAGAADAPISPITLACFDAIKATSPNNDDPAHASRPFDASRDGFVLGEGAAVFVLEPADEARRRGAHVYCEIAGYAQRSNAYHMTGLKPDGLGMAEAIRVAMGRARLAPEDIDYINAHGSGTRQNDRHETAAFKASLGARAXEVPVSSIKSMVGHSLGAIG

SEQ ID NO: 13936 - protein, 420 aa, Neisseria meningitidis MC58
MSNTQKQLALAKAAKKSVNTADTEEKNRALLAMADSLEAATADILAANRQDLEAAAGNIPESMTDRLLLDGKRICAMADGIRAVAALPNPVGEILETSTLPNGLEIVKKRVAMGVIGIIYESRPNVTSDAAALALKSGSAVVLRSGKDAFQSARAIVAALKTGLAQTRIDPDALQLIEDTGRESSYEMMRAKDYLDLLIPRGGAGLIRAVVENAVVPVIETGTGIVHIYIDKDADWDKALRIVYNAKTSRPSVCNSMEVLLVHEDIAADFLPKLERLLVRDRIEAGLPPIRFRLDPQAARHIGGEAAGADDFDTEFLDYILAVKTVASVEEAVWHIETHSTHHSDGIVTENRHAADYFTTHIDSAAVYVNASTRFTDGGEFGLGCEMGISTQKLHARGPMGLKELTSYKYIVQGTGQVRE

SEQ ID NO: 13937 - protein, 465 aa, Kluyveromyces lactis NRRL Y-1140
MQIAADKKYAKLALSDKQSKNEPNPFELELTSFDDTAKTADSAVDQNIFNVNEEDPLTDDIYLSNEAKSNRYMAFMNMANSILGSGVIGQPFAMKNCGIIGGLFATILMSILVDWTIRLIVINLKLTGKSTYQASVETAMGQWGGLLILVSNGLFAFGGCVGFCIIIGDSIPHVLSAFFPSHTDLFHRNVIITLVTLFISFPLSLNRDISKLSKTSMLALLGLIAIVIIIVVKAPLVSGEYKGTFHLHQLFITPRIFQGISVISFALVCHHNTSFIFFSLRNPSLKRFNQLTHVSLILSCIVCLTTAYSGFLNFKDKTVGNILNNFPSDDNVINFARLLLGFNMLTTFPLEIFVLRDVIRDIIYYNKDDPEPVKLTTKMHALITSGLVLIIMCIALSTSNLGALLEIIGATSASLMAYILPPLTNLVITGKKKSLKEKLPYCGCIVFGVILMFVSTAQTILEAFA

SEQ ID NO: 13938 - protein, 369 aa, Neisseria meningitidis MC58
MKYKRIVFKVGTSSITHSDGSLSRGKIQTITCQLAALHHAGHELVLVSSGAVAAGFGALGFKKRPVKIADKQASAAVGQGLLMEEYTANLSSDGIVSAQILLSRADFADKRRYQNAGGALSVLLQRRAVPIINENDTVSVEELKIGDNDTLSAQVAAMIQADLLVLLTDIDGLYTGNPNSNPDAVRLDKIEHINHEIIEMAGGSGSANGTGGMLTKIKAATIAAESGVPVYICSSLKPDALAEAAEHQADGSFFVPRAKGLRTQKQWLAFYSESRGSVYVDEGAEHALSEQGKSLLMSGIAGIEGHFSRMDTVTVYSKATKQPLGKGRVLFGSAAAEDLLKSRKAKGVFIHRDDWISITPEIRLLLTEF

SEQ ID NO: 13939 - protein, 180 aa, Buchnera aphidicola str. APS (Acyrthosiphon pisum)
MTLKNIIIGFFTQIRSIFMIGANIFSKPETKLYPEEKVYLAPRYRGRIILTRNIDGQERCVACNLCAVVCPVDCISLQKSEKTDGRWYPKFFRINFSRCIFCGLCEEACPTAAIQLMPDFELSDFKRQDLVYEKKDLLISGPGKYPNYDFYNFSGVTLKGKKTGDLEIQARPIDVKDLLP

SEQ ID NO: 13940 - protein, 305 aa, Vibrio sp. Ex25
MNKLVVLGSVNADHVLQVPSFPRPGETLHGRNYQVIPGGKGANQAVAAARLKADIGFIACVGDDSFGINIRENFNMDGIDITGVKMQPNCPTGIAMIQVSDSGENSICISAEANAKLTAEAIEPDLDRIRQADYLLMQLETPMCGIEKAARVAKDAKTNVILNPAPARELSDELLACIDVITPNETEAEVLTGVTVTDNDSAQEAANVLHSKGIEIVMITLGAKGVWLSQNGRGELIPGFRVDATDTTAAGDTFNGAFVTGLLEDLPLESAIKFAHAAAAISVTRFGAQTSIPTREEVDAFLAAQ

SEQ ID NO: 13941 - protein, 179 aa, uncultured bacterium
  misc_feature (10)..(10): Xaa can be any naturally occurring amino acid
  unsure (1)..(179): unsure at all Xaa locations
DAVGYARDLXPEGSADMMVAGATDAPISPITVACFDAIKATTPRNDDPEHALRPFDNSRNGFVLGEGSAIFVLEELEHARKRGAHLLAEIAGFASRCNAFHMTGLRPDGREMAEAIRVALHEAHMLPEDIDYVNAHGSGTKQNDRHETAAFKRSLGEHAYRTPVSSIKSMIGHSLGAIG

SEQ ID NO: 13942 - protein, 348 aa, Methanocaldococcus jannaschii DSM 2661
MANKGSEYLIKRVFMVIEMVKIFYDKDVTFDAVKDKTIAVIGYGSQGRAQALNMKDSGLNVIVGLRPNGASWNKAIKDGHKVMTIEEAAEKADIIHILIPDEVQPAVYKKQIEPYLTEGKTISFSHGYNIHYGFIRPPENVNITMVAPKSPGAMVRKTYEEGFGVPGLVAVERDYTGDALQIALGMAKGIGLTKVGVIQTTFREETETDLFGEQVVLCGGVTELIKAAFETLVEAGYAPEMAYFETCHELKLIVDLIYQKGLQGMWENVSNTAEYGGLTRRARVINEESRKAMKEILKEIQDGRFAKEWSLEREAGFPHLNALRRLEKEHLIEKVGKELRKMCGLEKE

SEQ ID NO: 13943 - protein, 80 aa, Brassica oleracea
MSCCGGNCGCGSGCKCGNGCGGCKMYPDLGFSGELTTTETFVFGVAPTMKNQHEASGEGVAENDACKCGSDCKCDPCTCE

SEQ ID NO: 13944 - protein, 325 aa, Arabidopsis thaliana
MARSGVDETSESGAFVRTASTFRNFVSQDPDSQFPAESGRYHLYISYACPWACRCLSYLKIKGLDEAITFSSVHAIWGRTKETDDHRGWVFPDSDTELPGAEPDYLNGAKSVRELYEIASPNYEGKYTVPVLWDKKLKTVVNNESSEIIRMFNTEFNGIAKTPSLDLYPSHLRDVINETNGWVFNGINNGVYKCGFARKQEPYNEAVNQLYEAVDRCEEVLGKQRYICGNTFTEADIRLFVTLIRFDEVYAVHFKCNKRLLREYPNIFNYIKDIYQIHGMSSTVNMEHIKQHYYGSHPTINPFGIIPHGPNIDYSSPHDRDRFSS

SEQ ID NO: 13945 - protein, 808 aa, Daucus carota
MGEPVLTRVHSLRERMDSTLANHRNEILMFLSRIESHGKGILKPHQLLAEYEAISKEDKLKLDDGHGAFAEVIKSTQEAIVSPPWVALAIRLRPGVWEYVRVNVHHLVVEELSVPQYLQFKEELVIGSSDANFVLELDFAPFTASFPRPTLTKSIGNGVEFLNRHLSAKMFHGKDSMHPLLEFLRLHNYNGKTLMLNNRVQNVNGLQSMLRKAGDYLSTLPSDTPYSEFEHKFQEIGFERGWGDTAERVTEMFHMLLDLLEAPDASTLETFLGKIPMVFNVVILSPHGYFAQENVLGYPDTGGQVVYILDQVPALEREMIKRIKEQGLDIKPRILIVTRLLPDAVGTTCNQRLEKVFGAEHAHILRVPFRTEKGILRKWISRFEVWPYIETFTEDVAKEIALELQAKPDLIIGNYSEGNLVASLLAHKLGVTQCTIAHALEKTKYPDSDIYWEKFDKKYHFSSQFTADLIAMNHTDFIITSTFQEIAGSKDTVGQYESHTAFTMPGLYRVVHGIDVFDPKFNIVSPGADTSVYFSYKEKEKRLTTLHPEIEELLYSSVENEEHLCIIKDKNKPILFTMARLDNVKNLTGFVEWYAKSPKLRELVNLVVVGGDRRKESKDLEEQAQMKKMYELIDTYKLNGQFRWISSQMNRVRNGELYRYIADTKGAFVQPAFYEAFGLTVVEAMTCGLPTFATLHGGPAEIIVHGKSGFHIDPYHGEQVAELLVNFFEKCKTDPSQWDAISAGGLKRIQEKYTWQIYSERLLTLAGVYGFWKHVSKLDRLEIRRYLEMFYALKYRKLAESVPLAKDE

SEQ ID NO: 13946 - protein, 919 aa, ASPERGILLUS NIDULANS FGSC A4
MAAAQSGSENTELSKQPSPQNDGCQDDDNHDQIGSSTPSPSGIATPQPNPADRRLPSIMHNYFQVGSSSAVMLRSLKTRFSLSDPSPSSADTMQSGSLANGTRDAQSSGHTSSSSGSFVIMERDEARLESPTTPPDNEAETQEISQESRPPAALPTPPCSSACSLLQKESEEPEAGPDKGMGSIFNTLKNYLSPSRSVSCSDSQARRHTSHPVSSISDDPVLASHFFNPSLSQTPESLCLVEAPLLDHEKPHVSASSENAAKLTANVSNPSHLKNTPPHTPRAMSDEDLQSNGKAPASPPRSSNPTHSPRDEPSDSADEITGKLNEVFPSSMDTSSSPSSGPPVASLKGKLHVKISEGKGLQPGFDPYVVCVFEWNEVISKSVQDEEQESLKRQQKELEQSALDSGRPMAIPMNRQSSHNNTLESTDHRGHAPITDPHWNHEAVFDVFGDQSEIDVSVYDRNDSEAFLGHVRLCVNLKEDNSRLDGWFPLKGRAAGDSRVSGEIHMEMRFEKTEKKQVGPNDFQILKLIGKGTFGQVYQVKKKDTRRIYAMKVLSKKVIIQKKEVAHTVGERNILVRTAMAASPFIVGLKFSFQTPTDLYLVTDYMSGGELFWHLQKEGRFQEPRAKFYIAELIMALQHLHDHDIVYRDLKPENILLDANGHIALCDFGLSKANLTQNDTTNTFCGTTEYLAPEVLLDEQGYTKMVDFWSLGVLVFEMCCGWSPFYAEDTQQMYKNIAFGKVRFPRDALSTEGRNFVKGLLNRNPKHRLGAQNDAKELMAHPFFHDIDWEALGRKEVIPPFKPKLKSDTDTSNFDPEFTNALENSNSLNDRAAALANGFMAASTPLSPGMQANFQGFTFVNESSIDHHFKNEVGDRMDEDYEPMHRSHRSGNSIDHRMAGVQKTGDAGEIFNVDDNFDM

SEQ ID NO: 13947 - protein, 209 aa, Glycine max
  misc_feature (101)..(101): Xaa can be any naturally occurring amino acid
  unsure (1)..(209): unsure at all Xaa locations
TSNDPPTATLPSLLPPSGFEIHAEIVMELPIEHGLLLDNLLDLAHAPFTHTSTFAKGWSVPRFVWFIPLKLKAIVIQKGIHFSDKAKYNIQLLVGIVSSGXIQYVKLIHVCLPSSKQKTRLLYRMSLDFAPLLKHIPLMKYLWRHFAEQVLNEDLRLVVGQQERMNNGANVWNFPVAYDKLGVRYRMWRDALERGVKQLPFSHSPHHID

SEQ ID NO: 13948 - protein, 129 aa, Zea mays; identical to SEQ ID NO: 1013

SEQ ID NO: 13949 - protein, 366 aa, Oryza sativa
MATPQISRKALASLLLLVAAAAAVSTASADDVLALTESTFEKEVGQDRAALVEFYAPWCGHCKKLAPEYEKLGASFKKAKSVLIAKVDCDEHKSVCSKYGVSGYPTIQWFPKGSLEPKKYEGQRTAEALAEYVNSEAATNVKIAAVPSSVVVLTPETFDSVVLDETKDVLVEFYAPWCGHCKHLAPIYEKLASVYKQDEGVVIANLDADKHTALAEKYGVSGFPTLKFFPKGNKAGEDYDGGRELDDFVKFINEKCGTSRDSKGQLTSEAGIVESLAPLVKEFLGAANDKRKEALSKMEEDVAKLTGPAAKYGKIYVNSAKKIMEKGSEYTKKESERLQRMLEKSISPSKADEFVIKKNILSTFSS

SEQ ID NO: 13950 - protein, 152 aa, Glycine max
MASIPRPASSGSSEGGGDPAAMDERKRKRMESNRESARRSRMKKQKLLEDLSDVASRLQGENVRLAQSIKAKEEAYVEIEAANDILRAQTMELADRLRFLNSILEIADEVGGGGESFEIPQIPDPLFMPWQIPHPMMASPDMLLHGNQGLFA

SEQ ID NO: 13951 - protein, 510 aa, Zea mays
MMIARRLLRPNAPAQASSLLKHVMTGTASLQGYADSLLDATVRHFGSAPSAQPEENGFKGHGMLAPFTAGWQSNDLHPLIIERSEGSYVYDINGNKYLDSLAGLWCTALGGSEPRLVKAATEQLNKLPFYHSFWNRTTKPSLDLAQEILSMFTAREMGKVFFTNSGSEANDSQVKLVWYYNNALGRPNKKKFIARSKAYHGSTLISASLTGLPALHQKFDLPAPFVLHTDCPHYWRYHLPGETEEDFATRLATNLENLILKEGPETIAAFIAEPVMGAGGVIPPPKTYFDKVQAVVKKYDILFIADEVITAFGRLGTMFGCDYYNIKPDLVSLAKALSNAYVPIGATLVSPEISDVIHSQSNKLGSFAHGFTYSGHPVACAVAIEALKLYRERDIPGHVKQIAPKFQDGIRALADSPIIGEIRGLGMIMGTEFTNNKSPTDLFPAEWGVGAIFGEECQKRGMLVRVAGDAIMMSPTLIMTPGEVDELVRIYGEALKATEERVAALQSKKN

SEQ ID NO: 13952 - protein, 478 aa, uncultured bacterium 580
MKPKTNIVWLKRDLRLTDHAPLYEATCRDEQFLVLYIYEPSLINDSHTDERHWRFIQQSLSVMEKILAKQSKQLSIAYGEADQIFSEIINQHEITNVFSHEETGLKLTYERDKKLKKIFNAKKIQWHEYQTNAVIRGLNNRKTWEKQWNKVMREEIKTINLAEANIISHNFPNYSIPKFRNDLNYQPGGCLPGQKEMHDFFETRGQDYFKFISKPDRSRTSCSRLSPYIAYGNLSMREVYQTLLKSWNKTGWRRSMAALSSRLHWHCHFIQKYESEIDIEDLPINRGYKDFPYKVINCEHEDFLAWANGETGYPLIDASMRALKKTGYLNFRMRAMVVSFACHYFMIHWKLVAKHLATLFLDFEPGIHYPQIQMQAGVTGINTIRIYNPSKQLQDHDPDTKFIRDWIDELSDQDKEYILGLPDDNFDLFSNSQNFYPTPAYDFFERTKYAKNLLWQWKKSSLVKSYNSKILSRHVKVR

SEQ ID NO: 13953 - protein, 199 aa, Saccharophagus degradans 2-40
MDIVWHDHKITKEVRQEQHGHKSCVIWFTGLSGSGKSSVASELERALVQQFNAKTYLLDGDNVRHGLCKDLGFTADDRVENIRRVGEISKLFVDAGLITLSAFISPFRTERRLARELLEDGEFIEVFVDTPLSECEKRDPKGLYQKAREGKIKNFTGIDSKYETPENPEIHLENGKQTIQESVEQIITYLKKHNYLASL

SEQ ID NO: 13954 - protein, 249 aa, Cucumis sativus
MGKCYPVVSEEYQKAIEKAKRKLRGFIAEKNCAPLMLRLAWHSAGTFCKDSKTGGPFGTMRFKSELAHGANNGLDIAVRLLEPIKEQFPILSYADFYQLAGVVAVEVTGGPDVPFHPGREDKPEPPPEGRLPDATKGSDHLRDVFYTMGLSDQDIVALSGGHTLGRAHKERSGFEGPWTTNPLIFDKSYFTELLTGEKEGLLQLASDKALLSDPVFRPLVEKYAADEDAFFADYAEAHQKLSELGFADA

SEQ ID NO: 13955 - protein, 375 aa, Debaryomyces hansenii CBS767
MSNTQNYLKKGILIDNSLPPFKELLRGIRNYSGLLQMQPSHYSYSPRPVESNKSRQLSYVSSVIGTDEGAMRSSRLLSVGLTLFMNKKRERLQFDTLAKVSGSQYYNSPDSVKKKEEDILSFLTWFLPGHATLADCLSEMNANLLRGKLKGSKNLSTEILFSQDLQRNEFAITRDEFKKWVIDIPDVLYNNISTSLEKFSLILHELKIMKYNYKLENEIEIRDHKEQEQWLYKKECDSPNHQHIGANSRCVNNNTGEGDYEDRELTESPPTKNKMHLPRGPNKQKIRKPRTKCHNIKKQKIKCNHCESTETPEWRRGPDGSRTLCNACGLFYSKLTKRYGTEDAVVIMKSRKTEGLISDRTIPSLDALKRMVGDT

SEQ ID NO: 13956 - protein, 462 aa, Treponema pallidum subsp. pallidum str. Nichols
MEKIVGLCKRRGFVFPSSEIYGGQGGVWDYGPMGIALKNNIAHAWWQDMTRLHDHIVGLDAAILMHPNVWRTSGHVDHFSDPLVDCTVCKSRFRADQVAVPSAGGPCPQCGGALTGVRNFNLMFSTHMGPTDERASLLYLRPETAQGIYVNYKNVLQTTRLKVPFGIAQIGKAFRNEIVTKNFIFRTCEFEQMEMQFFVRPAEDTHWFEYWCAQRWAFYQKYGVRMNHMRWRTHAAHELAHYARAACDIEYAFPMGFRELEGVHNRGDFDLTRHAQHSGKDLCYVDPDPNLDAAARRYVPCVVETSAGLTRCVLMFLCDAYTEEYVQAPNVAFSETTQTADQEGAARTGEMRIVLRLHPALSPTTVAFLPLVKKDGLVDLARAVRDELREDFACDFDAAGAIGKRYRRQDEVGTPFCVTVDYQSKEDDTVTVRLRDSMAQRRVSRAFLAEFLRTEIKHYRRP

SEQ ID NO: 13957 - protein, 417 aa, Phaseolus vulgaris
MGSSDMDKTPKEKESKTPPATSQEQSPPTTGMATINPDWSNFQAYSPMPPHGFLASSPQAHPYMWGVQHIMPPYGTPAHPYVAMYPHGGIYAHPSIPPGSYPFSPFAMASPNGIADTSGNNPGSIEVGAKPPEVKEKLPVKRSKGSASGGSLNMWITGKNNDLGKTTGESANGIHSKSGDSASDGTSEGSDENSQNDSQLKSGERQDSFEDEPSQNGSSAHAPQNGVHSRPQTVVNQTMPIPISTASAPGAVPGPTTNLNIGMDYWGTPTSSAIPALHGKVSSTAVAGGMITAGSRDGVQSQIWLQDERELKRQRRKQSNRESARRSRLRKQAECDELAQRADVLKEENATLRAEVSRIRSEFEQLRSENASLKERLGEIPGVATPGNEDVRSGQNDQHVSNDTQQSRQKEAVQGVH

SEQ ID NO: 13958 - protein, 397 aa, Phaseolus vulgaris
MGSSEMDKTPKEKESKTPPPTSQEQSSTTATGTINPDWPGFQAYSPIPPHGFLASSPQAHPYMWGVQQFMPPYGTPPHPYVAMYPPGGIYAHPSMPPGSYPFSPFAMPSPNGIAEASGNTPGSMEADGKPPEVKEKLPIKRSKGSLGSLNMITGKNNEHGKTRGTSANGIHSKSGDSASEGEGTSEGSDANSQNDSQMKSGGRQDSFEDEPSQNGTSAYTSQNGGISTPATVVNQNVPIIPISAGGAPGAVPGPTTNLNIGMDYWGTPAPSNIPALGRKVPSTAVAGSRDSVQSQLWLQDEREIKRQRRKQSNRESARRSRLRKQAECDELAQRAEALKEENASLRSEVSRIRSDYEQLLSENTALKERLGELPANDQHVGNEAQQNGQTEGVQGGH

SEQ ID NO: 13959 - protein, 315 aa, Arabidopsis thaliana
MSGLMSFGELEDQFGQISDTTMEEKIPFLQMLQCIEHPFTTTEPNQFLQSLLQIQTLESKSCLTLETNIKRDPGQTDDPEKDPRTENGAVTVKEKRKRKRTRAPKNKDEVENQRMTHIAVERNRRRQMNEHLNSLRSLMPPSFLQRGDQASIVGGAIDFIKELEQLLQSLEAEKRKDGTDETPKTASCSSSSSLACTNSSISSVSTTSENGFTARFGGGDTTEVEATVIQNHVSLKVRCKRGKRQILKAIVSIEELKLAILHLTISSSFDFVIYSFNLKMEDGCKLGSADEIATAVHQIFEQINGEVMWSNLSRT

SEQ ID NO: 13960 - protein, 140 aa, Brassica napus
  misc_feature (5)..(5): Xaa can be any naturally occurring amino acid
  misc_feature (12)..(12): Xaa can be any naturally occurring amino acid
  misc_feature (17)..(17): Xaa can be any naturally occurring amino acid
  misc_feature (23)..(23): Xaa can be any naturally occurring amino acid
  misc_feature (32)..(32): Xaa can be any naturally occurring amino acid
  misc_feature (51)..(52): Xaa can be any naturally occurring amino acid
  misc_feature (127)..(127): Xaa can be any naturally occurring amino acid
  unsure (1)..(140): unsure at all Xaa locations
YPVAXISYELNXLGSRXPRRMRXVMDTLPTSXMHPQRAAGSSNSLRDPPLXXSNKTPRWHEQLRCWCLNFHGRVTVASVKNFQLVAVGDRETEQATSERIILQFGKVGKDMFTMDYGYPISAFQAFXICLSSFETRIACE

SEQ ID NO: 13961 - protein, 605 aa, Candida glabrata CBS138
MASNKPILITITKNNARVFVGTWIEGSNGAHSSSDSPRLKHFGIKKKFKKIIVSSQVVWNCIVRHSKWPHVGNLPNNKWYKDMVTNAHAMEKMALNKSQLLSFNQDYLHLYSHFAGISASPRTTSRCSSIIKYDDNDTCSIGEDVIVKGGISNFKAYILLLKSFVGTGVLLLPNAFKNGGMLFSIILFIFIGIYSFWCYYILSVVKVSTKLSCFGEIGKRIYGTPMKVVILFSLILTQLGFASTGIIFVANNMKPSLEALFHWKDIKYFYLIFCQLILYIPLGLITDIKKFSITTMVSNVLMLSGLSIVFISCCSTLSIQPSEHFVENINYKFNPRNWSLFVGTAIFAFEGIGLIIPVQDSMRHPESFPLVLALVITSSAVIFLAIAIIGYMAFGNGVEVIILQSLSSGNILINLLQLLYSFAIMIATPLQNLPVVTILEDLLFAKIDIDNNNNETLDDCSIEEVSKSNNLMPLTEKKDITTQKEISSTDISEGALLPVLDCFRIVKDVLTNSQVPKVCLRLGITNLVVFLAYFGSGHLEKFVAVIGSLFCIPLVYMIPPALHLKDYSIKKDSGKILKPNIYLDVGLIMIGAISMVYTTYLSIIL

SEQ ID NO: 13962 - protein, 806 aa, Glycine max
MANHPLTHSHSFRERFDETLTGHRNEILALLSRLEAKGKGILQHHQVVAEFEEIPEESRKKLQGGVFGEVLRSTQEAIVLPPFVALAVRPRPGVWEYLRVNVHMLVVDELLPAEYLRFKEELVEGSSNGNFVLELDFEPFNASFPRPTLNKSIGNGVEFLNRHLSAKLFHDKESMQPLLEFLRLHSYKGKTMMLNDKVQSLDSLQHVLRKAEEYLTSVAPETPYSEFENKFREIGLERGWGDIAERVLEMIQLLLDLLEAPDPCTLETFLGRVPMVFNVVILSPHGYFAQDNVLGYPDTGGQVVYILDQVRALENEMLNRIKKQGLDITPRILIITRLLPDAVGTTCGQRLERVYDTEYCDILRVPFRTEKGIVRKWISRFEVWPYLETYTEDVALELAKELQAKPDLIVGNYSDGNIVASLLAHKLGVTQCTIAHALEKTKYPESDIYWKKFEEKYHFSCQFTADLFAMNHTDFIITSTFQEIAGSKDTVGQYESHTAFTLPGLYRVVHGIDPFDPKFNIVSPGADMSIYFPYTETERRLTEFHPDIEELLYSSVENEEHICVLKDRNKPIIFTMARLDRVKNITGLVEWYGKNARLRELVNLVVVAGDRRKESKDLEEKAEMKKMYGLIETYKLNGQFRWISSQMNRVRNGELYRVICDTRGAFVQPAVYEAFGLTVVEAMTCGLPTFATCNGGPAEIIVHGKSGYHIDPYHGDRAAEILVEFFEKSKADPSHWDKISQGGLKRIHEKYTWQIYSDRLLTLTGVYGFWKHVTNLERRESKRYLEMFYALKYRKLAESVPLAIEE

SEQ ID NO: 13963 - protein, 114 aa, Coccidioides posadasii
DVYLRPVAIFPDPFRRGENILVLCETWDSDGSPNKYNYRHEAARLMRANAHEHFWFGLEQEYTLLGPDGWPYGWPKGGFPGAQGPYYCGVGTGKVHCRDIVEAHYKACLYAGIN

SEQ ID NO: 13964 - protein, 114 aa, Chrysosporium lucknowense
DVYLRPVAIYPDPFRRGDNILVLCETWDSDGSPNKYNHRHEAARLMRTHADEHFWFGLEQEYTLLGPDGWPYGWPKGGFPGAQGPYYCGVGTGKVHCRDIVEAHYKACLYAGIN

SEQ ID NO: 13965 - protein, 114 aa, Chrysosporium queenslandicum
DVYLRPVAIFPDPFRRGENILVLCETWDSDGSPNKYNYRHEAARLMRAHANEHFWFGLEQEYTLLGPDGWPYGWPKGGFPGAQGPYYCGVGTGKVHCRDIVEAHYKACLYAGIN

SEQ ID NO: 13966 - protein, 304 aa, Mycobacterium tuberculosis H37Rv
MANASETNVGPMAPRVCVVGSVNMDLTFVVDALPRPGETVLAASLTRTPGGKGANQAVAAARAGAQVQFSGAFGDDPAAAQLRAHLRANAVGLDRTVTVPGPSGTAIIVVDASAENTVLVAPGANAHLTPVPSAVANCDVLLTQLEIPVATALAAARAAQSADAVVMVNASPAGQDRSSLQDLAAIADVVIANEHEANDWPSPPTHFVITLGVRGARYVGADGVFEVPAPTVTPVDTAGAGDVFAGVLAANWPRNPGSPAERLRALRRACAAGALATLVSGVGDCAPAAAAIDAALRANRHNGS

SEQ ID NO: 13967 - protein, 114 aa, Uncinocarpus reesii
DVYLRPVAIFPDPFRRGDNILVLCETWDSDGSPNKYNFRHEANRLMRTHAHEHFWFGLEQEYTLLGPDGWPYGWPKGGFPGAQGPYYCGVGTGKVHCRDIVEAHYKACLYAGIN

SEQ ID NO: 13968 - protein, 396 aa, Mycobacterium smegmatis
MSLVSALLLTALVSLLTLIAGVAVGVTVVPRIVARRQRRAAYAAGMTVSQMLQHITSLSPMGVAVVDTFNDVVYSNDRAVELNVVRDRILDDRAWQAAQRVFETGQDVEVDLSPLKVANPGRSGISVRGKVRLLTDDDRRFAVVYIDDQSEHARMEATRRDFVANVSHELKTPVGAMSVLAEALLASADDPDTVRRFAEKMVAESHRLADMIGELIELSRLQGAERLPDLDAVDVDSIVSEAVSRHKVAADNSQISITTDAPTGYRVLGDEGLLVTAIANLVSNAIAYSAQRNDVSISRRKRGGNIEIAVTDRGIGIAKDDQERVFERFFRVDKARSRATGGTGLGLAIVKHVAANHNGSIRLWSQPGTGSTFTLSIPEYPDPESHSDEREDQRER

SEQ ID NO: 13969 - protein, 158 aa, Coccidioides immitis
GAFDNERVVLPLTQYDVVIDRDSPRPGQQAFEKMTAGLYLGEIFRLVLLDLIDNKGNLIFEGQDVSSLRKPYCLDSSFLAYIEEDPFENLSETRDLFERTLGIKATKPELELCRRLAELVGTRAARLSACGVAAICKKKNIKSCHVGADGSVFNKYPH

SEQ ID NO: 13970 - protein, 376 aa, Mycobacterium tuberculosis H37Rv
MRSPHRDAIRTARGLVVKVGTTALTTPSGMFDAGRLAGLAEAVERRMKAGSDVVIVSSGAIAAGIEPLGLSRRPKDLATKQAAASVGQVALVNSWSAAFARYGRTVGQVLLTAHDISMRVQHTNAQRTLDRLRALHAVAIVNENDTVATNEIRFGDNDRLSALVAHLVGADALVLLSDIDGLYDCDPRKTADATFIPEVSGPADLDGVVAGRSSHLGTGGMASKVAAALLAADAGVPVLLAPAADAATALADASVGTVFAARPARLSARRFWVRYAAEATGALTLDAGAVRAVVRQRRSLLAAGITAVSGRFCGGDVVELRAPDAAMVARGVVAYDASELATMVGRSTSELPGELRRPVVHADDLVAVSAKQAKQV

SEQ ID NO: 13971 - protein, 411 aa, Brucella melitensis 16M
MNTHSVPVTTMDAQLRERAERVIPNGMWGHQRASSLPQGYPQYFASGKDACVTDVDGNSYIDFMCAWGPIILGHRNPLVDAAALSQIELGDSLNGPTAHAVELAELLVATIPHADWALFQKNGTDATTSCVTIARGTTKRRKVLVAKGAYHGAAPWCTPSLVGVTAEDRVHLIHYVYNDVESLTAAAREAGDDLAAILVSAFKHDLAIPQESPTKEFAQAARALCDAAGAALILDDVRGGFRIDLGGSWRGTGIEPDMAAYSKAIANGYALAAVTGSDRFREAARQAYMTGSFWYGGASMAAAVATIKELRRIDGPALMKHAGERLRSGLDAQAARYGFDLLQTGPAVMPLVQFTGDSDAALGARFCQEALKQGVYLHHKHNMFISCAHTDDVIDDALSRTEDAFKAISTK

SEQ ID NO: 13972 - protein, 406 aa, Vibrio sp. Ex25
MSVTANQVHGAVQTLTQSSDTLFLLLGAIMVFLMHAGFAFLEVGTVRQKNQVNALVKILADFGISAIAYFFIGYWVAYGGTFFADAETLSQGNGYELVKFFFLLTFAAAIPAIVSGGIAERARFYPILIATFFTVGIVYPLFEGMIWNGNFGVQAWFENTFGYGFHDFAGSVVVHGVGGWIALVAVVFLGMRKGRVRAGKHTNFAPSNIPFLALGAWILCVGWFGFNVMSAQTVSGISGLVAMNSLMAMVGGIVASLLAGKNDPGFIHNGPLAGLVAVCAGSDLMHPIGALVTGAIAGVLFVYLFTYLQNKTKIDDVLGVWPLHGLCGAWGGIAAGIFGQSALGGLGGVSIIVQLLGTLLGISIAVIGALAVYGAINASMGLRLSEEDEFNGADLAIHKISSTNED

SEQ ID NO: 13973 - protein, 762 aa, Zea mays
MAILSALATEVLIPVAAVIGIAFAVVQWVVVSRVKLSPAASGGSGGKAGYADSLIEEEEGLNDHNVVVKCAEIQNAISEGATSFLFTEYQYVGIFMAIFAVVIFLFLGSVEGFSTKSQPCTYSKDKYCKPALFTALFSTVSFLLGAITSLVSGFLGMKIATYANARTTLEARKGVGKAFITAFRSGAVMGFLLASSGLVVLYITINVFKLYYGDDWEGLFESITGYGLGGSSMALFGRVGGGIYTKAADVGADLVGKVERNIPEDDPRNPAVIADNVGDNVGDIAGMGSDLFGSYAESSCAALVVASISSFGIDHDFTGMCYPLLVSSVGIIVCLITTLFATDFFEVKAVKEIEPALKKQLIISTVLMTFGIALISWLALPAKFTIYNFGTQKEVSNWGLFFCVSIGLWAGLIIGFVTEYYTSNAYSPVQDVADSCRTGAATNVIFGLALGYKSVIIPIFAIAVSIYVSFSIAAMYGIAVAALGMLSTIATGLAIDAYGPISDNAGGIAEMAGMSHRIRERTDALDAAGNTTAAIGKGFAIGSAALVSLALFGAFVSRAGVKVVDVLSPKVFIGLIVGAMLPYWFSAMTMKSVGSAALKMVEEVRRQFNTIPGLMEGTAKPDYATCVKISTDASIKEMIPPGALVMLTPLIVGTLFGVETLSGVLAGALVSGVQIAISASNTGGAWDNAKKYIEAGASEHARTLGPKGSDCHKAAVIGDTIGDPLKDTSGPSLNILIKLMAVESLVFAPFFATQGGLLFKYL

SEQ ID NO: 13974 - protein, 434 aa, Methanosarcina acetivorans C2A
MNGRNCICRKSEVIRLREDPSAETFEAWIIRLRREFHRYPELSFEEYETQKRILKILEELGIEARKIADTGVLASIKGTMPGPCIALRTDTDGLQVQEEFTERNEGYISRNDGVMHACGHDGHMAMLFGAARLFVENRDFPGEVRLIFQPAEEIPPGGSERVIAEGGLKGVDAVMGMHIFTNHESGSVGFRPGPFMASTNRFEIVFKGKGGHISKPESCIDPVRMATDFISSIYPALEKQLEPDKYVLGVGRIQGGAQFNRTPDRVEALGSYRTFDSRTTEIIDLTIKECLERIKERYVKPGEEFAGLPDYELDVLHGYPVLVNDPVFTDAVNLKLQESFPELTIYPELEKTFAAEDFASYLRVVPGIFISLGTLNQKERIVEINHSSTFDIDEKILRTGTEIFYTISLDFLKHPEKYLDPQSKEKTNDNPELR

SEQ ID NO: 13975 - protein, 788 aa, Lactuca sativa
MNIAQITSSAMLVPSSHIPHRSWVVNCCMVQYNPSGLRTASSQAGQVNPTVMTLDVTKERIRKLFNNVEVSVSSYDTAWVAMVPSPNSPKSPCFPDCLNWLLDNQLDDGSWGLLPHQSPLIKDTLSSTLACVLALKRWNVGKDQINKGLHYIESNFASVTDKNQASPFGFDIIFPGMLEYAKDLDIKLPLNQTHLSVMLHERELELRRCHSNGREAYLAYISEGLGNLNDWNMVMKYQMKNGSLFNSPSATASVLIHHQNAGCLHYLTSLLDKFGNAVPTVYPIDLYVRLSMVDTLERLGIKRHFMVEIQNVLDETYRCWVQGDVQIFMDVVTCALAFRVLRSNGYEVSSDPLAKITKEGDYMNSPEKPFKDVYTSLEVYKASQIIYQEELAFREQNLTSYLPSSNKLSNYILKEVDDALKFPFNGSLERMSTRRNIEHYNLNHTRILKTTYSSSNISNKDYLKLAVQDFNECQSIYCEELKDLERWVVENRLDKLKFARQKTAYCYFSAASFLSSPDLSDARISWAKSSILTTVIDDFFDVGGSMDELVNFVHIIEKWNVNVENDCCSEEVGVLFLALKDAVCWIGDKAFKIQERNITSHVIEIWLDLVKSMLREAIWAKDGSIPTINEYMENGYVSFALGPIVLPTLYFLGVKLSEEVVQSSEYHKLYEVMSTQGRLMNDIHSFKREKKAGKLNAVALYMSDGKSGSVEEEVVEEMKILTKSQRKEMMKLVLETKGSVVPRVCKDVFWNMCNVLNLFYATDDGFTGNAILDVVKEIIYEPVSHELI

SEQ ID NO: 13976 - protein, 154 aa, Brassica napus
MVVALACSSISCTFTPFNRSNSVLACSGSNPDQRRRTVIFGSSLALASSLLASNQQSFPVESVIALEQLKEKEEELEDEEERNVNLFQKTSASVVYIEDIELPKTSSDESNVEENAKIEGTGSGFVWDKLGHIVTNYHVIAKLATDQSGLQRCK

SEQ ID NO: 13977 - protein, 364 aa, Glycine max
  misc_feature (195)..(195): Xaa can be any naturally occurring amino acid
  unsure (1)..(364): unsure at all Xaa locations
RVGGRVGGRVGHDSDKYELVRDIGSGNFGVARLMRDKHTEELVAVKYIERGDKIDENVRREIINHRSLRHPNIVRFKEIILTPTHLAIVMEYASGGELFERICNAGRFSEDEARFFFQQLISGVSYCHAMQVCHRDLKLENTLLDGSPAPRLKICDFGYSKSSVLHSQPKSTVGTPAYIAPEVLLKKEYDGKNLXELNIADVWSCGVTLYVMLVGAYPFEDPEEPKNFRKTIHRILKVQYSIPDYVHISSECRHLISRIFVADPAQRISIPEIRNHEWFLKNLPADLMVENTMNRQFEEPDQPMQSIEEIMQIISEATIPAAGTQSLNQYLTGSLDIDDDDMDEDLETDPDLDIDSSGEIVYAI

SEQ ID NO: 13978 - protein, 367 aa, Glycyrrhiza echinata
MSDSYSTKDNNLFSTSSEQTEDGACLSAMRLVTNLVYPAVLNAAIDLNLFEIIAKATPPGAFMSASEIASKLPLPTQHSDLPNRLDRMLRLLASYSVLTCATRSTERVYGLSQVGKYLVPDGSRGYLASFTTFLCYPALMNVWLNFKEAVVDEDIDLFKKLHGVSKYEYMETDPKMNHIFNKSMADVCATEMKRILQIYKGFEGISTLVDVGGGNGQNLKMIISKYPLIKGINFDLPQVIENAPPIPGIELVGGDMFASVPQGDAMILKAVCHNWSDEKCLEFLSNCHKALSPNGKVIVVEFILPEEPEPTEESQLASTLDNIMFITVGGRERTQKQYENMCKLAGFSKFQVACRAFSSLGVMEFYK

SEQ ID NO: 13979 - protein, 149 aa, Paracoccidioides brasiliensis
MADSLTEEQVSEYKEAFSLFDKDGDGQITTKELGTVMRSLGQNPSESELQDMINEVDADNNGTIDFPEFLTMMARKMKDTDSEEEIREAFKVFDRDNNGFISAAELRHVMTSIGEKLTDDEVDEMIREADQDGDGRIDYNEFVQLMMQK

SEQ ID NO: 13980 - protein, 472 aa, Ralstonia solanacearum
MQRSSHAKIVATLGPASDDHATIEALARAGADVFRLNFSHGAHADHQRRLERIRAVEAALGRPLGVLLDLQGPKLRVGTFAEGRVRLDDGAPFRLDLETGRPGDATRVALPHPEIFAAIRPGVALLLDDGKLRLEVVACGPDHAETRVVNGGMLSDRKGVNVPGVVLPLSALTEKDRADLAFGLALGVDWIALSFVQRAADIAEIRQLVHGRAGIVAKLEKPAAIDSLDAILAETDAVMVARGDLGVELPAEQVPAIQKRIVRACRRLGKPVIVATQMLESMIGAPVPTRAEASDVATAVYDGADAVMLSAETASGQFPVEAVAMMRRIIAQTEADPHYRAAIDASHTPPGANTPDAIGCAAHSVAGLLDVAAMVAYTSSGASALRMARERPRAAILGMTPRPETARRLALVWGVHPVICDGVLDVEAMTDVARQTAVQRRFAQAGQTLVIAAGLPFGTPGSTNLLRIAQVE

SEQ ID NO: 13981 - protein, 415 aa, Phaseolus vulgaris
MNFKSFGNEAGGDGGGRPPGNFSLTRQSSVYSLTFDEFMNTMGGSGKDFGSMNMDELLKNIWTAEEVQTMASAGVAADDGGAGISHLQRQGSLTLPRTLSQKTVDEVWKDISKDYGGHGEPNLAQTPRQPTLREMTLEEFLVRAGVVREDAKPNDGVFMDLARAGNNNGLGFEFQQMNKVAAATGLMGNRLNNDPLVGLQSSANLPLNVNGVRSSSQQPQMQSPQSQQQHHQQQIFPKQSAMSYAVAQMPQGMVRGGIVGFRGDQGLSVQGGGIGMVGLAPGSVHVATGSPAANQLSGDKMAKSNGDTSSVSPVPYVFNGGMRGRKSGGAVEKVIERRQRRMIKNRESAARSRARKQAYTMELEAEVAKLKEENQGLQKKQAEIMEIQKNQFKEMMNLQREVKRRRLRRTQTGPW

SEQ ID NO: 13982 - protein, 813 aa, Oryza sativa (japonica cultivar-group)
  misc_feature (634)..(634): Xaa can be any naturally occurring amino acid
  misc_feature (668)..(668): Xaa can be any naturally occurring amino acid
  unsure (1)..(813): unsure at all Xaa locations
MQFPFSGAGPGVFTSSPALSLALADAVAGRNSGGGGKMVTAAHGGVGGGGGGGRAKARDALEVENEMSRSGSDHLDVVSCGDAGGGGGDDDDDEDAEHGNPPKRKKRYHRHTPQQIQELEAMFKECPHPDEKQRAELSKRLGLEPRQVKFWFQNRRTQMKMQLERHENSLLKQENDKLRSENLSIREATSNAVCVGCGGPAMLGEVSLEEHHLRVENARLKDELSRVCALAAKFLGKSISVMAPPQMHQPHPVPGSSLELAVGGIGSMPSATMPISTITDFAGAMSSSMGTVITPMKSEAEPSAMAGIDKSLFLELAMSAMDELVKMAQMGDPLWIPGASVPSSPAKESLNFEEYLNTFPPCIGVKPEGYVSEASRESGIVIIDDGAALVETLMDERRWSDMFSCMIAKASTTEEISTGVAGSRNGALLLVSDEHSVMQAELQVLSPLVPIREVKFLRFSKQLADGVWAVVDVSADELMRDQGITSASSTANMNCRRLPSGCVLQDTPNGFVKVTWVEHTEYDEASVHPLYRPLLRSGLALGAGRWIATLQRQCECLALLMSSIALPENDSSAIHPEGKRSMLKLARRMTDNFCAGVSTSSTREWSKLVGLTGNIGEDVHVMARKSVDEPGTPXGVVLSAATSVWMPVMPERLFNFLHNKGLRAEWDXLSNGGPMQEVTSIAKGQQNGNTVCLLKASPTKDKQNSMLILQETCADASGSMVVYAPVDIPAMHLVMSGGDSSCVALLPSGFAILPAGPSIGADHKMGGSLLTVAFQILANSQPSAKLTVESVETVSNLISCTIKKIKTALHCDV

SEQ ID NO: 13983 - protein, 412 aa, Legionella pneumophila str. Paris
MNSRRVVITGMGMLTPVGLNVEETWRSILAGVSGVGLVEDFDTTEYPTKIWAKVKNFNVENHMPIKDARKMDVFTQYGMAAADEAMLDSGLKIDETLSRRIGVAVGAGIGGIQTITNNQDKLVAGGPRKVSPFFIPAGIINMVAGQISIKHNLKGPNISVVTACTTGTHNIGLAGRIIAYGDADVMICGGAEMTTTPLCLAGFSAVRSLSKRNDEPEKASRPWDKDRDGFVMGEGAGILVLEEYEHAKARGAKIYAELVGFGMSGDAYHITAPDEDADGASRAMEAAIQDAGIDPRQVDYINAHGTSTYLNDLNETKAIKRVFQNHAYDLAVSSTKSMTGHLLGAAGAVEAIISILAIRDQVAPPTINLDNPDEGCDLNYVAHVPQSRTINYVLSNSLGFGGTNGSLLFKRI

SEQ ID NO: 13984 - protein, 486 aa, Glycine max
MSLREDNEEGRDLKKPFLHTGSWYRMSGRQSSVFGSTQAIRDSSISVFACVLIVALGPIQFGFTAGYTSPTQSAIINDLGLSVSEFSLFGSLSNVGAMVGAIASGQIAEYIGRKGSLMIASIPNIIGWLAIAFAKDSSFLYMGRLLEGFGVGIISYTVPVYIAEISPPNLRGGLVSVNQLSVTIGIMLAYLLGIFVEWRILAIIGILPCTILIPGLFFIPESPRWLAKMGMTEEFETSLQVLRGFETDISVEVNEIKRAVASTNRRITVRFADLKQRRYWLPLMIGIGLLILQQLSGINGVLFYSSTIFRNAGISSSDAATFGVGAVQVLATSLTLWLADKSGRRLLLIVSATGMSFSLLVVAITFYIKASISETSSLYGILSTLSLVGVVAMVIAFSLGMGAMPWIIMSEILPINIKGLAGSVATLANWLFSWLVTLTANMLLDWSSGGTFTIYAVVCALTVVFVTIWVPETKGKTIEEIQWSFR

SEQ ID NO: 13985 - protein, 475 aa, Bordetella parapertussis 12822
MYEQLALYIDGEFLTGDGRRTQDVVNPATLEVLGQLPHASEADLDRALAAAQRAFETWKRTSPMERAAILRKVGQLSRDRAQEIGRNMTLDQGKPLAEAVGEVASCSEHADWHAEECRRIYGRVIPPRNPDVRQFVVREPIGVCAAFTPWNFPYNQAIRKIAAALGAGCTVVLKGPEDSPSAVMAIARMFHEAGLPKGCLNIVWGEPAKISDYLIRSPIVRKVSFTGSVPVGKQLAALAGAHMKRVTMELGGHSPVLVFDDADVDRAAEMLERFKVRNAGQVCVSPTRFYVQNGAYEQFLARFTEVLKNIKVGDGLEKGTDMGPLAHERRVPAMSTFVDDALKHGGKVVLGGDAPDRKGYFFSPTVVTELPDNAMLMTEEPFGPLAPVVRFTDTDEVLRRANSLPFGLSSYVFTNSLKTATKVSNALEAGMVNINHFGSALAETPFGGIKDSGIGSEGGLETFDGYLVTKYITHI

SEQ ID NO: 13986 - protein, 394 aa, Staphylococcus aureus subsp. aureus COL
MQEAYIVAYGRSAAAKAKQGALFHERPDDVAAKVLQGVLKRIDGKFNKNMIEDVIVGTAFPEGLQGQNIARTIALRAGLSDTVPGQTVNRYCSSGLQTIAIAANQIMAGQGDILVAGGVELMSAVPMGGNEPTNNPTLQYDDIGASYPMGLTAENVASQFDVSREDQDAYAVRSHQRAYDAQRDGRFKDEIIPIQVNSVEYTNAGPKVHTNIFDQDEFIRPDTTMEALAKLRTVFKADGTVTAGTSAPLSDGAGFVVLMSGDKVKELGVTPIARFVGFKAVGVDPKIMGIGPAYAIPEVLSLSNLSVEDIDLIELNEAFASQTIASIKEVGLDISRTNVNGGAIALGHPLGATGAMLTARLLNEMGRRPDSRYGMVTMCIGVGMGAAAIFEYVR

SEQ ID NO: 13987 - protein, 790 aa, Oryza sativa (japonica cultivar-group)
MQFPFASGFASSPALSLALDNAGGGIGGRMLGGGAGAGSSAGGAMTRDTEAENDSRSGSDHLDAISAAGEDDVEDAEPSNSRKRKKRYHRHTPQQIQELEALFKECPHPDEKQRAELSRRLSLDARQVKFWFQNRRTQMKTQLERHENALLKQENDKLRAENMTIREAMRSPMCGSCGSPAMLGEVSLEEQHLRIENARLKDELNRVCALATKFLGKPISLLSPPPLLQPHLSLPMPNSSLELAIGGIGGLGSLGTLPGCMNEFAGGVSSPMGTVITPARATGAAIPSLVGNIDRSVFLELAISAMDELVKMAQMDDPLWVPALPGSPSKEVLNFEEYLHSFLPCIGMKPAGYVSEASRESGLVIIDNSLALVETLMDERRWSDMFSCMIAKATVLEEVSTGIAGSRNGALLLMKAELQVLSPLVPIREVTFLRFCKQLAEGAWAVVDVSIDGLVRDHNSGTAPTGGNVKCRRVPSGCVMQDTPNGYCKVTWVEHTEYDEASVHQLYRPLLRSGLAFGARRWLATLQRQCECLAILMSSATVTANDSTAISQEGKRSMLKLARRMTENFCAGVSASSAREWSKLDGATGSIGEDVRVMARKSVSEPGEPPGVVLSAATSVWVPVAPEKLFNFLRDEQLRAEWDILSNGGPMQEMTQIAKGQRDGNSVSLLRASAVSANQSSMLILQETCTDASGSIVVYAPVDIPAMQLVMNGGDSTYVALLPSGFAILPDGPRIGATGYETGGSLLTVAFQILVNNQPTAKLTVESVETVNNLISCTIKKIKTALQCDA

SEQ ID NO: 13988 - protein, 522 aa, Arabidopsis thaliana
MGMDIADKENTSPLLFEFCNCYKVASLTETILNPVNVSNLKDRYVLGEQLGWGQFGVIRVCSDKLTGERLACKSISKDRLVTQDDMKSIKLEIAIMAKLAGHPNVVNLKAVYEEKDSVHLVMELCAGGELFHKLEKYGRYSEVRARVLFKHLMQVVKFCHDSGIVHRDLKPENILMATMSSSSPIKLADFGLATYIKPGEKLSGTVGSPFYIAPEVLAGGYNQAADVWSAGVILYILLSGAPPFWGKTKSKIFDAVRAADLRFSAEPWDNITSYAKDLIRGMLCVDPSQRLSADEVLAHSWMEQLSESGQEQYDQDGFGCEGLENGGCSFSTQCVSREQDYSFSVGQLEQSTDNDFKSSFSTFLPADNTLPNSGFDGFSFDGKQPESTTAGFSSTGIPSMPSFTFFCTSPARTQNNDITEIDGKVRDSSPKRLLPSPDSSSQLERRDEAGENQTEAGGKSETRRERGNWSRMSGLHSKRNRTIGLGELDQLVVDVAVTESIIRWASCTHIPTAPSLRLSLVC

SEQ ID NO: 13989 - protein, 158 aa, Coccidioides posadasii
GAFDNERVVLPLTQYDVVIDRDSPRPGQQAFEKMTAGLYLGEIFRLVLLDLIDNKGNLIFEGQDVSSLRKPYCLDSSFLAYIEEDPFENLSETRDLFERNLGIKATKPELELCRRLAELIGTRAARLSACGVAAICKKKNIKSCHVGADGSVFNKYPH

SEQ ID NO: 13990 - protein, 158 aa, Chrysosporium lucknowense
GAFDNERVVLPLTQYDMVIDRDSPRPGQQAFEKMTAGLYLGEIFRLVLLDLFDNKGKLIFEGQDVSGLRKPYCLDSSFLAHIEEDPFENLSETRDLFERTLGLKASKPELELCRRLAELIGTRAARLSACGVAAICTKKNIKSCHVGADGSVFNKYPH

SEQ ID NO: 13991 - protein, 887 aa, Ustilago maydis 521
MPSDRWQHRRNAEGERESASTSRTTNDDNRFSESSRSAHRSRYSPTSDRYDNSQLDFPNKQRRIDHSDTRRFGASARVYNNDRPGPSSPHRTESIRDTTKPPALTIRGVASTQVTSSSKMSRGDDDRPRRVRSRSLARSPDLFDRLAHPARPQDDTNGSSRYHTDSSRRSRLDNERAGTSDSSRRGPTKLAPRGRYDESGRRIDDASDTRDRNQASGVPTSPHRHDAGARRERERSSSPTDTDRPHYRAADVDQDSRLRDNRSSRNDRSRISRRSPSPTSAEAYRSRWNSSSDRYDRGDRRRSPPPQSDDRYAPEDSNRRERRWGLRAQVGDRDDDAATSRRRRTPSPSARSDVSNRSRRRDRDVEPLQLPARDRDEEQPSERGPRYRPARWRMDNYDSTDDSPRVRERDTSNGGQRQRSPDAHRARILPRSGRLDQGTAERGHILTRKSGVGATFDGKQPPTGPRQDFEPSQRSVRGGGWQTVRPGSRRKWDAPARDGEPAAGTRNGHESGAVDAEVDSTKSTRAALSVATIEPLRAEPGEAYESIHQVGEGTYGQVFKARAERTGALVALKKIRMDSEKDGFPVTAMREIRLLQALCHDNVVRLHEIMLSRTSVYMVFEYMEHDLNGILAHPQVSFSQAHLKSLAHQLFSGLDYLHRKAVLHRDLKGSNILLNNQGRLKLADFGLARFYAKRRAGDYTNRVVTLWYRPPELLFGATQYGSEVDMWGAGCIFVELFVKKPVFQSETELGQVHAITDILGPVTKKNWPEVDTLAWYEMVKPATEKEEDQERDYVKRAFARYLPASALEVASGLLTYNPRKRWSAKQAMSAVYFEEEPQAELPAGLLSSLQGEWHEYESRRAKKKSSASRGTDNAAVLITAGSTVQNQ

SEQ ID NO: 13992 - protein, 274 aa, Listeria monocytogenes str. 4b F2365
MSELKLKSFEIRKDVLKMIYDAKTGHTGSDLSCADILVALYYGVLNVNPENPEALDRDRYVQSKGHAVEVLWAVLADKGFFAKEELADFSAFGSRLIGHPNNKVAGIEMNTGSLGHGLSVSVGMALAAKMDGKSYHTYTLMGDGELAEGSVWEGAMAAANYKLDNLTAIIDRNSLQISGRTEDVMSVEPLADKWRAFGWNVIEVDGNDPDKLQAIFKTVNVTGKPRLIIAKTIKGYGVKMAENAAKWHHYVPSSEEYEIAMKDLEERMEACRHE

SEQ ID NO: 13993 - protein, 1878 aa, Trichodesmium erythraeum IMS101
MLIPSISQVINYHPLTATAETAVEDIIISMSSTGSSCVLITEKPSFSTSIKIVTPGDRSPGSPKGNHHSNSPDAKLQYLGPVIGIFTEGDLVQLASIGAPLSGFPIAQIMIRSIVTAQLSEIPDIFALFALFEKHKINHLPIVDNLERLIGLITGHSFLLNLNNIKKKGEKSILSRKKIKSQQKLSANQNNTVNKGLKSENNLLKNPNNQLLPQEITFDSSLELPGNFIPINHLEKTHESQVIQGSFSLSIKQITQLMSTHNVSYVLIIEATEKKYQNETDIYLNQESSNSQKSIKIIGTISSRDIVQLQALKIDFNKVKAGIVCNKSPIVIGSDVTLELAVDLINKKYCLLPLIVQNYIGKIDYFISPTKVIRQILLNKSLYQSLIRFYSYVEKTYLKLHQANKKLKQYTIEQNNLEKSQLAAPETTGITLKLDQDGIWDWNIETGEIFYSTLGEKMLGYTEHEISHKISFDEWLSRIHPEDRDKVNTAIQEHLTKKNTIYKIKYRIQGKDNNFIWIFDSGQTLWKSGKPVRMVGIFVDITKEKEAEIKQSFLVEKHIQIINNLSEIVWETDIHGNLIFLNQAWEKITGFKPKNSLGKNFLDYIHPEDINKLNFLTKNHPENTELAIIHNKLVADSYQLQLLTKTGGYCPVKMKSTLVFDRENKVTGIVSTLSNISEDIATQQQLQASQKAIKELYEVTTNADISFESKIVALLEMGCHRFGMDIGLLGQVLGELYKVIAAHLPENFLFGIAEGDIFTLEQTFDQEALQYDEPFVIESAKNSQWRHHPAHTVRHVESYIGTKILASGIVYGTLSFSSRLTKNKWSSIDIEVLKLMANYIGGELLREDERKALENKYQHFLLLKQITQEICSKLDTKEIFQTTVTQIGRAFKVSRCLIHSYVTEPDLHLPCMAEYLETNHESILGLDLIITSNYYTEKLLGEDRAIASPDVFSDPLLNSDVPMYQKLKVRSILAIRTSYQGKPNGIIHLHQCDYIRQWKQDEISLLEEVAFQVGLTLAKAQILESEVTHKEELEAENQALEKAREVAEVRNRAQGELLAMMSHKSQTNMNDVMMMTSLLLSMKLNPKQRDFVKTILARGDVVINMINNILDFTKIKSGEVELELSPLDIRGCVEDLLKSLDIIAKNKKLELAYLIDKNVPRIILTDDKKLVNILFNLLKNSINFTKTGEIVVYISAIKKSEKSQEYSQLEAISYEEISDFKGAGKITDNYEIQFAVKDTGAGIPLDQIDHLFKDFSQVSPATNREYDGLGLGLVISQRLSQMMGGQMWVVSQPLEIKNLSEEKKQISLLKIEDSRDINFPKNPINVYNSSSPESKVNIAGNPPHYFVKPELSGRGSIFYFTIQAKAIAMYSPEIVDGLLRGKKILVVESNIINQEEIKQQVKQWEMIPIVADSATKALSDLEQGKVFDLGIIAMDISDMDGLTLARKIRKLEAEQNSKQNKNDKSFLPLLMLNYIDTVDISRELQEAKVSLAGFLNIPIKQSQFYNVLLEVFGTRKEEEVNDKVPSLDMEDFQDLSEKNRDYTNIRILLAENNVVNQKVVIHLLEKIGYLADVAANKVEFLDALKRISYDVVLMDVQMNNGDGIGITNQICQRYSEEKRPWIIAMTANARSGDREKYLNAGMDDYMTKPVDQEKLVEVLNKFKRIRNQKLGSKTDLENAVRSHSSVIRSTLVKTNSSRQPVIQKPSFTNFQVESTSQSDEIISLKSTLPIVIPSNIEDVPETKEITMPGLDLLNDQQLAVDPKIIEKFCNLYYDEPDTPIILIQDYLTDGNKNINMIRNYINKGNFNALKTASQKFKTSSALLGAINFSKLCEELEKMALAVIESREDFDLEKATKIFLQSKNEWERVQKELSTKMNC

SEQ ID NO: 13994 - protein, 168 aa, Triticum aestivum
GRIEKWVLRNAFDDEEKPYLPKHILYRQKEQFSDGVGYSWIDGLKDHAKAHVSDSMMTNASFVYPDNTPTTKEAYYYRTVFEKFYPKNAARLTVPGGPSIACSTAKAVEWDAAWSELLDPSGRAALGVHDAAYEEKAPASVDPVVDNVSRSPAHDVKRLKTAISAAAV

SEQ ID NO: 13995 - protein, 158 aa, Chrysosporium queenslandicum
GAFDNERVVLPLTQYDVIIDRDSPRPGQQAFEKMTAGLYLGEIFRLVLLDLIDNKGNLIFEGQDVSSLRKSYCLDSSFLAYIEEDPFENLSETRDLLERTLGIKATKPELELCRRLAELIGTRAARLSACGVAAICRKRNIKSCHVGADGSVFNKYPH

SEQ ID NO: 13996 - protein, 158 aa, Uncinocarpus reesii
GAFDNERVVLPLTQYDIVIDRDSPRPGQQAFEKMTAGLYLGEIFRLVLLDLIDNKGNLIFEGQDASSLRKPYCLDSSFLAYIEEDPFENLSETKDLLERTLGLKATKPELELCRRLAELIGTRAARLSACGVAAICTKKNIKSCHVGADGSVFNKYPH

SEQ ID NO: 13997 - protein, 455 aa, Escherichia coli O157:H7
MKKQTQLLSALALSVGLTLSASFQAVASIPGQVADQAPLPSLAPMLEKVLPAVVSVRVEGTASQGQKIPEEFKKFFGDDLPDQPAQPFEGLGSGVIINASKGYVLTNNHVINQAQKISIQLNDGREFDAKLIGSDDQSDIALLQIQNPSKLTQIAIADSDKLRVGDFAVAVGNPFGLGQTATSGIVSALGRSGLNLEGLENFIQTDASINRGNSGGALLNLNGELIGINTAILAPGGGSVGIGFAIPSNMARTLAQQLIDFGEIKRGLLGIKGTEMSADIAKAFNLDVQRGAFVSEVLPGSGSAKAGVKTGDIITSLNGKPLNSFAELRSRIATTEPGTKVKLGLLRNGKPLEVEVTLDTSTSSSASAEMITPALEGATLSDGQLKDGGKGIKIDEVVKGSPAAQAGLQKDDVIIGVNRDRVNSIAEMRKVLAAKPAIIALQIVRGNESIYLLMR

SEQ ID NO: 13998 - protein, 142 aa, Triticum aestivum
MEGLQRSSSTFRRSGSSGLVWDERFLTEGAEAKAAGEGGTDEAQPEMRRSRSTGGVGMMLRRGGDDKKQQQQKKEQQGQKKKDEERDPQVFRTKEVAPDVDPPSPRVSGCILCAIFGGSGSGSGPAARRGRAKPKRRQRSAA

SEQ ID NO: 13999 - protein, 584 aa, Clostridium thermocellum ATCC 27405
MNTTMIVDTLWVVFAALLVFFMNLGFAAVESGFARSKNTVNILSKNFIVFAVSSLGFMLLGWGLMFGGDNPIIGTKELFILGGSDLGFYKDTLTSTVPFWGKFFFQLVFCGTAATIVSGAVAERIKYISFIVFSFILTLFIYPVVGHWIWGGGWLANLGFMDFAGDTVVHSVGGWAALTGAIILGPRHGKYDKDGKPKAIPGHSLALAVIGLFVLWLGWFGFNPGSTMSFQNPEDVVHIIVTTNTAAIAAILTATATSWIFIGKPDLGMTINGCLAGLVGITGSCAYVSVGSSLIIGAIAGIIVVFSVIFFDRIKVDDPVGATSVHLVCGVFGTLCVGLFAQEGVTSLSTVNGLFFGGGFSLLGAEIIGIIAVGAFVVASSALVWFILKKTIGIRVSLEEEIQGLDIGEHGNSAYPDFAIVAPITASGNGNGDSIVAISQVETIKPSSVKVTPEAAIPVVNRSHPGAKMTKVTVITNQDKYTQLQNALDKIGITGLTVTNVLGYGMQKGHTEYFRGLPVKTRLLPKVQVDIVVCKIPVETVVDTVKKALYTGNMGDGKIFIYDVENVIKIRTGEEGYDALQDEE

SEQ ID NO: 14000 - protein, 745 aa, Zea mays
MAGIDLNDTVEEDEEEAEPGNACSQQSRTSSAATFPPPPPNQPRPSAAVCLELWHACAGPVAPLPRKGSVVVYLPQGHIEHLGDAAAAGGGAPPPVALPPHVFCRVVDVTLHVRAPVPTQCADASTDEVYAQLWVVAENEDVARRLRGRSEDGSAEDGDEGETVKQRFSRMPHMFCKTLTASDTSTHGGFSVPRRAAEDCFPPLDYSQQRPSQELVAKDLHGTEWRFRHIYRGQPRRHLLTTGWSAFVNKKKLVSGDAVLFLRGDNGELRLGVRRAAQLKNGSAFPALYNQCSNLGSLPNVAHAVATKSVFHIYYNPRLSQSEFIIPFSKFIKSFSQPFSAGSRFKVRYESDDASERRCTGIIAGIGDADPMWRGSKWKCLMVRWDDDVDFRQPNRISPWEIELTSSVSGSHMSAPNAKRLKPCLPHVNPDYLVPNGSGRPDFAESAQFHKVLQGQELLGYRTHDNAAVATSQPCEATNMQYIDERSCSNDASNIIPGVPRIGVRTPLGSPRFSYRCSGFGESPRFQKVLQGQEVFHPYRGTLVDASLSNSGFHQQDGSHVPTQASKWHAQLHGCAFRGPQAPAVPSQSSSPPSVLMFQRGDPKMSPFEFGHFHVNKKEDRRAMFVHAGGIGGTEQTTMLQAHHVSGGTQNRDVTVEKSHPAVAAASDNREVSKNSCKIFGISLTEKVPAMKEKGCGDINTNYPSPFLSLKQQVPKSLGNSCATVHEQRPVVGRVIDVSTVDMMI

SEQ ID NO: 14001 - protein, 424 aa, Bdellovibrio bacteriovorus HD100
MEHKIEPLYDGPLFRNAIQTLDEAAKIINCDPNILERLKRPRRCITVSVPVRMDDHSVKVFTGYRVQYSPTLGPYKGGIRYHQNVDLSEVVGLAALMTFKNSVLGLPLGGAKGGITVDPTKLSRTEKQNLTRRYASEIGPFVGPTKDIPAPDVGTDPQTMAWFMDTYSQEQGGFAQPGVVTGKPVEIGGSLGRNHATGLGVVYVAEKAFEVCNMSMKGASIAIQGFGNVGSFAAKFAHERGARIVAVSDVSGGIFNGDGLDINEVNEYIKAHKFLKGYPKAQPISNEELLEVKCDALFPCALENQIDTHNAEKIQAKIIVEGANGPITNAATKILHKRGVFIAPDVIANGGGVIVSYFEWVQDTMSYFWDEDEVNGRLKGIITKAFDKGYSLAKEKNIDMRSAAMAVSVQRLERAMLLRGLYPR

SEQ ID NO: 14002 - protein, 406 aa, Methylobacillus flagellatus KT
MKITRKLPVTVLSGFLGAGKTTLLNHILNNREDKRVAVIVNDMSEVNIDAQLIREGGAGLSRSEEKLVEMSNGCICCTLREDLLVEIKRLAEAGRFDYLLIESTGISEPLPVAETFTFRDENGASLSDIARLDTMVTVVDAFNFLRDYASRDMLAERGSSMGEGDERTVVDLLVEQVEFCDVIVLNKTDLVNQEALQQLHGILKSFNPRARIVESEFGRVPLARVLDTGLFDFAAAQSAPGWLRELRGEHTPETEQYGITSFVYRARRPFHPERLWRWFSREWPNVIRSKGYFWMASRPAHCGSWSQAGSITRHGPAGYWWAATPKAYWPEDMESLSAIRERFSGEFGDRQQEIVLIGSSMDKVALRQAFDHCLLTDAELRLGMQAWKNFNDPFPAWDRQPEESSA

SEQ ID NO: 14003 - protein, 340 aa, Methylobacillus flagellatus KT
MTLDHRIPVTLLTGFLGSGKTTLLNKLLNHPGMKDTAVIINELGSAGLDHILARTVESQHIADNTVLLESGCLCCTLSNELADTMRDLFFKRQLEAIPAFSRLVIETTGMADPGPIMANLLNEPVISSTYRLDAVVVTIDSTYGLQQIAGHAEARKQAAVADVLLITKTDLASEESLEALSAALQELNPGATQYRISHGEIDPAAVIDAGLFNPGGTQAQPQRWLRAPSRSKARRGMLPQAVHEDEISSFTVTMPKPLTWLQLEPVLQWLCATHGENLLRMKGIIHAEDQPAPLAVHAVHHTLYPPNLLQGWDEDEPITRIVLIGKGLDEIKIRDALMQV

SEQ ID NO: 14004 - protein, 335 aa, Methylobacillus flagellatus KT
MIENTRLPITVLTGFLGAGKTTLLNRYLRHPQVQDTLVIVNEFGETGLDHLLVAYQCDQSMLAQPMVVELNNGCLCCQLRTDLKQTLKDIHWRFSRNGVRQFKRVVIETSGLADPAPVLHTLMTDAYVAAAYQLDGVVTLVDGLLGKATLQHHPEALKQVQLADRLLVSKADLAGSDTLHQLEAYLHQLNPVAALTRLDSSRPEASGPALLFGAGATAGFPHWLSALAAPALHGGEAASLSLSLARPVPRADFERWLDILRDDTSPGLLRLKGVFHIEGEPDPIAVHRVQHVLHVPEALPHWQGRDRRSQLVLITQSGIGNEEKRLLQPLARFLD

SEQ ID NO: 14005 - protein, 303 aa, Glycine max
MALETLASNEFSNFIIYDTISATPFSSHGSPEASFLESLVNYQEHDPAFDNSALRTRNHQAGEQESVGRRQNVVGVQVQGRKKRRRKPRVCKNKEEAETQRITHITVERNRRKQMNEHLVVLRSLMPESYVQRGDQASIVGGAIEFVKELEHLLQSLEARKLQLLHQEVVQANENTAISKLMQPPFAQFFSYPQYTWSQTPNKYTSKTKAAIADIEVTLIETHANLRILTRRNSPGQLTKLVAGFQTLCLTVLHLNVTTIDPLVFYSISAKVEEGFQLCSVDGIATAIHHLLARIEEEASLCS

SEQ ID NO: 14006 - protein, 483 aa, Bacillus cereus ATCC 10987
MDKKATFVNVEKKAMYINGEWITLQEQIEVNNPATKEIFATVPKGGVTEAKQAVDAAHEAFKSWSKLTAADRAVKLKKWFTLIDENKEEIAAIMTREQGKPFAEALGEVNYANSFVEWYAEEGKRVYGEMIPASHPNKRILVMKQPVGVMAAITPWNFPAAMITRKVAPALAAGCTAVVKPASQTPLTALKLAELAHEADIPKGVINIVTGSAKAIADTWMEDGRVRKVSFTGSTEIGKELMASAAQTMKKVSLELGGHAPFIVMNDADLDKVVEAVIGSKFRNAGQTCICTNRVFVQEEVYEVFAEKFQKSVGQLKVGDGFGDGTTVGPLIDENAVSKVQEHIADAIQKGGTVLYGGQKVAELDGHFMQPTVIGLANDTMLCMNEETFGPVAPVAKFKTVEEVIERANNTPYGLAAYIFTKDISQAFQISEALEYGIIGLNDGLPSVAQAPFGGFKESGIGREGGHFGIEEYLEIKYISLGL

SEQ ID NO: 14007 - protein, 547 aa, Haemophilus somnus 2336
MTAKDVKFGNDARVKMLAGVNVLADAVKVTLGPKGRNVILDKAFGAPTITKDGVSVAREIELEDKFENMGAQMVKEVASKANDAAGDGTTTATVLAQAIVSEGLKAVAAGMNPMDLKRGIDKAVNAVVEELKILSKPCETSKEIEQVGTISANADETVGKLIAQAMEKVGKEGVITVEDGSGLSDELDVVEGMQFDRGYLSPYFINKPEAATVELDNPFILLVDKKISNIRELLPVLEGVAKAGKPLLIIAEDVEGEALATLVVNTMRGIVKVAAVKAPGFGDRRKAMLQDIAILTAGTVISEEIGMELEKATLEDLGQAKRVVINKDNTTIIDGIGDEAQIKGRVAQIRQQIEEATSDYDKEKLQERVAKLAGGVAVIKVGAATEVEMKEKKDRVDDALHATRAAVEEGIVAGGGVALIRAATKVATTLKGDNEDQDVGIKLALRAMEAPLRQIVTNAGEEASVVASAVKNGEGNFGYNAGTEQYGDMIAMGILDPTKVTRSALQFAASIAGLMVTTECMVADLPKEEKADLTGGMGGMGGMGGMM

SEQ ID NO: 14008 - protein, 296 aa, Zea mays
MGNASGRDEDAAAVDGDGADVEDGGGDSSERDFPSYGSGGANHVRRACSVGVVGGGAAAGSPPGSPGHSLSPRMFVPQTPVPPLQRAADVTPVFNQILMDEQEEYDGPPQKEIPALIVWTLGGKNVYVEGSWDNWKSRKAMQKSGKDHSLLLVLPAGVYRYRFVVDGERRCLPDLPCEIDAMGNAVNLLDVNDYVPESVESVAEFEPPPSPDSSYSFQAPEDKDFAKEPPVLPSQLHLGVLNSQNSEESCARPQHIVLNHLFIEKGWGAHPLVSLGLTHRFESKYVTVVLYKPIER

SEQ ID NO: 14009 - protein, 96 aa, Haemophilus somnus 2336
MNIRPLHDRVIIKREEVETRSAGGIVLTGSAATKSTRAKVLAVGKGRILENGTVQPLDVKIGDTVIFNDGYGVKAEKIDGEEVLIISENDILAIVE

SEQ ID NO: 14010 - protein, 408 aa, Ipomoea quamoclit
MVDGNHPAPAPALTPPKVCVTGTAGFIGSWLVMKLLQQGYHVHATVRDPGNTKKLKHLLELPMADTNLTVWKGVMEEEGSFDEAIAGCEGVSHVATPMDFHSKDPDNELIKPAINGVLNIIKSCVKAKTVKRLVFTSSAGTLNVHPQQKPVCDETCWSDLDFIYAKKMTGWMYFASKILADKEAWKATKEKQIDFISIIPPLVVGPFITPTFPPSLITALSLITGNEAHYSIIKQGQYVHLDDLCEAHIFLYEHPKAEGRLICSSHHTTIHGLAEMITQNWPEYYIPSQFKGIEKDLPVVYFSSKKLQDMGFQFKYSLEDMFKGAIETLRKKGLLPYSTKEPAAAIEEEEETVPLKVEEPSTAIEEQKQEATTVPLKPAAIEEQKQEATTVPLKPAAIEQKQETVLCP

SEQ ID NO: 14011 - protein, 642 aa, Shewanella sp. ANA-3
MKSQYMIKPMIQMTNSELNNSRRRFVFGASAMLALMSIPFPKNAVANALSQSLSQLSGKVFDLTIDYKMVNFTGKSARATVVNQLLPAPLLRWKEGETVTLRVKNNLDHDSSIHWHGIILPTEMDGVPGFSFDGIKPGETFEYQFTVQQSGTYWYHSHSGYQEQTGLFGAIVIDPATPDPVIYDRDYVIMLSDWSDEAPENIYAKLKKQADYYNYRERTVMDFFSDVNKNGLANTWNARSMWNNARMSDRDISDVTGSTYTYLMNGNPPQQGWQGLFEQGEKVRLRFINSSAMTIFDVRIPGLKMSVVASDGQNIQPVSVDEFRIGVAETYDVVIEPEVDNAYCIFAQSIDRTGFTVGNLTSDASLHAPIPPMDPRPVLGHSDMGMDMSDMDMSGMDHSKMDMGAGDMSGMDHSKMAMGGGDMSGMDHSKMAMGGGDMSGMDHSKMAMDAAKATVSGLGLAGFGSNNEIKHIDTEFGPQVDMRADAPKSGLHDPGIGLRDHQQQFNRKVLTYGDIKGLHPTYDTRQPSREIQLHLTGNMNRYMWSVNGVKFMDAAPLEFEYGERLRITLVNDTMMTHPMHLHGMWSELETGDPDFIPRKHTVLVQPGSKISYLVTADAKGQWAYHCHLLFHMPGMFRKVVVK

SEQ ID NO: 14012 - protein, 519 aa, Ipomoea quamoclit
MATLTLILCTLLFAIFLYFLILRVKQRYPLPLPPGPKPWPVLGNLPHLGEKPHQSIAAMAQKYGPLMHLRLGFVDVVVAASAAVAAQFLKVHDANFSSRPPNSGAEHIAYNYQDLVFAPYGPRWRMLRKITSVHLFSAKALDDFSHVRQEEVATLTRSLASAGKTPVKLGQLLNVCTTNALARVMLGRKVFNDGSSKSDPKAEEFKSMVEEMMVLAGSFNLGDFIPVLGWFDLQGIVGKMKKLHARFDAFLNAILEEHKFVNNQHTTSSKDVDFLSTLLRLRDSGADMDGEEGKLTDTEIKALLLNLFTAGTDTSSSTVEWAFAELLRNPKILSQAQQELDLVVGTNRLVTESDLTQLPFLQAIVKETFRLHPSTPLSLPRIGAESCEINGYFIPKGATLLVNVWAIARDPNAWTNPLQFNPNRFLPGGEKTNVDIKGNDFEVIPFGAGRRICSGMSLGIRMVHLLIATLVHAFDWDLVNGQSVETLNMEESYGLTLQRAVPLMLHPKPRLQPHLYTLN

SEQ ID NO: 14013 - protein, 340 aa, Oryza sativa
  misc_feature (34)..(34): Xaa can be any naturally occurring amino acid
  unsure (1)..(340): unsure at all Xaa locations
MSWSLSLSMVEARLPPGFRFHPRDDELVVDYLSXGGGAAGAGCPTPTLIDVDLNKCEPWDLPEIACIGGKEWYFYNLKDRKYARGQRTNRATESGYWKATGKDREITRKGSLVGMRKTLVFYRGRAPKGERTDWVMHEFRQELDHANHHHHLKYMQEGWVLCRVFYKSRTEAVAAPTMESTLPPRYINGGTSRSPLPPLVDSSISFNHGGYEEVLPCFSSSHHQQPSPASMNASAAKATLPRPLLGKERKQTQKGKYMGLSLAHVKFLHRPPERPNYYTWTLSLSFHSERNSSCSPPPPAKGIDRMGTSVQVTPLSGAYGEGPLCYLLADLVLGQRCWAC

SEQ ID NO: 14014 - protein, 397 aa, Shewanella sp. MR-7
MIFSQVVLAPADPILGLTDTFKADPRQDKVNLGVGIYKDEAGQTPVLQSVKKAEALLLEQEKTKNYLGIEGVQTYNHVVQELLFGEGSTLVTSGRAATAQAPGGTGALRIAAEFLLRNTPSRTVWVSNPTWANHQNIFETAGLTVKEYGYYNAAAHDIDFDAMMTDLANALAGDIVLLHGCCHNPTGIDLTLAQWELVANLCADKQLVPLFDFAYQGFGAGIEEDAAGLRLVAAKVPELLVANSFSKNFGLYNERIGAVTVVAQNADEAVRAFSQVKRTIRANYSNPPAHGALIVSTILSDAALKALWVQELTEMRERIAEMRTLFVQSLKDEGVTQDFSFISRQNGMFSFSGLNKAQVARLKDEFGIYIVGSGRISVAGMTKTNMPVICKAIAQVL

SEQ ID NO: 14015 - protein, 319 aa, Arabidopsis thaliana
MAVHIHNPNFFHTHHLRASLTSASASPSSYLFHRHSASKYPSFLCKSNNKDDYLIDAPVSVGDGFSFSGGKYSDQPSPSDEWLKQGKWVKAHRVGGSGVEAKDPIFGLTMGASSQASKDLFRWFSVESGSVDSPPVILIHGFPSQAYSYRKTIPVLSKNYRAIAFDWLGFGFSDKPQAGYGFNYTMDEFVSSLESFIDEVTTSKVSLVVQGYFSAAVVKYARNRPDKIKNLILLNPPLTPEHAKLPSTLSVFSNFLLGEIFSQKYAEEMRTSLMDKNWKIPITVCWGQRDRWLSYEGVEEFCKSSGHNLVELPNVPVTS

SEQ ID NO: 14016 - protein, 142 aa, Streptococcus thermophilus
MLNKIQHRNLNTYSVTPFDFFEEFSRNLFNDFKPNFIKTDIHETDNEYLVEAELPGIPKENIQVTYENGVLTISGQRQIDAVNEDKKGKLIRSERSLTSVQRQYLLENVKEDEIKASYSDGVLKVTLPKDSNKEIKKSISIE

SEQ ID NO: 14017 - protein, 379 aa, Arabidopsis thaliana
MEIDEEEPMVFLDRTTRATRGKRMTKLLDDEVEEDEQFWNQEALKEEEHDDEYEAEREVADEFDSDFNDDVFMSCLCIEYLFIKEPEPDAVAVNEKELRDLPKKRLIYPGKTASKKKKKKTKVVSQLEYIPGDEKPGEELGNKEQEEKEENEAQEDMEGEKVIRKSTRTSVVVRQAERDALRAAIQATTKPIQRKKVGEEKRMTQEEMLLEAAQTEIMNLRNLERVLAREEEVKKKAIVHKAVYKGPQIRYHSKDGCNYLEFCNGASFNSELSTKSVPYPEKAVCVITGLPAKYRDPKTGLPYATRDAFKAIRERFMDEHDGLRKKMEMGDLFDTLVAKGFATKQKRTKIPKSNKSFSLRSSARFLSSESEEESEEDSD

SEQ ID NO: 14018 - protein, 207 aa, Triticum aestivum
  misc_feature (89)..(89): Xaa can be any naturally occurring amino acid
  misc_feature (186)..(186): Xaa can be any naturally occurring amino acid
  unsure (1)..(207): unsure at all Xaa locations
MVAYCPIMENACGIAEISQMPDEVLLRTNALYNNDNSTVDVNLGVAIYSTELGKLALLNAYKSPAQMLIHNELRPKEYLPITGLADANXLSAEIILRADRTAIHENRVGTAQGLSRTGSLRVGGEYLALHYHERTIYIRQPNWENDPKVVTIADLTARSYRDYDPATRGLDFQGPLEDLRSSTSAXELLHACAHQTNCVDPTLDNGN

SEQ ID NO: 14019 - protein, 396 aa, Yarrowia lipolytica
MTFHSLVNKVSGQPPSYNKKADYKFGKTLGSRYFGIVKYAKQHSTGEEVAVKIIVKKNLKGNDHVVIEELSLLKECHHPHIIAFKDWFESKEKFYIVTQLATGGELFDRICDYGKFTEKDARQSVKDILEAVDYLHSKDIVHRDLKPENLLFVTPDPHASLVLTDFGIAKHLKSPDEVLHSMAGSFGYAAPEVLKGTGHGKPCDIWSLGVITFTILSGYSPFRSETVRDFLEEIEGPNALVFHKKYWQDVSEDAKDFIKSCLALDPALRPTSAELLKHEWITGDTTKSIDLLPNIREGFNARSKFRQAIEAVRLHNRIKSLNMVDSDDEDEEEEAVADTEKPSLLSVASSMRPRAHSRSKSGTGAAAFQEVVLAAKRNKELLEKEKASKQDAAEEK

SEQ ID NO: 14020 - protein, 200 aa, Prochlorococcus marinus str. MIT 9312
MKYFLPLIIALSIFINPVNAFAEELILAGGCFWCLEHDLESLKGINFVQSGYSGGDLQNPTYENHEGHQEVVLVNYDSQLVTLPEILRLYLRNIDPLDGKGQFCDRGDSYRPVIFFKDATEESDATNAIVSASNELRVPLEKIAVELKSKGQFWLAEEYHQDFAERNELKYKFYRFSCGRDQRLDKLWGNNARSTNLWIE

SEQ ID NO: 14021 - protein, 293 aa, Azoarcus sp. EbN1
MRGWHGHEARAARPARNAVTIRKAGLRALRKARIYRCGGSAGISPASRFSATAIVAAPSSGADYIASGGRFPPWYTTKRGDATPIREAYVKLPALPKWCQWNNFLRSHDELDLGRLTDAEREEVFRAFGPDEDMQLYGRGIRRRLAPMLGNDRSRIELAHSLLLTLPGTPVLRYGDEIGMGDDLSLPARESVRTPMQWNDESNCGFSFAAPDRLALPPIADGQFGYRTVNVQAQRRDPDSLLNWLQRALRRRKECPEFALGECTWIDTDPPQMLAQRFELGDSTCFTISVRSA

SEQ ID NO: 14022 - protein, 458 aa, Arabidopsis thaliana
MQVLGMEEKPARRSVVLVPFPAQGHISPMMQLAKTLHLKGFSITVVQTKFNYFSPSDDFTHDFQFVTIPESLPESDFKNLGPIQFLFKLNKECKVSFKDCLGQLVLQQSNEISCVIYDEFMYFAEAAAKECKLPNIIFSTTSATAFACRSVFDKLYANNVQAPLKETKGQQEELVPEFYPLRYKDFPVSRFASLESIMEVYRNTVDKRTASSVIINTASCLESSSLSFLQQQQLQIPVYPIGPLHMVASAPTSLLEENKSCIEWLNKQKVNSVIYISMGSIALMEINEIMEVASGLAANNQHFLWVIRPGSIPGSEWIESMPEEFSKMVLDRGYIVKWAPQKEVLSHPAVGGFWSHCGWNSTLESIGQGVPMICRPFSGDQKVNARYLECVWKIGIQVEGELDRGVVERAVKRLMVDEEGEEMRKRAFSLKEQLRASVKSGGSSHNSLEEFVHFIRTL

SEQ ID NO: 14023 - protein, 237 aa, Vigna radiata
MLGIFSSSVVSPPEELVAAGSRTPSPKTTAGKLLTRFVESKASAVSLQVGEHVQLAYTHHSESPWYPRSFAVKDEIFCLFEGALDNLGSLRQQYGLAKSANEVILVIEAYKALRDRAPYPANRVVCHLSGSFAFIVFDKSTSTVFVASDQAGKVPLYWGITADGYVAFADDADLLKGSCGKSLASFPQGCFYSTAVGGLRCYENPKNKITAVPAEEEEIWGATFKVEGSAVLAATEY

SEQ ID NO: 14024 - protein, 580 aa, Oryza sativa
MGEVAEDIYTQDGTVDVKGNPATKKNTGNWRACPYILANECCERLAYYGMSTNLVNYMKTRLGQESAIAANNVTNWSGTCYITPLLGAFLADAYMGRFWTIASFMIIYILGLALLTMASSVKGLVPACDGGACHPTEAQTGVVFLALYLIALGTGGIKPCVSSFGADQFDENDEGEKRSKSSFFNWFYFSINIGALVASSVLVYVQTHVGWGWGFGIPAVVMAVAVASFFVGTPLYRHQRPGGSPLTRIAQVLVASARKWGVEVPADGSRLHETLDRESGIEGSRKLEHTGQFACLDRAAVETPEDRSAANASAWRLCTVTQVEELKSVVRLLPIWASGIVFATVYGQMSTMFVLQGNTLDASMGPHFSIPAASLSIFDTLSVIVWVPVYDRLIVPAVRAVTGRPRGFTQLQRMGIGLVISVFSMLAAGVLDVVRLRAIARHGLYGDKDVVPISIFWQVPQYFIIGAAEVFTFVGQLEFFYDQAPDAMRSMCSALSLTTVALGNYLSTLLVTIVTHVTTRNGAVGWIPDNLNRGHLDYFFWLLAVLSLINFGVYLVIASWYTYKKTADSPDDKAEHAGAN

SEQ ID NO: 14025 - protein, 167 aa, Arabidopsis thaliana
MEKVVDLFGVGEANSQKLLEGGKDLSEIQQGLFIGSVAEANNKDFLKSSNITHVLTVAVALAPPYPDDFVYKVIEVVDRSETDLTVYFDECYSFIDQAIQSGGGVLVHCFMGMSRSVTIVVAYLMKKHGMGFSKAMELVRSRRHQAYPNPGFISQLQQFEKSIQGNA

SEQ ID NO: 14026 - protein, 197 aa, Cytophaga hutchinsonii
MNHIHPIFDKILQREDKEAQLKQHSIVIWMVGLSGSGKSTLAKALERDLHDRGFLTTLLDGDNLRTGINNNLGFTEADRTENIRRAAETSKLFAACGIITICSLISPTEEIRSMSKNIIGANDYFELFVNTPIEVCEQRDVKGLYKKARAGEIKNFTGIDSPFEHPKAPSLEVRTDLHSLEDCLQQILTAILPKITY

SEQ ID NO: 14027 - protein, 356 aa, Beta vulgaris
MALLNDLINLNLSETSDKIIAEYIWIGGSGLDMRSKARTLTGPISDPAKLPKWNYDGSSTNQAPGEDSEVILYPQAIFKDPFRRGDNILVMCDAYTPAGEPIPTNKRYNAEKIFSHPDVVAEEPWYGIEQEYTLLQKDINWPLGWPTGGFPGPQGPYYCGVGADKSFGRDIVDAHYKACIYAGVNISGINGEVMPGQWEFQVGPTVGISSGDQVWVARYILERIAEIAGVVVSFDPKPVKGDWNGAGAHTNYSTKSMREDGGINVIKAAIEKLSLRHKEHIAAYGEGNERRLTGRHETADITTFSWGVANRGASVRVGRDTEKDGKGYFEDRRPASNMDPYVVTSMIAETTILGKP

SEQ ID NO: 14028 - protein, 423 aa, Legionella pneumophila str. Paris
MTQKTAKLSIDGQETIDLPIYTPTLGNDVIDITQLGSHGVFTFDQGFLSTASCESKITYIDGDKGILLYRGYPIEQLAEKKDFLDVSYLLLNGELPNKEEKKAFVSLINNHTMVHQQMYQFLNGFRRDAHPMAIMVGIVGALSAFYHESMDLNNAQDRFISAIRLVAKMPTLAAMSYKYSIGMPYMYPKNKMSYAENFLHMMFGVPSEDTTPDPVLVRAMDTIFILHADHEQNASTSTVRLAGSTGANPFACISAGIGALWGPAHGGANEACLNMLKEIGDVSRIDHYIKRAKDKNDPFRLMGFGHRVYKSYDPRAKVMRKTCYDVLEAVGAKEAPLFKLAMELERIALEDEYFIEKKLYPNVDFYSGLTLSAIGIPTNMFTVIFALARTVGWMSHWMEMVATKSRIGRPRQLYTGEKIRDVK

SEQ ID NO: 14029 - protein, 351 aa, Staphylococcus aureus subsp. aureus COL
MKALVKTREGHGNLELLDKEVATPLDDKVKIKVHYAGICGTDIHTYEGHYKVNFPVTLGHEFSGEIVEVGADVKDFKVGDRVTSETTFYVCNECEYCKSKDYNLCNHRKGIGTQVDGAFTNYVIAREESLHHIPDEVSYQSAAMTEPLACAHHGVSKIQVNSGDVAVVMGPGPIGLLVAQVLKSKGATVVVTGLDNDKVRLDKAEALHMDYVVNLQQTDLKTYINGITDGYGADVVVECSGAVPAARQGLDILRKKGFYSQIGIFKDAEIPFDMEKVIQKEITVVGSRSQKPADWEPSLQLMADGLVNAEALVTKIYDISKWDEAYQHLKSGEGIKVLLKPLDLDENEGEN

SEQ ID NO: 14030 - protein, 256 aa, Arabidopsis thaliana
  misc_feature (101)..(101): Xaa can be any naturally occurring amino acid
  unsure (1)..(256): unsure at all Xaa locations
MEACLRCSRGSYLIEAMRPLSSSLRPSSSVSFSTGKPIKRAYDGLLLDAGGTLLQLSKPVHETYASLGQKYGLKTTPAEIKEGFKRVFSAPWPEKLRYQDXGDGRPFWKLVVSEATGCSDNDYFEDVYQYYANGEAWHLPEGAYETMSLLKDAGVKMAVVSNFDTRLRKLLKDLNVIDMFDAVIVSAEVGYEKPDERIFKSALEQISVDVNRAVHVGDDEGADKGGANAIGIACWLWGEDVQTFSDIQKRILVSEL

SEQ ID NO: 14031 - protein, 347 aa, Staphylococcus aureus subsp. aureus COL
MKALKLYGVEDLRYEDNEKPVIESANDVIIKVRATGICGSDTSRYKKMGPYIKGMPFGHEFSGVVDAIGSDVTHVNVGDKVTGCPAIPCYQCEYCLKGEYARCEKLFVIGSYEPGSFAEYVKLPAQNVLKVPDNVDYIEAAMVEPSAVVAHGFYKSNIQPGMTVAVMGCGSIGLLAIQWARIFGAAHIIAIDIDAHKLDIATSLGAHQTINSKEENLEKFIENHYANQIDLAIESSGAKVTIGQILTLPKKGGEVVLLGIPYDDIEIDRVHFEKILRNELTVCGSWNCLSSNFPGKEWTATLHYMKTKDINVKPIISHFLPLEKGPETFDKLVNKKERFDKVMFTIY

SEQ ID NO: 14032 - protein, 1481 aa, Thermoanaerobacter ethanolicus
MFKRRTLGFLLSFLLIYTAVFGSMPVQFAKAETDTAPAIANVVGDFQSKIGDSDWNINSDKTVMTYKGNGFYEFTTPVALPAGDYEYKVALNHSWEGGGVPSQGNLSLHLDSDSVVTFYYNYNTSSVTDSTKYTPIPEEKLPRIVGTIQSAIGAGDDWKPETSTAIMRDYKFNNVYEYTANVPKRYYEFKVTLGPSWDINYGLNGEQNGPNIPLNVAYDTKITFYYDSVSHNIWTDYNPPLTGPDNNIYYDDLKHDTHDPFFRFAFGAIKTGDTVTLRIQAKNHDLESAKISYWDDIKKTRTEVPMYKIGQSPDGQYEYWEVKLSFDYPTRIWYYFILKDGTKTAYYGDNDEQLGGVGKATDTVNKDFELTVYDKNLDTPDWMKGAVMYQIFPDRFYNGDPLNDRLKEYSRGFDPVEYHDDWYDLPDNPNDKDKPGYTGDGIWNNDFFGGDLQGINDKLDYLKNLGISVIYLNPIFQSPSNHRYDTTDYTKIDELLGDLDTFKTLMKEAHARGIKVILDGVFNHTSDDSIYFDRYGKYLDNELGAYQAWKQGDQSKSPYGDWYEIKPDGTYEGWWGFDSLPVIRQINGSEYNVKSWADFIINNPNAISKYWLNPDGDKDAGADGWRLDVANEIAHDFWVHFRAAINTVKPNAPMIAELWGDASLDLLGDSFNSVMNYLFRNAVIDFILDKQFDDGNVVHNPIDAAKLDQRLMSIYERYPLPVFYSTMNLLGSHDTMRILTVFGYNSANENQNSQEAKDLAVKRLKLAAILQMGYPGMPSIYYGDEAGQSGGKDPDNRRTFSWGREDKDLQDFFKKVVNIRNENQVLKTGDLETLYANGDVYAFGRRIINGKDVFGNSYPDSVAIVVINKGEAKSVQIDTTKFVRDGVAFTDALSGKTYTVRDGQIVVEVVALDGAILISDPGQNLTAPQPITDLKAVSGNGQVDLSWSAVDRAVSYNIYRSTVKGGLYEKIASNVTQITYIDTDVTNGLKYVYSVTAVDSDGNESALSNEVEAYPAFSIGWAGNMNQVDTHVIGVNNPVEVYAEIWAEGLTDKPGQGENMIAQLGYRYIGDGGQDATRNKVEGVEINKDWTWVDARYVGDSGNNDKYMAKFVPDMVGTWEYIMRFSSNQGQDWTYTKGPDGKTDEAKQFIVVPSNDVEPPTALGLQQPGIESSRVTLNWSLSTDNVAIYGYEIYKSLSETGPFVKIATVADTVYNYVDTDVVNGKVYYYKVVAVDTSFNRTASNIVKATPDIIPIKVIFNVTVPDYTPDDGANIAGNFHDAFWNPSAHQMTKTGPNTYSITLTLNEGTQLEYKYARGSWDKVEKGEYGEEIANRKITVVNQGSNTMVVNDTVQRWRDLPIYIYSPKDNTTVDANTNEIEIKGNTYKGAKVTINDESFVQQENGVFTKVVPLEYGVNTTKIHVEPSGDKNNELTKDITITVIREEPVQEKEPTPTPESEPAPMPEPQPTPTPEPQPSAIMAL

SEQ ID NO: 14033 - protein, 1279 aa, Thermoanaerobacterium saccharolyticum
MYKKLFTKKFISFVMSLLLVLTAAFSSMPFHNVYAADNASVVANIVGDFQDQLGDSNWNIDSNITIMQYVGNGLYEFTTPTQLKAGSYQYKVALNHSWNGGGVPSQGNLTLNLTNDSYVTFWFDYNTQSVTDSTKYTPISNDKLPRLVGTIQSAIGAGKDWDPGTSTAIMIDDNFDNVYSYTAHIPKGDYQYKVTLGNTWAENYGANGVQDGSNIQLSVANDADITFFYDANTHNIWTNYSPTLTGLDNNIYYDDLKHDTHDPFFRNPFGAIKVGQTVTLRIQAKNHDLESARISYWDDINKTRTELPMTRIGESPDGNYEYWEIKLSFDHPTRIWYYFILKDGTKTAYYGDNDDQLGGLGKATDTVNKDFELTVYDKNFDTNDWMKGAVMYQIFPDRFYNGDTSNDHAKTLSRGNDPIEFHNDWNDLPDNPNNAGTPGYTGDGIWSNDFFGGDLKGIDDKLDYLKGLGVSVIYLNPIFESPSNHKYDTADYTKIDEMFGTTQDFEKLMSDAHAKGINIILDGVFNHTSDDSIYFNRYGKYPDLGAYQDWKDGNQSLSPYGDWYTINSDGTYECWWGYDSLPVIKSLNGSEYNVTSWANFIINDKNAISKYWLNPDENLNDGADGWRLDVENEVAHDFWTHFRDAINTVKPEAPMIAENWGDASLDLLGDSFNSVMNYQFRNDIIDFLIGQSFDDGNGQHNPIDAAKLDQRLMSIYERYPLPAFYSTMNLLGSHDTMSILTVFGYNSADPNENSDAAKRLAEQKLKLATILQMGYPGMADIYYGDEAGVSGGKDPDDRRTFPWGNEDTALQDFFKNVSSIRNNNQVLKTGDLETLYAQNDVYAIGRRIINGKDAFGNSYPDSAAIVAINRSNSDQQITIDTTKFLRDGVAFKDLINGDKSYTINGGQITINIPAMSGVMLISDDGQDLTAPQVPSNVVATSGNGKVDLSWSQSDGATGYNIYRSSVEGGLYEKIASNVTGTTFEDTNVTNGLKYVYAISAVDELGNESEMSIDTVAYPAYPIGWVGNLTQVVDNHVISVSNPTEDIYAEVWADGLTNSTGQGPNMIAQLGYKYVGGTVNDSVYGSVYNSVYGVDDSDFTWVNAQYVGDIGNNDQYKASLHLINRSMGYLMRFSDNQGQSWTTTDTLSFYVVPSDDLIKPTAPILNQPGVESSRVSLTWSPSTDNVGIYNYEIYRSDGGTFNKIATVSNEVYNYVDTSVINGTTYSYKVVAADPSFNRTESNVVTIKPDVVPIKVTFNVTVPDYTPNSVNLAGTFPNATW

SEQ ID NO: 14034 - protein, 444 aa, Deinococcus radiodurans
MTLSETHPTARSEALFVRARAVTPGGVNSPVRAFRSVGGVPRFIASAQGAYLTDADGARYLDYIGSWGPMILGHNHPAVRDAVAQALASGTSFGAPNEREVELAELIVELTGAERVRFVSSGTEATMSALRLARGYTGRKFIVKFRGNYHGHADGLLVEAGSGLLTNAEGDLGAAAPSSAGVPEEYAGLTLVLDYNDPEALDALMAQRGDEIAAVIFEPVVGNAGVLIPTSDFLAALHRVRDFGAVLIADEVMTGFRLSLNGATGLLSLDPDLRCWGKIVGGGLPVGAYGGRADIMDFVSPQGPVYQAGTLSGNPLAMAAGIATLRELKANPGLYRQLDEYAARLAAGLRGAAERAGVAVSINHIGSMLTVFFQDAPDGSVRDYAAAARSDTAAFAAWFQGLLARGIYWAPSQFESIFISAAHGEPELAATLEAAAQAFEGVKP

SEQ ID NO: 14035 - protein, 290 aa, Brassica napus
  misc_feature (54)..(54): Xaa can be any naturally occurring amino acid
  unsure (1)..(290): unsure at all Xaa locations
KKRPLFDTSNTWAFVFGLMGNGGSFAVFLSPVPTFYRVWKKKTTEGFQSLPYVXLFSATLWLYYATQKKDVFLLVTINSFGCFIETIYISIFLAFAPKKARMLTVKLLLLMNFGGFCLILLLCQFLAKGITRAKIIGRPTRPICVGFSVCVFAAPLSIIRTVIKTRSVEYMPFSLSLTLTISAVVWLLYGLALKDIYVAFPNVLGFALGALQMILYVVYKYCKTPPHLGEKEVEAAKLPEVSLDILKLSTVSSPEVRQANKCTCGNDRRPEVEDGQNAKNGKQSSSASAT

SEQ ID NO: 14036 - protein, 698 aa, Trichodesmium erythraeum IMS101
MSYCLNPNCPDPSDPLNSGQRICCQCGSQLVLQNRYRIIKPLGGGGFGKTYLIEDRGVQKVLKVLLKNHPKAISLFQQEAQVLISLRNPGIPKIEKDGYFTFKTADSKEPLHCLVMEFIHGSNLMDWMKSRRHKSINQTQAIDWLTQLSEILDKVHNKKYFHRDIKPQNIMRKPDGQLVLIDFGTVREVSETYLVKVDLGQNVTGIVSPGYTAPEQTNGKAVPQSDFFALGRTFVYLLTGKSPTSFPENPRSGKLQWQKYAPEISTELKDVIDYLMAPFPGNRPQKPKVILKCLAEIKTKNSITDNSRSYTAGQQSYATREDPKVLTERTKTKQKVKTKFKTKTKTKTKTTTKTFSNKSIIRLINNLVIGLTMLLLGGATFQFYGFWRYNIFPTNPVFLLRGLKSSRFLDKTLDSYIGEVNAIALTQDGQTLVSSGLNTIKIWNLKTRQLKNNIKDAHADKITTLAISPNDEILVSGSTDKTIKIWDLKNSKLLKDILGHNGQLNTVAISPDGQTLVSVGSDKLMKLWNIQTGSRILTRLPDKESEVNALAFSRDGETLFTGSSDGTIRLWDPSTLTRRQTLQGHTQAVNAIAISPDNQILASGSNDGTIKLWDFNTRKEKTVIKANVGKVKALVFSPDSQTIACSGDKITIWNLITKEKIQTFFGHSQQISSLAITPDGKTLISGSLDQTLKVWRIP

SEQ ID NO: 14037 - protein, 460 aa, Ralstonia metallidurans CH34
MSDMQEHKVTPYDQFNYEVPENVFPREGISANAAAAIVISDEWTDTNPMLNMSSFVTTFAEPEAREVAARNIFKNYIDHDMYPRLFAMEGRMVRWLHELWNGPKGVEPYGTCTVGSSEACMLGGLAHKWNWRQRRQAEGKDATRPNMVTGGNVQIVWKKFLRYFDVEPRIVPLKPGNYCLTAEDLDKYVDENTICVVAIAGQTFTGEDDDIQGIHDWLDAYEKRTGISIPMHIDGASGGFVNPFLYPDYKWDFRLPRVQSINASGHKYGLTPPGLGWVVFRERKIFNEELVFYVNYLGGEMPTATLNFSRNAFQVAVQYYQFLRLGFDGYKRVMQHTLDNAIFLRQQLVDSGYFDIMNTTQRIPVVAVTLNKKYKNFNEFDVSNKVREKGWVLSAYTMPPNAESVTSLRVVVRPHVNHNVAQLLANDIINACKFLEANGGNAKPPALHKHAEAQSTSLKC

SEQ ID NO: 14038 - protein, 525 aa, Glycine max
NRKKGGGGGGRRTAPPIFGRYKGCPGGGWGKCSDEVKKPGSVVPKKKIKTPVSKKQEETADSNKTETPSDKKDEGSVVAVQAQDDTQSTGKQTANADTTVTPEVKKTGKVVPKKQSKTPMPEKRDNTADSSKTETKSDKDDKKEERVTGEKSGAKTDKLKASDKDVTNVKGKVKDGDKSKDEKVTQERDGKDESKSKSSKEVKDKRKSNEPPRHPGFILQTKWTKDSKIRSLSLSLDSLLDYTDKDVEESNLELSLFAESFYEMLQFQMGSRILTFLQKLRIKFVIKRNQKKRQREDEQEMDDVKKSPVKRQKGNDPSVKNEPTNMDTLNPTLLDDEKAVARNDNSSNKEDDVKMEDGSDEEEDPEEDPEEYEEMENGSPQHEASNDKNAEQEANADTKSENITTNDKTADETSKEEIKVKDEVQESKADLQVKEEKEGKDEIKKETPTAKEVVVDRELLQAFRFFDRNRVGYIRVEDMRIIIHNLGMFFSHRDVKELVQSALLESNTGRDDRILYNKLVRMSDI

SEQ ID NO: 14039 - protein, 297 aa, Arabidopsis thaliana
  misc_feature (11)..(11): Xaa can be any naturally occurring amino acid
  misc_feature (81)..(81): Xaa can be any naturally occurring amino acid
  misc_feature (96)..(96): Xaa can be any naturally occurring amino acid
  unsure (1)..(297): unsure at all Xaa locations
MATDGSASSAXSQEGADVRMMCAAEVHVGTEGCDGQMERYVFERRDDGIYVFDLGKRWEKLQMAARVIVAIENPQNIIVQXARPYGQRAVLKFAQXTGANAISGRKTPGTFTNQMQTSFSEPRLLILTDPRTDHQPLKEGALGKIPIIPLSQTNSPIRFVDIGIPANNKGKNSIWCLFWLLARMVLQMRGTIAAEQKWDVMVDLFFYREPEETEPEDEDEAGPQAEYGALPAPEYGMVGGDQWTTAQIPDAAWPGEGQAPISAAPAAAPRSHSAAAPADGGWEAAAPPSGAPAAGWE

SEQ ID NO: 14040 - protein, 467 aa, Listeria monocytogenes str. 4b F2365
MVVGDFPEERDTIVIGAGPGGYVAAIRAAQLGQKVTIIEKEYYGGVCLNVGCIPSKALITIGHRFKEAGHSDNMGITADNVNLDFTKAQEWKGGVVNKLTSGVKGLLKKNKVEMLEGEAFFVDDHSLRVIHPDSAQTYTFNNVIIATGSRPIEIPGFKYGKRVLSSTGALALTEVPKKLVVIGGGYIGTELGGAFANLGTELTILEGGPEILPTYEKDMVSLVKRNLKSKNVEMVTKALAKSAEETENGVKVTYEANGETKTIEADYVLVTVGRRPNTDEIGLEQAGVKVTERGLVEVDKQGRSNVPNIFAIGDIVPGVPLAHKASYEAKIAAEAIAGEKAENDYTALPAVVFSDPELATVGLTEKEAKEKGFDVKAAKFPFGGNGRALSLDAPEGFVRLVTRKEDGLVIGAQVAGMNASDIISEIGLAIESGITAEDIALTIHAHPSLGELTMEAAELALGRPIHM

SEQ ID NO: 14041 - protein, 332 aa, Archaeoglobus fulgidus DSM 4304
MKVIIMAGGYATRLWPITKSKAKPLLPVGTKRIVDHVYEKVLKFNSPILLSTNKRFEEDFRKWAEGKDVEVVVEDTMREEEKLGAVKALAQVVEGIDDDFLVVAGDNIFSFELNPIVELFRKKKSPVTALYDVGDYELAKRYGVAELEGEIVRRFYEKPEKPASTLVGIAIYTFPREIADLLVEYVGGNERSDNLGDFLSYLCQKMDVYGCIFDNGNWYDVGNPDSYIEAFKFYTDSFVHESVEVAKAAKIIEPVVIERDVVIKGRSIVGPYAYIGEGCEIDSSDVSESVVFSKTVLKRVRLWRSIIDDDCEIRNIELSGSIIGGHAKIQRG

SEQ ID NO: 14042 - protein, 273 aa, Zea mays
MGRRACCAKEGVKRGAWTAKEDDTLAAYVKAHGEGKWREVPQKAGLRRCGKSCRLRWLNYLRPNIKRGNISYDEEDLIVRLHKLLGNRWSLIAGRLPGRTDNEIKNYWNSTLGRRAGAGAGAGGSRVVFAPDTGSHATPAAAGSREMTGGQKGAAPRADLGSPGSAAVVWAPKAARCTGGLFFHRRDTHTPHAGGTETPTPMMAGGAGGEARSSDDCSSAASVSVSPLVGSSQHDPCFSGDGNGDWMDDVRALASFLESDEEWLRCHTAEQLV

SEQ ID NO: 14043 - protein, 388 aa, Bacillus thuringiensis serovar konkukian str. 97-27
MSSAFIYSDDFRGYSFSPDHPFNQLRVTLTYDLLQKGGFISPSQIISPRMATDEEIAYIHTEEYINAVKRAGEGKLEKSIALTYGLGTEDTPMFPNMHEASALLVGGTLTAVDAVLSGKVKHALNLGGGLHHGFRGKASGFCIYNDSSIAMKYIQKKYGLRVLYIDTDAHHGDGVQWSFYDDPNVCTISLHETGRYLFPGTGAVNERGQGNGYSYSFNVPLDAFTEDESFLDSYRTVVREVAAYFKPDIILTQNGADAHYYDPLTHLCATMSIYREIPKLAREIANEYCEGRWIAVGGGGYDHWRVVPRAWALIWLEMNNIQNISGYLPPEWIDAWKGQAETELPLTWEDPDNMYKPIPRKPEIEEKNALTVAKSLEIIRNNMKKSLY

SEQ ID NO: 14044 - protein, 105 aa, Oryza sativa (japonica cultivar-group)
EPFDYYMFGQNYIRPLVDYRNSYVGNISIFQDMEQKLQQGHKVVLMSNHQTEADPAIIALLLERSNPWISENIVYVAGDRVVTDPLCKPFSMGRNLICVYSKKHM

SEQ ID NO: 14045 - protein, 623 aa, GIBBERELLA ZEAE PH-1
MADAPNSGDELYPIAVLIDELKHDDVLLRLNAIHRLSTIALALGAERTREELIPFLDESVEDEDEVLVALSEELGGFVEYVGGSQWGHVLLSPLENLAAIEEPVVRDKAVESLNKICSELSPQQVEEYFIPLTIRLAKADWFTSKVSGCGLFTTPYNKVSPPVQEQLRQQFGLLVHDETPMVRRQAATNLAKFVKEMPATIVVDEMIPLFQHLAQDDQDSVRLLTVEVLISIAEAVPKEQQASHGVLLTALRNLIEDKSWRVRYMIADRFEKIAKAVDEEVVSRDLVPAFVKLLKDNEAEVRTAIAGQIPGFCALVDRNVLLNDIMGSIEDLVSDTSQHVRAALGTQISGLAPILGKQETIDHLLPMFLQMLKDEFPEVRLHIISKLELVNQVIGIDLLSQSLLPAIVQLAEDKQWRVRLAIIEYIPLLASQLGVQFFDEKLSNLCMGWLGDTVFSIREAATHNLKKLTEVFGVEWASEAIIPKVMAMGNHPNYLYRMTTCFAISTLASVVSMDVIAKSILPMLDKLVSDDIPNIRFNVAKTYRVLISVLRRLPDEGTLYDLEKQGSEITPSPRGSELIQERVVPNLEKLQKDDDVDVRYFATTAAAEISGPIAGGEPMNTSP

SEQ ID NO: 14046 - protein, 1116 aa, Xanthomonas axonopodis pv. citri str. 306
MNAVASLQADAEQSAVVADQRWYKDAIIYQVHVKSFFDSNDDGIGDFPGLISKLDYIAELGVDTIWLLPFYPSPRRDDGYDIAEYMAVHPDYGSIEDFEHLVAHAHARGIRIVTELVINHTSDQHPWFQRARNAPAGSPERDFYVWSDTDQEYEGTRIIFCDTEKSNWTWDPVAGQYFWHRFYSHQPDLNFDNPAVLDAVLEVMRFWLDRGVDGLRLDAVPYLIERAGTSNENLPETHAILRKIRATLDAEYPDRMLLAEANMWPEDTQQYFGQNADECHMAFHFPLMPRMYMAIAREDRFPITDIMRQTPEIPESCQWAIFLRNHDELTLEMVTDSERDYLWQTYAADRRARINLGIRRRLAPLLERDRRRIELMTSLLLTMPGTPVLYYGDEIGMGDNIHLGDRDGVRTPMQWSIDRNGGFSRADPAQLVLPPVMDPLYGFQAVNVEAQIRDQHSLLTWTRRVLSVRKRYQAFGRGSLRFLYPGNRRMLAYLRCYQDETVLCVANLSHTLQAVELDLSEFEGRVPVDIIGGGSFPPIGRLTYLLTVPPFGFYAFQLVSEGTLPDWHVPSPVPLPDYRTLVLRSDADESAALLPHLPTLEGEILPAWLSARRWFSAKDQVLRSVRIARRTPLPGDEPMTLLELEVALEDGRHERYMLPVGIVWEREQPSTLAEQLALARVRQGREVGYLTDAFALKPMVRGVIDALRSHAALDFCDGDDAAQQGQVCFEATPALATLDIPQDPEIRWLSAEQSNSSLVVADKAVFKLLRHVAVGANPEIEIGRRLTEMGYANAAPLLGSVSRIGGQGTVTTIALLQGFIRNQGDAWRWTLDHLARSFDEYATAQTDEARAEAVAGYDAFAAVVGKRLAELHEALSRGTDDADFAPQRIDLPTANDVVAGVGRQVEEMWETVNARLAGSEDSAEREALEAVLAQRPQLDALLAKAPSVLADSLLTRVHGDFHLGQILVAFDDVVLIDFEGEPAKPLAERRAKASPLRDVAGFLRSLDYASEVSARGEEGTAARAGVGVDTHLDQFLVQFRRRSTQAFLDAYHAVLDASAHPWIAPAAFNAATLLFLVEKACYEVRYEAANRPGWLMVPIEGLRRILQRARAGAGDT

SEQ ID NO: 14047 - protein, 324 aa, Ehrlichia canis str. Jake
MVKIIVIDKTGGTEVFKYVDHNIGEPKDDEVLIQHTVIGLNRYDLECRNGMRKTRKLPTVLGIEAVGVVERLGKDVEVFNVGDRVGYCTVSGGAYSEKRIVNQKYLVRIPDDVTDQVAAAVLFKGMTAHYLTHIVYAIRPKTFALVHGATGGVGQILCQWASYKGCKVIGVISSDDRANIALRSGCSYIVNCNSKNFVEQVMEITQGTGVNVVYDSVGALTSKESFASLGMFGIYVSYGQISGAVSNVSASMLSSRSLFFTAPSVFHYKRSSFDLAMTSMELFEVIRRNHIKVSINKIYKFDDIVTAHQDLENRKLTGSNIIVL

SEQ ID NO: 14048 - protein, 689 aa, Prochlorococcus marinus str. MIT 9312
MVDTKNQDSRDYNSTSDNEDFHNNYWTNRIIAWWSGFSLRTKLLAIATLVVSLLMTGITFFALNSIQRDAGMNDTRYARDLGLLLSGNVTELVANNQKKEISNVAEKFWRSSRNLRYIFFTDAEDIVQLGIPISATTTSSDSQLQLTRRLKLPSELKKRPQFPLVRQHVTPQGQVTDVFVPMLWKGKYLGTLALGVTPNKKALASAALTREITIAVFISIWVLVILGAVFNALTITRPVRELVRGVREISKGNFKSRISIPMTGDLGELLNGFNRMATQLENYDEANIEELKAAQIKQQSLIATMADGAILLDSQGKIVLTNPTAKRLFRWEGRFLEGKYFLNEIPEILSNDLHTNIESILNREKEKDDLRFSLGEPARTLRIVLQSVLDTNKVELKGIAVTIQDLTREVELNAAQNRFISNVSHELRTPLFNIKSYVETLHDLKDQLSNEEQLEFLGIANSETDRLTRLVNDVLDLSRLESGKIIQLEEMDIKAAIEQTLRNYRLNATEKNVSLAHDIEENIPPILGNFDLLLQVFDNLLGNGLKFSPKNSNLMIRAYAWPDSCPAFPPSKQNDRAPQCELVSPLPKVRIEIADTGSGISQTDQEKIFDRFFRVENAVHTEQGTGLGLSIVRGIIEKHGGEIRMASELGIGTTFWFDLALAQSDKDELLTQTINNTDNFSNSEVSKFI

SEQ ID NO: 14049 - protein, 454 aa, Arabidopsis thaliana
MQIFVKTLTGKTITLEVESSDTIDNVKAKIQDKEGIPPDQQRLIFAGKQLEDGRTLADYNIQKESTLHLVLRLRGGMQIFVKTLTGKTITLEVESSDTIDNVKAKIQDKEGIPPDQQRLIFAGKQLEDGRTLADYNIQKESTLHLVLFMQIFVKTLTGKTITLEVESSDTIDNVKAKIQDKEGIPPDQQRLIFAGKQLEDGRTLADYNIQKESTLHLVLRLRGGMQIFVKTLTGKTITLEVESSDTIDNVKAKIQDKEGIPPDQQRLIFAGKQLEDGRTLADYNIQKESTLHLVLRLRGGMQIFVKTLTGKTITLEVESSDTIDNVKAKIQDKEGIPPDQQRLIFAGKQLEDGRTLADYNIQKESTLHLVLRLRGGMQIFVKTLTGKTITLEVESSDTIDNVKAKIQDKEGIPPDQQRLIFAGKQLEDGRTLADYNIQKESTLHLVLRLRGGSF

SEQ ID NO: 14050 - protein, 473 aa, Brucella melitensis 16M
MRIGKMEMQTRYPDVKLFIDGTWRDGSRGETIEIFNPATDEVIGHIARATTADLDDALAAVDRGFEAWSKVSAFDRYKIMRRAADIFRSRGEEVARLLTMEQGKPLAEARIEAAAACDLIDWFAEEARRSYGRIVPPRQAYVMQAEVKEPVGPVAAFTPWNFPINQAVRKISAALAAGCSILLKAAEDTPAAPAELVRAFAEAGLPDGAINLVYGDPAEISAYLIPHPVIRKVSFTGSTQVGKQLAALAGLHMKRVTMELGGHAPVIIAADADVEQAIKVVSGSKFRNAGQVCISPTRFLIENSVYDQVVEGMAAYATSLKVGDGLEAGTTMGPLVNAKRVNAMERLVQDAREHKARVVTGGERIGNRGNFFEPTILADVPRDAAIMNEEPFGPVALLNRFDALDEALSEANRLNYGLAAYAFTGSSAKAARISSTVRSGMITINQLRSGPAGSALRRDQRFRLWNGRRCRRA

SEQ ID NO: 14051 - protein, 326 aa, Glycine max
MRPILMKGHERPLTFLKYNRDGDLLFSCAKDHNPTVWFADNGERLGTYRGHNGAVWTCDVSRDSVRLITGSADQTAKLWDVQSGLQLYTFNFDSPARSVDFSVGDRLAVITTDPFMELSSAIHVKRIADDPTEQSGESLLLIKGPLGRINRAIWGPLNSTIISAGEDAVIRIWDSETGKLLKESDKESGHKKTVTSLAKSADGSHFLTGSLDKSARLWDTRSLTLIKTYVTERPVNAVTMSPLLDHVVIGGGQDASAVTTTDHRAGKFEAKFFDKILQEEIGGVKGHFGPINALAFNPDGKSFSSGGEDGYVRLHHFDPDYFNIKI

SEQ ID NO: 14052 - protein, 101 aa, Glycine max
ILSDPELKNVWLGEVKGMADRIIGMRKALRENLEKLGSPLSWEHVTNQIGMFCYSGMTPEQVDRLTSEYHIYMTRNGRISMAGVTTGNVAYLANAIHDVTK

SEQ ID NO: 14053 - protein, 188 aa, Xylella fastidiosa Ann-1
MLDELNERLVDKYFVNFSVFESIPDVWAINQIFPIVPIERLNEAPTRRGVVCDLTCDSDGTVKQYVENESLDSALPLHVLRHGEAYRIGFFLVGAYQEILGDIHNLFGDTDAVEVAVDGRGYRIAQQRCGDTTDVMLDYVGYALDEVRRVYAQRITAAGMSAAESKALSDMLEAGLTGYPYLSDVPLE

SEQ ID NO: 14054 - protein, 444 aa, Xylella fastidiosa Ann-1
MTWSQDLAHKTYSIRHWADGYFEVNDAGHMVVMPLGGDGVRISLPEVVDAARAAGAKLPLLLRFPDILRHRLGKLQAAFVQAQSEWEYAGGYTAVYPIKVNQHRGVAGVLASHQGDGFGLEAGSKPELMAVLALSRQGGLIVCNGYKDREYIRLALIGRKLGLKTFIVIEKPSELRMVLEEAKTLGVLPGLGVRVRLASLGAGKWQNSGGDKAKFGLSPRQVLDVWKVLRGTEYADCLNVMHFHMGSQISNVRDIAKGMREATRYFVELSRLGAKITHVDVGGGLGIDYEGTRSRSDCSINYGLQAYASHIVQPLASACEDYDLVPPRIVTECGRAMTAHHAVLIANVTEVEAVPEGRVPGLCDDEPAVVRHMREIYGELDARPAIELFYEAQHFHAEGLAAYTLGQIDLVHRARIDDLFYAISHGVRERLSHEERVTVRCWMS

SEQ ID NO: 14055 - protein, 97 aa, Symbiobacterium thermophilum IAM 14863
MNVKPLGARVVIKPLEKEERTKSGIVLPDTAKEKPQQGKVIAVGPGRTLESGTKVELEVKEGDTVIFSKYAGTEVKIDGEEYIILDGERDILAIVQG

SEQ ID NO: 14056 - protein, 518 aa, Rigidoporus microporus
MFRFNTFSTLIPLALSLGVRAAIGPVADLHISNANISPDGFTRAAVLAGGSFPGPLITGNKGDNFQINVINDLTDADQLKTTTIHWHGFFQHGTNWADGPAFINQCPIASGNSFLYNFQVPDQAGTFWYHSHLSTQYCDGLRGAFVVYDPDDPHASLYDVGDESTVIALADWYHGLARLGPKFPTTNSTLINGLGRYDFGPSSDLAVISVQAGKRYRFRLVSISCDSNYVFSIDEHTFTVIEVDGVNHQPVDADSLQIFAGQRYSIVVNADKSEGGNYWIRASPTPGPQGFANGINSAILRYVGSDEVEPTTNQTTSTNPLVEANLVPLENPGAPGDPTPGGVDVPLNLAVAFDGTGLDFQVNGQTFIPPTVPVLLQILSGAQSATDLLPSGSVYVLPSNATVEISIPAGAVGGPHPIHLHGHTFDVVRSAGSSTYNYVNPPRRDVVSIGNAGDNVTIRFRTDNPGPWFLHCHIDWHLEAGFAVVFAEDIPNVASVNSPPQAWSDLCPIYDALDPSDH

SEQ ID NO: 14057 - protein, 89 aa, Arabidopsis thaliana
  misc_feature (40)..(40): Xaa can be any naturally occurring amino acid
  misc_feature (50)..(50): Xaa can be any naturally occurring amino acid
  misc_feature (73)..(73): Xaa can be any naturally occurring amino acid
  unsure (1)..(89): unsure at all Xaa locations
HEHDQIEYEHVGANEDDDTGAQVAPIVRLEDVAVTTGDEXHDPVLDLMSXLYLFDNDANQVNDRGAGTREVLXQKTTGKIRLVIMQSET

SEQ ID NO: 14058 - protein, 252 aa, Zea mays
  misc_feature (149)..(149): Xaa can be any naturally occurring amino acid
  misc_feature (187)..(187): Xaa can be any naturally occurring amino acid
  misc_feature (242)..(242): Xaa can be any naturally occurring amino acid
  unsure (1)..(252): unsure at all Xaa locations
MQIFVKTLTGKTITLEVESSDTIDNVKAKIQDKEGIPPDQQRLIFAGKQLEDGRTLADYNIQKESTLHLVLRLRGGMQIFVKTLTGKTITLEVESSDTIDNVKAKIQDKEGIPPDQQRLIFAGKQLEDGRTLADYNIQKESTLHLVLRXLRGGMQIFVKTLTGKTITLEVESSDTIDNVKAKIQDKXGIPPDQQRLIFAGKQLEDGRTLADYNIQKESTLHLVLRLRGGMQIFVKTLTGKTXTLEVESSDTI

SEQ ID NO: 14059 - protein, 410 aa, Cytophaga hutchinsonii
MNTTVSLSQQAIELEDKYGAHNYHPLPVVLAKGEGVHVWDVEGKHYYDFLSAYSAVNQGHCHPRIINALIEQAQTLTLTSRAFYNDKLGEAEKFICDLFGYDKALLMNSGAEANESAIKLARKWGYQVKGIPTDQAVIVAVERNFHGRTTGIISASTDPDSRNNFGPFMPGYQIIPYNDVIALEEALKNPNVCGFWVEPIQGEAGVFVPGDGYLKKAQELCTKYNVILMMDEIQTGCGRTGKLIASNHEGVHPDMLILGKALSGGTYPVSCVLTSDEIMLTIKPGEHGSTFGGNPLACAVLVESLAVLMDEGLIDNAASMGELFRDRMNALKDKCEHVTLVRGKGLLNAIIIKPTADGRTAWDVCMKLMENGLLAKPTHGDIIRFAPPLIITEEQINACCDIIEKTLLEF

SEQ ID NO: 14060 - protein, 413 aa, Rickettsia sp. BJ-90
IAELKIRGKIFKLPILKASIGEDVIDISRVSAEADCFTYDPGFMSTASCQSTITYIDGDKGILRHRGYDIKDLAEKSDFLEVAYLLIYGELPSGEQYNNFTKQVAHHSLVNERLHYLFQTFCSSSHPMAIMLAAVGSLSAFYPDLLNFKEADYELTAIRMIAKIPTIAAMSYKYSIGQPFIYPDNSLDFTENFLHMMFATPCTKYTVNPIIKNALNKIFILHADHEQNASTSTVRIAGSSGANPFACISTGIASLWGPAHGGANEAVINMLKEIGSSEYIPKYIAKAKDKNDPFRLMGFGHRVYKNYDPRAAVLKETCKEVLKELGQLDNNPLLQIAIELEAIALKDEYFIERKLYPNVDFYSGIIYKAMGIPSQMFTVLFAIARTVGWMAQWKEMHEDPEQKISRPRQLYTG

SEQ ID NO: 14061 - protein, 393 aa, Azoarcus sp. EbN1
MANREVVVLSAVRSAVGGFGGSLKDMEPAELGAVVVKEAIARSGVDAKQISFAAVGNCIPTESRYPYVARLATVQGGMSMDSVAFAVNRLCGSAQQAIVNSAQAIMLGDADFAIGGGVEVMSRGAYLLPALRSGARMGDTKAIDAMVAVLTDPFGVGHMGVTAENLTTKWNISREEQDAFALESQNRAAAAIADGRFKSQIVPITFETRKGPVVFDTDEHPRMTTMEALGKMKPAFKKDGSVTAGNASGINDAASFLVLAEAGKAAAAGHKPIARLVAYAIAGVPNDLMGEGPIPASKLALQRAGLTLDKIDVIESNEAFAAQSIAVNRGLDLDPKKTNPNGGAIALGHPVGATGGVIITKLLHELIRVNGRYGMATMCIGGGQGITTIWERV

SEQ ID NO: 14062 - protein, 140 aa, Triticum aestivum
QKKVVEVLMINSQSGPGLLFPKGGWENDETVEQAAAREAIEEAGVRGDIVQFLGFYDFKSKTHQDACCPEGMCRAAVFALHVKEELASWPEQSTRRRTWLTVPEATSQCRYQWMQEALLTGFSEWHDNWSKGGSAGGDPI

SEQ ID NO: 14063 - protein, 404 aa, Haemophilus somnus 129PT
MRVFPKSDKLEHVCYDIRGPVHQEALRLEEEGKKILKLNIGNPAPFGFEAPDEILVDILRNLPAAQGYCDSKGLYSARKAIVQYYQSKNILSATVNDVYIGNGVSELITMSLQALLNDGDEVLIPMPDYPLWTAAATLAGGKAVHYLCDEQADWFPDVADIKSKVTSRTKAIVIINPNNPTGAVYSKELLLDIVEVARQNGLMIFADEIYDKILYDNAVHHHIAALAPDLLTVTFNGLSKSYRVAGFRQGWMILNGPKHQAKGYIEGLDMLASMRLCANHPMQHAIQTALGGYQSINEFILPGGRLLEQRNKAYELINQIPGLSCTKPMGALYMFPKIDTKKFNIYDDEKMVLDLLRQEKVLLVHGRGFNWQQPDHFRIVTLPYVNQIEDALGRLARFLEYYRQ

SEQ ID NO: 14064 - protein, 315 aa, Glycine max
LHKAWEFFLPLDCPDHNHFLNSLSLLLHQACRSTFHLSLIHDHHLDFEFLPTESPSQASWIAHMMEAQSQHIKGVCLSLEEEPKEEFKVTTTHYCNWDSTATSTYQAHDQVVFGEESHTHTFGGKRGRKPGEKRRTKAEKTISLPVLRQYFAGSLKDAAKSIGVCPTTLKRICRQHGITRWPSRKIKKVGHSLKKLQLVIDSVQGAEGAIQIGSFYNSFPELSSQSSKSNNNNNSSSPTAAAAAAQSPQQPLRVKATFADEKIRFSLQPHWGFTELQLEIARRFNLNDVSNGYLVLKYLDDDGEWVVLACDGDLE

SEQ ID NO: 14065 - protein, 282 aa, Arabidopsis thaliana
MGRSPCCEKAHTNKGAWTKEEDERLVAYIKAHGEGCWRSLPKAAGLLRCGKSCRLRWINYLRPDLKRGNFTEEEDELIIKLHSLLGNKWSLIAGRLPGRTDNEIKNYWNTHIRRKLINRGIDPTSHRPIQESSASQDSKPTQLEPVTSNTINISFTSAPKVETFHESISFPGKSEKISMLTFKEEKDECPVQEKFPDLNLELRISLPDDVDRLQGHGKSTTPRCFKCSLGMINGMECRCGRMRCDVVGGSSKGSDMSNGFDFLGLAKKETTSLLGFRSLEMK

SEQ ID NO: 14066 - protein, 409 aa, Desulfovibrio vulgaris subsp. vulgaris str. Hildenborough
MKDLLNAFENKAPEIVFEWHDAETDATGWAVINSLRGGAAGGGTRMRKGLDKHEVVSLAKTMEIKFAVSGPHIGGAKSGINFDPADPRKNDVLNRWYKAVMPLLKSYYGTGGDLNVCEIKDVIPNTEEYGLWHPQEGIVNGHFHPSEELRIQKICQLRGGVTMPVVNPAYTPDPAKKYLVADLITGFGVSESVRHYYEIKGDSVAGKRVIVQGWGNVGGTAAYYLAANGAKVVGIIDRAAGLVSTEGLTFEQVKELLAKRVGNTLTGDNLLSAEDTQKLVWSVGADVFLPCAASRLVTREQVATLKDNGLGLIACGANVPFRDDNIFYGPTAEYADGVVDVIPDFIANCGMARAFNYLMSSKVDLDESAIFQDVSEVIRNALTESCAAATGKNHLLAASLKTVLHKLMH

SEQ ID NO: 14067 - protein, 384 aa, Brassica napus
FWKTIPPTEPYRVILGDVRDKLYHTRERSRQLLSNGISDIPAEATFTNVEEFLEPLELCYRSLCACGDRPIADGSLLDFLRQVSTFGLSLVKLDIRQESERHTDVLDAITKHLDGSSYRDWSEERRQEWLLAELSGKRPLFGPDLPKTEEIADVLDTLKVISELPSDCFGAYIISMATSPSDVLAVELLQRECHVKKPLRVVPLFEKLADLEAAPAAVSRLFSLDWYKNRINGKQEVMIGYSDSGKDAGRLSAAWELYKAQEELVKVAKKYGVKLTMFHGRGGTVGRGGGPTHLAILSQPPDTVNGSLRVTVQGEVIEQSFGEEHLCFRTLQRFTAATLEHGMNPPVSPKPEWRALLDAMAVVATEEYRSVVFQEPRFVEYFRL

SEQ ID NO: 14068 - protein, 491 aa, Methanocaldococcus jannaschii DSM 2661
MRRDINNFLFGERMELFEILKQKIKEKEVITPKEMAIIDDNAEFLGIQKILLMENAGKAVYEEIKDIDAEEFIIFCGTGNNGGDGFVVARHLGKGDVILIGKESEIKTYEARENFKILKNLAEFGNIRIREIKWAEEVNDIFERLKNKKAVIIDAMIGTGVKGELREPFKTIVDKINELKQINKNIFVISVDVETGHLESDLTITFHKRKTINKDNAIVKKIGIPKEAEYIVGWGDLKALRKRDSNSHKGQNGKVLIIGGSKDFYGAPILAGLAALKIVDLVGILSVGKVIDKVNHPEFIMYRVEGDYLSSQHVDYTLEIAKKYDVVVLGNGLGANNRTKAFLNEFLAKYDGKVVIDADAIKVIDYNNFEFSENYIFTPHKREFEYMGIDLDNIENIKSTIVLKGKYDIIFNANNLKINKTGNAGLTKGGTGDVLAGLIGALFAVNEAFLSACCGAFINGYAGDLLLKEKGYYYTPLDLIEKIPNVLKIFQ

SEQ ID NO: 14069 - protein, 551 aa, Shewanella sp. ANA-3
MILLSIEGMTCPSCVAHVKEALDAIEGVNKVEISYENASATITTNGGVSVTDLIGAIEALGYNPLAENTAPNAYCDNENTSNTESNRTQHVAIIGTGSGAFACAIKAAEGGAKVTLIEGADVIGGCCVNVGCVPSKILIRAAQLAQQQRNNPFAGLENHAPQLSRALLAQQQTARVEELRAAKYQNILETNPALSLLKGWAQFKNANTLIVRKNDGTEQEIFADKILIATGSTPTIPPIEGLAETPYWTSTEALFAEELPQHLVVIGSSVVALEIAQAYRRLGSEVTVLARHSLLYSEDPIIGEKLAGCFEKEGIRVLNNTQATQVTHDGNQFTLNTNAGELSCDRLLVSTGRHANTSQLNLDAVGVTTNKKGEIVVNERMETNVAGIYAAGDCSNMPQFVYVAAAAGSRAGINMTGGDAKLDLSTMPAVIFTDPQVATVGLTEEQARAQDIETDSRVLGMENVPRALANFETDGFIKLVTEKETGLLLGAQILAHEGGELIQSAALAIRNRMTVTELADQLFPYLTMVEGLKLCAQTFNKDVKELSCCAG

SEQ ID NO: 14070 - protein, 339 aa, Streptomyces coelicolor A3(2)
MAPTARTPTARTRDDRRATTRTARLRTRIPEPDEEPDLLGQYLTQIGATPLLTAEDEVRLATRIEAGVRAREELETADTGEPAPTPRRRRTLEETVHDGQEAKDHMVRANLRLVVSMAKRHAHRGLPLLDVIQEGNLGLIRAVEKFDHTKGFKFSTYATWWIRQAIERGLATHARTVRLPVHVVEQLQKLAKVERKLRAGLDREPTTEEVAAESGIDVDKVVWLRRVGRDAVSLDTPVDETGDTVVGDLIPDTEVLRAPEVAEFQALAAELREAVGTLAPRESLILSLRYGLHDGRPRTLQQVAQHVGLTRERVRQLEKESLAHLRAPENRERLLDWAS

SEQ ID NO: 14071 - protein, 488 aa, Trichodesmium erythraeum IMS101
MTSKLKFRINKTKNRRLLSAKYSRFLEPTKLINYLSRTKWFSPTKLACIPLLCLIIALWAGAANAQDQELTPEYIKGVLDAIWILVASVFVIFMNAGFGMLESGFCRQKNTVNILAKNLIVFAIATLVYWSIGFSIMFAGDHPFIGAGGFFLTGESSTYGLNPFPAGLPVPVFFLFQAAFAATAATIVSGAVAERVEFLAFLLFSILITGISYPITGHWIWGSGGWLGAMGFKDFAGSTAVHSVGGWAALVGAYILRPRRGKYDEKNQPQAIPGHNMGFATLGCLILWIGWFGFNPGSQLAADENVVYIAVTTNLAAAAGGATAAITSWSKDKKPDLSMIINGVLAGLVGITAGCDGVSYLEAVIIGSIAGMIVVFSVSFFDKLTIDDPVGAISVHLICGIWGTLAVGIFVEDTSIITQFIGIISVGLFTVILSSIFWLALRATVGIRVHPEQEYKGLDISEHGMEAYHGFVKEPDSLATGVSHDHIQ

SEQ ID NO: 14072 - protein, 254 aa, Salmonella typhimurium LT2
MSQNTLKVHDLNEDAEFDENGVEAFDEKALSEEEPSDNDLAEEELLSQGATQRVLDATQLYLGEIGYSPLLTAEEEVYFARRALRGDVASRRRMIESNLRLVVKIARRYGNRGLALLDLIEEGNLGLIRAVEKFDPERGFRFSTYATWWIRQTIERAIMNQTRTIRLPIHIVKELNVYLRTARELSHKLDHEPSAEEIAEQLDKPVDDVSRMLRLNERITSVDTRWAVIPKKRCWTSWPMKKRTVRKTPRKMTI

SEQ ID NO: 14073 - protein, 332 aa, Streptomyces coelicolor A3(2)
MATRAVARRKSAAGETSGSATSVRANGGELADRDLVGMYLDEIARTPLLDAAKEVELSQTIEAGVFARQVLEGYEETGADATREELQALIDESERAKDVFIRSNLRLVVAVARRYPRSGLPLLDLIQEGNAGLVRAVEKFDYRKGFKFSTYATWWIRQAITRSIADQSRTIRLPVHLVEELGRIRRVQREFNREHGREPEPAEIAAELGSTPERVHDVLDWARDPVSLNMSVDDEGETQFGDLLEDTSAVSPEQSVLTLLRSEELDDLIGRLDPRTASIIKMRYGIDDGRERTLTEVGKEHGLTRERIRQIEKHALLELKKLARDTGFEAAA

SEQ ID NO: 14074 - protein, 532 aa, Archaeoglobus fulgidus DSM 4304
MKYIVVTGGVMSGLGKGITAASIGRLFVDMGYRVIPIKIDPYINIDAGTMNPFQHGEVYVLKDGTEVDLDLGHYERFIGEEVTGDHNITTGKIYKRVIEKERKGDYLGQTVQIIPHVTDEIKSWIRRVAKESNAEICLVEIGGTVGDIEGMPFLEAIRQMHNEEKEEDFALVHVTLVPLDAGGEQKTKPTQHSVKELRELGLHPDVIVGRCSERLKPATKKKIALFCDVPEEAVISNEDAEDIYEVPLIFKREKLDEYLMRKLNLRAKESRKEWEEMVKRMKTLYEEASIAIVGKYVDVRDAYLSIKEALKHGGIEAGCKVNIVWVDSEDLENVDDFTLDVDGILVPGGFGARGAEGKIRAIEYARENGVPFLGICFGFQLAVIEFARNVVGFSEANSTELDENTPHPVIDLLPEQKGIDEMGGTMRLGDIEVTIKPGTIAHKLYGSEKVVERHRHRYEVNPEYIEKIESKGLVFSAYSDGGRRMEIAELPDHPFFFATQFHPEFKSRPYRPSPPFVGFVRAALKYRREEEI

SEQ ID NO: 14075 - protein, 228 aa, Salmonella typhimurium LT2
MSQNTLKVHDLNEDAEFDENGVEAFDEKALSEEEPSDNDLAEEELLSQGATQRVLDATQLYLGEIGYSPLLTAEEEVYFARRALRGDVASRRRMIESNLRLVVKIARRYGNRGLALLDLIEEGNLGLIRAVEKFDPERGFRFSTYATWWIRQTIERAIMNQTRTIRLPIHIVKELNVYLRTARELSHKLDHEPSAEEIAEQLDKPVDDVSRMLRLNERITSVDTPAGR

SEQ ID NO: 14076 - protein, 463 aa, Triticum aestivum
MATEGLRMLLGDASPWSIAGAAAAVALLWLAAWILEWAWWTPRRLGRALRAQGLRGTRYRLFTGDVPENARLSREARLQPMPRGSHDITPRVQPMSCNVIKEHGKMSFTWFGPTPRVTIPDPELVREILSNKFGHYGKQKSSRFGKLLADGLANHEGDKWAKHRRILNPAFHHEKIHASRPVFSTCCEEMITRWENSMPTGGLCEIDVFPEFQNLTGDVISRTAFGSNYQEGMKIFQLQGELCERLTPPPQTLFIPGYWFLPTKNNRRMRAIDREICMILRGIMGKKERAIKNNEASSDDLLGLLWESNMQQANGKANLGMSIEDIIEECKLFYLAGMETTSVWLTWTLIVLSMHPEWQEQAREEVLHQFGRTRPDFENLSRLKIVTMIWYEVLTLYPPAIFLARRTYKAMELGGIRYPAGVNLMWPLIFIHHDPDIWGKDASEFNPQRLADGISNAAKHPAA

SEQ ID NO: 14077 - protein, 442 aa, Streptomyces coelicolor A3(2)
MVSAAEPKRTRKSVAAKSPAKRTATKAVAANPVTSRKATAPAAPAAPATEPAAVEEEAPAKKAAAKKTTAKKATAKKTTAKKAAAKKTTAKKEDGELLEDEATEEPKAATEEPEGTENAGFVLSDEDEDDAPAQQVAAAGATADPVKDYLKQIGKVPLLNAEQEVELAKRIEAGLFAEDKLANSDKLAPKLKRELEIIAEDGRRAKNHLLEANLRLVVSLAKRYTGRGMLFLDLIQEGNLGLIRAVEKFDYTKGYKFSTYATWWIRQAITRAMADQARTIRIPVHMVEVINKLARVQRQMLQDLGREPTPEELAKELDMTPEKVIEVQKYGREPISLHTPLGEDGDSEFGDLIEDSEAVVPADAVSFTLLQEQLHSVLDTLSEREAGVVSMRFGLTDGQPKTLDEIGKVYGVTRERIRQIESKTMSKLRHPSRSQVLRDYLD

SEQ ID NO: 14078 - protein, 326 aa, Salmonella typhimurium LT2
MSQNTLKVHDLNEDAEFDENGVEAFDEKALSEEEPSDNDLAEEELLSQGATQRVLDATQLYLGEIGYSPLLTAEEEVYFARRALRGDVASRRRMIESNLRLVVKIARRYGNRGLALLDLIEEGNLGLIRAVEKFDPERGFRFSTYATWWIRQTIERAIMNQTRTIHIVKELNVYLRTARELSHKLDHEPSAEEIAEQLDKPVDDVSRMLRLNERITSVDTPLGGDSEKALLDILADEKENGPEDTTQDDDMKQSIVKWLFELNAKQREVLARRFGLLGYEAATLEDVGREIGLTRERVRQIQVEGLRRLREILQTQGLNIEALFRE

SEQ ID NO: 14079 - protein, 324 aa, Oryza sativa (japonica cultivar-group)
MLQMKRCTLSQGDDNFQVDKTLRYSGPDLPEDIWHHIHSLMPLRDAARAACVSRAFLCNWKCHPNLIFTEETLSLEQDARRKGGKARAFASKVDHILKNHSGIGVKRLKLVICYSGKINVSSLNSWLQIAITPGIEEITLLLPTKYEGRYSFPLSLLCNRSGSSIQYIHLMYCNLRPTVGLGCFTNLTKLFLWFLCITDDELVYLLSKSFALEELDLRYCSEIICLTIPCLLERVGCLTVFECSNLQMINSNAPKVSTFTFSGDPIELSLGESSQVKKLDMSCSDVPNFIYYSITKLPYIVPNLTSLTLSSVNELYILDIFVMA

SEQ ID NO: 14080 - protein, 330 aa, Salmonella typhimurium LT2
MSQNTLKVHDLNEDAEFDENGVEAFDEKALSEEEPSDNDLAEEELLSQGATQRVLDATQLYLGEIGYSPLLTAEEEVYFARRALRGDVASRRRMIESNLRLVVKIARRYGNRGLALLDLIEEGNLGLIRAVQKFDPERGFRFSTYATWWIRQTIERAIMNQTRTIRLPIHIVKELNVYLRTARELSHKLDHEPSAEEIAEQLDKPVDDVSRMLRLNERITSVDTPLGGDSEKALLDILADEKENGPEDTTQDDDMKQSIVKWLFELNAKQREVLARRFGLLGYEAATLEDVGREIGLTRERVRQIQVEGLRRLREILQTQGLNIEALFRE

SEQ ID NO: 14081 - protein, 218 aa, Brucella melitensis 16M
MSFFDSYRKKMQMPSKEEVLPGRVQPIPTAAAHFVSGHPLKGPWPDGMKQVLFGMGCFWGAERLFWQVPGVYVTAVGYAGGITPNPTYEETCTGLTGHAEVVLVVYDPKVVTLNELLALFWEEHDPTQGMRQGNDIGTTYRSVIYTFNAVDRAVAEKSRDAYSQALASRGLGPVTTQITDAPDFYYAEDYHQQYLAKNPDGYCGLRGTGVSCPIPLAH

SEQ ID NO: 14082 - protein, 348 aa, Glycine max
  misc_feature (78)..(78): Xaa can be any naturally occurring amino acid
  unsure (1)..(348): unsure at all Xaa locations
MVGPNFMDEIDCGSFFDHIDDLLDFPVEDVDGGAATLPSVSAGNSNSLASIWPSESDSFPASDSVFSGNSASDLSADXAPPRYEDIVQLEWLSNFVEDSFCGGSLTMNKVEEPSCTTKEDSVNTQFHTSSPVSVLESSSSCSGGKTLPPRSPEIYIPVPCGRARSKRPRPATFNPRPAMNLISPASSFVGENMQPNVISSKASSDSENFAESQLVPKMPKLASGEPKKKKKVKVPLPVAPADNNQNASQPVRKCMHCEITKTPQWRAGPMGPKTLCNACGVRYKSGRLFPEYRPAASPTFCPSVHSNSHKKVLEMRCRGFDKSGFAINSAASPELIPNTNSSLTLEYM

SEQ ID NO: 14083 - protein, 330 aa, Salmonella typhimurium LT2
MSQNTLKVHDLNEDAEFDENGVEAFDEKALSEDEPSDNDLAEEELLSQGATQRVLDATQLYLGEIGYSPLLTAEEEVYFARRALRGDVASRRRMIESNLRLVVKIARRYGNRGLALLDLIEEGNLGLIRAVEKFDPERGFRFSTYATWWIRQTIERAIMNQTRTIRLPIHIVKELNVYLRTARELSHKLDHEPSAEEIAEQLDKPVDDVSRMLRLNERITSVDTPLGGDSEKALLDILADEKENGPEDTTQDDDMKQSIVKWLFELNAKQREVLARRFGLLGYEAATLEDVGREIGLTRERVRQIQVEGLRRLREILQTQGLNIEALFRE

SEQ ID NO: 14084 - protein, 532 aa, Brucella melitensis 16M
MRHRRMSNLSAVFRLMRAGWILTREGVISALPVEGLSGLPALGHRIAGFLARPRARQMERSERMSRAMNKLGPSYVKLGQFLATRPDIVGHDVAADLELLQDRLDFFPQAGAVAAIEGSLGRKIDDLYVRFDAPIAAASMAQVHPAEVMKDGAPQKVAVKVIRPGVRQRFARDLESFFMVARMQERHMPFTRRLRPVQVVETLSQTTRIEMDLRLEAAALSEIAENIKGDEGFRVPKVDWERTGRDVLTLEWIDGIKMSDIPALEAAGFDLKKLAETLIQSFLRHTLRDGFFHADMHPGNLFVDHQGLVVAVDFGITGRLDKQQRRFLAEILYGFITRDYMRVAEVHFEAGYVPYTHDVASFAQAIRAIGEPIHDQPAETISMAKLLTLLFEVTELFDMETRPELLMLQKTMVVVEGVSRTLDPHFNMWKAAEPVVGDWIRKNLGPQGMVLDAKESAYALLHFTRKTPELLQRIDRISVALDTMAANGLRFDDATAEAIGRAEAQHSRWGRIAQVVIAVSMAAIAIKLYIWL

SEQ ID NO: 14085 - protein, 277 aa, Triticum aestivum
ISFLILNLKAGSPNTNKSQTPPTQKFPKIIRTQTEIPTPIRLPPPVSPPSSIPNEARVSARRTAMGSSKGSPPPSAAGPSSAGNAPAPVGPVPRPPEVAPFLTKVYDMVSDAATDKVMSWTDAGNSFVIWDAHAFERDLLSRHFKHRNFSSFIRQLNTYGFRKVDPDRWEWANEGFLRDQKHLLKIIKRKKRPQEAGRELEKAPVKAAPGTENIEIGRYGGLVKEVETLKRGGGVLMQQLVDLTHYQQSSNLEVQSLIQRLQVMEQNQKQMMALLSI

SEQ ID NO: 14086 - protein, 199 aa, Citrus sinensis
TRVNVLFKHIQDMLSGDTAVIAETGDSWFNCQKLRLPENCGYEFQMQYGSIGWSVGATLGYAQAAKDKRVIACIGDGSFQVTAQEISTMIRCGQRSIIFLINNGGYTIEVEIHDGPYNVIKNWDYTGLVNAIHNGEGKCWTAKVRSEDELTEAMKTATGEQKDSLCFIEVFVHKDDTSKELLEWGSRVSAANSRPPNPQ

SEQ ID NO: 14087 - protein, 273 aa, Zea mays
MERAAPVRSSHTSTAGLLAWPQPDGAASQAPRRPNQPTEEFRKVVFGGQVTEEADGLNKTKMRTTASAPKSKETTGIGMFKAESAAAAVTTASRDRQASQITFSQDGTIPPRKPTSVAGVARQRELSHTVESSGDGKMKRQVSNAKSKELSGHNIFADHEDPSPNRSSSSAAALAHVKNANVSSFSFGKADMDSTVKTAKKKGSSNKSTDLMNGKAISERDSAPAGKQPLNRAKPKGLSGSSIFADGKASTTGDHAGRRTRQPPGGDSSILLG

SEQ ID NO: 14088 - protein, 471 aa, Anaplasma marginale str. St. Maries
MGVCDYDVAVIGAGPGGYKCALKAAKLGLKVASIDNNSLLGGTCLRVGCIPSKALLDYSYKYHAAKDIFKDFGVTASNVKFDLRKMFEVRDREINALGSGIGSLFSSAGVERLCGAATVTRAMGDGFEIVVRREGAPTDDELSAKNVVLATGSLPASLPGIDIDEVRILSSDGALGMDVPGKLLVIGGGAIGLEMSSVWSRLGAEVTVVEYADCIAPGFDSEVSKALLSHLKKQGINFMLSHKVVSVSEKKGGKLVVSCEALSSGAVSAVEVDKVLVAVGRRPNVGKTVAVDGLVLDDRGFVSVDSRYETSIKGIFAIGDVIGGAMLAHKAEMEGHAVAELVAGHDSNVDYGVIPAVVYTHPAVASVGRSEDYVKSVGYDYKVGKSNFAANGRARVTGEGEGFVKVVACKRTDTILGVHIVGTYADTMINEAVVALGYRASSKDICHICHSHPDVNEVFRDACEVACSRKG

SEQ ID NO: 14089 - protein, 409 aa, Corynebacterium glutamicum ATCC 13032
MVKGVKGRPNVLAIVLAGGEGKRLFPLTEDRAKPAVPFGGTYRLIDFVLSNLVNSGFLKIAVLTQYKSHSLDRHISLSWNVSGPTGQYIASVPAQQRLGKRWFTGSADAILQSLNLISDEKPDYVIVFGADHVYRMDPSQMLDEHIASGRAVSVAGIRVPREEATAFGCIQSDVDGNITEFLEKPADPPGTPDDPDMTYASMGNYIFTTEALIQALKDDENNENSDHDMGGDIIPYFVSRNDAHVYDFSGNIVPGATERDKGYWRDVGTIDAFYECHMDLISVHPIFNLYNSEWPIHTTSEGNLPPAKFVRGGIAQSSMVSSGSIISAGTVRNSVLSNNVVVEEGATVEGAVLMPGVRIGKGAVVRHAILDKNVVVRDGELIGVDQVRDAQRFKVSAGGVVVVGKNQVV

SEQ ID NO: 14090 - protein, 376 aa, Bacillus cereus ATCC 14579
MAQKQKCVAMLLAGGKGSRLSALTKNLAKPAVPFGGKYRIIDFTLSNCANSGIETVGILTQYQPLELHNYIGIGNAWDLDRVSGGVTVLPPYAESSGVKWYTGTASAIYQNLNYLSQYEPEYVLILSGDHIYKMDYSKMLDYHIEKESDVSISVIEVPWDEASRFGIMNTNEEMEIVEFEEKPQFPRSNLASMGIYIFNWSILKEYLEMDARNPESSNDFGKDVLPLLLDEGKKLMAYPFEGYWKDVGTVKSLWEANMDLLRDETSLNLNDRNWRIYSVNPNEPPQYIAEKAKVEESLINEGCVIEGDVKHSVLFQGVTVEEGSMVIDSVVMPGAKIGKNVVIERAIVGSEMVIEDGTIIRPEKNVDDVVLIAEGK

SEQ ID NO: 14091 - protein, 165 aa, Zea mays
MALAEADDGAVVFGEEQEALVLKSWAVMKKDAANLGLRFFLKVFEIAPSAKQMFSFLRDSDVPLEKNPKLKTHAMSVFVMTCEAAAQLRKAGKVTVRETTLKRLGATHLRYGVADGHFEVTGFALLETIKEALPADMWSLEMKKAWAEAYSQLVAAIKREMKPDA

SEQ ID NO: 14092 - protein, 398 aa, Mesorhizobium sp. BNC1
MVVSTQNPIFIPGPTNIPEVLRKAVDMPTIDHRSPLFGKILHPAIEGVKKVLKTKQAKLFVFPSTGTGGWETAITNVLSPGDKVLATRNGMFSHRWIDMCQRHGLDVIVVPQDWGESVPADRFEEILAADKAHKIKAVLATHNETATGVRSDIAAVRHAMDAAAHPALLLVDGVSSIASMDFRMDEWGVDIAVTGSQKGFMLPPGLAILGFSPKALEAVEAAKLPRTFFDIRDMARSYANNGYPYTPPVGLLNGLKIASEMLLEEGMENVFARHHRIAEGIRQAVAAWGLRLCAVRPELYSDTVSAIRVPDGFDGNRVVAHALNVYGVAFGTGLGDVAGKVFRIGHLGSLTDVMALSGIATAEMVLVDLGLPIKLGSGVAAAQEHYRLSAGNAQKRAA

SEQ ID NO: 14093 - protein, 310 aa, Debaryomyces hansenii CBS767
MDSTLGSDSLEPEKRTTIDSEGLNHRNPERFEGENRLSPDLEAQGIEEEALAVNPAREPLYKFTIFFTEDEKRVSIYGAEFFGTYVFLLSAYLVASVANLQAIAAEDGFYAPRVYNISFGFGISLLVVAACTSNFSGGHLNPAVVWGLFLNGNISMFRFLLESLVQVIAGMAAAGTASAMYPGPVTFANAKDASVSVSRGLFLEAFGVALLVFTVLFTAIEVSPFGGMAYLPIGLSLFLGHMICVPTTGAGLNPARSFGPAIAARDFPGYHWIYWLGPVIGGAVAVVAYKMIKLGHRGTILQEARMKSNS

SEQ ID NO: 14094 - protein, 454 aa, Desulfitobacterium hafniense DCB-2
MKNFSISEVMDSFGVNKFTWSIFFFLGLAMVFDGYDYMIVSYTMPQISAEWGLSAVEKGSLSSWSLFGLIIGGAISGIVSDKIGRKRTLVYSIAIYSLLNIPIFFAPSFGFYALFRVLAGLGLGACIPVVTTIFSESTPTNRRALFITFGMAWMIVGWVLAGLVATYLVPRVGWRWCYLVGGFPFIYSIFLHFKMKESVYWLANKGRNEDAVKRLQEIEKVATGKVTNWDPNALVVPPKSKVVGPKALFSKTYRMTTAGVWITYFCGCFTVYGINAWLPSLMLEKGLQLSSAYGLSIAQNAAAVIANCSTGFVAEVIGRRKNLIGSYGLGIVAILIMAFVGSSFWAILAANIFLGFAINYSITAVQPLMAEGYPTDIRNTGVSWCQAFGRLGGALAPIVAGMIIGLNLGYSSAFLFYVVPLLFGLLAAFLLIRNETKGKSIDQIQEENVLKAGS

SEQ ID NO: 14095 - protein, 469 aa, Geobacter metallireducens GS-15
MPDDTHDLVILGSGSTAFAAALRAQSYGTRVLMVEKGVPGGTCINWGCVPSKTLIHAALFYQEGKLGARLGLGECGGTVVLERLMARKDQVVGHLRQTKYLDILQDVPGLQLVKGTGRFLGPDRLEVGDREIRSERFLVAVGGDPRVPRIPGLESTPFLTSRGTLLLKTIPQSLVIIGGGVIAVEMGQMFQRLGAKVTILEHGPRILGPVEPEPALAVRDFLRAEGMKIVCRTTICLAAQDGAGVRVEAERDGERVSFTAEKLLVATGTAPATNGIGLELAGVETDPRGFVTVDERMRTTAPGIWAAGDCTGGMMIATVGAREGIVAVDDMLNPGCGCSMDFLSAPMAIFTDPEVGMVGHTEEGAKAAGFDVVVNVMPVAAIPKAHVTGHTAGVIKMVADKATGRLLGVHLACHRGADIINEAALAIRFRATVEDLANALHVYPSMGEGLRLCAQGFSRDISRLSCCAE

SEQ ID NO: 14096 - protein, 391 aa, Vibrio parahaemolyticus RIMD 2210633
MTNQTRNVVVVDCLRTPMGRSKGGAFRHTRAEDLSAHLMKGILARNPQVNPSEIEDIYWGCVQQTLEQGFNIARNAALLAGLPIEIGAVTVNRLCGSSMQALHDGTRAIMTGDAEICLIGGVEHMGHVPMNHGVDFHPGMSKNVAKAAGMMGLTAEMLGKLHGISREQQDEFAARSHARAHAATLEGRFKNEILPTEGHAADGTLFQLDYDEVIRPETTVEGLSQLRPVFDPANGTVTAGTSSALSDGASAMLIMSEEKANELGLKIRARIKGMAIAGCDPSIMGYGPVPATQKALKRAGLAIEDMDVVELNEAFAAQSLPCAKDLGLLEVMDEKVNLNGGAIALGHPLGCSGARISTTLINLMEAKDAKYGLATMCIGLGQGIATVFERP

SEQ ID NO: 14097 - protein, 668 aa, Geobacter metallireducens GS-15
MSAPVLTSEDARLGADTLRMLAVDAVEAANSGHPGLPMGAADYAFLLWHSHLRFAPTDPEWAGRDRFVLSAGHGSMLLYSLLHLFGFDLPLDELKRFRQWGSRTPGHPEFGHTPGVEVTTGPLGQGFAMGVGMALAARMASARFADERFDPCGHQVYAIVSDGDLMEGISQEAASLAGHLKLGNIVYIYDDNRITIEGSTDLAFSDDTAGRFTALGWQVQKVDGHDIGQVGEALWRAKVERDRPSLIIARTHIAQGSPGKHDTAAAHGSPLGAEEAAATRRNLGWPDELFHVPERVREICDKRREELVAAYAAWEDEFRRWRRRNPDKARLWDGMWQKAIPKDLETRLLAAVEGSTGATRALSGKVIQAAAAAMPALAGGSADLEPSTNTWIAESPSVLAGSYRGRNLHFGIREHAMAAVMNGMARYGCFIPYGATFLVFSDYCRPSIRLAALMKQQAIYVFTHDSIFLGEDGPTHQPVEQLSSLRLIPNLRVIRPADGPETALAWNAALRRADGPTALILTRQKVPAIMREEPLDAKTFAKGGYAVRQDGATPDVVIMASGSEVGLALAAADILAGEGVTARVVSVPSLETFLAQPEAYRRRLLPGRVPRVAVEAGHGGLWWRLLGPGGLFIGMEGFGASAPEKVLAEQFGFTPPQVAQRVRELVGR

SEQ ID NO: 14098 - protein, 242 aa, Salmonella typhimurium LT2
MSQNTLKVHDLNEDAEFDENGVEAFDEKALSEEEPSDNDLAEEELLSQGATQRVLDATQLYLGEIGYSPLLTAEEEVYFARRALRGDVASRRRMIESNLRLVVKIARRYGNRGLALLDLIEEGNLGLIRAVEKFDPERGFRFSTYATWWIRQTIERAIMNQTRTIRLPIHIVKELNVYLRTARELSHKLDHEPSAEEIAEQLDKPVDDVSRMLRLNERITSVDTPLGGDSEKALLDILADEK

SEQ ID NO: 14099 - protein, 195 aa, GIBBERELLA ZEAE PH-1
MAVVATIKCVVVGDGAVGKTCLLISYTTNKFPSEYVPTVFDNYAVTVMIGDEPYTLGLFDTAGQEDYDRLRPLSYPQTDVFLVCFSVTSPASFENVREKWFPEVRHHCPGVPCLIVGTQVDLRDDPSVREKLSKQKMQPVRREDGERMAKDLGAVKYVECSALTQYKLKDVFDEAIVAALEPPAPKKKSHKCLVL

SEQ ID NO: 14100 - protein, 494 aa, Vibrio parahaemolyticus RIMD 2210633
MANYFNTLNLREQLDQLGRCRFMDREEFVSEADYLKGKKVVIVGCGAQGLNQGLNMRDSGLDVSYALRQAAIDEQRQSFKNAKDNGFEVGSYETLIPQADLVVNLTPDKQHTNVVETVMPLMKEGAALGYSHGFNVVEEGMQIRKDLTVVMVAPKCPGTEVREEYKRGFGVPTLIAVHPENDPKGEGWDIAKAWAAATGGHRAGCLESSFVAEVKSDLMGEQTILCGMLQAGSIVCYEKMIAEGIDPGYAGKLLQYGWETITEALKFGGITHMMDRLSNPAKIKAFELSEELKDLMRPLYNKHMDDIISGHFSSTMMADWANDDKNLLGWRAETGETAFENYPETDVEISEQEYFDNGILMVAMVRAGVELAFEAMTASGIIDESAYYESLHELPLIANTIARKRLYEMNVVISDTAEYGNYLFANVATPLLREKFMPSVGTDVIGKGLGETSNQVDNATLIAVNETIRNHPVEYIGEELRGYMTDMKRIAVGG

SEQ ID NO: 14101 - protein, 371 aa, Oryza sativa
MDLSNSSPVITDPVAISQQLLGGLPSNLMQFSVMPGGYSSSGMNVGVSRLKIEEVLVNGLLDAMKSSSPRRRLNVAFGEDNSSEEEDPAYSAWMAKCPSALASFKQIVASAQGKKIAVFLDYDGTLSPIVDDPDKAVMSPVMRAAVRNVAKYFPTAIVSGRSRNKVFEFVKLKELYYAGSHGMDIMAPSANHEHSAEKSKQANLFQPAHDFLPMIDEVTKSLLQVVSGIEGATVENNKFCVSVHYRNVAEKDWKLVARLVNEVLEAFPRLKVTNGRMVLEVRPVIDWDKGKAVEFLLQSLGLNDSENVIPIYIGDDRTDEDAFKVLRQRNCGYGILVSQVPKETEAFYSLRDPSEVMEFLNFLVRWKKHSV

SEQ ID NO: 14102 - protein, 596 aa, Arabidopsis thaliana
MASTFTATSSLGSLLAPNAIKLSSATSISSSSFGRRHNVCVRRSRPAIVCAAKELHFNKDGTTIRKLQTGVNKLADLVGVTLGPKGRNVVLESKYGSPRIVNDGVTVAREVELEDPVENIGAKLVRQAAAKTNDLAGDGTTTSVVLAQGFIAEGVKVVAAGANPVLITRGIEKTAKALVNELKLMSKEVEDSELADVAAVSAGNNHEVGSMIAEAMSKVGRKGVVTLEEGKSAENNLYVVEGMQFDRGYISPYFVTDSEKMSVEYDNCKLLLVDKKVTNARDLVGVLEDAIRGGYPILIIAEDIEQEALATLVVNKLRGTLKIAALKAPGFGERKSQYLDDIAILTGATVIREEVGLSLDKAGKEVLGNASKVVLTKEMTTIVGDGTTQEAVNKRVVQIRNLIEQAEQDYEKEKLNERIAKLSGGVAVIQVGAQTETELKEKKLRVEDALNATKAAVEEGIVVGGGCTLLRLASKVDAIKDTLENDEEKVGAEIVKRALSYPLKLIAKNAGVNGSVVSEKVLANDNVKFGYNAATGKYEDLMAAGIIDPTKVVRCCLEHAASVAKTFLMSDCVVVEIPEPEPVPAGNPMDNSGYGY

SEQ ID NO: 14103 - protein, 552 aa, Ehrlichia canis str. Jake
MANVVVTGEQLDKAIREVVHILEDAVGCTAGPKGLTVAISKPYGAPEITKDGYKVIKSIKPEDPLALAIANIIAQSASQCNDKVGDGTTTCSILTAKVIEEVSKAKAAGADIVCIKDGVLKAKEAVLDALMSMKREVLSEEEIAQVATISANGDKNIGVKIAQCVQEVGKDGVITVEESKGFKELDVEKTDGMQFDRGYLSPYFVTNSEKMLVEFENPYILLTEKKLNIIQPILPILENVARSGRPLLIIAEDVEGEALSTLVLNKLRGGLHVAAVKAPGFGDRRKDMLGDIAILTGAKHVISDDLAIKMEDLTLAELGTAKNIRITKDTTTIIGSVDNSSDNVQSRINQIKVQIESSTSDYDKEKLRERLAKLSGGVAVLKVGGSSEVEVKERKDRVEDALHATRAAVEEGVVPGGGAALLYTLSVLENLKSKNDDEQLGINIIKRALQAPIKRIIRNSGSENAPCVIAHLLKQNDKELIFNVDTMNFANAFTSGVIDPLKVVRIAFDFAVSLAAVFMTLNAIVVDVPSKDDAGAAGGAGGMGGMGGMGGF

SEQ ID NO: 14104 - protein, 265 aa, Trichodesmium erythraeum IMS101
MISVSDCFESLRNNSSQCALIPFITAGDPDLETTAKALEVLDRSGANMIELGVPYSDPLADGPVIQAAATRSLNRGTTLESVLEVVQTVSPKLRSPIILFTYYNPILYRGVENFLKKIYDVGARGLVVPDLPLEEADILLEPAKDIGIELTLLVAPTSPKERIKAIAHQSQGFIYLVSVTGVTGMRAQMQTRVEDLLAQMREVTDKPIGVGFGISQPEQALQVKKWGSDAVIVGSAVVKRLAEGSPDEGLKAIGEFCQNLKAAIN

SEQ ID NO: 14105 - protein, 94 aa, Ehrlichia canis str. Jake
MNLSMLHDNVLIEALEEGNSNSPIQLPDSAKKKPTKGKVVAVGPGVYNSNGNILPMNIKVGEVVFYRQWAGNEIEFNDKKYIVMKESDIIAKEA

SEQ ID NO: 14106 - protein, 478 aa, GIBBERELLA ZEAE PH-1
MATYYDAIIIGSGQSGNPVAKAFANAGHKTAVIERTALGGTCVNVGCTPTKTMIASGRAAYMARRGKDYGVHAGNGNFEIDMARVRQRKRAIVEQWNSGSVRGLNAAGVDVIMGEGSFVGDKKLKVVLNDGGEKEVSADKIFINVGERPLRPDISGLDGVEPARVLDSTSIMELDAVPEHLVVLGGGYIGLEFGQLFRRLGSEVTVIQRAKQLVPHEDPDVAECLYDILQQDGLTVYLSSTVNSVSASTDSKMPFTVNVQTANGQTDVAGSHILLAAGRVPNTDRLNLSEVGIKTTSKGHVVVDDKLQTSASNVYALGDCHGGAAFTHISYDDSRIIRTNLLPKTMASTTPAMPTTQSSTSRVLTPYVMYTDPQLGHVGLHARDLFNSKREVKIAKMPMSYVARALETAEPRGMMKATVEAKTGEILGFTCLGLEGGEIMSIVQTAMMGNLKWWDLEAAVYAHPTLAESLNNLWGHLE

SEQ ID NO: 14107 - protein, 157 aa, Arabidopsis thaliana
MSLIPSIFGGRRTNVFDPFSLDVFDPFEGFLTPSGLANAPAMDVAAFTNAKVDWRETPEAHVFKADLPGLRKEEVKVEVEDGNILQISGERSNENEEKNDKWHRVERSSGKFTRRFRLPENAKMEEIKASMENGVLSVTVPKVPEKKPEVKSIDISG

SEQ ID NO: 14108 - protein, 330 aa, Salmonella typhimurium LT2
MSQNTLKVHDLNEDAEFDENGVEAFDEKALSEEEPSDNDLAEEELLSQGATQRVLDATQLYLGEIGYSPLLTAEEEVYFARRALRGDVASRRRMIESNLRLVVKIARRYGNRGLALLDLIEEGNLGLIRAVEKFDPERGFRFSTYATWWIRQTIERAIMNQTRTIRLPIHIVKELNVYLRTARELSHKLDHEPSAEEIAEQLDKPVDDVSRMLRLNERITSVDTPLGGDSEKALLDILADEKENGPEDTTQDDDMKQSIVKWLFELNAKQREVLARRFGLLGYEAATLEDVGREIGLTCERVRQIQVEGLRRLREILQTQGLNIEALFRE

SEQ ID NO: 14109 - protein, 409 aa, GIBBERELLA ZEAE PH-1
MLSRALRLPRAVPMRTKLAAPAYTAVRSVTTDAASASLSHSVPKADDEPFSVNLSDESFETYELDPPPYTLEVTKKELKDMYREMVVTRQMEMAADRLYKEKKIRGFCHLSTGQEAVAVGIEHAITKEDDIITAYRCHGYALLRGASVRSIIGELLGRREGISYGKGGSMHMFAKGFYGGNGIVGAQVPVGAGLAFAHKYNNNKNASIILYGDGASNQGQVFEAFNMAKLWNLPALFGCENNKYGMGTAAARSSALTDYYKRGQYIPGLKVNGMDVLAVKAAVKYGKEYTAADKGPLVLEYVTYRYGGHSMSDPGTTYRTREEIQRMRSTNDPIAGLKQKILDWEITTEEELKKIDKEARAHVNEEVAAAEAMAAPEAKPEILFEDIYVRGSEPEYIRGRIPEENHYFQ

SEQ ID NO: 14110 - protein, 557 aa, Porphyromonas gingivalis W83
MIEQNFIRLYQDSFREHWALPALTNYDTKESYTYGEMAADIARRHLLFERIGLKPGDKVALLGKDSAEWCMAFMSVITYGAIIVPVLPDFNAADAASIVTHSDAKYLFVSDKIWETMDPSQLLLLCGAVSIRDYTVFLDRTEGGLLSQEVEGLSRSFSEHYPSGFTAEDIRYAEVSNDDLILLNYTSGTTGFSKGVMLRANNLAGNVTYVKDRDIMFRGETILCFLPLAHTYSCAFNFLTPLTIGVHVYILGKIPSPLTLIKAFADVRPSFVIMVPLIIEKLYHKAIAPKIKTPLIKFLLRLPVLKKVIHKSIRSKLIESFGGNFRQIIIGGAALNDEVAHFLYRIGFPLTVGYGMTECGPLISYEDHSLWLPGSCGKSLSIMEVRIDHSGQERHSDSGDVGEIQVRGENVCLGYYKNAELTAELFTPDGWMRTGDLGTIDSLGNIFIKGRSKTMLLGSNGQNIYPEEIESKINNLSYVLESIVTERDGRLIALIVPDRQAIEHKGISPDQAWAYIERSRAELNGQVGAYEKITAFVRHDEEFEKTPKHSIKRFLYT

SEQ ID NO: 14111 - protein, 572 aa, Francisella tularensis subsp. novicida
MAFSAFGCYRKYIFLSADASMIYLINPILNYGFGPGGGITKQSATILMLMGVGMVGFIALRSVGSFVSQYFIGSLGQKVVYKFRKDIYKRLMDLPASFFDKHSTGQIISRLLYNVDQVTEATSTAIITVVQDGTFVIGLIVVMFVSSWQLSLFLIVVGPFLGLFISIINKKFRNLSRNTQSSMGNVTHTAEETIRNYKEIRIFGAQQKQQNKFFKNLDYTYSQQIRTIALDALTSPVIQIIASLVLAFSLFTIAIFGTNDGGGSSWLTAGSFASFFAAAAAILKPIKNLTKVNVVIQKAVAATEDIFYILDYPAEKETGSKELAKVDGNVTIKDLSFAFGEHKVLSGVSVDIKAGQTVAFVGKSGSGKTTLTSIISRFYTQHKGEILLDGVDTRELTLENLRSHLSIVSQNVHLFDDTVYNNIAFGLSREVSEDEVIDALKRANAYEFVQELSDGIHTNIGNNGSKLSGGQRQRISIARALLKNAPVLIFDEATSALDNESERVVQQALESLTESCTTIVIAHRLSTVENADKIVVMDGGKVVESGKHQELLEQGGLYTGSINRDFNSTYAR

SEQ ID NO: 14112 - protein, 104 aa, Arabidopsis thaliana
  misc_feature (44)..(44): Xaa can be any naturally occurring amino acid
  misc_feature (55)..(55): Xaa can be any naturally occurring amino acid
  misc_feature (89)..(89): Xaa can be any naturally occurring amino acid
  unsure (1)..(104): unsure at all Xaa locations
INVSGHKYGLVYAGIGWVVWRAAEDLPEELIFHINYLGADQPTXTLNFSKGSSQXIAQYYQLIRLGFEGYKNVMENCIENMVVLKEGVXETRGVQHRKGPRGFP

SEQ ID NO: 14113 - protein, 547 aa, Pseudomonas aeruginosa
MAAKEVKFGDSARKKMLVGVNVLADAVKATLGPKGRNVVLDKSFGAPTITKDGVSVAKEIELKDKFENMGAQLVKDVASRPTDAAGDGTTTATVLAQAIVNEGLKAVAAGMNPMDLKRGIDKPTVAIVAQLKELAKPWRDTKAIAQVGTISANSDESIGQIIAEAMEKVGKEGVITVEEGSGLENELSVVEGMQFDRGYLSPYFVNKPDTMAAELDSPLLLLVDKKISNIREMLPVLEAVAKAGRPLLIVAEDVEGEALATLVVNNMRGIVKVAAVKAPGFGDRRKAMLQDIAILTGGTVISEEVGLSLEGATLEHLGKPKRVVINKENTTIIDGAGVQADIEARVLQIRKQIEETTSDYDREKLQERLAKLAGGVAVIKVGAATEVEMKEKKAPVEDALHATRAAVEEGVVPGGGVALVRALQAIEGLKGDNEEQNVGIALLRRAVESPVRQIVANAGDEPSVVVDKVKQGSGNYGFNAATGVYGDMIEMGILDPAKVTRSALQAAASIGGLMITTEAMVAEIVEDKPAMGGMPDMGGMGGMGGMM

SEQ ID NO: 14114 - protein, 285 aa, Streptococcus pneumoniae TIGR4
MILSKNREDGLRKFATNIRLNTLRTLNHLGFGHYGGSLSIVEVLAVLYGEIMPMTPEIFAARDRDYFILSKGHGGPALYSTLYLNGFFDKEFLYSLNTNGTKLPSHPDRNLTPGIDMTTGSLGQGISVATGLAYGQRIRKSPFYTYAIVGDGELNEGQCWEAIQFASHQQLSNLIVFVDDNKKQLDGFTKDICNPGDFVEKFSAFGFESIRVKGSDIREIYEGIVQLKQSNNSSPKCIVLDTIKGQGVQELEEMKSNHHLRPTVEEKQMLTSVVERLSQELEETE

SEQ ID NO: 14115 - protein, 720 aa, Arabidopsis thaliana
MNANEEGEGSRYPITDRKTGETKFDRVESRTEKHSEEEKTNGITMDVRNGSSGGLQIPLSQQTAATVCWERFLHVRTIRVLLVENDDCTRYIVTALLRNCSYEVVEASNGIQAWKVLEDLNNHIDIVLTEVIMPYLSGIGLLCKILNHKSRRNIPVIMMSSHDSMGLVFKCLSKGAVDFLVKPIRKNELKILWQHSSGSGSESGTHQTQKSVKSKSIKKSDQDSGSSDENENGSIGLNASDGSSDGSGAQSSWTKKAVDVDDSPRAVSLWDRVDSTCAQVVHSNPEFPSNQLVAPPAEKETQEHDDKFEDVTMGRDLEISIRRNCDLALEPKDEPLSKTTGIMRQDNSFEKSSSKWKMKVGKGPLDLSSESPSSKQMHEDGGSSFKAMSSHLQDNREPEAPNTHLKTLDTNEASVKISEELMHVEHSSKRHRGTKDDGTLVRDDRNVLRRSEGSAFSRYNPASNANKISGGNLGSTSLQDNNSQDLIKKTEAAYDCHSNMNESLPHNHRSHVGSNNFDMSSTTENNAFTKPGAPKVSSAGSSSVKHSSFQPLPCDHHNNHASYNLVHVAERKKLPPQCGSSNVYNETIEGNNNTVNYSVNGSVSGSGHGSNGPYGSSNGMNAGGMNMGSDNGAGKNGNGDGSGSGSGSGSGNLADENKISQREAALTKFRQKRKERCFRKKVRYQSRKKLAEQRPRVRGQFVRKTAAATDDNDIKNIEDS

SEQ ID NO: 14116 - protein, 199 aa, Magnaporthe grisea 70-15
MAAPGVQSLKCVVTGDGAVGKTCLLISYTTNAFPGEYIPTVFDNYSASVMVDGKPISLGLWDTAGQEDYDRLRPLSYPQTDVFLICFSIVSPPSFDNVKAKWYPEIDHHAPNVPIILVGTKLDLREDPSTLESLRSKRMEPVSYDQALICAKEIRAHKYLECSALTQRNLKSVFDEAIRAVLNPRPQPAKVKKSKCTIL

SEQ ID NO: 14117 - protein, 372 aa, Zea mays
MAKDGGPDWNGLLKWSLAHGDGTNPPRALSEEDRKWFMDAMQANTVDVVKRMKEITQVMKTPEDVLQSQGVTPENIEDMLDELQEHVESIDMANDLHSIGGLDPLLGYLKNSNAGIRAKAAEVVSTIVQNNPKSQQLVMESNGLEPLLTNFKSDPSTNARTKALGAISSLIRHNQPGVSAFRLGNGYAGLKDALGSDDARLQRKALNLIQYLLHNYKADRSVATELGLPKLMMHLVSSDDSLVREAALGGLLELARDKTSGNALPDQEKLKDMLKSRIEGISAMDTDDLHAAREERQLVDSLWKECYNEPSSLREKGLVVLPGEDAPQQPPPDVAGKMFEPPLRAWAAARPAQEDDSDSGSGKKDPPLLLKF

SEQ ID NO: 14118 - protein, 510 aa, Citrus sinensis
MANIDIEGLLRDVPNDKRLPKTKIVCTLGPASRSVPMLEKLLRAGMNVARFNFSHGTHEYQQETLNNLRAAMHNTQILCAVMLDTKGPEIRTGFLKDGKPIQLKEGQEITVSTDYDFKGNEEMITMSYKKLPVDVKPGNTILCADGTITLTVLSCDPKSGTVRCRCENTAMLGERKNVNLPGVVVDLPTLTEKDKEDILRWGVPNNIDMIALSFVRKGSDLVTVRKVLGPHAKNIQLMSKVENQEGVVNFDDILRETDSFMVARGDLGMEIPVEKIFLAQKMMIYKCNLVGKPVVTATQMLESMIKSPRPTRAEATDVANAVLDGTDCVMLSGESAAGAYPEIAVKIMRRICIEAESSLDYRAVFKEMIRSTPLPMSPLESLASSAVRTANKARAKLIVVLTRGGTTAKLVAKYRPAVPILSVVVPVLTTDSFDWTCSDETPARHSLIYRGLIPILAEGSAKATDAESTEVILEGALKSAIEKGLCSPGDAVVALHRIGVASVIKICIVK

SEQ ID NO: 14119 - protein, 138 aa, Bdellovibrio bacteriovorus HD100
MADKVLKCGLPSDEGELKKILTPEQYRIMVENGTERPFQNAYWNHHEQGIYVDAISGVPLFSSDDKFDSGSGWPSFTRPISADAVKEIADYSHGMTRIEVRASSSNSHLGHVFDDGPAPTGLRYCINSASLKFIPRKG

SEQ ID NO: 14120 - protein, 289 aa, Oryza sativa
  misc_feature (98)..(98): Xaa can be any naturally occurring amino acid
  unsure (1)..(289): unsure at all Xaa locations
MAGKEIYHKMKDKVKDAFSSSGPETGKGKTKLSGKRVKHGYHLVKGKSNHPMEDYLVAEYRQEGEHDLGLFAIFDGHLGHTVPDFLRSHLFDNILKQXFLSNPQAAIRNAYQLTDAKILESAAELGRGGSTAVTAILISSENSVNLVVANVGDSRAVISKSGVAKQLSVDHEPNKERHSIEKKGGFVSNLPGDVPRVDGQLAVARAFGDRSLKKHLSSEPDVVEEPIDENTDFLILASDGLWKVMSNQEAVDEIKDFKDAQAAAKHLTEQAVNRKSKDDISCIVVKFLC

SEQ ID NO: 14121 - protein, 194 aa, Xylella fastidiosa 9a5c
MNMLNVLRFPVLALALALAFVSSGVLADAGSLLDLDYRPLAGKETVNLQRLYGGKVLLVVNTASKCGFTPQYEGLEALHQKLSPLGFAVLGFPSNDFKGQEPGDEQQIQKFCTLTYGVKFPMFQKVHVKGDEVTPLYQRLTQTTGVAPGWNFHKYLIARDGHVVAQFDSRTRPDDPILLEAIKRELAKPVQVAH

SEQ ID NO: 14122 - protein, 242 aa, Triticum aestivum
MENHQLPYTTQPPATGAAGGAPVPGVPGPPPVPHHHLLQQQQAQLQAFWAYQRQEAERASASDFKNHQLPLARIKKIMKADEDVRMISAEAPVLFAKACELFILELTIRSWLHAEENKRRTLQRNDVAAAIARTDVFDFLVDIVPREEAKEEPGSAALGFAAGGVGAAGGGPAAGLPYYYPPMGQPAAPMMPAWHVPAWEPAWQQGGADVDQGAGSFGEEGQGYTGGHGGSAGFPPGPPSSE

SEQ ID NO: 14123 - protein, 456 aa, Photobacterium profundum SS9
MHNYRRETRQLLTLAIPVLIASVAQTSMGFVDTVMAGGVSATDMAAVSVASSIWLPAILFGVGLLIALVPIVAQLNGSGKKDKIPFEVQHGFLLALIISVPIMAILYNAGMLIDYMDVEPILAEKTIGYLHAVVYAVPAFLLFQTLRSFAEGLSLTVPGMVIGFIGLMANIPLNWIFVYGKFGFPEMGGVGCGVATAIVYWLMFFSMLVYVLVNKRLKRAGLFDVWYKPQPKAVLRLFKLGFPVAASMFFEVSLFAVIALMISPLGSIIVASHQVAINFSSLVFMLPMSLGIALSIRVGHMLGEQDLVGAKIASHCGLIVGLIMSLMTAILTIIYREEIALLYTDNADVIVLAGQLLFLAAVYQCSDAIQVVAAGALRGYKDMRAIFIRTFIAYWMLGLPVGYILGMTDWIVEPMGPHGFWIGNIVGLSAAAIMLAMRLRWIQCQSDEFQIAMSLK

SEQ ID NO: 14124 - protein, 325 aa, Glycine max
MSSSAGKLVCVTGAAGYIASWIVKFLLERGYTVRATVRNPNDHTKVEHLLKLEGAKERLHLFKADLLGENSFDSIVEGCDGVFHTASPFIINVKDPQADLLDPAVKGTLNVLKSCVKSPSVKRVILTSSVAAVAYNKRPKSPEVVVDETWWSDPDYCRELKLWYLLSKTLAEDAAWKFAKENDLDLVVVNPAMVVGPLLQAELNTSAAIILNLINGSETFSNDTYGWINVKDVANAHIQAYEIASASGRYCLVERVAHYSELARILRDQYPTYQIPEKSADDKPYVPTFQVSKEKAKTLGIEFIPLEVSLRETVETLKEKNFANF

SEQ ID NO: 14125 - protein, 449 aa, Bifidobacterium longum DJO10A
MSTTTSAQPAQLTRNERLDRLPFNKAHRKLLVASGIGWAFDAMDVGLVSFVVAAIAADPHFNLTPTEKSWVLSIGFVGMAIGAAVGGFIADRVGRKTVFTATLIIFGIANGAMALSWSLGMLLGARLIIGLGLGAELPVASTLVSEFSPTKQRGRMTVLLESFWAVGWIVAAMIGYFVIPNTGDWGWRWALAIGALPLLYAIVTRVHIPESVRFLEAKGREDEAEKAVRYFEEAGGVAPVTSPKGKPLPKIKTRELFGSKYLARTIAIWATWFFVNFSYYGAFTWMPSLLADQFGSLTKSFGYTLAISIAQLPGYFLAAWLVEVWGRRKTLSIFLAVSAVAAFAFSQAGSVALVLVFGMLLSASNLGAWGVLYAVTPEIYPTRLRGAAAGAAAAVGRIAAIIAPLLMPWFLTLSGGNKAVAFIIFAAAFIIACVAALCLPERKGLDLED

SEQ ID NO: 14126 - protein, 722 aa, Methylobacillus flagellatus KT
MSRPTLLIVDDNERLAQSLQQLLQLHGYNAEICSSGEDALQLVMDIKFDLVLLDLSMPDMNGFDVLTELATYSAPPPVIVISGTKTLNAAIEAMRLGAYDFLRKPYQPEELLHTIENAIEKSRLETQNRSIHARLEESENLYRYLVNSSPDIIYTLDDSGHFTFINHRVETLLGYRRESLIGKHYTEIIYSDDFDRASYAFNERRTGNRATRNIELRLKCKDLESDIRHFEINFITVVLNATGTYGGTHESGTPFSGTYGVARDISDRKKVEEVITRQAYHDTLTGLPNRALFKDRLNVALNHAKRNQQQLAIMFLDLDRFKWVNDTLGHFYGDELLKHVAQRLSGCLRAQDTLARMGGDEFTLLLHDLQQPEDASLVAAKIVDELKRPFLLDEREIFISSSIGIALYPDHGDTIETLIKSADIAMYHVKWRGKNGYQYYEASMNAMFHKKLSMENELRRAIEKKQIMLHYQPQVDVETRKIIGLEALARWHHPELGIISPTEFIPLAEETGLIFSLSEMLLGEACKQMQLWEAAGLLNFRLALNVSPQLVEEESFVSKTLSYIQSHHLKPEFFEIEITENLLVRDLENTVAKLKALGKHGIRIALDDFGTCYSSLSYLRQFPIHNIKIDKSFVGDINTHDESVPIITAISGIAKGFKLDLIAEGVETLQQMKTLHKMGCNIMQGYLFSKPLPAQNITTLLKRQANLFHKNGEPDDALITQH

SEQ ID NO: 14127 - protein, 105 aa, Glycine max
MTSSAVTEQFDKCMKKQVEAIARVLHLFQSYKEDNIPCKIDEGLYLGSIATAANKPALKDCNITHILTVAGRIPPAHPNDFVYKIIDGMVIFIEIKLLFAFHVDL

SEQ ID NO: 14128 - protein, 345 aa, Synechocystis sp. PCC 6803
MVTVTVILLLFIKESFRMPTANLSSPTSPPTFTADMVRSYLHEIGRVPLLTHEQEIILGKQVQQMMALLEHKKALADRLGREPSDPEWAEAADLSVTKLHRYLGQGERAKRKMIEANLRLVVAIAKKYQKRNMEFLDLIQEGSLGLERGVEKFDPTKGYKFSTYAYWWIRQAITRAIAQQGRTIRLPIHITEKLNKIKKTQRELSQQLGRSATPAEVAKALEIDPSQIREYLSLSRQPISLDVRVGDNQDTELSELLEDEGVSPDAYITQESMRQDLQNLLAELTPQQQAVLTMRFGLNDGQELSLAKIGQHLNISRERVRQLENQALAQLKRRRANMAEYIIAS

SEQ ID NO: 14129 - protein, 217 aa, Brucella melitensis 16M
MTDSSHQRSTAMSRTLVLVRHGQSEWNLKNLFTGWRDPGLTEQGHAEAKAAGQRLKAAGLKFDIAYTSALSRAQVTCQHILDELGQPGLETIRDQALNERDYGDLSGLNKDDARAKWGEEQVHIWRRSYDVPPPGGESLKDTGARVWPYYLHTIQPHVLREETVLVAAHGNSLRALIMALEGLTPEQILKQELNTGVPIIYRLNADSTVASKEILSA

SEQ ID NO: 14130 - protein, 1042 aa, Synechocystis sp. PCC 6803
MTESLSPLLPEISIALVLEQLRRLCRQNCQSHWYCLPGAPWEISDWQTYPLGKVNEKGYLIWEKGEKTQWFAQTFTVPKALADYPLDGLTLRLALTWWAKDAQIFVNGELVQAGDLFDSKARVLLTDNSQIGRTFTVALKLTSSGHDIGGLMQSQLIFERKYPDLDPGFIADEIEVLSLYLAQFESERLAQLSKTLEAITWNKISDQEQFDQSLLQLRQRLLLLTEGLKQQQINLLGHAHLDMAWLWQLEETWEVGERTFQSVINLQTEFADLVFGHTSPVLYQWIEEHLPALFEQIQVAIKKGNWELLGGMWVEPEVNIISGESLARQFLYGQRYFEAKFGQISKVAWLPDSFGFCGQLPQIFHQSGIDYFVTGKLHWNDTNSFPHGAFHWRSPDGTEIFTVMSPPNLAGVMDNQPLPMANYANRWQEQTGLKECLWLPGVGDHGGGPSRDMWEMKERWQNSEFFPTINTAKAEHFLAGIKQKLQSDQSFPIWERELYLELHRGCFTVHADQKLYNRQCEHLLYEAELWSSFANWLGGYSYPKEKLELAWKKVLLNQFHDILPGTSIPEVFVTANQAWQEVYQTTNKIINQALKHLSDQINYPSYHHDSTERETPLLVFNPLHWSQSQLVEIPIQEGKHYQVYDGQTKTLVNSQITAEGSLIFLVDSPPLTCKYYWLKTKEPLSNSQQLESFSQDPILNNGLLKVEISLDNGEIASIYDLANQRQVLAGHGNQLQFFRDQGQYWDAWNIDPNYEQYPLSSAKLINYQWLEQGPLHWRLRVVKKFQQSVFTQDYCLTKDSPLLEIKTEVDWQETHVMVKAAFPIALQSEFFTTEAPCAVVDRPTNPQTETEKAQWEVPHQHWFSLTDQTENYGVSLLNNCKYGCDVKDNLMRLTLLRSSVWPDPSADRGKHKFSYYFYPHQGNWQSAKTVAVGYGIHRPLRTYFPENFNPLSSQKLLSPGEPWLNLGSDNLCLMALKLREDYPDQWVLRCYEMSGESAQLEVITAFDHRVKTRLNLLEEAQPEENNNHVNPWQIVSVCLAYD

SEQ ID NO: 14131 - protein, 356 aa, Glycine max
MVNNMIVQIHHGRLSENDSRRYFQQLIDGVDYCHSKGVYHRDLKPENLLLDSLGNIKISDFGLSAFPEQGVSILRTTCGTPNYVAPEVLSHKGYNGAVADVWSCGVILYVLLAGYLPFDELDLTTLYSKIERAEFSCPPWFPVGAKMLIHRILDPNPETRITIEQIRNDEWFQRSYVPVSLLEYEDVNLDDVNAAFDDAEEPRADQQCDNDDMGPLMLNAFDLIILSQGLNLATIFDRGQDSVKYQTRFISQKPAKVVLSSMEVVAQSMGFKTHIRNYKMRVEGVSANKTSYFSVILEIFEVAPTFYMVDIQKAAGDTGEYLKFYKNFCSNLEDIIWKPPHEASKSRISKTKSKRR

SEQ ID NO: 14132 - protein, 235 aa, Methanosarcina acetivorans C2A
MMVFFDIDGTLLDHKSAEFSGVELFYQNYHSFFEIDFNEFYSIWCELAEKHFQRYLAKKCSFEEQRIERIKELYLIRNINLSNEEALKVFDYYLFNYESSWKPYDDVIPCLKKLSNLKKGIISNGDLGQQKLKLSKMGISRYFVDIIVAGEFHVAKPCTEIFEIACKRNGEEPEKCFYVGDAIETDIIPCEKIGMKGIWINRGNKTFPNKNIKSILSLEELVNVLYEDMPQLLDY

SEQ ID NO: 14133 - protein, 395 aa, Citrus x paradisi
FGTRSKLSSSSSLSTNILKPLTNSFFLHRPISTDTTPLTIETSVPFTSHQCEAPSRSVETTPKELLSFFRQMATMRRMEIAADSLYKAKLVRGFCHLYDGQEAVAIGMEAGITKKDSIITAYRDHCTFLGRGGTLLEVFSELMGRKDGCSHGKGGSMHFYKKDSRLYGGHGIVGAQIPLGCGLAFAQKYSKDETVTFALYGDGAANQGQLFEALNIAALWDLPAILVCENNHYGMGTAEWRAAKSPSYYKRGDYVPGLKVDGMDALAVKQACKFAKEHALKNGPMILEMDTYRYHGHSMSDPGSTYRTRDEISGVRQERDPIERIRKLILAHDLATEKELKDIEKEVRKEVDEAIAKAKESPMPEPSELFTNVYVKGYGVEVFGADRKEVRSVLP

SEQ ID NO: 14134 - protein, 153 aa, Glycine max
  misc_feature (119)..(119): Xaa can be any naturally occurring amino acid
  unsure (1)..(153): unsure at all Xaa locations
GKEWRQRQIRKITDRVFDKVKNQMETDKLSFEDLYIAVLLVYNDINKYIPGPHFDPPSKDKVREVKQSCDINLDGDIDRDEFYDFIMIMTADTFTFVSQKLIVTLVVAPTGRSRPQSEXETGLEVVGELVQKIPSSVYCFLVAIAAVWFQKKA

SEQ ID NO: 14135 - protein, 479 aa, Glycine max
MVSSQFSAFTLAGYKPSQTQLLFPAKLVDTVNTEHIELDFSDVFGPVTLDLNNIDSTTSEPMEEVNELVYDDPPVIYTRSHSLVGPSTCVSQSLKLGKLTIHETEDSLELVEHVNGEAIKDIKESSFVEESLKDEDGNLMKIHRVSIDDFEILKVVGQGAFAKVYQVRKKGTSEIYAMKVMRKDKIMEKNHAEYMKAERDIWTKIEHPFVVQLRYSFQTKYRLYLVLDFVNGGHLFFQLYHQGLFREDLARIYTAEIVSAVSHLHANGIMHRDLKPENILLDADGHVMLTDFGLAKQFEESTRSNSMCGTLEYMAPEIILGKGHDKAADWWSVGVLLFEMLTGKPPFCGGNRDKIQQKIVKDKIKLPAFLSSEAHSLLKGLLQKEQARRLGCGPRGVEEIKSHKWFKPINWRKLEAREIQPSFRPEVAGVHCVANFEKRWTDMPVVDSPAASPNGGNPFKDFSYVRPAASFLQRNNPAY

SEQ ID NO: 14136 - protein, 657 aa, Saccharomyces cerevisiae
MSFLKFAYRNSWRYYSKSTRHFHKIPIRQFIIPTSIAFYLTQNSFPKQNCLIYNDSLKPDPKGDTFEMGLYVSSENELQEKLKSFRSAKITESRNKLIRYLRIFWFGFNDNIVEPVCTILRFLEISAIFLPLLLLYPISWFGHKLKITDTNITETRGSLIWCQLLRKALELAGPSFIKLGQWAGSRTDIFSHALCHELGKLHSNVTAHSLSFTLEKLSQALKVDKIEDAFDEFNRTPIGVGSIAQVYVGELSQKYIDKYDNIQIGKDGNRWCAIKILHPNVRSQIRRDLKIMKFCADAINWIPTMEWLSLPSEVDQFSILMNIQLDLRIEALNLERFNENFKNSIQVKFPKPFLPLSNRDVMFEEHVYGLSMEKFLSTKKQINDVELCKKVSDPFVDAFLQMLILDDFVHADLHPGNVIIRFVKTNKYGTNIISSELESYRITHDLRKKIEEDQDQDFVGKLKSVLTNYTPQICFIDTGIITELNEKNRINFIALFNALARFDGYRAGELMIERSRTPETAIDKEVFAFKVEKLVDKVKQRTFTLGTVSIGDLLDQMLSMVRSHHVRMESDFVSVVVAILLLEGIGRQLDPNLDLFESSLPILREFGFKREAKSLLKDASTLSMLKIWVGLEVRQLMHLSMKQIYDLVRTDQLCPNY

SEQ ID NO: 14137 - protein, 338 aa, Xylella fastidiosa 9a5c
MSVALSIDLSKKKTILCFGEALIDMLAQPPVKKGMPRAFLQCAGGAPANVAVAVARLGGAVQFVGMLGRDMFGDFLFDSFAEAGVVTDGIVRTSAAKTALAFVALDAHGERSFSFYRPPAADLLFRAEHFQDASFSDALIFHACSNSMTDADIAEVTFEGMRRAQAAGAIVSFDLNFRPMLWPNGENPASRLWKGLSLADVVKLSSEELDYLANTLAADANAVIQQLWQGRAQLLLVTDAAGPVHWYTRTARGQVPTFRVQVQDSNAAGDAFVGGMLYTFAQQFDDAAALIDFCHDPESIASMLRFAAAVGALAVTRHGAFTAMPMLSEVLSLIQEQS

SEQ ID NO: 14138 - protein, 267 aa, Zea mays
  misc_feature (127)..(127): Xaa can be any naturally occurring amino acid
  unsure (1)..(267): unsure at all Xaa locations
RPGRDRRDGAPHWVLLHLAPLFHARDGTLLHFLAVQVPIAPAAVARGATCHTTGHLLAACRDEASRVAEDFPCATHAGKVFVDMDKRGLEAEEPRVASDSEKEMAISTANSIVSALNSYSKLTGLVXTDSRLPDMPIIYASDAFTSLTGYSREEILGCNCKVLNGPGTSLEVLEEINQHICSEQACTVDLLSYRKDGSSFCDHLHVSPIRDTSGKVAFHIWVHLDMGAKHDFSGLTPEKWLLGAVGAVRVAVRGLSASGSLLRPPSQ

SEQ ID NO: 14139 - protein, 135 aa, Coix lacryma-jobi
MRKQRIVPLVAALLVLLALAVSSTRNAREEESMADDAGMLAGGIKDVPANENDLHLQELARFAVDEHNKKANALLGYEKLVKAKTQVVAGTMYYLTIEVKDGEVKKLYEAKVWEKPWENFKELLEFKPVEEDASA

SEQ ID NO: 14140 - protein, 489 aa, Nicotiana tabacum
SKFRPSSAYDSPFLTTNAGGPVYNNVSSLTVGPRGPVLLEDYHLIEKLATFDRERIPERVVHARGASAKGFFEVTHDISHLTCADFLRAPGVQTPVICRFSTVVHERGSPESLRDIRGFAVKFYTREGNFDLVGNNVPVFFNRDAKSFPDTIRALKPNPKSHIQEYWRILDFFSFLPESLHTFAWFFDDVCLPTDYRHMEGYGVHAYQLINKAGKAHYVKFHWKPTCGVKCMSEEEAIRVGGTNHSHATKDLYDSIAAGNYPEWKLFIQIMDTEDVDKFDFDPLDVTKTWPEDILPLMPVGRLVLNRNIDNFFAENEQLAFNPGHIVPGLYYSEDKLLQTRIFAYADTQRHRIGPNYMQLPVNAPKCAHHNNHRDGAMNFMHRDEEVDYLPSRFDPCRHAEQYPIPSRVLTGRREMCVIEKENNFKQAGERYRSWEPDRQDRYVSKWVEHLSDPRVTYEIRSIWICSLSQADKSCGQKVASRLTLKPTM

SEQ ID NO: 14141 - protein, 678 aa, Bacillus circulans
DPDTAVTNKQSFSTDVIYQVFTDRFLDGNPSNNPTGAAYDATCSNLKLYCGGDWQGLINKINDNYFSDLGVTALWISQPVENIFATINYSGVTNTAYHGYWARDFKKTNPYFGTMADFQNLITTAHAKGIKIVIDFAPNHTSPADAENGRLYDNGTLVGGYTNDTNGYFHHNGGSDFSSLENGIYKNLYDLADFNHNNATIDKYFKDAIKLWLDMGVDGIRVDAVKHMPLGWQKSWMSSIYAHKPVFTFGEWFLGSAASDADNTDFANKSGMSLLDFRFNSAVRNVFRDNTSNMYALDSMINSTATDYNQVNDQVTFIDNHDMDRFKTSAVNNRRLEQALAFTLTSRGVPAIYYGTEQYLTGNGDPDNRAKMPSFSKSTTAFNVISKLAPLRKSNPAIAYGSTQQRWINNDVYVYERKFGKSVAVVAVNRNLSTSASITGLSTSLPTGSYTDVLGGVLNGNNITSTNGSINNFTLAAGATAVWQYTTAETTPTIGHVGPVMGKPGNVVTIDGRGFGSTKGTVYFGTTAVTGAAITSWEDTQIKVTIPSVAAGNYAVKVAASGVNSNAYNNFTILTGDQVTVRFVVNNASTTLGQNLYLTGNVAELGNWSTGSTAIGPAFNQVIHQYPTWYYDVSVPAGKQLEFKFFKKNGSTITWESGSNHTFTTPASGTATVTVNWQ

SEQ ID NO: 14142 - protein, 473 aa, Bdellovibrio bacteriovorus HD100
MQNFDVVVIGAGPGGYVAAIRSAQLGFKTAVIEREFLGGVCLNVGCIPSKAMITATHLLHKAQHNFKEMGLNIKGGIDVDMKQLVKWKQSVSDKMSGGVNQLLKGYGVTIIKGDAEFKSSKEISVKSSAGTESVQAKYFVVATGSRPIEIPGFKFDEKDICSSTGALAFDTIPKRVAVIGGGYIGLEISSYLRKLGTEVTVIEAQSALLAGVVDPDCAQIVTRKLTKAGVNVLYGAKAKGQKKVKDGYEVTVEINGKDEVVKCDKILVTVGRRPNGDQANLKAAGIQVDERGFVKVDAQRRTNVSNIFAIGDIAGQPMLAHKASHEGVLVAEVIAGHNRVYDAKTVPAVVFTDPEIAAAGMTEAEAKAKGHTDLLISKFPFAANGRAVSMMETDGFVKMIADKKTHVLLGVHIVGPEASNLISEAVLAIEMGARIEDLALSIHPHPTLGETMMEAAEATLGHAIHIIQKPLKA

SEQ ID NO: 14143 - protein, 189 aa, Methylobacillus flagellatus KT
MDIDFKKLAPWNWFKKEQEEQQSTVSLPVQRNDLPVAGGPVSPILQLHREIDRLFDDAFRGFGFPTLAMPRWPSEWPGLLKPALDIQETDKQYKISLEVPGVEEKDIQITLDNDVLLVRGEKRQEQESKDGGFHRVERSYGSFQRALNLPADANQDTIKAAFKNGVLTITMEKREASTPKQGRSIPING

SEQ ID NO: 14144 - protein, 142 aa, Oryza sativa
TKVLFPMARTKQTARKSTGGKAPRKQLATKAARKSAPTTGGVKKPHRYRPGTVALREIRKYQKSTELLIRKLPFQRLVREIAQDFKTDLRFQSHAVLALQEAAEAYLVGLFEDTNLCAIHAKRVTIMPKDIQLARRIRGERA

SEQ ID NO: 14145 - protein, 355 aa, Ralstonia metallidurans CH34
MLLLNPGPVTLSERVRRSLLQTDLCHRESEFFDLQDEARDRLLNIYALDPAAWTAVLMTGSGTAALESMIAAMVPANGKLLIVQNGVYGERIAQIAAQYQIAHALVKHDWMEAPDLARIDAALAEDPAITHVAVIHHETTTGRLNDLSAIDRLCQARGVRLLVDTVSSFGAEAIDFSGNIDAVCSTANKCLHGVPGAAFVIARRAALTHAATRTYYLDLVRLAKLQDQRNTPFTPSVHAYYALVEALREHQEEGGWKGRHQRYAALAEQARAGLAALGIEALWPAEQSSVVLRAYRLPNGVTYEQLHDGLKARGFVIYAGQGGLSSQLFRISTMGAITAADIDRLIEGFKALVQR

SEQ ID NO: 14146 - protein, 358 aa, Zea mays
  misc_feature (164)..(164): Xaa can be any naturally occurring amino acid
  unsure (1)..(358): unsure at all Xaa locations
MAADQQPQLQEEMNDAAGGGLRLPPGFRFHPSDFEIVSFYLTNKVLNTRFTCTAITEADLNKIEPWDLPSKAKMGEKKEWYFFYQKDRKYPTGLRANRATEAGYWKATGKDKEVYNAAEGVAVLVGMKKTLVFYRGRAPRGDKTNWVMHEYRLEGSGRLPARPXASATGSAAANAAAALKASAYKDEWVVCRVFHKTTGIKKTTTAAPAYQVAMAGAEMDQNQNNIPFPMPMQFSMLPDFSLDPVPPYYPYPNAGAGMPMLPMAAGIGGGAGGLHLNGAALFGNPMAAPQPMSFYHQMGTGTACAGGFDVSAPESRPSSMVSQKDDQANGAEISSMMSVAGPGPATTTTIEMDGVWKY

SEQ ID NO: 14147 - protein, 399 aa, Geobacter metallireducens GS-15
MKSADWIAKGDKYIMKTYGRYPLVPVRGEGCRVWDADGKEYLDFLAGVAVNNLGHCHPKVVAALQKQAAEMIHCSNYYNIPTQIELAELLCSNSFADKAFFCNSGAEANEAAIKLARKYAREKTGDVERYEIITAIASFHGRTMATISATGQEKVQKFFDPLLHGFTYVPFDDADALEAAVTPKTCAVMLEPIQGEGGVVIPSADYFRKVREICDRHGLLLIFDEVQVGIGRTGKLFAHEHFDVTPDIMTLAKALAGGAPIGSMLAKDEVAASFSPGTHGSTFGGNPLVTAAGVAAVRAVLEEGLLNRAEEMGEYLVGELERLKEKYAFITDVRGIGLMIGMELSAPAGEIVLKGLERGVLLNVAQDKVLRFVPPLIVTKQEVNEMIAVLDGILEEIKQ

SEQ ID NO: 14148 - protein, 147 aa, Triticum aestivum
NRAREELSFELGRAPTDEETMKKVGLSPARYRDVVRMTRPTYSLHSRNRVTQEELIKEVTDVDAIGVDTHKHNRLLRLAIDDLLDSLKPKESVVIRQRFGLDGRGRRTLSEIAGNLRISREMVRKYELKALMKLKHPTRVDYLRRYM

SEQ ID NO: 14149 - protein, 467 aa, GIBBERELLA ZEAE PH-1
MKPTYSTLFLSLLASTEAISLHKREHGLEPRVMSVPIQRRQIDNPLAHDRKRLNRRAGTVNVGIDNEQSLYFLNASIGTPPQNFRLHLDTGSSDLWVNSVNSELCDTHANICAESGLYNANKSSTYEYVNSGFNISYADGSGASGDYVTDTFRMGEVSIKDLQFGIGYITSDNEGVIGIGYTSNEAVVDQPDPEFYKNMPARLASDGVIASNAYSLYLDDLESATGKILFGGVDEQHFIGDLVTVPIMKINDEYSEFYVKLQSINSGSEIVGEGLDLGVVLDSGSTLTYLPSSVTDSIYQLVGADYEEGQTTAYVPCDLANQGGNLTFKFTSPAEITVPLSELILDFTDITGRQMSFTNGQAACSFGIAPSTSQVSILGDTFLRSAYVVFDLDNNEISLAQSNFEATGSHILEISKGKNAVPSATGSDGPQSSGSENAAGSLSPLGSTGAVSILAGAMALTFAWFLI

SEQ ID NO: 14150 - protein, 1238 aa, Bordetella pertussis
MPAPHRLYPRSLICLAQALLAWALLAWAPAQASQELTLVGKAAVPDVEVALDGDDWRWLARKRVLTLGVYAPDIPPFDVTYGERYEGLTADYMAIIAHNLGMQAKVLRYPTREQALSALESGQIDLIGTVNGTDGRQQSLRLSVPYAADHPVIVMPIGARHVPASNLAGQRLAVDINYLPKETLARAYPQATLHYFPSSEQALAAVAYGQADVFIGDALTTSHLVSQSYFNDVRVVAPAHIATGGESFGVRADNTRLLRVVNAVLEAIPPSEHRSLIYRWGLGSSISLDFAHPAYSAREQQWMADHPVVKVAVLNLFAPFTLFRTDEQFGGISAAVLQLLQLRTGLDFEIIGVDTVEELIAKLRSGEADMAGALFVNSARESFLSFSRPYVRNGMVIVTRQDPDAPVDADHLDGRTVALVRNSAAIPLLQRRYPQAKVVTADNPSEAMLMVANGQADAVVQTQISASYYVNRYFAGKLRIASALDLPPAEIALATTRGQTELMSILNKALYSISNDELASIISRWRGSDGDPRTWYAYRNEIYLLIGLGLLSALLFLSWIVYLRRQIRQRKRAERALNDQLEFMRVLIDGTPNPIYVRDKEGRMLLCNDAYLDTFGVTADAVLGKTIPEANVVGDPALAREMHEFLLTRVAAEREPRFEDRDVTLHGRTRHVYQWTIPYGDSLGELKGIIGGWIDITERAELLRELHDAKESADAANRAKTTFLATMSHEIRTPMNAIIGMLELALLRPTDQEPDRQSIQVAYDSARSLLELIGDILDIAKIEAGKFDLAPVRTALRVLPEGAIRVFDGLARQKGIELVLKTDIVGVDDVLIDPLRMKQVLSNLVGNAIKFTTEGQVVLAVTARPDGDAAHVQFSVSDTGCGISEADQRQLFKPFSQVGGSAEAGPAPGTGLGLSISRRLVELMGGTLVMRSAPGVGTTVSVDLRLTMVEKSVQAAPPAAATAATPSKPQVSLRVLVVDDHKPNLMLLRQQLDYLGQRVIAADSGEAALALWREHAFDVVITDCNMPGISGYELARRIRAAEAAPGYGRTRCILFGFTASAQMDEAQACRAAGMDDCLFKPIGVDALRQRLNEAVARAALPTPPSPQAAAPATDDATPTAFSAESILALTQNDEALIRQLLEEVIRTNRADVDQLQKLHQQADWPKVSDMAHRLAGGARVVDAKAMIDTVLALEKKAQGQAGPSPEIDGLVRTLAAQSAALETQLRAWLEQRPHQDQP

SEQ ID NO: 14151 - protein, 96 aa, Photobacterium profundum
MNIRPLHDRVIVERQEVESKSAGGIVLTGSAAEKSTRGVVLAVGKGRILENGTVQELDVKVGDTVIFAEGYGTKSEKIDGKEVLIMSENDIMAIVE

SEQ ID NO: 14152 - protein, 463 aa, Haemophilus influenzae R2866
MKKTRFVLNSIALGLSVLSTSFVAQATLPSFVSEQNSLAPMLEKVQPAVVTLSVEGKAKVDSRSPFLDDIPEEFKFFFGDRFAEQFGGRGESKRNFRGLGSGVIINASKGYVLTNNHVIDGADKITVQLQDGREFKAKLVGKDEQSDIALVQLEKPSNLTEIKFADSDKLRVGDFTVAIGNPFGLGQTVTSGIVSALGRSTGSDSGTYENYIQTDAAVNRGNSGGALVNLNGELIGINTAIISPSGGNAGIAFAIPSNQASNLVQQILEFGQVRRGLLGIKGGELNADLAKAFNVSAQQGAFVSEVLPKSAAEKAGLKAGDIITAMNGQKISSFAEIRAKIATTGAGKEISLTYLRDGKSHDVKMKLQADDSSQLSSKTELPALDGATLKDYDAKGVKGIEITKIQPNSLAAQRGLKSGDIIIGINRQMIENIRELNKVLETEPSAVALNILRGDSNFYLLVQ

SEQ ID NO: 14153 - protein, 259 aa, Lactuca sativa
  misc_feature (64)..(64): Xaa can be any naturally occurring amino acid
  unsure (1)..(259): unsure at all Xaa locations
MFLLRTTTATTTPASLPLPLLSISSHLSLSKPSSFPVTSTKPLFTLRHSSSTPKIMSWLGRLGXGTRTPADASMDQSSIAQGPDDDIPAPGQQFAQFGAGCFWGVELAFQRVPGVSKTEVGYTQGFLHNPTYNDICSGTTNHSEVVRVQYDPKACSFDSLLDCFWERHDPTTLNRQGNDVGTQYRSGIYFYTPEQEKAAIEAKERHQKKLNRTVVTEILPAKKFYRAEEYHQQYLAKGGRFGFRQSTEKGCNDPIRCYG

SEQ ID NO: 14154 - protein, 376 aa, Rhodopseudomonas palustris CGA009
MASPKLHDFRHIVVKVGSSLLIDSAAGEVRAGWLAALAADIAELHRGGRDVMVVSSGSIALGRSRLKLPRGPLKLEESQAAAAVGQIELARTWSEVLGAHGIGAGQILVTFQDTEERRRYLNARSTIAKLLEWRAVPVINENDTVATTEIRYGDNDRLAARVATMASADLLILLSDIDGLYTAPPGSNPDATLIPVVEAITAEIEGMAGAAGSELSRGGMRTKIEAAKIATSAGTHMLIASGKIDHPLKAIADGGKCTWFLTPANPVTARKRWIAGTLEPKGTLTIDAGAVSALRAGKSLLPAGVIRVDGQFSRGDAVIVRGPDTHEIGRGLVAYDAEDAEKIKGHSSPDVMMILGITGRAEMIHRDDLVVGTAPT

SEQ ID NO: 14155 - protein, 391 aa, Staphylococcus aureus subsp. aureus MW2
MLDWFQLANNKENKTIQLRRYLHQYPELSFEEFQTHDYIVNQLSQLSCDIETPIGRNGIKATFKGLGTGPTIALRAVFDALPVEELNDVPYKSKNPGCMHACGHDGHTAILLTVAEILDEHKHLLEGNVVLIFQYGEEIMPGGSQEMIDAGCLENVDRIYGTHLWSGYPTGTIHSRAGAIMASPDEFSVTIKGRGGHGAKPHETIDPIVIMAEFILSAQKIISRTIDPVKQAVLSFGMIQAGTTDSVIPDQAFCKGTVRTFDSDIQNHVMDKMDKLLQGLAIANDINYDLNYIKGYLPVHNNEKAYQVIKEATNDLHVRFNESDLMMIGEDFSHYLKVRPGAFFLTGCGNESKGITAPHHNPKFDIDEKSLKYAVAVFLKIIELEQVFKTN

SEQ ID NO: 14156 - protein, 430 aa, Rhodopseudomonas palustris CGA009
MTASLKAIDGSAELTTLMTDLGRQARAAARTLALAPPEQKNRALEAMERAIRAGADKILAANAEDVADAKAAGTTSAFLDRLTLTPARVEAMAEGIAVVRGIADPVGTVTESWQRPNGMTIERVRVPLGVVAVIFESRPNVAADAGVLCLKSGNAVILRGGSESFRSCRAIHDRLVQGLREAGLPDAAITLVPTRDRAAVGLLLAGLDGSVDVIVPRGGKSLVARVESEARVPVFAHLEGVNHVYVDRSADLEMAKSIVLNAKMRRTGVCGAAETLLIDRAAATTHLAPLVTMLIDSGCEVRGDQTVQQVDPRVKPASDEDWDTEYLDAVIAAKLVDGVDGAIVHIHNHGSHHTDAIVAEDAQAAAKFLGEVDSAIVLHNASTQFADGGEFGFGAEIGIATGKFHARGPVGAEQLTTFKYRIHGSGQTRP

SEQ ID NO: 14157 - protein, 380 aa, Ralstonia metallidurans CH34
MYAAESALDHRTADPAPSGAPAAAPAETRTEAATRDLRRVPIHPDHWYPLAWSREVKAGQAHGVQFAGDPIVLVRTATGKIFALEDRCAHRQVPLHAGVVDGESIRCCYHGWTYDCSGRCIDVPYLGKERLPNGVRAYPCEERAGLIFVFPGNPALAGQQPLPEFASVADKHYKTRRFGREVKCHYSFMHENLMDMNHQFLHRRQMGMMRARSLGRRRGADFVEVDYTFSREGGKQPMGEALVFSKEGGEGNKDVMTVRTGYPYQTLKIRSGSGTLVMDLWIAYVPLDAAQRTNRTFGMLSIRRPGIPFALDLAWPLLVWFTERIFKEDRWIVEREQEAHDRQGEDWNHEVFPVIRDLRDLLRECGGRTVIPIQRLETQV

SEQ ID NO: 14158 - protein, 336 aa, Gossypium hirsutum
MESDTIECVSSIDEIVEDHEIPHHNLLHHPHPRHAPHHQFSSSKPHHNGTNNVNSISNIVGPTAIAPAASVHELLECPVCTNSMYPPIHQCHNGHTLCSTCKIRVHDRCPTCRQELGDIRCLALEKVAESLELPCKYYKLGCPETFPYYSKLKHEGICIYRPYNCPYAGSECSVVGDIPFLVAHLRDDHKVDMHTGCTFNHRYVKSNPREVENATWMLTVFHCFGQYFCLHFEAFQLGMAPVYMAFIRFVGDETEARNYSYSLEFGANGRKLIRKSAPRSIRDSHRKVRDSHDGLIIQRNMALFFSGGDRKELKLRVTGRIWKEQQNPDANMCIPN

SEQ ID NO: 14159 - protein, 81 aa, Methylobacillus flagellatus KT
MRVSAENGVLTISGERKLEKEEQGKKFHRIERAYGRFVRSFVLPDNVDPTKVTASMKDGALEVRLVKAEQAKPKQIEISVN

SEQ ID NO: 14160 - protein, 527 aa, Streptomyces coelicolor A3(2)
MAQTAREPARDGLPKGFRSAELGWPELHRIPHPPYRLPLLGDVVGASRRTPMQDSLRYARRLGPIFRRRAFGKEFVFVWGAALAADLADEARFAKHVGLGVANLRPVAGDGLFTAYNHEPNWQLAHDVLAPGFSREAMAGYHVMMLDVAARLTGHWDLAEASGRAVDVPGDMTKLTLETIARTGFGHDFGSFERSRLHPFVTAMVGTLGYAQRLNTVPAPLAPWLLRDASRRNAADIAHLNRTVDDLVRERRANGGTGGGTGSGSGSGDLLDRMLETAHPRTGERLSPQNVRRQVITFLVAGHETTSGALSFALHYLAQHPDVAARARAEVDRVWGDTEAPGYEQVAKLRYVRRVLDESLRLWPTAPGFAREAREDTVLGGTHPMRRGAWALVLTGMLHRDPEVWGADAERFDPDRFDAKAVRSRAPHTFKPFGTGARACIGRQFALHEATLVLGLLLRRYELRPEPGYRLRVTERLTLMPEGLRLHLVRRTAAAPAPGRRTAAPGAADDAGDTVSAPGCPVHRAGD

SEQ ID NO: 14161 - protein, 207 aa, Lactobacillus sakei subsp. sakei 23K
MDGLLVDSEKVYYQANQLAAQKMGFEVTAEDHQAILGTTDTYLRQYFLQKLGSPELVKQFIDLSYRTVDEIIQDQGVAIKPGLVELLDYCDNHGINRVIASSNFRTMVEDFMQSTGLKPRFNQIVSGDEVTHGKPHPEIFLKALDKLAIPAPSALVLEDSPNGILAASKADIPVIMVPDLIAPTAITNQQTLATVDNLAAVIPFLEK

SEQ ID NO: 14162 - protein, 445 aa, Bradyrhizobium japonicum USDA 110
MYSRRGFLGTAALASASAISGRVQAASIPEAPTMDKVVMQPPLHPISGPDYRPVVTLNGWSLPFRMNGDWKEFHLVAEPVVREFAEGMKVNLWGYNGQSPGPTIEAVEGDKVRIFVTNKLPEYTTVHWHGMIVPSGMDGVGGLNQPHIDPGKTFVYEFEMKKSGTFMYHPHSDEMVQMAMGMMGMVVVHPRDPNFRPVDRDYVFVMSTYRVDPGSYLPRVNEMTDFNMWTWNSRVFPGIDPLPVRLGDKVRVRIGNLSMTNHPIHLHGHSFAVTCTDGGWIPESAQIPETTTDVPVGAVRVFDVLADNPGDWAFHCHKSHHTMNAMGHEVRTLIGVSRKDLAKAVGKLAPDSMAMGSTGMAMGNMEMPAPDNTLPMMTGTGQFGPIEMGGMFTVMKIREDLARDDYRDPGPYKFPQGTVAYEVTPPAAEPARQQGGTPPMKNMKM

SEQ ID NO: 14163 - protein, 148 aa, Fagus sylvatica
MADQLTDDQISEFKEAFSLFDKDGDGCITTKELGTVMRSLGQNPTEAELQDMINEVDRDGNGTIDFPEFLNLMARKMKDTDSEEELKEAFRVFDKDQNGFISAAELRHVMTNLGEKLTDEVDEMIREADVDGDGQINYEEFVKVMMAK

SEQ ID NO: 14164 - protein, 121 aa, Arabidopsis thaliana
MAEQTEKAFLKQPKVFLSSKKSGKGKRIRGRILAGTCHSAKMQRTIIVRRDYLHFVKKYQRYEKRHSNIPAHVSPCFRVKEGDHIIIGQCRPLSKTVRFNVLKVIPAGSSSSFGKKAFTGM

SEQ ID NO: 14165 - protein, 183 aa, Triticum aestivum
  misc_feature (141)..(141): Xaa can be any naturally occurring amino acid
  unsure (1)..(183): unsure at all Xaa locations
MAPTVMASSATSVAPFQGLKSTAGLPVSRRSNGASLGSVSNGGRIRCMQVWPIEGIKKFETLSYLPPLSTEALLKQVDYLIRSKWVPCLEFSKVGFIFREHNASPGYYDGRYWTMWKLPMFGCTDATQVINEVEDVKKEYXPYVRIIGFDNMRQVQCVSFIGFKPPGCKIRQGLNSSLTTGHI

SEQ ID NO: 14166 - protein, 549 aa, Yersinia enterocolitica
MAAKDVKFGNDARIKIVRGVNILADAVKVTLGPKGRNVVLDKSFGSPTITKDGVSVAREIELEDKFENMGAQMVKEVASKANDAAGDGTTTATVLAQSIITEGLKAVAAGMNPMDLKRGIDKAVIAAVEELKKLSVPCSDSKAIAQVGTISANSDSTVGELIAQAMEKVGKEGVITVEEGSGLQDELDVVEGMQFDRGYLSPYFINKPETGSIELESPFILLADKKISNIREMLPVLEAVAKAGKPLLIIAEDVEGEALATLVVNTMRGIVKVAAVKAPGFGDRRKAMLQDIATLTAGTVISEEIGLELEKTTLEDLGQAKRVVINKDTTIIIDGVGDEAAIQGRLAQIRQQIEEATSDYDKEKLQERVAKLAGGVAVIKVGAATEVEMKEKKARVEDALDATRAAVEEGVVAGGGVALIRARSAITAAGLKGDNEDQNVGIKVALRAMESPLRQIVVNAGEEASVIANNVKRVQVATVTSYSEEYGDMIAMGILDPTKVTRSALQYAASIAGLMITTECMITDLPRDDKGADMGAGGMGGMGGMGGMM

SEQ ID NO: 14167 - protein, 341 aa, Oryza sativa
MVIMESCVPPGFRFHPTDEELVGYYLRKKVASQKIDLDVIRDVDLYRIEPWDLQEHCRIGYEEQSEWYFFSYKDRKYPTGTRTNRATMTGFWKATGRDKAVRERSRLIGMRKTLVFYKGRAPNGHKTDWIVHEYRLESDENAPPQEEGWVVCRAFKKRTMQPPRSSIGAWEASYSYHDPAVFVGGGEHFKQEAAAELDGVAAAAGANAFLRYSTRLAELPQLESPPLPSQGSQAASAVVDGEEDNADSSRRPGGGGGAAAAVTTDWRAFDKFVASQLSPEEQHTCRATDDDDMAALLLLDGGGQEDDAGRWLGSAGLLSAVAADATTDCGLGTSCVPGDIN

SEQ ID NO: 14168 - protein, 1139 aa, Arabidopsis thaliana
MSSELQISPAIHDPQGQEKQQQAAGVGILLQIMMLVLSFVLGHVLRRHKFYYLPEASASLLIGLIVGGLANISNTETSIRQQNMLFSLTYLFAPSQASVYNLYLGGVMFLMYRLPFVECLMFGSLISATDPVTVLSIFQELGSDVNLYALVFGESVLNDAVFLFPMLLLADGDISVQDNVLGEKSFLWTEFLYGDSQILLKHFTSFHTHRRVVSLNVKHLFKYAGLDVDNYMLAEGLSLSGIVSILFTGICLLFGIFVLLRAANVFGCGYLVNLARPAHRKIPMTHQKALWYSGLRGAMAFALALQSVHDLPEGHGQTIFTATTAIVVLTVLLIGGSTGTMLEALEVVGDSHDTSLGDGFEVVNSRYMTSYDDEDTPPGSGFRTKLREFHKSAASFTELDRNYLTPFFTSNNGDYDDEGNMEQHHENVTARQKCGPCLFAGIGDGLSLRNSKINVGKSKFFSVNRRRLARAALVQARPKEDGAAASPSPSSRPASVVQYRRADLADDLQAEARALGRAIDASIYSPELIARKHGSQPFKALRRSLEILGALGGFALKLGIDQKQGNLEKNMKKRAIELRRIFTRLGPTFVKLGQGLSTRPDLCPPDYLEELAELQDALPTFPDAEAFACIERELDLSLETIFSSVSPEPIAAASLGQVYKAQLRYSGQVVAVKVQRPGIEEAIGLDFYLIRGVGKLINKYVDFITTDVLTLIDEFACRVYQELNYVQEAQNARRFKKLYADKADVLVPDIFWDYTSRKVLTMEWVEGTKLNEQLAIESQGLKVLDLVNTGIQCSLRQLLEYGFFHADPHPGNLLATPDGKLAFLDFGMMSETPEEARFAIIGHVVHLVNRDYEAMARDYYALKFLSPDVDVTPIIPALRDFFDDALNYTVSELNFKTLVDGLGAVFYQYPFNVPPYYALILRSLTVLEGLALYADPNFKVLAASYPYFAKRLLTDPNPYLRDALIELLFKDGKFRWNRLENLLQQGSKDRDFSAKDALQPVLKLLLDPNGEELRLLVIKEAVRVSEAIALGTVVDTYNSLPEFLRSLVFNGNGNGPLTMSTAELQSTLELRDQVSRIWGLLQSSESFDPAILQPILQVLQQPEARRLGGRVAGGVGQRLAARFLQQLLRATTPSSAPSP

SEQ ID NO: 14169 - protein, 434 aa, Cytophaga hutchinsonii
MRNKILSDGAKELSYEIREIVKKADLINKNGQSIVFENIGDPIQKNNVVPQWIRETISNLTLDNKSYSYSPSKGILKTRQFLAELNNKKAGAQITADDILFFNGLGDAIAKVYQFISRSSRVIGPSPAYSTHSSAEAAHASQDPITYKLDPNNHWYPDLDDLYNKVKYNPNIIGILIINPDNPTGMVYPLETLKRIVEIAREFNLFLLSDEIYLNITYNGARAYSLAEVIEDVPGIAMKGISKEFPWPGSRCGWMEYYNRGKDQDFDKFCSALDNAKMIEVCSTTLPQLAIPVIMSDPRYLPYREELNSKIGKRSKIIAGILGQIPELMFNETYGAFYNTIVFKDGVLNDKQTLPIENAANKALVEKWISEPNVDLDKRFVYYLLAAKGICVVPISSFCSDLKGFRVTLLEENEELLEQTFTSIRDAIRLYLKS

SEQ ID NO: 14170 - protein, 345 aa, Picrophilus torridus DSM 9790
MKALILHGGSGTRLRPLTYTASKQLIKIAGKPISQYGIEDLRDNGIKDIGIILGDNSPRDVINYYGDGSDLGIKITYIYQGNPRGIADAVLKARDFIANDDFIVYLGDNIVLNGIKGMINFNGDASILLAKVDNPNRFGVALIKDNNIVKLIEKPKEFVSDLALVGVYAFTPEIFKYIEELKPSQRGELEITEAIQALIDNNKIVNFSIINDWWKDSGTPRDLLEANIKLLDKFTPESDNSNDMYGRINMPKTSNIVNSKIYGPSYIGNNVTIKNSYIGPYTSIGDNCIIENSELSNSIIFDNSVIKEAKLIESIIGEDASIGKTYNRPISSKFVVGKGSMISLE

SEQ ID NO: 14171 - protein, 554 aa, Bacteroides fragilis NCTC 9343
MEQEQRFIGYIEQSIINNWDANALTDYKGITLQYKDVARKIAKFHIILEMAGIQPGDKIAVCGRNSAHWAVTFLATVTYGAVIVPILHEFKADNIHNIVNHSEAKLLFVGDQVWENLNEDRMPLLEGISSLTDFTPLVSRNDKLTYAHEHRNEIYGQRYPKNFRPEHISYRKDMPEELAVINYTSGTTGYSKGVMLPYRSLWSNIAYCHEMLPVKPGDHIVSMLPMGHVFGMVYDFLYGFSAGAHLYFLTRMPSPKIIAQSFAEIKPKVIACVPLIVEKIIKKDILPKLDNKIGKLLLRVPIVNDKIKAAARQAAMEIFGGNFDEIIIGGAPFNAEVEAFLKQIGFPYTIAYGMTECGPIICSSRWETLKQASCGKATSRMEVKIDSPDPENIAGEIICKGTNLMLGYYKNTGATSQIIDVNGWLHTGDLATMDSEGYVTVRGRSKNMLLTSSGQNIYPEEIESKLNNMPYVSESLVLLQKDKLVALIYPDFDDAFAHGLLQSDIEKIMETNRIELNQQLPAYCQITKIKIHFEEFEKTAKKSIKRFMYQEAKG

SEQ ID NO: 14172 - protein, 395 aa, Bacteroides fragilis NCTC 9343
MDSNHLSPLRKGVVGVQFLFVAFGATVLVPLLVGLDPSTALFTAGISTLLFHLVTKGKVPIFLGSSFAFIAPIIKATELYGLAGTLSGMVGVAMVYFVMSALVKWQGIRLIERLFPPVVIGPVIILIGLSLAGTGVNMAKENWTLALLSLFTAVIVSIRAKGLLKLIPIFCGIIMGYIAALIFYDVDMSGVRNAAWLGFPQFVFPQFSWEPILFMMPVAIAPVIEHIGDVYVVNTVTGKDYVKDPGLHRTLLGDGLACLCAGLLGGPPVTTYSEVTGAMSLTKVTNPQVIRIAAITAILFSVIGKVSALLKSIPSAVLGGIMLLLFGTIACAGIANLVNNCIDLSRTRNIIIVSLTLTIGIGGAVLAWGEFSLSGIGLAALVGVGLNLVLPREER

SEQ ID NO: 14173 - protein, 438 aa, Cytophaga hutchinsonii
MKEQNNIPTSKVERATKFVQTGAKIGGNYIKHYAKKAFNPELTKEQLHEDNSKDVYETLSQLKGSALKVAQMLSQDKNMLPQAYVDKFTMAQYSAPPLSYPLVVKTFQKYFGKSPESMFDTFERNASNAASIGQVHKATKDGKVFAVKIQYPGVAESVSSDLKLVKPFALRLMNMKEKDLDMYMDEVESKLIEETDYELELRRSNEISTQCAHITGLVFPAYYPEYSSKRILTMDWLEGLHMKEFLATNPSQEIRNQIGQLLWDFYDFQMHQLRTVHADPHPGNFLMRSNGSLGVIDFGCVKEIPEEFYTEYFKLLNKEVIEDKTELLKTFERLNFFDAEDTALQREIFFDLFCEMTHLLGLPFYSETFDFSDDSYFKRIYDFGEHISNVKEIKDARQARGSRHGIYINRTYFGLYNLLNQLGANVRTKSYGEVAIEV

SEQ ID NO: 14174 - protein, 344 aa, Lolium perenne
MTVVNTVAQQLPGHGQTVCVTGAAGYIASWLVKLLLERGYTVKGTVRNPDDPKNAHLKALDGAVERLILCKADLLDYDAICAAAEGCHGVFHTASPVTDDPEQMVEPAVRGTEYVINAAADAGTVRRVVFTSSIGAVTMDPNRGPDVVVDESCWSDLEFCKKTKNWYCYGKAVAEQAAWEAARKRGIDLVVVNPVLVVGPLLQPTVNASAAHILKYLDGSAKKYANAVQSYVDVRDVADAHIRVFEAPEASGRYLCAERVLHRGDVVQILSKLFPEYPVPTRCSDEVNPRKQPYKMSNQKLQDLGLQFTPVNDSLYETVKSLQEKGHLLVPSKNIPEGLNGVTA

SEQ ID NO: 14175 - protein, 174 aa, Oryza sativa
MAKQGVKKTRDANKKRMDLILRLILAANVIYIVVRMAVMHSSFTWKHWIGLAVTSAAYFLPYKQLANMSEPEYSENGELINAGYDLNAGGMSEYLQDVIYITLFVQLMSIFSDKFWWTYLVIPAYGGYKISGLLRGAFFGGSSEGEEEDEKTRKKREKMEKKASRGKIIKTRTR

SEQ ID NO: 14176 - protein, 185 aa, Brassica napus
MNLSAITQGNDNDVPAPGNEFAQFAAGCFWGVELAFQRVSGVTHTEVGYTQGFLHNPSYEDVCTNTTNHAEVVRVQYDPKECNFESLLDVFWSRHDPTTLNRQGKDVGTQYRSGIYFYTPEQEKLAAVSMERHQKQMESKIMTEILPAKKFYRAEEYHQQYLSKGGQSCSGIACNSPLMCSAATA

SEQ ID NO: 14177 - protein, 377 aa, Burkholderia fungorum LB400
MSYPTIDHRGPEFGELGLTVLDGIKKIFRTQQPVVIYPASGTGAWEAALSNTLSPGDHVLMFETGHFATLWKKMADSLGLKPEFLGLPGIEGWRRGVQPQMIEERLRADTQHAIKAVCVVHNETSTGVTSDIAAVRHAIDAAGHPALLLVDTISGLACADYRHDEWGVDVTVSGSQKGLMLPPGISFNAISPKAVAASKQAKLPRSFWDWAEIVEMNKTGYWPYTPNTNLLYGLSEALEMILGEGLDNVFARHERLAEATRRAVRAWGLEIQCADPAVYSPVLTGVMMPDGIDADAVRKLIYERFDMSLGTGLGKMKGRMFRIGHLGDCNDLMLLATLAGCEMGLRLAGVPLEGSGLPAAMEWLSQPTTALGLKVAA

SEQ ID NO: 14178 - protein, 255 aa, Triticum aestivum
  misc_feature (56)..(56): Xaa can be any naturally occurring amino acid
  unsure (1)..(255): unsure at all Xaa locations
MSTDVVSWCYATVVPRARSSTIVASLGTPAPSNSSSFRPKLIRNTPVQAAPVAPAXMDAAVERLKTGFEKFKTEVYDEKPDFFEPLKAGQAPRYMVFACADSRVCPSVTLGLEPGEAFTIRNIVNMVPSYCKNKYAGVGSGIEYAVCALKVEVIVVIGHSRCGGIKALLSLKDGADDSFHFDEDWVRIGFPVNKKVQTECASMPYDDQCTVLEKEVVNVSLQKLLIYPFVKEGVSNGTLRLVGAQYDYVSWQFET

SEQ ID NO: 14179 - protein, 440 aa, Legionella pneumophila str. Paris
MVNTDQLIAKDLKHIWHPCSQMKDFETFPPIVVNKAQGSYLYTNKGPVIDAISSWWCKSLGHGHPAVIAAIKNQLDCFEHVISANTTHPAAVELAEKLSEITGKQHVFFASDGSSAVEIAMKLAIHASQIKGHKNKNQFIALKNGYHGETIGTMSVSDLGLYKTPYASFGVQCHFIDDIPYVSGLKDPLWTNCDAYWNNVVQQLNKICDKVCAILLEPIIQGAGGMLCYSADFLSKISSWAKEKDIYLIADEIMTGIGRTGEWLACDHARVQPDLICLSKGLTSGSIPFSCVMIDSTLFDLFYDDYHTGKSFLHSHTYSGNPLAIGAALATIKTIEQDNILMHSQELGKIMFSYLQDIARDSRKLVNVRGVGAVVAADLIESGQARIGFKIYQEAIKQGALIRPIGNTLYWLPPLNTDKEIIGKLAEITLNSIEKAYNKA

SEQ ID NO: 14180 - protein, 143 aa, Gossypium hirsutum
GCERTTEGYGCEEDDRRELKHESQCSYRPYSCPYAGSECTVIGDFPYLVAHLKDDHKVDMHNGSTFNHRYVKSNPHEVENATWMLTVFSCFGQYFCLHFEAFQLGISPVYIAFLRFMGDDNEAKNYSYSLEVGGNGRKMIWQG

SEQ ID NO: 14181 - protein, 181 aa, Brassica napus
  misc_feature (58)..(58): Xaa can be any naturally occurring amino acid
  unsure (1)..(181): unsure at all Xaa locations
YINMDGNGDDVDWFPSLIFQELYAKLNRMASLAADMFEGRERFATSLLMRLTETVILXWLSGDQSFWDDIEEGPRPLGPLGLRQLYLDMKFVICFASQGRYLSRNLPRGTNEIITKALAAFSATGLDPYSDLPEDDWFNEICLDGMERLSGKAKGNNGEVHSPTASVSAQSVSSARSHGSY

SEQ ID NO: 14182 - protein, 402 aa, Photobacterium profundum SS9
MLNINRRDLKMKKVLLFTPGPVNLAENVRSSIGKKDICHREVEFDRLLISIETKLLQVFNVDTDDYRAVVITGSGTAANESILSSVVGNKHILILSNGEFGERLNKISKIHNKNTHFLPFPWGEGFDLKKVDDYLTKHQIDVVAMVHHETSSGMLNSLDDIGLLTKKHGATFVVDCVSSAGAEVIDMEKCNIAFISSSSSKAIGSYSGLSFVIGKTEEFEKLKDLPAKTMYLNLYTFYSFIKKYSQTPNTPAVHLFYALEQALSNIIDKGVDNYYEDLKDKANLLRQGILNLGLKFLIEQKNMCSILTTVCVPLNVNVSVLRKELRDKSIVIYEGKGCFQGKVFQVGNIGELSINEIEYFLSSLKEILNDFLLIGNNDLSAVEGIYINDECRIEDEMVRMEL

SEQ ID NO: 14183 - protein, 380 aa, Legionella pneumophila str. Paris
MTLNIKINEYTAQLQEQGLLRTRQILETGKIDYIRFDSNDYLSLTEDRRIAEAYQKGYELYPCGSGASMVLSGYHSSHQTLERAFAEMLGVDDCLLFSSGYCANLAITALLGRLGTHCFIDKSVHASIYDGLALSRVTYSRYIHNDMNALSALLKSHLGDSVLITEGIFSMSGQIAPLSTISTLCKENGSELFVDEAHAFGVIGPQGMGSVPGHGLTQNEVPLRVIPFGKAFASQGAVVGGRKDWINALLQTARSFVYSTAISPALCYGLLKTLEIIAAADSRREKLNQLVAQFKELIKSSPLNWLDSDTPIQQLRLGCPHKALHYASELKKDGIYCSAIRAPTVNSASSGLRIIINYKHTIEQIIELFNKLHLIHEYSS

SEQ ID NO: 14184 - protein, 181 aa, Lactuca sativa
MASISSSAVATVNRSTPAQASLAAPFTGLKSNVAFPVTKKANNDFSSLPSNGGRVQCMKVWPPIGLKKYETLSYLPPLSDEALSKEIDYLIRNKWVPCLEFELEHGFVYREHHHSPGYYDGRYWTMWKLPMFGCTDSAQVMKEVGECKKEYPNAFIRVIGFDSVRQVQCISFIVSKPPGVL

SEQ ID NO: 14185 - protein, 477 aa, Bdellovibrio bacteriovorus HD100
MKKTLTTSAGIPISENQHSLTSGPRGPVALQDYHLIEKLAHFNRERIPERVVHAKGSGAYGTFTVTHDITRFTKAAIFSKIGKKTEAFLRFSTVAGEKGSADTERDPRGFALKFYTEEGNWDIVGNNTPVFFERDPLKFPDFIHSQKRDPQTGYKNPVRMWDYWSKAPEALHQITILFSDRGIPDGYRFMNGYGSHTFSFINDKNERVWVKFHFKSMQGIKNLPVAKAVELAGTDPDYAGRDLFEAIERKEFPRWALKVQIMTERQAEQFRFDPFDLTKVWPHSEFPLLDVGILELNRNPENYFAEVEQAAFSPSNVPPGVGFSPDKMLQGRLFAYPDAQRYRLGVNYQYLPVNRPHSEVNSYHRDGSMRFDGNGGRQDNYEPNGFGGPVQNESFKDPALNLSGTLDRHDSHKDNDDFTQAGNLYRMLSEEEKDRLTSNIAGTMKTISEDLQTKNIEHFKRCDPDYGGRIAAKLGLD

SEQ ID NO: 14186 - protein, 384 aa, Methylobacillus flagellatus KT
MAYHDPYPQRPAPDHFVRRWLFITACVAALMLFWQFLPAIEAWFSPRQAAERTVTPRGDLAADEQATIELFEKSRASVVYITTSQLVRDVWTRNVFSVPRGTGSGFIWDDAGHVVTNFHVIQGASEATVKLADGRDYQAALVGTSPAHDIAVLKIGVGFKRPPAVPVGTSADLKVGQKVFAIGNPFGLDWTLTTGIVSALDRSLPGESGGVTIEHLIQTDAAINPGNSGGPLLDSAGRLIGINTAIYSPSGASAGIGFAVPVDTVMRVVPQLIKTGKYIRPALGIEVDEQLNRRLQALTSTQGVFVLRVAPGSAAQKAGLSGITVGPEGIVPGDRITGIDGAPVDDVAKLLARLDDRKVGDVVVLSVERAGKPREVRVELQPGA

SEQ ID NO: 14187 - protein, 215 aa, Haemophilus somnus 129PT
MQINSVIFDMDGVMIDSEPQWAKAQIAVLAEFGIAITEKECEKFTRGKRIDELSETWIKKFNLSVSNQKLSEAILENGCSAIAQTGIALKGLYELLAFLKSNHIKLAVATSSPPVVIKTIFDRLNLWDYFPIQCSAMDEEYGKPHPAVYLRAVKKLGIEKQECIVIEDSITGLIAAKAANLTTFLVNSNYENEKFSIADERMASLLDVMTKLKLY

SEQ ID NO: 14188 - protein, 483 aa, Cupriavidus necator
MELQHTALLRTHCLIDGEWTGAQSGAELAVCNPATGERIGSVPLAGAAEAEQAVRAAERALPAWRAQTGKAVPPVLRRWADLMLAHQEDLARLMTAEQGKPLPDARGEVAYAASFLEWFGEEAKRVDGEVLASPRSSQKMLVLREPVGVCAAITPWNFPAAMITRKVGPALAAGCTIIVKPAEQTPLTALALAVLGEQAGVPRGVLQVVTGDAVQIGGVLCASPVVRKLSFTGSTAIGKLLMAQCAGTVKKLSLELGGNAPLIIFDDADMDSAVEGIIASKFRNTRQTCVCANRIYVHDRVYDEVARRLVSAVEQLLPGHGVDSGVTQGPLIDADAVAKVEAHIADALAQGATVLTGGQRHALGGTFFAPTVLANATASMRVAREETFGPLAPLFRFTSEAEVVAMANDTESGLAAYFFSRDMAKIWRVAQGLEYGMVGINTGLISNEVAPFGGVKQSGLGREGSRHGIDEYLETKYLCMEVE

SEQ ID NO: 14189 - protein, 455 aa, Vibrio parahaemolyticus RIMD 2210633
MEKVMATHFDYICIGGGSGGIASANRAAMYGAKVALIEAQDLGGTCVNVGCVPKKVMWHGAQIAEAMNLYAEDYGFDVDVKGFDWSKLVESRQAYIGRIHQSYDRVLGNNKVNVIKGFAKFVDEKTVEVNGEHYTADHILIAVGGRPTIPNIPGAEYGIDSNGFFDLAEQPKRVAVVGAGYIAVEIAGVLHALGTETHLFVRKESPLRSFDPMIIDTLVEVMEAEGPTLHTHSVPKEVVKEADGSLTLHLENGESQNVDQLIWAIGRHPATDAINLASTGVATNEKGYIKVDEYQETNVKGIYCVGDIMEGGIELTPVAVKAGRQLSERLFNNKPNAKMDYDLVPTVVFSHPPIGTIGLTTQEAEEKYGKDNIKVYTSGFTAMYTAVTKHRQPCKMKLVCAGEEETVVGLHGIGFTVDEMIQGFGVAMKMGATKADFDSVVAIHPTGSEEFVTMR

SEQ ID NO: 14190 - protein, 530 aa, Saccharomyces cerevisiae
MKFSAGAVLSWSSLLLASSVFAQQEAVAPEDSAVVKLATDSFNEYIQSHDLVLAEFFAPWCGHCKNMAPEYVKAAETLVEKNITLAQIDCTENQDLCMEHNIPGFPSLKIFKNRDVNNSIDYEGPRTAEAIVQFMIKQSQPAVAVVADLPAYLANETFVTPVIVQSGKIDADFNATFYSMANKHFNDYDFVSAENADDDFKLSIYLPSAMDEPVVYNGKKADIADADVFEKWLQVEALPYFGEIDGSVFAQYVESGLPLGYLFYNDEEELEEYKPLFTELAKKNRGLMNFVSIDARKFGRHAGNLNMKEQFPLFAIHDMTEDLKYGLPQLSEEAFDELSDKIVLESKAIESLVKDFLKGDASPIVKSQEIFENQDSSVFQLVGKNHDEIVNDPKKDVLVLYYAPWCGHCKRLAPTYQELADTYANATSDVLIAKLDHTENDVRGVVIEGYPTIVLYPGGKKSESVVYQGSRSLDSLFDFIKENGHFDVDGKALYEEAQEKAAEEAEADAEAEADADAELADEEDAIHDEL

SEQ ID NO: 14191 - protein, 258 aa, Saccharomyces cerevisiae
MSETELRKRQAQFTRELHGDDIGKKTGLSALMSKNNSAQKEAVQKYLRNWDGRTDKDAEERRLEDYNEATHSYYNVVTDFYEYGWGSSFHFSRFYKGESFAASIARHEHYLAYKAGIQRGDLVLDVGCGVGGPAREIARFTGCNVIGLNNNDYQIAKAKYYAKKYNLSDQMDFVKGDFMKMDFEENTFDKVYAIEATCHAPKLEGVYSEIYKVLKPGGTFAVYEWVMTDKYDENNPEHRKIAYEIELGDGIPKMFHVD

SEQ ID NO: 14192 - protein, 234 aa, Zea mays
TRKTWFDDKPNDGTAAHVISRGGPVERGQIDEEGIREGEDLHRGLKARQISMIAIGGSIGTGLVIGSGSGLAKGGPVGLLIAYVIMGAMCFGVMCSLGEMATYLPHKKGFGGYASRFVDPSMGFALGWNYLMKYLVVTPNNITAGAIVVRYWTDKVPIGAWITIYIGGCFLVNLLGIEVFGEVEFWASFIKIIVLAGLILLGIIIDLGGAVVDRIGFRYWRGQPFSHYIFQNDT

SEQ ID NO: 14193 - protein, 454 aa, Bradyrhizobium japonicum USDA 110
MPLLSRQQRSAAVTLHQIPNTIKTDSFWMPFTANRQFKKAPRLFSSAEGMHYTTVDGRKVIDGSAGLWCVNAGHGRKQIAAAVERQLMTLDFAPTFQMGHPLAFDFAERLAEIAPKGLDRIFFTNSGSESVDTALKIALAYHRATGQSSRTRLIGRERGYHGVGFGGTSVGGMVANRRAFATLLPGVDHIRHTHDLSRNAFAKDQPEHGAELADDLERLVGLHGAETIAAVIVEPVPGSTAVLPPPKGYLQRLREICDKHGILLIFDEVITGFGRLGTPFAANFFGVTPDLMTTAKGITNGTIPCGAVFASRKVHDGMMVGPENQMELFHGYTYSAHPTACAAGIATLDIYKDEGLLTRGASIAEYWRDALHSLKGLPNVVDIRNCGLMGAVELAPRAGVVGARGYDVMVDCFNTGLYLRMSGDSFAMSPPLIVEKSHIDQMVSILGDAIKKVA

SEQ ID NO: 14194 - protein, 466 aa, Pseudomonas putida
MKSYDVVIIGGGPGGYNAAIRAGQLGLTVACVEGRSTLGGTCLNVGCMPSKALLHASELYEAASGDEFAHLGIEVKPTLNLAQMMKQKDESVTGLTKGIEYLFRKNKVDWIKGWGRLDGVGKVVVKAEDGSETALQAKDIVIATGSEPTPLPGVTIDNQRIIDSTGALSLPQVPKHLVVIGAGVIGLELGSVWRRLGSQVTVIEYLDRICPGTDTETAKTLQKALAKQGMVFKLGSKVTQATASADGVSLVLEPAAGGTAESLQADYVLVAIGRRPYTKGLNLESVGLETDKRGMLAQRTPPTSVPGVWVIGDVTSGPMLAHKAEDEAVACIERIAGKPHEVNYNLIPGVIYTRPELATVGKTEEQLKAEGRAYKVGKFPFTANSRAKINHETEGFAKVIADAETDEVLGVHLVGPSVSEMIGEFCVAMEFSASAEDIALTCHPHPTRSEALRQAAMNVDGMAMQI

SEQ ID NO: 14195 - protein, 797 aa, Yarrowia lipolytica CLIB122
MSQRPTGLKIDMPESFSDQMAKAKKYGNLGANSSGPSSAGPMRTPSWGILNVPELLNDFHHHTLESKLDPVKEGYDEALPMRSRRRTLVNGEIRNSEDREEAAVELDTLKQECDHVIHNHDCDLNEPRIPVYDPLGHIHDHTHDHTHDHIHDHIHDHIHDHTQDHIHDHSHAHAHTHDHKHTHDGHDHSHDHNLTNTHTHTHDHGSCSHGHGHSHSHDPREIPDLQIHIPPLSSLLQSIPSFISLPTSLLATSLLCLQLNVLSPIVSALLVAGCTTFWAGVFRLFGIKHTIGTRKGARNTVVLTAGIFALVISAIFLGTTRVTAIVFVSLNVPLKKVPEWRSSWQYLVYLLISIAHDVVVEGGPLLDFAIGYLALGVAVFVLQQNLETPSSQAIPLGLLITIPTALFVSLTIEQIILLVVACGSCGVFLIAKRDLQPNRINGVFSSLIGFTLDLSIKSRATPSEALVCGLSIFVPTLVSEDGEDASDKSIKKRPGLIDSIISHSDTRNIFYFLLLNFSFMLIQLLYSILSHSLGLLSDSIHMFFDCLALMVGLVASILSKLPPSSRFPYGLGKVETVSGFTNGCLLVAIAGGVCIEALGRIYNPVELERTAELLVVSALGLLVNIVGIVVFNHGHAPGEECSHGHSHGGHDHSEHNSNTYGIYLHIMADTLGSVGVIISTILTWYFGWSGFDPLASMLIAILIFLSALPLVSTAAKTLLLSLTDSQEYTIRNILNDISVMPGVASYDEPRFWSDGGAVRGTIHVKLQQDASSKQVKQTILQRMQQDHVKDVFIQIDA

SEQ ID NO: 14196 - protein, 172 aa, Zea mays
  misc_feature (22)..(22): Xaa can be any naturally occurring amino acid
  misc_feature (38)..(38): Xaa can be any naturally occurring amino acid
  misc_feature (43)..(43): Xaa can be any naturally occurring amino acid
  misc_feature (66)..(67): Xaa can be any naturally occurring amino acid
  misc_feature (104)..(104): Xaa can be any naturally occurring amino acid
  misc_feature (106)..(106): Xaa can be any naturally occurring amino acid
  misc_feature (133)..(133): Xaa can be any naturally occurring amino acid
  misc_feature (153)..(153): Xaa can be any naturally occurring amino acid
  unsure (1)..(172): unsure at all Xaa locations
RLRRTVRKVPRKPGPTAVNPPXSVTEANLQYYQQESSXTEHRXGTFQNLTRHILGDLSGPGTSRTXXTFEGSFEKGIGCVASRKHEMLVAEIEYMQKGKIELQXDXMYLDSKINERAGMQQQEASVIHHQGTXVYESSSHQSEQYNRNYFRLXLLEPNQNSSDQNQPPLQLV

SEQ ID NO: 14197 - protein, 311 aa, Geobacter metallireducens GS-15
MTARKYSDEELKQRLTPLQYRVTRKSGTEPPFDNTYWNEHREGLYVDIVSGEPLFSSRDKFDSGTGWPSFTRPVAPNSVKEETDIGFGTVRTEVRSKEADSHLGHLFTDGPRDKGGLRYCVNSAALRFIPVDDLEKEGYGSYLPLFGRKAPAAAVKQVATLAGGCFWGMQDLLRKQPGVIATEVGYTGGSVPNATYENHEGHAEAVRIEFDPTKTSYEALLRFFFRMHDPTTLNRQGNDIGSSYRSAIFYHDAEQKRIAEKVKAEVDASGKWKRPVVTEIVPAGPWWRAEEYHQDYLVKNPGGYTCHWVRE

SEQ ID NO: 14198 - protein, 194 aa, Yarrowia lipolytica CLIB122
MADSDSKPSSGNELELREQDKWLPIANVARIMKSALPENAKVSKEAKECMQECVSEFISFITSEASEKCAAEKRKTVNGEDILFAMLSLGFENYAEALKIYLTKYRQNQNYKQENRSENRKKKTLPAQEGAVAAAATGSNPVTETNSPSQQQQEEYYAAYDVPINGQDPTEQRFSEEPTQDEKAMYDAYTGDYY

SEQ ID NO: 14199 - protein, 489 aa, Thermobifida fusca YX
MTDETGRRDIHGEAEDPVTGPAKPPSGPYTGSASGPATAPPASPGGMSPGPAWSPIGEQPAASGWNPSAGPGPVRQTPSSHTQTWAVPPGLRNPGPPPDAVHSTGQWPVFTPGIPAEEPQQRPRRNGMPLWAVLLLVMVVAAGSAGVGGMVGASLVAPEESPPPQSSGALNNEVPSDVPSRAPDTIAGVAQRVSPSVVSIRSTSPQLSGNGSGFVIEGNYVVTNNHVVDAVRRGGIEVVYSDGHVSRAEVVGAAASSDLAVLKLADPLDVEPLEFGDSDEVAVGDTVIAIGAPLGLDGTVTSGIVSALNRPVTVGEDGQEAYLSAIQTDAAINPGNSGGPLVNEQGLVIGVNSAIATMSGSSGEQSGSIGLGFAIPSNQASRVVEQLIETGEAPHAVIGAILDLRYPEQGALIMEAGRGAETVMRGGPADQAGLRPGDVIVEFDGTTVRDATQLITLIHTKAPGDRVEVRYLRNGREHTTTLVLGSSND

SEQ ID NO: 14200 - protein, 150 aa, Zea mays
MSQTVVLKVGMSCQGCVGAVNRVLDKMEGVESFDIDIKEQKVTVKGKVEPEAVFQTVSKTGKKTSYWPVEAEAEANAEAEPKVETETKPEAETKTEGKVVEVLGAKVDATKVEPEADVEPKLAETETKTEGKVDDEVLDAKFDPKVDAKG

SEQ ID NO: 14201 - protein, 314 aa, Fragaria x ananassa
MATLVSPPNFCAKEDAEALRKSVKGWGTNEKAIISILGHRNAGQRKEIRAAYEQLYQEDLLKPLESELSGDFEKAVYRWTLDPADRDAVLANVAIKKSTDVYNVIIEISCIHSPEELLAVRRAYQLRYKHSVEEDLAAHTTGDIRKLLVALVTAYRYDGHEINAKLANSEADILHDAIKDKAFNHEEIIRILSTRSKTQLMATFNKYRDDQGISISKNLLEEGANDFQKALHTAIRCLNDPKKYFEKVLRNAIKRVGTDEDALTRVIVTRAERDLRDIKEVYYKKNSVPLEQAVAKDTSGDYKAFLLTLLGKED

SEQ ID NO: 14202 - protein, 661 aa, Anaplasma marginale str. St. Maries
MMGRESYQIMAKAVRLLSVDAIQNAASGHPGMPLGMADVATVLFSKFLRFSVNHPSWFDRDRLVLSNGHGSMLMYSIMHLVGYIGIDDIKRFRQLHSITPGHPEYGCTTGVEVTTGPLGQGLGCAVGLAIAERMFSQKFGDDLINHHTYAIVGDGCLMEGISHEAASLAGHLGLDHLIVLFDDNGISIDGSTSLATSDDVRARFSAYGLDVFEVDGHDFGEIEQAIGAARESRGKPSIICCKTVIGKFMPPKAGTSAAHSWPFSPEDAQEFRNAIGWEGEKFEIPEEAKALWRKVRARAELECELWMKKFAGCAKAEVLNAILSDGVPNSVIDELDTLKNTLCETRPAEATRKSFGRVLEFLAMRVNKLVGGSSDLTSSNNTKVPCMGVVSSKNFDASYVHYGVREHAMAACMNGMALHGGIIPYGGTFLVFSDYCRPAIRLSALMRVQVIYVMTHDSIGVGEDGPTHQPVEHLASLRSIPNLYVFRPADAVEVLECWEMALKLTKSPSLFALSRQSVGFSRACYSHNNLASRGAYIIREHEGDFRVTIFSTGSEVGVALGAREILQDQGIGTRVVSMPCWRIFDEQDEEYIASLLGNGSLKVAVEAACSLGWHKYIGEKGVFMGLDRFGASGKCEDLYRHFGITKENVAGTILAKLRSGV

SEQ ID NO: 14203 - protein, 112 aa, Brassica napus
MASTQSLTVAAKTLRNRIFSRSGSTSAGPSRWATPGHEERPKGYFMNRTPPPPGQSRKWEDWELPCYITSFLTIVILGVGLNAKPDLSIETWAHQKALERLEMERLAGASSD

SEQ ID NO: 14204 - protein, 126 aa, Debaryomyces hansenii CBS767
MSKISDTALHNSDYEIKEQDRFLPIANVGRVMKKALPPHAKLSKESKECIQECVSEFISFITSHASDRGRLEKRKTLNGEDILWSMYILGFENYSETLKIYLAKYRQVCIFIHSVFIREAITKTLV

SEQ ID NO: 14205 - protein, 417 aa, Haemophilus influenzae R2866
MLEQMGKQAKDAAFILAQLTTAEKNRALSIIAEQLEQQAPLILAENAKDIELAKQNGLSDAFIDRLLLTQERLQGIANDVRHVISLADPVGKIIDGGTLDSGLKIERVRTPLGVIGTIYEARPNVTIDVASLCLKTGNAVILRGGKETQFSNKILIEVVQNALEQAGLPKFAVQAITDPNRELVMQLLKLDRYVDMIIPRGGSGLHELCKQHSTIPVIVGGVGVCHTFVEKSADQNKAIFVIDNAKTQRPSTCNTLETLLVQHSIAEEFLPKLVSHLATKNVKYHAKSTALNILKQAGANVCEVTEKELRKEWGSLDLNVVVVEDIHAAIEHIRQYGTQHSESILTSSQNLARQFINQVDAAAVYVNASTRFTDGGEFGLGAEVAVSTQKLHARGPMGLEALTSYKWVCEGEYTVRK

SEQ ID NO: 14206 - protein, 555 aa, Bacillus subtilis
MKTEQTPWWKKAVVYQIYPKSFNDTTGNGVGDLNGIIEKLDYLKTLQVDVLWLTPIYDSPQHDNGYDIRDYYSIYPEYGTMEDFERLVSEAHKRDLKVVMDLVVNHTSTEHKWLRGDLFNRQPYRDFYIWKKPQENGSVPTNWESKFGGSAWELDEASGQYYLHLFDVTQADLNWENEEVRKHVYDMMHFWFEKEIDGFRLDVINLISKDQRFPNAEEGDGRSFYTDGPRVHEFLHEMNEKVFSHYDSMTVGEMSSTTVDHCIRYTNPDNKELDMTFSFHHLKVDYLTAEKWALAPFDFLKLKEILSDWQTGMHAGGGWNALFWCNHDQPRVVSRYGDDGAYRVKSAKMLATAIHMMQGTPYIYQGEELGMTNPKFTDISSYRDAESLNMYHAFKEKGMADQDITAILQAKSRDNSRTPVQWDATENGGFTTGTPWIPVAGNYREINAEAALRDQNSVFYHYQKLIQIRKMYDIVTEGTYEIIAKDDPNIFAYLRHGSNEKLLVINNFYGTEAAFTLPDSLAPDEWKAEVLLTNDEAREGLQNMTVAHMSPLFIV

SEQ ID NO: 14207 - protein, 479 aa, Zea mays; identical to SEQ ID NO: 865

SEQ ID NO: 14208 - protein, 118 aa, Brassica napus
MSSRDKGSSSSPAMDKETYVKNRIQELVRVYRQDNVPSLIQEGLYLGSFAAASNKNVLKSCNVTHILTVASSLRPAHPGDFVYKVVPVVDKEDTNLEIYFDECIDFIDEAKKQCHCSC

SEQ ID NO: 14209 - protein, 91 aa, Glycine max
  misc_feature (45)..(45): Xaa can be any naturally occurring amino acid
  misc_feature (51)..(51): Xaa can be any naturally occurring amino acid
  misc_feature (80)..(80): Xaa can be any naturally occurring amino acid
  unsure (1)..(91): unsure at all Xaa locations
MSRKIESLGVERVISGEGSHGMFGGYLYFSKAPSKEEFLPEAMRXIKALLXYDCLRATRSTFDRGLEARVPFLNKECYEXAMNIDPQCAMI

SEQ ID NO: 14210 - protein, 399 aa, Xylella fastidiosa 9a5c
MPPIAITAFTATTAVGHGQAALNEALRTRRSGLRRNDFGVHPLKCWIGDVEGLETMTLPQALHPWECRNNRLAWLALQQDNFSEAVANARTRHGKTQMAVIMGTSTSSIGASEEAYTRLEYDAEGARFPDDLQRAVIHAPHSLGNFVQHATDLCGPCVTVATACSSSAKVFAQAARLITSGVVSAALVGGVDTLCGSVLFGFNALQLVSPEPCRPFDVHRAGLSLGEAGGFALLERLDLAPDADLLLCGYGESSDAYHMSAPHPEGLGARMAMQEALARANVDASEVGYLNLHGTASPANDSIEAVAIAALFPPTLHASSTKAWTGHTLGASGIVESTIALLALRGNILPGTMNSEQLDPVCGPQIRCENAHTPILYAMNNSFGFGGNNCALLFKRADA

SEQ ID NO: 14211 - protein, 478 aa, Mesorhizobium sp. BNC1
MKRSRKVKILATLGPASSDEEIIVRLHEAGADAFRINMSHTDHPTMRELVARIRSVETQVSRPIGILADLQGPKLRVGTFADKSATLSIGQEFTLDDNPAPGDATRVHLPHPEILQAVQPGHRLLIDDGRLQLAALKTDGRSIVARVIAGNKISDRKGVSLPDTELPLGALTEKDRRDLDAVLQTGVDWIALSFIQRPQDLAEVRKIARGRAALMAKIEKPQAVKRLPEIIELSDGLMVARGDLGVEMPLEAVPGIQKQITRACRRAGKPVVVATQMLESMITAPVPTRAEVSDVATAVFEGADAVMLSAESAAGQYPVEAVAMMNAIAIQVERDPVFNDVINAQRTEPEATGADAISLASREIAETLKLAAIITYTASGTTGLRAARERPKVPIIALSPVVETTRRLSLVWGTHCVVSEDATDLDDMVDRACRIAYEEQFAKPGDRVIITAGVPLRTPGVTNMLRIAYIGSDGLSGL

SEQ ID NO: 14212 - protein, 554 aa, Bdellovibrio bacteriovorus HD100
MAKRKTTTKKVSTAKSTKKTLKQKFIFVTGGVVSSIGKGLTAASLGALLEGRGHKVTIMKFDPYLNVDPGTMSPLQHGEVYVTEDGAETDLDLGHYERFTSALMNRSNSVSTGQIYDTVLNRERRGDYLGGTVQVIPHITEEIKARIYEAAQGSEIILVEIGGTVGDIESQPFLEAIRQMRIDVGQENSVLVHVTYVPYIAAAGELKSKPTQHSVKELREIGLQPDFLVCRSEKVIDDNLKAKIGLFCSVKPENVIAAQDSRFIYEVPLALHREKLDELIVARLGLSAGKLNMKGWQNLVKILGNPSHTVKIGVVGKYVDLKESYKSLHEALVHGGVANNARVEIIYVDSEKVTDKTVHSLLGKVDGILVPGGFGTRGVEGKITAIKYAREKRVPFFGICFGMQLSAIEFARNVCGIKDATSREFHAENKRTGNFVIDSMAEQRGVINKGGTMRLGAFPCAIASGSRAYQVYKASSIMERHRHRFEFNNKYKDLFEKNGMMASGICKERDLVEIVELPDHPWFVGVQFHPEFKSKPLAPHPLFVHFVKASLKKK

SEQ ID NO: 14213 - protein, 145 aa, Brassica napus
  misc_feature (68)..(68): Xaa can be any naturally occurring amino acid
  misc_feature (128)..(128): Xaa can be any naturally occurring amino acid
  misc_feature (131)..(132): Xaa can be any naturally occurring amino acid
  unsure (1)..(145): unsure at all Xaa locations
TIKKMDKRWSLQGMTALVTGGASGIGSAIVEELARFGAKIHVCDISEVMLNQGLSEWEKKGFHVSGSXCDVTSLSERETLIQSVSSLFDGKLNILVNNVGVLRGKRTLEYAKEDFDFHISTNLEPAFXFCXXSHPLLKASGYGSI

SEQ ID NO: 14214 - protein, 467 aa, Rhodopseudomonas palustris CGA009
MATYDLVVIGTGPGGYVCAIRAAQLGLKVAVVEKNATLGGTCLNVGCMPSKALLHASELFEEAGHSFAKMGIGVSAPKLDLPAMMNFKQQGIDGNVKGVEYLMKKNKIDVLVGKGKILGTGKVEVTGADGKATSVEAKSIVIASGSAVAQLKGIEIDEKRVVSSTGALSLDKVPGKLIVVGAGVIGLELGSVWRRLGAEVTVVEFLDRILPGMDGEVVKQFQRILEKQGFAFKLGAKVTGVDTSGAKLAVKVEAAAGGNPETLEADVVLVAIGRVPYTEGLGLKEAGVALDERGRVVIDDHFATSLKGVYAIGDVVRGPMLAHKAEDEGVAVAELIAGKAGHVNYDVIPGVVYTTPEVSSVGKTEEDLKQAGVAYTVGKFPFTANGRSKVNQTTDGFVKILADAKTDRVLGVHIIGREAGEMIHEAAVLMEFGGSAEDLARTCHAHPTRSEAIKEAALTVGKRAIHM

SEQ ID NO: 14215 - protein, 582 aa, Schizosaccharomyces pombe
MVSFLSSSVSRLPLRIAGRRIPGRFAVPQVRTYAKDLKFGVDARASLLTGVDTLARAVSVTLGPKGRNVLIDQPFGSPKITKDGVTVARSVSLKDKFENLGARLVQDVASKTNEVAGDGTTTATVLTRAIFSETVRNVAAGCNPMDLRRGIQLAVDNVVEFLQANKRDITTSEEISQVATISANGDTHIGELLAKAMERVGKEGVITVKEGRTISDELEVTEGMKFDRGYISPYFITDVKSQKVEFENPLILLSEKKVSAVQDILPSLELAAQQRRPLVIIAEDVDGEALAACILNKLRGQLQVVAIKAPGFGDNRRNMLGDLAVLTDSAVFNDEIDVSIEKAQPHHLGSCGSVTVTKEDTIIMKGAGDHVKVNDRCEQIRGVMADPNLTESEKEKLQERLAKLSGGIAVIKVGASSEVEVNEKKDRIVDALNAVKAAVSEGVLPGAGTSFVKASLRLGDIPTNNFDQKLGVEIVRKAITRPAQTILENAGLEGNLIVGKLKELYGKEFNIGYDIAKDRFVDLNEIGVLDPLKVVRTGLVDASGVASLMGTTECAIVDAPEESKAPAGPPGMGGMGGMPGMM

SEQ ID NO: 14216 - protein, 400 aa, Alkaliphilus metalliredigenes QYMF
MSKKISKTVEVNVMNIREEIKHYTQELIDLRRDFHQHPELGFEEFRSSQIIQNYLIKCGIEVKKIAKTGVVGVLKGNEKGPTVLLRADMDALPIHEENDIAYKSIYEGKMHACGHDGHMAMLLIAAKILSKQKKHINGNIKFVFQPNEEDAGAAEMIREGVLENPTPDVAIGAHLWSSIETGKIGIAEGPIMASSEYFWLKIIGKGGHGGAPHESIDPIICASNIIQEVQAIQSRRINVITEPTVITFGSIQGGSFPIIIPETVELKGSIRCLHNELEKIKELFERKIRCQCQSDETTYELSYKCGNGLLSNDPKTTKLVKDVAVKVVDKDNLVSDVKVMLGEDFSEFSASVPSCFYFIGAGNVKKQTDYFHHHPRFNIDEDALLIGVEIHVRTALDYLK

SEQ ID NO: 14217 - protein, 243 aa, Triticum aestivum
  misc_feature (173)..(173): Xaa can be any naturally occurring amino acid
  unsure (1)..(243): unsure at all Xaa locations
MVQSKKKFRGVRQRHWGSWVSEIRHPLLKRRVWLGTFETAEEAARAYDEAAILMSGRNAKTNFPVPRSANGEIIVAPAAARDGRGVGSSSSGAAGASSLSQILSAKLRKCCKTPSPSLTCLRLDTEKSHIGVWQKRAGARADSSWVMTVELNKEPATAAAAPTPKRQHGVGDXPSSSTSTSTTGSPPEALEDEERIALQMIQELLNRSTPASPVNGLVHGEKGTSSSEKIIARLESLSGYLPD

SEQ ID NO: 14218 - protein, 102 aa, Oryza sativa
MSSDGGPVLGGLEPVGNENDLHLVDLARFAVTEHNKKANSLLEFEKLVSVKQQVVAGTLYYFTIEVKEGDAKKLYEAKVWEKPWMDFKELQEFKPVDASANA

SEQ ID NO: 14219 - protein, 221 aa, Bacillus thuringiensis serovar konkukian str. 97-27
MLKKAIAEFIGTFVLVLFGTGVAVIGGGIEGIGTLGIAMAFGLSIVAMAYSIGTISGCHINPAVSVAMFINKRMNAMELCYYVLAQILGGLLGTATLVTILQSAKTPLDNLGQNGFGTLGLSGAFLVEFILTFVFVLVIVAVTGKKGSSSLAGLVIGFTLVLVHLLGIPLTGTSVNPARSIAPALFAGGEALSQLWVFIVAPILGGIVAAIVGKFILNTEK

SEQ ID NO: 14220 - protein, 571 aa, GIBBERELLA ZEAE PH-1
MGSTGQTLRAWWKESSVYQIYPASYQDSTGSGVGDLKGIISRVDYLKDLGVDIIWLSPIFKSPQVDMGYDISDYYTVDPPYGNVSDVDVLKDKLHERGMKLVLDLVMNHTSDQHEWFKESRKSKDNPYRDWYIWKPAKYDADGNRHPPNNWDAHFQGSAWEYDEITDEYYLCLFCKQQPDLNWENPAVRKQVHQVMRFWLDRGVDGFRMDVINFVSKDQAFPDSDKTVLRGTEYYACGPRCHEFLKEIGSILQEYDAFSVGEMPCVHDERELIKAVHGDRGELSMIFHFELMDLDHGVEGKFTPRSWKLSELKATTLKWQRFMYDNEGWNALYLENHDQPRAVSRFVHDDPEHRVASAKLIALFLGFQSGTPFIYQGQEIGMTNVPKDWDLEEYKDLDCLKHWDLHKNDDVAAQNSYKVEYQRKSRDNARTPMQWDASPNAGFTTADANPWMRVNDNYTDINAASQTSDSNSVYSCYRQVLGKRKEYKDIFVYGNFQLVDESNDKIFAYSRRADSGETALVVCNFSVDSVAWKLPGEAREVLTSPAGRTLNDLNSGEIKLAPCEAFAVLLK

SEQ ID NO: 14221 - protein, 341 aa, Bradyrhizobium japonicum USDA 110
MKAVHTELHRSHDPQFFLVRGVVKRTTEQPERADRLLKGLKDGKHQLVEPTTFGQGPRARIHSPEYLSFLSEAWDAWTALGDSGPEMIGNIHPVRHAATYPTHIVGKLGWHTADTAAPIGPGTWAAACAATDVAVTAAQMVMDGEDATYALCRPPGHHAYRDMAGGFCFLNNSAIAAAHLRLKHERVVILDVDVHHGNGTQGIFYARPDVYTVSIHADPVAYYPYVWGYAHERGEGPGLGTNLNIPLAIGTGDDGYIQAMDVARKAIESFAPGALVIALGLDASEHDPLKGLAVTTPGFRRIGQAIARMGLPTVFVQEGGYLSEILGANLTSVLAGFEEAR

SEQ ID NO: 14222 - protein, 462 aa, Lupinus albus
MKMGYSSFVAIALLMSVVVVCNGGKTSTYVRNLIEKPVDMPLDSDAFAIPPGYNAPQQVHITQGDLVGQAMIISWVTVDEPGSNQVIYWSDSSLQNFTAEGEVFTYTYYNYTSGFIHHTTITNLEFDTTYYYEVGIGNTTRQFWFITPPEVGLDVPYTFGIIGDLGQTFDSNTTLTHYQNSNGTALLYVGDLSYADDYPYHDNVRWDTWGRFTERSAAYQPWIWTAGNHEIDFDLQIGETQPFKPFSTRYHTPYEASQSTEPFYYSIKRGPAHVIVLATYSAFGYSTLQYKWLTAELPKVNRSETSWLIVLMHAPWYNSYNNHYMEGEPMRVIYESLFLKYKVDVVFAGHVHAYERSERVSNNKYNITNGICTPVKDITAPIYITNGDGGNLEGLATMKQPQPSYSAYREASFGHGIFAIKNRTHAHYSWNRNQDGYAVEADKLWLFNRYWNPLNDSTIHIP

SEQ ID NO: 14223 - protein, 411 aa, Nostoc sp. PCC 7120
MPGGVSSPVRAFKSVGGQPIVFDHVKGAYIWDVDGNQYIDYVGTWGPAICGHAHPDVIGALHDALEKGTSFGAPSFLENVLAEMVIAAVPSIEMVRFVNSGTEACMAVLRLMRAFTNREKVIKFEGCYHGHADMFLVKAGSGVATLGLPDSPGVPKSATSSTLTAPYNDLEAVKALFEENRDQIAGVILEPVVGNAGFITPDAGFLEGLRELTHEHGALLVFDEVMTGFRIAYGGAQEKFGVTPDLTTLGKVIGGGLPVGAYGGRRDIMSMIAPAGPVYQAGTLSGNPLAMTAGIKTLELLQKPGAYEYLERITKKLADGLLQVALETGHAACGGHISAMFGLFFTSGPVHNYEDAKNSDTAKFGRFHRGMLERGVYLAPSQFEAGFTSLAHTDEDIDQTIAIAREVLSSI

SEQ ID NO: 14224 - protein, 474 aa, Haemophilus influenzae R2866
MSKEIKTQVVVLGAGPAGYSAAFRCADLGLETVIVERYSTLGGVCLNVGCIPSKALLHVAKVIEEAKHANKNGIYFSEPRIELDEVRAGKEAVVAKLTGGLAGMAKARKVTVVEGLATFTDSHTLVARDRDGNPTTVKFDNAIIAAGSRPVQLPFIPHEDPRIWDSTDALKLKEVPKKLLIMGGGIIGLEMGTVYNALGSEVEVVEMFDQVIPAADKDVVGIYTKQVEKKFKLMLETKVTAVEAKDDGIYVSMEGKACNDTKRYDAVLVAIGRVPNGKLIDAGKAGVEVDDRGFIHVDKQMRTNVPHIYAIGDIVGQPMLAHKGVHEGHVAAEVIAGQKHYFDPKVIPSIAYTEPEVAWVGKTEKECKQEGLNYEVAKFPWAASGRAIASECSEGMTKLIFDKDTHRVLGGAIVGSNGGELLGEIGLAIEMGCDAEDIALTIHAHPTLHESVGLAAEVFEGSITDLPNAKAKKK

SEQ ID NO: 14225 - protein, 460 aa, Frankia sp. EAN1pec
MADTAAGPVDLVVLGGGSGGYAAALRAAELGLRVVLVEKDKLGGTCLHRGCIPTKALLHAAEVVDTVAASESFGIRATLDGIDMAGVRAYRDSVVDGLYKGLSGLVRARGIEVVTGTGRLVSPTAVAVGDRVVEARHVLLATGSAARTLPGLDLDHRTVIDSGDALALEHVPGSVVVLGGGAIGCEFASVWRSFGAEVTIVEALGHLVPAEDEASSKLLERAFRARGIALRLGVPLAGAKTTDRGVTVVLEDGSTVDAELLLVAVGRGPVSAGLGLDEVGVSTDRGHVLVDTHLRTNIPTVSALGDVRPGPQLAHVAFAEGILSAELLAGLDPVPVDYDNVPRVTYSHPEVASVGLTAAAARERHGEINTATYHLAGNGKARILRSAGAVTVVSAADGPVVGVHMVGDRVGELIAEAQLITNWEAYPADVAQLLHPHPTLSEALGEAHLALAGKPLHVHS

SEQ ID NO: 14226 - protein, 749 aa, Aspergillus fumigatus
MATKIAGGLHRAQEVLQNTSSKSKKLVDLERDTADAHTQQPLTTDHGVRVSNTDQWLRVTNDRRTGPSLLEDQIAREKIHRFDHERIPERVVHARGTGAFGNFKLKESIEDLTYAGVLTDTSRNTPVFVRFSTVQGSRGSADTVRDVRGFAVKFYTDEGNWDIVGNNIPVFFIQDAVKFPDFVHAVKPEPHNEVPQAQTAHNNFWDFVYLHPEATHMFMWAMSDRAIPRSYRMMQGFGVNTFALVNKEGKRHFVKFHWIPHLGVHSLVWDEALKLGGQDPDFHRKDLMEAIDNKAYPKWDFAIQVIPEEKQDDFEFDILDATKIWPENLVPLRVIGELELNRNVDEFFPQTEQVAFCTSHIVPGIDFTDDPLLQGRNFSYFDTQISRLGINWEELPINRPVCPVLNHNRDGQMRHRITQGTVNYWPNRFEAVPPTGTKGSGVGGGFTTYPQRVEGIKNRALNDKFREHHNQAQLFYNSMSEHEKLHMKKAFSFELDHCDDPTVYERLAGHRLAEIDLELAQKVAEMVGAPIPAKALKQNHGRRAPHLSQTEFIPKNPTIASRRIAIIIGDGYDPVASTGLKTAIKAASALPFIIGTKRSAIYATEDKTSSKGIIPDHHYDGQRSTMFDATFIPGGPHVATLRQNGQIKYWISETFGHLKALGATGEAVDLVKETLSGTLHVQVASSQSPEPVEWYGVVTAGGKQKPESFKESVQILKGATDFVGKFFYQISQHRNYQRELDGLASTIAF

SEQ ID NO: 14227 - protein, 1693 aa, Synechocystis sp. PCC 6803
MTVMLSCLTQQQELLQSLADRVGQPAIQDNLYFCLAGQFTWVEDWYTTAIAGDVLIFDAGEKEQLARVLQQWEQFTGHVILITGLTEEPDPQTFLTQLALGKQQRCGERHFHWIVLVDPTIEEAFRGLQTFLDGKSHWLDLRLGVGDLEQCTDELWQCVWLEPSPLAPEKRQEMLVNLPHWLAEIVDQKQNLELEPISLLQAKLSLLQGLARESRGEMGRKQAQCHYRESLDVWELLGDTEAIIWLSLRLGYLFLLQAYGEKSRGHQLWQQTRNYAQTAIAALENQQWHFTHGETLNLLGEILRGLEDWEQLRQAAENSLIFFYQLSPFAATDTTPERNQEKLWTELELQGLISLAHSYLCEALVEQWKFDEGKEALKRAFETRPKQVEERDYRPCLANLHYLAGRVQLANDQIRESLMTLRQAQTLVSFEDNPRLYLAILVELRECYLQLEDWLAALAIDQEYQAREYRLGQRAFIGPKPLPCWPEQRICRHPLAPEKMLGGGAEARSAVQSKTMVSLTWQDLQKVWEQKPTPVLVLTGEPGVGKTSWLAGEVLQQMSPERVLLVDFTPHWAEKLWVHLGESFSLPSLGQATTPELVSALQALPILDLLLVLDGENGSLPWQKSPSLRQQELAQVLWQWLLTTSPSQGVRLLISVPPTAIADLYEELKGQLGEEHSLPPLQYQTLSPPTLGQAENWLTQAMAQCRHPWPPSLQSQFLGDLAMEGNGEQQPWLHPIDLQLLGTVLEQEQVTKSADYQGKKLDEWLTLAVQTYLAFLPPHLLKKALQLLKSLADGQQALCLKTEYQLLAALYSAPEPAADNPPEFAQEDIQQLQLLLTLLLRGRLIIVISQATLPYYRLSTTHLAHALQGKSAVISTPALINAGRRGSKSNPNLIAPSPGDRQQGNEDLIAELEAGSSAEEQVVAQKLKAAQLQYQKLVAGINLEKQCQFILKQFLVYPLEALLAAVKTGQDLQKLVTPETPLVQYPSLAPWLSLHSILARINECNRCHHEGPVTVLRISPSMENTPPLVLTATTNGIAYLWSFHGELINVLRGHQEAITALDWSADGQYFATASADHTVKLWQRHGEEVATLRGHEDWVRSVHFSPHHQFLVTSGQDNTARIWNFAGEQLTLCQGHADWVRNAEFNCHGQILLTASRDGTARLWDLEGREIGLCQGHTSWVRNAQFSPDGQWIVTCSADGTARLWDLSSQCFAVLKGHQNWVNNALWSPDGQHIITSSSDGTARVWSRHGKCLGTLRGHDHNIHGARFSLDGQKIVTYSTDNTARLWTKEGTLLTILRGHQKEVYDADFSADGRFVFTVSADQTARQWDISQKDTITLTGHSHWVRNAHFNPKGDRLLTVSRDKTARLWTTEGECVAVLADHQGWVREGQFSPDGQWIVTGSADKTAQLWNVLGKKLTVLRGHQDAVLNVRFSPDSQYIVTASKDGTARVWNNTGRELAVLRHYEKNIFAAEFSADGQFIVTASDDNTAGIWEIVGREVGICRGHEGPVYFAQFSADSRYILTASVDNTARIWDFLGRPLLTLAGHQSIVYQARFSPEGNLIATVSADHTARLWDRSGKTVAVLYGHQGLVGTVDWSPDGQMLVTASNDGTARLWDLSGRELLTLEGHGNWVRSAEFSPDGRWVLTSSADGTAKLWPVKTLPQLLSQGGQWLKNYLTHNALVSPADRPGAKVT

SEQ ID NO: 14228 - protein, 242 aa, Bacillus subtilis
MPYLKRVLLLLVTGLFMSLFAVTSTASAQTGGSFFDPFNGYNSGFWQKADGYSNGNMFNCTWRANNVSMTSLGEMRLALTSPSYNKFDCGENRSVQTYGYGLYEVRMKPAKNTGIVSSFFTYTGPTDGTPWDEIDIEFLGKDTTKVQFNYYTNGAGNHEKIVDLGFDAANAYHTYAFDWQPNSIKWYVDGQLKHTATNQIPTTPGKIMMNLWNGTGVDEWLGSYNGVNPLYAHYDWVRYTKK

SEQ ID NO: 14229 - protein, 339 aa, Debaryomyces hansenii CBS767
MGQLLSHPIEDKTMEHKSYDTITYCIGLMQGYRMSMEDAHNVKVNEDESLAVFGVFDGHGGKTCAEVVSDKLPTMVFRELSSLLKNGNGDLASYMKVLKDSFFRIDRDLTNEDSSNCGTTAIIASIIANEYIIVSNAGDSRCIMSLEGGAPKTLSFDHKPSTMGERVRIENSGGYVVNGRVNEILALSRAFGDFKFKLPYMELLNNQNKYIAANKKYFKHELIHLPPELFLVSVEPDVVVYDLKSLKQPEFVVLACDGIWDCYTNTKLIKIIRDKLSLDWKIHHITEFILNDCVGMANNVTGIGFDNMTIIIVAVHNNNNIDEWYTMMKERVLKEKGLL

SEQ ID NO: 14230 - protein, 250 aa, Thermobifida fusca YX
MKGTVQLDERPDTAQRTSDRKIRSGGLAQRLNALRAGVLGANDGIVSTAAVVVGVAGATTDAGPILMAGLAAAVGGAVSMALGEYVSVSSQRDSERHLIEQQSQALRNDPEGELLALARSYEERGISAATARRAAEELFASNALEAQMRERHNIDPDEVTSPWHAAIASFLAFAVGALLPLLAILLPSPELRVPVAFGATLLSLALTGAIAAGIGGGSQLRAAARVTLGGALALAVTYAIGSLIGTTGLV

SEQ ID NO: 14231 - protein, 480 aa, Debaryomyces hansenii CBS767
MIKGKVLVVSNRLPVTIKRSPNGTYDYSMSSGGLVTALQGLKKSTEFQWLGWPGLEIPEDEQSKVNKDLMEKFNCTAIFLSDSIADLHYNGFSNSILWPLFHYHPGEMNFDENAWAAYIEANRKFAITIAQQVDDNDMIWVHDYHLMLLPQMLREEIENKKKNIRIGFFLHTPFPSSEIYRILPVREEILVGVLSCDLIGFHTYDYARHFLSSVSRIVSNVNILPNGIEYQGRSIGIGAFPIGIDVDKFTEGVTKPKVVDRIKQLKQKFTDTKIIVGVDRLDYIKGVPQKLHAFEIFLTENPEWIGKVILVQVAVPSRGDVEEYQSLRATVNELVGRINGRFGTVEFVPIHFMHKSIPFDELISLYHISDVCLVSSTRDGMNLVCYEYIACQQENKGVLILSEFAGAAQSLNGAIVVNPWNTEELSYAIKESLTLPEEKKELNFKKLFDYISKYTSGFWGESFVKELRKCSSQDKITEIR

SEQ ID NO: 14232 - protein, 234 aa, Streptococcus pneumoniae TIGR4
MMNELFGEFLGTLILILLGNGVVAGVVLPKTKSNSSGWIVITMGWGIAVAVAVFVSGKLSPAYLNPAVTIGVALKGGLPWASVLPYILAQFAGAMLGQILVWLQFKPHYEAEENAGNILATFSTGPAIKDTVSNLISEILGTFVLVLTIFALGLYDFQAGIGTFAVGTLIVGIGLSLGGTTGYALNPARDLGPRIMHSILPIPNKGDGDWSYAWIPVVGPVIGAALAVLVFSLF

SEQ ID NO: 14233 - protein, 337 aa, Zea mays
MGKIKIGINGFGRIGRLVARVALQSEDVELVAVNDPFITTDYMTYMFKYDTVHGQWKHSDIALKDSKTLLFGEKPVTVFGIRNPEEIPWGEAGAEYVVESTGVFTDKDKAAAHLKGGAKKVVISAPSKDAPMFVVGVNEDKYTSDVNIVSNASCTTNCLAPLAKVIHDNFGIIEGLMTTVHAITATQKTVDGPSAKDWRGGRAASFNIIPSSTGAAKAVGKVLPELNGKLTGMSFRVPTVDVSVVDLTVRIEKGASYEEIKKAIKAASEGPLKGIMGYVEEDLVSTDFTGDSRSSIFDAKAGIALNDHFIKLVSWYDNEWGYSNRVVDLIRHMFKTQ

SEQ ID NO: 14234 - protein, 343 aa, Burkholderia fungorum LB400
MKALAKLERAPGLTLTDVKKPEVGHNDVMIRITRTAICGTDIHIWKWDDWAQKTIPVPMHVGHEYVGEIVEMGQEVRGFAIGDRVSGEGHITCGFCRNCRAGRRHLCRNTVGVGVNREGAFAEYLVIPAFNAFKIPPEISDDLAAIFDPFGNATHTALSFNLVGEDVLITGAGPIGIMAVAIAKHVGARNVVITDVNDYRLELARKMGATRAVNVSRESLRDVMADLHMAEGFDVGLEMSGVPSAFTGMLEAMNHGGKIALLGIPPAQTAIDWTQVIFKGLEIKGIYGREMFETWYKMVAMLQSGLDLSPILTHHFKVDDYREAFATMLSGESGKVILDWTAA

SEQ ID NO: 14235 - protein, 490 aa, Zinnia elegans
MSRKMLIDGDVGSISDEDYDFDLFVIGAGSGGVRASRFSAQYGAKVGICELPFHPVSSETVGGVGGTCVIRGCVPKKILVYGASFGPEIQDAKEYGWQVNENLDFDWKKLLHKKTEEIVRLNGVYKRLLSNAGVKLFEGEGRIVGPNEVEVIQLDGTKLSYTAKHILISTGSRAHRPDIPGQELGITSDEALSLDELPKRVVILGGGYIAVEFASIWRGMGSTVNLCFRKELPLRGFDDEMRALVARNLEGRGVILHPQTNLTKLVKTESGIKVTTDHGEELMADVVLFATGRVPNTKRLNLQAVGVEVDKTGAIKVDEYSRTNVPSIWAIGDVTNRINLTPVALMEGTMFAKTVFGNEPSKPDHSNVPCAVFCIPPLSVVGLSEEQAIQQGTGDILVFTSTFKPMKNTISGRQEKTLMKLIVSAENDKVIGASMCGPDAPEIMQGIAIAIKCGATKAQFDSTVGIHPSAAEEFVTMRSVTRRITASGKR

SEQ ID NO: 14236 - protein, 766 aa, Arabidopsis thaliana
MLRSLGLGLLLFALLALVSGDNDYVSCNCDDEGFLSVHTILECQRVSDLLIAIAYFSIPLELLYFISFSNVPFKWVLVQFIAFIVLCGMTHLLNAWTYYGPHSFQLMLWLTIFKFLTALVSCATAITLLTLIPLLLKWKVRELYLKQNVLELNEEVGLMKRQKEMSVQVRMLTREIRKSLDKHMILRTTLVELSKILDLQNSAVWMPNENRTEMHLTHELRANPMRSFRVIPINDPDVVQVRETKVVTILRKNSVLAVESSGCGGSEEFGPVAAIRMPMLHGLNFKGGTPEFVDTPYAIMVLVLPSANSRVWTDKEIEIAEVVADQVAVAISHASVLEESQLMREKLGIQNRALLRAKQNAMMASQARNTCQKVMSHGMRRPMHTILGLLSMFQSESMSLDQKIIVDALMKTSTVLSALINDVIDISPKDNGKSALEVKRFQLHSLIREAACVAKCLSVYKGYGFEMDVQTRLPNLVVGDEKRTFQLVMYMLGYILDMTDGGKTVTFRVICEGTGTSQDKSKRETGMWKSHMSDDSLGVKFEVEINEIQNPPLDGSAMAMRHIPNRRYHSNGIKEGLSLGMCRKLAQMMQGNIWISPKSHGQTQSMQLVLRFQTRPSIRRSILAGNAPELQHPNSNSILRGLRITLADDDDVNRTVTKRLLEKLGCEVTAVSSGFECLNALSNVEMSYRVVILDLQMPEMDGFEVAMKIRKFCGHHWPLIIALTASTEDHVRERCLQMGMNGMIQKPVLLHVMASELRRALQTASE

SEQ ID NO: 14237 - protein, 399 aa, Burkholderia fungorum LB400
MRDLYLAHLRDTLEQIRADGFYKNERVIASPQSADIRLADGAAVLNFCANNYLGLADDARLIDAAKQGLDSDGFGMASVRFICGTQTVHKELEQALAAFLQTDDCILYSSCFDANGGLFETLLDENDAIISDELNHASIIDGVRLSKAKRSRYKNNDLADLEARLIEAQAAGARFKLIATDGVFSMDGIIADLAGICDLADRYGALVMVDDSHAVGFVGEHGRGTPEHCGVLSRVDIITGTLGKALGGASGGYVAARKEIVELLRQRSRPYLFSNTLTPSIAAASLKVLELLASEEGAQLRARVRENGAHFRSKMSALGFTLVPGEHPIIPVMLGDAQLASKMADALLKEGVYVIGFSFPVVPKGRARIRTQMSAAHTPGQIDRAVDAFARVGRELGVI

SEQ ID NO: 14238 - protein, 427 aa, Burkholderia vietnamiensis G4
MKNADLHARKNAATPRGVGVMCDFYAARAENAELWDVEGRRFIDFAAGIAVLNTGHRHPKIVKAIADQLNCFTHTAYQIVPYASYVELAEKINARAPGDYPKKTAFFTTGAEAVENAIKIARAATGRPGVIAFAGGFHGRTMMGMALTGKVAPYKLNFGPFPGDVFHAPYPNPLHGVTTADSIKAIEMLFKADIDPKRVAAIIFEPVQGEGGFNPAPADFVRALRKICNEHGIMLIADEVQTGFARTGKLFAMQQYDVLADLITMAKSLAGGMPLSGVVGRADVMDAAAPGGLGGTYAGNPLAVASAHAVLDIIDEEKLCERATQLGDALKAKLNALRADIAPIADVRGPGAMVAVEFVNPATGEPDADFTKRVQARALERGLLLLVCGVYSNVVRFLFPLTIPQAVFDEALTILEEVLKETVGVPA

SEQ ID NO: 14239 - protein, 487 aa, Burkholderia vietnamiensis G4
MSTENLALKDPSLLRQQAYINGEWQSAANGESFEVRNPATGGLLGTVPAMGAAETRQAIDAANAAWPAWRKKTAKERAAILRKWHDLMMENADDLALILTTEQGKSLAEAKGEIGYAASFLEWFAEEGKRVYGDTIPTPASDKRIVVTKEAIGVCAAITPWNFPAAMITRKVGPALAAGCPIVVKPAEATPFSALAMAVLAERAGVPAGVFSVVTGDPKAIGGELTSNPIVRKLSFTGSTPVGRLLMSQCAATVKKVSLELGGNAPFIVFDDADLDAAVQGAIASKYRNSGQTCVCTNRFYVHEAVYDAFAQKLAAAVGQLKVGRGTEPGVTQGPLINEAAVLKVEAHIEDALAKGATVVTGGKRHALGHGFFEPTVLTGVTPAMKVAKEETFGPLAPLFKFGSDDEVIRLANDTEFGLAAYFYSRDIGRVWKVAEALEYGMVGVNTGLISNEVAPFGGVKQSGLGREGSHYGIDDYVVIKYLCLAV

SEQ ID NO: 14240 - protein, 509 aa, Saccharomyces cerevisiae
MRNYLVKFLYIFYSMTSLIHYFHRQKKEINTVARTNSKIKWKRKVSSFLNMPSNVRSGVLTLLHTACGAGVLAMPFAFKPFGLMPGLITLTFCGICSLCGLLLQTRIAKYVPKSENASFAKLTQLINPSISVVFDFAIAVKCFGVGVSYLIIVGDLVPQIVQSIFYRNDDNMSGSQEHHMFLDRRLYITLIIVFVISPLCFKRSLNSLRYASMIAIVSVAYLSGLIIYHFVNRHQLERGQVYFMVPHGDSQSHSPLTTLPIFVFAYTCHHNMFSVINEQVDKSFKVIRRIPIFAIVLAYFLYIIIGGTGYMTFGENIVGNILTLYPNSISTTIGRLAMLLLVMLAFPLQCHPCRSSVKNIIIFIENFRKGKLYDNRASFIPLDNFNSEDPQEAPTQQNNEEPNLRSESLRHINIITLCILLFSYLLAISITSLAKVLAIVGATGSTSISFILPGLFGYKLIGSEFTGTNERVPTSIKIFKYLSLSLFIWGIAVMVASLSAIVFLGTSSH

SEQ ID NO: 14241 - protein, 928 aa, Oryza sativa
MGSVERITSMPRRQVQARDGSVASLAKRTGSPCQQEDDYEGAKTMTNPWTFLPEDIWYHIHSLLPLKDAARTACVSHTFLRSWRYRPNLVFSDAKLGLSGLSESDEVTKELNEKVDLIMKNHSGIGLRTFGLEYYNLVDASYLDRWLQIAVTPAIEELILMFFPEIKAKYYDFPFSLLFDRGGNSIKHLRLSYCAFRPTTSLNFLQRLHLFEVRITGDELGCLLSNSFALEQLKLTHCKELNYLKIPCVLQRLSKLTVFGCTTLQVIEIKAPNLSTFDYDGNLAGLSDGGLLPVKNLHLSSFYQHHTIQYTCAKLPSVAPTIETLTIFSESERFNTQISPFRFLHLKCLTISLSIYRGGFSPSNDYLSLAYFLDASPVLEIFTLTVSQTRMKHHVISEDSSYLRQMPGHRHVNLKNVKIIGFCSAKSMVELTCHIIENATSLESLTLDTICDDYENPDRLSVHEIGECSPICRQMIMEAKNALLAIERYIVGKVPSTVSFNETEYYTAAPRQKEEGVLYCCFGTELEVLYYYESVASLAKRNGSPCQQGDDYQGVKTMRNPWAFLPEIAVTPAIEELILLLFPEDKANYYDFPFSLLFNRGGSSIKHLYLSYCVFRPTGGLNCLRSLFLYEVRITGHELGCLFSNSFVLEQLELTDCKELSYLKIPCLLQRLSKLAMYGWEASQVMEIKAPNLLNFHYEGNLARLSDGGLPYVKNLTIASIRWHNAIYYACANLPSIVPTIETLTVFSVSEIINTPIAPLRFLHLKHLTVFLHTVPRVVSPTYDYLSLAYFLDASPALETFTLKVSQTRMEHDVISEDSSHLRQMPGHHHDTIKNVKIMVELTCHILENATSLEGLTLDTIFDGNNNPADRLSVHEVGRCGRIHSPMVMEAKNALLAIERYIVGKVPSTVKLDVLKPCSWCHTNSSVE

SEQ ID NO: 14242 - protein, 611 aa, Mesorhizobium sp. BNC1
MAAAVQNKAGPAYTYVDHVFDVVVVGAGGAGLRATLGMAEQGLKTACITKVFPTRSHTVAAQGGIAASLRNMGPDDWQWHLYDTVKGSDWLGDVDAMEYLAREAPAAIYELEHYGVPFSRTDDGRIYQRPFGGHMQNFGDGPPVQRTCAAADRTGHAILHTLYGQSVKHHAQFFVEYFALDLIMSPDGVCTGVVAWNLEDGTIHRFAAKMVVLATGGYGRAYFSCTSAHTCTGDGNGMVARAGLPLQDMEFVQFHPTGVYGAGVLITEGARGEGGYLVNAEGERFMERYAPSAKDLASRDVVSRCMTLEIREGRGVGPKKDHIFLHLDHLDPAVLHERLPGITESARIFAGVDLTREPIPVLPTVHYNMGGIPTNYHGEVLNPTLDNPDAIVPGLMAAGEAACASVHGANRLGSNSLTDLVVFGRAAAIRAGMVVDRESKVPPIDLAACEKIMDRFDRIRHASGSTPTAALREKMQRAMQEDAAVFRTQESLEQGCRRVSQAWGELSDIKVQDRSMIWNSDLMETLELENLMANAIATVFSAEARKESRGAHAREDFTERDDANWRKHTLSWVDPDGTVRLDYRPVHTEPMLKPENGGIDPARIAPKKRVY

SEQ ID NO: 14243 - protein, 213 aa, Mesorhizobium sp. BNC1
MFRQIAAAVSSLVLIFIGTLQSAAETGTAIFAGGCFWCVESDFDQVPGVTSTISGYSGGNTPNPTYDDYMEGGHREVVKIEYDDTRVSYDQLLDVFFHSVDPTDGGGQFCDRGHAYSTAIYVLNDAQRQAAENAKKAAEAELGRSVVTPIESAATFWPAEDYHQNYYQSQDRILSRFGYVTKADAYKGYREGCGRDARLRQVWGENALRGLAH

SEQ ID NO: 14244 - protein, 273 aa, Oryza sativa
DAPEAEEHDAAVGLPVEPHEGLVPPAGLVTGAGGGLRFCKLLPKSTRERDRSTHIERERGKMQIFVKTLTGKSITLEVESSDTIDNVKAKIQDKEGIPPDQQRLIFAGKQLEDGRTLADYNIQKESTLHLVLRLRGGMQIFVKTLTGKTITLEVESSDTIDNVKAKIQDKEGIPPDQQRLIFAGKQLDDGRTLADYNIQKESTLHLVLRLRGGSRGGYTIQEPTLRALALKYREKKKVCRKCYARLPIRSHHCRKKKCGHSKEVSISKVPLRM

SEQ ID NO: 14245 - protein, 753 aa, Oryza sativa
MISEGGVTALVVICVAIGFGFALLNFLATRAVKVDALAGPGEASASDNLLVHAVQGNVAEKIRKIAGKISTGANAFLFREYIYIGIFLVAFTFVLLLVLGLSTKDWSRTGLTIFAFILGASTSVASGYAGMWIATYSNQRTCIRAAHSVGAAFNTAFKAGLVMGFFLVSAAIIMLYILMCICKAYYTNALTVAGAADTTAMFEAIAGYGLGGSTVALFGRVGGGIYTKAADVGADLVGKLENGMPEDDPRNPAVVADNVGDNVGDIAGMGADLFGSFAESACATMVVASNSVGPNGLSMNWASLCFPLAISSTGLLVSLVTSFVATHLWQVRDVHGIEPSLKRQIGLSTIIMTPIAFLCCYYFLLTEGTFSIGSGDAAKDVKYWYVFFCVACGLWSGMAIGYITEYYTSHGWENGPVREVAEACKTGAATNIIFGLALGFKSVIIPVFCLAITIYVSYSLAGMFGIAVAALGILSTLPTSLTIDAYGPICDNAGGIAEMAGMDKGVRERTDALDAAGNTTAAIGKGFAIGSAALVSLALFGAYVTIVKLDAVGVNLLKPFEFAGLLVGAMLPYWFSAMTMKSVGLAANGMVIEVRRQLREHPEIMAQGSEVEPDYERCIAISTDHSLREMMPPGALVMLTPIIVGFFFGTHALAGVLAGALVSGVQIAISSANMGGAWDNAKKFIEGKGLGENLGKHSAPHAAAVVGDTVGDPLKDTSGPSLNILIKLMAIISVVFGPALAKFDKGLLEQWFS

SEQ ID NO: 14246 - protein, 232 aa, Zea mays
MLLIKLSFMFLKLCLGPARCYRQIKNKPYPKSRYCRGVPDPKIRIYDVGMKRKGVDEFPYCVHLVSWEKENVSSEALEAARIACNKYMTKSAGKDAFHLRVRVHPFHVLRINKMLSCAGADRLQTGMRGAFGKPQGTCARVDIGQVLLSVRCKDNNAAHASEALRRAKFKFPGRQKIIESRKWGFTKFSRADYLKYKSEGRIVPDGVNAKLLGNHGRLEKRAPGKAFLDAVA

SEQ ID NO: 14247 - protein, 125 aa, Oryza sativa (japonica cultivar-group)
MPVANWKLRLASFYVLKELEDDGPVTGHTSGQLKQTSWQRSIKPIVVSVPLKDSKFSHDECYKEETVRRKKYPDLEEKSSSTKATVVLGVAPEKKAQQFEAAAESGETAHGCSCGSSCRCNPCNC

SEQ ID NO: 14248 - protein, 253 aa, Geobacter metallireducens GS-15
MSGGPVKTPFLSFIIPAYNEEQRLPSYLERVIGFFAGQSYSFEIVVVDDGSSDGTAALVKALMAQHSCLRLEALDRNRGKGFAVKTGMSAAKGQLRVFADADGATPVEEIRRLLDAREQGADIAIGSRAMRSDECIVQGRVHRKIMGTVFNGLIRALAVRGIHDSQCGFKLFTASAAEDIFPRQRITGFGFDVELLFLARRLGYVVVEVPVNWSDVEGTKVRLVRDSFRMLGEVLRIRFTNLTGGYGDIPGKT

SEQ ID NO: 14249 - protein, 369 aa, Lactobacillus sakei subsp. sakei 23K
MADNKKADTKKLDTAVKALIKEYKPKKEITNDELVAKIVKPFALEADEINELMQQVEDHGIGIVDEDGNPSAATLKKEKVSAKELKDMSAPTGIKINDPVRMYLKEIGRVSLLNAQQEVDLALRIEQGDQEAKQRLAEANLRLVVSIAKRYVGRGMQFLDLIQEGNMGLMKAVEKFDHRKGFKFSTYATWWIRQAITRAIADQARTIRIPVHMVETINKLIRIQRQLLQDLGREPTPEEIGAEMDMNTDKVREILKIAQEPVSLETPIGEEDDSHLGDFIEDQDATSPEEHASYELLKEQLESVLDTLTDREENVLRLRFGLDDGRTRTLEEVGKVFGVTRERIRQIEAKALRKLRHPSRSKQLKDFLE

SEQ ID NO: 14250 - protein, 358 aa, GIBBERELLA ZEAE PH-1
MASATRQFARAATRATRNGFAIAPRQVIRQQGRRYYSSEPAQKSSSAWIWLTGAAVAGGAGYYFYGNSASSATAKVFNPSKEDYQKVYNEIAARLEEKDDYDDGSYGPVLVRLAWHASGTYDKETGTGGSNGATMRFAPESDHGANAGLAAARDFLQPVKEKFPWITYSDLWILAGVCAIQEMLGPAIPYRPGRSDRDVSGCTPDGRLPDASKRQDHLRGIFGRMGFNDQEIVALSGAHALGRCHTDRSGYSGPWTFSPTVLTNDYFRLLVEEKWQWKKWNGPAQYEDKSTKSLMMLPSDIALIEDKKFKPWVEKYAKDNDAFFKDFSNVVLRLFELGVPFAQGTENQRWTFKPTHQE

SEQ ID NO: 14251 - protein, 493 aa, Picrophilus torridus DSM 9790
MKIYIDGEWRDSSSGETIKKYNPSTGEVLDTFPAATRNDVDAAIDSAEDAFKRWSDMTSMERSKILYKALELISKDKDQLTDLLIKENGKVKREAMDETEGVIDQLQYYTEFERKLTGDIVEGTSNKRKIFQYKVPYGIVIAITPWNFPAAMVIRKLAPALLTGNTVILKPSSDTPLTAEWLVKKFVDAGIPKGVLNLITGKGSEIGDYIVEHKKVSLITMTGSTSTGQRIMEKASKNMAKLILELGGKAPFMVWKDANIERALKSLVWAKYLNVGQSCIAAERLYIHEDIYDEFMKKFIEVSKRIKLGDPESSDMGPLINKSAVETTEKYVDIARSSGYKILLGGKKPELSGKYKNGYFYEPTIIENVPQDSPLFQEEIFGPVIGAESVSSVDELYEKANDSKYGLASYLFTEDPELIFEASEKIRFGELYVNMPGPEASQGYHTGFRLTGQAGEGSKYGISEYLKLKNVYVDYSRGNLSISTVNDDLFKNL

SEQ ID NO: 14252 - protein, 496 aa, Colwellia psychrerythraea 34H
MKTSLYQRLALTLCATFMVMASLLVAWSNSLVQQSKYQAEQKLHVNLAEHLAHDNPLLQDGVYDKAALENLFHTLMLLGPSFEFYFLDTQGNILTYSADPAKIKRKSVSLIPLKKLIDKPQQVPVFGDDPRDINNKKIFSASPVYQGELLQGYLYIIIGGEIYDSIFSQVQSDKDLQKYGAFVVAGLFLFLLVLLAVFRYFTRPVRELATQMQALKAVKFDQTKVELKQWGSESSQNIDSNEVHFLGATFNDMVVQINQQFSLLTENDRIRRELLAHLSHDLRTPLATMQGYIEILAIKGDNLSSIEKQDYLATVQRNVSQLKRLIDQIFELAHLENGQVTVNLETFPIGELLHDILAKFTLKAAEKNIALTLQPQPCQFIVYSDIAKLERIMTNLLENAIRHTDNGGDIVMTVTQLSTQVKVSVTDNGSGISKEDIAYIFDARYRASNAIEDSTQHAGLGLAISQKLSQVINSELMVKSELGNGSSFSLSLPMLP

SEQ ID NO: 14253 - protein, 518 aa, Arabidopsis thaliana
MDCILLILTTLVAIFIVKIVLLVTKPNKNLPPSPNICFPIIGHLHLLKKPLLHRTLSHLSHSLGPVFSLRLGSRLAVIISSPTAAEECFLTKNDIVLANRPRFIMGKYVAYDYTSMVTAPYGDHWRNLRRITALEVFSTNRLNASAEIRHDEVKMLLQKLHDLSVERPAKVELRQLLTGLTLNVIMRMMTGKRFFEEDDGGKAGISLEFRELVAEILELSAADNPADFLPALRWFDYKGLVKRAKRIGERMDSLLQGFLDEHRANKDRLEFKNTMIAHLLDSQEKEPHNYSDQTIKGLILMMVVGGTDTSALTVEWAMSNLLNHPQILETTRQNIDTQMETSSSRRLLKEEDLVNMNYLKNVVSETLRLYPVAPLMVPHVPSSDCVIGGFNVPRDTIVLVNLWAIHRDPSVWDDPTSFKPERFEGSDQFGHYNGKMMPFGLGRRACPGLSLANRVVGLLLGSMIQCFEWESGSGGQVDMTEGPGLSLPKAEPLVVTCRTREMASELLFFGSEPSNKNV

SEQ ID NO: 14254 - protein, 555 aa, Picrophilus torridus DSM 9790
MSRTKLIATIGPASESMEIIKKMANLGLSCIRINTAHIENGYITKVAKMVDDVNKSEGTYIGLMVDLKGPELRTGKFKDGSFKIDYNKKYKISYNKNDNPDILINYNISDFIDDKTLIAMSDGKLRFSVDSVNGDIINVTSLDSGSLRDNSRVNVPGKLLRLGSLTDRDRMFIEEGIKNNVNFYALSFVQSRENINELQDYLFERNCDAQLISKIETKSGYDNIDEIARASDFIMVARGDLGVEMPLKEVTIAQKKIIDESRKYATPTIVATQMLESMVNNDSPTRAEVSDITNAIIDGTDALMLSEETAIGRYPVEAIGYLSSISDYVDSMEIKYKEPESFAFDKVAFAISKGLKMISDYTNVDSIVAFTRSGFTARLVSSMRPGKMIYSVVSSDFLARSLNLLKSVVPVKIDESMKSKEIYDILVDINRSNKIRPGKKVLVVSGSPYFVFGGTNEIRLVTMGKFIGRGYPVGNSFSGYYEPDGSGDIIILDKYIKNFDYKKYKCVIIKGNVSDTIKNLFYENKILLLYNTEFDAELNEKTFLNIDGDTGIITA

SEQ ID NO: 14255 - protein, 419 aa, Thermobifida fusca YX
MSTTVVLFTRDLRVSDHPALHAAVTEADRVVPLFVVDPALVRVSARNRIAYLLEALAELRGLLRERGGELVVRQGDTVAETVRIVAEAGAQAVYLSADVSAAAVRRARQLTEAVRAAGAHVRTFPGVTVVPPGALRPAHGDHYQIFTPYLNAWRAAQWRSPRPAPERVRLPEGLVPGPLPGAELIRLGTGVLAPQREQGGPRTARERIRAWLAQPNQDSRFGCHLHFGCLSPLEVALVAREHPRGALLLRQLALRDFHHQVLQAFPRLPRADYRPRPIQWRDDDSAFAAWCSGRTGVPIVDAGMRQLLWEGYVPGRIRMLTATYLTQVLRIHWKRGADHFYSLLVDGDVANNYGNWQQIAGTGGVPRPARRINLYRQAERYDPSGDYVRRFVPELRSISGSAVHHPPVPRPGGYPPPLR

SEQ ID NO: 14256 - protein, 343 aa, Thermus thermophilus HB27
MRALAKLAPEEGLTLVDRPVPEPGPGEILVRVEAASICGTDLHIWKWDAWARGRIRPPLVTGHEFSGVVEAVGPGVKRPQVGDHVSLESHVVCHACPACRTGNYHVCLNTKILGVDRDGGFAEYVVVPAENAWVNPKDLPFEVAAILEPFGNAVHTVYAGSGVSGKSVLITGAGPIGLMAAMVARASGAGPILVSDPNPYRLAFARPYADRLVNPLEEDLLEVVRRVTGSGVEVLLEFSGNEAAIHQGLMALIPGGEARILGIPSDPIRFDLAGELVMRGITAFGIAGRRLWQTWMQGTALVYSGRVDLSPLITHRLPLSRYREAFGLLASGQAVKVILDPKA

SEQ ID NO: 14257 - protein, 1079 aa, Debaryomyces hansenii CBS767
MYKAKDTEYKLGSPIHEKIPSFEIGSDRRLDIDDNEGEEVSARDEHDDDEDYEYKRIIEEEFENDREFKDEHGFEIGVVDNDENNDQDCEADTSKSIGSLPRMPGTYDFSGLKSDDNQYNELTETLNQDDGNQLNDIAVGKLGDEASHTYKSTLDPGKPLQNPPPSNLNIDSILKSQLENNKSEGSIGQRIDSISRKTTNSSGGPNIMKDNTLDRIPTHDYENIDDNNVFNRAGDPKIRGGLNASNDASINDNIADISQSTIQTSTDAGESINKGNGDITKGLSNVDVNDTLVNKSKQRNISSGSVIRNPPSASQANQSNQSYHQTRAITPVMNQMNKFQGSNSEASSPREHLGMGINNSAPSTGANSNTSSPMNGSYPNSIAKSRRSGNRVKGVFSNMFSKNKTSTSVTSSPETHAINMKISTPFNAKHVAHVGVDDNGSYTGLPIEWERLLSASGISKKEQQQHPQAVMDIVAFYQDTNDDNPDENAFKKFHYDNDSSHSSIYNATPPSTPGIPSTYNATPLQSEKQLQRQQSQKSQSSHPVQVQSTPKTPNNNYENQFIPSRPAPKPPSSSIPSTKTIKPPPVPPSPSTNTNISPALKKNSFMGRSFSSKSIKALRNSNRKISEPPKAPQSKISDSNTEMGIPKSKSHSNSLSTQSEVEPTKGSTTAPVSSTAKFNSTTINNINGHNIIEEEKNNNTLLSNPKQREQKPDSTIEKRDTPPSPSQSRVSEEESTKKETSEKYNNKENDIPKKSSQQPVRDAKQAALLAQKKREDKKRKNQQIISKLQQICSEGDPNELYKDLMKIGQGASGGVYIAHDVNHRSQTVAIKQMNLEQQPKKELIINEILVMKGSKHENIVNFIDSYLLRGDLWVVMEYMEGGSLTEIVTHSVMTEGQIGAVCRETLKGLRFLHSKGVIHRDIKSDNILLNIDGNIKMTDFGFCAQINEINLKRTTMVGTPYWMAPEVVSRKEYGPKVDVWSLGIMIIEMIEGEPPYLNETPLRALYLIATNGTPKLKEPEALSYDIRKFLSWCLQVDFNKRGNADQLLNDKFILEADDVESLSPLVKIAAMKKATELDE

SEQ ID NO: 14258 - protein, 444 aa, Arabidopsis thaliana
MVRRQEEEKKAEKGMRLGKYELGRTLGEGNFGKVKFAKDTVSGHSFAVKIIDKSRIADLNFSLQIKREIRTLKMLKHPHIVRLHEVLASKTKINMVMELVTGGELFDRIVSNGKLTETDGRKMFQQLIDGISYCHSKGVFHRDLKLENVLLDAKGHIKITDFGLSALPQHFRDDGLLHTTCGSPNYVAPEVLANRGYDGAASDIWSCGVILYVILTGCLPFDDRNLAVLYQKICKGDPPIPRWLSPGARTMIKRMLDPNPVTRITVVGIKASEWFKLEYIPSIPDDDDEEEVDTDDDAFSIQELGSEEGKGSDSPTIINAFQLIGMSSFLDLSGFFEQENVSERRIRFTSNSSAKDLLEKIETAVTEMGFSVQKKHAKLRVKQEERNQKGQVGLSVTAEVFEIKPSLNVVELRKSYGDSCLYRQLYERLLKDVGTSSPEQEIVT

SEQ ID NO: 14259 - protein, 370 aa, Mesorhizobium sp. BNC1
MLHAREPSILKKPVGDDSLSISDITSEAARLPSFDGHENIWCGRDEDRGLTAIVAIHNTKLGPALGGTRLWPHESFEAALTDALRLSRGMTYKSAVAGLPLGGGKAVIIADPKTGKTPALLTAYAEMLVRLEGQFITAEDVGMTLEDADFLREHAPNVVGTSAGGSGNPSPFTAEGVFLGIKAALKHRNGTERLSGIRVAVQGLGSVGWSLCEKLYREGAALIVTDLDPGQVEKAKRAFEAETVAPGEIVTVSADVFAPCALGGAITARNVPHIKFGIIAGSANNQLAKHEDARLLMERGILYAPDYVINAGGLINVAAELSPEGYDPEAVMAKLAKIPLTLTEIFQRAEQQKRPTNDIAAEMAMERIRR

SEQ ID NO: 14260 - protein, 1041 aa, Arabidopsis thaliana
MNRHRLLSAATDECNKKLGQACSSSLSPVHNFLNVQPEHRKTPFIRSQSPDSPGQLWPKNSSQSTFSRSSTFCTNLYLSSSSTSETQKHLGNSLPFLPDPSSYTHSASGVESARSPSIFTEDLGNQCDGGNSGSLLKDFLNLSGDACSDGDFHDFGCSNDSYCLSDQMELQFLSDELELAITDRAETPRLDEIYETPLASNPVTRLSPSQSCVPGAMSVDVVSSHPSPGSAANQKSRMRWTPELHESFVKAVIKLEGPEKATPKAVKKLMNVEGLTIYHVKSHLQKYRLAKYMPEKKEEKRTDNSEEKKLALSKSEADEKKKGAIQLTEALRMQMEVQKQLHEQLEVQRVLQLRIEEHAKYLEKMLEEQRKTGRWISSSSQTVLSPSDDSIPDSQNMSKTKASSPQPPLPAENKASETEDDKCESPQKRRRLENIAESEDPKRSLSETCKLITDIEDVTAFTVRKESLILCLCVYRSLLIEKRKMLESGICKETFPKMVMEERSCHTANRVGDVQMGNGHKRGRSEDSSSNNVSIGVETDKQDMLSNKAQKKWVFGKCVNLSAVDAPCFKEMMTVDGGQMGLESSDCHDLNGWRLQDALEEVQDRVEKIKESWAITGCSILLDAWVDQKGRDLVTFVADCPAGLVYLISFDVSDFKDDVTALLSLVNGLVEEVGVRNVTQIIACSTSGWVGELGELFAGHDREVFWSVSVSHCFELMLVKISKIRSFGDIFDKVNNIWLFINNNPSVLNIFRDQCHGIDITVSSSEFEFVTPYLILESIFKAKKNLTAMFASSNWNNEQCIAISNLVSDSSFWETVESVLKCTSPLIHGLLLFSTANNQHLGYVYDTMDSIKESIAREFNHKPQFYKPLWDVIDDVWNKHLHNPLHAAGYFLNPTAFYSTNFHLDIEVVTGLISSLIHMVEDCHVQFKISTQIDMYRLGKDCFNEASQADQITGISPAEWWAHKASQYPELQSLAIKILSQTCEGASKYKLKRSLAEKLLLSEGMSNRERQHLDELVFVQYNLHLQSYKAKLSEEIDVYKD

SEQ ID NO: 14261 - protein, 355 aa, Glycine max
PLSYVGPPPPPPMELGIFRGTHIKIFCMCLPEGERGMALEAVVYPQPQDPFGHGIKDPSYNYNNLLEGGGGNWGYADFNLEKEDRTCVPFLANQTENYPYGEWNCSPSPPSMLPQLNIASNPQSSETSNTQNNLDSSVSTPARPKRRRTKSRKNKEEIENQRMTHIAVERNRRKQMNEYLSVLRSLMPESYVQRGDQASIIGGAINFVKELEQRLQFLGAQKEKEAKSDVLFSEFFSFPQYSTSASGGCDNSTAMSEQKSEAQSGIADIEVTMVESHANLKIRSKKRPKQLLKIASSLHGMRLTILHLNVTTTGEIVLYSLSVKVEEDCKLGSVDEIAAAVYQILDRIQQETISN

SEQ ID NO: 14262 - protein, 405 aa, Desulfitobacterium hafniense DCB-2
RLSLAQTIPLGLQHVFAMFGATVLVPFLTGLSPAVALLSSGIGTIVFLLLTKSQIPAYLGSSFAYIASLTYFVKDQNNLAAAMGGALVIGIIYVLLFALMSYFGSSWIHKIVPPVVAGPVVAIIGLSLTPTAAGMASEQWYIAIFTLAVTAFLSIYAKGFLKIIPILAGIVIGYIVAAFAGLVDFTAVTASVSVDSWDKIIVSPINADTWQAPVFNKAAILMFAPLAFVTIIEDLGHMIVLGNITHSDPIEKPGFNRVLLGNGLATGIASFLGGPPVTTYGENIGVLAVTRVYSTFNIWVAAFIAIILSFVNPLQALIMSIPTAVMGGVSLYLFGMIGVTGLRTLIEARVDFSKNKNLIIASVIFAVGIGVQSHGVAYATLAGIILNLVLREEKDEVAGSGKEVS

SEQ ID NO: 14263 - protein, 412 aa, Glycine max
  misc_feature (127)..(127): Xaa can be any naturally occurring amino acid
  unsure (1)..(412): unsure at all Xaa locations
MSENMYPRLLFFDHTHSKMVWVKHQIQQKDGYLSYSPPLLASSSSSSSSSSSSSPPYPLGATFHKESSLPSSTPPPPPSGTRISPAVLFIIVVLAVLFFISGLLHLLVRFLIKHPSSASAQSNNRHXRTFPSDALQRQLQQLFHLHDSGLDQAFIDALPVFQYKEIVGLKEPFDCAVCLCEFSEKDKLRLLPMCSHAFHISCIDTWLLSNSTCPLCRGTLLTQGFSVENPIFDFDDLMEDEMCPWNGENGFNTRQKTVVVEESVEKEKGVFPVRLGKFKKLSSVEGGGESEVGETSSSNLDARRCFSMGSYQYVVGNSDLRVALNHDEISKGQVTRLNKGMELDDGKLSVEEGDVEGKKISSVSKGDSFSVSKIWLWPKKGKLPTSLDGQIGMPMPSFLNTDFPRMRDTEGA

SEQ ID NO: 14264 - protein, 392 aa, Ralstonia metallidurans CH34
MNEAVIVSTARTGLAKSWKGAFNMTHGATLGGHAVQHAIARAKIEAGEVEDVLMGCANPEGATGANIARQIALRAGCPVTVPGATVNRFCSSGLQTIAMAAQRVIADEGDIFVAGGVESISCVQQDMNRHMIQESWLNKNKPEIYWSMLQTAENVAKRYNIGKDRQDEYGVQSQLRAAAALEAGKFKDEIVPMTVLAGVADKATGQLMTKEVTIDADEGIRADTTLEAVSKIRTAMPGGVITAGNASQFSDGASAAVVMNARVAAAKGLQPLGVFRGFAVAGCEPDEMGIGPVFAVPKLLKKAGLKVDDIGLWELNEAFAVQVLYCADKLGIPMDRLNVNGGAIAVGHPYGVSGARLVGHALIEGKRRGVKYVVVTMCIGGGQGAAGLFEVL

SEQ ID NO: 14265 - protein, 408 aa, Shewanella oneidensis MR-1
MTVSELRFALDTFYFLISGALVMWMAAGFAMLEAGLVRSKNTTEILTKNVVLYAIACVMYLLVGYNIMYVDNAEGGWLPSFGTLIGSQAADANHALESDFFFQVVFVATAMSIVSGAVAERMKLWAFLVFSVVMTGIIYPVEGYWTWGKGFIASLGFVDFAGSGIVHMTGAAAAIAGVLLLGARKGKYGPNGQVNPIPGSNLPMATLGMFILWMGWFGFNGGSQLMVSDAANASAVAKVFVNTNTAAALGAISALIVCKMIWGKADLTMILNGILAGLVAITADPLSPSLLMAGVIGLVAGGLVVFSIVGLDRIKIDDPVGAISVHGVAGFLGLMCVPLSNANATITAQLTGAAIIFAWVFSASFAVWFVLKMTMGIRVSEEEEYNGMDASDCGIDAYPEFVTVKSAG

SEQ ID NO: 14266 - protein, 544 aa, Vibrio parahaemolyticus RIMD 2210633
MTPAELKRLYHIIKVQLEYGLDELLPDHQLTKAPLLMRKSLFWIKNQHPEKPLGERLRLALQELGPVWIKFGQMMSTRRDLFPPHIADPLALLQDQVAPFDGELAKQQMEKALGGPLENWFTEFDIKPLASASIAQVHTARLKDTNQEVVLKVIRPDIRPVIDSDLKLMHRMARIVAGAMPEARRLKPVEVVREYEKTLLDELDLRREAANAIQLRRNFEGSEELYVPEVFPDFSNETVMVSERIYGIQVSDIEGLEANGTNMKLLAERGVSVFFTQVFRDSFFHADMHPGNVFVKPEHPENPMWIGLDCGIVGTLNSEDKRYLAENFLAFFNRDYRRVAELHVDSGWVPADTNVDEFEFAIRIVCEPIFAKPLCEISFGHVLLNLFNTARRFNMEVQPQLVLLQKTLLYVEGLGRQLYPQLDLWETAKPFLEEWMMNQVGPQALVNSIKDRAPFWAEKLPELPELLYDSLKQGKAMNQRMDLLYQGYRQSKRQQATGKFLFGVGATLVVCSAILVDNAYEQLSMASGIAGVTFWLLSWRAYRQ

SEQ ID NO: 14267 - protein, 647 aa, Streptomyces coelicolor A3(2)
MNQPHLSQPQRASRTVAGPEDVVSDTQTLIENRPPSVAGLFLERVAATPDAEAYRYPVPPAAGEGPDDWKSLTWAQAAERVYAIAAGLVELGVQPEQRVALASSTRLEWILADLGIMCAGAATTTVYPQTNAGESAYILSDSESRVLIAEDAAQLAKAKEKKAELPDLTHVVVVDATGADTSEDWVLTLDELERRGAARLEKDPQLIKERVGALTKDQLATLIYTSGTTGRPKGVRLPHDCWSYMAKAIAATGLVTKDDVQYLWLPLAHVFGKVLTSGQIEAGHVTAVDGRVDKIIENLPVVQPTYMAAVPRIFEKVYNGVAAKARAGGGAKYKIFQWAAGIAREYAKVTQDNFKRTGTASAPAGLRTKHAVADRLVYAKIREAFGGRLRACVSGSAALAPEIGYFFAGAGIHILEGYGLTESSAASFVNPGEAYRTGTVGKPLPGTEVRIADDGEILLRGPGIMEGYHKLPEKTAEVLEADGWFHTGDIGELSPDGYLRITDRKKDLIKTSGGKYIAPAEVEGQFKAVCPYVSNILVHGADRNFCTALIALDEIAITEWARENGLAGKPYAEIVAAPATVEMVDGYVRQLNEGLQRWQTIKKFRLLPRDLDVEHGEITPSLKLKRPVVEREYKNLIEEMYEGSREA

SEQ ID NO: 14268 - protein, 493 aa, Ralstonia metallidurans CH34
MSHPHPHQHPVVEHDDLHRKLKARHLTMIALGGAIGTGLFVASGASIAQSGPGGALLAYCLIGLMVYCLMTSLGELAVHMPVAGSFVTYSALYVDEGFGFALGWNYWFSLAVTIAVELTAAQLVMQYWFPEVPGIYWSAGFLALMFALNAFSVKGFGEAEYWFAMIKVVTVVVFLCVGVLMILGILKGGPQSGWHNFTTGEAPFVGGLPGLFAVAMIAGFSFQGTETVGVAAGEAADPGRTIPRAIRQTFWRILLFYVVAILIIGVLIPYTDPNLLRNDVTDVGVSPFALVFQHAGLAFAAALMNAVVLTALLSAGTSSMYVSTRILYGLAVSQRAPRALAKLTPNGVPFNALLVTTGIGALCFFSSLFGDKAVYLWLLNTSAMTGFFAWLGIAVSHYRFRKGLLYQGYKVSDLAYRSPLYPFGPIFAGVLCLVIVGGQNYQAFTDIPGRWQEIVSTYIGVPVFLALWLGYRIVRGTRMIDYEDMPFELVKKD

SEQ ID NO: 14269 - protein, 1244 aa, Synechocystis sp. PCC 6803
MDKGGKTYNLAMIPGDVVTPGTPFFAQMPWMNIWSRFKFPPMPWWVAKQRSLGGLSLTPSLWELERDNQERKPTATNLEHRQQREIDQLKRQLLEAEQAKEKLARELAQHQNSPSQPPPPVSGLQTALARLGQWGILSRDLYGFFDQATELIRTALGVDYCGLWELLPNRSALVLCAGDGWDKALVGNYTIDATNRSYAGYTIQHNGDRRMEDYEPIVELDLRISTKFRASPLLHNLGIVSGINLMVAGPRTAFGVLGVYSLTARKFTEEEIEFLKVASHILAAAIDRQEYEERLLLLQQAIDASSNGILITDALGSDNAVVYANQGFETITGFNREEVIGQNCRFLLNEDRQGEQNKQLEKLRTAIAHGQECEVVLKNYRKDGASFWNHLYLSPIYNQQNFLVNFIGIQTDVTQQKLAEQQLRASEEFFSSMIVTITDGLLIVDQEGIIQFVNPAAREMFKRQEGELLQQPFGIPFVADQATEITLTPLDGSMVVAEMRVSPIHWQKGKAFLVSLRDITEQHQARLALAESEKKYRYIVELTSEGIWILDQDQQTTFANQQLADMLGYSVQEILEKNITAFVLVIHHLPESQNSHQKTLQSFPRCVLPNHGQVYDVQFQRRDGSVLWGLVSRSAWYDQWGNYRGELAMLTDITKRKSAEQALSASEQRLEGILGSIQDVVWSADAVSFATLYLNPTTAMVYGQSLEVCYQSQNFWFEQVHPGDRLLLEYHLQLLMEKDQTELEYRIVQPGGKERWLFRRSQLVRDGEHQPLRIDSIDSDITERKLAAEKLHYNANHDSLTNLPNRSMFLDRLGHALQRNLRRRDLRFAVLFLDLDGFKIINDSLGHSCGDLLLQGIAHRLRQCLRPEDTLARLGGDEFTMLIENITCPEDVIAVAQRIHQELQKPFNLNGQEIFTNTSIGIALNHPHYGHPQDVLRDADTAMYRAKAAGKGRYAIFNQTMHHHAVQRLQRENDLRRAIDRQELQLHYQPIVCLKTGQLQGVEALVRWQHPEEGLILPEEFVAIAEETGLIVPMGDWILWEASRQILELKQSFPQLSHLQVSINVSSRQLRDQRLLKTVDEILSSTNLAPQDLKLEITESLLIDNLNLAADVLKSLRQRNIQISLDDFGTGYSSLSYLHRFPINTIKVDRSFVNTMEPNNQNTAIVHTIVTLAHTLGLDVIAEGIETERHLTQLHWLGCDAGQGYYFARPIPSEDLLDFLTIQIPRWSVPAVTECHGDRKEPFS

SEQ ID NO: 14270 - protein, 245 aa, Picrophilus torridus DSM 9790
MRNLIPYFTLGYPDNETLKRFLMAMPINMINYIEFGFPSNDPRYDGPTIRKTHRIGNENYDESFYIDIFNYFNDHNIKMYSLSYYSDIKDIERFAAVLSNLGFSGSIIPDLLIDYYDEAFDVINKLNEMHFEYIPFFTPSTPDNVIKKVSEKTYSWIYYGLQPSTGIDIPYDLDYTCNRIFSLVKSREINFGFGIKTIEDVSGLIRRGASGVAIGSYLVNMLDGNDLNGFLDYLKRIRGALDVES

SEQ ID NO: 14271 - protein, 557 aa, Magnaporthe grisea 70-15
MPRLAAPPLPVPSHNLLRFLRSQTDGLLSFDAASATTCRTSRVVPSAHGPLGPRALTCKAKTLALPPGRRSFCTSNLRPQRTEGDGSRNFIFDMNKILPRVFRRQRGSTSRGTQEGQYPDEDRPNAYPRATKPTWQEKLGWGGVKSLGSDMGGPGSSDDCGPDNNFTFGSRRAQLMRAPMDPRLRCTEVDENGEVILVDGEYKKSELIAKYGLLPRDLRKIDSSNLPHILVRPSAILINLLHLRVLIKSDRVLLFDVFGSKTSYNQSAFMYDLQGRLRQKQPAGSNAVLPYEFRALEAVLISVTSALEADLLTVREPVVRVLRELEDDINRDRLRILLVLSKKVSTFEQKAKLVRDAIDELLEADDDLAAMYLTEKRHDLYRGVDDHTEVEMLLESYHKICDEVVQEASSLVSSIRNTEEIIRAILDANRNSLMLLDLKFSIGTLGLAMGTFLAGLYGMNLENFIEETNWGFAGVTTFSIFFSLLVCRYGLVKLRKVQRVKMHGTDGGTTSSWFRENVQTIEQGNAPGLGGNMGSIDKFRRIKNKSNNTSSNPGKWI

SEQ ID NO: 14272 - protein, 460 aa, Prochlorococcus marinus subsp. marinus str. CCMP1375
MTIGQKVPVTILTGFLGSGKTTLLNRILSEEHGKRIAVIENEYGEVGIDQGLVINADEEVFEMSNGCICCTVRGDLIRVLGNLMKRRDKFDYVLVETTGLADPGPVAQTFFMDDEIRNEFSLDGIVTLVDAAHIDQQLGRSDESSEQVAFADVLVLNKTDLVSDESLDILESRLRDMNRMARVVRSKQAEVSIDTVLNLSAFDLDQVLKRRPTFLEPEYPFEWTGVFSLEKGRYELSLEEGPDPTMSLVVLGDQGIDEAALNAGAESCVRLYADSAKLLHPGSTVPIEKHVSLQLQSNGRKSFFLELDNPTHIGLFTQHTAEEFDIKVSRVDTLISTIESNGKIEALVQPETERTWVAEHEHDDEVGSIAIERLGDVDPEKLNKWLSRLLSEKGVDIFRTKGFISYAGESRRMVFQGVHMLFTAQPDKEWGSEPRRNQLVFIGRNLDEEEMSREFDKCLV

SEQ ID NO: 14273 - protein, 268 aa, Burkholderia vietnamiensis G4
MSKIPAFGLGTFRLQGQVVIDSVRNGLELGYRAIDTAQIYGNEAEVGAAIAASGVRREDLFVTTKIWVDNYAPDKLAASLEDSLRKLRTDYVDLTLIHWPAPDNGVSVDAFMTALADAKSKGLTREIGVSNFNIALTKEAIAAVGSDAIATNQIELSPYLQNRKLVEFLQSERIHVTSYMTLAYGKVLGDPVLDAIARRHRATPAQVALAWALQLGYSVIPSSTKREHLASNLLAQTLRLTDEDLAQIATLERNGREVDPAGLAPQWD

SEQ ID NO: 14274 - protein, 360 aa, Triticum aestivum
MGSTAADMAASADEEACMYALQLVSSSILPMTLKNAIELGLLETLVAAGGKLLTPAEVAAKLPSTANPAAADMVDRMLRLLASYNVVSCTMEEGKDGRLSRRYRAAPVCKFLTPNEDGVSMAALALMNQDKVLMESWYYLKDAVLDGGIPFNKAYGMSAFEYHGTDPRFNRVFNEGMKNHSIIITKKLLEVYKGFEGLGTIVDVGGGVGATVGAITAAYPAIKGINFDLPHVISEAQPFPGVTHVGGDMFQKVPSGDAILMKWILHDWSDEHCATLLKNCYDALPAHGKVVLVECILPVNPEATPKAQGVFHVDMIMLAHNPGGRERYEREFEALAKGAGFKAIKTTYIYANAFAIEFTK

SEQ ID NO: 14275 - protein, 738 aa, Oryza sativa
  misc_feature (194)..(194): Xaa can be any naturally occurring amino acid
  misc_feature (244)..(244): Xaa can be any naturally occurring amino acid
  unsure (1)..(738): unsure at all Xaa locations
MMGTAHHNQTAGSALGVGVGDANDAVPGAGGGGYSDPDGGPISGVQRPPQVCWERFIQKKTIKVLLVDSDDSTRQVVSALLRHCMYEVIPAENGQQAWTYLEDMQNSIDLVLTEVVMPGVSGISLLSRIMNHNICKNIPVIMMSSNDAMGTVFKCLSKGAVDFLVKPIRKNELKNLWQHVWRRCHSSSGSGSEXSGIQTQKCAKSKSGDESNNNNGSNDDDDDDGVIMGLNARDGSDNGSGTQXTSSWTKRAVEIDSPQAMSPDQLADPPDSTCAQVIHLKSDICSNRWLPCTSNKNSKKQKETNDDFKGKDLEIGSPRNLNTAYQSSPNERSIKPTDRRNEYPLQNNSKEAAMENLEESSVRAADLIGSMAKNMDAQQAARAANAPNCSSKVPEGKDKNRDNIMPSLELSLKRSRSTGDGANAIQEEQRNVLRRSDLSAFTRYHTPVASNQGGTGFMGSCSLHDNSSEAMKTDSAYNMKSNSDAAPIKQGSNGSSNNNDMGSTTKNVVTKPSTNKERVMSPSAVKANGHTSAFHPAQHWTSPANTTGKEKTDEVANNAAKRAQPGEVQSNLVQHPRPILHYVHFDVSRENGGSGAPQCGSSNVFDPPVEGHAANYGVNGSNSGSNNGSNGQNGSTTAVNAERPNMEIANGTINKSGPGGGNGSGSGSGNDMYLKRFTQREHRVAAVIKFRQKRKERNFGKKVRYQSRKRLAEQRPRVRGQFVRQAVQDQQQQGGGRE

SEQ ID NO: 14276 - protein, 396 aa, Glycine max
  misc_feature (39)..(39): Xaa can be any naturally occurring amino acid
  unsure (1)..(396): unsure at all Xaa locations
MAIQHHNEQLEHNENVSSVLDALYCDEGKWEDEEEEEEXYEESEVTTNTGTSLFPLLMLEQDLFWEDEELNSLFSKEKVQHEEAYDYNNLNSDDNSNDHSNNNNNVLSDSCLSQPRREAVEWILKVNAHYGFSALTATLAVTYLDRFLLSFHFQREKPWMIQLVAVTCISLAAKVEETQVPLLLDLQVQDTKYVFEAKTIQRMELLVLSTLKWKMHPVTPLSFLDHIIRRLGLKTHLHWEFLRRCEHLLLSVLLDSRFVGCLPSVLATATMLHVIDQIKHNGGMEYKTQLLSVLKISKEKVDECYNAILQLSKANKYGHNNINNTSKRKYEQIPSSPSGVIDAAFCSDGSNDSWAVGSSLLYSPPEPLFKKSRTQGQQMNLSPLKRFIIGIVGTPP

SEQ ID NO: 14277 - protein, 484 aa, Bacillus licheniformis ATCC 14580
MEQSNTNRQNFQRKMQTRHLIMLSLGGVIGTGLFLSSGYTISQAGPAGTILAYLAGALIVYLVMLCLGELSVAMPVTGSFHMYASRFIGPGTGFTVAWLYWLTWAVALGSEFTAAGLLMQRWFPDTSVWMWSAVFAALIFALNAVSVRFFAESEFWFSSIKVLAIILFIILGGAAIFGIIPIQNADAAPLLSNFAGEGGLFPNGFLPIFMAMLSVNFAFSGTELIGIAAGESAEPEKNIPKAIKTTLWRLVLFFIGTIFVLSCLIPVKEAGVIKSPFVDVFDRIGVPYAADIMNFVILTALLSAANSGLYACSRMLWSLSKEKTLHPVFQKLTSRGIPLNALIFSMLGGILSLLSSVFAPDSVYIVLVSISGFAVVAVWMSIAASQFMFRRRFLAEGNTADDLKYRTPLYPAVPIAAFLLCLASCIGIAFDPNQRIALFCGVPFMALCYTIYYATNRKNSWNPSEPVKNASLHVSFSEYEEKKN

SEQ ID NO: 14278 - protein, 493 aa, Agrobacterium tumefaciens str. C58
MAGSLSAPVAARAQSHGPESVADLAEPLLDAVVNISTSQNVKTEGKGPVPPKLPEGSPFQEFFKDYFDSQKPEGGEKVNSLGSGFVIDPAGYVVTNNHVIEGADAIEVIFPNGSKLKATLVGTDTKTDLSVLKVEPKTPLKAVKFGDSRSMRIGDWVMAVGNPFGLGGSLTVGVISARGRNINAGPYDNFIQTDAAINKGNSGGPLFNMKGEVIGINTAIISPSGGSIGIGFAVPTELAQNIVQQLIEFGETRRGWLGVRVQPVTDDVAASLGMDSAKGALISGVAKGGPVENGPIQAGDVVLKFDGKDINEMRDLLRIVAESPVGKEVDVVVYRDGKEETVKVKLGQLQDTTDEKASTDDPQGEDGDGSMVAPDDKDGGDDQAQDQTPEVREAPQTVLGMNLVVLSNELRTEKGIAESVEGVLVASVDPGSPAEQKGMKAGDVIVEVGQDFMEVPGDVLVRVNGLKSEGRKNAHMMVADAQGNLRVVALPLE

SEQ ID NO: 14279 - protein, 509 aa, Arabidopsis thaliana
MGALEAERAANNATALETQSSPEDLSQPSPLRKIISVASIAAGVQFGWALQLSLLTPYIQLLGIPHKWSSYMWLCGPISGMIVQPIVGYHSDRCESRFGRRRPFIAAGVALVAVSVFLIGFAADMGHSFGDKLENKVRTRAIIIFLTGFWFLDVANNTLQGPCRAFLADLAAGDAKKTRVANACFSFFMAVGNVLGYAAGSYTNLHKMFPFTMTKACDIYCANLKTCFFLSITLLLIVTFSSLWYVKDKQWSPPQGDKEEKTSSLFFFGEIFGAVRHMKRPMVMLLIVTVINWIAWFPFILYDTDWMGREVYGGNSDGDERSKKLYDQGVQAGALGLMFNSILLGFVSLGVESIGRKMGGAKRLWGCVNFILAIGLAMTVLVTKSAEHHREIAGPLAGPSSGIKAGVFSLFTVLGIPLAITYSIPFALASIFSTNSGAGQGLSLGVLNIAICIPQMIVSFSSGPLDAQFGGGNLPSFVVGAIAAAISGVLALTVLPSPPPDAPAMSGAM

SEQ ID NO: 14280 - protein, 252 aa, Arabidopsis thaliana
MAYQSELGGDSSPLRKSGRGKIEIKRIENTTNRQVTFCKRRNGLLKKAYELSVLCDAEVALIVFSSRGRLYEYSNNSVKGTIERYKKAISDNSNTGSVAEINAQYYQQESAKLRQQIISIQNSNRQLMGETIGSMSPKELRNLEGRLERSITRIRSKKNELLFSEIDYMQKREVDLHNDNQILRAKIAENERNNPSISLMPGGSNYEQLMPPPQTQSQPFDSRNYFQVAALQPNNHHYSSAGRQDQTALQLV

SEQ ID NO: 14281 - protein, 537 aa, Marchantia polymorpha
MGASNVDAKGSEEEVPLKQSSSRKEAVNPADGNAAVSIKIRTRLPDFLNSVNLKYVKLGYHYVITHALYLLMVPLLMVVAAEFGRLGHEDFGQLWEQLQFNLVSVLVCSGTLVFGGTLYFMSRPHPVYLVDFACYKPIDERKVTREIFMECSRITGNFNEKSLEFQRKILERSGLGQDTYLPPAVLRVPPNPNMHEARLEAETVMFGALDELFEKTGVKPKEVGILVVNCSLFNPTPSLSAMIVNHYKMRGNIKSLNLGGMGCSAGVISIDLARDLLQVHNSTYAVVVSMENITLNWYMGNDRSKMLSNCIFRMGGAAILLSNKMKERRRAKYELVHTVRTHKGADPKCFSCVVQEEDDEGKIGVSLSRDLMGVAGDALKANITTLGPLVLPLSEQILFFATLVGRKLFKMKIKPYIPDFKLAFEHFCIHAGGRAVLDELEKNLNLTEWHMEPSRMTLYRFGNTSSSSLWYELAYTEAKGRVRRGDRLWQIAFGSGFKCNSAVWRALRTVKSPKQSPWADEIDSFPVEVPAFTSMLN

SEQ ID NO: 14282 - protein, 501 aa, Rhodococcus equi
MTADSRTPGAADAGSDRPEGPRLAPRPVYRPEVDPAATHAFGRPADVTGSFVRAADPRAGGPSPIRVGRPDPVLAEAFGRPDGESDLIQRAPEPVVEIPAADDTPADPWRDPDAPVRLGAPAEAGDGPARMPDAPKLGVRDVLLGGHVEGKALAGLAALALAIGLVGGLIGIAATSDRDSLTSRSVTLSQSGDDGEEPVGQIAAVADAALPSVVSIQVAQGEQSGTGSGVVVDGAGYIVTNNHVISMAATAPEGATIRVTFSDGTKVPAQIVGRDIKTDLAVLKTDARNLTVADLGKSSEVQVGQDVVAVGSPLGLNKTVTRGIVSALNRPVRLNGAGTDTDAVIDAVQTDAAINPGNSGGPLIDMDGRVIGINSAIRSESGGSVGLGFAIPIDDVTAVAQELIRNGVVHHPEIGVNARTVINDALRATSGAEVANVQADSPAQKAGIVEGDVIVKVGDRSVSSADELIVAVHDQEVGKPVTVQLFRSGRSVDVEVTPTSD

SEQ ID NO: 14283 - protein, 607 aa, Rhodopseudomonas palustris CGA009
MAANVNGAPAAGGNAYPIEDHTYDVVVVGAGGAGLRAVVGCSEAGLRTACITKVFPTRSHTVAAQGGISASLGNMHKDDWRWHMYDTVKGSDWLGDQDSIEYMVRNAPEAVYELEHWGVPFSRTEDGKIYQRPFGGMTMDFGKGQAQRTCAAADRTGHAMLHTMYGQALRHSAEFYIEFFAIDLIMDDQGCCRGVVALKLDDGTIHRFKAQTTILATGGYGRAYASCTSAHTCTGDGGAMALRAGLPLQDMEFVQFHPTGIYGSGCLVTEGARGEGGYLVNSEGERFMERYAPSAKDLASRDVVSRAMTIEMREGRGVGKKKDHIFLHLDHLAPEVLHERLPGISESARIFAGVDVTREPIPILPTVHYNMGGIPTNFHGEVVTKKDGDDNAVVPGLMAIGEAACVSVHGANRLGSNSLIDLVVFGRAAALRCAEKLVPNGKQPELPASSADMSLSRLDKYRYAKGGTPTAKLRERMQHVMQNNCAVFRTGEVLAEGKELIANVHGSVGDVGVSDRTLVWNSDLVETLEFDNLIVQAVVTMNSAANRTESRGAHAREDFPDRDDANWMKHTLAWIGDKGDVTIDYRPVHDYTMTNDVQYIPPKPRVY

SEQ ID NO: 14284 - protein, 214 aa, Mesorhizobium sp. BNC1
MVHLPERLLAGYRNFMAGRYSAESARYRSLAREGQSPETMVIACCDSRAAPETIFDSGPGELFVVRNVANLVPPYAPDEYHHGTSAALEFAVQSLKVKNIVVMGHGRCGGIGAALNPSAEPLSPGDFIGRWMSLVAPAAEAVAGNKLLTPAERQTALERISIRFQVENLRSFPCVRILEQKGKLTLHGAWFDISSGELWVMDPNTGDFARPDLG

SEQ ID NO: 14285 - protein, 429 aa, Streptomyces coelicolor A3(2)
MSDNSVVLRYGDGEYTYPVIDSTVGDKGFDIGKLRAQTGLVTLDSGYGNTAAYKSAITYLDGEAGILRYRGYPIEQLAERSSFVEVAYLLINGELPTVDELSAFKGEITQHTLLHEDVKNFYKGFPRDAHPMAMLSSVVSALSTFYQDSHNPFDERQRNLSTIRLLAKLPTIAAYAYKKSIGHPFVYPANNLGYVENFLRMTFSVPAQEYELDPTVVAALDKLLILHADHEQNCSTSTVRLVGSSQANMFASISAGINALWGPLHGGANQSVLEMLEGIRDAGGDVDSFIRKVKNKEDGVRLMGFGHRVYKNFDPRAKIIKAAAHDVLSALGKSDELLDIALKLEEHALSDDYFVSRSLYPNVDFYTGLIYRAMGFPTEMFTVLFALGRLPGWIAQWHEMIKEPGSRIGRPRQIYTGVVERDFVPVEER

SEQ ID NO: 14286 - protein, 185 aa, Triticum aestivum
  misc_feature (29)..(29): Xaa can be any naturally occurring amino acid
  misc_feature (81)..(81): Xaa can be any naturally occurring amino acid
  misc_feature (130)..(130): Xaa can be any naturally occurring amino acid
  misc_feature (142)..(142): Xaa can be any naturally occurring amino acid
  misc_feature (174)..(174): Xaa can be any naturally occurring amino acid
  unsure (1)..(185): unsure at all Xaa locations
AYSCSPIYSTWPPPGMASSATTDAPFQGXKYTAGLPVSRRSSGSLGRLSNGGRIRCMQVWAIDGIKKFETLSYLPPLSTQXYLKHVDYLIRSKGVPCLEFTKDGFDLREHNSCPGYYDGRYWTMCKLPMXGCTDATQVLNEXLEDVKKEYPDAYVRVIGFDNLGQVQCVNFIAXRPPRCDESRKV

SEQ ID NO: 14287 - protein, 314 aa, Rhodopseudomonas palustris CGA009
MSHDHHHHHGPGAAHGAGGHSHAPQDFGRAFAIGIALNMVFVVAEAAFGYFSNSMALIADAGHNLSDVAGLVVAWIAAGLSKRPPSARYTYGLRGSSILAALFNAVFLLLAVGAIGWEAVVRLFAPEPVAGITVMVVAGIGIVINAVTAWLFASGRHSDLNIRGAYLHMAADAAVSAAVVVAGVIILSTGWYWIDPAVSLIVAVVIVWGTWGLLRDSTALSLAAVPRDIDPTAVRAFLSKLPGVTQVHDLHIWGMSTTEVALTCHLVMPGGSPGDPFLVDLAHELQHDFGIAHTTVQIETDPNTVCALAPEHVV

SEQ ID NO: 14288 - protein, 255 aa, Hordeum vulgare subsp. vulgare
MEDERSTQSYQGAEADQVEVTDRGLLGNLLGKKKEEEDKKKEEELVTGMEKVSVEEPEVKEDGEKKETLFSKLHRSSSSSSSSSDEEEEEEVIDENGEVIKRKKKKGLKEKLKEKLPGHKDNEAEHVTGLPAPTAPASVQTHHDTDVVVEKIDGDAKAEATPAVPEEEKKGFLEKIKEKLPGGHKKPEDAAAVPVTHAAPAPVHAPAPAAEEVSSPDAKEKKGLLGKIMDKLPGYHKTGEEDKAAAPSGEHKPRA

SEQ ID NO: 14289 - protein, 152 aa, Methanosarcina mazei Go1
MKLPIKRPSRDVYSWDPFDEIKRMQEYMEQMMRAFPALENRYVSDTLSPLTDVAEEDNKVIVTTDLPGIDKENVELNLRENLLVISAQKGKEEETEKEGYLRKERSFMRYYREIPLPDNVTEDGATAQLKNGVLTVTLPKTKDVTEKRIQIE

SEQ ID NO: 14290 - protein, 126 aa, Nicotiana tabacum
  misc_feature (114)..(114): Xaa can be any naturally occurring amino acid
  misc_feature (122)..(122): Xaa can be any naturally occurring amino acid
  unsure (1)..(126): unsure at all Xaa locations
MRHQRATIMAEDYKKDLEFIEEVTSNVESVQEMFLLKILSQNAHVEYLQRHNLNGSTDRESFKKVVPVITYEDIQPDITRIAYGDNSPILCSQPISEISSSSGTSGGESKLIPXTEPEIGRXLQLH

SEQ ID NO: 14291 - protein, 165 aa, Glycine max
MAVLVARQGRELQRYSTSTGGRIVVGCIPYRMRDGGDSDGEGELEVLVISSQKGHGMMFPKGGWELDESMDDAARREALEEAGVRGEMGKVLGCWHYQSRRYQTTYEGIMYPLRVTDELQQWPEMASRKRTWATVQQVMEGCQHCWMREALEELVARHAKPQSAL

SEQ ID NO: 14292 - protein, 352 aa, Thermus thermophilus HB27
MDWLLTPGPVRLHPKALEALARPQLHHRTEAAREVFLKARGLLRQAFRTEGEVLILTGSGTLAMEALVKNLFAPGERVLVPVYGKFSERFYEIALEAGLVVERLDFPYGDTPRPEDVAKEGYAGLLLVHSETSTGALADLPALARAFKEKNPEGLVGADMVTSLLVGEVALEAMGVDAAASGSQKGLMCPPGLGFVALSPRALERLKPRGYYLDLARELKAQKEGESAWTPAINLVRAVAAVLEAVLPRLEEHLALKAWQNALLYGVGEEGGLRPVPKRFSPAVAAFYLPEGVPYARVKEAFARRGAVIAGGQGPLKGKVFRLSLMGAYDRYEALGVAAMFREVLEEILPAS

SEQ ID NO: 14293 - protein, 358 aa, Nostoc sp. PCC 7120
MVDSLKKPGFEEIRPGVKVPAKETLLTPRFYTTDFDEMARMDISVNEDELLAILEEFRTDYNRHHFVRDAEFEKSWDHIDGDTRRLFVEFLERSCTAEFSGFLLYKELGRRLKDKSPVLAECFNLMSRDEARHAGFLNKAMSDFNLSLDLGFLTKSRNYTFFKPKFIFYATYLSEKIGYWRYITIYRHLEAHPEDRIYPIFRFFENWCQDENRHGDFFDAIMKSQPQMLNDWKAKLWSRFFLLSVFATMYLNDIQRKDFYATIGLDARDYDIYVIKKTNETAGRVFPIILDVDSPEFYERLDICVENSEKLSAIASSNTPKFLQFFQKLPVLASTGWQLLRLYLMKPIDAVSAQGAAR

SEQ ID NO: 14294 - protein, 430 aa, Cytophaga hutchinsonii
MKNKTSAGLFSRAKEVIPGGVNSPVRAFRAVGGNPLFIKRAHGAYLVDEDDNQYIELINSWGPMILGHGNELIEKAVRDALSNSLSFGAPSRKEVEMAELIVSMVPSVEMVRMVNSGTEATMSAIRVARGYTGKEKIIKFEGCYHGHGDSFLIAAGSGAVTMGVPDSPGVPQGVANDTLTAPYNDIEAVRILVEKNKNKIAAIIIEPVAGNMGCVLPKAGFLEALREICDQENIVLIFDEVMSGFRLSVSGAQGVYGVQPDMTTMGKIIGGGMPVGAYGGKKEIMQNVSPSGPIYQAGTLSGNPIAMSAGLAILQYLQASPALYTQLNDQTDYLIHGMRKANNLLGLDYTFNHVGSMFTMFFTNIGVYDFETAKKSDLSKFAAYFQAMLSRGIYLAPSQFESLFISSAITKQLADQIIQAHAESMKEIHN

SEQ ID NO: 14295 - protein, 612 aa, Methanosarcina acetivorans C2A
MDKYEKVFELAKRRGFLWNSFELYGGSRGFYDYGPLGSTLKRRIEQVWREFYVIQEGHMEIECPTIGIEEVFIASGHVGGFSDPLCECMNCKEAFRADHLVENVTEAAGTLSAEELTKVIREKEIRCPECGGEFEDAYEFNLMFKTTIGPGTGRQGYLRPETAQGMFVDFQRLSRFYRDKLPFGAVQIGKSYRNEIAPRQGVIRLREFTQAECELFVDPRNKKHPNFERFADKELVLYSQAAQQTGEPVRLTVREAVETGVIAHEILGYNIALTNEFLTKVGIDPEKLRFRQHLTDEMAHYAIDCWDAEIETDRFGWVEIVGIADRTDYDLKAHARVSKTDLYVYVEYDEPKIVTRFVVKPNMGKLGPLFKGKAKAVADALKQLSEEELSKDQIKVTLDGEELTVSPDVVDFAEENIKVSGENVIPHVIEPSYGIDRIFYGIMEHAFDEENVAQKAAESGLKGAGEAEGTEDAGKESGGAKSESEAEGEEARLVMHFSSAVAPVQVAVLPLLTRKELADPAKEIIAKLREKTLLVNYDDSGTIGRRYRRNDEIGTPYSVTVDYDTLQDGTVTIRDRDSMRQVRAPINGIENVLYELIYRGRDFESAGKPFNF

SEQ ID NO: 14296 - protein, 183 aa, Arabidopsis thaliana
MGMSKSKGNTHNIFLLCNYILLGSASSCIFLTISLRLFPSLSGLSLIFLYTLTIATAVSGCSIFASSTSATASDRLYGSHMVATVLTAIFQGAVSVLIFTRTGDFLRFLKSYVREEDGEVILKLSGGLCVLMFCLEWIVLVLAFLLKYSDYLDESVVDDDDFKVRRQEEDLKDWPSYPFQLKI

SEQ ID NO: 14297 - protein, 328 aa, Debaryomyces hansenii CBS767
MLVYMLLFVAVIIICIYTIIIFFSHQPREPTLSELTYTTNDPTNEHYKLPDRINSRTSEYRDDAIQLSVVIPCFNETQRLGKMLDECIEHLNTNYPSKYEIIIVDDGSLDKSDEFALKKADEFHLKPHVMRVVKLSKNRGKGGAVTHGLLHSRGKYSLFADADGATKFSDVDKLVAYLSSVDSKKPAIAIGSRAHMVDTDAVVKRSFIRNFLMYGLHTLVYIFGIRNIQDTQCGFKMFNFQSVSLIFPHMHTERWIFDVEVLLLGELQKMSMKEIPVNWQEVDGSKIDIAKDSIGMAIDLVVTRLAYLLGIYKLDECGKLNSNNKKFD

SEQ ID NO: 14298 - protein, 332 aa, Zea mays
MSTSVSVSVSVSVSAAAVAALVPPLTGRRSPPASRVPQICRRRIRSKPRIFSSSPSFPIVPAAAMATGGAAPTAFDAGSKKKLLIFDSEEDLSVSLAKYTAELSEKFAAERGAFTAVLSGGSLIEALRKLTEPPYLDSVDWSKWHVFWVDERVVPKDHVDSNYKLAYDGFLSKVPIPPGQVYAINDALSAEGAADDYEACLKQLVKNGVISMSAATGFPRFDLQLLGMGPDGHIASLFPGHPLVNEKERWVTYIKDSPKPPPERITFTFPVINSSAYVAMVVTGAGKAAAVQKALSDKQTSSDLLPVEMAVLQDGEFTWFTDKAAVSLLQNK

SEQ ID NO: 14299 - protein, 280 aa, Arabidopsis thaliana
MAANGVATAGRQVSEKEADIQMMLSADVHLGTKNCNYQMERYVFKRRDDGIYIINLGKTWDKLQMAARVIVAIENPKDIIVQSARPYGQRAVLKFAQYTGVNAIAGRHTPGTFTNQMQTSFSEPRLLILTDPRTDHQPIKEGALGNIPTIAFCDTDSPMGFVDIGIPANNKGKHSIGCLFWLLARMVLQMRGTILAAQKWDVMVDLFFYREPEEAKQEGDEEAEVQADYGMVGGDQWTTAQISDAAWSGEVEQPISAAPAVGVTVAAGWEAASVPAAGWE

SEQ ID NO: 14300 - protein, 383 aa, Arabidopsis thaliana
MAENLACGETASHGSLTTTMMISTMAADFTNEIDYNHQLFAKDDNFGGNGSIPMMGSSSSSLSEDRIKEMLVREIEFCPGTDYVKRLLSGDLDLSVRNQALDWILKVCAHYHFGHLCICLSMNYLDRFLTSYELPKDKDWAAQLLAVSCLSLASKMEETDVPHIVDLQVEDPKFVFEAKTIKRMELLVVTTLNWRLQALTPFSFIDYFVDKISGHVSENLIYRSSRFILNTTKAIEFLDFRPSEIAAAAAVSVSISGETECIDEEKALSSLIYVKQERVKRCLNLMRSLTGEENVRGTSLSQEQARVAVRAVPASPVGVLEATCLSYRSEERTVESCTNSSQSSPDNNNNNNNSKQEEEKTMRENKRVIHCLLQPKTTSTHDI

SEQ ID NO: 14301 - protein, 175 aa, Streptococcus thermophilus LMG 18311
MVREDAMERAIFAGGCFWCMVQPFEEQEGILSVRSGYTGGHVPNPTYEEVCRKTTGHTEAVEIIFDPEIISFADLVEIYWAQTDPTDAFGQFEDRGDNYRPVIYYFDERQKKIAEQSKANLQASGRFDRPIVTKIEPAETFYEAEAYHQGFYKTNPERYAQSSAIRHQFLEENWK

SEQ ID NO: 14302 - protein, 230 aa, Triticum aestivum
  misc_feature (170)..(170): Xaa can be any naturally occurring amino acid
  misc_feature (199)..(199): Xaa can be any naturally occurring amino acid
  unsure (1)..(230): unsure at all Xaa locations
MAGKEIYHKMKDKVKDAFSSSGPETGKGKTKLSGRRVKHGYHLVKGKSNHPMEDYLVAEYRQVGEHDLGLFAIFDGHLGHTVPDFLRAHLFDNILSEPEFLSDTKNAIRKAYLLTDEKILEKAAELGRGGSTAVTAILISSNDSVKLVVANIGDSRAVISKNGKAERLSXVDHEPSMEREILEEKGGLFPNLPRNVPRXDGQLAVSKSIPETGVEITLWLLAKRGFRNYQ

SEQ ID NO: 14303 - protein, 466 aa, Triticum aestivum
MAYAYRWRRNLCTLMRFLPQVERPDQPVSLHDKYFYTAASVFIFMAASQLPLYGFKPGMGIDPFYWVGMAFASNWGTLTTFGILPVFVPEFLVPVCISRILKVSSRTPEGRMLLDGAHKVVGICTNIVMVIIFMLVYAILVKVDTCTAVVMMLQLFFSGVVVLYLDEVLKKGYGLLPSISLFTATNICVSVLWKAFSPSYVTYYHEQGAQFEGAVIAWVHLLVTGTDKFSATCQAFCRQNLPNVTNLLVTCLFCLIALFFQSFYVALPVKLLDCAQFTYRLKFSYISYAAIILQQVVVTYLLVISEVLYVIFCALVDLHGRSNGSSKTIGICRRGDGIFYYLTAPPTLIDLQRDPVHVFLYIVIVLSACAYFSVIWTRCCMTSRRFLHDMLGEDVQLPGPDTMSDDEFQSCIAKGACLGGICVGLLIVLSDFAGLCGSGMGILLAVAAVYPYFEGVRAEDIGVFGL

SEQ ID NO: 14304 - protein, 306 aa, Streptomyces coelicolor A3(2)
MYDYDLLVVGSANADLVIGVERRPAAGETVLGSDLAVHPGGKGGNQAVAAARLGARTALLARVGDDDYGRLLLDSQRAAGVDTVGVLVGGAPTGVALITVDPSGDNSIVVSPGANGRLAPGDVRAAASLFHASRVVSTQLEIPLETVVEVVRSLAPDSRFVLNPSPPRPLPQEVLTACDPLIVNEHEAKVILGDSLVGERPEDWARVLLAKGPRSVVVTLGAEGALVASAAGGVVRVPSVKVDAVDTTGAGDAFTAALAWRLGTGESLADAAAYAARVGAAAVTKAGAQESYPTAAEAEDLGAGAL

SEQ ID NO: 14305 - protein, 348 aa, Antirrhinum majus
LSFDLVEAWIRDNPKASICTPEGAYNFKNIANFQDYHGLPVFRNAVARFMEKVRGNRVRFDPDKIVMSGGATGAQETLAFCLADPGDALLVPTPYYPGNDRDITWRTGIQLLPVVCESSNEFKLTHEALESAYKKAQDSNIKVKGLLLNNPSNPLGIVLDKQTLTDSLNFTNDKNIHLICDEIYSATVFSQPSFTSIAEIVQENENYNRDLIHIVYSLSKDLGFPGFRVGIIYSYNQTVMNCARKMSSFGLVSTQTQHLIATMLSDSDFVDRFIDESAKRLGKRHGVLSRGLAQVGIGSLKSNAGLYCWMDLRRLLKEPTFEAELDLWRVILNEVKLNVSPGASFHCS

SEQ ID NO: 14306 - protein, 162 aa, Geobacter metallireducens GS-15
MDETPELEKATFGAGCFWHVEAEFRRVSGVVATHAGYMGGWKDHPTYEEVCSKETGHAEVVEVVYDPARVSYDELLRIFWTIHDPTQLNRQGPDIGTNYRSVIFFHTPEQEQAARLSMEKEGGSGRYSRPIVTEIASASAFWWAEEYHQQYLEKRGGGSCNW

SEQ ID NO: 14307 - protein, 613 aa, Campylobacter coli RM2228
MVQKANSGHPGAPLGMADILTVLSYHLSHNPKNPTWLNRDRLVFSGGHASALLYSFLHLSGYDLSLDDIKNFRQLHSKTPGHPEISTQGVEIATGPLGQGIANAVGFAMAAKKAQNLLGKELINHKVYCLCGDGDLQEGISYEACSLAGLHKLDNLIIIYDSNEISIEGDVSLAFNEDVKMRFESQGFEVLSIDGHDYEAIDKALKQAKKANKPCLIIAKTTIAKGAGELEGSHKSHGAPLGEEVIKKAKEKAGFDPNLNFYIPKAAKIRFESAVELGDLEEAKWKDKLEKSEKKELLEKLLNPDFSKINYPDFKGKDLATRDSNGEILNALAKDLEGFLGGSADLAPSNKTELYGMGDFAEGKNIHFGIREHAMAAINNAFARYGIFLPFSATFFIFSEYLKPAARIAALMKVKHFFIFTHDSIGVGEDGPTHQPIEQLSTFRAMPNFLTFRPADGVENVKAWQIALNADIPSAFVLSRQKLKALNEPVFGDVKNGAYLLKESKDAKFTLLASGSEVSLCLESANELEKQGFACNVISMPCFELFEKQDKAYKDRLLQGEVIGVEAAHSNELYKFCDRVYGIESFGESGKDKDVFEHFGFSVPQILNFILDK

SEQ ID NO: 14308 - protein, 226 aa, Arabidopsis thaliana
MEKRGGGSSGGSGSSAEAEVRKGPWTMEEDLILINYIANHGDGVWNSLAKSAGLKRTGKSCRLRWLNYLRPDVRRGNITPEEQLIIMELHAKWGNRWSKIAKHLPGRTDNEIKNFCRTRIQKYIKQSDVTTTSSVGSHHSSEINDQAASTSSHNVFCTQDQAMETYSPTPTSYQHTNMEFNYGNYSAAAVTATVDYPVPMTVDDQTGENYWGMDDIWSSMHLLNGN

SEQ ID NO: 14309 - protein, 309 aa, Thermus thermophilus HB27
MLVTGGAGFIGSHIVEDLLARGLEVAVLDNLATGKRENVPKGVPFFRVDLRDKEGVERAFREFRPTHVSHQAAQASVKVSVEDPVLDFEVNLLGGLNLLEACRQYGVEKLVFASTGGAIYGEVPEGERAEETWPPRPKSPYAASKAAFEHYLSVYGQSYGLKWVSLRYGNVYGPRQDPYGEAGVVAIFAERILKGLPVTLYARKTPGDEGCVRDYVYVGDVAEAHALALFSLEGIYNVGTGEGHTTREVLMAVAEAAGKAPEVQPAPPRPGDLERSVLSPLKLMAHGWRPKVGFQEGIRLTVDHFRGAV

SEQ ID NO: 14310 - protein, 267 aa, Thermobifida fusca YX
MSERGPALTAQTEHSTPDRARARELFERLGELDPDSPERQRIRDELVELHLPLVEYLARRFRNRGEWLDDLTQVATIGLIKSIDRFDLSRGVEFSTYATPTIVGEIKRHFRDKGWAVRVPRRLQELKLSLTKAVSELSQRHGRAPTVAELAEYLKMSEEEVLEGLESANAYSTVSLDAPDNGDEDAPAVADSLGIMDESLEGVEYRESLKPLLERLPPREKKILLLRFFGNMTQSQIAAELGISQMHVSRLLARTLAQLRQALTADD

SEQ ID NO: 14311 - protein, 336 aa, Burkholderia fungorum LB400
MTEQNRDLVLVTGASGFVGSSVARIAQQKGFKVRVLVRATSPRQNVESLDAEIVVGDMRDEASMRNALRGVRYLLHVAADYRLWAPDPSEIERSNLEGTEATMRAALKEGVERIVYTSSVATLKVTSSGQSADETSPLKADQAIGVYKRSKVLAERAVERMIAEDNLPAVIVNPSTPIGPRDVKPTPTGRIIVEAALGKIPAFVDTGLNLVHVDDVAAGHFLALERGKIGERYILGGENLPLQQMLADIAALTGRKAPTLSLPRWPLYPLAMGAEAIAKITKREPFVTVDGLKMSKNKMYFTSAKAERELGYRARPYREGLGDALEWFRQAGYLKA

SEQ ID NO: 14312 - protein, 446 aa, Symbiobacterium thermophilum IAM 14863
MKEVLPVDISTRVQQLAPDLVRVRRDLHAHAESGWTEFRTAALVVQRLSALGYEVRYGPEVLSPDHMAGLPPREELDRHLERAVAQGADPEVVRRMAGGFTAVVGVLRCGEGPTVALRFDMDALDVTETDDPGHRPNREGFASRNPGAMHACGHDGHTAIGLGVAAVLADLKDELRGTVKLLFQPAEEGVRGARAMVEAGVCDDVDYLLGAHLGFAATEVGTVIAGAGGFLATSKLDAVFTGVPSHAGAAPEAGRNALLAAAAAALNLHAIARHSKGASRINVGVLQAGSGRNVIPARAVMKLETRGETTAIDAYMREEAERIIRAAAAMHGVQVEILPIGSAAGGASDPDLAEVVARAAAETPSVTRILPAGDLGGSEDFAWMMDRVQRRGGKAVYMMIGTQIAAPHHDSRFDFDERALPIGVEVMARAVLRLAGGGIPQNSRKR

SEQ ID NO: 14313 - protein, 514 aa, Cucumis sativus
MGHPLDHSDAHHRPPSNGVIKVLPPDSDPSLPPPLPKQLPTSSAPPALGRVLARPFSDVRSFYSFRGELGRGQFGVTYLVTHKETKQDFACKSIATRKLIDQDDVEDVRREVQIMHHLTGHPHIVELKEVYEDRHYVNLIMELCAGGELFDRIIAKGHYSECTAASLCRQIVTVVHNCHSMGVMHRDLKPENFLFLSADENSPLKATDFGLSVFFKPGDVFKDLVGSAYYVAPEVLRRRYGPEAAVWSAGVILYILLSGVPPFWAENDQGIFDAVLRGHIDFSSDPWPSISSGAKDLIRKLLHSDPKERLSAIEALNHPWMKEDGEASDKPLDIAVLTRMKQFRAMNKLKKVALKVIAENLSEEEIVGLKEMFKSMDTDNSGTITFEELKAGLPKLGTKLSESEVRQLMEAADVDGNGSIDYIEFITAAMHMNRVEREDHLFKAFEYFDKDKSGYITMEELETALKKYNMGDETTIKEIIAEVDTDNDGRINYDEVVAMMRKGNQELTTTSRQK

SEQ ID NO: 14314 - protein, 374 aa, Crocosphaera watsonii WH 8501
MNTTEMMQTESTNEFVPAQMEAEGLEQTDKELQSVEVELSSLSDELGNQYPEGYRKTVSDDTVGAFFKEMSRYPLLNAEEEVELAQQVQFLLEVEETKQRLKEELQRTPSKAECAEALGFETAKQFEHRLHKGRIAKRKMIRSNLRLVVSIAKRYLNRGVPFLDLIQEGAIGLNRAAEKFDPNKGYKFSTYAYWWIRQAITRTIANDARTIRLPIHVVEKLNKLKKAQRVLKQKLQRNPNEKELADELEVTPPQLRQLLQLRRQSLSLNHRVGKGEDTELVDLLEDQDLQLPEELMNEGMLQYEVSAVLSDVLTQREKDVISLRYGLCTSQPHTLEEVGGIFNLSRERVRQIQSKAMRKLRRPQVARRLKGWLH

SEQ ID NO: 14315 - protein, 324 aa, Zea mays
MSTSVSAAAVAALVPPLTGRRAPPASRVPQICRRRIRSKPRIFSSSPSFPIVPAAAMATGGAAPTASDAGSKKKLLIFDSEEDLAVSLAKYTAELSEKFAAERGAFTAVLSGGSLIEALRKLTEPPYLDSVDWSKWHVFWVDERVVPKDHVDSNYKLAYDGFLSKVPIPPGQVYAINDALSAEGAADDYEACLKQLVKNGVISMSAATGFPRFDLQLLGMGPDGHIASLFPGHPLVNEKERWVTYIKDSPKPPPERITFTFPVINSSAYVAMVVTGAGKAAAVQKALSDKQTSSDLLPVEMAVLQDGEFTWFTDKAAVSLLQNK

SEQ ID NO: 14316 - protein, 445 aa, Oryza sativa
MSFRSIVRDVRDGFGSLSRRGFEVRLVGHRRGRSHSAVHELRDGHAAAAAADVVQSSCWANLPPELLRDVIERLEASEAAWPSRKNVVACAAVCRTWRDMCREIVKNPEFCGKITFPVSLKQPGPRNGAIQCFIKRDKSTQTYNLYLCLSSAVLVESGKFLLSAKRYSRATCTEYTIFMSADNTSRSSNMYIGKLRSNLLGTKFVIYDTQPPCNTANVSQSGKTSRRFYSRKVSPKNPSSTYSIAQVSYELNVLGTRGPRRMNCVMHSIPASSLEAGGTVPCQPDSVLARSLDESFGSISFSKSSIMDRSIRFSSSRYSDISVGGPMVGGQALGDSDESKERPLILRNKAPRWHEQLQCWCLNFKGRVTVASVKNFQLVAATQPAAGAPTPSQPAPPPPPDHDKVILQFGKVAKDMFTMDYRYPLSAFQAFAICLSSFDTKLACE

SEQ ID NO: 14317 - protein, 548 aa, Pseudomonas sp. BW13
MITLSISGMTCASCTHHVQEALLAVAGVSSAMVSYDEANAVIETDTDIQKTLLDAVATLGYKAKVVALGNNSRLTKDEDTEELHVAIIGSGSAAFACAIKAAEAAKVTLIEGADVIGGCCVNVGCVPSKILIRVAQLAEQRHNPFGGLENHSPQLSRSLLLAQQTARVEELRAAKYQNILDANPALSLIKGWARFKDANTLIVSQNDGTQQQVHADKVLIATGSTPTIPPIEGLSGTPYWTSNEALFAEEMPQHLVVIGSSVVALEIAQAYRRLGSEVTVLARHTLLYREEPLLGEQLSGCFEKEGIRVLNHTQASSVSYDGQQFTLEILSSEAGAGTLHCDKLLISTGRHANTGKLNLDAVGVKTEQNGVIIVNERMETSVPGVYAAGDCANMPQFVYVAAAAGSRARINMTGGETKLDLSAMPAVIFTDPQVATVGLTEDQAKAQYIETDSRVLSMENVPRALANFDTDGFIKLVVEKVSGRLIGPQILAHEGGELIQSAALAIRNRMTVTELSEQLFPYLTMVEGLKLCAQTFNKDVKELSCCAG

SEQ ID NO: 14318 - protein, 412 aa, Salmonella typhimurium LT2
MKALTYHGPHHVKVENVPDPGIEQPDDIILRVTATAICGSDLHLYRGKIPQVKHGDIFGHEFMGEVVETGHDVKNIRKGDRVVIPFVIACGDCFFCRLQQYSACENTNDGHGAAMNKKQIPPPAALFGYSHLYGGVPGGQAEYVRVPKGNVGPFKVPPLLSDDKALFLSDILPTAWQAAKNAQIQQGFSVAVFGAGPVGLLTIACARLLGAEQIFVVDHHAWRLRFAEERYGAIPINFDDENDPAEKIIEQTAGHRGVDAVIDAVGFEAKGSLTETVLTNLKLEGSSGKALRQCIAAVRRGGVVSVPGVYAGFIHGFLFGDAFDKGLTFKMGQTHVHAWLGELLPLIEKGLLKPEEIVTHYMPFEEAARGYEIFEKREEECRKVILVPGATSAQAAQKQATGVVNPMPGGVV

SEQ ID NO: 14319 - protein, 347 aa, Antirrhinum majus
VSFDLLEEYLEKHSEATNCDSRNSGFRENALFQDYHGLLSFRKAMASFMEQIRGGRATFDPERVVITAGAPPANELLTFILANPGDALLIPTPYYPGFDRDLRWRTGVNIVPIHCDSSNNFEITPQALEAAYNEAESKNIKVKGVLITNPSNPLGATIKRAILEQILEFVTRKNIHLISDEIYSGSSFSPEEFVSIAEILEAQDYKNSERVHIVYSLSKDLGLPGFRVGTIYSYNDKVVTTARRMSSFTLISSQTQHLLASMLSDKEFTKEYININRSRLRKRYEMIVDGLKEAGIECLKGNAGLFCWMNLKPLLEKPTKEHEVELWKLIMYEVKLNISPGSSCHCS

SEQ ID NO: 14320 - protein, 517 aa, Dianthus caryophyllus
MGSYKGVYDREILSKIATNDGHGENLEYFDGWKAYDRDPYHSTKNSNGVIQMGLAENQLCFDLVTEWLLKNPQASICTNEGVNKFMDIAIFQDYHGLPEFRSAVAKFMGKARDEKVIFNPDRIVMSGGASASETLLFCLANPGDAFLIPSPYYPAFNRDLRWRTGVNLIPFTCSSSNNFKITKEALQSAYEDALKKNIKVKGIIVTNPSNPLGTVLDKDTLKMLLTFVNAKNIHLVCDEIYATTVFNSPSFISVAEVIKDMPHVNQDLVHILYSLSKDMGMPGFRVGIIYSYNDRVVSTARRMSSFGLVSSQTQFMIAALLSDDDFVRRFLVESRDRLFRRHQHFTSELAKIGIGCLQGNAALFVWMDLRHLLDEATVERELKLWRVIINEVKINVSPGSSFLCSEPGWFRVCFANMDNATLDVALNRIRSFVTRGRVDNSTMTTTSARAAATTTTTTTTTTTTTTTTTTIKKKRGQMELRLSFNNRRFEDGLMSPHSILLSPHSPMPQSPLVKART

SEQ ID NO: 14321 - protein, 403 aa, Aspergillus fumigatus
MREIVHLQTGQCGNQIGAAFWQTISGEHGLDGSGHYNGSSDLQLERMNVYFNEANGDKYVPRAVLVDLEPGTMDAVRAGPFGELFRPDNFVFGQSGAGNNWAKGHYTEGAELVDQVIDVVRREAEGCDCLQGFQVTHSLGGGTGAGMGTLLISKIREEFPDRMMATFSVVPSPKVSDTVVEPYNATLSVHQLVEHSDETFCIDNEALYDICMRTLKLSNPSYGDLNHLVSAVMSGVTTCLRFPGQLNSDLRKLAVNMVPFPRLHFFMVGFAPLTSRGAHSFRAVSVPELTQQMFDPKNMMAASDFRNGRYLTCSAIFRGKVSMKEVEDQMRNIQSKNQSYFVEWIPNNIQTALCSIPPRGLKMSSTFIGNSTSIQELFKRVGDQFTAMFRRKAFLHWYTGEGM

SEQ ID NO: 14322 - protein, 358 aa, Cryptococcus neoformans var. neoformans
MSQLIATKRVDLLAPYLALDQGSRVQAEYIWIDAEGGIRSKTMTLDKAPSSVADLKEWNFDGSSTNQAPADNSDVFLRPVAIFKDPFRGGANILVLCECYDNDGTPNKSNYRAHCKKVMDAAKDTEPWFGLEQEYTLFDADGQVFGWPKNGFPGPQGPYYCGVGAGKVFARDFIEAHYRACLYAGIKISGINAEVMPSQWEFQVGPCTGIEMGDHLWMPRFLLLRIGEEWGITPSLHPKPLKGDWNGAGCHSNYSTKDMRTPGKGMAAIEDAIKKLEKKHLEHIAVYGEDNDLRLTGKHETASMTTFSAGVANRGASIRIPRHVGAQGYGYLEDRRPASNVDPYRVTAILVETTVLNN

SEQ ID NO: 14323 - protein, 94 aa, Bacillus sp. PS3
MLKPLGDRIVIEVVETEEKTASGIVLPDTAKEKPQEGRVVAVGAGRVLDNGQRIGRKSKVGDRVIFSKYAGTEVKYDGKEYLILRESDILAVIR

SEQ ID NO: 14324 - protein, 255 aa, Glycine max
MGTTLMRCSHANALFRALKPKPRNSSLPLSSMAINKGNSNKAYDALLLDAGGTLLQLAKPVEEIYATIGSKYGVTVDPAMIKQGFKRAFAAPWPEKLRYQGDGRPFWKLVVSEATGCGDEDYFEEVYEYYAKGDAWHLPDGAFETITFLKDAGVKMAVVSNFDNRLRKLLKDLNVLNLFDAVIISSEVGYEKPDPRIFQAALDEVNVEACKALHIGDDQKADKLGANAVGIDCWLWGIDVKTFSDIQIRILNSEA

SEQ ID NO: 14325 - protein, 158 aa, Brassica napus
MASTSSLALSQALLARAISLHGSDQRISLPSSFSRASASSRRRNAASMTKLRSIRPLVRAAAVETLETSTDSSIIDKSVNSIRFLAIDAVEKAKSGHPGLPMGCAPMAHILYDEVMRYNPKNPYWFNRDRFVLSAGHGCMLLYALLHLAGYDSVLEED

SEQ ID NO: 14326 - protein, 499 aa, Saccharomyces cerevisiae
MSRLERLTSLNVVAGSDLRRTSIIGTIGPKTNNPETLVALRKAGLNIVRMNFSHGSYEYHKSVIDNARKSEELYPGRPLAIALDTKGPEIRTGTTTNDVDYPIPPNHEMIFTTDDKYAKACDDKIMYVDYKNITKVISAGRIIYVDDGVLSFQVLEVVDDKTLKVKALNAGKICSHKGVNLPGTDVDLPALSEKDKEDLRFGVKNGVHMVFASFIRTANDVLTIREVLGEQGKDVKIIVKIENQQGVNNFDEILKVTDGVMVARGDLGIEIPAPEVLAVQKKLIAKSNLAGKPVICATQMLESMTYNPRPTRAEVSDVGNAILDGADCVMLSGETAKGNYPINAVTTMAETAVIAEQAIAYLPNYDDMRNCTPKPTSTTETSLPRVAAVFEQKAKAIIVLSTSGTTPRLVSKYRPNCPIILVTRCPRAARFSHLYRGVFPFVFEKEPVSDWTDDVEARINFGIEKAKEFGILKKGDTYVSIQGFKAGAGHSNTLQVSTV

SEQ ID NO: 14327 - protein, 350 aa, Bacillus anthracis str. A2012
MKALLWHNQRDVRVEEVPEPTVKPGAVKIKVKWCGICGTDLHEYLAGPIFIPTEEHPLTHVKAPVILGHEFSGEVVEIGEGVTSHKVGDRVVVEPIYSCGKCEACKHGHYNVCEQLVFHGLGGEGGGFSEYTVVPEDMVHHIPDEMTYEQGALVEPAAVAVHAVRQSKLKEGEAVAVFGCGPIGLLVIQAAKAAGATPVIAVELSKERQELAKLAGADYVLNPATQDVLAEIRNLTNSLGVNVSFEVTGVEVVLRQAIESTSFEGQTVIVSVWEKDATITPNNLVLKEKEVVGILGYRHIFPAVIKLISSGQIQAEKLITKKITVDQVVEEGFEALVKDKTQVKILVSPK

SEQ ID NO: 14328 - protein, 364 aa, Picrophilus torridus DSM 9790
MLLIPGPVEVTRPVMDAGSYLCNHRSDEFRAIVNNIENSLNSLTGSHRAVVTTGSGTLAVESMVFSLINKNDKVVALTQGPFGDRLAASVRRASKNAEIINIENKNIMEIIEEKDFDKLFMVHNETGYGVAVRNINDVARAVKNKGSRIIIDSVSGYLGYKIDFSNIYAMATGSQKNIAALPGTGIDFLSKEAVDDLYSNDVDAPFYLDLKTSLDFLEKNETPYTPSTGAFKSLEVALDEVKKEGMENRVKRIERASKFIRSILNENNIEVNGDDSNYSNTVVCFKPRTDPDDVIKRLASENIIITKGMGSMKNYLRIGTMGIINSHFISRFLNSYFKIEKINDYVDESEVKCDLPEFLEIIEA

SEQ ID NO: 14329 - protein, 194 aa, Triticum aestivum
MVSHLPAKQGKWADYTAAPAASYSPHGAAAGDEELPSPSSAESGGSGGAPRKRYRGVRQRPWGKWAAEIRDPHKAARVWLGTFDDAEAAARAYDAAALGFRGSRAKLNFPESATIPPQQQPPPAPALAMPPTAAARGVAGVAGSVGRAGLFPLRQVPAAEHRRLDVGGAENAGASCDVQLRSRSELPHAAGEQR

SEQ ID NO: 14330 - protein, 150 aa, Symbiobacterium thermophilum IAM 14863
MERSFVMVKPDGVQRGLIGEVISRLERRGLKLVAAKLMRVSRELAEEHYAQLKDKPFFPSLIEFITSGPVMAMVWEGPNAISIIRKTMGATNPANAEPGTIRADFACDVSYNVVHGSDGPESAEREIRLWFGEVEPSYSRSVDRWIFPEG

SEQ ID NO: 14331 - protein, 599 aa, Nocardia farcinica IFM 10152
MSESSERNSGAVAARPVQEHRYDVVIVGAGGAGMRAAIEAGPRVRTAVLTKLYPTRSHTGAAQGGMCAALANVEEDNWEWHTFDTVKGGDYLVDQDAAEIMAKEAIDAVLDLEKMGLPFNRTPEGKIDQRRFGGHTRDHGKAPVRRACYAADRTGHMILQTLYQNCVKHDVQFFNEFYVLDLVLTETDRGPVATGVVAYELATGDLHVFHAKSIVFATGGSGRMYKTTSNAHTLTGDGMAIVFRKGLPLEDMEFHQFHPTGLAGLGILISEAVRGEGGILRNADGERFMERYAPTIKDLAPRDIVARSMVLEVLEGRGAGPNKDYVYIDVTHLGEDVLEEKLPDITEFSRTYLGVDPVKELVPVFPTCHYVMGGIPTRIRGEVLRNNDDIVPGLYAAGECACVSVHGANRLGTNSLLDINVFGRRAGIAAAEYAERTDFVEMPENPAQMVQDWLALILSDHGNERVADIRTELQRSMDNNASVFRTEDTLKQALTDIHALKERYSRITVQDKGKRYNSDLLEAVELGFLLELAEVTVVGALNRKESRGGHAREDYPDRDDVNFMRHTMAYKEGTDLLSDIRLDFKPVVQTRYEPMERKY

SEQ ID NO: 14332 - protein, 583 aa, Bacillus sp. KSM-1876
MLREAIYHRPKNNFAYAYDKETIHIRLRAKKGDLTKAYLIFGDPYQWTDEGWKNDTKPMVFEGSDELFEYWFVEVKPEFRRLRYGFELHSDDQCLVYGEDGFKEKDPKNAHFYFVFLFLNGNDVFTAPEWVKDTIWYQIFPERFPNGNPSLNPEGTLPWGSVEPKWDTFFGGDLEGIINNIEYLKELGINGIYLTPIFKARTNHKYDTVDYMEIDPQFGDKQTFKKLIEVCHDNGIRVMLDAVFNHSGFYFEQFQDVLEHQEKSKFRDWFHLREFPVIPLPEPNYDTFAFTHQMPKLNTANPEVKEYLLNVGRYWVEEFDIDGWRLDVANEVDHQFWREFRNTIKSIKPDVYILGEVWHDSMPWLQGDQFDAVMNYPFTQAVVEFIPKNEIDSKQFEQQLTKLLTSYPQNVNEVAFNLLGSHDTPRILTICEGNKDKLKLLLLLQFSFIGTPCIYYGDEIGLTGGNDPGCRKCMVWDESDQDSELLNFFRSLIALRRNYPAFGNKGLVEVMETNRETNHIIYAKKSSQETIVIAINNSSEKIKVDLPHEFNDRKSIDIWNNEPFPKMSEVELNPWGFAIIKLT

SEQ ID NO: 14333 - protein, 370 aa, Caulobacter crescentus CB15
MSPSFAKEARLDPGVVRGHLRPLRFSLTAFHWACRMTVTVPAEWAPHRAMWVGFPSHAELWQEDLEQAQQEVADLARALAGPGAERVRLMVVGDEAEAAARALLSDTTVEIVRGQFGDIWLRDTGPIFVDDAGKAVAAGFKFNGWGGKYSLEGDDIVAEQIAAASGAPLVRNDFILEGGALDHDGNGTILTTRQCLLNDNRNPGWDEATANAALTEALGAKKVLWLGKGLKNDHTDGHVDNLARFVAPGVVACPMGYGLDDPNADIYGDTAKMLAGMTDSRGSPLQVVRIPSPGKLLDEDGEPIPASHMNFLIANEAVIVPIYAEESGAFAVEVIKGLFPERQVIGLPSTAILTGGGSFHCISQQEPETA

SEQ ID NO: 14334 - protein, 236 aa, Arabidopsis thaliana
MQIFVKTLTGKTITLEVESSDTIDNVKAKIQDKEGIPPDQQRLIFAGKQLEDGRTLADYNIQKESTLHLVLRLRGGMQIFVKTLTGKTITLEVESSDTIDNVKAKIQDKEGIPPDQQRLIFAGKQLEDGRTLADYNIQKESTLHLVLRLRGGMQIFVKTLTGKTITLEVESSDTIDNVKAKIQDKEVFLRTSSVSSSLESSLRMDVLWPTTTSRRSLLFTWSCVFVVVSKSRLCYA

SEQ ID NO: 14335 - protein, 243 aa, Thermobifida fusca YX
MITIDFTLFPVGPGHRVLDLGCGGGRHAFEVYRRGADVVAFDQNAEDLAAVSAMFAAMRAEGEAPAEATAETVRGDALAMPFDDNTFDRVIAAEIMEHIPHDTAAMAEMYRVLRPGGIAVVTVPSWFPERICWALSEEYHTVEGGHIRIYTRAELEAKLKATGFIIGPHHHAHALHSPYWWLKCAVGTTNDSHPLVRAYHNLLVWDMLKAPRITRVTERLLNPLIGKSVVVYLRKPRNDGDTG

SEQ ID NO: 14336 - protein, 462 aa, Cytophaga hutchinsonii
METAVLDTIEAAVPAIDSIKAVAAITVDTLASKSSLAATDAAVSQLGLTANNIWMMLCTALVFIMNLGFATVESGLARSKNTTNILFKNTITPAIGIIIFCLWGFNLMYPGGAYEGGFFGFGGFGLTAPAAESGGLDLTYAGGYTYWTDFLFQAMFAATAATIVSGAVAERIKLTSYIIFTCIIIGVIYPVVGMWNWGGGWLKSLGFYDFAGSTMVHSLGGWAALAGVIVLGPRIGKYVDGKINPIPGHSLPLATIGVFLLWLGWFGFNGGSVLSADPALTSLVLVTTSLAAAAGAIGALLASVIYLKTLDLSMVLNGILGGLVGITAGADLMSPNDAILIGLISGAAVVFAVIFFDKIKVDDPVGATSVHLVCGILGTLFVGIFGDKGFGGSAEGAGMSQLIKQLIGVGAAASLVFPASYVIFTIISKTVGLRVAAKEEIEGLDIAEHGMKAYNIDVDKEY

SEQ ID NO: 14337 - protein, 290 aa, Wolinella succinogenes
MRVALIQQAFHGSREATIQRSRELILEASKGGAELVVMQELHTSEYFCQSEETRFFDYASFYEEDVRIFSSIAKEGGVVLVGSFFERRSAGIYHNTAVVFEKDGSIAGRYRKMHIPDDPGFYEKFYFTPGDLGFEPISCSLGKLGVLVCWDQWYPEAARLMALKGADILLYPTAIGWFDADDLDEKERQKEAWIAIQRGHAVANGLPVVAVNRVGFEKDSSGVLEGIRFWGHSFAFGPQGEPLALGSMESEEVIWVDVDMKRSEEVRRIWPFLRDRRIECYDGLTKRFLD

SEQ ID NO: 14338 - protein, 448 aa, Arabidopsis thaliana
MASQGCVDWQFSGSDAAEKAAQASLGTYSSEIFSLCDPQGKPILPPLSEEAETSHTAEKAVVKAVLCGTGNAYAPSIGLPVAKRAVAEYLNRDLDNKLTGDDVYMTVGCKQAIELAVSILAKPKANILLPRPGFPWDMVHSIYKHLEVRRYEFIPERDFEIDFNSVREMVDENTFAIFIINPHNPNGNYYTEAHLKQLATLARELGIMVVSDEVYRWSVFGSNPFVPMGKFSSIVPVITLGSISKGWIVPGWRTGWLALHDLNGVFRSTKVPAYLVLYGQVLKAAKEFLEITSKPPTVIQAAIPTILEKTPQDFFEKRGIFLKDKVDFGYSKLKNIPTLTCYMKPESCTFLWFETNFSLWIIRIAQTKLDPLHFVDIEDDHDFCRKLAKEENLVVLPGIAFGQNNWLRHSIDMETPRLEDAFERLKSFCERHSVIVEASSLKDVNGVN

SEQ ID NO: 14339 - protein, 547 aa, Bradyrhizobium sp. BTAi1
MAAKDVKFAGDARDRMLRGVDILANAVKVTLGPKGRNVVIEKSFGAPRITKDGVTVAKEIELEDKFENMGAQMLREVASKTNDLAGDGTTTATVLAQAIVREGAKAVAAGMNPMDLKRGIDTAVAAVIKDIEKRAKPVASSAEVAQVGTISANGDAAIGKMIAQAMQKVGNEGVITVEENKSLETEVDIVEGMKFDRGYLSPYFVTNAEKMTAELDDVYVLLHEKKLSGLQAMLPVLEAVVQSGRPLLIIAEDVEGEALATLVVNRLRGGLKVAAVKAPGFGDRRKAMLEDIAILTGGQLISDDLGMKLENVTIKMLGRAKKVVIDKENTTIVNGAGKKADIEARVGQIKAQIEETTSDYDREKLQERLAKLAGGVAVIRVGGATEIEVKEKKDRVEDALNATRAAVQEGIVPGGGVALLRAKKAVGRITNPNSDVQAGINIVLKALEAPVRQIAENAGVEGSLVVGKILEEKSETFGFDAQSEDYVDMVAKGIIDPAKVVRTALQDASSVAGLLVTTEAMVAELPKEAAPAMPAGGGMGGMGGMGF

SEQ ID NO: 14340 - protein, 397 aa, Pirellula sp. 1
MHRFDSISVAPPDAILGLTEAFKADERETKMNLSVGVYQDASGTTPVLRCVKEAEKRLLDTESTKGYLSIDGLPDYREAARRLIFSDQIAAERVAAVQTPGGTGALRVAAEFLATQCGPLRIFLPTPTWANHNAIMAAAGLPVETYSYLASDKKTLDFDALIEDLKTKPKAGDAVLLHACCHNPTGVDPTPEQWEQIASVVSEKKLIPLLDFAYQGFGEGLDEDAIGVRTILRQMDEAIVCSSFSKNFGLYSERVGTACLVSGSAETTKAALSQLKRVVRANYSNPPRHGGAIVATVLADEGLTQMWHEELAEMRTRIASLRKQFVDGMAATGVDQDFSFLLDQKGMFSFSGLSPMQVDQLRSEHGVYLVGSGRINVAGMNESKMEWLCNAVAAVLR

SEQ ID NO: 14341 - protein, 490 aa, Photorhabdus luminescens
MTNDVNTELLRQQAYINGQWVDADNQATFKVTNPANGQVIAHVSNMGAAETERAIAAAQQALPAWRAMTAKQRSQILQRWFQLMMANQQALAELLSREQGKSQAEAMGEIAYGASFIEWFAEEGKRTYGETIPSPMPGRRIVTIKQPIGVVAAITPWNFPNAMITRKVGPALAAGCTVILKPASETPLSALALAALAEQAGIPAGVFNVVTGVDAKTIGGVLTQSPIVRKLSFTGSTRIGKLLMAQSADTVKKLSLELGGNAPFIVFDDANIDAAVQGALIAKFRNSGQTCVCANRILVQETIYDAFAERLAQAVNKLQVGPASDAKSQQGPLINQAAVDKVEEHINDAVSRGARILAGGKPHALGGLFFEPTVLADVNESMLISQEETFGPVAPLFKFRDEAEAIHLANDTEFGLAAYFYSRDIGRIYRVAEALESGMVGINEGLISNEVAPFGGIKQSGLGREGSRYGIEDYLEVKYLCFGGIEDTGV

SEQ ID NO: 14342 - protein, 194 aa, Solibacter usitatus Ellin6076
MDQLEGTPRRAFLIMPVAFAGLMALWYRRERPLPNPRQPGSGRPIRVVLFLDNGKRGETIQVNKIAKTDADWQKELTPEEFAVTRKKGTERAFTGRYWDNHEPGLYRCTCCGTTLFRANEKFDSGTGWPSFYAPAAEENVATETDSSLFMKRTEVLCSKCDAHLGHVFDDGPAPTGLRYCINSAALKFTPEKEK

SEQ ID NO: 14343 - protein, 252 aa, Burkholderia sp. 383
MFELSGKVAVITGGASGIGLGIARGMVDAGANVVLVGRDRDKGDAAIASLPGGSERGLFVPADITRRDACMTAIEQAERRFGRLDILVNNAGMNIRQQGHELTADDWYRIIDTNLSGAHFCAQAIHPAFRRAGGGKIINIGSMLSLFGTTYGAAYAASKGGIVQLGKAWAVEWAPDNIQVNTLLPGWIETELIAEAKRLFPDLERSVLERTPLRRWGKPQDLAGIAVALCAPECDFVTGAVIPVDGGYSVQG

SEQ ID NO: 14344 - protein, 371 aa, Bacteroides thetaiotaomicron VPI-5482
MGIMVGLPSPSGSEKDLQLNFGKNMTVQVEMRAPHLPAEWHLQSGIQLTWPHAGTDWAYMLKEVQECFVNIAREIAKRELLLIVTPEPEEVKKQIVATVNMDNVRFLRCETNDTWARDHGAITMIDTGNPSLLDFTFNGWGLKFASELDNLITGQAVKAGALKGQYIDCLDFVLEGGSIESDGMGTLLTTTECLLSPHRNGKLNQVEIEEYLKSTFHLQKVLWLDHGYLAGDDTDSHIDTLARFCSTDTIAYVKCDNTEDEHYEALHAMEEQLKTFRTLAGEPYRLLALPMADKVEEDGERLPATYANFLIMNDAILYPTYQQPDNDRKAGEVLQQAFPKHQVIGIDCRALIKQHGSLHCVTMQYPSGVIQ

SEQ ID NO: 14345 - protein, 340 aa, Burkholderia sp. 383
MSTESALQATIQALVQDGKGLLAADESGPTIAKRFKTIAVESTEENRRAWRTLLLSTPGLGEFVSGVILYEETLGQCADDGTPLPELAARQQIVPGIKVDAGKIPLALAPGDEITQGLDGLAARLDGYQRQGARFAKWRAVYNVSATLPGHAAIQANAEALARYAAICQEAGVVPIVEPEVLMDGDHSIGRCAQVTDAVLHAVFDALHRHRVVLAHMLLKPSMVVAGSTHTAQPAPAEVAEATVRLLRSAVPAEVPGIFFLSGGQTPEEATAHLDAMNRVAGRPWLLSFSYGRALQEPPLAAWQGQAANVRAAQDALLLRARLNGAACRGQYDAAMERTP

SEQ ID NO: 14346 - protein, 322 aa, Zymomonas mobilis subsp. mobilis ZM4
MASEIKNTEMGHDHDHHHNHSHAHHDHHHGHSHVHEINASNSRGFGIGIAINLAFILVEIGYGITSGSLSLIADAGHNLSDVLGLALSLAAFIAERSKPTSRFTYGYRSSSILAALFNALFLVIACGAIGWEAIRRFSEPVDVPGGTIMIIAGIGIIINFATALLFKDGHEELNRHAAFLHMLLDALVSAVVVLSGFIIKMTGWHWIDPSLSLAIVVVLLWSSWSLIKRSFAMALNAVPPSIDVSAVVTRLDQLPDVINVHHVHIWPVSTSETAMTAHIVRSKIQNNDAFIGSVADIMKKEFDIGHVTLQIEHDGCDNEIIC

SEQ ID NO: 14347 - protein, 345 aa, Zymomonas mobilis subsp. mobilis ZM4
MEAYKGSIVQDHNQVNKEKPVLVTGVSGFVGSAVARSLAQQGYKVRGMVRATSPKTNIRDFPGEIVFGDLDDPPSLREPLSGCGALIHVAADYRLWAADPNEIIRHNRLHTQAIMTAALYLGIERVIYTSSVATLAPGHGKPSDENSPLMPENAIGAYKRSKVEAERLVEKMIAEQGLPAVIVNPSTPIGPRDVKPTPTGRIIIEAATGKMPAYVNTGLNLAHVDDVADGHVKALEKGVIGERYILGGADVPLSVMLAEIARQVGRKPPKVALPRWPLFPLAWGAEAFAKITKKEPFITSDALRMAGYHMYFSSEKAKRDLGYKSRPWQHAISDAIEWFRAEGML

SEQ ID NO: 14348 - protein, 180 aa, Glycine max
KHHLNACVRSHRFSLWSKNLARTLQFKVRVDIQRTKLKLTFELQRSPTEEELVERIGISLERYHEVMKASKPILSLHSRHITTQEEYINGITDVDGVNGDNRRQLAVLRLALDDVLDSLKPKESLVIRQRYGLDGKGDRTLGEIAGNLNISREIVRKHEVKALMKLKHPARLDYLRRYVV

SEQ ID NO: 14349 - protein, 569 aa, Pseudomonas sp. ED23-33
MQELNEVGLSVAGMTCPSCTRHVEDALLAVPGVTRAAVDYPSNKAQVTGNRLDVSALVAAVGALGYGATPTDEFESKERSVEQPGLLGKAAQWLSGERAVEKPAGQLHVAIIGTGGAAVAAALKAAENGARVTLIERGTIGGTCVNVGCVPSKIMIRAAHIAHLRRESPFDVGLSATPPVVLRDRLLAQQQARVDELRHAKYESILESNPSINLVRGSARFKDGQTLIVEAAEGDTREVAFDRCLIATGASAAIPPLPGLAGTPYWTSTEALVSEAIPKRLAVIGASVVALELAQAFARLGSEVTVLARRTLFASDDPAIGEAVTAAFRAEGITVLTQTQASAVTYCDRQFILTTAQGELKVDQLLVATGRTPNTASLNLELAGVTFDSQHRILIDQGMRTSASNIYAAGDCTDQPQYVYVAAAAGTRAGINMTGGDVKLDLDAMPAVVFTDPQVATVGYSEAEAQRIGLQTESRTLTLDNVPRALANFDTRGFIKLVAEAGSGRILVVQAVTPEAGEIIQTAAIAIRARMTVQDLANQLFPYLTMVEGLKLVAQTFSKDVTQLSCCAG

SEQ ID NO: 14350 - protein, 133 aa, Arabidopsis thaliana
  misc_feature (47)..(47): Xaa can be any naturally occurring amino acid
  unsure (1)..(133): unsure at all Xaa locations
DPVIVKRPIDATVSQAVRVYSALVKLGIGWSKVGALLEDEGVDSFLXSLDSLPGALQGKANTLTPPSPSPSRPPSVSGVPPCGFRTWGYCSASMSHAVVIASEVFSGLSRTLALLFRLVFVIQPLPIVRVFLP

SEQ ID NO: 14351 - protein, 458 aa, Yarrowia lipolytica CLIB122
MNYPAEPEFQQAYDELYNSIHDSTLFDKHPEFEKVIPVVSVPERIIQFRVVWEDDQGKLQVNRGYRVQFNSALGPYKGGLRFHPSVNLSILKFLGYEQIFKNALTGLNIGGGKGGADFDPKGKSDAEIRRFCYAFMGELHRHIGADTDVPAGDIGVGGREVGFLFGAYKKYKNTWEGVLTGKGLTWGGSLIRPEATGFGLVYYVEKMIEYATSGKESFKGKRVAISGSGNVAQYAALKVIELGGNVVSMSDSKGALVLVSDFTEGFTPAEIEQIADIKLQHKELASLYPSATLPETKFKYIEDARPWCHVGKVDVALPCATQNEVSGEEAKSLVAAGCKFIAEGSNMGCESDAIEVFEAERMARPNGIWYGPGKAANAGGVAVSGLEMAQNSQRISWTKEEVDQKLKDIMVDCFNTCVETASTYSSEKVDGLPSLVKGANIAGFLKVSAAMKDHGDFW

SEQ ID NO: 14352 - protein, 478 aa, Mycoplasma hyopneumoniae 232
MNDMKNYISKRTKIIATIGPSTQDYEVLKKLVLSGVSVIRANFSHGNYQEQKQKFDSARKLSNELKIPISIMLDTKGPEIRIGKILEGSQKILANQRLTVLTDSDSYQNFQGTAQIITVSHQIDKDLKIGDKILFDDGKLQSVVIEIEPGKVVVRTKNSHVLKSNKRLNLPGVAFSLPFLSQKDIDDILFGINENVNYIAASFVNSGENVRELRTLLDQNGGGHIQIISKIESRLGLENIDEIIELSDGIMIARGDLGLEVPYEEVPFQQKRIIRKCRFAGKTVVVATQMLDSMEKSSQPTRAEVTDVYWATELGADATMLSGESAQGQFPIESVQVMAVINKRAEKEFYNKLFYAKQLAVITENSRGLRAKIAHKLAHLAYEKEIKYTVVLSRTGQLLREIAKFRPNTAVIGVINNEKLINGFGITSSVFVSINSISEFTAIKNDFSLARNVLEPFGVEKGDTFLVVENEKMVQFVY

SEQ ID NO: 14353 - protein, 378 aa, Magnetospirillum magnetotacticum MS-1
LVPPVVIVVSTPLMFHDLAAQIAGVVPRGTNPGELDLDAVAPAKDRRRMDDFIVYGLAAASEAVEDSGWMPTDSESLERTGVMIGSGIGGLPNIADGAITLEKSGPRRISPFFIPAALINLVSGHVSIRYGFKGPNHAVVTACATGAHAIGDAARLIMFDDADVMVAGGTEAAVHRLGIAGFAAAKALCTSYNDRPTEASRPWDKDRDGFVMGEGAGIVVLEELEHAKKRGAKIYGEVIGYGMSGDAHHITAPAEDGNGAVRAMRAAIKRAGVSLDEIDYVNAHGTATMGDTIELGAVKQVFGDHAYKLSMSSTKSAIGHLLGAAGAVEAIYSLLAIRDQVAPPTLNLHNPDEGCDIDLVPLKAKQRKIKVALSNSFG

SEQ ID NO: 14354 - protein, 586 aa, Vicia faba
MCGILAVLGCSDDSQAKRVRILELSRRLKHRGPDWSGLHQHGDNYLAHQRLAIVDPASGDQPLFNEDKSIIVTVNGEIYNHEELRKQLPNHTFRTQCDCDVIAHLYEEYGENFVDLLDGIFSFVLLDTRDNSFIVARDAIGVTSLYIGWGLDGSVWIASELKGLNDECEHFEVFPPGHLYSSKEREFRRWYNPPWFNEAIIPSTPYDPLVLRTAFEKAVIKRLMTDVPFGVLLSGGLDSSLVASVTARYLADTKAAKQWGAKLHSFCVGLKGAPDLKAGKEVADFLGTVHHEFQFTIQDGIDAIEDVIYHTETYDVTTIRAATPMFLMSRKIKSSGVKMLISGEGSDEIFGGYLYFHKAPNKEEFHQETCRKIKALHRYDCLRANKSTYAWGLEARVPFLDKDFIKAAMDIDPEFKMIKHDEGRIEKWILRKAFDDEENPYLPKHILYRQKEQFSDGVGYGWIDGIKDHAAKHVTDKMMFNASHIFPFNTPNTKEAYYYRMIFERFFPQNSARLTVPGGPSVACSTEKAIEWDASWSGNLDPSGRAALGVHVSAYENQINPITKGVEPEKIIPKIGVSPLGVAIQT

SEQ ID NO: 14355 - protein, 257 aa, Brassica napus
MLSLVASPPVISAASLSKPLQSLSKAALSLSKRAKPTSPFPKTARSISVYKSPMNNLFTRLGFGSRPQPDPAASAAIAQGPDDDVPSPGQQFAQFGAGCFWGAELAYQRVPGVTKTEVGYSHGFVDNPSYEDVCSETTGHNEIVRVQYDPKEVSFESLLDVFWKRHDPTTLNRQGNDVGTRYRSGIYFYTDEQEKLAREAMEKQQKILNRKIVTEILPATKFYRAENYHQQYLAKGGRMGLSQSAEKGCNDPIRCYG

SEQ ID NO: 14356 - protein, 235 aa, Yarrowia lipolytica CLIB122
MDPNTVVNENNEVVVTPRLGQRILESQWTIWFFYRAQGVRISNYEAATKRVCTFATVEEFWSFYGHLKHVDKLPYTSEFQVFRRGIKPMWEDSHNVCGGKWVCRLRRPSKQFAKLDNDDDIVVPTRAPPMQIASLRHQAAVYWEKLLLALVGGTLLPEGQYQDEIVGAVISVRKEEDIISVWNRTSNDPQVTEAIRAGMQAVLGVPESVTFEYKVHSDSLKEGVEKQALYETEEK

SEQ ID NO: 14357 - protein, 98 aa, Bradyrhizobium sp. BTAi1
MAKSKFRPLHDRVVVKRIDAEEKTKGGIIIPDSAKEKPSQGEVVAVGPGGRDESGKLIPIDVKVGDRVLFGKWSGTEVKLDGEELLIMKESDIMGVVA

SEQ ID NO: 14358 - protein, 249 aa, Frankia sp. EAN1pec
MAAKLDGKVAIITGAGSGIGRASAHLFAAEGAKVVCADFSGKEKRTADEIGAAAVAVHVDVAVAADVERMVATAEDRFGKLDILFNNAGVAGPKMLITEQKEEDFDRVVAVNLKGVFLGMKYGIPAILRNGGGSLINTASAAGLVGWRKNAVYGASKGGVIQMTKAVALDFADRGVRVNAICPGMTWTGMVPGSDDLLEPPASVPAPPQPMSRWGLPSELATAALFLASDDSSFVTGVALPVDGGYVVG

SEQ ID NO: 14359 - protein, 405 aa, Methanosarcina acetivorans C2A
MITNSRKGIHLTENIIESGDPQARYDSVIEKDSKYVMQTYGRQPLVLSKGKGAVVQDIYGKEYIDCVAGIAVNNVGHCHPTVVKAIQAQAENLIHVSNLYYTEIQAEFAETLASITGMERVFFCNSGAESVEAAMKLARVATGKSAFVAAEHSFHGRTIGALSVTHKSMYRDPFMPPVSSETTFVPYSDAEAIRQAISENTAAVILEPIQGEGGINIPDPGYLKEVREICDETGALLIFDEVQTGFGRTGTWFCKEQFGVEPDIMSMSKAIGGGFPMGAIAAHNGINFGRGQHASTFGGGPLACAAALASVKVIREEKLLERSKEMGAYFMKKLAGMVRDDVVEVRGKGLMIGVEIKYPCGKFVDFAREQGVLVNCTSDSVLRLVPPLVITKEQIDTVVDVLEQA

SEQ ID NO: 14360 - protein, 526 aa, Glycine max
MADLSVLGWILCSALSLFALYSLAFGGASRNRASPEKRNELSETVTTSAGECRSEKHHGDADVIIVGAGVAGASLAHTLGKDGRRVHVIERDLSEPDRIVGELLQPGGYLKLIELGLEDFVDKIDAQQVFGYALFKDGKHTRLSYPLEKFHSDVSGRSFHNGRFIQRLREKAASLANVRLEQGTVTSLVEEKGTIKGVQYKNKDGQELTTYAPLTIVCDGCFSNLRRSLCNPKVDIPSCFVGLVLENCELPCANHGHVILGDPSPILFYPISSTEIRCLVDVPGQKVPSISNGEMEKYLKTMVAPQIPPQLYDAFIAAVDKGNIRTMPNRSMPADPHPTPGALLMGDAFNMRHPLTGGGMTVALSDIVVLRNLLSPLSDLNDAPTLCKYLESFYTLRKPVASTINTLAGALYKVFCASPDLARKEMRQACFDYLSLGGLFSEGPVSLLSGLNPRPLSLVLHFFAVAIYGVGRLLLPFPSPKRVWIGARLISGASAIILPIIKAEGIRQMFFPATVPAYYRTPPVAQ

SEQ ID NO: 14361 - protein, 226 aa, Glycine max
MAATFNVNAEAGLQKLDGYLLSRSYISGYQASKDDLAVYSEFSVAPPSTCTNVARWYNHIDALLKLSGVTAAGQGVKVLSSVVPETSTTDVAEAPAADDDDDSDVDLFGEETEEEKKAAEERAAKAKASTKKKESGKSSVLLDVKPWDDETDMVKLEEAVRSIKMEGLLWGASKLMPVGYGIKKLQIMMTIIDDLVSVDTLIEDHLCVEPANEYIQSCDIVAFNKI

SEQ ID NO: 14362 - protein, 606 aa, Thermobifida fusca YX
MTTQPAPGARPTPTGSVPDTFTHAKPRDPYWYKHAVFYEVLVRGFYDSNGDGTGDLRGLIEKLDYLQWLGIDCLWLLPIYESPLRDGGYDVSDYMKILPEFGRISDFVELVEKAHQRGIRVITDLVMNHTSDQHPWFQASRHDPDGPYGNFYVWSDTTERYSDARIIFIDTEQSNWTYDEVRGQYYWHRFFSHQPDLNFENPDVQDAILEVMRFWLDLGIDGFRLDAVPYLYEREGTNCENLKETHEFLKRIRAEVDRLYPDRVLLSEANQWPADVVDYFGDYESGGDECHMNFHFPLMPRMFMAVRREQRYPISEILAQTPPIPRNCQWAIFLRNHDELTLEMVSDEERDYMYSEYAKDPRMRANMGIRRRLAPLLENDLNQIKLFTALLLSLPGSPVLYYGDEIGMGDNIWLGDRDSVRTPMQWTPDRNAGFSRCDPGRLYLPVIMDPIYGYQAINVEAQQNNPNSLLNWTRNMIQIRKQHPVFGTGDFTELHASNPSVFAFVREYGDDRMLCVNNLSRFPQPVELDLRRFEGITPIECTGGVHFPPIGELPYLLTLPGHGFYWFQLPPVAEEQPLAQPVTTVPAAPQPPAPADRPASDPTQRS

SEQ ID NO: 14363 - protein, 336 aa, Glycine max
MENSTEESHLRSENSVTYESPYPIYGMSFSPSHPHRLALGSFIEEYNNRVDILSFHPDTLSVTPHPSLSFDHPYPPTKLMFHPRKPSPSSSSDLLATSGDYLRLWEIRDNSVDAVSLFNNSKTSEFCAPLTSFDWNDIDPNRIATSSIDTTCTIWDIERTLVETQLIAHDKEVYDIAWGEARVFASVSADGSVRIFDLRDKEHSTIIYESPHPDTPLLRLAWNKQDLRYMATILMDSNKVVILDIRSPTTPVAELERHRGSVNAIAWAPHSSTHICSAGDDTQALIWELPTLASPTGIDPVCMYSAGCEINQLQWSAAQPDWIAIAFANKMQLLKV

SEQ ID NO: 14364 - protein, 705 aa, Zea mays
MLVFRKVRAILGGRIRFILAGGAPLSGETQRFINICLGAPISQGYGLTETCAGGTFSEYDETGIAPLGPLLACSYIKLIRLPLFGTRKLIAREMVVAADGRSFEKLHLGNYEWKSYADAFKTVCNFASGLLRIGHLKEKRVAIFADTGAEWQIALQACFRQNIAVVTIYASLGEGALCHSLNETEVTTVVCGRKEFKKLIDISGQLDTVKHVIYIDEEGISVEVSLAENCTSWTVKSFEEVESIGLQRPVEANLPLPSDTAVIMYTSGSTGMPKGVMMSHQNVLAVVSAVMTIVPGLGKKDVYLAYLPLAHILELAAEAIITGVGASIGYGSPLTLTDTSNKIKKGTQGDASVLKPTLMTAVPAILDRVRDGVRKNVDAKGGLAKRLFDIAYSRRLAAVNGSWLGAWGLEKLLWDMLVFRKVRAILGGRIRFILAGGAPLSGETQRFINICLGAPISQGYGLTETCAGGTFSEYDETSVGRVGPPLPCSYIKLIDWTEGGYLTTDSPMPRGEIVIGGPNVTKGYFKNEAKTNEVYKVDERGMRWFYSGDIGRLHPDGCLEIIDRKKDIVKLQHGEYVSLGKVEAALSVCSYVDQIMIHADPFHSYCVALVVTAQSELKSWASKQGMTYSDFSDLCHKQGTVKEVLQSLVKAGKQARLEKFEIPAKIKLIPEPWTPESGLVTAALKLKREVIKKAYEMDLAQLYSQ

SEQ ID NO: 14365 - protein, 262 aa, Salmonella typhimurium LT2
MFVAAGQFVVSSVWEENAQVCVSLMAQAAGRGVSLLVLPEGILARDDIDLDLPIRAAQPLDGAFMTRLLEESAHNNMTTIFTILVPSTPGRAVNMLVALRAGHIVARYAKLHLYDAFSMQESQSIDAGTVIAPVLDVEGVKVGLMTCYDLRFPDMALALALQGADVLALPTGWVRGPLKEQQWSTLLAARALDTTSYMIAAGECGNRNIGQSRIIDPLGVTIAAAADRPALIVAEIFRERIDQVREQLPLLQQRRFAPPQLL

SEQ ID NO: 14366 - protein, 339 aa, Solibacter usitatus Ellin6076
MPNRYYEKDGNLDFLAGRTVAIIGYGSQGHAHALNLRDSGVDVVVGLPAGSKSTAKAEAAGLKVLSPADAAKTANVVMILVPDHIQADLYNNEIAPHMTAGKTLMFAHGFNIHFGQIKPPVDIDVTMVAPKAPGHRVRELYTEGVGVPALVAVHQNATGQALERALAYALALGCLKAGVIDTNFREETESDLFGEQAVLCGGAAELVRAGFQTLVDAGYAPEIAYFECLHELKLIVDLIQEGGLSYMRYSVSDTAEYGDYTRGPRVVNDQTRAEMKKILSEIQSGEFARQWIEENKTGRKNFLAMREKGHNDQIEVVGRELREMMTFLKKKKEVGVPVA

SEQ ID NO: 14367 - protein, 189 aa, Weissella paramesenteroides
NSTGHVSCSYRATYYAKYARDKLALFTDVAPEAVIESLDVDILYEVVLNMQKQGMDDVILKRLGLSAPAADLTEWRAMIDKIRNLKKKIKITLIGKYADLQDAYISVNEALRAGGYAVDTDVDINAVNSEKVTAENVAEILADADGVIVPGGFGSRGTEGKIAAIQYARENNLPFLGVCLGMQLATVEF

SEQ ID NO: 14368 - protein, 211 aa, Glycine max
MVAVVSQENVAALVSRTGRELQRYRKGRRQVVGCIPYRFKIGEKTSLDVVSDELEVLVISSQKGKGMLFPKGGWELDESKKEAALRETMEEAGVRGIVGGKLGKWSFKSKTHDTFYEGYMFPLLVQEQLEFWPEQNVRQRIWMSVTEAREVCQHWWMKEALDRLVNRLSGQKQLGHYRDNKRVLGSMNCKGDAKSASVNSVASLEGRAQLF

SEQ ID NO: 14369 - protein, 255 aa, Streptomyces exfoliatus
MNDLSGKTVIITGGARGLGAEAARQAVAAGARVVLADVLDEEGAATARELGDAARYQHLDVTIEEDWQRVVAYAREEFGSVDGLVNNAGISTGMFLETESVERFRKVVDINLTGVFIGMKTVIPAMKDAGGGSIVNISSAAGLMGLALTSSYGASKWGVRGLSKLAAVELGTDRIRVNSVHPGMTYTPMTAETGIRQGEGNYPNTPMGRVGNEPGEIAGAVVKLLSDTSSYVTGAELAVDGGWTTGPTVKYVMGQ

SEQ ID NO: 14370 - protein, 277 aa, Corynebacterium sp. SHS752001
MPNIPTISLNDGRPFAEPGLGTYNLRGDEGVAAMVAAIDSGYRLLDTAVNYENESEVGRAVRASSVDRDELIVASKIPGRQHGRAEAVDSIRGSLDRLGLDVIDLQLIHWPNPSVGRWLDTWRGMIDAREAGLVRSIGVSNFTEPMLKTLIDETGVTPAVNQVELHPYFPQAALRAFHDEHGIRTESWSPLARRSELLTEQLLQELAVVYGVTPTQVVLRWHVQLGSTPIPKSADPDRQRENADVFGFALTADQVDAISGLERGRLWDGDPDTHEEM

SEQ ID NO: 14371 - protein, 476 aa, Wigglesworthia glossinidia endosymbiont of Glossina brevipalpis
MKENKINTEVLVIGSGPGGYSAAFRCADLGLKTVLVERFSSLGGVCLNVGCIPSKSLLHIANNLNSINKLKKIGIKFNEREIDMNQIRKWKCDVVLKLTNGLNMMSKARNVKIIHGYGEFIDPYTVNVKSLKENTKIKFEHAIIAVGSSPIKNHFMLQPDEKIWDSTDALKIKFIPKKLLIVGGGVIGLEMATVYNSFGSEVYIAEMSNQLIPAVDTDIINIFYKSIKNNFNIMLNTELKSVYLEDNNIYAELVNNDKKIEKICCNAVLFSTGRKSNGDLIKAKEIGIKLNNLNFIEVNNQMRTNIPHIYAIGDVTGHPMLAHKASYQSHIAAEVISGENHFFDPRVIPSVAYTNPEISWVGITEKEAINLNIPYETALFPWNALGRAIASDHHEGGMTKLIFNKENKKIIGGSIVGYNSSELLGEISLAIEMGCDVDDISLTIHAHPTLYESIGRASEIFSGTITDFLNKKSKNK

SEQ ID NO: 14372 - protein, 220 aa, Bacillus licheniformis ATCC 14580
MAKILAVDDEKDILVLIQNILRRDQHQVHTLSQVNTESLDVFSGYDLILLDVMMPGMDGFELCEKIRPLVDCPILFLTAKTEEEAIVKGLLTGGDDYISKPFGVLELSARVNAHLRRERREKYETKRVISGFLFHFDSKEVFIHDQKLNLTKNEFKICELLAQHKGRTFTREEIYDHVYGLEGNALYSTITEFIRTIRKKCKEHNRDPIKTVWGVGYRWE

SEQ ID NO: 14373 - protein, 303 aa, Shewanella oneidensis MR-1
MSHILVIGSANADHVMNFEYLPVPGQTLKSRSYRLEHGGKGANQAVACARLCLPDSRVDFICHLGQDSIGNEMRDSWLKDGIQAEGITLVDNVSTGTAMIFVADNGENAIGIAAGANAHLTPLELEKHYALFANAQYLLIQLETPTETVSNALQMAKRLGITTVLNPAPAATQELDYLKWVDIITPNETEAEALTGIEVKHEEDAKLAAQWLHQQGITTVVITLGSKGAFISSPGFTGLIPALTVQAIDTVAAGDTFNGALVVGLSEGMSIAAAVSFANAASAITVTREGAQRAIPYRSEVSR

SEQ ID NO: 14374 - protein, 463 aa, Bacillus anthracis str. A2012
MQHSNKSGTLNRGLKERHITLMSLGSAIGVGLFLGSASAIKLAGPSILLGYMIAGLVIFFIMRALGEMAIEQPVAGSFSKYAYDYLGPLAGYITGWNYWFLWVVTCMAEITAAGIYMQYWFPDIPRWTWALLALLLMSAFNFLSVKVFGELEFWFALIKIVTIICMIVVGAGIILFGFGNGGIATGISNLWSHGGWFPNGFSGLLLSMQMVLFAYLGVELIGVTAGEAQNPKKTLAKAIDNVFWRILLFYVGALFVMMAIYPWNELGEKGSPFVLTFQQIGIAKAAGIINFVVLTAALSSCNGGLFSTGRMLYTLAQQKKAPERFGRLNKNGIPSQGIVATAIVLLIGVILNYLVPAKVFTWLTSISTFGAIWTWGIILVAQIKFRKSLPTQNRQKLSYKMPLYPLSSYFSLAFLVLVLGIMAYSEDTRIALIVGPIWLIGLAIVYYMKGFHKIDETPNSKIS

SEQ ID NO: 14375 - protein, 200 aa, Ashbya gossypii ATCC 10895
MREERKELSVRCNNHPNSTVIKPNTDIREKCLHSPFFGFFDAISNEVANYNRSLSRVPGSSAVETKHGKKDTTDWFTNARIIPPVDVLEREKDYEVHLSVPGIVDQDKINIEFHSDRGELVISGEVPTSEAEENKNRWRVRERATGSFRRVIGLPDKPGVDSERITADYRHGILTLRVPKLEPRESLTVCRIQIGRGSSK

SEQ ID NO: 14376 - protein, 250 aa, Triticum aestivum
  misc_feature (56)..(56): Xaa can be any naturally occurring amino acid
  misc_feature (69)..(69): Xaa can be any naturally occurring amino acid
  misc_feature (87)..(87): Xaa can be any naturally occurring amino acid
  unsure (1)..(250): unsure at all Xaa locations
RGRGRGVSINMEKKKEHQRKFTPSVIEPSFGIGRIIYCLFEHCFYQRTGKTDDEQXLNVFRFPPLVAPXKCTVFPLVKVEKFDVVAXKKISKALTTAGISHIIDITGTSIGKRYARTDEIGVPLAITVDSTTSVTVRDRDSKDQIRVEVEEVASVVKEVTDGQSTWADIMWRYPAHTALATDEGEASETLKGTGFLSFGCVSWFTEILIERCPVTLVLFSPHVWFSSVPCRNLRDLHAHLPVIKWKKRVR

SEQ ID NO: 14377 - protein, 327 aa, Mesorhizobium loti MAFF303099
MTKAEQLQAVAILVPADFSDHAVRRIDRTFKQVSIERADPALVTDEMRRMVRGIASFAGISAAMMDALPNLELIASFGVGYDSVDVGHAAAKNIMVTNTPDVLTEEVADTAIGLLINTIRDLPRAENWLRDGSWVRKGNYPLSRLTLRARRVGIFGMGRIGQAIARRLEAFGLPIAYHNRRRVEGLAYQYHPTLRGLAEAVDTLISVAPGGASTQKAVNAEILSALGANGVFVNIGRGSTVDEAALAAALADGTIAAAGLDVFADEPNVPKALLDAPNASLLPHVGSASEHTRRAMADLCVDNLVSWFTERQPLTPVPETAHVKARG

SEQ ID NO: 14378 - protein, 414 aa, Nocardia farcinica IFM 10152
MPPPPPVPPSRDGARADAGARVDAAARADAAIGAAGPRLIALSHAIHAEPELAFAEHRSVAKTLEPLAERGFEITTGVAELPTAFRAVYGSGSLTVGLCAEYDALPEIGHACGHNIIAAASVGAGLGLAEVADALDLTVVVLGTPAEESGGGKVLMLERGVFDDIAMAMMVHPGPCDIAGARSLALADIAVRFHGREAHASAAPDQGRNAGDAVTVAQVALGLLRQHLKPGQQLHGIVSDGGIAPNIVPGHAELLYYLRAADSASLDDLMRRASACFEAGALATGCTHEIRTLAPTYTELTPDPGLLRVYREQIADLGRVPIAADLEAARPLGSTDMGNVTNVVPGIHPVIGIDAGGAVTHQPGFAAASVNASADRAVIDGARALARTAIAVARDEEHRGRLWQRLVRRQEDIR

SEQ ID NO: 14379 - protein, 448 aa, Ashbya gossypii ATCC 10895
MREVISVNAVGQAGCQIGNACWELYSLEHGIRPDGYLQEGLTKPKGGEEGFSTFFNETGSGKFVPRAVYVDLEPNVIDEVRTGAYRELFHPEQLISGKEDAANNYARGHYTVGRELLDDILDRIRKISDQCDGLQGFLFTHSLGGGTGSGLGSLLLEQLSIDYGKKSKLEFAVYPAPQVSTSVVEPYNTVLTTHTTLEHADCTFMVDNEAIYEMCKKNLDISRPSFANLNNLIAQVVSSVTASLRFDGSLNVDLNEFQTNLVPYPRIHFPLVSYAPILSKSKAHHESNSVGEITNACFEPGNQMVKCDPRVGKYMATCLLYRGDVVTRDVQTAVAQVKNKKTVQLVDWCPTGFKIGICYEPPTATPNSQLSSVSRAVCMLSNTTAIADAWKRIDRKFDLMYAKRAFVHWYVGEGMEEGEFTEAREDLAALERDYIEVGADSYADEEEF

SEQ ID NO: 14380 - protein, 450 aa, Bordetella parapertussis 12822
MAFDFDLYVIGAGSGGVRAARFAAGYGARVAVAESRYLGGTCVNVGCVPKKLLVYGAHFHEDFEQAAGFGWNPGRPEFDWPTLIANKNREIERLNGIYRNLLVNSGVALHEGHARIVDPHTVEINGQRHSAQHILVATGGWPFVPDIPGKEHAITSNDAFFLPELPRRVLVVGGGYIAVEFASIFNGLGAQTVQVYRRELFLRGFDGSVREHLRDELVKKGLDLRFNTDVERIDKRADGVLAVTLSDGSVLETDCVFYATGRRAMLDDLGLENTGVRLAESGYIEVDDEYRTSEPSILAIGDVIGRVPLTPVALAEGMAVARRLFRPQEYRKVDYDLIPTAVFSLPNIGTVGLTTEQALEHGFRVTRYESRFRPMKLTLTQSQKKTLMKLVVDADSQKVLGCHMVGPDAGEIVQGLAVALKAGATKQVFDDTIGIHPTAAEEFVTMRTAT

SEQ ID NO: 14381 - protein, 267 aa, Nocardia farcinica IFM 10152
MPELPVGVRLIFQPAEEVMPGGALDMVAAGALDGIERIFAVHCDPRLEVGRVGMRVGAITSAADTVELVLDSPGGHTSRPHLTSDLVYAIGTVITGLPGLLSRRIDPRTSTVMVWGAVSAGKAPNAIPQTGMLTGTVRTGDHATWSLLEPMVHEIVDGLLAPTGVRYQLNYRRGVPPVVNDEHSARQFEDAIRALGPDALSDTPQSGGGEDFSWYLEEVPGAMARLGVWSGHGEQLDLHQPTFDIDERALAVGVRVFTNLVLQQRPR

SEQ ID NO: 14382 - protein, 171 aa, Arabidopsis thaliana
MASSSSTYRSSSSSDGGINNPSDSVVTVDERKRKRMLSNRESARRSRVRKQEHVDDLTAQINQLSNDNRQILNSLTVTSQLYMKIQAENSVLTAQMEELSTRLQSLNEIVDLVQSNGAGFGVDQIDGCGFDDRTVGIDGYYDDMNMMSNVNHWGGSVYTNQPIMANDINMY

SEQ ID NO: 14383 - protein, 469 aa, Nocardia farcinica IFM 10152
MTRIAIIGGGPAGYEAALVAAQHGAQVTLIDRDGIGGACVLWDCVPSKTFIASTGMRTDLRRARDLGITLDPSQAAVQLPEVNARVKALALAQSSDIRSKLLSAGVTLISGTASFTDPAPGRAPHRITVRPTGERAGERVIDAEVVLIATGASPRVLPGAEPDGERILTWRQLYDLRELPETLVVVGSGVTGAEFVSAYTELGVQVKLVSSRDRVLPGEDADAALVLEEALAERGVELVKHARADAVERTADGVVVKLSDGRTVTGTHALMTVGSTPNTGDLALDKVGIELDRGGYLRVDRVSRTAVSGIYAAGDCTGLLPLASVAAMQGRIAMYHALGEGVSPIRLKTVASAVFTRPEIATVGVSQTAIDNGEVPARTVMLPLNTNPRAKMSGLRRGFVKIFCRPATGVVIGGVVVAPIASELILPIALAVQNNLTVNDLAQTFSVYPSLTGSVTEAGRLLMRHDDLD

SEQ ID NO: 14384 - protein, 624 aa, Lactobacillus plantarum WCFS1
MLRFKRKNFFKTINFKIALVFALLLLITLEIVGAIFVKQLESKNIQDFKQSVQIPTYIDNSLSEQLTVSSTRKANGQIKTILSNYNNTNVDEIQVVDSKGTIRGTSDVNDQSVVGQKTTDRNVKNAIYNNRTYTKSTYDTQNNGRYYVSIVPLYSSNSAGNSSQLVGVLYVRANMKSVYSTINNIMGIFVIASLAAMVLGLGIAIIIARAITRPIEEMKQQTQRIARGDYAGQVRVYSDDELGQLAKAINNLSIRVEESQESTEAERRRLDSVLSHMSDGVIATDRRGNITIINETASDFMDVTAEKAIGNSILDILKIRDDYSLRDLIENQDELMLDFSSNERDLILNAYFSLIQRESGFISGLVCVLHDVTEQQKIDNDRKQFVSNVSHELRTPLTSLRSYIEALSDGAWKDPEVAPGFLKVTQEETDRMIRMINELLSLSRMDSGTTRVDMELVNINEMFNYVLDRFDMILKKDDNPAKYYTIKREFTKRDLWVEIDTDKFTQVLDNIMNNAIKYSPDGGVVTCRLLETHNQVIISISDQGLGIPRADLGHVFDRFFRVDKARSRAQGGTGLGLAISKEVVQMLGGRIWVDSVEGKGSTFYISLPYEPYEEEDLWDDDSQA

SEQ ID NO: 14385 - protein, 393 aa, Nocardia farcinica IFM 10152
MSSTLPPLAGKLGGLTSSAIRDLLKLTAHADIVSLAGGLPDAELMPRERIAAAADAALRGPGCLQYTESPGWGPLREVLAARESARLGRTVPVAEVFVTHGSQQALSLLAEVLLDPGALVVVEDPAYVGALQVFRAAGARIVAVPLDAEGMRVDVLRELLGRGERPAVVHTVSNFHNPGGVTMSPARRRELAELAQTHGFWVIEDDPYGELWFDRPAPAPVASHAPNVIRLSSASKIIAPTLRVGWMVAPDPVCRAVELLKQGADLCGSALTQQIAAELLADTTWLTGHVDRVRAVYGARATALVHAVRETFGERIVCTDAAGGMFVWADFTDGTDTGQMLPRALEAGVAYVPGQAFAVSEGYRGSLRMCFTTSEAPVLGDAVQRLAKAHAAG

SEQ ID NO: 14386 - protein, 153 aa, Methanosarcina acetivorans C2A
MKWPAKRSVSGPARWDPFEEIRRTQERLNQLFEDFMPMEEWGGGKVYTPAIDIMEEDDKLVVTTDLPGINKEDVEINLKEDMLEISAKTGEEKETEEEGYLRKERAYTQFYRAVRLPVGVKEEGSTAKMENGVLTISLPKAQIEEPKKKIEIE

SEQ ID NO: 14387 - protein, 858 aa, Thermus thermophilus HB27
MSQDPFALLKAEVDLLGRLLGEAIRTLSGERFFALVEEVRALAKARRQGDEAAGEALLARVEGLSTEEAEALVRAFTHYFHLVNLAEERHRVRVNRLRAQAETLESPRPEGFLALAKALKERGLSLEEAEAHLNRLELLLTFTAHPTETRRRTLRHHLEALQRELEAGDRERLAARVALLYGTEEVRKARPTVEDEIKGGLYYLPTTLWEAVPRVVAGLEAALERVYGRRPRLKSPVRFRSWIGGDRDGNPFVTPEVTAFAGRYAREVARRRFLEALEDLVRDLSLAEARVPVPREVRERGEGVERFMGEPYRRYFAALYRALEREEATTEGLLAALKAAERGLREVGLGRVAEAFLDPLEARLSAFGLELAPLDLREESGRLLEAAAELLRVGGVHPDFLALPQEERERLLTEELKTARPLLPVGEAPEGEALRVALGALKAWRDKGAHVVSMTHHPEDLLAVFLLAREVGLYRPGRPLPFDVVPLFETLEDLRRAPGVLRRLLENPVFLAHARGRGGVEVMIGYSDSNKDAGFLMANLALYEAQEALSRVGEEVGLPVYFFHGRGTSTARGGGPAGRAIASLPPRSVGRRIRLTEQGEALADRYSHPDLAVRHLEQMLYHFALAALGPGQEPEARWREALAQAAEESTRRYRALLQEEGFFDFFEAFTPIREIGELPIASRPVYRRGRVRDIRDLRAIPWVMAWTQVRVLLPGWYGLSALEELPLDLLREMYRGWPFFASTLEAAAMALAKADMGVARLYLRLVPEPLRFFYRRLAEEHARTVALLEAVFQAPLLHNQRTLERQIRLRNPYVDPINIVQVELLRRYRAPGGKEDEALRRALLLSILGVAAGLRNAG

SEQ ID NO: 14388 - protein, 420 aa, Lactobacillus plantarum WCFS1
MANKSLIKVAVTALVAGLIGGGVAYGGINYFQNNNIATSSTSVPTGSNKSGSTSTTNVKVNVSSQATKVFENNKAAVVSVINLQKKSSSSSWSGILGGDDSSGSDSSSSSDSSSSKLEEYSEGSGLIYKKSGDAAYIVTNNHVVSGSSAIRVIMSDGTKLSAKIVGTDSVTDLAVLKINSSKVTKTASFGNSDNIKVGETALAIGSPMGSNYATTLTQGIISAKKRTVATTNTSGQTTGYATVIQTDTAINSGNSGGPLFNIAGQVIGINSMKLASDNSGTSVEGMGFAIPSNEVVKIINELVQKGEVVRPALGVATYDLSNISSSDQKSVLKLPTSVTKGVVIMKTYSGSPAKAAGLTKYDVITELGGKKVTSLATLRSALYAHSVNDTVTVKYYHNGKLKTANMKLTETTKTLTKQSN

SEQ ID NO: 14389 - protein, 256 aa, Arabidopsis halleri subsp. gemmifera
MEDYERNSNSPTHEEDSDVRKGPWTEDEDAILVNFVSIHGDARWNHIARSSGLKRTGKSCRLRWLNYLRPDVRRGNITLEEQFMILKLHSLWGNRWSKIAQYLPGRTDNEIKNYWRTRVQKQAKHLRCDVNSNLFKETMRNVWMPRLVERINAQSSPATCEPVESMITDPGQPIEEPIPVEPGFLQFNQQFVPASELSATSSNSPAETLSDVQGGVVNGSGSDPAGQTGFGEFNDWGCVGGDNIWTDEESFWFLQD

SEQ ID NO: 14390 - protein, 223 aa, Crucihimalaya himalaica
GDARWNHIARSSGLRRTGKSCRLRWLNYLRPDVRRGNITLQEQFMILKLHSLWGNRWSKIAQYLPGRTDNEIKNYWRTRVQKQAKHLRCDVNSNLFKETMRNVWMPRLVERINAQSSSATCEPLESMVTDPGQPIDEPSPVEPGFAQFNTNHYHQQQLVPATEISATSSNSPAETLSDVQNGVVNGSGYDLVGQTGFGEFNDWGCVGGDNMWTNDESLWFLQD

SEQ ID NO: 14391 - protein, 244 aa, Brassica napus
MLGIFSGRIVSLPEELVAAGNRTPSPKTTGSVLVNKFVEKNPSAVSVQVGDYVQLAYSHHKESPLRPRSFGAKDEIFCLFQGSLDNLGSLKQQYGLAKNANEVLLVIEAYKTLRDRAPYPANHVVSHLSGDFAFVVFDKSTSTLFVASDQEGKVPLYWGITADGYVAFADDIELLKGACGKSLASFPQGCFYSTALGGLRSFENPKNKITAIPAREEEIWGATFKVKEQQFLHMESERIKIHLS

SEQ ID NO: 14392 - protein, 737 aa, Metarhizium anisopliae var. acridum
MAGTTNHQAHGSDDYNVFDDAKTYYASEERHQNRFGSRTRTYSQNSLMKQFERNGLREPHRRGSHDESSLPQGRRFLIQVDPTLESLQAQEDTDGNMQITIEDEGPKVLSLRTAASAGHNRFEVRGTYMLSNLLQELTLAKEYGRKQIVLDEGRLNENPVDRLSRLIRDHFWDGLTRRIDASSIEIAARDPKDWTDDPRPRIYVPAGVPEQYEYYKQVAEERPEIRLDVQQLPEKITPELIRDMNEKPGLLAVETEQVVDPETGRKTLRGLPFVVPGGRFNELYGWDSYMESLGLLVNDRVDLAKSMVLNFCFCIEHYGKILNATRSYYLGRSQPPFLTDMALRVYEKIKHEPDAKEFLRRSILAAIKEYHSVWTCEPRLDPVTGLSRYRPEGLGVPPETEAGHFVHILEPYVKKHNMEFKEFVRAYNYGEIKEPELDDYFMHDRAVRESGHDTTYRFEGICADLATIDLNSLLFKYETDIARTIRNVFDDKLVIPGEFCDRTPYQPGEVLASAAWDRRAKRRKLTVDKLMWDEEQGVFFDYDTAKRERCNYESSTTFWALWAGIATPKQAADMVKKGLPRFEAYGGLLAGTEKSRGDIGLERPNRQWDYPYGWAPQQMLAWTGLLRYSFTEEAERLAYKWLFMITKAFVDFNGVVVEKYDVTRPADPHRVDAEYGNQGLDFKGVAKEGFGWVNASYVYGLQIVNAHMRRALGTLTPYPTFIKAIELSLEKELADLP

SEQ ID NO: 14393 - protein, 156 aa, Glycine max
MEQTTGVSGHEHVIDIPRDSGPSASASHSVGRENHEGLNPVDRPSTRAATSALQPPAAIGPPHAENTSGTRRRDNYGRRHRSPLNSGLWISVEVIVNVSQIVAAIVVLSLSRKEHPQAPLFEWVIGYTVGCFATLPHLYWRYIHRNIVNGENEPAH

SEQ ID NO: 14394 - protein, 585 aa, Gibberella moniliformis
MGFWNRSNKTSDVDLQDITTTTDHEKNPHPEDGHPAVSDDALPAEDVTEGVKDMEAITLVWSKASLICLFIFIWLVYLLNAFQSATVGNLLPYVTSDWSAHSLLNTIGVVASSMTAAVFIPLAKLLDLWGRAEGYLLMVGFCELGLILMATSKDLSTYCAANVFYSVGFTGLIYSVDVMTADATNLKNRALAYAFTSSPYMISAFAGSYASDRMLADIGWPWGFGTFAFITPVVCAPLYLLLKINLRKAKKNILPKKASGRTLKESIWHYVLEFDVLGVFLFAAGLIIFLLPFTIASMAPHGWSTGYIIAMIIVGFILLVGFALNEVYFAPVPFLKFHFLTDRTLVGACLLDLTYQISYYCWNNYFTSFLQVVNYLTVAEAGYVNNTFNVVSGFLLFLVGWGIRKTGYFKWLLWAGVPLYILAQGLMIYFRNPTGYVGYLVMCQIFISVGGSVFTICMQLAVLAAVDHQHVAAALAMLSVTGTAGDSIGDTISGAIWTNTFEKALKMYLPASALENLDAIYGDLPTQLSYAKGTPERIAIQKAYGYAQTRMLAAGTAIMALSFIWVALIRNLKVSEMRQTKGNVF

SEQ ID NO: 14395 - protein, 683 aa, Pirellula sp. 1
MPMTATTTDNQTLAIDTIRCLSMDAVQTANSGHPGTPMALAPIAYQLFQNTMNYDPAKPHWPGRDRFVLSCGHASMLLYSTLHLIGVQATDRYGKPTGGESISLEDIKNFRQIGSVCAGHPEFAEAAGIETTTGPLGAGVSNSVGMAMAEKWLAANYNTDDLTLFNYNTYAICSDGDLMEGIATEAASVAGHLKLDNLCWLYDDNNITIEGDTELAFSEDMGKKFEGLGWNVLHVDDANDVEALGKAIAKFQACGDKPTLIVVKSIIGYGAPNKQNTHGAHGAPLGWDEVALAKKSYGLPEDEKFYVPEGVRKHFAEGVGKRGATASSQWEDVWTKYQAAEPAKAAELKAMFAGELPEGWDKDIPVFEADAKGDATRNSSGKVLNAIAKNVPFMIGGSADLAPSNKSDLKFEGAGEFLPRQYKGRNLHFGIREHAMSGIANGLCLSGLRGYAATFFVFTDYMRGGMRLSSIMHQPTMYILTHDSIGVGEDGPTHQPVEHLTACRAIPGLNVFRPGDSNEVAECYRTAMGINDHPSAFVLSRQNMPTLDRSKYAAASGCARGGYILSDCEGTPDVILMGSGSELYMAVDAGEQLTAQGKKVRVVSMPCMDIFAQQDASYINEVLPPEVTNRVAIEAGIQMCWDRWIGSQGKFIGMHSFGASGPFDAVYEHFGINADAVVKAALS

SEQ ID NO: 14396 - protein, 352 aa, Brassica napus
QAFEKKPGVNADNVGDNVGDIAGMGSDLFGLYAKSSCAALVVASISSFGINHDFTAMLFPLLVGPRGRLVCLITTLYATDISEIKAVKEIEPALKNQLIISTVIMTAGIALVSWIGLPSSFTIFNFGTQKVVKNWELFLCVAVGLWAGLIIGFVTEYYTSNAYSPVQDVADSCRTGAATNVIFGLALGYKSVIIPIFAIAVSIFVSFSFAAMYGVAVAALGMLSTIATGLAIDAYGPISDNAGGIAEMAGMSHRIRERTDALDAAGNTTAAIGKGFAIGSAALVSLALFGAFVSRAGVQTVDVLTPKVVIGLLVGAMLPYWFSAMTMKSVGSAALKMVEEVRGQVNTIPGLM

SEQ ID NO: 14397 - protein, 391 aa, Bacillus licheniformis ATCC 14580
MKKQIEKEIENIREELLHISQYIGNHPELGHEEFKASKILSEELKKHGFQVELGTCGLATAFTAEFDSGRPGPSIGFMAEYDALPDLGHACGHNLIGTMAVGAAIGVSKVIASCGGKVYVYGTPAEETKGGKVTMAEQGVFDHLDAAMMVHPYCRHEKSGTSLAMDAIQFEFFGKASHAAGAPHEGINALDAVIQTFNGINALRQHILPDARIHGIIPEGGKAANVVPDYAVAQFYVRGTERAYVNELLDKVKNCAKAAALATGARLESSFYELSYDDLKTNETLSDAFTQNMIELGVDPDSIHEKADGGGSVDMGNVSQIAPSIHPYVQICDEPYACHTPEFREAAMSSRGFEGLMLGAKSMAFTAYDVLINEELLKKIKEEFNLLKALA

SEQ ID NO: 14398 - protein, 492 aa, Avicennia marina
MDPYKYCPSSSFNTPHTTTNGGHPVYNDNSSLTVGTRGPVLLEDYQLIDKLAHFTRERIPERVVHARGATAKGFFEVTHDVSHLTCADFLRAPGVQTPLIVRFSTVIHERGSPETLRDPRGFAVKFYTREGNFDIVGNNFPVFFIRDAIKFPDVIHAFKPNPKSHIQESWRILDFCSHFPESLLTFAWFYDDVGIPQDYRHMEGFGVHSYTLINKAGKVNYVKFHWKPTCGVKCLMEDEAVRIGGTNHSHATQDLYDSIAAGNYPEWKLYFQIMDPDQEDRFDFDPLDTTKIWPEDIIPLIPVGRMVLNKNIDNFFAENEMLAFSPHMIVPGINFSNDKMLQTRIFAYGDTQRHRLGPNYLLLPVNAPKCAYHNNHYDGFMNFMHRDEEVDYFPSKYDPTRHAERHPIPNAVITGRRDRRVIEKEDNFKQAGDRYRSWAPDRQERFLRRWVDALSDPRLTLEIRSIWVSYWSQADKSFGQKLASRLNVRPTM

SEQ ID NO: 14399 - protein, 940 aa, Oryza sativa (japonica cultivar-group)
MERGAPAAAGGRGGMGSTSVSTRGTEGGHGGVERKEQQQQRGYQLPRDSRGSLEVFNPSSASSFRTAAAAPKSASPFLAIPDREEDNVVAQQRAAEWGLVLQTDHHTGLPQGVSARPSSGSARTSSEDNPQQQQSAAAIPRVSEELRAALSAFQQTFVVSDATHPNHPIMYASAGFFNMTGYTSKEVVGRNCRFLQGSGTDPHEIDKIRQSLANGSNYCGRILNYKKDGTPFWNLLTIAPIKDEDGRLLKFIGMQVEVSKYTEGKKDTVVRPNGLSESLIKYDARQKDHARSSVSELLLALKNPRSLSESSNNTLKRKSQESLSMSMTEVPSKRSSESGSRRNSRSGTRSSLQKINEVPDQGNRTRKSGLRAFMGFLGMGHGSVEKNMLKPRDEDPLIDSDDERPESFEDEFRRKEMRRGIDLATTLERIEKNFVITDPRLPDNPIIFASDSFLQLTEYNREEILGRNCRFLQGPETDRATVRKIRDAIDNQAEVTVQLINYTKSGKKFWNLFHLQPMRDQKGDVQYFIGVQLDGTEHVQDDAAKEGVVLVKKTADNIDEAAKELPDANLRPEDLWANHSKVVLPNPHMKDTASWRAIQKVLESGESIGLKHFRPVKPLGSGDTGSVHLVELLNTGEYFAMKAMDKSIMLNRNKVHRATAERQILDLLDHPFLPTLYASFQTKTHICLITDYCPGGELFVLLDNQPLKVLHEDAVRFYAAEVVVALEYLHCQGIIYRDLKPENILLHRDGHISLTDFDLSCLTSCRPQVFLPEDADEKKGRKNGSYPIFFAEPMRASNSFVGTEEYIAPEIITGAGHTSAVDWWALGILLYEMLYGYTPFRGKTRQRTFANILHKDIRFPASISVSLAARQLMYRLLHRDPANRLGSYEGANEIKGHPFFRGINWPLIRATAPPKLEIPLFSKDDMEKKGLVTNNRTDMF

SEQ ID NO: 14400 - protein, 289 aa, Mesorhizobium loti MAFF303099
MTPGHEFSGIVEAIGKAVSGFAVGDRVTGDPNIACGRCPHCHAGRVNLCRNLNAIGIHRDGGFAEYVVLPQKQAFILPADLPPTHGAFCEPLGCCLHGVDLAQIKPGSSVVVLGGGVIGLLTVQLAKLAGATTIILSTRQASRRVLAEELGATATVDPTAGDVIDAIAGSEGLMPGGADVVFECAGVRDTVEQSMRLARAGGTVVIVGVTPQGMKAEFEPFDLLFRELKVVGSFLNPYTHRRAAELIASGAIEIDRLISRQVPLEEAADVIANPPAPGEVKVLVVPRQG

SEQ ID NO: 14401 - protein, 472 aa, Bacillus clausii KSM-K16
MNHALFINNECVATDDMIEVENPATKEVIGTVANGGKQEALAAVDAAAAALPEWRAKTAAERGAYLQKWYELIQREEEEIAKLMTLEQGKPFAEALGEVRYANSFLSWYAEEGKRVYGETVPAAATNKRIFVQKQAIGVIAAITPWNFPAAMLTRKLGPALAAGCTAVMKPSELTPFTAYRIVELAKVAGIPKGVVNMITGDAQQIGETWMADERVRKVSFTGSTRVGKLLMRQAADTVKKLSLELGGHAPFIVTAQADIQKAVDGLIASKYRNGGQTCVCANRIYVHESIKAPFVEAFAAEMKKLKVGNGMEPDSHIGPLINEAAVAKVQKHIEDAQAKGGEVIFGQEADATNGYFQTPALIANATDDMLCMKEETFGPLAPIATYTSTEDVIERANHSPYGLAAYVYSNDLSEAVTIAERLEYGIVGLNDGLPSVAQAPFGGMKESGLGREGGHWGIEEYVEVKYISLQL

SEQ ID NO: 14402 - protein, 156 aa, Saccharomyces cerevisiae
MSTELTVQSERAFQKQPHIFNNPKVKTSKRTKRWYKNAGLGFKTPKTAIEGSYIDKKCPFTGLVSIRGKILTGTVVSTKMHRTIVIRRAYLHYIPKYNRYEKRHKNVPVHVSPAFRVQVGDIVTVGQCRPISKTVRFNVVKVSAAAGKANKQFAKF

SEQ ID NO: 14403 - protein, 152 aa, Brassica napus
MGSIRESAPTANSSTTVVMSSIPPFLSKTYDMVDDPSTDEVVSWSSGSNSFVVWNVPEFSKQFLPKYFKHNNFSSFVRQLNTYGFRKVDPDRWEFANEGFLKGQKQLLKSIIRRKPTQVQPPQQPQVQHSSVGACVEVGKFGLEEEVERLQR

SEQ ID NO: 14404 - protein, 391 aa, Bacillus anthracis str. A2012
MDVAKELVLSKDQLVEWRRHFHKYPELSFQEEKTSQFVFDILRKIPCLEVSRPTKYSVMARLIGKQSGKTIAVRADMDALPIHEENEFDFISAYPGVMHACGHDGHIAILLGVVHKLVEAREKIKGEVRFLFQHAEENFPGGAEEMVAAGVMEGVDYIVGAHLWASLEVGKVGVIYGPAMAAPDVFKITIEGKGGHAGIPHETVDSIAIGTQVVSQLQQIVSRLTNPLDSLVVSVTQFHAGTTHNVIPAQTEIEGTVRSLRHELREETEKRIEQIVKHVTEAYGAKYTFSYEYGYRPVVNDYEVTEIIEQTALQLYGRERVTRLQPTMAGEDFSAFLQKVPGTFFFIGAGSKEKGIIYPHHHPRFTIDEDALPIGVQVFVSSIMNFISKGE

SEQ ID NO: 14405 - protein, 460 aa, Bordetella parapertussis 12822
MPRSTARAAWKRELAATLALGLPLVLTNLAQMAMTVTDVIFIGRLGSQALAASALGANLFTAIEFFGLGLVAATAPMVAHALGRRGNTVRDVRRTVRQGLWTAVIYSVPGCLLLWHGEAILLAIDQPPELAAQAGAYLRALMWAMPPFLGFLVLRSFVTALQRPRSAFLIALAAIVLNVFGNWVLVFGNLGAPALGLVGAGLASALATLGLFLGMVGVVCLDRRFRRYHLFGDVWQPDWQRLAEFWKLGLPIGAATAFEVTIFNAAAFLMGWLGEPELAAHAIAIQIASVTFMIPYGIAQAATVRVGHAYGARQPDQVARAGWCAFSLGIGSMAIAAALMLLAPGLLVSAFLDIGDPANAQVLRLATAYLAVAALFQIVDGAQVLGAGMLRGLHDTRVPMLYAALGYWGVGLPSGAALAFWAGWRGVGVWSGLAIGLALVAVLMMQRWLRRDRVGLLRRA

SEQ ID NO: 14406 - protein, 414 aa, Glomus diaphanum
GNACWELYCLEHGIQPDGQMPSDKSVGICDDSFNTFFSETGAGKHVPRTVFVDLEPTVVDEVRTGTYRQLFHPEQLITGKEDAANNYARGHYTIGKEIVDLVLDRIRKLADNCTGLQGFLVFHSFGGGTGSGFGALLLERLSVDYGKKSKLEFSVYPAPQVSTAVVEPYNSILTTHTTLEHSDCAFMVDNEAIYDICRRNLDIERPTYTNLNRLIAQVVSSITASLRFDGSLNVDLTEFQTNLVPYPRIHFPLVTYAPVISAEKAYHEQLTVAEITYSCFEPNNQMVKCDPRHGKYMACCLLYRGDVVPKDVNAAIATIKTKRTIQFVDWCPTGFKVGINYQPPTVVPGGDLAKVQRAVCMLSNTTAIAEAWARLDHKFDLMYAKRAFVHWYVGEGMEEGEFRGPRANSADIHH

SEQ ID NO: 14407 - protein, 196 aa, Triticum aestivum
  misc_feature (49)..(49): Xaa can be any naturally occurring amino acid
  unsure (1)..(196): unsure at all Xaa locations
MTGKKRKAEAARLDETDRAMYGAFRGAANSLSQLYTLAMGGQKLSFQAXGERHAMEKLYEWILRQHENGLRLTVGDIASHVQHEIQYGGDNPLASPRSQYASQSTHGTVHMPNTSNQQPSASLFALGNPGLTQPKNSAVFSNALSSPVRRGLQPYHLDQGGDAGYFANGLAREPNPTASNDSSMDMHSDSPAHDSS

SEQ ID NO: 14408 - protein, 274 aa, Deinococcus radiodurans R1
MSTMKFTAAQEFVAELLGTLVLILFGCGVVAMVKLFGSSPAIPGEVVMGGYTNIVLGWGFAVLMGIFVAGTITGAHLNPAVTIALAATGRFPWAKVGYFILAQMIGAFLGAAIVFAVYHAKWLGVDPGLDHTAGIFSTFPAVPGFLPGFIDQVVGTALLVGLILAIGDKLNNPAGAAWGSLAVAFVVMAVGISFGGMNGYAINPARDLGPRLFALLAGFKNLGDINVWLVPVIGPIVGGLVGAFIYDFCIGRPLLRAGEAHVGVQGVDPEFNRQ

SEQ ID NO: 14409 - protein, 405 aa, Glomus claroideum
GPQVGNACWELYCLEHGIQPDGQMPSDKSVGICDDSFNTFFSETGAGKHVPRTVFVDLEPTVVDEVRTGTYRQLFHPEQLITGKEDAANNYARGHYTIGKEIVDLVLDRIRKLADNCTGLQGFLVFHSFGGGTGSGFGALLLERLSVDYGKKSKLEFSVYPAPQVSTAVVEPYNSILTTHTTLEHSDCAFMVDNEAIYDICRRNLDIERPTYTNLNRLIAQVVSSITASLRFDGSLNVDLTEFQTNLVPYPRIHFPLVTYAPVISAEKAYHEQLTVAEITYSCFEPNNQMVKCDPRHGKYMACCLLYRGDVVPKDVNAAIATIKTKRTIQFVDWCPTGFKVGINYQPPTVVPGGDLAKVQRAVCMLSNTTAIAEAWARLDHKFDLMYAKRAFVHWYVGEGMEEGE

SEQ ID NO: 14410 - protein, 630 aa, Oryza sativa
MWRGCVSRGLRSLSKGKGSSSSAPVSAAARLFSTASSSYTVVDHSYDAVVVGAGGAGLRAAIGLSEHGFNTACITKLFPTRSHTVAAQGGINAALGNMTEDDWRWHMYDTVKGSDWLGDQDSIQYMCREAPKAVIELENYGLPFSRTEDGKIYQRAFGGQSLDFGKGGQAYRCACAADRTGHAMLHTLYGQAMKHNTQFFVEYFALDLIMDSEGTCQGVIALNMEDGTLHRFRATNTILATGGYGRAYFSATSAHTCTGDGNAMVARAGLPLQDLEFVQFHPTGIYGAGCLITEGSRGEGGILRNSEGERFMERYAPTAKDLASRDVVSRSMTMEIREGRGVGPLKDHIYLHLNHLPPEVLKERLPGISETAAIFAGVDVTKEPIPVLPTVHYNMGGIPTNYHGEVVTMKGDNPDSVVPGLMAAGEAACASVHGANRLGANSLLDIVVFGRACANRVAETAKPGEKQKPLQKSAGEKTIAWLDKLRNANGSLPTSKIRLNMQRVMQNNAAVFRTQETLEEGCKLITKAWESYHDVKISDRSLIWNSDLIETIELENLLINACITMHSAEARKESRGAHAREDFTKRDDEQWMKHSLGYWENEKVRLAYRPVHMNTLDSEVESFPPKARVY

SEQ ID NO: 14411 - protein, 507 aa, Arabidopsis thaliana
MAMASLARRKAYFLTRNISNSPTDAFRFSFSLTRGFASSGSDDNDVVIIGGGPGGYVAAIKAAQLGLKTTCIEKRGALGGTCLNVGCIPSKALLHSSHMYHEAKHVFANHGVKVSSVEVDLPAMLAQKDTAVKNLTRGVEGLFKKNKVNYVKGYGKFLSPSEVSVDTIDGENVVVKGKHIIVATGSDVKSLPGITIDEKKIVSSTGALSLTEIPKKLIVIGAGYIGLEMGSVWGRLGSEVTVVEFAADIVPAMDGEIRKQFQRSLEKQKMKFMLKTKVVGVDSSGDGVKLIVEPAEGGEQTTLEADVVLVSAGRTPFTSGLDLEKIGVETDKGGRILVNERFSTNVSGVYAIGDVIPGPMLAHKAEEDGVACVEFIAGKHGHVDYDKVPGVVYTYPEVASVGKTEEQLKKEGVSYNVGKFPFMANSRAKAIDTAEGMVKILADKETDKILGVHIMSPNAGELIHEAVLAINYDASSEDIARVCHAHPTMSEAIKEAAMATYDKPIHM

SEQ ID NO: 14412 - protein, 463 aa, Burkholderia sp. 383
MNAPNFPHRTTQDYQRSDAAHHLHAFVDQKALNEEGARVMVRGEGVHLWDNDGNRYLDGMSGLWCTNVGYGRPELVDAAARQMKELSYYNMFFHTTHPSVIELSERLFALLGNRFSHVVYTNSGSESNEVLIRTVRRFWDVMGKPEKKVLIGRVNGYHGSTVGSASLGGMAFMHEMGDLPIPNITHVDEPYWYANGGDLSPEAFGKQAALSLERKILEIGADRVAAFVAEPFQGAGGMIFPPDGYWQEIERICRQYDVLLCADEVIGGFGRTGEWFAHRHFGFEPDLICVAKGLTSGYVPMGGLIMSRRVGDALVDKGGVYAHGLTYSGHPVAAAVALANLDVLEREGLVERTKTDTGPYLQKALRDAFGSHPLVGEVQGVGAVGAIQFAKNKATRERFANEADLTWHSRTVGFELGAIVRSTNGRLIVAPPLVIDHAQIDELVDTMRKAVDATAREVLGIDC

SEQ ID NO: 14413 - protein, 400 aa, Glomus proliferum
CLEHGIQPDGQMPSDKSVGICDDSFNTFFSETGAGKHVPRTVFVDLEPTVVDEVRTGTYRQLFHPEQLITGKEDAANNYARGHYTIGKEIVDLVLDRIRKLADNCTGLQGFLVFHSFGGGTGSGFGALLLERLSVDYGKKSKLEFSVYPAPQVSTAVVEPYNSILTTHTTLEHSDCAFMVDNEAIYDICRRNLDIERPTYTNLNRLIAQVVSSITASLRFDGSLNVDLTEFQTNLVPYPRIHFPLVTYAPVISAEKAYHEQLTVAEITYSCFEPNNQMVKCDPRHGKYMACCLLYRGDVVPKDVNAAIATIKTKRTIQFVDWCPTGFKVGINYQPPTVVPGGDLAKVQRAVCMLSNTTAIAEAWARLDHKFDLMYAKRAFVHWYVGEGMARRANSADIHH

SEQ ID NO: 14414 - protein, 464 aa, Haemophilus influenzae Rd KW20
MNFRLLSQYHADIKKLIKISLPILLAQIAQNSMGLADTIMAGRVSSTDMAAISIGASIWMPLMFFGQGLLLALPPTISYLNGSGQHHRIAHQVRQGIWLVLGVSIPLGLLIYFCEIPLQYMQMESKMSDLARDYLHAMLWGLPAYLMLINFRCLNDGIEKTKPAMVITFLGLLINIPLNYIFIYGKFGMPAFGAVGCGIATAIVNWAMCLMMIFYSYTNTQERSLKVFSQLIEMPNPKTLKKLLRLGLPIAIAICCEVALYALTSLMLSPLGATIVASHQITLNTSSFIFMFPMSIGMATTILVGQALGAGSPQNAKKIGYAALLLGLTVTIVTALITIFFRYEIASIFVTDEIVIAMAANLLLFAALYQFSDTIQMVVGGILRGYKDTKVILYITLFSYWVIGVPLGYTLGRTDWLVPHIDAKGFWIAFVVSLTFAAFLLSLRMKKMQAMNDNAILQRLEKLK

SEQ ID NO: 14415 - protein, 384 aa, Glomus geosporum
CLEHGIQPDGQIPSDKSVGICDDSFNTFFSETGAGKHVPRTVFVDLEPTVVDEVRTGTYRQLFHPEQLITGKEDAANNYARDHYTIGKEIVDLVLDRIRKLADNCTGLQGFLVFHSFGGGTGSGFGALLLERLSVDYGKKSKLEFSVYPAPRVSTAVVEPYNSILTTHTTLEHSDCAFMVDNEAIYDICRRNLDIERPTYTNLNRLIAQVVSSITASLRFDGSLNVDLTEFQTNLVPYPRIHFPLVTYAPVISAEKAYHEQLTVAEITYSCFEPNNQMVKCDPRHGKYMACCLLYRGDVVPKDVNAAIATIKTKRTIQFVDWCPTGFKVGINYQPPTVVPGGDLAKVQRAVCMLSNTTAIAEAWARLDHKFDMMYAKRAFVHWH

SEQ ID NO: 14416 - protein, 377 aa, Glomus sp. BEG19
PDGQIPSDKSVGICDDSFNTFFSETGAGKHVPRTVFVDLEPTVVDEVRTGTYRQLFHPEQLITGKEDAANNYARGHYTIGKEIVDLVLDRIRKLADNCTGLQGFLVFHSFGGGTGSGFGALLLERLSVDYGKKSKLEFSVYPAPRVSTAVVEPYNSILTTHTTLEHSDCAFMVDNEAIYDICRRNLDIERPTYTNLNRLIAQVVSSITASLRFDGSLNVDLTEFQTNLVPYPRIHFPLATYAPVISAEKAYHEQLTVAEITYSCFEPNNQMVKCDPRHGKYMACCLLYRGDVLPKDVNAAIATIKTKRTIQFVDWCPTGFKVGINYQPPTVVPGVDLAKVQRAVCMLSNTTAIAEAWARLDHKFDLMYAKRAFVHWY

SEQ ID NO: 14417 - protein, 518 aa, Zea mays
MQPQQGSSSSLQQNSTSAPGAAVVPPPKKKRNQPGNPNPDAEVIALSPRTLLATNRFVCEVCNKGFQREQNLQLHRRGHNLPWKLKQKNPREARRRVYLCPEPTCVHHDPSRALGDLTGIKKHYCRKHGEKKWKCDKCSKRYAVQSDWKAHSKTCGTREYRCDCGTLFSRRDSFITHRAFCDALARESAQMPPLGAGLYVGPGSMSLGLSQIHGFADQAQSSSAAAAPQFDHIMPSSSGSSSMFRSQASASSPSYFLGGSAPPAAAQDFSEDGSQGSQGPLLHGKAHFHGLMMQLPEQQHQPGSSNAAVGANGSNILNLGFFSAGNSGGTSGSLQDARIAIQDQFNLSGSGSGSAEHGNNVMVASIGSHLGRGFPSLYSSSPSAGMAQNSATALLMKAAQMGSTTSSTTHNNHNGPTTTSTLLRATGFSGATGSGQLGTTGGRAAAGEEGAASHEAHFHELIMNSLAGGGFSGTAGFGGGVDDGKLSTRDFLGVGRGAATMAPPGLHMGALDPAQQMK

SEQ ID NO: 14418 - protein, 440 aa, Chlamydophila pneumoniae CWL029
MLNCSNQKHTVTFEEACQVFPGGVNSPVRACRSVGVTPPIVSSAQGDIFLDTHGREFIDFCGGWGALIHGHSHPKIVKAIQKTALKGTSYGLTSEEEILFATMLLSSLKLKEHKIRFVSSGTEATMTAVRLARGITNRSIIIKFIGGYHGHADTLLGGISTTEETIDNLTSLIHTPSPHSLLISLPYNNSQILHHVMEALGPQVAGIIFEPICANMGIVLPKAEFLDDIIELCKRFGSLSIMDEVVTGFRVAFQGAQDIFNLSPDITIYGKILGGGLPAAALVGHRSILDHLMPEGTIFQAGTMSGNFLAMATGHAAIQLCQSEGFYDHLSQLEALFYSPIEEEIRSQGFPVSLVHQGTMFSLFFTESAPTNFDEAKNSDVEKFQTFYSEVFDNGVYLSPSPLEANFISSAHTEENLTYAQNIIIDSLIKIFDSSAQRFF

SEQ ID NO: 14419 - protein, 496 aa, Oryza sativa
VKHVIYVNEEGVSSEVSLAQKCTSWRVESFEEVERLGLETPVEAKLPLPSDTAVIMYTSGSTGMPKGVMMSHRNVLAVVSAVMTIVPALGKKDVYLAYLPLAHILELAAETVMSAVGASIGYGSPLTLTDTSNKIKKGTQGDASALKPTLMTAVPAILDRVRDGVRKNVDAKGGAAKKLFDIAYSRRLAAINGSWLGAWGLEKHLWDMLVFQKVRAILGGRIRFILSGGAPLSGDTQRFINICLGAPIGQGYGLTETCAGGTFSEYDDNSVGRVGAPLPCSYIKLIDWAEGGYLTNDSPMPRGEIVIGGPNVTKGYFKNEAKTNEVYKDDERGMRWFYSGDIGRLHPDGCLEIIDRKKDIVKLQHGEYVSLGKVEAALSVCPYVDNIMIHADPFHNYCVALVVVAHSELKSWASQQGITYSDVSDLCEKQETVKEVLQCLAKAAKQARLEKFEIPAKVKLVPEPWTPESGLVTAALKLKREAIKKAYEDDLAALYS

SEQ ID NO: 14420 - protein, 154 aa, Glycine max
MSLIPGFFGGRRSNVFDPFSLDMWDPFKDFHVPTSSVSAENSAFVSTRVDWKETPEAHVFKADIPGLKKEEVKVQIEDDRVLQISGERNVEKEDKNDTWHRVERSSGKFTRRFRLPENAKVNEVKASMENGVLTVTVPKEEVKKPDVKAIEISG

SEQ ID NO: 14421 - protein, 396 aa, Haemophilus influenzae Rd KW20
MFEHIKAAPADPILGLGEAFKSETRENKINLGIGVYKDAQGTTPIMHAVKEAEKRLFDKEKTKNYLTIDGIADYNEQTKALLFGKDSEVIQSNRARTVQSLGGTGALRIAAEFIKRQTKAQNVWISTPTWPNHNAIFNAVGMTIREYRYYDAERKALDWEHLLEDLSQASEGDVVLLHGCCHNPTGIDPTPEQWQELAALSAKNGWLPLFDFAYQGLANGLDEDAYGLRAFAANHKELLVASSFSKNFGLYNERVGAFTLVAENAEIASTSLTQVKSIIRTLYSNPASHGGATVATVLNDAQLRQEWENELTEMRERIKKMRHLFVQLLKEYGAEQDFSFIIEQNGMFSFSGLTGEQVDRLKNEFAIYAVRSGRINVAGITEDNIRYLCESIVKVL

SEQ ID NO: 14422 - protein, 465 aa, Xanthomonas campestris pv. vesicatoria str. 85-10
MPESSSATAPQFQRSMQVRHLVMLSLGGVIGTGLFFNTGYIIASTGALGTVLAYLIGALVVYLVMQCLGELAVAMPQTGAFHVYAARYLGPATGYVVAWLYWLTWTVALGSSLTAAAFCMQYWFPHSPAWPWCLLFCALIFGLNTVSARWFAEGEFWFSLIKVVTILVFIVLGGAAVIGLLPLADGSPAPGLRHLRAEGWFAHGALPILMTMVAVNFAFSGTELIGVAAGETAQPARAIPLAIRTTLVRLVVLFVGTVLVLAALLPAKQAAVETSPFVRAFELLGIPYAADILNAVILTAILSAANSGLYAAARMLWSLANEGTLPSGLARLTGRGIPLRAVSLSMLGGLLALLTGVYAPETVFVAISAVSGFAVVVVWLSICAAHYRFRRQLLRDGAALETLAYRAPWYPWTPILGFSLCLLACIGLAFDPQQRIALWCGVPFVALCYGAYALTQWLAARRLHA

SEQ ID NO: 14423 - protein, 304 aa, Kineococcus radiotolerans SRS30216
MPTAGPYAPRLGMRAVTRRTSVSAMTVPTILLNDGREIPQLGFGVFQIEPGDTAQAVKTALDLGYRHIDTAQMYGNEAEVAQGIADSGVPRDEIWVTSKLNNGFHEPDAARKAVDDSVEKLRGPIDLYLIHWPLPTLYGGDFVSTWKVLEEARAAGKLRSIGVSNFQVNHLQRLAQEATVVPAVNQIEVHPYFGNEEVRRHCGEHQIGVEAWSPIAQGKVLDDPTVTAVANRLGKSPAQVVLRWHVERGDIVFPKSVTPSRMEENFALFDFELTEEDLALISALDKGEAGRTGPNPDTFDYVPS

SEQ ID NO: 14424 - protein, 343 aa, Oryza sativa
MANLGGGAMPAGSSGGDGEVEAGFAKLQGEDFEYYMQTYSIMLGRNSKKSTVDVDLSSLGGGMNISRHHARIFYDFQRRRFALDVIGKNGCLVEGVLHLPGNHPVKLDSQDLLQIGDKKFYFLLPTRSIFASAAAARHPPIIPQQMPPPSYVRTGRPRLSEFHDRSFEGDYGREGDEIGNGISESGGMRGKLIKRNKKLSAESEMYGGHRINVEAIGTLGEDSRSEIRSRGDRDMDNQHILQAEEKDVVSSVATVLSDLCGPGEWMPMAKLHTELLEQFGNVWHHSRVRKYLSPEDWSPTETKGRPWYGLLALLRKYPEHFVINTRSKGRVTSEFVSLVSLLS

SEQ ID NO: 14425 - protein, 347 aa, Camellia sinensis
MKDSVASATASAPGTVCVTGAAGFIGSWLVMRLLERGYIVRATVRDPANLKKVKHLLDLPKADTNLTLWKADLNEEGSFDEAIEGCSGVFHVATPMDFKSKDPENEVIKPTINGVLSIIRSCTKAKTVKRLVFTSSAGTVNVQEHQQPVFDENNWSDLDFINKKKMTGWMYFVSKTLAEKAAWEAAKENNIDFISIIPTLVVGPFIMPTFPPSLITALSPITRNEGHYSIIKQGQFVHLDDLCESHIFLYERPQAEGRYICSSHDATIHDLAKLMREKWPEYNVPTEFKGIDKDLPVVSFSSKKLIGMGFEFKYSLEDMFRGAIDTCREKGLLPHSFAENPVNGNKV

SEQ ID NO: 14426 - protein, 245 aa, Zea mays
MKDPEPSSPAVGAPGDHGADETNESGGAVVAAGNRRPRGRPPGSKNKPKPPIFVTRDSPNALRSHVMEVAGGADVAESIAHFARRRQRGVCVLSGAGTVADVALRQPAAPGAVVALRGRFEILSLTGTFLPGPAPPGSTGLTVYLAGGQGQVVGGSVVGTLIAAGPVMVMASTFANATYERLPLEEEDEGPAPPMASGGGADPLMGGGLGIADPSALPMFNLPPSNGQLGGGDGFPSWAHPRPPY

SEQ ID NO: 14427 - protein, 390 aa, Burkholderia vietnamiensis G4
MSETKDAAAPAAAGGFKPKKSVALSGVTAGNTALCTVGRTGNDLHYRGYDILDVAESCDFEEIAHLLVHGTLPNLTELAAYKTKLRALRGLPNALKAALEQIPASAHPMDVMRTGVSVLGTVLPEKDDHNLPGARDIADRLMASLGSMLLYWYHFSHNGKRIETETDDDSIGGHFLHLLHGKAPSKSWVEAMHTSLILYAEHEFNASTFTGRVIAGTGSDIYSAITGAIGALRGPKHGGANEVAYDIQSRYDSPDEAELDIRRRVENKEVVIGFGHPVYTISDPRNKVIKGVAHKLSKEAGDLKLYNIAERLESVMWDAKKMFPNLDWFSAVSYHLMGVPTAMFTPLFVISRTSGWSAHIIEQRIDNKIIRPSANYTGPEDLQFVPIDKR

SEQ ID NO: 14428 - protein, 264 aa, Zea mays
MGRRACCAKEGVKRGAWTAKEDDTLAAYVKAHGEGKWREVPQKAGLRRCGKSCRLRWLNYLRPNIKRGNISYDEEDLIVRLHKLLGNRWSLIAGRLPGRTDNEIKNYWNSTLGRRAGGSRVVFAPDTGSHATPAAGSREMTGGQKGAAPRADLGSPASAAVVWAPKAARCTGGLFFHRRDTHTPHAGGTETPTPMMAGGGGGEARSSDDCSSAASVSPLVGSSQHDPCFSGDGDGDWMDDVRALASFLESDEERLRCHTAEQLV

SEQ ID NO: 14429 - protein, 257 aa, Oryza sativa
  misc_feature (136)..(136): Xaa can be any naturally occurring amino acid
  unsure (1)..(257): unsure at all Xaa locations
MAKEVDPCDHGEVVDAGCVRAVLAELVLTFVFVFTGVAATMAAGVPEVAGAAMPMAALAGVAIATALAAGVLVTAGFHVSGGHLNPAVTVALLARGHITAFRSALYVAAQLLASSLACILLRYLTGGMVSTQPVTXPLHTLGSGIGPMQGLVMEIILTFSLLFVVYATILDPRSSVPGFGPLLTGLIVGANTIAGGNFSGASMNPARSFGPALATGVWTHHWIYWLGPLIGGPLAGLVYESLFLVKRTHEPLLDNSF

SEQ ID NO: 14430 - protein, 668 aa, Xanthobacter flavus
MSSRTSDSVTSHDRLANAIRFLAIDAVEAANSGHPGLPMGAADIATVLFTKVLKYDPSRPFWPDRDRFVLSAGHGSMLLYSVLHLAGYEKVTIDEIKRFRQLGSLTPGHPENFVTEGIETTTGPLGQGIATAVGMAMAERLLAARFGSDVVDHYTYALASDGDLMEGISQEAADLAGHLKLSKLIVMWDDNKISIDGPTSISGSTNQLARFAASGWATAAVDGHDPEAILAALEAAKASDRPTLIACRTTIGFGSPKKAGSEKVHGSPLGAEEIVATRAALGWEAPAFVVPEDALNGWRAAGAAGRAAREAWEARFAARPAEERAEFERRVAGTLPAALEGAIVAVKEKAVKDGGAVATRKSSEMVLDFITPAVPEMVGGSADLTGSNNTKAKGAKSVTPDDFSGSFIHYGVREHGMAAAMNGMALHKGLIPFSGGFMVFSDYCRPAIRLAALMGERVIHVLTHDSIGLGEDGPTHQPVEHLAALRAIPNLLVMRPCDTVETAECWQIALQSTDRPSALILSRQNLPLLRTDATAVNRSAEGAYEILAASGPAQASLFATGSEVSLAVEAAKLLEAQGVPTRVVSISSFELFLERPAAERAKVIGDAPAKVAVEAAIRMGWDAIVGSNAAFVGMTSFGASAPAKELYAHFGITAQQVAARALDQLRQA

SEQ ID NO: 14431 - protein, 159 aa, Glycine max
MAEQTEKAFLKQPKVFLSSKKTGKGKRPGKGGNRFWKSIGLGFKTPREAIEGTYIDKKCPFTGNVSIRGRILAGTCHSAKMNRTIIVRRNYLHFIKKYQRYEKRHSNIPAHISPAFRVKEGDHVIIGQCRPLSKTVRFNMLKVIPAGSSSGAKKAFTGM

SEQ ID NO: 14432 - protein, 89 aa, Arabidopsis thaliana
  misc_feature (16)..(16): Xaa can be any naturally occurring amino acid
  unsure (1)..(89): unsure at all Xaa locations
GTCHSAKMQRTIIPSXVRRNYLHFVKKYQRYEKRHSNIPAHVSPCFRVKEGDHLIIGQCRPLSKTVRFNVLKVIPAGSSAIGKKAFTGM

SEQ ID NO: 14433 - protein, 378 aa, Gigaspora margarita
PDGQMPSDKSVGVCDDSFNTFFSETGAGKHVPRTVFVDLEPTVVDEVRNGTYRQLFHPEQLITGKEDAANNYARGHYTIGKEIVDLVLDRIRKLADNCTGLQGFLVFHSFGGGTGSGFGALLLERLSVDYGKKSKLEFSVYPAPQVSTAVVEPYNSILTTHTTLEHSDCAFMVDNEAIYDICRRNLDIERPTYTNLNRLIAQVVSSITASLRFDGSLNVDLTEFQTNLVPYPRIHFPLVTYAPVISAEKAYHEQLTVAEITYSCFEPNNQMVKCDPRHGKYMACCLLYRGDVVPKDVNAAIATIKTKRTIQFVDWCPTGFKVGINYQPPTVVPGGDLAKVQRAVCMLSNTTAIAEAWARLDHKFDLMYAKRAFVHWYE

SEQ ID NO: 14434 - protein, 428 aa, Deinococcus radiodurans R1
MWAFNVQFGTSKGDDMISGLKRVVITGLGPVTPIGVGAKAYAEAQRAGKNGIGPITRFDAKDTASKIAGEVHDSLDDFVDPREARKLDRYTLLALSAAELAVRDSGLSAEDLRGERTGTLVGSGIGGMKTFEDQARVYVERGAGRISPMFIPMQIANMATGHIAMRYGAMGPSSTVVTACATGTGAIGEAARYIQLGLADVMLAGGAEASITAMAVGGFSNMKALSTRNDDPEHASRPFSATRDGFVLSEGAGVVVLEEYEHAKARGATIYAEVAGFGVSADAYHITMPAPQGAGAQLAMKMALHTAGVNPEQVGYINAHGTSTHFNDLHETQAIQHVFGDHAAQLAVSSTKSMTGHLLGAAGAIEAIAVAQALADGLLPPTINLTDPDPELPLDFIPEGARERQVDYALSNSFAFGGQNAALLLGRV

SEQ ID NO: 14435 - protein, 384 aa, Scutellospora castanea
CLEHGIQPDGQMPSDKSVGVCDDSFNTFFSETGAGKHVPRTAFVDLEPTVVDEVRNGTYRQLFHPEQLITGKEDAANNYARGHYTIGKEIVDLVLDRIRKLADNCTGLQGFLVFHSFGGGTGSGFGALLLERLSVDYGKKSKLEFSVYPAPQVSTAVVEPYNSILTTHTTLEHSDCAFMVDNEAIYDICRRNLDIERPTYTNLNRLIAQVVSSITASLRSDGSLNVDLTEFQTNLVPYPRIHFPLVTYAPVISAEKAYHEQLTVAEITYSCFEPNNQMVKCDPRHGKYMACCLLYRGDVVPKDVNAAIATIKTKRTIQFVDWCPTGSKVGINYQPPTVVPGGDLAKVQRAVCMLSNTTAIAEAWARLDHKFDLMYAKRAFVHWY

SEQ ID NO: 14436 - protein, 431 aa, Escherichia coli
MVSLEKNDHLMLARQLPLKSVALILAGGRGTRLKDLTNKRAKPAVHFGGKFRIIDFALSNCINSGIRRMGVITQYQSHTLVQHIQRGWSFFNEEMNEFVDLLPAQQRMKGENWYRGTADAVTQNLDIIRRYKAEYVVILAGDHIYKQDYSRMLIDHVEKGVRCTVVCMPVPIEEASAFGVMAVDENDKTIEFVEKPANPPSMPNDPSKSLASMGIYVFDADYLYELLEEDDRDENSSHDFGKDLIPKITEAGLAYAHPFPLSCVQSDPDAEPYWRDVGTLEAYWKANLDLASVVPKLDMYDRNWPIRTYNESLPPAKFVQDRSGSHGMTLNSLVSGGCVISGSVVVQSVLFSRVRVNSFCNIDSAVLLPEVWVGRSCRLRRCVIDRACVIPEGMVIGENAEEDARRFYRSEEGIVLVTREMLRKLGHKQER

SEQ ID NO: 14437 - protein, 484 aa, Arabidopsis thaliana
MEIISLNVVPQCSVVTWSSKLATKRLVPNRSSLLFSGVKKSRLVIRSGNSDGYVVGENDDLGRIARRGESTSKVLIPGLPDESNGEIAARISHSHCEWKPKLRVHYEKAGCDNLDAPAVLFLPGFGVGSFHYEKQLTDLGRDYRVWAIDFLGQGLSLPTEDPTTMTEETSSSEDKEPFWGFGDKTEPWADQLVFSLDLWRDQVQYFVEEVIGEPVYIAGNSLGGYVALYFAATHPHLVKGVTLLNATPFWGFFPNPVRSPKLARLFPWPGAFPLPERVKKITELVWQKISDPESIAEILKQVYTDHSTNVDKVFSRIVEVTQHPAAAASFASIMLAPGGELSFSEALSRCKENNVQICLMYGREDPWVRPLWGKKIKKEIPNAPYYEISPAGHCPHDEVPEVVNYLMRGWIKHLESGGFEALPLLEDTEEDWEESRIGREIEFPRDGWKKAVNLWLYGSNYTYWRGVRESFRSSFIRVFGGKSA

SEQ ID NO: 14438 - protein, 377 aa, Acaulospora laevis
PDGQMPTDKSTGVCDDSFNTFFSETGAGKHVPRTVFVDLEPTVVDEVRTGTYRQLFHPEQLITGKEDAANNYARGHYTIGKEIVDLVLDRIRKLADNCTGLQGFLVFHSFGGGTGSGFGALLLERLSVDYGKKSKLEFSVYPAPQVSTAVVEPYNSILTTHTTLEHSDCAFMVDNEAIYDICRRNLDIERPTYTNLNRLIAQVVSSITASLRFDGSLNVDLTEFQTNLVPYPRIHFPLVTYAPVISSEKAYHEQLTVAEITYSCFEPNNQMVKCDPRHGKYMACCLLYRGDVVPKDVNAAIATIKTKRTIQFVDWCPTGFKVGINYQPPTVVPGGDLAKVQRAVCMLSNTTAIAEAWARLDHKFDLMYAKRAFVHWY

SEQ ID NO: 14439 - protein, 621 aa, Triticum aestivum
MWRSRVSRGLREAKAAAAAASRRFSTTSSYTVVDHTYDAVVVGAGGAGLRAAIGLSEHGFNTACITKLFPTRSHTVAAQGGINAALGNMSEDDWRWHMYDTVKGSDWLGDQDAIQYMCREAPKAVIELENYGLPFSRTEDGKIYQRAFGGQSLDFGKGGQAYRCACAADRTGHAMLHTLYGQAMKHNTQFFVEYFALDLIMDKEGTCQGIIALNMEDGTLHRFRSTNTILATGGYGRAYFSATSAHTCTGDGNAMVARAGLPLQDLEFVQFHPTGIYGAGCLITEGSRGEGGILRNSEGERFMERYAPTAKDLASRDVVSRSMTMEIREGRGVGPMKDHLYLHLNHLPPEVLKERLPGISETAAIFAGVDVTKEPIPVLPTVHYNMGGIPTNYHGQVVDIKGDNPDTIIPGLMAAGEAACASVHGANRLGANSLLDIVVFGRACANRVAEISKPGETQKPLEKDAGEKTIAWLDKLRNANGSLPTSKIRLNMQRIMQNNAAVFRTQETLTEGCELISEAQKSFHDVKLSDRSLIWNSDLIETIELENLLINACITMHSAEARQESRGAHAREDFKTRDDDKWMKHSLGYWEDEKVRLEYRPVHMNTLDDEVETFPPKARVY

SEQ ID NO: 14440 - protein, 664 aa, Photorhabdus luminescens
MTTRKTLANAIRFLSMDAVQKAKSGHPGAPMGMADIAEVLWRDYLNHNPTDPHWVDRDRFVLSNGHGSMLIYSLLHLTGYDVSVDDLKNFRQLHSKTPGHPEYGYTPGVETTTGPLGQGIANAVGFAIAERTLAAQFNRPGHEIVNHNTYAFMGDGCMMEGISHEVCSLAGTLKLGKLIAFYDDNGISIDGHVEGWFTDDTASRFEAYGWHVIRGIDGHNAASVKAAIEEARKVADKPSLLMCKTVIGFGAPTKAGTHDSHGAPLGDAEIAATREALDWNYPAFEIPADIYAEWDAKEAGNVKQAAWNEKFAAYEKAYPELAAEFKRRTSGELPADWEAESKAFIEQLQKNPANIASRKASQNALEAFGKVLPEFMGGSADLAPSNLTMWSGSKPLNEDLAGNYIHYGVREFGMSAIMNGIALHGGFVPYGATFLMFVEYARNAVRMAALMKIRSIFVYTHDSIGLGEDGPTHQPVEQLASLRVTPNLSTWRPCDQVESAVAWKYAIERKTGPSALIFSRQNLAQQERTAEQLANIEKGAYILKDCQGQPELILIATGSEIELAVSAYNQLTEEGRQVRVVSMPSTDAFDKQDAAYREAVLPAVVSARVAIEAGIVDYWFKYVGINGAIVGMDTFGESAPADQLFKAFGFTVENVVAKAKALLK

SEQ ID NO: 14441 - protein, 343 aa, Solibacter usitatus Ellin6076
MLVAELIAQRQFRFTEIPIEDPGPGEVQVRVNAVGICGSDLHSYAEGAIGDTPCEYPMVLGHEPAGTVVKTGTGVGGWSRGDRAALEPALYCYHCEFCRSGRHNICANIRFLSNPGTPGFFREFVNLPVSNLLAIPPELSLELATIVEPLAVALHSLKFAAIQPRETVAVFGAGPIGLLTIACLKDAGAGRIWVVEPVSHRRELALRMGAAAALDPTHLDAARQILSDTARRGVDCAIDCAAREDTTNAAIRAARNGGRVVLTGIHSAAFVPFEVSPMRRKELAIFNVRRSCHESHEALSMLTSQMSSFAPLVTHTRPLHALPDAFTLTEHYADGVAKMVVVP

SEQ ID NO: 14442 - protein, 80 aa, Brassica napus
MATNRKTIVWFRRDLRIEDNPALAAAAREGSVFPVFIWCPEEEGQFHPGRASRWWMKQSLAHLNQSLKSLGSHLTFIKYT

SEQ ID NO: 14443 - protein, 197 aa, Medicago sativa subsp. X varia
MSASRFIKCVTVGDGAVGKTCLLISYTSNTFPTDYVPTVFDNFSANVVVNGSTVNLGLWDTAGQEDYNRLRPLSYRGADVFILAFSLISKASYENVSKKWIRELKHYAPGVPIILVGTKLDLRDDKQFFVDHPGAVPITTAQGEELRKLINAPAYIECSSKSQQNVKAVFDAAIRVVLQPPKQKKKKSKAQKACSIL

SEQ ID NO: 14444 - protein, 613 aa, Shewanella sp. MR-4
MNSSNHKSSQTVLPHTPVESLASPPSKVQDRAVLPWIWQFLKPYRLRVVAAIVFLLIGSLAWLSLGQGVRLMVDEGFIKDNAQRLNEIILLVLLITAVSGTAVFCRFYLMTWLGERVSADIRLTVYNQLLKLSPAFYAKVRTGEVISRFTADSTLLQTVVGSSLSMALRSGVTVIGGLAMMGITSVKMTLLVLLAVPLVLGPVGFFGRKVRTLARESQDRVADLGAYVDETLHEIHTVQAYGHEDKDRSLFNSRVEDVMTAASGRIRYRAMLISSVMFLSIAAIASVTWVGAHDVMSGKMTGGELSAFMFYAVMVAGAVATISEVVGEIQRASGAAERLIELAETEVDIPAPLVPKTLPAKVRGELQLQQLSFHYPEQTQLVLSDLELMITAGERVALVGPSGAGKSTLFQLLQRFYVPSSGSIHLDGIDIAELSPKDLRAQFALVPQDSVIFATSVLENVRYGRVDASEQEVIDACIAARVHEFISEFSEGYQTYLGERGVRLSGGQKQRIAIARAILADRPILLLDEATSALDALSEQKVKQALDELMKGKTTLIIAHRLATVINADRIIVFDKGRIVASGKHQTLLQTNALYREFASLQLLTDDVSALSE

SEQ ID NO: 14445 - protein, 197 aa, Medicago sativa subsp. X varia
MSASRFIKCVTVGDGAVGKTCLLISYTSNTFPTDYVPTVFDNFSANVVVNGSIVNLGLWDTAGQEDYNRLRPLSYRGADVFILAFSLISKASYENVSKKWIPELKHYAPGVPIILVGTKLDLRDDQQFCIDHPGAVPITTAQGEELRKLINAPAYIECSSKSQENVKAVFDAAIRVVLQPPKQKKKKNKAQKACSIL

SEQ ID NO: 14446 - protein, 197 aa, Medicago sativa subsp. X varia
MSGSRFIKCVTVGDGAVGKTCLLISYTSNTFPTDYVPTVFDNFSANVVVDGSTINLGLWDTAGQEDYNRLRPLSYRGADVFLLAFSLISKASYENIAKKWIPELRHYAPGVPIILVGTKLDLRDDSQFFQDHPGAAPITTAQGEELKKLIGAPIYIECYSKTQKNVKAVFDSAIKVVLQPPKQKKTKRKGQKACSIL

SEQ ID NO: 14447 - protein, 548 aa, Oryza sativa (japonica cultivar-group)
MAAATSTSSTALAHPKTLNPAAAKVSSPQVIGATMPSLDFETSVFKKEKVSLAGHDEYIVRGGRNLFPLLPEAFKGIKQIGVIGWGSQGPAQAQNLRDSLAEAKSDIVVKIGLRKGSKSFEEARAAGFTEESGTLGDIWETISSSDLLLLLISDAAQADNYEEIFSHMKPNSILGLSHGFLLGHLQSVGLDFPKNISVVAVCPKGMGPSVRRLYVQGKEVNGAGINSSFAVHQDVDGRATDVALGWSVALGSPFTFATTLEQEYRSDIFGERGILLGAVHGIVEALFRRYTEHGLDEDSAYKNTVECITGIISKTISKKGMLEVYNSLTEEGKKQFIEAYSAAYYPCMDILYECYEDVSSGSEIRSVVLAGRRFYEKEGLPAFPMGNIDQTRMWKVGERVRSTRPAGDLGPLHPFTAGVYVALMMAQIEVLRKKGHSYSEIINESLIESVDSLNPFMHARGVAFMVDNCSTTARLGSRKWAPRFDYILTQQAFVTVDKNAPVNQDLISNFFSDPVHSAIEVCAQLRPTVDISVPADADFVRPELRQSS

SEQ ID NO: 14448 - protein, 282 aa, Pseudomonas syringae pv. phaseolicola 1448A
MTATTLSAPSTSLAQRAHNIRRHALRMGQVQGQGYVGQALGAADLLAVSYFHALNYRPEDPEWEQRDRFYLSIGHYAIALYAALIEADIIPLDELETYGSDDSRLPMSGMATYTPGMEITGGSLGHGLGIAVGACLGLKRKNSRSFVYNLLSDGELNEGSTWEAAMSASHWKLDNLIAIVDVNNQQADGHSSEVLAFEPIVDRWQAFGWFTQRVDGNDLNALVAAFDAARQHAGAQPRVIICDTKMGKGVAFLETREKTHFIRVDEHEWDVALNNLDEGKTV

SEQ ID NO: 14449 - protein, 82 aa, Triticum aestivum
MAPSRRMAASALLLLVLLVATEIGATRTKVAEARDCLSQSHKFKGACLSSSNCAGVCRTENFPDGECHTHNFARKCFCKRAC

SEQ ID NO: 14450 - protein, 644 aa, Cryptococcus neoformans var. grubii
MPTDCDESTGPADQISWRPIGHTSRQLILYHPASHAVCVRPDCLPNELWRPANETSVACHPVGYDVGSVTRRQYCPSCSQPLNDCLPHAFPSPQNNPNYFSTLELVHSNASRSFPAQSETCRPQTTSIEGDSDIESCLPTKGYYARFFKEVKQLGMGAEGSVYLAVHHIDGDVLGTYAVKKVAVGHSKSYLHHKLREVKLLEALRHPNIIAYHHAWIDMTRFSELAPPVPSLHVLMMYASGGNLDRYLLARLHVHPPGTELAAEDIGDFESFNELPKAERIKAFKRRKQRIKMRPNDASRSTGSEGLKNARHREAGVENRGVLLLGIDEILALLGDVVEGLSFLHANAILHLDLKCSNVLLHLEEGKIIPRALISDFGTSEEMLRGQRERTGHTGTLEYMAPETLVFDSEGRYRPSDSHVDMWSIGMILYKMLFLRSPYKDTENYSVLRDEILSYPGFVPDDAVKETLERRNIPTKLVELLMQLLNVSPEKRPSAEKIRMVLLNMKGHPENTKSRSATLGRSKMYYSQNPYSLESNPQSILDSKSSARTTRLLSALPMMNDESLPESLRCMTRLTKCQITRIVLLFIKIISIQRSITGVDLPPAVAAIMIALAVTESAGGYQESGIWSLFSLVVHCMLLICFAR

SEQ ID NO: 14451 - protein, 349 aa, Prunus persica
LVASHAALPPQLYWNSVLPNTQMPKSISELLQPDFAEEKGTTVGVGKGGVNVQAGKGKPGGGTNVNVGGKGGGVGVTTGKPGGGTNVGVGKGGVSVNTGHKGKPVYVGVKPGPNPFNYVYAATETQLHGNRNAAIFFLEKDIRPGTSMTLTFSGNSNTAAFVPRKTADSIPFSSNKLPEIFSQFSVKPESVEADIIKGTIEECESSGIRGEEKYCATSLESMVDFSTSKLGGNIQAISTEAEKGATLQKYTITPGVKKLAAGKSVVCHKQTYPYAVFYCHATKTTRAYVVPLKGADGLEAKAVAVCHTDTSEWNPKHLAFQVLKVKPGTVPVCHFLPKDHIVWVPKKST

SEQ ID NO: 14452 - protein, 247 aa, Burkholderia sp. 383
MNTTSPRGPAPQRRTAMLRRIGAIAIAAAAVFGYQRIVNSAEPMRTVPAPTLDETPGTSHDETAVLAGGCFWGVQGVFEHVKGVKQVTAGYAGGASETAHYALVGSGLTGHAESVRIVYDPTQITYGRLLQVFFSVAHDPTELNRQGPDEGSQYRSAIFPTTAQQRAVATAYIAQLGTAHVFPAPVVTRVEDYKGFYPAEAYHQNYLELHPDAPYIAYNDMPKITGLKQHFPALYRTDAVLWRDARS

SEQ ID NO: 14453 - protein, 562 aa, Shewanella sp. ANA-3
MDDNKRPLYLPFAGPAILEAPLINKGSAFSEEERIFFNLEGLVPYAIETIEEQASRAYDQFRSFNNDLDKHIYLRNIQDTNETLFYRLVQNHISEMMPIIYTPTVGLACERFSKNYRRNRGLFISYPNKDRIDDILNNSTRQKVKIIVVTDGERILGLGDQGIGGMGIPIGKLSLYTSCGGISPAYTLPITLDVGTDNPQLLEDPMYMGWRHPRIGGEEYAEFIEAFMQAVHVRWPDTLIQFEDFAQKNAMPILERYKDRYCCFNDDIQGTAAVTVGSLLAACKAAGTELNKQRIAFLGAGSAGCGIAEAIVAQMVSEGISDEQARSQVCMVDRWGLLLDNMPNLLPFQQKLAQKCADICNWNNFSDNISLLDVVNNAKPTVLIGVSGAPGLFTEEIVRAMHSHCERPIIFPLSNPTSRVEATPKDILHWTSGQALVATGSPFEPVVVDGETYEIAQCNNSFIFPGIGLGVLASGARHVSDAMLMASSRALAECSPLAINGSGPLLPKLEDIHSVSKHIAFAVGKVAIEQGLSLPASDELLMQSIEDNFWKPEYRRYKRTSF

SEQ ID NO: 14454 - protein, 176 aa, Burkholderia sp. 383
MPTRRHLLFAGATGLAVLATLSSVGRRALVGRAFAAPPATPQTAAPFEVTLSDAEWHRRLTPAQYSVLREAGTERPYTSPLNDEHRQGTFACAGCALSLFSSATKFDSHTGWPSFWKPLDHAVATTTDASFGMIRTEVHCRRCGGHLGHVFDDGPQPTGLRYCMNGLALTFHPAAA

SEQ ID NO: 14455 - protein, 273 aa, Zea mays
MADDEQQQAAAYACVPPGFRFHPTEEELVGYYLARKVASQKIDDLDIIREVDLYRIEPWDLQVQERCGYYGGGQDQEEPTEYYFFSYKDRKYPSGTRTNRATAAGFWKATGRDKPVLSSSSSGVVIGMRKTLVFYRGRAPNGRKTDWIIHEYRLQSNEHAPAQEEGWVVCRAFHKPMPNHHHHMIRHAAASCCYYYPAPAAAPPAAGLPPHNGHLHLHSPSAESAVDWNLLSSLLPPGQLDFVHHTLTPPPASSPSSCSTTTTTTTTRNNNNE

SEQ ID NO: 14456 - protein, 447 aa, Bradyrhizobium sp. BTAi1
MLDKSPRPAVTVPNDLAAHWMPFTANRAFKKNPRLLAGAKDMHYITIDGRKIIDAAAGMWCCNAGHGRTEIAEAIGKQAAALDYAPPFQFGIPQAFELANRIADLAPAGLDHVFFCNSGSEAADTALKMALAYHQINGQGSRTRLIGRVRGYHGVGFGGTSVGGIVNNRKMFGTLLTGVDHIPATYDREKQAFTKGEPEYGAHFAEELENLVALHGANTIAAVIVEPMAGSTGVIPAPKGYLKRLREITQKHGILLIFDEVITGFGRLGHAFAAERYGVTPDLLTFAKGVTNGAAPMGGVVVRDTIHDAFMSGPEHMVEFTHGYTYSAHPIACAAGLATLDIYRDHKLFEHAKAIEPKWADAVMSLKGLPNVLDIRTVGLTAGIDLAPLPDAAGKRGYSAMEQAFHNTDLMLRIAGDTLALTPPLIISEDQIGEIVDKVGKVIKAVA

SEQ ID NO: 14457 - protein, 879 aa, Haemophilus influenzae Rd KW20
MTQEYSTLRNNISMLGRFLGETINDAQGEDILELIENIRKLSRNSRAGDDKARQALLDTLGSISNENIIPVARAFSQFLNLTNIAEQYQTISREHSLAQSSSQSLSELFKRLKEQNASVEEVHKTVEKLLIELVLTAHPTETTRRSLIHKHIEINKCLSKLEHHDLTEKERNIIERLLLRLIAEAWHTNEIRTVRPTPFDEAKWGFAMLENSLWQAVPEFLRQLNETAREFLGYDLSVGLKPVRISSWMGGDRDGNPFVTAQITKKVLYFARWKAADLFLQDISKLADELSMMKCSDEFRDKYGEHLEPYRFVVKNLRNQLTATLAYFDDHLSNRTPRVSESEIILEDNQLWEPLYDCYQSLIQCGMRIIANGSLLNILHRISCFGVTLSQMDIRQESTRHTDAIAEITRYIGLGDYSQWMEDDKQAFLIRELSSRRPLIPQNWTPSPETKEILDTCKVIAQQKQGVIACYVISMARSASDVLAVHLLLKESGVPYHIPVVPLFETLEDLDAAEKVMTQLFNVGWYRGVINNRQMVMIGYSDSAKDAGMMAASWAQYRAQEALVNLTEKLGIELTLFHGRGGTIGRGGAPAHAALLSQPPRSLKNGLRVTEQGEMIRFKLGLPAVAVETFDLYASAILEANLLPPPEPKPEWRTIMDELSTISCDIYRGVVRGDKDFVPYFRSATPEQELSKLPLGSRPAKRNPNGGVESLRAIPWIFAWMQNRLMLPAWLGAGAAIRQVIEQGKGDIIHKMCENWPFFSTRIGMLEMVFSKSDTWLSQQYDQRLVKKELWYLGENLRKQLEDDIQTVLSLSHQSELMSDLPWIADSIALRNIYTDPLNLLQVELLHRFRENPEQVNPDVEQALMITITGIAAGMRNTG

SEQ ID NO: 14458 - protein, 348 aa, Glycine max
MGRPPCCDKVGIKKGPWTPEEDIILVSYIQEHGPGNWRSVPTNTGLSRCSKSCRLRWTNYLRPGIKRGNFTPHEEGMIIHLQALLGNKWAAIASYLPQRTDNDIKNYWNTHLKKKLKKFQAALDPHSASDSTASGQFLPKSFSDRRSLDISSSNNNHGSSIRLSHQSQSSSTTYASSTENISRLLEGWMRSSPKPLKGSSSQDDEDIQLQGINDDDKNNNNFESTTKLVNLHHLQHKVRNKDEHQEGGGGGVDNMVSHEEFDSILSFENLNNAAWDKSTCDSMPEKSSEAAAEYSVDHHHDIAAHERNNIRQKSENSGAPPLSFLEKWLLDESVGHQVEEMMELSPMF

SEQ ID NO: 14459 - protein, 357 aa, Zea mays
CSLRQLLEYGYFHADPHPGNILATLEGKLAFLDFGMMSETPEDARVAIIGHVVHLVNRDYEAMARDYYALDFLEPDVDVSPIVPALKNFFDDALNATVSELNFKTIVDGLGAVLYQYPFNVPAYYALILRSLTVLEGLALYADPDFKVLAASYPYFAKRLLTDPNPYLRDALVELLFKDGRFRQVPAHIWNRLENLLVQGRQDREFAAKDALQPVLKLLLGPDGEELRVLVVKEAVRVTEAITIGTLIDSYNAAPAFLKPLISSGNPAGPFKFSEAEQEQMLELRDQVFRVWGLLRSSNNFDPSLLQPIVQKSGCGNQVLQEPEARVLGSRVAGGVTQRLAARLLQQLLRIPSPGSS

SEQ ID NO: 14460 - protein, 409 aa, Chromobacterium violaceum ATCC 12472
MDKRRVVITGIGVVSPYGAGLQRFWQALAGGESARRPIQGFDASVYRSAQGGEAPAELLADAGARARCGDPGEDSAYFLALAAAEALADAGLGAAFSDEDRVGCVLGTLCAGMRNMREYGAAYEAGRPSPVAAETIPAHYQLDFLARRHNLTGPSSLVSTACSSTTDALGYAFDLIRGGECDSCLSGGGDVLAEMIHAAFNGLYSITTGEPRPFDSERDGFFIGEGAGLFHLETLESARARGARIHAEILGYGLSNTGHHLTATSEDGAGEALAIRRALDDAGLAPADIDYINCHGTGTRHNDASEIRAINRVFGDAAERLHISSNKASIGHCMGAAGALEAAATVLALEKGLIPPTLHTRGDEAELRSRLVGAEARPAALRRALSQSFGFGGACSCIVFGHYGEDGHA

SEQ ID NO: 14461 - protein, 554 aa, Salmonella typhimurium LT2
MCSIFGVFDIKTDAAELRKKALELSRLMRHRGPDWSGIYACDNAILAHERLSIVDVNAGAQPLYNARKTHVLAVNGEIYNHQTLRAEYGDRYAFQTGSDCEVILALYQEKGPDFLDDLQGMFAFALYDSEKDAYLIGRDHIGIIPLYMGYDEFGNFYVASEMKALTPVCRTIKEFPAGSYLWSKDGEIRQYYQRDWFEFDAVKDNVTDKNALRQALEESVKSHLMSDVPYGVLLSGGLDSSVISAITKKFAARRVEDQERSEAWWPQLHSFAVGLEGSPDLKAAQEVANHLGTVHHEIHFTVQEGLDAIRDVIYHIETYDVTTIRASTPMYLMSRKIKAMGIKMVLSGEGSDEVFGGYLYFHKAPNAKELHEETVRKLQALHMYDCARANKAMSAWGVEARVPFLDKKFLDVAMRINPQDKMCGNGKMEKHVLRECFESYLPASVAWRQKEQFSDGVGYSWIDTLKEVAAKQISDQQLETARFRFPYNTPSSKEAYLYREIFEELFPVPSAAECVPGGPSVACSSAKAIEWDEAFKTMDDPSGRAVGVHQSAYQ

SEQ ID NO: 14462 - protein, 300 aa, Linum usitatissimum
MFKVPEHQVAGHQAINGLLGPLVDDSGRFYKPLQGDERGATEMAFYTSFSAHKTIPQHVRRFFPAFHGTQSIEASDGSGLHPHLILEDLTSTRLHPCVMDIKIGSRTWYPEASQAYIEKCLKKDVESSSPFLGFRISGLQVYGNDKESSEVVLKPERKLLQNLTADEVRLVLKRFVSSNPKSDQPDCSFAAVVYGGSNGILAQLLELKAWFEDQTIYHFNSCSVLMLYEKEKTKMVNGGEESLGCAAVKLIDFAHVTEGNGVIDHNFLGGLCSLIKFISEILTGPDENSPKSCLQDGAAE

SEQ ID NO: 14463 - protein, 388 aa, Mesembryanthemum crystallinum
MFATLRQPTQSHSLITLSLQKPSIPKTEQLSFPNLPSSKHEEISHLSVTKPLHVASLLKPRKHLVECNAYEANRSQPLDINIELPSVKSETAKRVKIGIYFATWWALNVVFNIYNKKVLNAFPYPWLTSTLSLAAGSLMMLISWASRVAHPPKTDLQFWKSLLPVAVAHTIGHVAATVSMSKVAVSFTHIIKSGEPAFTVLVSRFLLGDTFPMPVYMSLIPIIGGCALAAVTELNFNMIGFMGAMISNVAFVFRNIFSKKGMNGQSVSGMNYYACLSMLSLLLLTPFAIAVEGPQVWAAGWQKAVSQIGPNFVWWVAAQSIFYHLYNQVSYMSLDQISPLTFSVGNTMKRISVIVSSIIIFHTPIQPVNALGAAIAILGTFIYSQAKV

SEQ ID NO: 14464 - protein, 431 aa, Arabidopsis thaliana
ALHKIQVAFGGVEPASKPTRIADHNSEKTAPLKALALPGPKGSKELRKSATEKALVVGPTLPPRDLNNTGNPGKSTAILPAPGSFSERNLSTAALMERMPSRWPRPEWHAPWKNYRVLQGHLGWVRSVAFDPSNEWFCTGSADRTIKIWDVATGVLKLTLTGHIGQVRGLAVSNRHTYMFSAGDDKQVKCWDLEQNKVIRSYHGHLHGVYCLALHPTLDVVLTGGRDSVCRVWDIRTKMQIFVLPHDSDVFSVLARPTDPQVITGSHDSTIKFWDLRYGKSMATITNHKKTVRAMALHPKENDFVSASADNIKKFSLPKGEFCHNMLSLQRDIINAVAVNEDGVMVTGGDKGGLWFWDWKSGHNFQRAETIVQPGSLESEAGIYAACYDQTGSRLVTCEGDKTIKMWKEDEDATPETHPLNFKPPKEIRRF

SEQ ID NO: 14465 - protein, 481 aa, Zymomonas mobilis subsp. mobilis ZM4
MTRPNLQTESGRIVGDNQNSITAGKRGPTLLQDVYLIEKLAHFNRERTPERVVHAKGSGAFGELTVTADITRYTKAKIFSEIGKKTPMFARFSTVGGERGSADTVRDPRGFALKFYTEEGNWDLVGNNTPVFFIRDAIKFPDFIHTQKRNPQTNLKDPKMVWDFFSQSPESLHQVLILFSDRGIPLSHRFMHGFSSHTYSMINAAGDIHYVKWHFLSQQGIKNLKAEEAEKLAGSNPDHYQEDLFSSIEKGDFPKWKVAIQIMTPEQARNQRLNPFDVTKVWYHKEFPLMEVGFFELNKNPENYFQDVEQAAFSPANTIPGLYFSPDKMLQGRLFAYADTQRYRLGINATQIPVNRPRCSVHGYYRDGTMRVDGNGGDAVNYEPNSDPSSPFENASYKEPPIAIDGEGGHYDRYEDSGNDNYEQPGKLYRLMKEDEKARLVSNLVASLGAPSVPNAIKEKQIELFRRCDADLGKRLADSLL

SEQ ID NO: 14466 - protein, 202 aa, Arabidopsis thaliana
MNILNKLGIGSSRQTNMDPSPIAQVIDDEAPAPGNQFTQFGAGCFWSVELAYQRVPGVTQTEVGYSQGITHDPSYKDVCSGTTNHAEIVRVQYDPKECSYQSLLDLFWSKHDPTTLNRQGNDVGTQYRSGIYFYNPEQEKLARESLERHQQQVDRKVVTEILPAKKFYRAEEHHQQYLSKGGRFGLKQSTEKGCNDPIRCYG

SEQ ID NO: 14467 - protein, 304 aa, Zea mays
  misc_feature (71)..(71): Xaa can be any naturally occurring amino acid
  misc_feature (85)..(85): Xaa can be any naturally occurring amino acid
  unsure (1)..(304): unsure at all Xaa locations
MERPAPVRKSHTSTADLLVWPEGAPQELPAGSTPPSNRRPHQPSEALRKVVFGGQVTEAEAESLNKSSGLXGSGKGMASSVTVMXLWFSPSWNCHLTNYVGVLQTDRSHQNAPRKRSWSVYVSASSAKPCSAPKWKEMTGSGIFAAGGEGEEDESANVSATSVRTAPKNYQAISTISHISFAEEESISPKKPTSIAEVAKQRELSGTLLSEDDSKMKRQISDLKSKELSGHDIFAPPEDPRPRNSENGSTSQTPGKNAHVSNFKFGEADEDSAVKTAKKIPTKKFTDLAGNIFKGDDEAPGTAE

SEQ ID NO: 14468 - protein, 274 aa, Arabidopsis thaliana; identical to SEQ ID NO: 814

SEQ ID NO: 14469 - protein, 419 aa, Streptomyces griseoflavus
MSRRVFITGVGVVAPGAVGRDPFWELLTQGRTATRRLSLCDPEPFRSQVAAEADFDAEAAGLSERQSAELDRAAQFALVAAREAVEDAAWSETCPPERAGVIVGSAVGATTKLEEVYRQLSRDGSLWDVAPDSPAELYSYFVPSSFASGIAHDLGVTGQSGVVSTGCTSGIDSVGNAWELIQSGILDSAVCGATDAPISPITVACFDTIKATSTYNDTPESASRPFDATRGGFVLGEGSAMFVLESEESVHRRGARVYGEIRGYASRCNAYHMTGLKADGRELAEAVVSALGQAGVDPGRLDYVNAHGSGTKQNDRHETAALKSSLGPAAHDVPISSIKSMIGHSLGAIGSLEIAACALALRDDVIPPTANLTRPDPELDLDYVPVHARKQPTNSVLTTGSGFGGFQSAMVLTDPEHHS

SEQ ID NO: 14470 - protein, 483 aa, Bacillus subtilis
MSSNKLTTSWGAPVGDNQNSMTAGSRGPTLIQDVHLLEKLAHFNRERVPERVVHAKGAGAHGYFEVTNDVTKYTKAAFLSEVGKRTPLFIRFSTVAGELGSADTVRDPRGFAVKFYTEEGNYDIVGNNTPVFFIRDAIKFPDFIHTQKRDPKTHLKNPTAVWDFWSLSPESLHQVTILMSDRGIPATLRHMHGFGSHTFKWTNAEPEGVWIKYHFKTEQGVKNLDVNTAAKIAGENPDYHTEDLFNAIENGDYPAWKLYVQIMPLEDANTYRFDPFDVTKVWSQKDYPLIEVGRMVLDRNPENYFAEVEQATFSPGTLVPGIDVSPDKMLQGRLFAYHDAHRYRVGANHQALPINRARNKVNNYQRDGQMRFDDNGGGSVYYEPNSFGGPKESPEDKQAAYPVQGIADSVSYDHYDHYTQAGDLYRLMSEDERTRLVENIVNAMKPVEKEEIKLRQIEHFYKADPEYGKRVAEGLGLPIKKDS

SEQ ID NO: 14471 - protein, 182 aa, Arabidopsis thaliana
ERCESLCSDELISSSDAFYLKTRKPYTITKQREKWTEAEHEKFVEALKLYGRAWRRIEEHVGTKTAVQIRSHAQKFFTKVARDFGVSSESIEIPPPRPKRKPMHPYPRKLVIPDAKEMVYAELTGSKLIQDEDNRSPTSVLSAHGSDGLGSIGSNSPNSSSAELSSHTEESLSLEAETKQSP

SEQ ID NO: 14472 - protein, 183 aa, Amaranthus hypochondriacus
MASSMLSNAAMATTAATAGAQASMVAPFNGLKSFATFPITKKSSNDFSSLPSNGGRVQCMQVWPPVGKKKFETLSYLPPLSDAQLLAQVQYLLNKGWIPCIEFELEHPFVYRENHRSPGYQDGRYWTMWKLPMYGCTDPAQVLNEVEEAKKAYPSAFIRIIGFDNKRQVQCVSFIAYKPAGGL

SEQ ID NO: 14473 - protein, 707 aa, Ashbya gossypii ATCC 10895
MSILLRKAFTDARDQGRSALVTFMTAGYPSAEATVPVLKGFQDGGADVIELGLPFSDPLADGPTIQTANTEALAGGATMKGVLALLREARAGGVTVPIILMGYYNPILSYGEEAFIRDAAAAGANGFIIVDLPPQDAMKLRGFVQQHGLSLVPLVVPATTDERLAVLAQVADSFIYVVSRMGTTGASTSVPAHLNDLLKRVRKYSGETPLAVGFGVATREQFCTIGSAADGVVIGSKVVSLVGDAPEGEHYNTVKTYCEYILAGEKHTLLSPEEFATLHKKYTTEPASIKEIGDIFGETRKFAPMFGDFGGQYIPEALHACVQELEHAFEAAVEDPTFWEEFRGLYTYIGRPSSFHKADRLSEYCGGAQIWLKREDLNHTGSHKINNSLAQVLLAKRLGKSKIIAETGAGQHGVATATACAKFGLDCTVFMGAEDVRRQALNVFRMRLLGATVIPVTNGTRTLRDATTEAFRYWVGHLESTHYVVGSAIGPHPYPTLVRTFQSVIGRETKEQFAALNDGKLPDAVVACVGGGSNSTGMFSAFEHDTSVKLLGVEAGGDGLDTEYHSATLTAGRPGVFHGVKTYVLQDSDGQIHDTHSVSAGLDYPGVGPELAAWKASGRVEFIAATDAQALEGFKLLSQLEGVIPALESSHAVYGAVQLAKTMRPDQHIVINISGRGDKDVQTVAEVLPKLGPQIGWDLRFEPDTAA

SEQ ID NO: 14474 - protein, 281 aa, Escherichia coli
MSQTSTLKGQCIAEFLGTGLLIFFGVGCVAALKVAGASFGQWEISVIWGLGVAMAIYLTAGVSGAHLNPAVTIALWLFACFDKRKVIPFIVSQVAGAFCAAALVYGLYYNLFFDFEQTHHIVRGSVESVDLAGTFSTYPNPHINFVQAFAVEMVITAILMGLILALTVDGNGVPRGPLAPLLIGLLIAVIGASMGPLTGFAMNPARDFGPKVFAWLAGWGNVAFTGGRDIPYFLVPLFGPIVGAIVGAFAYRKLIGRHLPCDICVVEEKETTTPSEQKASL

SEQ ID NO: 14475 - protein, 400 aa, Dehalococcoides sp. CBDB1
MKAVILAAGEGSRMRPLTFTRPKVMLPIAGKPILEHLLMEVSAAGIKEFVLVVGYRDEQVRSYFADGAKWGVKISYCQQTRQLGTAHALKQLENQLEGNFLVMNGDILAESADISALAAGSETTLSVLEVSDPSSLGVLETDGDRVRCIHEKSANPPANLANAGLYLFTPRIFKAISDTPLSPRGEYEITSSIQLLIDNGTEVGYRRLVYWQDVSYPWDLLDVNASMLKNLAPCVYGTVEENVVIKGTVEIGEGSLVRSGAYIEGPVLIGKNCDIGPNCYIRPSTSIGDNCRVGASVEIKNSIIMDNTKIPHLNYVGDSVIGQNCNLGAGTKLANLRFDGADIIAGGVNTRRRKLGAVLGDGVETGINVSLNPGVLIGSGSRIGPGAVVSGLVEPNSYIG

SEQ ID NO: 14476 - protein, 285 aa, Linum usitatissimum
  misc_feature (58)..(58): Xaa can be any naturally occurring amino acid
  unsure (1)..(285): unsure at all Xaa locations
MLKVPEHQVAGHQDINGLLGPLVDDSGRFYKPLQGDERGATEMAFYTSFSTNKTIPQXVRRFFQAFQGTQSIEASDGSGLHPHLILEDLTSTRLHLCVMDIKIGSRTWYPEASQAYIEKCLKKDVESSNPLLGFRISGLQVYGNGKESSEVVLKPERKLLLNLNADEVRLVLKRFVSSNLKSDQPDCSFAAVVSSGSNGILAQLLELKAWFEDQTIYHFNSCSVLMLYEKEKTKMVNGGEESLGGAAVKLIDFAHVTEGNGVIDHNFLGGLCSLIKFISENQIML

SEQ ID NO: 14477 - protein, 319 aa, Symbiobacterium thermophilum IAM 14863
MDEKRLELATFAGGCFWCMVSPFEEQPGIYKVVSGYTGGHKENPTYEEVCSGTTGHFEAVQITFDPDVFPYERLLDLFWQQIDPTDPDGQFYDRGPQYRTAIFYHNEEQRRLAEKSKAELEASGRFDKPIATLILPAGPFYPAEEYHQGYHRKNPFHYQRYRAASGRDDFIRKHWRDPERDAELRRRLTPIQYEVTQLGATERPFTGEYWNHFEEGIYVDVVSGEPLFSSRDKFDAGCGWPSFTRPLVPENIVERLDLSHGMVRTEVRSRGADSHLGHVFPDGPAPTGLRYCINSAALRFIPKEDLEKEGYGEFRKLFE

SEQ ID NO: 14478 - protein, 924 aa, Pisum sativum
MMELRVICIIRLVVACVLCLCIFIRSASSATEGFESIACCADSNYTDPKTNLNYTTDYRWYSDKSNCRQIPEILLSHRSNINFRLFDIDEGKRCYNLPTIKDQVYLIRGTFPFDSVNTSFYVSIGATELGEVTSSRLEDLEIEGVFRAPKDNIDFCLLKEDVNPFISQLELRPLPEEYLHDFSTNVLKLISRNNLCGIEDDIRFPVDQNDRIWKATSTPSYALPLSFNVSNVELNGKVTPPLQVLQTALTHPERLEFVHVGLETDDYEYSVLLYFLELNDTLKAGQRVFDIYLNSEIKKEGFDVLEGGSKYSYTVLNISANGSLNITLVKASGSKFGPLLNAYEILQARPWIDETDQTDLEVIQKMRKELLLQNQDNEALESWSGDPCMLFPWKGVACDGSNGSSVITKLDLSSSNLKGTIPSSVTEMTKLQILNLSHNHFDGYIPSFPPSSLLISVDLSYNDLTGQLPESIISLPHLNSLYFGCNQHMRDDDEAKLNSSLINTDYGRCNAKKPKFGQVFMIGAITSGSILITLAVVILFFCRYRHKSITLEGFGGKTYPMATNIIFSLPSKDDFFIKSVSVKPFTLEYIELATEKYKTLIGEGGFGSVYRGTLDDGQEVAVKVRSATSTQGTREFDNELNLLSAIQHENLVPLLGYCNEYDQQILVYPFMSNGSLLDRLYGEPAKRKILDWPTRLSIALGAARGLAYLHTFPGRSVIHRDVKSSNILLDHSMCAKVADFGFSKYAPQEGDSYVSLEVRGTAGYLDPEYYKTQQLSEKSDVFSFGVVLLEIVSGREPLNIKRPRVEWSLVEWAKPYIRASKVDEIVDPGIKGGYHAEALWRVVEVALQCLEPYSTYRPCMVDIVRELEDALIIENNASEYMKSIDSLGGSNRYSIVMDKRALPSTTSTAESTITTQNVSHPQPR

SEQ ID NO: 14479 - protein, 925 aa, Medicago truncatula
MMELQVIRIFRLVVAFVLCLCIFIRSASSATKGFESIACCADSNYTDPKTTLTYTTDHIWFSDKRSCRQIPEILFSHRSNKNVRKFEIYEGKRCYNLPTVKDQVYLIRGIFPFDSLNSSFYVSIGVTELGELRSSRLEDLEIEGVFRATKDYIDFCLLKEDVNPFISQIELRPLPEEYLHGFGTSVLKLISRNNLGDTNDDIRFPDDQNDRIWKRKETSTPTSALPLSFNVSNVDLKDSVTPPLQVLQTALTHPERLEFVHDGLETDDYEYSVFLHFLELNGTVRAGQRVFDIYLNNEIKKEKFDVLAGGSKNSYTALNISANGSLNITLVKASGSEFGPLLNAYEILQARSWIEETNQKDLEVIQKMREELLLHNQENEALESWSGDPCMIFPWKGITCDDSTGSSIITKLDLSSNNLKGAIPSIVTKMTNLQILNLSHNQFDMLFPSFPPSSLLISLDLSYNDLSGWLPESIISLPHLKSLYFGCNPSMSDEDTTKLNSSLINTDYGRCKAKKPKFGQVFVIGAITSGSLLITLAVGILFFCRYRHKSITLEGFGKTYPMATNIIFSLPSKDDFFIKSVSVKPFTLEYIEQATEQYKTLIGEGGFGSVYRGTLDDGQEVAVKVRSSTSTQGTREFDNELNLLSAIQHENLVPLLGYCNEYDQQILVYPFMSNGSLLDRLYGEASKRKILDWPTRLSIALGAARGLAYLHTFPGRSVIHRDVKSSNILLDQSMCAKVADFGFSKYAPQEGDSYVSLEVRGTAGYLDPEYYKTQQLSEKSDVFSFGVVLLEIVSGREPLNIKRPRIEWSLVEWAKPYIRASKVDEIVDPGIKGGYHAEALWRVVEVALQCLEPYSTYRPCMVDIVRELEDALIIENNASEYMKSIDSLGGSNRYSIVMDKRALPSTTSTAESTITTQTLSHPQPR

SEQ ID NO: 14480 - protein, 662 aa, Chromobacterium violaceum ATCC 12472
MCGIAGALLDRHAHDGDVAEARRMILRQTHRGPDGLAARRVGPALLASSRLAIVDVANGSQPFSDESRAIHAVFNGEIYNHLELRENLSRRGHSLSGGSDGEVIVHLYEEYGTDCFQWLDGQFAIAIFDSRDDSLHLARDRMGICPLHWARLDGALYFSSEIKGLLAVAGMPRRAEPRAMLQLAYFGAVCAPLTPFGGIHQLPAAHRLSFRAGRLEIGRYWSLDFPLAGEHARLSEAQAAEGLAARLERAVASHAQGEFEPTCFLSGGIDSAVIAALLQRRSQASIAAFCAASEHGRMDEGGAAARTAEWLGVDLKRVRIDEAGIADAFPRLIWHGETPVISTEASALMRLAGEAGKRSKIVLTGEGADEAFAGYLAFRQYRQLGALTGRGLSPLRTMVRPWLRGHYGSECLLPGEDRLGVLAEHFGCVPAQAYEWEFYREALTPLFSPELRAMAAAGGCWDGFEFDRGAVRGRHWLDRSLYVSYQVMLPNYLLGAHGDRIYAAHSVEGRYPFLDRALVEYAAALDPALKLRRGREKHILRVAAARWLPDEVAWRPKTRFVMPFGTPFVGPRAAPLYAELLSPGKLAEYGYFDPERVRSLFRALASPPSAGGKARRYLERLALGLGATFVVSAQLWHHLHLADGGSAVSGEAARRSAPATIA

SEQ ID NO: 14481 - protein, 472 aa, Arabidopsis thaliana
MAETDVGSVKGKEKGSGKRWILLIGAIAAVLIAVVVAVFLNTQNSSISEFTGKICNCRQAEQQKYIGIVEDCCCDYETVNRLNTEVLNPLLQDLVKTPFYRYFKVKLWCDCPFWPDDGMCRLRDCSVCECPESEFPEVFKKPLSQYNPVCQEGKPQATVDRTLDTRAFRGWTVTDNPWTSDDETDNDEMTYVNLRLNPERYTGYIGPSARRIWEAIYSENCPKHTSEGSCQEEKILYKLVSGLHSSISVHIASDYLLDEATNLWGQNLTLLYDRVLRYPDRVQNLYFTFLFVLRAVTKAEDYLGEAEYETGNVIEDLKTKSLVKQVVSDPKTKAACPVPFDEAKLWKGQRGPELKQQLEKQFRNISAIMDCVGCEKCRLWGKLQILGLGTALKILFTVNGEDNLRHNLELQRNEVIALMNLLHRLSESVKYVHDMSPAAERIAGGHASSGNSFWQRIVTSIAQSKAVSGKRS

SEQ ID NO: 14482 - protein, 633 aa, Oryza sativa
MDDHNLDYKGSGALEELEMLTVNAKEAQELILTKILERNQATEYLSKFMNGSTNISAFKRHVPVVTYDKVHPYILRIATGEESSILCGEYILELLRRLLLMTVINPEAQTELRLGKIVYIYFLECARLEMTGHTKLLAFSGTSRGEPRLMPSILKDLDRRTYLYSLIMPIMNKYISGLGEGKAMYLLFVKAETLTDSGIPVRSVLTSYYKSPHFLHRKHDLYNNYTSPDEVILCPDSQQSMYCQLLCGLVERQHVLRIGAVFASAFLRSISFLEQHWRDLVNDIRIGQLNSSITSPACRLAMLNFLALPNPELADQVEAICSCGSWKGILGRLWPNVKYIEAVLTGTMAQYIPMLEFYGGGAIPFVCTMYASSESYFGVNLSPLCSPADVSYTILPNMAYFEFIPLEDGLRLTDHEEVIENDKLVSLVDVKVGCYYELVVTTFSGLYRYRVGDVLQVTGFYNRAPQFKFICRRNVILSIDSDKTNEEDLHNSVTTAKKILENQNYLLLEYTSYTDISTVPGHYVLFWEIKSTHDERPAPLDAQLLESCCAAVEESLDYVYRRCRAHDRSIGPLEIRLVEAGAFDALMDLLVSHGSSINQYKTPRCIESSLALKLLNSKVIACFFSPQDPECGM

SEQ ID NO: 14483 - protein, 545 aa, Pseudomonas aeruginosa PAO1
MPDRTALPRAMLAAWVLLLLAACSQGPAPTPPASWGWQDASGERAIAPDEAYPELFQAVQENRLFSDQKHFVDALPLREPARIRADYLRERERPGFDLRAFVGRNFEESGSVETAPPEAGADLASHISDLWPALTRHYEQVPAHSSLLPLPKPYVVPGGRFREVYYWDSYFTMLGLAESGQHQRVRDMLDNFAYLIDTYGHIPNGNRSYYLSRSQPPFFAYMVDLQARREGDAAYRRYLPQLQKEYAYWMEGSAGLRPNEARLHVVKLADGSLLNRYWDNRDTPRQESFLEDRATAARAPQRPAGEVYRDLRAGAESGWDFSSRWLDDGRELASIRTTAIVPVDLNALLYHLERIIAKACASSALKACEQGYGARAEKRRQAIEDHLWHPAGYYADYDWQRRRPIERINAASLFPLFTGLASAERAGRTADSVAAQLLRPGGLATTTRASGQQWDEPNGWAPLQWVAVQGLRAYGRDALAEDIGRRFLAQVQQVYDREGKLVEKYDISGNQGGGGGGEYPLQDGFGWSNGVTLQLLRLYGPGAGR

SEQ ID NO: 14484 - protein, 540 aa, Hyphomicrobium methylovorum
MAHKKTYSQLRSELLARYPVGLTKGGVSIDDIVQLRLQSPYESHLDVARAMASVMRADMAAYDRDTGKFTQSLGCWSGFHAQQMIKAVKRLRGTTKGAYVYLSGWMVAGLRNRWGHLPDQSMHEKTSVVDLIEEIYVSLRQADEVALNDLFNELKDARAKGATNKACEEIISRIDGFESHVVPIIADIDAGFGNEHATYLLAKEMIKAGACCLQIENQVSDAKQCGHQDGKVTVPREDFIEKLRACRLAFEELGVDDGVIVARTDSLGASLTQKIPVSQQAGDFASSYIKWLKTEPITDANPLSEGELAIWQSGNFARPIRMPNGLFSFREGTGRARVIEDCIASLKDGDADLIWIETDTPNVDEIASMVAEIRKQVPDAKLVYNNSPSFNWTLNLRKQVRAQWISEGKIAEADYPDGTALMSAQYDTSELGREADDRLRQFQVDISARAGVFHNLITLPTFHLTAKSTDELSHGYFGEDRMLAYVATVQREEIRRSISAVRHQHEVGSDLGDTFKEMVSGDRALKAGGAHNTMNQFAAE

SEQ ID NO: 14485 - protein, 366 aa, Zea mays
MAGPAPDRAALTVGPGMDMPIMHDSDRYELVRDIGSGNFGVARLMRDRRTSELVAVKYIERGEKIDENVQREIINHRSLKHPNIIRFKEVILTPTHLAIVMEYASGGELFERICKNVRFSEDEARYFFQQLISGVSYCHSMQVCHRDLKLENTLLDGSDAPRLKICDFGYSKSSVLHSQPKSTVGTPAYIAPEVLLKKEYDGKIADVWSCGVTLYVMVVGAYPFEDPEEPKNFRKTIQRILNVQYAIPDNVNISPECRHLISRIFVGDPATRITIPEIRNHSWFLKNLPADLMDDDSMSNQYEEPDQPMQTMDQIMQILTEATIPPACSRSINVLADGLDMDDDMDDLDSDSDLDVDSSGEIVYAM

SEQ ID NO: 14486 - protein, 109 aa, Hyphomicrobium methylovorum
EFNDIMDAIAALDADVISIETSRSQMELLDGFSDFKYPNEIGPGVYDIHSPRCPCVGEMTGLIAKARERLAPEQIWINPDCGLKTRKWDEVLPALKNMVEAAKKMRESA

SEQ ID NO: 14487 - protein, 257 aa, Allium cepa
GVFHIATPMDFESKDPENEMIKPTINGMLDILKSCVKAKVRRVVFTSSGGTVNVEATQKPVYDETCWSDLDFIRSVKMTGWMYFMSKILAEQAAWKYAAENNLDFISIIPPLVVGPFIMPSMPPSLITALSPITRTESHYTIIKQGQYVHLDDLCMSHIFLYENPKANGRYIASACAATIYDIAKMLREEYPEYNVPTKFKDYKEDMGQVQFSSKKLTDLGFEFKYGLKDMYTEAVETCRAKGLLPLSLEHHENGSA

SEQ ID NO: 14488 - protein, 241 aa, Magnaporthe grisea 70-15
MASPDSQPKPKPSSNGATTGDPAIKLGHQQRQKIFTPPNFALLLCLLLSLVNFYHLQKPGRASVIYVQEPSTPIPPTIYKNTAKMSTEQTFIAIKPDGVQRGLVGPIISRFEQRGYKLVAIKLVTPGKAHLEQHYADLKDKPFFAGLVEYQPADMNSGPIAAMVWEGRDAVKTGRTLLGATNPLASAPGTIRGDYAIDVGRNVCHGSDSVENAKKEIALWFKEGEVVSYQASQASWIYEKP

SEQ ID NO: 14489 - protein, 534 aa, Mesembryanthemum crystallinum
MGICASKNKATQPEDNGYTPANGVGSNNQSKPPAQQNYHQQPPQQPVAPPQPASHPPVRMPSPKPAPKVEPNTILGKPFEDVKVYYTLGRELGRGQFGVTYLCTDKKTGQQYACKSISKKKLVTKADKDDMRREIQIMQHMSGQPNIVEFKGAYEDKTSVNLVMELCAGGELFDRIIAKGHYSEKAAATMLRQIVNVVHVCHFMGVMHRDLKPENFLLSSKDENSLLKATDFGLSVFIEEGKVYRDIVGSAYYVAPEVLRRRYGKEIDVWSAGVMLYILLSGVPPFWAETEKGIFDAILQGHIDFESKPWPSISNGAKDLVRKMLTQDPKKRITAAQVLEHPWLRDGEASDKPIDSAVLLRMKQFRVMNKLKKLALKVIAENLPDEEIQGLKQMFANMDTDGSGSITYEELREGLARLGSKLTETEVKALMEAADQDGSGSIDYYEFITATMHRYRLERDEHLYKAFQYFDKDNSGFITTDELETAMKEYGIADENCIAEILLEVDTDNDGRINYDEFSAMMRSGTQNPVTKLI

SEQ ID NO: 14490 - protein, 535 aa, Streptococcus pneumoniae R6
MSTKYIFVTGGVVSSIGKGIVAASLGRLLKNRGLKVTIQKFDPYINIDPGTMSPYQHGEVFVTDDGAETDLDLGHYERFIDINLNKYSNVTTGKIYSEVLRKERRGEYLGATVQVIPHITDALKEKIKRAALTTDSDVIITEVGGTVGDIESLPFLEALRQMKADVGADNVMYIHTTLLPYLKAAGEMKTKPTQHSVKELRGLGIQPNMLVIRTEEPAGQGIKNKLAQFCDVAPEAVIESLDVEHLYQIPLNLQAQGMDQIVCDHLKLDAPAADMTEWSAMVDKVMNLKKQVKISLVGKYVELQDAYISVVEALKHSGYVNDVEVKINWVNANDVTAENVAELLSDADGIIVPGGFGQRGTEGKIQAIRYARENDVPMLGVCLGMQLTCIEFARHVLGLEGANSAELAPETKYPIIDIMRDQIDIEDMGGTLRLGLYPSKLKRGSKAAAAYHNQEVVQRRHRHRYEFNNAFREQFEAAGFVFSGVSPDNRLVEIVEIPENKFFVACQYHPELSSRPNRPEELYTAFVTAAVENSN

SEQ ID NO: 14491 - protein, 313 aa, Bacillus anthracis str. A2012
  misc_feature (5)..(5): Xaa can be any naturally occurring amino acid
  unsure (1)..(313): unsure at all Xaa locations
MRNVXCIGELLIDFVCRNTNVSLVNGSNFEKKAGGAPANVAAAITKLGGHATFMGQVGNDPFGEFLEQTLQHAHVDTSMLIKDKQTTLAFVSIDQNGERDFTFMRGADGEYHFNSIDLSKIKTNDLIHFGSATALLSSPLKDTYFQLLQHARESGQFISFDPNYRNALITNTEQFIQDCLTFIKHAHFVKVSQEEAIMLSKESDLQQSALKLLNHGAKAVAITLGKDGTLLATKDKQTIVPSISIQQVDTTGAGDAFVGAMLYQIAKSEQMFLHNFEGLTTFISFANKVGALTCTNYGAISSLPSLTDVKAYE

SEQ ID NO: 14492 - protein, 566 aa, Arabidopsis thaliana
MLDSDTDTDSGPVVATTKLVTFLQRVQHTALRSYPKKQTPDPKSYIDLSLKRPYSLSTIESAFDDLTSGSHDQPVPVETLEKFVKEYFDGAGEDLLHHEPVDFVSDPSGFLSNVENKEVREWAREVHGLWRNLSCRVSDSVRESADRHTLLPLPEPVIIPGSRFREVYYWDSYWVIKGLMTSQMFTTAKGLVTNLMSLVETYGYALNGARAHYTNRSQPPLLSSMVYEIYNVTKDEELVRKAIPLLLKEYEFWNSGKHKVVIRDANGYDHVLSRYYAMWNKPRPESSVFDEESASGFSTMLEKQRFHRDIATAAESGCDFSTRWMRDPPNFTTMATTSVVPVDLNVFLLKMELDIAFMMKVSGDQNGSDRFVKASKAREKAFQTVFWNEKAGQWLDYWLSSSGEESETWKAENQNTNVFASNFAPIWINSINSDDENLVKKVVTALKNSGLIAPAGILTSLANSGQQWDSPNGWAPQQEMIVTGLGRSSVKEAKEMAEDIARRWIKSNYLVYKKSGTIHEKLKVTELGEYGGGGEYMPQTGFGWSNGVILAFLEEYGWPSHLSIEA

SEQ ID NO: 14493 - protein, 204 aa, Brassica napus
  misc_feature (58)..(58): Xaa can be any naturally occurring amino acid
  misc_feature (93)..(93): Xaa can be any naturally occurring amino acid
  misc_feature (137)..(137): Xaa can be any naturally occurring amino acid
  unsure (1)..(204): unsure at all Xaa locations
MGPFTRTKQKCRACEKTVYPVELLSADGVPYHKSCIKCSHCKSTLQQTNYSSIEGVLXCKPHYEQLFKETGSFNKNFQSPAKPVTDKSNPELXRTPSPVAGMFSGTHEKCATFSKTPYPIEKVSQTFDINLESMFSXTVESQTYHKSCFKCSHGGCPISPSNYAALEGILYCKHHFAQLFKEKGSYNHLIKSASIKRSAAAAVA

SEQ ID NO: 14494 - protein, 234 aa, Dehalococcoides sp. CBDB1
MIKGVFFDLYNTLIGYQPSREEMTVKLLADMNYPINENDLYLPMNKADEYFYLQNAQKPISLREKPEQFAVWSHYYRIILEEIGIEAKPELINTLISRWKNLKWEMILYEDVIPCLKNLKSRNLKIGLISNADRDMSELFNKTGLNTYLETVVISQEVGVTKPNPLIFQAALRKSGLTAKEVLYIGDQYQVDYIGAMNVGLNPVLLDRRNCYLDLNDCRRISGLGELEYCIDNT

SEQ ID NO: 14495 - protein, 175 aa, Triticum aestivum
MAPTVMASSATSVAPFQGLKSTAGLPVSRRSNGASLGSVSNGGRIRCMQVWPIEGIKKFETLSYLPPLSTEALLKQVDYLIRSKWVPCLEFSKVGFIFREHNTSPGYYDGRYWTMWKLPMFGCTDATQVINEVEEVKKEYPDAYVRIIGFDNMRQVQCVSFIAFKPPGCEESGKA

SEQ ID NO: 14496 - protein, 610 aa, Oryza sativa; identical to SEQ ID NO: 1097

SEQ ID NO: 14497 - protein, 390 aa, Bacillus clausii KSM-K16
MATHPIGIIMNGVTGRMGTNQHLIRSILAIREQGGVALPNGETLMPDPVLVGRNEAKLEALASKYGLNRIETDLEQALADECNVIYFDAQTTSRRAAAIKQAISAGKHIYCEKPTATSLDEALELAELANKAGVKNGVVQDKLFLPGLLKLKRLIDSHFFGDIYSVKLDFGYWVFEGDWQEGQRPSWNYREEDGGGIIVDMFAHWRYVIDNLFGEIQSLSCLGATHIRKRVDEDGQPYKATADDAAYAIFELENGIVVQANSSWVTRVDRDDLLTIHVDGKYGSAVAGLRDCKIQHRVMTPRPTWNPDIPNPIAFQELWQQVPDNEPYENGFKAQWELFLKHVHTDSPFPWDLLEGAKGTQLSDLGLQAWRERKWVGVPKLAATVPAKHI

SEQ ID NO: 14498 - protein, 231 aa, Shigella flexneri 2a str. 301
MFRKLAAECFGTFWLVFGGCGSAVLAAGFPELGIGFAGVALAFGLTVLTMAFAVGHISGGHFNPAVTIGLWAGGRFPAKEVVGYVIAQVVGGIVAAALLYLIASGKTGFDAAASGFASNGYGEHSPGGYSMLSALVVELVLSAGFLLVIHGATDKFAPAGFAPIAIGLALTLIHLISIPVTNTSVNPARSTAVAIFQGGWALEQLWFFWVVPIVGGIIGGLIYRTLLEKRD

SEQ ID NO: 14499 - protein, 272 aa, Nocardia farcinica IFM 10152
MEISGKVAIVTGAGGGIGAALARRLAAGGARVVVADIDPTGAREVAEAIGAAAVPVVGDVADEQVIATMIERAESEFGPVDLYFANAGIGGGPGLDSTDAQWTAALEVNVLAHVRAARALMPGWLARGTGYFVATASAAGLLTQIGSAPYSVTKHAAVGFAEWLAVTYGDRGIRVSCVCPMGVDTRLLHGDLVPGNAEAAALAVKAVTTAGAVLTPEEVADVVIAGMAAEQFLILPHPEVLEMYRRKGADYDRWLAGMRRFQSALLGEGLSR

SEQ ID NO: 14500 - protein, 504 aa, Pericallis cruenta
MSILTLICTFITGLMFYGLVNLLSRRASRLPPGPTPWPIIGNLMHLGKLPHHSLADLAKKYGPLIHVRLGSVDVVVASSASVAGQFLKVHDANFANRPPNSGAKHMAYNYHDMVFAPYGPRWRMLRKMCSMHLFSAKALTDFRQVRQEEVTILTRVLARTGQSAVKLDQQLNVCFANTLSRMMLDRRVFGDGDPKADDYKDMVVELMTLAGQFNIGDYIPWLDLLDLQGIVKRMKKVHSQFDSFLDTIIDEHTIGTGRHVDMLSTMISLKDNADGEGGKLSFIEIKALLLNLFSAGTDTSSSTVEWGIAELIRHPQLMKQAQEEMDIVVGKNRLVTEMDISQLTFLQAIVKETFRLHPATPLSLPRIASESCEVKGYHVPKGSILFVNVWAIARQSELWTDPLEFRPGRFLIPGEKPNVEVKPNDFEIVPFGGGRRICAGMSLGLRMVNLLIATLVQAFDWELANGLEPEKLNMEEVFGISLQRVQPLLVHPRPRLARHVYGTG

SEQ ID NO: 14501 - protein, 142 aa, Dechloromonas aromatica RCB
MAIERTLSIIKPDAVAKNVIGKIYSRFESNGLKVIAARMTWLSEQEAGQFYSVHKERPFFKDLVSFMTSGPVMIQALEGENAIAKNRELMGATDPKKADAGTIRADFAESIDANAVHGSDAPETAAVEIAFFFPGMNTYAGR

SEQ ID NO: 14502 - protein, 370 aa, Nocardia farcinica IFM 10152
MPDKPAYPVQLIQPDGARVLDREHAALVADIGPHELRELFADMTVARRIDVEATALQRQGQLGLWPPLLGQEAAQVGSARALHPDDYVFCSYREAAVAYCRGVRPGELTRLWRGVAHHCWDPDAVGMTNPNIVVGAQGLHATGYAYAAHLDGAEIATIAYFGDGATSQGDIAEAFGFAASWSAPVVFFCQNNHWAISAPVRVQSATPLVRRAYGYGMPGVQVDGNDVLAVLAVTRQAVARARTGGGPSFIEALTYRMGPHTTADDPTRYRAAAETEEWTRRDPIDRLRRLLEREALWDAAFEREVGERADTAAAELRRATLEMPDPDPAQLFDHVYAAPHPLIEAERRAFAEYAAGDPGAAFARPEGASR

SEQ ID NO: 14503 - protein, 238 aa, Lactobacillus plantarum WCFS1
MVHQLIAEFMGTALMIIFGVGVHCSSVLKGTKYRGSGHIFAITTWGFGISVALFIFGNVCINPAMVLAQCLLGNIAWSLFIPYSVAEVLGGVVGSVIVWIMYADHFKASTDEISPITIRNLFCTAPAVRNLPRNFFVELFDTFIFISGILAISEIKTPGIVPIGVGLLVWAIGMGLGGPTGFAMNLARDMGPRIAHAILPIANKADSDWQYGIIVPGIAPFVGAAIAAWFMHGFFGIN

SEQ ID NO: 14504 - protein, 564 aa, Xanthomonas campestris pv. vesicatoria str. 85-10
MCSIFGIFGLQPGDDLQALRRQALECSQRQRHRGPDWSGVYVDTGAILVHERLAIVDPAGGSQPLLSDDGQLALAVNGEIYNHRELKAELLQPYAFQTGSDCEVINALYREDTPASYLNRLNGIFAFALWDKTEGRVIIARDPIGVVPLYWGHDREGRLRVASELKSLVDDCADAAQFPPGHWYDSATGALSRYYERAWRHYDAVEGVQVQLQELREAFERAVHRQLMTDVPYGVLLSGGLDSSLVAAVAARYARHRIEENDTTEAWWPRLHSFAIGLKGSPDLAAAEVAAAALGTVHHGFEYTFDEGLDALPDVIRHIETYDVTTIRASTPMFLLARRIKAMGVKMVLSGEGSDEIFGGYLYFHKAPNAREFHEELVRKLDALNNYDCLRANKSMMAWGVEPRVPFLDREFLDVAMRMDARFKMIDKTSGGAARMEKGVLREAFAGYLPESILWRQKEQFSDGVGYGWIDGLKAHAQAQVSDRELAAADRRYPVNPPQTKEAYFYRSLFEQFFPGQAAAETVPGGKSIACSSPTAIAWDASFAAMADPSGRAIAGVHAQALAS

SEQ ID NO: 14505 - protein, 161 aa, Xanthomonas axonopodis pv. citri str. 306
MSDISTFAFTDLEGRTQSMRDYAGNVLLVVNVASKCGFTPQYAGLQALWQRYRERGLVVIGFPCDQFGHQEPGDAAQIRQFCSLDYAVDFPLAAKIDVNGNGAHPLWQWLKHEQRGVLGSEAIKWNFTKFLIGRDGRVLERYAPTTKPEALATEIERALDA

SEQ ID NO: 14506 - protein, 410 aa, Coxiella burnetii RSA 493
MNQTDIIIIGAGLVGTSVAVALQGHGIKIKILEHHLPSAAVTSSNDVRPLTLSFGSYQILKNLGVEADLANEACPISTVHVSDQGALGALRFRASEFNVPALGYVVSFAKLQQSLYQRAALQKNAEIVPISTIDDIQCNTNHAQVTFSTINGQQQLQADLLIAADGTHSTARRLLKIPVEEENRNEVALIALLRLKQPHNHIAYERFTSQGTLALLPLFQANQCRLVWTLPKTKADEIEQLSDDEFRAVLHRVFKPYIGAIQSVERGKRFPLQMLIAQEQVRPSFVMLGNASHTLYPIAAQGFNLGLRDAAVLSEVLIDARRQLKPLGDIRFLQEYSRWRKTDQARITGLTRGLSQWFGVQLPLANQARGLGLLATGLLPPFKKRLAKRLMGLSGRLPQLMRGLKLDDAI

SEQ ID NO: 14507 - protein, 457 aa, Burkholderia sp. 383
MNAASHPVDRVLPRRQMLTLGLQHMLVAYIGAIAVPLIVASALKMSPADTTVLISTALFCSGISTILQTVGVWKLGVRLPILQGVAFSSVGPVIAIGLTPGVGFAGVCGAVIGAGIITTFAAPLVGRLRRLFPPVVTGCIVTVIGLQLFPVAYQWAGGGDAAKLQFGELSFLAVALVVAVVILAVNRFANAFLRNLSVLIGLVAGSLLAIALGMGNFTNVAAAPWFTVPYPFHFGTPVFAIVPVLTMVIVMIVQMVESMGLFVAIGDIVEKQVSEEDVVRGLRANGVASAIAGTFAAFPFIAFMENVGLVILTGVRSRWIVAVSGVLMCVVALVPKIGAIVASTPSAALGGAGIAMFGVVVAAGVQTLAKVDFENNRYNVLIVGFTIATALIPVMAPKVFAHMPDWTQPFLHSGVVLACLVSVLLNALLNGVPAAEPVESHVHADAAHASPMARECD

SEQ ID NO: 14508 - protein, 369 aa, Burkholderia sp. 383
MTHIHTTHSDVEKIPVTVLTGFLGAGKTTLLNYILREKHGRKIAVIENEFGEIGIDGGLVLESTEEIYEMTNGCVCCVGAVREDLVRIVRMLVARPDRLDHIIVETSGLADPYPVAQTFFLDDPIAKEVALDAVVTMVDAKHIRAHLDDLVLDGRDNQAVDQIVCADRIVINKVDLVDTPDVDALTARLRELNTTAEIVTSSYAQVDLDRILGIGANEFAQILVESDGLQADAPHADEQAHEHDHEHDDHAYEAHAHDDDHDHHEHDESVSSVGIEVDADVDLDALEAWLGELRHSDTANLFRMKGILAVQGRAQRYVLQGVHGVIELRAAQAWGCEPRSSRIVFIGRDLDRAALTDRFHACLAAAVAA

SEQ ID NO: 14509 - protein, 271 aa, Pyrus communis
PGVWDYVRVNVYELSVEELTVSEYLHFKEELVDGESSDKYVLELDFEPFNAAFPRPTRSSSIGNGVQFLNRHLSSIMFRNRESLDPLLDFLRVHKYKGHPLMLNDRIQSVSKLQSALAKAEDHLSKLQPETPYSEFEYLFQGMGFERGWGDTAVHVLEMMHLLLDILQAPDPSILETFLGRIPMVFNVVILSPHGYFGQANVLGLPDTGGQIVYILDQVRALEKEMLERIRKQGLDFTPRILIVTRLIPEAKGTTCNQRLERISGTEHTHI

SEQ ID NO: 14510 - protein, 450 aa, Yarrowia lipolytica CLIB122
MPNWTVDPANKKRLLALQKDGANKKCFDCDAPNPQWASPKYGIFICLECAGVHRGLGVHISFVRSISMDQFKPDEMERMEKGGNQRAHEFFDKAGMARDTPIKQKYNSVVARNYMNYLTSEIEGTEYVPEKEGATPSVAPSKSRDSSRSGESDLTPQGSNVAFFEGLGAKNASRSADVRPSEGGKYSGFGNTPAPVSSNNRPGATITMDNFQADPLGTLTKGWGLFSKTVSQMSTEVNNQYIKPTVQNIQESEYTKTALEHAQKLGETVQKESKRGLDRFHEFVEGNEGDPQGYSRPGESRNLIQYEDESDEDPFSHLKPKGKSNMTGFGKTADGEDWGEWNEWDDDGVEDEDEDEQVAKVTKDAVPPAAAPSATEAPKAKKPSAKERALAAKAEAEKAAKEAEAKEKTEKVDGAEEKEAEKVEEQDKEPLEEVEPEAEPEMEPKSKKDD

SEQ ID NO: 14511 - protein, 414 aa, Zea mays
MATGPVVHPQPVRGDPIDLKNAAAKNRRALGDIGNVDSLIGVEGGKLDRPITRNFRAQLLENAQVAAAANKKAPILDGVTKKQEVVRAVQKKARGDKREPSKPIEVIVISPDTNEVAKAKENKKKVTYSSVLDARSKAASKTLDIDYVDKENDLAAVEYVEDMYIFYKEVVNESKPQMYMHTQPEIDEKMRSILIDWLVEVHVKFDLSPETLYLTVNIIDRFLSLKTVPRRELQLVGVSALLIASKYEEIWPPQVNDLVYVTDNSYNSRQILVMEKTILGNLEWYLTVPTQYVFLVRFIKASGSDQKLENLVHFLAELGLMHHDSLMFCPSMLAASAVYTARCCLNKTPTWTDTLKFHTGYSESQLIDCSKLLAFIHSKAGESKLRGVLKKYSKLGRGAVALISPAKSLMSSAP

SEQ ID NO: 14512 - protein, 652 aa, Cryptococcus neoformans var. grubii
MMDIEDPSRDMAGAGELEQDWRPIGHTSNQLVLYHPASHALRVRIQPPSSPRSTFPSNIVRANDALKRRSPDLATRPLCLLCRQPVSRNGLGEVAAISGMDSYFQTLEHVHSESESFSEGMGIDNLLNAPQMDTSNEENSSATGYYVRFFKEVRKLGMGAEGSVYLAVHHIEGDTLGTYAVKKIAVGESKEYLHKILHEVKLLEVLRHTNIIPYYHAWIDTTRFSDLAPPVLALHVLMMYASGGNLDSLLLSRSHSTGFATGLSADDIADAESIDKLPKEERIKAFKRRRQSAKTEWANNRRSFSGGMGASRAENRGVLLLSFEEIVQLFGDIIEGLSFLHSNSILHLDLKCSNVLLHWEEGKLVPKAMLSDFGTSEEMLRGQRERTGHTGTMEYAPETLVQDSEGRFRPSDSHADMWSLGMILYKMMFLKLPYEECDNYDVLRAQIISYKGFLPDGSLLQNLQRRHIPQRFVFLLKKLLDIHPEKRPSAEKTRSVLADIKHHSNQNEDYSSAIVGQTLASLENLSYPNRGICRRNSVVVNDGHLNADATASNNVLLPFFPSPKKKLLPSFIDGHERAMTCLAGPAVRLALLFGKLVSIQPSISGVRLPPAVAVILILLALTDLAHQGSLLWSLTCLIAHCAAVLNFSSHEV

SEQ ID NO: 14513 - protein, 276 aa, Erwinia carotovora subsp. atroseptica SCRI1043
MNPYSLSVEALTHKARAIRRRIIHLNANSPAGGHTGADLSQVEILTALYFRILNCAPDRLQDPQRDIYIQSKGHAVGGYYCCLAEAGYFPESWLATYQHPDSHLPGHPVKHKTPGIELNTGALGHGLPVAVGIALAAKRDNSPRRVFVLTGDGELAEGSNWEAALAAAHYQLDNLIIINDKNKLQLAGTTCSIMNTDPLAEKWQAFGLQVTECAGNDMRSVVDTLENLPRNGKPNVVIANTEKGAGVSFIQGRAEWHHRVPKGEEIALALEELKDE

SEQ ID NO: 14514 - protein, 362 aa, Lotus corniculatus var. japonicus
MKNPKRHPSESSLRRVTSEETVTGLKNAHRRRLKIRRMKYSCQAKINAGDGDFPPSGKERREIHESVQISLSLANSSSSSSSEEDRERKRDDGVLPYGSVSVVGSRKEMEDAVSVETGCVTKCDYFAVFDGHGGAQVAEACRERLYRLVAEEVERCGNGVEEVDWEEVMEGCFRNMDGEVAGNAALRTVGSTAVVAVVAAAEVVIANCGDCRAVLGRGGEAVDLSSDHKPDRPDELMRIEEAGGKVINWNGQRVLGVLATSRSIGDQYLRPYVISKPEVTVTKRSSKDEFLILASDGLWDVISSEMACQVVRKCLNGQIRRICNENQSRASEAATLLAEIALAKGSRDNTSVIVIELRGTVT

SEQ ID NO: 14515 - protein, 184 aa, uncultured bacterium
VHVGAGPDGCTSGLDAVGYARDLIREGSADMMVAGATDAPISPITVACFDAIKATTPRNDDPEHALRPFDNSRNGFVLGEGSAIFVLEELEHARKRGARLLAEIAGFASRCNAFHMTGLRPDGREMAEAIRVALHEAHMLPEDIDYVNAHGSGTKQNDRHETAAFKRSLGEHAYRTPVSSIKSM

SEQ ID NO: 14516 - protein, 282 aa, Lotus corniculatus var. japonicus
MTGREILHKMKEKVLGSSDPDSGKGKSKMSKNITHGYHLVKGRSDHAMEDYVVAQFKTVDNNELGLFAIFDGHSGHNVPDYLQSNLFDNILKEPDFWTKPVEAVKKAYVDTDSTILEKSGELGRGGSTAVTAILINCQKLVVANLGDSRAVLCKNGEAIPLSVDHEPATESEDIRNRGGFVSNFPGDVPRVDGQLAVSRAFGDKSLKKHLSSEPHVTVELIDDDAEFIILASDGLWKVMSNQEAVDAIRNVKDARSAAKNLTEEALKRNSSDDISCVVVRLQ

SEQ ID NO: 14517 - protein, 185 aa, uncultured bacterium
GCTSGMDAVGYARDLIRGGSADMMVAGATDAPISPITVACFDAIKATTPRNDDPEHALRPFDNSRNGFVLGEGSAIFVLEELEHARKRGAHLLAEIAGFASRCNAFHMTGLRPDGREMAEAIRVALHEAHMLPEDIDYVNAHGSGTKQNDRHETAAFKRSLGEHAYRTPVSSIKSMIGHSLGAIG

SEQ ID NO: 14518 - protein, 421 aa, Dianthus caryophyllus
AKLSASICTAEGIDEFQDTAIFQDYHGLPQFRKAVAKFVEKVRGEKVKYDESRIVMSGGATGAHELMTFCLADPGDAFLVPTPYYPGFDRDLRWRTGVQLVPVLCHSSDNFRITTSALQDAYERAQEAKIKVKGLLITNPSNPLGTVLDKETLINILEFTNEKNIHLICDEIYGATVFGEQKFISISEVIIDQPHNPDLVHIVYSLSKDLGFPGFRVGIVYSYNDNVVNCARKMSSFGLVSTQTQRLIACMLSDEEFVERFLEESRKRLENRHRVFTWGLSQVGIKCLRSNAGLFVWMDLRHPLQDPTIEGELALWRVIINEVKINVSPGSSFHCSEPGWFRVCIANMNDETMEVALRRIRSFVLQKKDAATCVTSSKRKCWQTNLQLRLSNRRLEDFIGISQIGSPSSPLPQSPLVLART

SEQ ID NO: 14519 - protein, 770 aa, Arabidopsis thaliana
MNISQNPSPNFTYFSDENFINPFMDNNDFSNLMFFDIDEGGNNGLIEEEISSPTSIVSSETFTGESGGSGSATTLSKKESTNRGSKESDQTKETGHRVAFRTRSKIDVMDDGFKWRKYGKKSVKNNINKRNYYKCSSEGCSVKKRVERDGDDAAYVITTYEGVHNHESLSNVYYNEMIVPNRSHLLPFNNLSKETKSFHICSSAQISNTNLFEEEDEPYLIDLGGGEIFLNKFDSVAKMKFWRERERENKEQILAPLCGQVRVLVVGDSGVGKTSLVHLINKGSSIVRPPQTIGCTVGVKHITYGSPASSSSSIQGDSERDFFVELWDVSGHERYKDCRSLFYSQINGVIFVHDLSQRRTKTSLQKWASEVAATGTFSAPLPSGGPGGLPVPYIVVGNKADIAAKEGTKGSSGNLVDAARHWVEKQGLLPSSSEDLPLFESFPGNGGLIAAAKETRYDKEALNKFFRMLIRRRYFSDELPAASPWSISPVPTSSSQRLDEITSDDDQFYKRTSFHGDPYKYNNTIPPLPAQRNLTPPPTLYPQQPVSTPDNYTIPRYSLSSVQETTNNGSARLLQSAEKNPNSVSLSRRAKTLNPGNYLDFCFQFRFCSEIVQGEKFNLKGKINFVCNAQCKIQVLKKRKMVEVWWSLIGAAVPALIAGQAWRIKKRHGEEERIKSARGREKSSDEIFVCERVCTSKRMLKKVGAFSKDPIPDTCVTVCGVSELDACSDACARTVCVNQHQVANWNDICLRRCQSECLKLSSSSSSSRYS

SEQ ID NO: 14520 - protein, 183 aa, uncultured bacterium
TSGLDAVGYARDLIREGSADMMVAGATDAPISPITVACFDAIKATTPRNDDPEHALRPFDNSRNGFVLGEGSAIFVLEELEHARKRGAHLLAEIAGFASRCNAFHMTGLRPDGREMAEAIRVALHEAHMLPEDIDYVNAHGSGTKQNDRHETAAFKRSLGEHAYRTPVSSIKSMIGHSLGAIG

SEQ ID NO: 14521 - protein, 509 aa, Zea mays
  misc_feature (261)..(261): Xaa can be any naturally occurring amino acid
  unsure (1)..(509): unsure at all Xaa locations
EGLFEAITGYGLGGSSMALFGRLGGGIYTKAADVGADLVGKVERNIPEDDPRNPAVIADNVGDNVGDIAGMGSDLFGSYAESSCAALVVASISSFGINHEFTPMVYPLLLSSVGIIACLITTLFATDFFEIKAVDEIEPALKKQLIISTIVMTIGIALISWLGLPYTFTIFNFGVQKTVQSWQLFLCVAVGLWAGLVIGFVTEYYTSNAYSPVQDVADSCRTGAATNVIFGLALGYKSVIIPIFAIAFSIFLSFSLAAMYXVAVAALGMLSTIATGLAIDAYGPISDNAGGIAEMAGMSHRIRERTDALDAAGNTTAAIGKGFAIGSAALVSLRLFGAFVSRAAISTVDVLTPEVFIGLIVGAMLPYWFSAMTMKSMGSAALKMVEEVRRQFNTIPGLMEGTTKPDYATCVKISTDASIKEMIPPGALVMLTPLIVGILFGVETLSGVLAGALVSGVQIAISASNTGGAWDNAKKYIEAGVSEHARTLGPKGSDPHKAAVIGDTIGDLK

SEQ ID NO: 14522 - protein, 348 aa, Pisum sativum
MANPVTKQKLISIVFILITLFTSQALADCETESTNSCNNKEKALSLKIIAIFSILVTSMIGVCLPLVSRSVPALSPDGNLFVIVKCFAAGIILGTGFMHVLPDSFDMLWSDCLQEKPWHEFPFSGFAAMISAVVTMMVDSLATSYYTQKGKKGVIIPAEGEVGDQEMGAVHAGHHHHYQVKTEGEESQLLRYRVIAMVLELGIVVHSIVIGLAMGSSNNTCSIKGLVAALCFHQMFEGMGLGGCILQAEYKFVKKAIMVFFFSITTPLGIAIGIAMSSNYKENSPKALITVGLLNGSSAGLLIYMALVDLLAADFMSRRMQGSIKLQLKSYVAVFLGAGGMSLMAKWA

SEQ ID NO: 14523 - protein, 359 aa, Glycine max
  misc_feature (194)..(194): Xaa can be any naturally occurring amino acid
  misc_feature (203)..(203): Xaa can be any naturally occurring amino acid
  unsure (1)..(359): unsure at all Xaa locations
MIIWVFLDYGVYYLLSIMGTNLSTPKTEKSSDDGENEHLRYGLSSMQGWRATMEDAHAAHLDLDASTSFFGVYDGHGGKVVAKFCAKYLHQQVLKNEAYIAGDIGTSLKESFFRMDDMMRGQRGWRELAVLGDKIDKFNGKIEGLIWSPRSRHSKEQDDTWAFEEGPHSNFAGPTSGSTACVAIIRNNKLFVAXNAGDSTVVXVCREGSKRMDLSIDHKPDLEIEKERIVKAGGFIHAGRVNGSLSLARAIGDMEFKQNRFLSAEKQMVTANPDINTVELCDEDEFIVLACDGIWDCLSSQQLVDFVRQQLLLETKLSAVCERVLDQCLAPTITVGDGCDNMTMILVQFKKLAQSSAPA

SEQ ID NO: 14524 - protein, 185 aa, uncultured bacterium
GCTSGMDAVGYARDLIREGSADMMVAGATDAPISPITVACFDAIKATTPRNDDPEHALRPFDNSRNGFVLGEGSAIFVLEELEHARKRGAHLLAEIAGFASRCNAFHMTGLRPDGREMAEAIRVALHEAHMLPEDIDYVNAHGSGTKQNDRHETAAFKRSLGEHAYRTPVSSIKSMIGHSLGAIG

SEQ ID NO: 14525 - protein, 325 aa, Lactobacillus plantarum WCFS1
MQALVVPDPSAQTMEQLQWQERPMPNLGPTEVLIKTQAVGLNPVDFKLVAAGNAAWQYPHTLGLDTAGIVEAVGAEVTNFRPGERVCGHANLANNGTFAEYVSLPAAVLAKIPTTVSFEAAAASLCAGLTAYQALLRKANLNAAQTVLIHAGAGGVGSMAIQLAKAAGKTVFTTVSKAKQAFVAPLHPDAQIDYHHEDVTTRIQDLTQQHGVDLIINTIGHADADLPRLAYNGQLVCVLATPDHFPSNQVVTISKLDLGGAHRSGNPAQVADLGQMTAALLALVQAGKVDPLITQVLHRDQLVTGLQQLQAGQVVGKLVVTFDAC

SEQ ID NO: 14526 - protein, 125 aa, Brassica napus
MASPSVFAGIAQGPEDPILGVTVAYNKDPSPVKVNLGVGAYRTEEGKPLVLNVVRRAEQMLIQNESRVKEYLPITGLADFNKLSAKLIFGADSPAIQENRVATVQCLSGTGSLRVGGEFLARHYH

SEQ ID NO: 14527 - protein, 454 aa, Lactobacillus plantarum WCFS1
MQRKLSTGQMQMIALGGTIGVGLFMGSSSTIKWTGPSVLIAYIVSGAFLYLIMRALGEMLYVDPNTGSFAKFASEYIHPVFGYLTAWSNIFQFVVVGMSEMIALGGYCRYWWPNLPDWIPGLIAIVFLCAANLISVKMFGTLETWFSLIKVVTIILMIIAGLGLIIFGIGNGGHPIGISNLWTHGGFFTGGVKGFVFALAIVLASYQGIELIGVTAGEAENPQSTIVKAIRSTVARILIFYVGAIFVIVSIYPWDKLSQIGSPFVQTFAKIGITAAASIINFVVITASLSGTNSGIYSASRMTYTLAESHQLPRKMTLLNRHGVPFYSVIAIATGILIGVVLNVVLPMFFKDASEIFVMVYSSSVLPGMVPWFVILVSQIAFRKQNAAKMANHPFKMPLSPYSNYLTLAFLALTLVFMFINPETRYSILVGVVFLVIMTLIYFRKYAGNKEETL

SEQ ID NO: 14528 - protein, 307 aa, Staphylococcus epidermidis RP62A
MNKNKVIVIGSTNVDKFLNVKRFPKPGETLHINQAQKEFGGGKGANQAIAASRLAADTTFISKVGKDGNANFILEDFKKAGIHTQYILTSESEETGQAFITVDEAGQNTILVYGGANMTLSATDVEMSVDAFIGADFVVAQLEVPFEAIEQAFKIARKQNITTVLNPAPAIELPKSLLELTDIIIPNETEAELLTGISINNESDMKETATYFLDLGISAVLITLGEQGTYCAYQEQYKMIPACNVKAIDTTAAGDTFIGAFLSELNKDLSNLESAIRLANQASSLTVQRKGAQASIPTRKEVEAEYN

SEQ ID NO: 14529 - protein, 162 aa, Zea mays
MGRPPCCDKESVKKGPWTPEEDLVLVSYVQEHGPGNWRAVPANTGLLRCSKSCRLRWTNYLRPGIRRGGFFDQEDKLIIHLQALLGNRWAAIASYLPDRTDNDVKNYWNTHLKKKLLAQQQQQLRASPSPPKGQWELKLQTDINLSRRALCDALSIYAGPPG

SEQ ID NO: 14530 - protein, 212 aa, Zea mays
  misc_feature (47)..(47): Xaa can be any naturally occurring amino acid
  unsure (1)..(212): unsure at all Xaa locations
PTIFLLLVLQPQDAIERLTSGFQQFKVNVYDKKPELFGPLKSGQAPXYMVFACSDSRVCPSVTLGLQPGEAFTVRNIAAMVPGYDKTKYTGIGSAIEYAVCALKVEVLVVIGHSCCGGIRALLSLQDGAPDTFHFVEDWVKIGFIAKMKVKKEHASVPFDDQCSILEKEAVNVSLENLKTYPFVKEGLANGTLKLIGAHYDFVSGEFLTWKK

SEQ ID NO: 14531 - protein, 461 aa, Vibrio cholerae O1 biovar eltor str. N16961
MENSVHRYKKEASNLIKLATPVLIASVAQTGMGFVDTIMAGGVSAIDMAAVSIAASIWLPSILFGVGLLMALVPVVAQLNGAGRQHKIPFEVHQGLILALLVSVPIIAVLFQTQFIIRFMDVEEAMATKTVGYMHAVIFAVPAYLLFQALRSFTDGMSLTKPAMVIGFIGLLLNIPLNWIFVYGKFGAPELGGVGCGVATAIVYWIMLLLLLFYIVTSKRLAHVKVFETFHKPQPKELIRLFRLGFPVAAALFFEVTLFAVVALLVAPLGSTVVAAHQVALNFSSLVFMFPMSIGAAVSIRVGHKLGEQDTKGAAIAANVGLMTGLATACITALLTVLFREQIALLYTENQVVVALAMQLLLFAAIYQCMDAVQVVAAGSLRGYKDMTAIFHRTFISYWVLGLPTGYILGMTNWLTEQPLGAKGFWLGFIIGLSAAALMLGQRLYWLQKQSDDVQLHLAAK

SEQ ID NO: 14532 - protein, 922 aa, Astragalus sinicus
MELQHIWMLRLVVACALFLCIFFRSTSAVEGFESIACCADSNYTDPRTTLNYTTDYIWFSDKQSCKQIPEIVLSQRSNENVRLFHINEGKRCYNLPTIEDKVYLIRGTFPFDSFDSSFYVSIGVTQLGEVRSSRLQDLEIEGVFKATKDYIDFCLVKGEVNPFISQIELRSLPEEYLHDLPASVLKLISRNNLGDKKDDIRFPVDQSDRIWKATSNLSSALPLSFNVSNVDLRGNLTPPLQVLQTALTHPERLQFIHDGLDTEDYEYSIFLYFLELNSTIIAGQRVFDIYLNNEVKKERFDVLAGGSKYSYTILNISANGSLNITLVKASQSKFGPPLNAYEILQIRPWIEETNHIDVKVIQKLRKELLQNPENKALESWTGDPCILFPWKGIKCDGSNGSSVINKLDLSSSNITGPIPSSVTEMTNLEILNLSHNSFVGHIPSFLRSSLLISVDVSYNDLTGPLPESIISLPHLKSLYFGCNHHMSEEDPAKLNSSRINTDYGKCKVKEHKHGQVFVIGAITGGSLLITLAVGILFFCRYRYKLIPWEGFGGKNYPMETNIIFSLPSKDDFFVKSVSIEAFTLEYLEVVTEKYRTLIGEGGFGSVYRGTLDDSQEVPVKVRSATSTQGTREFDNELNLLSAIQHENLVPLLGYCKEKDQQILVYPFMSNGSLLDRLYGDAAKRKILDWPTRLSIALGAARGLAYLHTFPGRSVIHRDVKSSNILLDQSMCAKVADFGFSKYAPQEGDSYVSLEVRGTAGYLDPEYYKTQQLSEKSDVFSFGVVLTGNWGVAGEPLNIKRPRTEWSLVEWAKPYIRASKVEEIVDPGIKGGYHAEAMWRVVEVALQCLEPYSTYRPCMVDIVRELEDALIIENNASEYMKSIDSLGGSNRYSIVLDKRVLPATTSTAESTITTQALSHPQPR

SEQ ID NO: 14533 - protein, 127 aa, Thermoplasma volcanium GSS1
MNKTGIAHIYASQNNTIIHVTDPTGAETIAMVSGGMVVKNDRDQASPYAAMKAADMVSETLKEHEITDLIIKVRAPGGNKSKIPGPGAQAAIRALSRAGLKIVRIEEVTPIPHDGTKKKGGKRGRRV

SEQ ID NO: 14534 - protein, 185 aa, uncultured bacterium
GCTSGLDSVAHACDLIREGSADVVVAGAADAPISPITLACFDAIKATTARNDDPEHASRPFDRTRDGFVLGEGAAMFVVEEMEHARKREARIYAEIAGFGSRCNGFHMTGLRRDGAEMAAAITAALDQVRLNPEEIDYVNAHGSGTRQNDRHETAAFKVSLGEHAYHVPVSSVKSMIGHSLGAIG

SEQ ID NO: 14535 - protein, 403 aa, Rhizobium leguminosarum bv. viciae
MDRRVVITGLGGLCGLGTDASSIWTEMREGRSAIGPISNSEIHELKGMIGTEIKVLPQHDIDRKQLISMDRFSLLAVLAAKQAMLQAGLSCNEGNAHRFGATVGVGFGGWDATEKAYRTLLLGGATRTELFTGVKAMPSAAACQVSMNLGLRGPVFGATSACASANHAIASAVDQIKLGRADVMLAGGSDAPLVWIVLKAWEAMRVLAPDTCRPFSADRKGLVLGEGAGMAVLESYEHAAARGATMLAEVAGIGLSADAYHIAAPAVHGPEAAMRACLVDASLNAEDVDYLNAHGTGTKANDQIETTAIKRVFGDHARSMSISSTKSTHAHCLGAASALEMIACVMAIQEGVVPPTANYREPDPDCDLDVTPNVPRERKVRVAMSNAFAMGGMNAVLAFKQVP

SEQ ID NO: 14536 - protein, 184 aa, uncultured bacterium
CTSGMDAVGYARDLIREGSADMMVAGATDAPISPITVACFDAIKATTPRNDDPEHALRPFDNSRNGFVLGEGSAIFVLEELEHARKRGAHLLAEIAGFASRCNAFHMTGLRPDGREMAEAIRVALHEAHMLPEDIDYVNAHGSGTKQNDRHETAAFKRSLGEHAYRTPVSSIKSMIGHSLGAIG

SEQ ID NO: 14537 - protein, 223 aa, Burkholderia sp. 383
MRTNTPAEVNADTYDHYVDTFTLEWNRNLVQRVEHELAQRRIASGRLLDVGTGTARTLIELARVPSLAPLGFVGVDYYDDMVRRAEQNVRAEGLEGRIDIRAGDVHALPFDDGTFVAVIGRSVVHHWADPVGAYREIFRTLAPGGFALIHEPCSDPAPEALAFFNERRAAAGVHPVHLDGKFTVAESIGHLHEAGIGEHASVSKGSGMLAIGFEVLIAKPAQQ

SEQ ID NO: 14538 - protein, 498 aa, Brevibacterium flavum
MESSMVENNVAKKTVAKKTARKTARKAAPRVATPLGVASESPISATPARSIDGTSTPVEAADTIETTAPAAKAPAAKAPAKKVAKKTARKAPAKKTVAKKATTAKAAPATAKDENAPVDDDEENLAQDEQDFDGDDFVDGIEDEEDEDGVEALGEESEDDEEDGSSVWDEDESATLRQARKDAELTASADSVRAYLKQIGKVALLNAEQEVSLAKRIEAGLYATHRMEEMEEAFAAGDKDAKLTPAVRRDLRAIARDGRKAKNHLLEANLRLVVSLAKRYTGRGMAFLDLIQEGNLGLIRAVEKFDYSKGYKFSTYATWWIRQAITRAMADQARTIRIPVHMVEVINKLGRIQRELLQELGREPTPQELSKEMDISEEKVLEIQQYAREPISLDQTIGDEGDSQLGDFIEDSEAVVAVDAVSFTLLQDQLQDVLETLSEREAGVVKLRFGLTDGMPRTLDEIGQVYGVTRERIRQIESKTMSKLRHPSRSQVLRDYLD

SEQ ID NO: 14539 - protein, 183 aa, uncultured bacterium
TSGLDSVAHACDLIREGSADVVVAGAADAPISPITLACFDAIKATTARNDDPEHASRPFDRTRDGFVLGEGAAMFVVEEMEHARKREARIYAEIAGFGSRCNGFHMTGLRRDGAEMAAAITAALDQVRLNPEEIDYVNAHGSGTRQNDRHETAAFKVSLGEHAYHVPVSSVKSMIGHSLGAIG

SEQ ID NO: 14540 - protein, 331 aa, Brevibacterium flavum
MTAPSTQDLATTEREVDPGSRRGQTNDNPSQDLVRVYLNGIGKTALLTAEDEVELAQTIEVGLYAEHLLKNSEEPLTRAMKRDLKVLAKDGKKARSHLLEANLRLVVSLAKRYTGRGMPLLDLIQEGNLGLIRAMEKFDYSKGFKFSTYATWWIRQAITRGMADQSRTIRLPVHLVEQVNKLSRIKREMYQHLGREATNEELAEESGIEESKIEMLLRQSRDPVSLDMPVGADEEAPLGDFIEDSEATDAESAVVASMRHSDIRAVLNTLEPREQDVIRLRYGLDDGVPRTLDQIGRRFGLSRERVRQIEREVMSKLRDGERASRLREYAQ

SEQ ID NO: 14541 - protein, 252 aa, Arabidopsis thaliana
TAYQSELGGDSSPLRKSGRGKIEIKRIENTTNRQVTFCKRRNGLLKKAYELSVLCDAEVALIVFSSRGRLYEYSNNSVKGTIERYKKAISDNSNTGSVAEINAQYYQQESAKLRQQIISIQNSNRQLMGETIGSMSPKELRNLEGRLERSITRIRSKKNELLFSEIDYMQKREVDLHNDNQILRAKIAENERNNPSISLMPGGSNYEQLMPPPQTQSQPFDSRNYFQVAALQPNNHHYSSAGRQDQTALQLV

SEQ ID NO: 14542 - protein, 184 aa, uncultured bacterium
CTSGMDAIGYGHQMIQDGEADIVIAGASESGVSPISMACFDPIKATSHRNDDPEHASRPFDRDRDGFVMGEGGAILILEELQSALARKAPIYCELAGFANRGSAFHMTGLRPDGLEMAEAITDALKQGGLVPDDIDYINAHGSGTKQNDRHETAAFKLALGERAYKIPVSSIKSMIGHSLGAIG

SEQ ID NO: 14543 - protein, 373 aa, Burkholderia sp. 383
MDDVQFKLQQADAGAHPAGAYDATTRLAASWYVAMRSDDLKDKPTALTLFGRPCVAWRGATGRAVVMDRHCSHLGANLADGQVKDGCIQCPFHHWQYDEQGQCVHIPGHSTEVRRLEPVPRGARQPTLVTAERYGYVWVWYGSPQPLHPLPEIAAADVDNGDFMHLHFAFETTTAVLRIVENFYDAQHAHPVHALPISAFELKLFDDWRPWPEVESLARAGAWFGAGIDFTVNRYFGPLGMLSRALGLNMSQMNLHFDGYPGGCVMTVALDGEAKYKLLQCVTPVSDGKNVMHMLISIKKVGGPLRRATDFVLFGLQTRQAAGYDVKIWNGMKPDGGGAYSKYDKLVLKYRAFYRGWVERVVAGERQGVSRRS

SEQ ID NO: 14544 - protein, 296 aa, Zea mays
  misc_feature (286)..(286): Xaa can be any naturally occurring amino acid
  unsure (1)..(296): unsure at all Xaa locations
MAAAAGGGAVRALSQKEQDIQMMLAADVHLGTKNCDFQTERYVFKRRSDGIYIINLGKTWDKLQLAARVIVAIENPQDIIVQSARPYGQRAVLKFAQYTGAHAIAGRHTPGTFTNQLQTSFSEPRLLILTDPRTDHQPIKESALGNIPTIAFCDTDSPMRYVDIGIPANNKGRNSIGCLFWLLSRMVLQMRGTILPGHKWEVMVDLFFYRDPEEAKEQEEEVAVAPEFAAITDYQRTDQWGGDQWTSDWGAAPAPVPTGDGWDQAGAPVPADGTAPPVVAPTGWDXAAPPTAQGWE

SEQ ID NO: 14545 - protein, 456 aa, Nocardioides sp. JS614
MHPDYDHLQRAAKDHLWMHFTRHSSYAEADVPIIVRGEGAYIYDAKGKRYLDGLGGLFVSQLGHGRTELAEAAAAQARELAFHPLWSYAHPNAILLAERIAGYAPGELNRVFFTSGGGESVESAWKLAKNYFKLTGKPLKHKVISRAIAYHGTTQGALSITGLPPLKQQFEPLVPSTFRVPNTNIYRAPLHGEDPEAFGRWAADQIAVAIENEGPDTVAAVFLEPVQNSGGCFPPPPGYFQRVREICDEYDVLLVSDEVICAFGRLGHMFGAERYGYQPDIITCAKGITSGYAPLGAMIASDRLMEPFLRDAQMFAHGYTFGGHPVSTAVALKNLEIFEEEKVLEHVRSNEAAFRSTLERLHDLPIVGDVRGDGYFYGIELVKDKTTKESFTDEECERLLYGFVSKQLFAEGLYCRADDRGDPVIQLSPPLICEQSHFDEMEQILRVVLDKAGTLV

SEQ ID NO: 14546 - protein, 140 aa, Lactobacillus plantarum WCFS1
MANTLMNRNDFGMLDPFERMARSFWAPLENMDQVLKTDINETDDQYQVKVDVPGIDKQDVKLDYRDNVLSIKVQKDSFVDHEDQDQNIVMNERHTGTLQRQYMLPNVAANKITASQADGVLTITLPKTQPSANDGQIEIQ

SEQ ID NO: 14547 - protein, 645 aa, Xanthomonas campestris pv. vesicatoria str. 85-10
MKRGIQRSSVPGKRLQCSRAGVQGQSALRHGLAVIGAKRGFHPDTLRLSLDRASNIRGGAGYAAAVQRLAPWRCRPTWTTPITLGEVRQLRPLSSCVRHVRAGNGGRRAGAGTIGPVFSTTGLPLTTSISPGASAGARLPRQIPFIIGNEACERFSFYGMRNILVQFLITSLLLQEISGPGREAEAKHILHSFMIGVYFFPLLGGWLADRFFGKYNTILWFSLVYCAGHACLALFEGSRDGFFLGLGLIALGAGGIKPLVASFMGDQFDQSNKHLAKVVFDAFYWIINFGSLFASLLIPLALKNLGPAWAFGIPGILMFVATLVFWLGRKRYVLVPLPPKDPHGFGAVVRTALLTHAPGQGRPGLMLAVVSVLLALAGFALVEQLGIVVCLCIALVLLLAGIGGGTWWQLERARGTHPDVAVEGVRALLRVLVIFALVTPFFSLFDQKASTWVLQGREMTMPAWFTASQMQALNPLLVMLLIPFNNLVLYPLLRRGGWEPTPLRRMTSGIALSGVAWVAVGAIQMVMDGGEPMHIAWQILPYALLTFGEVLVSATGIEFAYSQAPTSMKGVVMSFWYLTTTVGNLWVLLSNVAVRNATVTAHIADTGLSEAAFLMFFFAAFAFLAALAFGLYARRYRMVDNYRTA

SEQ ID NO: 14548 - protein, 408 aa, Candida tropicalis
MDRLNQLSGQLKPNAKQSILQKNPDDVVIVAAYRTAIGKGFKGSFRSVRSEFILTEFLKEFIKKTNIDPSLIEDVAIGNVLNQAAGATEHRGACLAAGIPYTAAFIAVNRFCSSGLMAISDIANKIKTGEIECGLAGGAESMSTNYRDPRVAPRIDPHLADDAQMEKCLIPMGITNENVANQFNISRERQDEFAAKSYNKAAKAVAAGAFKSEILPIRSIIRNSDGTEKEIIVDTDEGPREGVTAESLGKLRPAFDGTTTAGNASQVSDGAAAVLLMKRSLAEAKGYPIIGKYVLCSTAGVPPEIMGVGPAYAIPEVLKRTGLTVDDIDVFEINEAFAAQCLYSAEQVNVPEEKLNINGGAIALGHPLGETGARQYATIIPLLKPGQIGLTSMCIGSGMGSASILVRE

SEQ ID NO: 14549 - protein, 346 aa, Arabidopsis thaliana
MGTSSDPIQDGSDEQQKRSEIYTYEAPWHIYAMNWSVRRDKKYRLAITSLLEQYPNRVEIVQLDESNGEIRSDPNLSFEHPYPPTKTIFIPDKECQRPDLLATSSDFLRLWRIADDHSRVELKSCLNSNKNSEFCGPLTSFDWNEAEPRRIGTSSTDTTCTIWDIEREAVDTQLIAHDKEVFDIAWGGVGVFASVSADGSVRVFDLRDKEHSTIIYESSEPDTPLVRLGWNKQDPRYMATIIMDSAKVVVLDIRFPALPVVELQRHQASVNAIAWAPHSSCHICTAGDDSQALIWDISSMGQHVEGGLDPILAYTAGAEIEQLQWSSSQPDWVAIAFSTKLQILRV

SEQ ID NO: 14550 - protein, 646 aa, Xanthomonas axonopodis pv. citri str. 306
MCGLAGMLLASPRLHGEQLDALVRPMGAALRHRGPDDAGTWCDAQAGVALAHQRLSILDLSPLGHQPMRSADGRYVLAYNGEVYNFAQLRAALSALGHRFRGHSDTEVLLAAVVEWGLDETLTRCNGMFAIALWDERDNCLFLARDRVGKKPLYYGWAGDTLVFGSELKALWQHPDFDNGVDRDALTLLLRLGYIPAPACIHEHTFKLMPGRVLRIDAQAVAAGAAAHRPDQAQQPFWNAREAMQRALATPFTGTDAQAEEQLDRVLRDAVALRMVADVPVGVFLSGGTDSSIVTAMMQAQSAQPVHTFSIGFEGSHHDEAPLAREVATHLCTDHTELYVSGADALAVVPNLPDMFDEPFADASQVPTALVARLARGGVTVALSGDGGDELFFGYGRYQRALRNWRMHGLVPGPLRRLMAVAARRNGESSRTGGLAALVAEAGARGIGDIYRNRISRWRDPAAVVLGATEPDSFYSLADPLHGSGTPADAMMLADFAAYLPDDLLCKVDRTTMAVGLEARAPLLDWRVAEFAWSLPLSLKYRDGVSKYLLKRVLCRYLPDAMVYRGKRGFGAPVSAWLRGDLHGWADDLLAHGALQREGVFAADSVARLWRDFNGGERKWHTHLWTVLMFQAWQAHWREQRAAVVR

SEQ ID NO: 14551 - protein, 408 aa, Candida tropicalis
MDRLNQLSGQLKPNAKQSILQKNPDDVVIVAAYRTAIGKGFKGSFRNVHSEFILTEFLKEFIKKTNIDPSLIEDVAIGNVLNQAAGATEHRGACLAAGIPYTAAFIAVNRFCSSGLMAISDIANKIKTGEIECGLAGGAESMSTNYRDPRVAPRIDPHLADDAQMEKCLIPMGITNENVANQFNISRERQDEFAAKSYNKAAKAVASGAFKSEILPIRSIIRNSDGTEKEIIVDTDEGPREGVTAESLGKLRPAFDGTTTAGNASQVSDGAAAVLLMKRSLAEAKGYPIIGKYVLCSTAGVPPEIMGVGPAFAIPEVLKRTGLTVDDIDVFEINEAFAAQCLYSAEQVNVPEEKLNINGGAIALGHPLGETGARQYATIIPLLKPGQIGLTSMCIGSGMGSASILVRE

SEQ ID NO: 14552 - protein, 493 aa, Rhodobacter sphaeroides 2.4.1
MERTGAIGAVLEAMDAPANLRVVARVLGWPFKWLGLPGDPALPPATRALTALGPAYIKFGQILSTRPDVVGPEMALQLQYLQDKLPPFPTSVAKALIEEELHLPVDRVFSEFSEPVAAASIAQVHRARLADTGVEVAVKVLRPGIERAFRTDIDAFYLAAQIIELLSPSSRRLRPTEVIRHFEGVVNGELDLRLESASAGEFAVNTEADAGFQVPKPVWNLSARQVMTIGWAEGLSLADNPALDAAGHNRTELGTRVLSLFLSHALRDGFFHADMHQGNLKVAANGDIIAYDFGIMGRLDEYTRRVYAEIIFGFIQRDYRRVAEVHFEAGYVPADRDIDEFARALRAVGEPIFGMDASRISMARLLAYLFEVTERFGMETRTELILLQRTMVVVEGVARSLDPHINIWQVARPIVEDYIRDNVGPKAVARDLLRTARILGRFGPRLPRLVEARLIRQGHPEVDEPPQRETHSMVWMLAGAGLTAAGVWIGSLL

SEQ ID NO: 14553 - protein, 149 aa, Candida albicans
MAEKLSEQQIAEFKEAFSLFDKDSDGKITTKELGTVMRSLGQNPSESELTDMINEVDVNSDGSIDFPEFLTMMARKMKDTDSEAEIAEAFKVFDRNGDGKISAAELRHLLTSIGEKLSDADVDQMIKEADTNNDGEIDIQEFTLLLAAK

SEQ ID NO: 14554 - protein, 155 aa, Arabidopsis thaliana
DVRMISAEAPILFAKACELFILELTIRSWLHAEENKRRTLQKNDIAAAITRTDIFDFLVDIVPRDEIKDEAAVLGGGMVVAPTASGVPYYYPPMGQPAGPGGMMIGRPAMDPNGVYVQPPSQAWQSVWQTSTGTGDDVSYGSGGSSGQGNLDGQG

SEQ ID NO: 14555 - protein, 465 aa, Pseudomonas syringae pv. tomato str. DC3000
MQPETSDNDDLIYGLNDRPKPLTAILAAFQHVLASFVGIITPPLIIGSTLGLTEYLPYLISMALMVSGTGTFIQARRPFGIGAGMICLQGTSFAFLGAVLSAGFLVKQRGGSPEDIMAMIFGVCFFGALVQIVLSRCIGQLRRIITPLVTGIVITLIGVSLIKVGVTDLGGGFNAPDFGAPLNLALGVFVLAVIIVLNRSNTPWVRLSAIIIGLAVGSLAAWFSGKLIPQPIHDLPLISVPVPFRFGFNFDWTAFLPVALIYLISSIETVGDLTANCMLARQPISGPSYVARLKGGVLGDGVSCMIAATFSAFPNTTFAQNNGVIQLTGVASRYVGLYIGAVLFILGLFPHIGAIVQQIPKPVLGGATLVMFGSVAAAGVRILAQSPLDRRSMLIIATSFGVGLGIAAQPALLHQMPKLVQNLFDSAITSGGITAIVMCLLIPEGKVAVTTTQAATERKPLEQPR

SEQ ID NO: 14556 - protein, 132 aa, Sulfolobus tokodaii
MSSRREIRWGIARVYASQNNTLITITDITGAEIISRASGGMVVKADREKPSPYAAMLAANKAATEAFDKGISAIHIKVRAQGGYGSKTPGPGAQPAIRALARAGFIIGRIEDVTPIPHDSIRRPGGRRGRRV

SEQ ID NO: 14557 - protein, 448 aa, Pseudomonas syringae pv. tomato str. DC3000
MNMFELSDVPVTSQLKLDAHWMPYTANRNFHSDPRMIVAAHGSYLTDDKGRKIYDGLSGLWTCGAGHTRKEIQEAVSRQLGVLDYAPGFQFGHPLSFQLAEKITELTPGNLNHVFYTNSGSECADTAVKMVRAYWRLKGQATKTKMIGRARGYHGVNVGGTSLGGVNGNRKMFGQLMDVDHLPHTLLASNAYSKGMPEAGGIALADEMLKLIELHDASNIAAVIVEPMAGSAGVIVPPQGYLKRLREICDQHNILLIFDEVITGFGRTGSMFGADSFGVTPDLMCIAKQITNGAIPMGAVIASSEIYQTFMNQPTPDYAVEFPHGYTYSAHPVACAAGLAALELLQRENLVQQVAEIAPHFESALHGIKGAKNVVDIRNYGLAGAIQIAPRDGDAIVRPFEAGMKLWKAGFYVRFGGDTLQFGPTFNSQAQDLDRMFDAVGEALNLID

SEQ ID NO: 14558 - protein, 561 aa, Cryptococcus neoformans var. neoformans JEC21
MPIRSPTSLSLKRSSHFTTATRRLHTSTPTLIAAASLSKKLQRFSPQLTPRLLAPNGSRTMSNWPKVTSENPLGLDDPSLFIQKGFINGQYVGTQSGKTFEVNDPASGKTIGTCPEMTVEDTRHAIEVAEKAFATFRNTSPVQRSNWLSELYRLYQASIKDIARLIVWENGKSWNDAMAEATYAGTFFSWFAGEALRTYGDVIPCSVPGTRNFSIKQPIGVVALLCPWNFPAAMIARKMGPALAVGCTSVIKTPSETPFTTLAIIELARRAGIPDGVINVITTDANLQDVGKELCTNPAVHKVSFTGSTRVGKILASQCSSTLKKMSLELGGNAPLIVFEDADIPTAVAGTIASKFRGSGQTCVCANRIYVHEAIYDEFAKKLAEKVAEFKVGPGFGEGVTHGPLIHSRQADKVEEHVQDAIKKGAKVLVGGKRGNGTEYIPTVLTNVSDECLIATEETFGPVAALFRFSSEEEVVARANRAEVGLAGYFFSRDSDRIWRVAEALETGMVGANTGMISQAVIPFGGIKESGYGKEGGRQGTEEYTITKLVAVGTSLHNMPK

SEQ ID NO: 14559 - protein, 401 aa, Sinorhizobium meliloti
MDRRVVITGMGGLCGLGTDTTSIWKWSARRRSAIGPVLNTELHGLKGIVGAEIKALPDHNIDRKQLVSMDRISVLAVIAAHEAMRQAGLSCNEGNALRFGATVGVGLGGWDATEKAYRPSLSTGGRTEIFTGVKAMPSAAACQVSMSLGLRGPVFGVTSACSSANHAIASAVDQIKCGRADVMLAGGSDAPLVWIVLKAWEAMRALAPDTCRPFSAGRKGVVLGEGAGMAVLESYEHATARGATILAEVAGVGLSADAFHITAPAVHGPESAMRACLADAGLNAEDVDYLNAHGTGTKANDQNETTAIKRVFGDHAYSMSISSTKSTHAHCIGAASALEMIACVMAIQEGVVPPTANYREPDPDCDLDVTPNVPRERKVRVAMSNAFAMGGTNAVLAFKQV

SEQ ID NO: 14560 - protein, 686 aa, Bacillus circulans
APDTSVSNKQNFSTDVIYQIFTDRFSDGNPANNPTGAAFDGTCTNLRLYCGGDWQGIINKINDGYLTGMGVTAIWISQPVENIYSIINYSGVNNTAYHGYWARDFKKTNPAYGTIADFQNLIAAAHAKNIKVIIAFAPNHTSPASSDQPSFAENGRLYDNGTLLGGYTNDTQNLFHHNGGTDFSTTENGIYKNLYDLADLNHNNSTVDVYLKDAIKMWLDLGIDGIRMDAVKHMPFGWQKSFMAAVNNYKPVFTFGEWFLGVNEVSPENHKFANESGMSLLDFRFAQKVRQVFRDNTDNMYGLKAMLEGSAADYAQVDDQVTFIDNHDMERFHASNANRRKLEQALAFTLTSRGVPAIYYGTEQYMSGGTDPDNRARIPSFSTSTTAYQVIQKLAPLRKSNPAIAYGSTQERWINNDVLIYERKFGSNVAVVAVNRNLNAPASISGLVTSLPQGSYNDVLGGLLNGNTLSVGSGGAASNFTLAAGGTAVWQYTAATATPTIGHVGPMMAKPGVTITIDGRGFGSSKGTVYFGTTAVSGADITSWEDTQIKVKIPAVAGGNYNIKVANAAGTASNVYDNFEVLSGDQVSVRFVVNNATTALGQNVYLTGSVSELGNWDPAKAIGPMYNQVVYQYPNWYYDVSVPAGKTIEFKFLKKQGSTVTWEGGSNHTFTAPSSGTATINVNWQP

SEQ ID NO: 14561 - protein, 520 aa, Glycine max
MEPLFSSAAAICVVTVLVAVIPIWALKMLNSLWLRPKRFERLLRAQGFHGDPYSLSHHNSNQTLLQQHQLNSQPFPLSDDVAPRVSSLLHHTIDKYGKKSFFWEGRTPKVIITDPNQLKEVFNNIHDFQKPKFSDNVKFLFAGLLNYEGDKWAKHRRIMNPAFHSEKLKNMLPAFSQSCHDMISMWKGMLSSDGKCEIDIWPFLQNLTRDVISQTAFGSSYAEGEKFFRNLRMQGYLLMAGKYKNIPILRHLRTTTTKRMEAIEREIRDSIEGIIKKREKAMENGETSNEDLLSILLESNHKEIQGHGNSRAVGMTKQEVIEECKLFYLAGQETTSSLLVWTMVLLARYPEWQARARDEVFQVFGNQNPNIDGLSKLKIVTMILYEVLRLYPPTTFFSRAPQKDVKLGNLSLPAGIRITMPILFIHHDGDIWGDDAKEFKPERFSEGIAKATKGQISFYPFGWGPRICIGQNFALMEAKIVLSLLLQHFSFELSPVYEHAPTVVLSLQPKRGAHIVLHKL

SEQ ID NO: 14562 - protein, 474 aa, Corynebacterium efficiens
MERRTKIVCTLGPAVASADGILRLVQDGMDVARLNFSHGDHPDHEQNYKWVREATDKTGRAVGILADLQGPKIRLGRFKEGSTVWETGETVRITVDDVEGTHDRVSTTYKNLAKDARPGDRLLVDDGKVGLVCVSVEGNDVICEVTEGGPVSNNKGVSLPGMDISVPALSEKDIKDLRFALKLGVDFIALSFVRSPADVELVHAIMDEEGRRVPVIAKLEKPEAVAALESIVLAFDAIMVARGDLGVEVPLEEVPLVQKRAIQIARENAKPVIVATQMLDSMIENSRPTRAEASDVANAVLDGADAVMLSGETSVGKDPHNVVRTMSRIVRFAETDGRVPDLTHIPRTKRGVISYSARDIAERLNARALVAFTTSGDTAKRLARLHSHLPLLVFTPDPSVRSQLALTWGAQTFLCPKVDDTDGMMREVDRALLAMDEYQKDDMMVVVAGSPPGVTGNTNMIHVHLLGEDTRIPK

SEQ ID NO: 14563 - protein, 686 aa, Bacillus circulans
APDTSVSNKQNFSTDVIYQIFTDRFSDGNPANNPTGAAFDGTCTNLRLYCGGDWQGIINKINDGYLTGMGVTAIWISQPVENIYSIINYSGVNNTAYHGYWARDFKKTNPAYGTIADFQNLIAAAHAKNIKVIINFAPNHTSPASSDQPSFAENGRLYDNGTLLGGYTNDTQNLFHHNGGTDFSTTENGIYKNLYDLADLNHNNSTVDVYLKDAIKMWLDLGIDGIRMDAVKHMPFGWQKSFMAAVNNYKPVFTFGEWFLGVNEVSPENHKFANESGMSLLDFRFAQKVRQVFRDNTDNMYGLKAMLEGSAADYAQVDDQVTFIDNHDMERFHASNANRRKLEQALAFTLTSRGVPAIYYGTEQYMSGGTDPDNRARIPSFSTSTTAYQVIQKLAPLRKSNPAIAYGSTQERWINNDVLIYERKFGSNVAVVAVNRNLNAPASISGLVTSLPQGSYNDVLGGLLNGNTLSVGSGGAASNFTLAAGGTAVWQYTAATATPTIGHVGPMMAKPGVTITIDGRGFGSSKGTVYFGTTAVSGADITSWEDTQIKVKIPAVAGGNYNIKVANAAGTASNVYDNFEVLSGDQVSVRFVVNNATTALGQNVYLTGSVSELGNWDPAKAIGPMYNQVVYQYPNWYYDVSVPAGKTIEFKFLKKQGSTVTWEGGSNHTFTAPSSGTATINVNWQP

SEQ ID NO: 14564 - protein, 653 aa, Cryptococcus neoformans var. neoformans
MIDNEDPSRDVAGAGELGQDWRPIGHTPNQLVLYHPASHALRVRIQPPSPPRSAFPSDIVRANDALRRRSPDSATRSLCLLCRQPVPRNGLGEVAAISGMESYFQTLEHVHSESESFSQGVGIDDLLDAPQPRTSNEENSSAAGYYARFFKEVRKLGMGAEGSVYLAVHHIEGDTLGTYAVKKIAVGESKEYLHKILREVKLLEVLRHTNIIPYYHAWIDTTRFSDLAPPVLALHVLMMYASGGNLDSLLLSRSHSTGFAAGLSADDIADAEPIDQLPKEERIKAFKRRRQSAKTEWANNQRPFTGGRRASRAENRGVLLLSFEEIAQLFGDIIDGLAFLHSNSILHLDLKCSNVLLHWEEGKLVPKAMLSDFGTSEEMLRGQRERTGHTGTMEYAPETLVQDAKGRFRPSDSHADMWSLGMILYKMMFLKLPYEECDSYDVLRAQILSYMGFLPDGPLLQNLQRRHIPKRFAFLLKELLDIHPEKRPSAEKTRSVLADIKHHSNQNEDYSSAIVGQTLASLENLSYPSSRSICRRDSVVVNDGHLDADATTPNNGLLPFFPLPKNNLLPSLTDVPERAMTCLAGPAVRLALLFGKLVSIQPSISGVRLPPVVAVILILLALTDLAHQGSFLWSLTCLIAHCAAVLNFSSHEI

SEQ ID NO: 14565 - protein, 639 aa, Mesorhizobium loti MAFF303099
MSGVAGILLRQEAPADAATDIQRMLARMRHRGPDGNSWWLDSGIALGHAWLNTTDEAGPGPLTMAGGKLAITADCRLDNRDELMARLGIRDRSVADAVLLMRAYLRWGESCPVHLQGDFAFAIWDAERQLLFCARDHFGVKPFYYHAADRRFAFASEIGPMLGLDGVGARISEHRISGFLAGLPDDPQSTPYSDIFTLPARHSLTVTAQQVVLRRYWQIEPSVRPARSDAAEEFAHLFSQSVRNRMRGSRSVGAMLSGGLDSSSIACVAGLQNAAERKPKLPTFSLVFEKGSSMDERAFIDAVLDQHKTDPTLIPVGNYAPFAEFERVLEEQEGTFLAPGLTLTRGIYRTAGAKGIKVLLDGHGGDEVVSQGHGHLHELANGGRWLDLWREVRSASNTYGDSTLGLYFQFLTLYGPAWRIAKARQLANRALNRIRKPTQMQRGRSWRDLINPDLARRTELIDRFHRAGYMPPGVQASDALSHRWILSNGYVPHSFEVLDKAAANFGVEPRYPFWDKPLVEFCLALPGEEKLSHGFGRYVLRRAMEGILPAAVQWRRDKIDFTANLVNGMVRNHRDLLEQLLVSDAGRIAPYVNLPQVSAAYARLLSQPDQVASLDVQYVWRSASLSLWLRQVQHGGSPA

SEQ ID NO: 14566 - protein, 185 aa, uncultured bacterium
GCTSGIDAIGYGHQMIQDGEADIVISGASESPISPISMACFDPIKATSQRNDDAAHASRPIDRDRDGFVMGEGCGILILEELDAARARGAHIYAEVVGYGTRGNAYHMTGLRPEAFAMTEAILDAMRQAEVKPEDIDYINAHGSGTKQNDRHETNAYKKTLGEHAYQVPISSIKSMVGHSLGAIG

SEQ ID NO: 14567 - protein, 536 aa, Deinococcus radiodurans R1
MSDENNKGVGTAVQGVGGPRDGRTAPGEQGTTLTTRQGHPVHDNQNSRTVGSRGPMTLENYQFIEKLSHFDRERIPERVVHARGVGAHGVFRATGKVGDEPVSKYTRAKLFQEDGKETPVFVRFSTVGHGTHSPETLRDPRGFAVKFYTEDGNWDLVGNNLKIFFIRDALKFPDLIHSQKPSPTTNIQSQERIFDFFAGSPEATHMITLLYSPWGIPASYRFMQGSGVNTYKWVNDQGEGVLVKYHWEPVQGVRNLTQMQADEVQATNFNHATQDLHDAIERGDFPQWDLFVQIMEDGEHPELDFDPLDDTKIWPREQFPWRHVGQMTLNRNPENVFAETEQAAFGTGVLVDGLDFSDDKMLQGRTFSYSDTQRYRVGPNYLQLPINAPKKHVATNQRDGQMAYRVDTFEGQDQRVNYEPSLLSGPKEAPRRAPEHTPRVEGNLVRAAIERPNPFGQAGMQYRNFADWERDELVSNLSGALAGVDKRIQDKMLEYFTAADADYGQRVREGIQAKEAEMKGQKQEAPVYGTEASSLY

SEQ ID NO: 14568 - protein, 185 aa, uncultured bacterium
GCTSGMDAIGYGHQMIQDGEADIVISGASESPISPISMACFDPIKATSQRNDDAAHASRPFDRDRDGFAMGEGCGILILEELDAARARGAHIYAEVVGYGTRGNAYHMTGLRPEAFAMTEAILDAMRQAEVKPEDIDYINAHGSGTRQNDRHETNAYKKTLGEHAYQVPISSIKSMVGHSLGAIG

SEQ ID NO: 14569 - protein, 185 aa, uncultured bacterium
  misc_feature (64)..(64): Xaa can be any naturally occurring amino acid
  unsure (1)..(185): unsure at all Xaa locations
GCTSGIDAIGYGHQMIQDGEADIVISGASESPISPISMACFDPIKATSQRNDDAAHASRPFDRXRDGFVMGEGCGILILEELDAARARGAHIYAEVVGYGTRGNAYHMTGLRPEAFAMTEAILDAMRQAEVKPEDIDYINAHGSGTKQNDRHETNAYKKTLGEHAYQVPISSIKSMVGHSLGAIG

SEQ ID NO: 14570 - protein, 484 aa, Xanthomonas axonopodis pv. citri str. 306
MLRSLIVCCRVRMSYAIVWFRRDLRLEDNPALRAALDAGHHPIPLYIDAPHEEGEWTPGAASRTWRHRSLAALDGALRALGSGLVIRVGNSAQVLDEVIAQTGAVAVYWNRKYEPATQPRDAQIKRDLRERGIEVQSCNCALLFEPWQLSTQQGGPYKVFTPFWRNALTQLQLPAAIGAPRSLPPLPASLKTDALDTLQLVPGLQWDQGFWEHWQPGEAGAHEMLEIFIDGALSGYRENRDRPDRVGTSQLSPHLHFGEIAPWRIANTLETHRTARNGAEIDAYIRQLGWRDFAYHLLHHFPDTTNQNLNPRFAGFDWATVDPVALQAWQRGRTGIPIVDAGMRQLWHTGWMHNRVRMIVASFLCKHLRIHWIEGARWFWDTLVDADLANNTLGWQWVAGTGADAAPYFRVFNPVTQAEKFDPQAAYITRWVPELGKLAVKERFAPWLHPLSLARLAPEYPRTPIIGLAEGRDAALAAYAKTRG

SEQ ID NO: 14571 - protein, 130 aa, Sorghum bicolor
ARVVPLVAALLVLLALAVSSTRNRNAQEGEESMALDGGIKDVPANENDLHLQELARFAVDEHNKKANALLGYEKLVKAKTQVVAGTMYYLTVEVKDGEVKKLYEAKVWEKPWENFKELQEFKPVEEGASA

SEQ ID NO: 14572 - protein, 282 aa, Lactobacillus plantarum WCFS1
MTVLTTMYQLANGVNIPKVAFGTWQIPGGEATYQAVRAALAAGYRHIDTALAYQNEASVGQAIRDSGIPREQIFVTTKLPAETKSYQGALNDFDRSLKNLGLDYVDLYLVHAPWPWGQVGRVYDEANLDVWQAMEAIYQSGRAKAIGVSNFAVRDLKNILNQATIPPMVNQIQYYLGFTEPKITKFSEEHAMLVEAYSPLATGGVLDNPQVQAYADKYGVSVAQLALRFVLQNGVLPLPKAVNPAHIEANTQLDFAISVADMQALNDLPDAAGSYMHNPTQG

SEQ ID NO: 14573 - protein, 161 aa, Xanthomonas campestris pv. vesicatoria str. 85-10
MSDISTFAFTDLEGRTQSMRDYAGNVLLVVNVASKCGFTPQYAGLQALWQRYRERGLVVIGFPCDQFGHQEPGDAAQIRQFCSLDYAVDFPLAAKIEVNGNGAHPLWQWLKHEQRGVLGSEAIKWNFTKFLVGRDGRVLERYAPTTKPEALAADIERALGA

SEQ ID NO: 14574 - protein, 529 aa, Triticum aestivum
MEYERIHKPQAGALSPTKLRMKLLGAHNRVRVISSSSSRTSPSKNAEPSLAHNRLLVCDVLDEVSDSSGASKCPAAVSNTEVIDKDPAVDRYKVQNTPKSSVHQPAPSNSSMIHPVRTVEEDSNECDSGLDNASTSSFEFHGGEKTAAKNPTAGYFSRQASSKWNDAEKWIVNKQTVQQNTTTKGASQNQSAHQVSSAAPRGGGVVPKHHGTFARPIQNMKRFNPASSASRSILERLSFASHQPKLVRHADVCADQGSSAISDYQKGQAETDSIAIKPCNDTEAISTVQAVSVRDVGTEMTPIPSQDPSRTGTPLGSVTPTRSPNCSIPSTPVGGRSSASIGEDNADDGPYFNRKGGMNEMSEDEIRLKARKEIAALGVQLGKMNIASWASKEELELVSATPSIADLERMKQEYATRAAAFEDAENSKHTARFKKEELKIEAWESRQRTKVESEMKRLEERAEKMRSEAMARMAERLELARRVAEEKRASANAKMNKQAARAVQKADLIRQTGRIPGSRILCCGCFCEP

SEQ ID NO: 14575 - protein, 393 aa, Dechloromonas aromatica RCB
MSRDVVVLSAVRSAIGAFGGALADFESTELAGIVMKEAIARSGVDPQAINYVTVGTTMPTDSRYAYVSRVASIQAGLSMDSVAMQVSRLCASGLQGIVTTAQNLMLGDADYGIGGGVEVMSKAAYLLPALRNGARMGDTKAIDSMVAVLTDPFGVGHMGITAENLAAKHGFSREDQDAFAVESQRRAAAAIDAGYFKSQIVPIVKQTRKGDVVFDTDEHLKRGTTMESLAKMKPAFKKDGTVTAGNASGINDGAAFFVLAAADVAAKAGHKARARIAGYAVAGVPNDVMGEGPIPATKAALKKAGLTLDQMDVIESNEAFAAQALSVSKVLGLDPAKTNPNGGAIALGHPVGCSGAFIATKALYELERIGGKYALVTMCIGGGQGIAVIFERA

SEQ ID NO: 14576 - protein, 598 aa, Crocosphaera watsonii WH 8501
MSKMKKIKTNKHPMQRLLQYGKTYRNLIWQAVTCSVINKIFDLAPPVLIGAAVDVVVNQQDSFIGKLGVNDVFNQLLILSFLSIIVWGLESLFQYTYERLWRNLAQNIQHNLRLDAYGHLQELELAYFEERNTGLLLSILNDDINQLEHFLDVGANEILQVMTTVVIVGAMFFIVTPGTAWMAMLPIPFILWGSITFQKLLAPRYADVREKVGLLNSRLSTNLSGITTIKSFTTEAYELDRLRHESQAYRKSNLKAIAFSSAFVPLIRMVILIGFTAILLYGGMEVVDGKLAVGNYSVLVFLTQRLLWPLTKLGQTLDLYQRSMASTNRVMKLLDTPLTIHSGTIALPTGTVKGKIELNNVNFAYQEGYPIIKNLSLNIPAGNRIGVVGSTGSGKSTLVKLLLRLYEIDHGEISLDDINIQDIYLGDLRKSIGLVSQDVFLFHGTAKENIAYGNNNASYREIIEAAKIAEAHEFIEQLPQGYDTIVGERGQKLSGGQRQRIAIARAILKDPPILILDEATSAVDNETEAAIARSLEKITAQRTTIAIAHRLSTIRHSDCIYVMEFGKIVEQGTHEKLLEKQGIYAGLWQVQTGVISEY

SEQ ID NO: 14577 - protein, 94 aa, Clostridium botulinum
MRIKPLGDRVVIKRLEAEEKTKSGIVLPGSAKEKPQEAEIVAVGPGGLVDGKEVNMEVKVGDRVLFSQYAGNEVKIDGEEYIILRQNDILAIVE

SEQ ID NO: 14578 - protein, 204 aa, Oryza sativa (japonica cultivar-group)
MGRPPCCEKEGVKKGPWTPEEDMVLASYVQEHGPGNWRAVPPRTGLLRCSKSCRLRWTNYLRPGIRRGGFSHHEERLILHLQALLGNRWAAIASYLPHRTDNDVKNFWNTHLKKKLALTSSSSSPPTPTTPLVARGQWERKLQTDIDLARRALRDALSVDDAASPAMISSGPPAPAAAAAYALSERNISVMLSGWAAPPPARKG

SEQ ID NO: 14579 - protein, 457 aa, Zea mays
  misc_feature (199)..(199): Xaa can be any naturally occurring amino acid
  unsure (1)..(457): unsure at all Xaa locations
MYTLPVRATTSSIVASLATPAPSSSSGSGSGRPRPRLIRNAPVFAAPATVVGMDPTVERLKSGFQKFKTEVYDKKPELFEPLKSGQSPRYMVFACSDSRVCPSVTLGLQPGEAFTVRNIASMVPPYDKIKYAGTGSAIEYAVCALKVQVIVVIGHSCCGGIRALLSLKDGAPDNFHFVEDWVRIGSPAKNKVKKEHASXVPFDDQCSILEKEAVNVSLQNLKSYPFVKEGLAGGTLKLVGAHYDFVKGQFVTWEPPQDAIERLTSGFQQFKVNVYDKKPELFGPLKSGQAPKYMVFACSDSRVCPSVTLGLQPGEAFTVRNIAAMVPGYDKTKYTGIGSAIEYAVCALKVEVLVVIGHSCCGGIRALLSLQDGAPDTFHFVEDWVKIGFIAKMKVKKEHASVPFDDQCSILEKEAVNVSLENLKTYPFVKEGLANGTLKLIGGHYDFVSGEFLTWKK

SEQ ID NO: 14580 - protein, 204 aa, Oryza sativa (japonica cultivar-group)
MGRPPCCDKVGVKKGPWTPEEDLMLVSYIQEHGAGNWRAVPTNTGLMRCSKSCRLRWTNYLRPGIKRGNFTEQEEKLIVHLQALLGNRWAAIASYLPERTDNDIKNYWNTHLKKKLKKMQAAEGGEDSGAASEGGGGRGDGDGGGKSVKAAAPKGQWERRLQTDIHTARQALRDALSLDHPDPSPATAAAAATPAGSSAAYASS

SEQ ID NO: 14581 - protein, 441 aa, Escherichia coli
MNKYQAVIIGFGKAGKTLAVTLAKAGWRVALIEQSNAMYGGTCINIGCIPTKTLVHDAQQHTDFVRAIQRKNEVVNFLRNKNFHNLADMPNIDVIDGQAEFINNHSLRVHRPEGNLEIHGEKIFINTGAQTVVPPIPGITTTPGVYDSTGLLNLKELPGHLGILGGGYIGVEFASMFANFGSKVTILEAASLFLPREDRDIADNIATILRDQGVDIILNAHVERISHHENQVQVHSEHAQLAVDALLIASGRQPATASLHPENAGIAVNERGAIVVDKRLHTTADNIWAMGDVTGGLQFTYISLDDYRIVRDELLGEGKRSTDDRKNVPYSVFMTPPLSRVGMTEEQARESGADIQVVTLPVAAIPRARVMNDTRGVLKAIVDNKTQRMLGASLLCVDSHEMINIVKMVMDAGLPYSILRDQIFTHPSMSESLNDLFSLVK

SEQ ID NO: 14582 - protein, 229 aa, Oryza sativa (japonica cultivar-group)
MGRSPCCEKEHTNKGAWTKEEDERLVAYIRAHGEGCWRSLPKAAGLLRCGKSCRLRWINYLRPDLKRGNFTADEDDLIIKLHSLLGNKWSLIAARLPGRTDNEIKNYWNTHIRRKLLGRGIDPVTHRPVNAAAATISFHPQPPPTTKEEQLILSKPPKCPDLNLDLCISPPSCQEEDDDYEAKPAMIVRAPELQRRRGGLCFGCSLGLQKECKCSGGGAGAGAGNNFLG

SEQ ID NO: 14583 - protein, 396 aa, Coxiella burnetii RSA 493
MQEILSQLNKEIEGLKKAGLYKSERIITSPQNAEIKVGEKEVLNFCANNYLGLADHPALIKTAQTVVEQYGFGMASVRFICGTQTIHKELEKDISEFLGTDDTILYSSCFDANGGLFETLLGPEDAIISDELNHASIIDGIRLCKAQRYRYKNNAMGDLEAKLKEADEKGARFKLIATDGVFSMDGIIADLKSICDLADKYNALVMVDDSHAVGFIGENGRGTPEYCGVADRVDILTGTLGKALGGASGGYTSGHKEIIEWLRNRSRPYLFSNTVAPVIVATSLKVLELLKTEGPQLRKQLQENSRYFRAGMEKLGFQLVPGNHPIIPVMLGDAQLATNMADHLLQEGIYVVGFSYPVVPMGKARIRVQMSAVHTQQQLDRAIEAFGQVGKKLGAI

SEQ ID NO: 14584 - protein, 547 aa, Neurospora crassa
MAANNMVNPAVDPALEDELFAKEVEEVKKWWSDSRWRQTKRPFTAEQIVSKRGNLKIEYASNAQAKKLWKILEDRFAKRDASYTYGCLEPTMVTQMAKYLDTVYVSGWQSSSTASSSDEPGPDLADYPYTTCPNKVGHLFMAQLFHDRKQRQERLSVPKDQREKLANIDYLRPIVADADTGHGGLTAVMKLTKLFIEKGAAGIHIEDQAPGTKKCGHMAGKVLVPIQEHINRLVAIRAQADIMGSDLLCIARTDAEAATLITTTIDPRDHAFILGCTNPDLEPLAHLMMKAEAEGKTGAQLQAIEDDWLAKADLKRFDEAVLDVIAKGKFSNAKDLAAKYQAAVKGKQISNREARAIARQLLGQEIFFDWESPRTREGYYRLKGGCDCSINRAISYAPYCDAIWMESKLPDYAQAEEFAKGPRVWPEQKLAYNLSPSFNWKTAMGRDDQETYIRRLAKLGYCWQFITLAGLHTTALISDQFAKAYSKIGMRAYGELVQEPEIDNGVDVVKHQKWSGATYVDELQKMVTGGVSSTAAMGKGVTEDQFH

SEQ ID NO: 14585 - protein, 436 aa, Chromobacterium violaceum ATCC 12472
MKKILAAMASGLAALSLPALADAPAGPAVAAAKVINSGDTAWMLTSTALVLFMTIPGLALFYGGMVRKKNVLATLMQSFAITALVTVLWAVVGYSLAFTVGTPYIGDLSRVLLDGMVYMKDAGKLAVHPLAGTIPESVFMTFQMTFAIITPALITGAFAERMKFSAMLVFMALWSLLVYVPVAHWVWAPGGWMGDKGVLDFAGGTVVHINAGVAGLVTALVLGKRVGFGREAMPPHNLVLTLVGASMLWVGWFGFNAGSAGAADGRAGMAMVTTQVATAMAALAWMFAEWIAKKKPSVLGIASGAVAGLVAITPAAGFVDVKGALAIGLAAGVICFWGATGLKHMMGYDDSLDAFGVHGVGGILGALLTGVFAVKDIGGADGSLATQALGVGVTIVYCGVVTFILLKLVDIVLGLRVAEDEEREGLDLVLHGERVE

SEQ ID NO: 14586 - protein, 386 aa, Yarrowia lipolytica CLIB122
QIDAKWKTCPTTCNLDHPSRFPTCQLLLKDVTIEQVVNASNNNNNTLTPLAESSAGATHTPPSSVHIVNEQKLAVRSIRQFLQSKSAYDVLPVSFRLIVLDTALLVRKSLTILLQNNIVSAPLWNSKTSKFAGLLTAADYINVIQYYFQNPDKMEEIDKITLDDFRDVEKAVGAKPIETISIHPMKSIFEACKKMIESKAKRIPLIDRDEETGREIVVSVLTQYRILKFVALNCKETRGLMMPICSLPKLGVFKGLATAHMDTPVVQVIKLLVDARVSSIPIVDTHNRLMNVYEAVDVLALIKGGIYTDLTLSVGEALMRRPEDFEGVYTCTNQDRLDTIMNTIRRSRLHRLYVVDGDGKLEGVVTLSDILRYLLFDEDVEQVEVK

SEQ ID NO: 14587 - protein, 338 aa, Phaffia rhodozyma
MAVKVGINGFGRIGRIVLRNAIIHGDIDVVAINDPFIDLEYMVYMFKYDSTHGVFKGSVEIKDGKLVIEGKPIVVYGERDPANIQWGAAGADYVVESTGVFTTQEKAELHLKGGAKKVVISAPSADAPMFVCGVNLDKYDPKYTVVSNASCTTNCLAPLAKVIHDNYTIVEGLMTTVHATTATQKTVDGPSNKDWRGGRGAGANIIPSSTGAAKAVGKVIPSLNGKLTGMAFRVPTPDVSVVDLVVRIEKAASYEEIKETIKKASQTPELKGILNYTDDQVVSTDFTGDSASSTFDAQAGISLNGNFVKLVSWYDNEWGYSARVCDLVSYIAAQDAKA

SEQ ID NO: 14588 - protein, 159 aa, Yarrowia lipolytica CLIB122
MRHIIDYIDHPFRGVGDLTMSSPFLDNSLTRSPTSSQAPQLPSSFKFVPQMDLYNKPDRIRVSMSLPGVKMDDIVVEFEDEARVLSVSGETCSETDKDSLGLVINERQCGEFERRIRIPQGENIDPDHITAKLTNGVLEVVIPKIEGKPEPKKVNVDKE

SEQ ID NO: 14589 - protein, 626 aa, Pediococcus pentosaceus ATCC 25745
MCGFAGYINQANVNKDTIKSMADRIKHRGPDDEAFFQDENASMGFRRLSIIDLAHGRQPMMNSAETKVLTFNGEIYNYKQVREELKELGYEFRTDVDSEVLIHGYDAWGPELLKKLRGMFAFVIYDKEKQEVFGARDHFGIKPLYYYDDDKTFLWGSEIKSFLEHPNFVKEFNEELLPIHLSFEFIPSKETMFKNVYKLLPGTYFIHKNGKTETHTYFKFNYDHIDESQTIEEDSKKIRKIVSDSVDAHMIADVEVGSFLSSGIDSSYVLAEAAKLKPIQSFSLGFRNSKYSELSYSTEFAKEINQKNTPLYMDGDDYFDILPTIMYYMDEPLSNPSAMQLFYLSKGTRKNVKVALSGEGADEFFGGYNTYLEAFTFERYQKMVPSFIRKGLAKAVSGLPRFHGRRFLMRGAQPLSERYYRVNYVFNQQERDQILRNPALNVDSGAYTQHIFDEVKGKDEMTQMQYFDINTWLPFDILHKADRMSMANSLEVRTPLVDREVAKFAATMPIKTRIHKEETKVSLRRAAEAELPERVAKKEKLGFPSPIANWIKEDKYRKRIEAAFNSDIAKKFFKPEALMHILDEHVNGKSSMQKIFTIYTFILWYGVFFPEDTNTNTIDLVKRTQV

SEQ ID NO: 14590 - protein, 175 aa, uncultured bacterium
YGHQMIQDGEADIVISGASESPISPISMAYFDPIKATSQRNDDAAHASRPFDRDRDGFVMGEGCGILILEELDAARARGAHIYAEVVGYGTRGNAYHMTGLRPEAFAMTEAILDATRQAEVKPEDIDYINAHGSGTKQNDRHETNAYKKTLGEHAYQVPISSIKSMVGHSLGAIG

SEQ ID NO: 14591 - protein, 543 aa, Lactobacillus johnsonii
MAKEIKFSENARHSLLKGVDKLADTVKTTLGPKGRNVVLEKSYGAPDITNDGVTIAKSIELENHFENMGAKLVSEAAQKTNDIAGDGTTTATVLTQAIVREGMKNVTAGANPVGIRRGIETATKAAVDELHKISHKVSTKDEIAQVASVSSASTEVGNLIRDAMEKVGHDGVITIEESKGIDTELSVVEGMQFDRGYLSQYMVTDNDKMEADLDNPYILITDKKISNIQDILPLLQEIVQQGKSLLIIADDVDGEALPTLVLNKIRGTFNVVAVKAPGFGDRRKAMLEDIAILTGGTVISSDLGLELKDTKIDQLGKAGKVTVTKDSTTIVEGAGSKEAIAERVDQIKKQIADTTSDFDREKLQERLAKLAGGVAVIKVGAATETELKERKYRIEDALNATRAAVEEGYVAGGGTALVDVMKSIQGTVKGDSEDAETGVKIVMKALGAPVRQIAENAGKDGAVILDHLEHEDPEVGYNAATNKWENMVKAGIIDPTKVTRSALQNAASIAALLLTTEAVVADAPEDDKNQAPAAPNPGMGMGM

SEQ ID NO: 14592 - protein, 185 aa, uncultured bacterium
GCTSGIDAIGYGHQMIQDGEADIVISGASESPISPISMACFDPIKATSQRNDDAAHASRPFDRDRDGFVMGEGCGILILEELDAARARGAHIYAEVVGYGTRGNAYHMTGLRPEAFAMTEAILDAMRQAEVKPEDIDYINAHGSGTKQNDRHETNAYKKTLGEHAYQVPISSIKSMVGHSLGAIG

SEQ ID NO: 14593 - protein, 185 aa, uncultured bacterium
GCTSGMDAIGYGHQMIQDGEADIVISGASESPISPISMACFDPIKATSQRNDDAAHASRPFDRDRDGFVMGEGCGILILEELDAARARGAHIYAEVVGYGTRGNAYHMTGLRPEALAMTEATLDAMRQAEVKPEDIDYINAHGSGTKQNDRHETYAYKKTLGEHAYQVPISPIKSMVGHSLGAIG

SEQ ID NO: 14594 - protein, 543 aa, Clostridium botulinum
MAKSILFGEESRRAMQAGVDKLANAVKVTLGPKGRNVVLDKKFGSPLITNDGVTIAKEIELEDPYENMGAQLVKEVATKTNDVAGDGTTTATLLAQAIIREGLKNVTAGANPMLIRKGIKLAVDTAVEQIKKSSKQVDGKEDIARVAAISAADPEIGKLIADAMERVGNEGVITVEESNTMATELEVVEGMQFDRGYLSPYMVTDAEKMEAVLENPYILLTDKKISNIQEILPILEQIVQQGKKLLIIAEDIEGEALATLVVNKLRGTFTCVAVKAPGFGDRRKEMLRDIAILTGGEVISEELGREIKDVTLDMLGTAESIKVTKENTTIVNGKGSKAEIEDRIGQIKRQIEETTSEFDKEKLQERLAKIAGGVAVVKVGAATETELKERKLRIEDALAATKAAVEEGIVAGGGTAYLRAIKEVEKLTDNNSEIRLGIAIIRRALEEPVRQIASNAGLEGSVIIDKIMNGQEGMGFDALEGEYVNMVQKGIVDPAKVTRSALQNAASVASTFLTTECVVAEIPEKNPAPQAPGMGGMGMEGMY

SEQ ID NO: 14595 - protein, 185 aa, uncultured bacterium
GCTSGMDAIGYGHQMIQDGEADIVISGASESLISPISMACFDPIKATSQRNDDAAHASRPFDRDRDGFVMGEGCGILILEELDAARARGAHIYAEVVGYGTRGNAYHMTGLRPEAFAMTEAILDAMRQAEVKPEDIDYINAHGSGTKQNDRHETNAYKKTLGEHAYHVPISSIKSMVGHSLGAIG

SEQ ID NO: 14596 - protein, 546 aa, Mycobacterium tuberculosis H37Rv
MDQHQRPDPMGPGSPRASARRPEPDPMGEPWWSRAVFYQVYPRSFADSNGDGVGDLDGLASRLDHLQQLGVDAIWINPVTVSPMADHGYDVADPRDIDPLFGGMPAFERLVAAAHRQGIKVTMDVVPNHTSSAHPWFQAALADLPGSPARDRYFFRDGRGPDGSLPPNNWESVFGGPAWTRVREPDGNPGQWYLHLFDTEQPDLNWDNPEILDDFEKTLRFWLDRGVDGFRIDVAHGMAKPPGLPDSPDLGIEVLHHRDDDPRFNHPNVHAIHRDIRTVIDEYPGAVTVGEVWVHDNARWAEYLRPDELHLGFNFRLARTEFDAAEIRDAVANSLAAAALQNATPTWTLANHDVGREVSRYGGGEIGLRRAKAMAVVMLALPGVVFLYNGQELGLPDVDLPDEVLQDPTWERSGRTERGRDGCRVPIPWSGNIPPFGFSTCPDTWLPMPPEWAALTAEKQRADAGSTLSFFRLALRLRRERNEFDGDVDWLAAPDDALIFRRHGGGLVCALNAAERPLALPAGEPILASAPLTDATLPPNAAAWLV

SEQ ID NO: 14597 - protein, 473 aa, Buchnera aphidicola str. APS (Acyrthosiphon pisum)
MNKKIYTQVVVIGSGPAGYSAAFRCADLGLDTVLIERYDKLGGVCLNVGCIPSKTLLHIAKVIKEAKELHKTGVSFNKPDIDIKKIKNWKQHIVNKLTDGLSSMRKKRKIRIFQGHAIFETDKSLCVTNTEDKFTIFFDNAIIATGSKPIKIPSIPHDDIRIWDSTDALSLKKIPNNFLIIGSGIIGLEMATIYSALGSKVDIIDRFNHFLPVIDEDISSIYKKSINQQFNLMLNTHIDKVEVKKDALIVDMIHENIPKKNILYDAVLVAIGRTPNIDSLGLDRIGLKINNFGFIQVNNQLKTNIPHIYAIGDVAGTPMLAHKGVHEGHIAAEVISGKNHYFEPKVIPSIAYTDPEIAWVGLSEKEAKQENINYEVAIFPWNASGRAIASNCSIGKTKLIFNKQNNKIIGGSIVGSNAGELIGEVGLAIEMGCDAEDIALTIHAHPTLSESIGLSAEVFQGTVTDVLNFKLNK

SEQ ID NO: 14598 - protein, 152 aa, Brassica napus
  misc_feature (16)..(16): Xaa can be any naturally occurring amino acid
  misc_feature (31)..(31): Xaa can be any naturally occurring amino acid
  misc_feature (38)..(38): Xaa can be any naturally occurring amino acid
  unsure (1)..(152): unsure at all Xaa locations
FTQFLALKDMDPLDAXATNPHSNFGKFCKSXKYLILIXPKMEASFFGNLDQREYVTGGGHPRTAFYQAFLKLAKSIWLLHRLAYSFDPAAKIFQVKKGSEFSDSYMESVLKNIVVDEKGESPSVGLMVMPGFWIGGSVIQSRVYVSGVKVVE

SEQ ID NO: 14599 - protein, 482 aa, Ralstonia eutropha JMP134
MPVFPSNQRRGDAPMTSASTTVPTDLTNERLPSGRLLALGLQHVLVMYAGTVAVPLIVGGALKLPKDQLAFLINADLFAAGLATLIQAFGFWKFGIRMPVMMGVTFASVAPMIAIGTDPNVGLLGIYGAVIASGVFGILVAPMMGRMLGLFPPVVTGTVITLIGVSLMRVGINWAAGGQPTTRAVIDGVVKEVPNLAYGDLANLGIAGLTLAVILLLTKYGRGLVANCAVLLGIIAGTFVAMAMGKVSFEGLNEASFVAVITPLHFGIPTFELSAILSMCIVMLITLVESTGMFLALSDITGKKLSNEDLTRGLRADGLGTVIGGLFNTFPYTSFSQNVGLVTVTGVRSRYVAAAGGIILIAFGLFPKMAHVVASVPQFVLGGAGIVMFGMVAATGIRILGSCDFNRNRHNLFIVAISIGFGMIPTLAPTFFQYLPKWTVPFTHSGIVLGTIVAVALNLFYNGIQSREEAMRNAAANTHGTE

SEQ ID NO: 14600 - protein, 342 aa, Coxiella burnetii RSA 493
MKVLSKLKPAPGLWLHKAPTPKPGRDEVLIKIKKTAICGTDLHIYKWDEWAQKTIPVPMHVGHEFVGEIVEVGEAASALAVGDRVSGEGHITCGDCRNCRAGKRHLCRYTVGVGVNRPGAFAEYLVIPAKNAYKIPAKISDDIAAILDPFGNAAHSALEFDLVGEDVLITGAGPVGLMSAAIARHVGARHVVITDVNDYRLALAEKVGVTAAVNSTKTPLTETMKNLGMTEGFDVGLEMSGNAEAFRSMLTVMNNGGKIAFLGIPPEPFAIDWNQVVFKSLLIKGIYGRRMFETWYKMTNLLLSGLDISPIITHEFPMKDFQQAFDVMLSGKTGKVILNWEQ

SEQ ID NO: 14601 - protein, 849 aa, Rhodobacter sphaeroides 2.4.1
MDIEQKLAKERRARLAAERLLEYKQRELFAANEKLAIHARALSDQIIEQRAVVKTALSEAEKLKGQNSRFLSELERAHTAAVMAERRLWDSIDAIEDGFAVFDAGQRLVAANEAYRCHFEGLEVRPGMALADLLQLATTHGLIDLRGEPADHWRQRMIRRWDEDPVEPEIVRRCTGQWLRLVNRRARDGDMVSLLIDITEQMRLRAAIDAIPDGFVLFDRAERLVLCNDRYRAIYPRSAEALRPGAPFEEILRHGLAHGQFPEAAGREEEWLADRLAAFRHLGGAAEQQLDDGRWLRVIEHETPDGGRVGLGVDITELKRQQAALESARAAAEAASRAKSAFLANMSHEIRTPMNGIVGMADLLCETVLTEDQRLFSETIRSSGEALLVIINDILDYSKIEANRLTLHPEPFDLERTIHEVAMLLQPKARAKGIDLLIDFDLFLPTRFVGDPGRLRQVLTNLIGNAVKFTAAGHVLIRVVGLEVAPGRHDLRVTVEDTGIGIAPEHLDHVFGEFNQIEAEATRRFEGTGLGLAITRRLIELMQGAVWVESEPGRGSCFGFRLTLPAADDEAAPPVPIEVRRALVVDGQFINRTILERQLAPCGISVTLCRSGIEALAELSADAGYDLLLTDHEMPDLDGLALAQRVRAGGFSMPILLLTSNPSAVRDHPAEALLAGVLQKPLLRSDLYRRLQSLTAPPAAPDRPPPVPVPALRRMRVLAAEDNRTNQLVFGKMVRDLDIDLTFADNGREAVELYDRIRPDLVFMDISMPEMDGRAAARAIRARERGGTHVPIVALTAHALESDARASAAAGIDRTLTKPLRRAMILETLAAFCPAGTRPIQPALVEGPD

SEQ ID NO: 14602 - protein, 199 aa, Staphylococcus epidermidis RP62A
MSESNHITWHDSEVTKKQRQHKNGHKSAVIWFTGLSGSGKSTVSVALEKELFNEGKQTYRLDGDNVRHGLNKNLGFSPEDRSENIRRIGEVAKLMVDAGALTVTAFISPYKEDREGVRALLEDNEFIEVYTKCSVEECEKRDPKGLYKKARSGEIPEFTGISAPYQAPENPEITIDTEHDTIEQSVVQIIRYLKEHEYI

SEQ ID NO: 14603 - protein, 320 aa, Bifidobacterium longum DJO10A
MPEPVRERLEALKDAPGSVIVVGSMNADYTVTTKRLPKPGETVNGGAMKVLPGGKGANQASAAARLGVNVQLLGAVGEDSNADFLLSKLDEAGVDTADILHVEGPSGTTVITVSAEGENTIVYSPGSNAKASAGYVQSHRTTIAECAVLGLCLESPIATVIAAAQTAHDAGVTVLLNDSPFMDELPHELVEATDILLVNQHEVAQLLGLPDDDVESLDWYEVAERFTDYGFDRAIVTLGASGSVVIENGRWHRVSAAQVNAVDTTGCGDSFMGTVLAGLAAGHTLLQSAQIGSYVSAYAATKLGAQSAYGTAEEVIAYFS

SEQ ID NO: 14604 - protein, 286 aa, Arabidopsis thaliana
MELLTSLTNWLTPTTLLLLLNFTIATIFITNRFSSGSRKHNQHQDGYGSSGHDQNQARFGRPPSLIDRVKSINFHLYNSPSPESEIHYSGSDPNPNPPPSLLQRVKSINMPYFKFPQHNSEGDYAAYELMTQPDETNRVDPIDKIPEDEVTTEPRFGAPSLLQRVKSIKLPSLYRSDPDPTPEVQTHTRTKSESSKPATKKKKKATKKMMKSASERHIGREEEETVEAVEKRRPETMRVERTTSIGDGGEEGVDDKASNFINKFKQQLKLQRLDSFLRYREMLKND

SEQ ID NO: 14605 - protein, 756 aa, Haemophilus influenzae Rd KW20
MTTSHILGFPRVGAKRELKFAQERYWRKELAEQDLLDLAKALREKNWKHQAAANADFVAVGDFTFYDHILDLQVATGAIPARFGFDSQNLTLDQYFQLARGNKDQFAIEMTKWFDTNYHYLVPEFQKSTAFKANPAHYVNQIREAKALGLNFKPVIVGPLTFLWLGKEKGEAFNRFDLLNQLVPVYVEILNALVAEGAEWIQIDEPALALDLPAEWVEAYKSVYTELSKVNAKLLLATYFGSVAEHAELLKALPVAGLHLDLVRAPEQLAAFEDYSKVLSAGVIEGRNIWRANLNKVLDVLEPLKAKLGERLWIAPSCSLLHTPFDLEVEVQLKEKNTALYSWLSFTLQKVEELNVLKQALNNGRASVQAALDASQVAADARATSKEIHRPEVAERLANLPKGADQRKSPFAERIVKQNAWLNLPLLPTTNIGSFPQTTEIRHARASFKKGELSLADYEAAMKKEIEYVVRRQEELDLDVLVHGEAERNDMVEYFGELLDGFAFTKFGWVQSYGSRCVKPPVIYGDVTRPEPMTVRWSQYAQSLTNRVMKGMLTGPVTILQWSFVRNDIPRSTVCKQIGVALSDEVLDLEAAGIKVIQIDEPAIREGLPLKRADWDAYLQWAGEAFRLSSMGVQDDTQIHTHMCYSEFNDILPAIAALDADVITIETSRSDMELLTAFADFKYPNDIGPGVYDIHSPRVPTATEVEHLLRKALNVIPKERLWVNPDCGLKTRGWTETIDQLKVMVDVTKKLRAELA

SEQ ID NO: 14606 - protein, 138 aa, Brassica napus
  misc_feature (124)..(125): Xaa can be any naturally occurring amino acid
  unsure (1)..(138): unsure at all Xaa locations
MNPEIHHSKVISHVFFTGSAKQGSPGPPIGLVDIGESDIAYLFRVSLPGIHKNLNKIKCEIQREGRVCIQGVVPEIAIPSDSGCLYRMQVQQLCPPGPFSITFNLPGQVDPRLFSPKFRPDGIXXVVVVKLGVRVLLL

SEQ ID NO: 14607 - protein, 1107 aa, ASPERGILLUS NIDULANS FGSC A4
MLSPITRATALSSGKAQGSTFQRAAAPMMWSKGFSTTAPGSKKAAILLQDKSNGFGFARSNPRPKKPRSQGVTEIRGPYYTVMGKRYLADILETMGTHVDGLKFAGGSFSLFPEKPLRELIDLAHEHSVYVSTGGWAEHLLTHPDPTSVFDKYLTKCEDLGFVMLNLVPFRVLTLHHRFDVIELSSGFLSIPEDDWLRLVDKVHSYGLKAKPELGIQFGAGGDTSAAGLESLGTSDPGKLVNLGRKFLDAGVERLMIESEGITENVKSWRTDVVSKIMKELPPERVMFEAADPQVYTWYIREFGIDVNLFVDHSQIVQLSGLRHGIWGTADTFGRLVSFRAEPSVSRLLIAAPSPALAAGSRTTNEDTLESDNANASSQYSCRGPSPVQTGRRKEAECHFSDKPARLLRPGNDPKEAMLLSEHLVSTPQRRTAMDHLLNSLEDTSANLEQQVEEDKDGGAAPVPKVARLLRDGQGKFMYIGDSASLSFLQSVRRIVSQSIGRCEFTEDTSRHSMLEAFQSSSATQNGPLAQPPSNDEAQRLARQYVLATSPLLDLFDLEEFHPRLANWIGNPTGDEDTVSSIFYLVLAIGAQVSDTNQAQAERYFVSGRQLAFSAFTETPSLYTIQSYVLISMYMLGACRRNGAFMNLGIALRAAYAVGIHRRDANSLFTTRERRARERVWKSLRMMDLFLSASLGRPPATSDFDYDLREDEVSRKESHLPQDQVSTTVISLCRIFERVLTEVYMRQVVSINLAENISNQHRAWVRTLPTFLQLQRDRLESRTLEESLAAAHVFGSYYWSIILLTRPFLIFWVSQYVKSKKGSAGAPESRNGTSRLSLFADACVYSALRGLDIVEGLARYEALPRRLPFLINSVFNSAVVLGAAFFADYDNLLPLGEGMNKAERFLELFVPHDPHSCRFLQIIRYLRAAVSEYVGRRSRQWMERRSRQVEQLFGQVGPASADELSPTPDTIPSARRPGEIAAPSPLSPNKLPQADNPIPSQHPDLTTLAPHDSSIWDALCGTTTAGLPFDSAISTLTTTGIPVNFSPGGSMGMPLAGAGASASASRRAGAETGDGDGHTPLSDMILSDNGLLYMAEDLPVFGLWDET

SEQ ID NO: 14608 - protein, 314 aa, Pueraria montana var. lobata
MAAIEIPTIVFPNSFAQHRVPVVEMGSAPDFTCKKDTKEAIIEAVKQGYRHFDTAAAYGSEQALGEALKEAVDLGLVSRQDLFVTSKLWVTDNHPHLVVSALRKSLKTLQLEYLDLYLIHWPLSSQPGKFSFPIEVEDLLPFDVKGVWEAMQECQKLGLTKAIGVSNFSVKKLQNLLSVATIRPVVNQVEMNLAWQQKKLREFCKENGIVITAFSPLRKGASRGPNEVMENDVLKEIADAHGKSIAQVSLRWLYEQGVTFVPKSYDKERMNQNLQIFDWALTQEDHHKISQISQSRLISGPTKPQLSDLWDDEI

SEQ ID NO: 14609 - protein, 331 aa, Oryza sativa (japonica cultivar-group)
MGRAPCCEKVGLKRGRWTTEEDEKLAGYIAKHGEGSWRSLPKNAGLLRCGKSCRLRWINYLRAGVKRGNISNQEEDVIIKLHATLGNRWSLIASHLPGRTDNEIKNYWNSHLSRQIHTYRRTYTAPSEAAVTIDVTKLQAAGKRRGGRTAGQSRKGDKKRAEDDPPKETAAADTPLPESSPRRAQSDEARSGSVVVDPEEPSSQPNNGSSGGGGGTPDGPCSEETATGPTSLDPMEMGLWEVESEFAEMEALLCGGVAPDGPGIPGLEPLDVAAQADDLLDMDWDGFAADLWGDPAQRGGLVQDAGEPNGSMGCSSDELESFASWLLSDSC

SEQ ID NO: 14610 - protein, 492 aa, Ricinus communis
MDPYRNRPSSGFNTPFWTTNSGAPVWNNNSSLTVGSRGPILLEDYHLIEKLANFDRERIPERVVHARGASAKGFFEVTHDVSHLTCADFLRAPGVQTPVIVRFSTVIHERGSPETLRDPRGFAVKFYTREGNFDLVGNNFPVFFIRDGMKFPDVVHAFKPNPKSHLQENWRIFDFLSHVPESLHMLTFLLDDLGIPQDYRHMEGSGVNTYTLINKAGKVHYVKFHWKPTCGVKCLLENEAIKVGGSNHSHATQDLYDSISAGNYPEWKLYIQIMDPAHEDKFDFDPLDVTKTWPEDILPLQPVGRLVLNKNIDNFFAENEQLAFCPGIVVPGVSYSEDKLLQTRIFSYSDTQRHRLGPNYLQLPVNAPKCAHHNNHHEGFMNFMHRDEEVNYFPSRCDPARNAESFPVPSAICSGKREKCVIEKENNFKQPGERYRSWAPDRQERFLNRLVGGLSDPRITHELRTIWISYWIQCDKSLGQKLATRLNVKPSI

SEQ ID NO: 14611 - protein, 646 aa, Xanthomonas campestris pv. vesicatoria str. 85-10
MCGLAGMLLASPRLHGEQLDALVRPMGAALRHRGPDDAGTWCDAQAGVALAHQRLSILDLSPLGHQPMRSADGRYVLAYNGEVYNFAQLRAALSALGHRFRGHSDTEVLLAAVVEWGLDETLTRCNGMFAIALWDERDNCLFLARDRVGKKPLYYGWAGDTLVFGSELKALWQHPDFDNGVDRDALTLLLRLGYIPAPACIHEHTFKLMPGRVLRMDAQAVAAGAAAHRPDQAQQPFWNAREAMQRALATPFTGTDAQAEEQLDSVLRDAVALRMVADVPVGVFLSGGTDSSIVTAMMQAQSAQPVHTFSIGFEGSHHDEAPLAREVATHLRTDHTELYVSGADALAVVPGLPDMFDEPFADASQVPTALVARLARGGVTVALSGDGGDELFFGYGRYQRALRNWRMHGLVPGPLRRLMAVAARRNGESSRTGGLAALVAEAGARGIGDIYRNRISRWRDPAAVVLGATEPDSFYSLADPLHGSGTPADAMMLADFAAYLPDDLLCKVDRTTMAVGLEARAPLLDWRVAEFAWSLPLSLKYRDGVSKYLLKRVLCRYLPDAMVYRGKRGFGAPVSAWLRGDLHGWADDLLAHGALQREGVFAADSVARLWRDFNGGERKWHTHLWTVLMFQAWQAHWREQRAAVVR

SEQ ID NO: 14612 - protein, 492 aa, Ricinus communis
MDPYKFRPSSSNDTPFWTTNAGDPVSNNNSSMTVGPRGPILLEDYHMIEKLANFTRERIPERVVHARGMSAKGFFEVTHDVTDLTCADFLRAPGVQTPVIVRFSTVIHERGSPETLRDPRGFATKFYTREGNFDIVGNNFPVFFIRDGIKFPDVVHAFKPNPKSHIQEYWRIFDFCSHHPESLSTFAWFFDDVGIPQDYRHMEGFGVHTYCLINKAGKVTYVKFHWKPTCGVKCLMDDEAIKVGGANHSHATQDLYDSIAAGNFPEWKLMIQTMDPADEDKFSFDPLDMTKIWPEDMFPLHPVGRLVLNRNIDNWFAENEMLAFNPAHVVPGVYYSNDKLFQLRLFAYSDTQRHRLGTNYLQLPVNAPKCPYHNNHYDGFMNFMHRDEEVDYFQSRYDPVRHAEKVPIPNAICSGRREKCVIEKEDNFRQPGDRYRSWAPDRQERFLCRLVNALSEPRITHEIRSIWVSWWTQCDKSLGQKLASRLNVRPNI

SEQ ID NO: 14613 - protein, 521 aa, Pueraria montana var. lobata
MLLELALGLLVLALFLHLRPTPTAKSKALRHLPNPPSPKPRLPFIGHLHLLKDQLLHHALIDLSKKYGPLYSLYFGSMPTVVASTPELFKLFLQTHEATSFNTRFQTSAIRRLTYDNSVAMVPFGPYWKFIRKLIMNDLLNATTVNKLRPLRTEQIRKFLRVMAQSAEAQQPLNVTEELLKWTNSTISMMMLGEAEEIRDIAREVLKIFGEYSVTNFIWPLMYLKVGKYEKRIDDIFNKFDPVIERVIKKRREIVRRRKNGEVVEGEASGVFLDTLLEFAEDETMEIKITKEQIKGLVVDFFSAGTDSTAVATEWALAELINNPRVLQKARDEVYSVVGKDRLVDEVDTQNLPYIRAIVKETFRMHPPLPVVKRKCVEECEVNGFVIPEGALILFNVWAVGRDPKYWDRPLEFRPERFLESGAEGEVGPIDLRGQHFQLLPFGSGRRMCPGVNLATSGMATLLASLIQCFDLQVVGPKGEILKGNDAKVSMEESAGLTVPRAHNLRCVPLARTSVAAKLLS

SEQ ID NO: 14614 - protein, 546 aa, Chromobacterium violaceum ATCC 12472
MAAKDVKFGDSARSKMVAGVNILADAVKVTLGPKGRNVVLDRSFGAPTITKDGVSVAKEIELKDKFENMGAQMVKEVASKTSDVAGDGTTTATVLAQAIVQEGMKFVAAGMNPMDLKRGIDKAVVSLVGEIAKIAKPCATSKEIAQVGSISANSDSDIGEIIANAMEKVGKEGVITVEDGKSLNNELDVVEGMQFDRGYLSPYFINNQDKQIAALDNPFILLFDKKISNIRDLLPVLEQVAKSGRPLLIIAEDVEGEALATLVVNTIRGILKVVAVKAPGFGDRRKAMLTDIAVLTGGEVIAEEVGLTLEKATLDQLGQAKRVEVGKENTTIIDGAGEAATIQARVGEIRKQIEEATSDYDREKLQERVAKLAGGVAVIKVGAATEVEMKEKKARVEDALHATRAAVEEGVVPGGGVALLRARATLENLKTDNAEQEAGVKIVLRAIEAPLRQIVKNAGDEPSVVVNKVLEGKGNFGYNAASGEYGDMLEMGVLDPAKVTRSALQHAASVAGLMLTTDCMIAELPEDKPAAGMPDMGGMGGMGGMM

SEQ ID NO: 14615 - protein, 455 aa, Bacillus anthracis str. A2012
MEQVVNLAKHRGFVFPGSEIYGGLANTWDYGPLGIELKNNVKKAWWKKFIQESPYNVGLDAAILMNPKTWIASGHVGNFNDPMIDCKKCKARHRADKLIEDALDAKGIEMVVDGLTFDQMADLMKEHEVKCPDCGSEEFTEIRQFNLMFKTFQGVTESSTNEIFLRPETAQGIFVNFKNVQRSMRKKLPFGIGQIGKSFRNEITPGNFTFRTREFEQMELEFFCKPGEDLEWFAFWRETCKNWLLSLGMTEESMRLRDHGEEELSHYSNATTDIEFKFPFGWGELWGVASRTDFDLKRHMEHSNEDFNYIDPQTNERYVPYCIEPSLGADRVTLAFLCDAYEEEQLENDSRTVLRFHPALAPYKAAILPLSKKLSEGATEVFAELAKDFMVDFDETGSIGKRYRRQDEIGTPFCITYDFDSVEDKAVTVRDRDTMEQVRMPISELKGFLEKKIQF

SEQ ID NO: 14616 - protein, 372 aa, Pseudomonas syringae pv. tomato str. DC3000
MRSKVTGAQRWVVKIGSALLTADGKGLDRNAMGVWVEQMVALHEAGVELVLVSSGAVAAGMSRLGWTARPSAMHELQAAAAIGQMGLVQAWESSFAEHGRHTAQILLTHDDLSDRKRYLNARSTLRTLVELGVVPVINENDTVVTDEIRFGDNDTLAALVANLVEADLLVILTDRDGMFDADPRNNPDAQLIYEARADDPALDAVAGGTGGALGRGGMQTKLRAARLAARSGAHTVIVGGRIERVLARLKGGERLGTLLSPEREMLAARKQWLAGHLQTRGTLVLDDGAVSALASDHKSLLPVGVKLVQGSFRRGEMVVCVAPDGREIARGLSNYSAIEAQKIIGHSSEAIVRELGYMAEPELIHRDNLILV

SEQ ID NO: 14617 - protein, 122 aa, Brassica napus
LSVRVASGAVPFLLYENHAKKKRKIFPANHTVSSSSEAIDSDGVVRRCTHCETTKTPQWREGPNGPKTLCNACGVRFRSGRLVPEYRPASSPTFVPSVHSNSHRKIIEMRSREGDQFGKRAV

SEQ ID NO: 14618 - protein, 296 aa, Pediococcus pentosaceus ATCC 25745
MHVLCWFAIYYLYEVITMLKINQDGLNNLWPVRSNDSHKGSYGRILIVAGNDQYGGAGILSSSAAVYAGGGLVTLATDKTNFTAVRSTLAEVMLLDFLDFDALKAALKKSTGVVIGPGLGTNATSLKILKFVLDHVQPQTPLVIDGSAIDLIATHQIQVDHPQTIFTPHQMEWQRLSGIKIVDQNPSLNQRAVDRLKAMVVLKHYETEIYAPHTDFRQIMAGNPGMATGGSGDALTGVIIALVNQVDSLALGVTLGTFLHSYTADQIYQKEAVVLPHRLIRRLPFTLKQLQKNKLL

SEQ ID NO: 14619 - protein, 185 aa, uncultured bacterium
GCTSGMDAIGYGHQMIQDGEADIVISGASESPISPISMACFDPIKATSQRNDDAAHASRPFDRDRDGFVMGEGCGILILEELDAARARGAHIYAEVVGYGTRGNAYHMTGLRPEAFAMTEAILDAMRQAEVKPEDIDYINAHGSGTEQNDRHETNAYKKTLGEHAYQVPISSIKSMVGHSLGAIG

SEQ ID NO: 14620 - protein, 330 aa, Synechococcus elongatus PCC 7942
MARMYYDADANLDLLNGKTVAIIGYGSQGHAHALNLRDSGVNVVVGLYPGSKSAAKAEAEGLKVLPVAEAAQAADWIMILLPDEFQKSVFENEIRPALSAGKVLAFAHGFNIHFAQIVPPADVDVVMIAPKSPGHLVRRTYEQGQGVPCLFAIYQDASGQARDRAMAYAKGIGGTRAGILETSFREETETDLFGEQAVLCGGLSALIKAGFETLVEAGYQPELAYFECLHEVKLIVDLIVEGGLAAMRDSISNTAEYGDYVTGPRLITEETKAEMKRVLADIQQGRFALDFVQECGAGKPVMTATRRLEAEHPIESVGKDLRAMFSWLKK

SEQ ID NO: 14621 - protein, 185 aa, uncultured bacterium
GCTSGMDAIGYGHQMIQDGEADIVISGASESPISPISMACFDPIKATSQRNDDAAHASRPFDRDRDGFVMGEGCGILILEELDAARARGAHIYAEVVGYGTRGNAYHMTGLCPEAFAMTEAILDAMRQAEVKPEDIDYINAHGSGTKQNDRHETNAYKKTLGEHAYQVPISSIKSMVGHSLGAIG

SEQ ID NO: 14622 - protein, 267 aa, Streptomyces avermitilis MA-4680
MTVKGGTAVARREQTDGATLQGKVAIVTGGAGGLGRATALALGKAGARVVVADLDPQGGKEVADLVGGHFRACDVSDLDANRALVDFAQEQYGGVDIAFLNAGVTTGCGVGEDFDLARYRRAMGANLDGVVFGTHAVLPALRARGGGSIVATASLAGLAAVPLDPLYAANKHAVVGLARSLGQALAPENVRFNAVCPGYAESRIIDDLRDMLAEQGLPVIPAQAVADTVLRIVTGDGTGECWFVQADREPEPFRFRNVPGPGKPAGT

SEQ ID NO: 14623 - protein, 520 aa, Trametes versicolor
MSRFHSLLAFVVASLAAVAHAGIGPVADLTITNAAVSPDGFSRQAVVVNGGTPGPLITGNMGDRFQLNVIDNLTNHTMLKSTSIHWHGFFQKGTNWADGPAFINQCPISSGHSFLYDFQVPDQAGTFWYHSHLSTQYCDGLRGPFVVYDPNDPAADLYDVDNDDTVITLADWYHVAAKLGPAFPLGADATLINGKGRSPSTTTADLTVISVTPGKRYRFRLVSLSCDPNHTFSIDGHNMTIIETDSINTAPLVVDSIQIFAAQRYSFVLEANQAVDNYWIRANPSFGNVGFTGGINSAILRYDGAAAIEPTTTQTTSTEPLNEVNLHPLVATAVPGSPVAGGVDLAINMAFNFNGTNFFINGASFTPPTVPVLLQIISGAQNAQDLLPSGSVYSLPSNADIEISFPATAAAPGAPHPFHLHGHAFAVVRSAGSTVYNYDNPIFRDVVSTGTPAAGDNVTIRFRTDNPGPWFLHCHIDFHLEAGFAVVFAEDIPDVASANPVPQAWSDLCPTYDALDPSDQ

SEQ ID NO: 14624 - protein, 185 aa, uncultured bacterium
GCTSGMDAIGYGHQMIQDGEADIVISGASESPISPISMACFDPIKATSQRNDDAAHASRPFDRDRDGFVMGEGCGILILEELDAARARGAHIYAEVVGYGTRGNAYHMTGLRPEAFAMTEAILDAMRQAEVKPEDIDYINAHGSGTKQNDRHETNAYKKTLGEHAYQVPISSIKSMVGHSLGAIG

SEQ ID NO: 14625 - protein, 310 aa, Synechococcus elongatus PCC 7942
MASASAHAVATAQRRTRDNVSWYLSSIGRIPLLTADQEIELGQKVQVMMNLLEETSSDRTFTEAETAAIQLGQRAKERMIKANLRLVVSVAKKYQGKGLEFLDLIQEGALGLERAVEKFDPSKGYKFSTYAFWWIRQSMTRAIACQSRTIRLPVHLTERLSQIRKVTRELAHELGRLPSRQEIAEAVQLPLNDLETILRQSRQCTSLDAPVSGEDGKSFLGELIADPNGNEPMDIMENAMQREQLDAWLEHLTPQERQVLYLRFGLGDGERHTLAEIGRMMEVSRERVRQVEVKALRKLRNLTKRSRIAV

SEQ ID NO: 14626 - protein, 515 aa, Glycine max
MIKQILSKLPKKVPKSDSSDSARSDSSNTTTFGNVFQCTNVGSTISSKLNVVKRVSSVVFPASMSAGVEAVDPCLSFKDVSNTQKQSLFISKLNLCCKVYDMSDPDKNTTEQDLKRKTLLELVDYVSSGSVKFTEPAIAALCKMCATNLFRAFPPKFRTSTTGGETEDEEPIFDPAWSHLQVVYDLLLQFINYNSLDVKLAKAHIDHAFILRLLDLFDSEDPRERDCLKTILHRVYGKFMIHRPFIRKSVSNIIYRFVFETERHNGIAELLEIFGSVISGFALPLKEEHKIFLLRALVPLHKPKSVGIYHQQLTYCVVQFIDKDQRLASSVIKGLLKFWPVTNSQKELMFISELEEILEMTSMAEFQKIMVPLFRRMAFCLNSSHYQVAERAHLLWNNEHILNLITQNRQVILPLVFSAIVHNGQSHWNQAVLNLTQNIRKMLSQMDEELVAACQRRIEEEDSSASSAAERRRVTWERLEAAAAAASTSCVQSSSVGGGGDVLVPVKSATCSVAC

SEQ ID NO: 14627 - protein, 172 aa, uncultured bacterium
QMIQDGEADIVISGASESPISPISMACFDPIKATSQRNDDAAHASRPFDRDRDGFVMGEGCGILILEELDAARARGAHIYAEVVGYGTRGNAYHMTGLRPEAFAMTEAILDAMRQAEVKPEDIDYINAHGSGTKQNDRHETNAYKKTLGEHAYQVPISSIKSMVGHSLGAIG

SEQ ID NO: 14628 - protein, 548 aa, Legionella pneumophila
MAKELRFGDDARLQMLAGVNALADAVQVTMGPRGRNVVLEKSYGAPTVTKDGVSVAKEIEFEHRFMNMGAQMVKEVASKTSDTAGDGTTTATVLARSILVEGHKAVAAGMNPMDLKRGIDKAVLAVTKKLQAMSKPCKDSKAIAQVGTISANSDEAIGAIIAEAMEKVGKEGVITVEDGNGLENELYVVEGMQFDRGYISPYFINNQQNMSCELEHPFILLVDKKVSSIREMLSVLEGVAKSGRPLLIIAEDVEGEALATLVVNNMRGIVKVCAVKAPGFGDRRKAMLQDIAILTKGQVISEEIGKSLEGATLEDLGSAKRIVVTKENTTIIDGEGKATEINARIAQIRAQMEETTSDYDREKLQERVAKLAGGVAVIKVGAATEVEMKEKKARVEDALHATRAAVEEGIVAGGGVALIRAQKALDSLKGDNDDQNMGINILRRAIESPMRQIVTNAGYEASVVVNKVAEHKDNYGFNAATGEYGDMVEMGILDPTKVTRMALQNAASVASLMLTTECMVADLPKKEEGVGAGDMGGMGGMGGMGGMM

SEQ ID NO: 14629 - protein, 185 aa, uncultured bacterium
  misc_feature (4)..(4): Xaa can be any naturally occurring amino acid
  misc_feature (9)..(9): Xaa can be any naturally occurring amino acid
  unsure (1)..(185): unsure at all Xaa locations
GCSXGMNAXGYGHQMIQDGEADIVISGASESPISPISMACFDPIKATSQRNDDAAHASRPFDRDRDGFVMGEGCGILILEELDAARARGAHIYAEVVGYGTRGNAYHMTGLRPEAFAMTEAILDAMRQAEVKPEDIDYINAHGSGTEQNDRHETNAYKKTLGEHAYQVPISSIKSMVGHSLGAIG

SEQ ID NO: 14630 - protein, 228 aa, Staphylococcus aureus subsp. aureus MSSA476
MPKLILCRHGQSEWNAKNLFTGWEDVNLSEQGINEATRAGEKVRENNIAIDVAFTSLLTRALDTTHYILTESKQQWIPVYKSWRLNERHYGGLQGLNKDDARKEFGEEQVHIWRRSYDVKPPAETEEQREAYLADRRYNHLDKRMMPYSESLKDTLVRVIPFWTDHISQYLLDGQTVLVSAHGNSIRALIKYLEDVSDEDIINYEIKTGAPLVYELTDDLEVIDKYYL

SEQ ID NO: 14631 - protein, 472 aa, Pseudomonas fluorescens PfO-1
MSGQNSQSGELKRGLKNRHIQLIALGGAIGTGLFLGSAGVLKSAGPSMILGYAICGFIAFMIMRQLGEMIVEEPVAGSFSHFAHKYWGGFAGFLSGWNCWILYILVGMSELTAVGKYIHYWAPEIPSWVTAAAFFVLINAINLANVKVFGEAEFWFAIIKVVAIVGMIALGSYLLVSGHGGPQASVSNLWSHGGFFPNGVSGLVMAMAIIMFSFGGLEMLGFTAAEADKPKTVIPKAINQVIYRILIFYIGALVILLSLTPWDSLLETLNASGDSYSGSPFVQVFSMLGSNTAAHILNFVVLTAALSVYNSGTYCNSRMLLGMAEQGDAPKALAKIDKRGVPVRSILASAAVTLVAVLLNYLIPQHALELLMSLVVATLVINWAMISFSHFKFRQHMNKTHQKPLFKALWYPYGNYICLAFVLFILGVMLLIPGIQISVYAIPVWVVFMWICYVIKNKRGAQQALHAASAAK

SEQ ID NO: 14632 - protein, 703 aa, Kluyveromyces lactis NRRL Y-1140
MVQTTDSSSNANTLLSRIPLTLLYPTLLLSNNLILTVHDDILDQSANHVPLLIQYLVLPIFASCLITLCSQVLRTFSNHALTLVISFLIIILNLFLGPVEASTVSVLLLQLVTASEYNLRKYAVLPLLSIGIDYYNNSLSFTTVLSYILILAIIFSSARSKKSLYYLDHIKVPKSALLSVSCISLVIMYLWVTLSTDNQTKITKINYSMLFVFLGCTLVLLLVCQDIKTTLDNQPFATVWQNQYSATIIGFMAMVLQYLSFNAISSSSKSDFLTAVFILISGILPSSLEYENQGYHPKEDENPDKHCQHQLNEHEHEHSHSVSTHSHTHDSKELLENEKEFLTTSKLLMSLATNKETKSIFSFLLLNSAFMFVQLLYSFRSRSLGLLSDSLHMALDCTSLFLGLLAGVLSKYPASDKYPFALGYLETIAGFTNGVLLIGIVIEIFIESFQRIFNPVTILGTTELLVVSILGLLVNVVGLCAFDHGHAHGEHESNDNMRGIFLHVLADTLGSVGVIISTLLTKIFKSQIFDPIASFFIASLILLSSLPLLKSTGSSLLLKVDDKKHALLKNVLNQIVSTPGVTGYTAPRFWPESTSGNSHGHSHGHSHTSSNSHEEENNHSHESSHSHTESPVEAKSKSNSSAKPSLVGYIHVQYIDGENSTIIKKRVERIFERANIKVWIQVEAQSSACWCRATSMKDQAIII

SEQ ID NO: 14633 - protein, 170 aa, Ipomoea batatas
GGKIVKITGIQDMGRTASVLVRGSNQLVIDEAERSLHDALCVVRCLVNKRFLIAGGGAPEIELSRQLGAWAKVLQGMEGYCVKSFAEALEVIPYTLAENAGLNPITIVTELRNRHAQGEINAGINVRKGQITNILEENVVQPLLVSTSAITLATECVRMILKIDDIVTVR

SEQ ID NO: 14634 - protein, 633 aa, Rhodococcus sp. DS7
MTVSSDLIADDIEAYLERHANKSMLRFITCGSVDDGKSTLIGRLLYESKLVFDDQLTALEADSRKSGTQGEGLDFALLVDGLAAKRELGITIDVAYRYFTTERRKFVVADTPGHEQYTRNMVTGASTADLAVILVDSRKGILTQTRRHSYLVSLLGIKHVVLAVNKLDLVDYSQEVFDAITADYAEFAHEIGLDGFVAIPMSAYMGDNLTQRSANTPWYSGPSLIEHLGSVDIDDAAAAAPFRMPVQWVNRPDLDFRGFSGQIVSGTVSPGDPIRVLPSGKTSTVERIVTMGGDLDVARAGRSVTITLADEIDISRGDVLSIGDNPPAVADQFEACIVWMGEAPMLPERPFLCQIGTVTVTGRITKPKHKINVNTLEKTATTTLALNEIGVCNLSFDRPVPFDPYVGNRDTGSFILIDRLTNGTVGAGMITHSLRRSDNIHWQSVDVDEAAHTRLKGHQPAVLWFTGLSGSGKSTIANDVERQLHALGAHTYLLDGDNVRHGLNRDLGFTEADRVENIRRVTEVTRLMADAGLIVLASFISPFEAERHAARELIGDEQFVEIFVDTALAVAEERDPKGLYKKARRGELVNFTGIDSPYEPPQNPDIHVDTSVTTTEDAAIAIVDHLRARGTIS

SEQ ID NO: 14635 - protein, 397 aa, Pseudomonas fluorescens PfO-1
MHFDAIGRVPGDPILGLMEAYAQDSNPRKFDLGVGVYKDAQGLTPIPEAVKIAEARLVESQDTKTYIGGHGNPLFGKVINELVLGVDSKLIAEQRAGATQTPGGTGALRLAADFIAQCLPGKGVWLSNPTWPIHETIFAAAGVKISHYPYVGSDNRLDVDAMLAVLNEVPKGDVVLLHACCHNPTGFDLSHDDWQRVLEVVRRRDLLPLIDFAYQGFGDGLEQDAWSTRLFAAELPELLITSSCSKNFGLYRDRTGALIVSAKTADKLIDIRSQLAHIARNLWSTPPDHGAAVVATILADPELKRRWADEVEAMRLRIAQLRSGLVEALEPHGLRERFAHIGVQRGMFSYTGLSPEQVKNLREHHSVYMVSSGRANVAGIDATRLDLLAEAIANVCK

SEQ ID NO: 14636 - protein, 500 aa, Xanthomonas campestris pv. vesicatoria str. 85-10
MVIHRPASRHRCARWLMLRSLTVCCRARMSYAIVWFRRDLRLEDNPALRAALDAGHHPIPLYIDAPHEEGEWTPGAASRTWRHRSLAALDGALRALGSGLVIRSGDSAQVLDEVIAQTGAVAVYWNRKYEPATQPRDAQIKRDLRERGIEVQSCNAALLFEPWQLSTQQGGPYKVFTPFWRNALTQLQLPAAMDAPRRLPPLPASLKTDALDTLQLVPGLQWDQGFWEHWQPGEAGAHEMLEIFIDGALSGYRENRDRPDRVGTSQLSPHLHFGEIAPWRIASTLEAHRTARNGAEIDGYIRQLGWRDFAYHLLHHFPDTTNQNLNPRFAGFDWATVDPVALQAWQRGRTGIPIVDAGMRQLWHTGWMHNRVRMIVASFLCKHLRIHWIEGARWFWDTLVDADLANNTLGWQWVAGTGADAAPYFRVFNPVTQAEKFDPHATYITRWVPELGKLAVKERFAPWLHPLALARFAPEYPRNPIIGLAEGRDAALAAYAKSRA

SEQ ID NO: 14637 - protein, 255 aa, Oryza sativa
MAPVQFSAAGVGAVAFATKGMASRDALRLPPPAAVRVLRQAPRPSRGLVVRAAAAIVAPKYTTLKPLADRVLVKIKSAEQKTTGGILLPSAAQSKPQGGEVVAIGEGRTVGDNKVEVSIQVGSQVVYSKYAGTEVELNDSNHLILKEDDIIGILETDDAKDMKPLSDRVLIKVAEAEDKTPGGLLLTETTKEKPSIGTVVAVGPGPLDEEGKRIPLSVSAGSTVLYSKYAGSEFKGSDGTSYIVLRVSDLMAVLS

SEQ ID NO: 14638 - protein, 467 aa, Zea mays
SPCSLVILLQMQIFVKTLTGKTITLEVESSDTIDNVKAKIQDKEGIPPDQQRLIFAGKQLEDGRTLADYNIQKESTLHLVLRLRGGMQIFVKTLTGKTITLEVESSDTIDNVKAKIQDKEGIPPDQQRLIFAGKQLEDGRTLADYNIQKESTLHLVLRLRGGMQIFVKTLTGKTITLEVESSDTIDNVKAKIQDKEGIPPDQQRLIFAGKQLEDGRTLADYNIQKESTLHLVLRLRGGMQIFVKTLTGKTITLEVESSDTIDNVKAKIQDKEGIPPDQQRLIFAGKQLEDGRTLADYNIQKESTLHLVLRLRGGMQIFVKTLTGKTITLEVESSDTIDNVKAKIQDKEGIPPDQQRLIFAGKQLEDGRTLADYNIQKESTLHLVLRLRGGMQIFVKTLTGKTITLEVESSDTIDNVKAKIQDKEGIPPDQQRLIFAGKQLEDGRTLADYNIQKESTLHLVLRLRGGQ

SEQ ID NO: 14639 - protein, 95 aa, Chromobacterium violaceum ATCC 12472
MAIRPLHDRVVIKRLEAEEKTASGIVLPGAAAEKPDMGQVLAVGNGKILENGERRPLELKVGDKVIFGKYSGQTVKVDGEEVLVMREEDVMGIVE

SEQ ID NO: 14640 - protein, 580 aa, uncultured bacterium 580
MAELKKIHIPNIGDFDSVEVIEVMVKVGDKINIEDSLITVESDKASMDIPSPASGLIKSIDIKVGDEVKEGSLILSIDSEIEDSSGEKAPEEKKQATQKKEVQPAPQGDKSDEEYDVAVLGSGPGGYTAAFRAADLGLKVALVEKYTTIGGVCLNVGCIPSKALLHTAKVITDAEDTASHGVSFTQPKIDLEQLRNWKSNKVVKKLTMGLSQMAKQREVEVIEGEGKFSSPNQIIVNLKDGTKKSIGFKSAIIAAGSQSSKIPNTPDDERIMDSTGALELRDIPKKLLIIGGGIIGLEMGTVYDALGSEVSVVELSDGLIQGCDRDIVKPLHRRMEKRFEDIWLKTKVTKIETIKEGVVVHFEGDDAPEKLTFDRVLVAVGRKPNGHKIDAEKAGVKVDEHGFINVNKQMKTNVDHIYAIGDIIGQPMLAHKATHEGKVAAEVIAGEKVEFQAMTIPSVAYTDPEIAWAGVTEEDAKTQNLEIEKSVFPWAASGRAISTNRTEGMTKLIFDKKTQRIIGAGIVGTNAGELIAETVLSIEMGADAHDIGLSIHPHPTLSESVAMASEIKEGTITDLFIKKR

SEQ ID NO: 14641 - protein, 381 aa, Arabidopsis thaliana
MTTTTTTTMSTLPVVLVDEILARVPITSLRSLRSTCKRWEAPSKTNLVGGKATARKSSHVGFILIGDKICSMKLDLNGGDDFVDTSVNQVSAFDGFAISQLFHCDGLLLCVSNNHYCSYTLMVCNMYLGETRLIQHRCLFEGFHNFGSYAFGYDSSKNRNHKILRKNPVSGGYEIYSFKSDSWKDLNVDLEKSIHLWRLGSVSLKGNAYFRVIKVIEEGVWEYNLLCFDFTRESFGKLLSLPFESLGDEGEGIMVISCVRDDHLAVLYQRDTLGIWISTEIEPNKVSWREFLQVDLATLDGFPDVFIAGRFIVDEEKQVVVVFGQETELDLNHGNAFIFGRDGYFTSFTVGDAPPEDFTSYVPSLVSLQIDKTGKRKARDD

SEQ ID NO: 14642 - protein, 536 aa, Rhodobacter sphaeroides 2.4.1
MSDWWRGSVTYQIYPRSFQDSDGDGVGDLRGIIERLDHVAWLGADAIWLSPIFPSPMEDMGYDVSDYTAIHPLFGSMEDFDALLARAHELGLKVIIDQVLSHSSSAHPFFRESRRSRDNPKADWYVWADAQPDGSPPNNWLSVFGGSAWEWDAQRRQYYLHNFLISQPDFNFHNPEVQDWLLDQMRFWLDRGVDGFRLDTVNFYFHDAELRSNRPNPQNGPIPPVNAYDMQDHAFSKSRIENIAFLLRMRKLLDDYPDRAMVGEVADGLRGLAIMAEYTSGTDRLHMAYTFEMLSRTFTAGHFRSRIEEFFATAPQGWPCWAFSNHDVVRHATRWAGHGAEDDVARLAAAMLLSFEGSVSLYQGEELGQTETELLYEELTDPPGLRFWPEEKGRDGCRTPMVWDDGPAGGFTTGTPWLPVKPPQLARNVASQKGIPGSLLETYRALLQFRRSQPALIRGRSRFFDLPEPMLGFTRTLDGQSLACFFNLGIEPVSATLPGHGGLIGPAQAAVLEGDRLTLGANGYAFLPAPEDASVS

SEQ ID NO: 14643 - protein, 614 aa, Rhodococcus sp. DS7
MPQLLRVATAGSVDDGKSTLIGRLLYDSKSIFEDQLEAVERSSRERGDEYANLALLTDGLRAEREQGITIDVAHRYFATPHRKFIIADTPGHEQYTRNMVTGASTADLALILVDARKGVLEQTRRHAFLSTLLGIPHLVLCVNKIDLVGWSQERFEEIKEEFRQFAIKLDVHDLTFIPVSALLGDNIVARTENMSWYDGPSLLHHLEQVHIASDRNLIDARFPVQYVIRPQKQTDADLHDFRGYAGTVASGVFKPGDEIVALPSGFTSTVKAVHGPGGDVIDEAFAPSAVCIELADDLDVSRGDQLCRLNNRPQVGQEIDAMVCWLTEQTTLSENNRYSLLHTTRSTKAQIVKLDYRLDVNSLHRDEKAESLSLNEIGRISIKTQQPLMFDPYRRNRVTGSFILVDETTGNTVAAGMINGPTLKESRVVWHSAEVSREERATAGATVWLTGLSASGKSTIAVELERRLVAAGIPAYRLDGDNLRHGLNADLGFSAEDRAENVRRVGSVAQLFADSGAVAVACLISPYREDRDRVRAAHEAAGLKFVEVYVDTPIEQCEARDPKGMYAKARAGEIKGFTGVDDPYEAPASAELVIRPEDGTPTELALRIMEVLDR

SEQ ID NO: 14644 - protein, 158 aa, Staphylococcus epidermidis RP62A
MSIYDIAVENYDGSTYLLKRYKGKVLIIVNTATNCTLNDQFNKLEMLYKKYHKYGLEILSFPCNDFNNQEPGLIKDIYRVYKYKFGITFPIHAKINVNGEHEHPLYTLLKCKQPGLFGSQIKWNFTKFVVDQQGNIVKRFLPCDNPNQMEKLIRQLLK

SEQ ID NO: 14645 - protein, 447 aa, Staphylococcus epidermidis RP62A
MKQYDVVFLGSGHAAWHAALTLKQSGKQVAIVEKDTIAGTCTNYGCNAKIFLEGPYEVLEEAKQYPNIIDSHNLEVNWKNLMHYKEQVINPMSETLTSMFEQQGIDVIMGKGKLVDAHTIGVNNTTLQSDYIVIATGQHSHQLDIEGKEYTHDSREFLSMQSLPDSITFIGAGIISIEFASIMIKSGVEVNVVHHTNQALEGFNESHVNKLIQKLKDEGVKFYFSENTKSVKPNAQRFIVETESGKMIETDYVLDATGRKPNVQQIGLEKVGILFSDRGIEVDDYLRTNVKNIYASGDVINKMIPKLTPTATFESNYIAAHILGLNTDAIQYPPIPSVLYSLPRLSQIGVTVSEAKKDDTYMIKDIPFGRQMVFEYQNETEAEMSIVLDSHKRLVGAEIYGNDAGDLVNLLVFIINQKLTAQDLNKNIFAIPGASSGVIDLLKLAMM

SEQ ID NO: 14646 - protein, 249 aa, Cryptococcus neoformans var. neoformans JEC21
MPIRYISQKLAQQIDVELMSASGAFSLDQLMELAGLSCAQALAKSFPPTKHKHVMVACGPGNQGGDGLVAARHLHHFSYTPTVYLPKPSSKDFLQRLVKQCENLNIPILKDVDAFQTELAKSDVILDAIFGFSFQPPLRKPFDQVLKAIKGVSKKIPIVSVDIPSGWSVTDGPQPLWTEEDDKGGKEMIETFEPEVLVSLTAPKEGVKAFKGQHWLGGRFVPDELGKKHELNIPPYEGIDQVVELPRNH

SEQ ID NO: 14647 - protein, 432 aa, Pirellula sp. 1
MGRGLRCDRWRRTHRIASRIIYGISVHAVGIMMTAEDVHDRLENLSRKHAMKIREVRRYIHRYPELSGYEYRTTEFLAEIIADLGLKPTLAEDNRGLFVDIGEPRELGRTAIRADIDALPIQTMVQHEYASGTDQVMHACGHDAHAAMAYGAAAILTELAGEGMAVNSRIIFQPAEETSRGGLHMIRSGALQGVHSAIALHVDPTRPVGTIGIREGAFTAGCDLFTVEMSGQGGHGARPHLTGDLVGAAAQWVTDIYRRVPRAIDARDAVVINVGSLHTGNAPNVVPSSASISGTLRTLSAESAEKAKEMMAEISRSIASIHSCRIDLEFGQHTPPVINDAAIARRLRNAGIEILGETNVRDIAQPSMGAEDFSFIAQQVPAAMFRLGVAGIDVGSEPLHTPKFDIDESALPIGASVLAMAAILDDPGMTAA

SEQ ID NO: 14648 - protein, 304 aa, Staphylococcus aureus subsp. aureus COL
MTNKVVILGSTNVDQFLTVERYAQPGETLHVEEAQKAFGGGKGANQAIATARMQADTTFITKIGTDGVADFILEDFKVAHIDTSYIIKTAEAKTGQAFITVNAEGQNTIYVYGGANMTMTPEDVINAKDAIINADFVVAQLEVPIPAIISAFEIAKAHGVTTVLNPAPAKALPNELLSLIDIIVPNETEAELLSGIKVTNEQSMKDNANYFLSIGIKTVLITLGKQGTYFATKNQSQHIEAYKVNAIDTTAAGDTFIGAFVSRLNKSQDNLADAIDFGNKASSLTVQKHGAQASIPLLEEVNQV

SEQ ID NO: 14649 - protein, 500 aa, Streptococcus mutans UA159
MNKRVKIVATLGPAVEIRGGKKFGEDGYWGEKLDVEASAAKIAELITEGANVFRFNFSHGDHAEQGERMATVRRAEELARQKVGFLLDTKGPEMRTELFADGVKEYEYKTGDKLRIATKQGIESTKDVIALNVAGGLDIYDDVAVGQTILIDDGKLGLTVTAKDITTREFEVTVENDGIIAKQKGVNIPNTKIPFPALAERDNADIRFGLEQGLNFIAISFVRTAKDVNEVRQICKETGNEHVKLFAKIENQQGIDNIDEIIDAADGIMIARGDMGIEVPFEMVPVYQKMIITKVNAAGKSAITATNMLETMTDKPRATRSEVSDVFNAVIDGTDATMLSGESANGKYPVEAVRTMATIDKNAQTLLNEYGRLNSDNLPRTNKTEVVASAVKDATKSMDIKLVVTITESGNTARLISKYRPDADILALTFDEKVQKSLMINWGVIPILTEKPASTDDMFEIAEKAALKSGLVESGDNIVIVAGVPVGSGGTNTMRVRTVQ

SEQ ID NO: 14650 - protein, 765 aa, Stenotrophomonas rhizophila
MTVSTPSLSTPTRTPPATPAPQLILATDLDGTFLAGDAAARHRLYRLVDQHPGIALIFITGRGLEAVMPLLSDPAIPRPDYVVCDVGATVVDGHTLQPLQPLQSMIDAHWPGEHVVAAAMRPFTALQRQDVPQERRCSYFCDPQTLAPLRAQIQAAAQALGCDVLYSADRYLDILPPDTDKGRTLAALARLLDLPRERILVAGDTLNDLSMYTAGFRGVCVGDSEPALTEATATLATTFHAQAPGCGGILEAIEHFALLADDDRYLYPPKQARAAGADLVMVYHRLPFDEVMENGVLVQRPPRSPNGIIPSLLSFFEGGQKGSWVAWGIDDPKRGPFQTHLAVDAERYPTLTAARVPLSRQEVDIFYKRFSKEAYWPMLHVFWERARFREDDWQVFLKVNRKFAEATAAEAAHGATVWIHDYNLWMVPATLRELRPDLKIAFFHHTYFPSADVFNVVPWRREIIGSLLSCDYIGFHIPRQVENFVDVVRGAVPAERLAWESCAPRFLTYGCAVGLDTMTTRLRVGDREIALGAHPVGTDLRRIHNVLARSDVRNDIFKLRREIGARKLVLSVERLDYTKGTLAKLEAFERLLEQHPERQGKVTLLMVCVPAAREMTVYRTLQNQIEQAVGRINGRFSRLDWTPVRFFAQALPFEEVVAHYAAAQVMWITPLRDGMNLVAKEFVATHGIEGSSGVLVLSEFAGAAAELKGAVLTNPHDPADLTAGLLQALSMPEEEATGRMRQLFGSVEYYDVDRWGREFLEAVRG

SEQ ID NO: 14651 - protein, 514 aa, Pirellula sp. 1
MAAGTALQAPHNETGAQSAPRSKWSKSMPNLLVIDDDRTILALAEKALAPIADVSVAANAADGLGLLREGEFDAVLLDIQLPDQNGLAVYCEIREHDRRIPVIFMTVEAASNTAIEAMQLGAFDYIAKPLNVESLRDLVEKAIEQRQISSVPVAISADDEGGDQSAELFIGRSPVMLDVFKAVGKVAKQDVPILVRGESGTGKELVARALFQYSHRSDETFLAVNCAALPDNLLESELFGHEKGAFTGAESRRIGKFEQCNGGTLFLDEIGDMAPTVQAKVLRVLQEQRFERVGGNKELTTNVRIIAATNRPLEQMVVDGDYREDLLYRLNGVTIELPPLRDRLSDVPALIRFFLAQAKIEFNKPDLEGLSPEAVDLLTVYDWPGNVRQLRAVIRRCVLDTVMPVITPDTLPDAIAGTRNSGAKSESGTNEKLESEAPGSQLPQLVQRLLKEKSTNVYGEAMEYMERFVILQVLQSTDGNQSQAAEILGITRGKLRDRINSYNIVLKSDVAVES

SEQ ID NO: 14652 - protein, 330 aa, Erwinia carotovora subsp. atroseptica SCRI1043
MKLAIYSTKQYDRKYLEQVNQQFGYELEFFDFMLTSRTAKTAAGCQAVCIFVNDDGSRDVLTELAGLGIKTLALRCAGFNNVDLEAAKELGISVVRVPAYSPEAVAEHAVGLMLTLNRRIHRAYQRTRDANFSLEGLIGFNMHNRTAGIIGTGKIGIATMRILKGFGMRLLAFDPYPNPQALELGAEYVDLKTLYANADVISLHCPLTPENHHLLNQAAFAQMKNGVMIVNTSRGGLIDSQAAIDALKQQKIGALGMDVYENERDLFFADKSNDVIQDDIFRRLSACHNVLFTGHQAFLTEEALISISQTTLQNLKDISQNVPCANLVTP

SEQ ID NO: 14653 - protein, 596 aa, papaya bunchy top disease rickettsia
MTKSYNIIHHKFDVIVVGAGGAGLRAAFGMAKEGLNTACISKLFPTRSHTVAAQGGISAALGNMGADDWRWHMYDTVKGSDWLGDQDAIEYMCKNAPDAILELEHYGVPFSRTEEGKIYQRPFGGMTTEYGKGKAAQRTCAAADRTGHAILHTLYQQSLKHKVQFFIEYFAIDLLMEDGECRGVVAWNLDDGSLHCFRAHNVVLATGGYGRAYFSATSAHTCTGDGGGMAIRAGLPLQDMEFVQFHPTGIYSAGCLITEGARGEGGYLVNANGERFMERYAPAAKDLASRDVVSRAMTIEIREGRGVGEHKDHVFLHLNHLSPEILHSRLPGISETAKIFAGVDVTKEPIPVLPTVHYNMGGIPTNYHGQVIIKDGKNHNSVVKGLMSIGEAACVSVHGANRLGSNSLLDLVVFGRSAALKAAELIKPASPHKPVSEEALEKIVSRFDKIRHSSGNISVADLRLKMQRTMQSHASVFRTQEVLNEGAKMISEIRSSYKDIKINDRSLIWNSDLVEALELDNLLDQALVTVYSAAARKESRGAHAREDYPDRNDKEWMQHTLSGVDEAGKVVLDYKPVTLTTLSDEVKAVPPAKRVY

SEQ ID NO: 14654 - protein, 189 aa, Ashbya gossypii ATCC 10895
MANLRTQKRLAASVVGVGKRKIWMDPSETVEIAQANSRNAIRKLFKNGTIVKKPTRVHSRSRTRAMAESKRNGRHTGYGKRKGTKEARLPSQVVWIRRLRVLRRLLAKYRDAGKIDRHLYHSLYKAAKGNTFKHKRSLVEHIIQAKADAQREKALKEEAEARRLKNRAARERRAQRIAEKREALLKEDA

SEQ ID NO: 14655 - protein, 287 aa, Physcomitrella patens
MGFNRGLQCALPILLLLCCHAMVGSHAQPVRSRFNAWTPNTEFPTDTQIRLTLDRQNFAGAGSKESFLYAEISAWIKCPPFDSAGTVTTFYLSSSGPEHCELDMEFLGNSTGQPFILHTNVFVGGKGEREQQMYLGFDPSAEFHLYTFRWTKDSVLFLVDGAVVRVFKNLEGQVPGFKYLKDQAMMVYVSIWDGSQWATQGGRVKINYDSAPFVAHYDYFGLNGCTVDPNDAANGVAACQYSPYATGQNNGNSNPQPSTTTTMLYDYCYDTNRNPTPPPECAYNKVE

SEQ ID NO: 14656 - protein, 183 aa, uncultured bacterium
TSGMDAIGYGHQMIQDGEADIVISGASESPISPISMACFDPIKATSQRNDDAAHASRPFDRDRDGFVMGEGCGILILEELDAARARGAHIYAEVVGYGTRGNAYHMTGLRPEAFAMTEAILDAMRQAEVKPEDIDYISAHGSGTKQNDRHETNAYKKTLGEHAYQVPISSIKSMVGHSLGAIG

SEQ ID NO: 14657 - protein, 415 aa, Physcomitrella patens
MGSLHLLRFGALLLCTLHLVSAQTALPNCSYPAVYGFGDSLTDVGNGIAAFPEKFQHCEEDPYGVTFPMHAADRFTDGKMFIDFLAFGVRRRPTYAVLRGTAGDFTYGTNFAASGGPARPVKVWNSDDKFTTPFSLEVQQQWFQRYKIRLWFYESPVYNPNGRLVQSLPKLANISASLYTVWAGYQDYFFSLYDKKLTVGQTLKIVPDVVKAIEEHIEKMLAVVEYTPPGFPSMLMPPAKEILIQNQLPLGCVPAMLTLYGGSKAKYDEYGCLSSLNKISEAHNTLLGLKVEELRKKYPDAKLYYGDVYAVYTDILKEPAKYNVTAPLKACCGVGGDYNFNKDVWCGQSGTVEGKFVNLTSTYCADPVSTLSWDGIHTSNTVNKALATAFLTGKHIYPEGGLKCNADFKFWEART

SEQ ID NO: 14658 - protein, 436 aa, Streptomyces sp. 139
MRLPRSRAVNERLHALVPGGAHTYAKGDDQYPQDLAPVISHGRGAHVWDVDGNRYIEYGSGLRSVSLGHAHPRVLEAARRELDRGSNFVRPSVVEAEAAERFLATVPTAEMVKFAKNGSDATTAAVRLARAVTGRARVALCADHPFFSTDDWFIGTTPMSAGIPAETTELTVTFPYGDLAATEELLDRHRGEIACLILEPAAQTEPPPGYLAGLRELADRHGCVLVFDEMITGFRWSEAGAQGLYGVVPDLSTFGKALGNGFAVSALAGRRALMERGGLRHDDDRVFLLSTTHGAETHALAAAMAVQATYTEEGVTARLHALGERLAAGVRDAAAAMGVGDHLVVRGRASNLVFATLDGPGRPSQEYRTLFLRRLLTGGVLAPSFVVSAALDEADVDRTVDVVGQACAVYRKALDAGDPTPWLGGRPVRPVFRRRA

SEQ ID NO: 14659 - protein, 162 aa, uncultured bacterium
VISGASESPISPISMACFDPIKATSQRNDDAAHASRPFDRDRDGFVMGEGCGILILEELDAARARGAHIYAEVVGYGTRGNAYHMTGLRPEAFAMTEAILDAMRQAEVKPEDIDYINAHGSGTKQNDRHETNAYKKTLGEHAYQVPISSIKSMVGHSLGAIG

SEQ ID NO: 14660 - protein, 597 aa, Neurospora crassa
MRSLLHKLGRPAAPADIVEEVQHNPNDKEAAVGTTSATNASDPGAETDSSQEISKEAQAGIQRVEAMTKVWTRNDMYMAYITIWILYFVDALQSGMSTSFYPYVTSSFALHSLTATTSIMSSLIGGLFKLPLAKILDIWGRPQGFCAMLGCLTIGLIMMAGCNGVKTYAAAQVFYWVGYNGLTYSISIFLADTSALKNRALLFAFVSSPYIITCWISGIVAQRFLDGPGWRWGYGAFAIIVPAVCSPILWLFYKNHVKAKKAGLLPKHESKGNFWQTLKFYVIEFDILGLLLITTGLALFLLSFNLYSYQKDQWKSPLIICFLIFGGLLMIAFALYEKFLAPKTFIPYQLLMDRTVISACILAGALFVSFYIWDSYFSSFLQVVNNLDVVKTSYVVNVYSVGSCFWSLLVGWAVRKTNRFKWLAVYFGVPVTILGVGLMIHFRQPNENVGYIVMCQIFIATAGGTLVICEQMAVMAATSHEFIAVVLAIEAMFSNVGGAIGSTVASAIWTGVFPKHLAKYLPASEQQNLTAIYGSIVTQLSYPYGSETRNAIARAYGDSQKYMLIAATAIQAISMVSVLFWRDIKLDNVKQNKGLVF

SEQ ID NO: 14661 - protein, 238 aa, Kluyveromyces lactis NRRL Y-1140
MSFKVVSSKVAASIDQELMGPVGFTLQQLMELAGLSVAEAVLQQYPVKSSKSQVLVISGPGNNGGDGLVCARHLKLFGYEPVVYYPKRSGREEFYGQLVKQLEFFDVPVLGQGEDNWLEYLEHENTLCVIDSMFGFSFHPPMRAPFDDILSKLKQFEKKVPIVAVDVPSGWDVDKGPIDNKAIQPDTLVSLTVPKPCAQFLKPEANHYVGGRFVPRHFAQKYGFEPFKYKSGDQILKL

SEQ ID NO: 14662 - protein, 636 aa, Haemophilus somnus 2336
MKKEKTLDLICLGRVAVDLYAQQIGSRLEDVSSFAKYLGGSSGNVAYGTAVQGVKSSMLARVGDEHMGRFLREELQRLGVDTSHLITDKERLTALVILGIKDQDTFPLIFYRDNCADMAITADDFDEEYIASAKALAITGTHLSHPKTRHAVLTALEYAGRNGTKRLLDIDYRPVLWGLTSLGDGETRFIDSEAVTQSLQEVLHHFDVLVGTEEEFHIAGGSTDTLTALKNVRKVSNATLVCKRGALGCSVFEGDIPNHIDGGINVYGVRVEVLNVLGAGDAFMSGLLRGYINGESWEQCCRYANACGALVVSRHGCAPAMPTKEELDNYLSRAESVPRPDLDEQLNHLHRVTTRKQQWHDLCIFAFDHRKQLVDMAEKCGADLKRIPTLKTLLLKAAEQTAQKEGIYNGNAGVLADTTFGQEALNEITGKKWWIGRPIEMPSSRPLRLEHGDLGSQLISWPAEHVVKCLAFYHPADKAELKADQDATLKEVYRACCRTGHELLLEIILPADMEQKESYYTDMIAHFYSLGIKPDWWKLPGVSAKTWADISQVIEKNDKHCRGILILGLDAPEAVFENVFKASANAPLVKGFAVGRTIFGQPSADWLAGKIDDEQLIKETSERYRRLIKLWKNRKN

SEQ ID NO: 14663 - protein, 183 aa, Wolbachia endosymbiont of Drosophila simulans
MALGWVRQSITRAIPEQSKVVRIPLHMVEIISKINRALRKMTHEMGREPTLEELSVELTMPLERIRKVMKIARDPVSLEAPTGKDDSSTFGDCIEDKRVSRPEDAAILADLRGITTNVLATLTPKEERILRMRFGLGKDGKEHTLEEVGKIFNVTRERIRQIEAKALRKLKHPSRARKLRGFF

SEQ ID NO: 14664 - protein, 390 aa, Zea mays
MAPSCYDAAASMLLCAEEHSSILWYDEEEEELEAVGRRRGRSPGYGDDFGADLFPPQSEECVAGLVERERDHMPGPCYGDRLRGGGGCLCVRREAVDWIWKAYTHHRFRPLTAYLAVNYLDRFLSLSEVPDGKDWMTQLLAVACVSLAAKMEETAVPQCLDLQVGDARYVFEAKTVQRMELLVLTTLNWRMHAVTPFSYVDYFLNKLSNGGSTAPRSCWLLQSAELILRAARGTGCVGFRPSEIAAAVAAAVAGDVDDADGVENACCAHVDKERVLRCQEAIGSMASSAAIDGDATVPPKSARRRSSPVPVPVPVPQSPVGVLDAAACLSYRSEEAATATATSAASHGPPGSSSSSSTSPVTSKRRKLASRCDGSCSDRSKRAPAQWTKE

SEQ ID NO: 14665 - protein, 166 aa, Shewanella sp. ANA-3
MAIERAVLAGGCFWGMQDLIRKRPGITSTRVGYTGGEVANATYRNHGNHAEGIEIMFDNEITSYRQILEFFFQIHDPSTVNRQGNDKGTSYRSAIYYTSEAQHAEAVKTIADVDASGLWPGKVVTEVEPASDFWEAEAMHQDYLELRPNGYTCHFPRPDWKLPSSQ

SEQ ID NO: 14666 - protein, 148 aa, Shewanella sp. ANA-3
MNTYQKSMNAISALTKEQYRVTQENGTERPGTGELLKNTKPGIYVDIVSGEPLFASSAKYESGCGWPSFTKAIDSVNVIEITDRSHGMTRTEVRSTHGDSHLGHVFSDGPKDQGGLRYCINSASLRFIPREEMASKGYAEYLDQVEDI

SEQ ID NO: 14667 - protein, 504 aa, Cucumis sativus
MDMNVPNYKLGKTLGIGSFGKVKIAEHALTGHKVAIKILNRRKIKNLDMEEKVRREIKILRLFMHPHIIRLYEVIETPSDIYVVMEYVKSGELFDYIVEKGRLQEDEARNFFQQIISGVEYCHRNMVVHRDLKPENLLLDSKCNVKIADFGLSNIMRDGHFLKTSCGSPNYAAPEVISGKLYAGPEVDVWSCGVILYALLCGTLPFDDENIPNLFKKIKGGIYTLPSHLSSGARELIPSMLVVDPMKRITIPEIRQHPWFQAHLPRYLAVPPPDTMQQAKKIDEDILQEVVKMGFDRNQLVESLRNRIQNEATVAYYLLLDNRFRVSSGYLGAEFQETMETGFNRMHPSDPTNPAVGHRLPGYMDYQGMGLRAQFPVERKWALGLQSRAHPREIMTEVLKALRELNVAWKKIGHYNMKCRWLPGIPGHHEGMINNPVHSNHYFGDKSTIIENDGVVKSPNVIKFEVQLYKTREEKYLLDLQRVQGPQFLFLDLCAAFLAQLRVL

SEQ ID NO: 14668 - protein, 375 aa, Lycopersicon esculentum
MACCFPVILDRSMRSSFKLSKSSSSSKLDKSKSSICSPTSLSTKKKSIQENDNLVVCFGELLIDFVPTVSGVSLAEAPGFKKAPGGAPANVAVGIARLGGSSAFIGKVGADEFGYMLADILKQNNVDNSGMRFDTHARTALAFVTLKSDGEREFMFFRNPSADMLLTEAELDKNLIQKARIFHYGSISLIAEPCRSAHLAAMETAKNAGCILSYDPNLRLPLWPSEEAAREGILSIWDQADIIKVSEDEITFLTNGEDAYDDNVVMTKLFHSNLKLLLVTEGGDGCRYYTNNFHGRVSGVKVAAVDTTGAGDAFVGGLLNSMASDPDIYMDEKKLRDALLFANGCGAITVTEKGAIPALPTKEAVLKILDGATAN

SEQ ID NO: 14669 - protein, 185 aa, uncultured bacterium
  misc_feature (9)..(9): Xaa can be any naturally occurring amino acid
  misc_feature (184)..(184): Xaa can be any naturally occurring amino acid
  unsure (1)..(185): unsure at all Xaa locations
TSGLDAIGXGHQMIQDGEADIVISGASESPISPISMACFDPIKATSQRNDDAAHASRPFDRDRDGFVMGEGCGILIFEELDAARARGAHIYAEVVGYGTRGNAYHMTGLRPEAFAMTEAILDAMRQAEVKPEDIDYINAHGSGTKQNDRHETNAYKKTLGEHAYQVPISSIKSMVGHSLGAIGXA

SEQ ID NO: 14670 - protein, 248 aa, Archaeoglobus fulgidus DSM 4304
MIDRSLIVFFTACYPTAEKTVEFMLTAAESGADVIELGVPFSDPVADGKTIQESYVRALRNFRVERVFEIAKAFRAESDKPLVLMSYYNPIYRRGVESFVEKAYSSGIDAMLVVDLPYDEAGDFVEVCSRTGMKNVFLAAPNTPEDRLRAMDELSAFVYLVSTYGVTGERDRISPLAFEALKRAKGICRKPVAVGFGVSKADHVRQLISAGADGVVVGSAFVRLINEKGERATEDIRALTENLRSGLV

SEQ ID NO: 14671 - protein, 183 aa, uncultured bacterium
TSGIDAIGYGHQMIQDGEADIVISGASESPISPISMACFDPIKATSQRNDDAAHASRPFDRDRDGFVMGEGCGILILEELDAARARGAHIYAEVVGYGTRGNAYHMTGLRPEAFAMTEAILDAMRQAEVKPEDIDYVNAHGSGTKQNDRHETNAYKKTLGEHAYQVPISSIKSMVGHSLGAIG

SEQ ID NO: 14672 - protein, 452 aa, Staphylococcus aureus subsp. aureus MSSA476
MNYTQQLKQKDSEYVWHPFTQMGVYSKEETIIIEKGKGSYLYDTNGNKYLDGYASLWVNVHGHNNKYLNKVIKKQLNKIAHSTLLGSSNIPSIELAEKLIEITPSNLRKVFYSDTGSASVEIAIKMAYQYWKNIDREKYAKKNKFITLNHGYHGDTIGAVSVGGIKTFHKIFKDLIFENIQVESPSFYRSNYDTENEMMTAILTNIEQILIERNDEIAGFILEPLIQGATGLFVHPKGFLKEVEKLCKKYDVLLICDEVAVGFGRTGKMFACNHEDVQPDIMCLGKAITGGYLPLAATLTSQKIYNAFLSDSHGVNTFFHGHTYTGNQIVCTVALENIRLYEKRKLLSHIETTSSTLEKQLHALKRHRNVGDVRGRGLMFGVELVTDKDSKTPLEIEKVERIVRKCKENGLMIRNLENVITFVPVLSMSNKEVKTMVRIFKKAVHNILDRKC

SEQ ID NO: 14673 - protein, 577 aa, Staphylococcus aureus subsp. aureus MSSA476
MFQITFKILNWIRPYKARMILGFSMSFLNAIFIALPIFLAAKIFNNVLSHKPIYMKDILNVVIIMVLLVIGRFITAYFKSKSHESIAYEMSAKERLDIGDKLKNVRLGYFNSHHSNELTTIVTTDLTFLENFAMKMVDVVVNGYILITVLILSLLVVSWQVSLLACIGVLLSFFAIQLLERKSRQNAPAYHNVQNQLVEKVLEVIRGIQVIKSFAKENTSLKSFNQAVNESKRINTKIEMQYIPFNLLHLLSLKVVSIMIVLVACLLYMNHSIDLPTLIMISIFSFVIFDSVENINSAAHVLEMIDMTIDDIEKIKNAPELDENGKNLTIKNENIAFQNVNFSYDDKQVIKNVNFEIPTQTSTAIIGPSGSGKSTLCHLLLRFYDIDDGNIRIDGVDIKDMTLSTLMSKISAVFQKVYLFNDTIENNILFGNPGATKEEIIRAAKQACCHDFIMSLPEGYQTMLNEKGSNLSGGEKQRISIARAILKDAPIIILDEATASIDPENEQLIQTAINELSKGKTVITIAHKLETIKNADQIIVLNEGEIIQKGSHDELIRKPGMYQDFIRIKSKSAGWKL

SEQ ID NO: 14674 - protein, 160 aa, Brassica napus
METFCGFQKEEEQMDLPPGFRFHPTDEELISHYLHKKVLDISFSAKAIGEVDLNKSEPWELPWMAKMGEKEWYFFCVRDRKYPTGLRTNRATEAGYWKATGKDKEIYRGKSLVGMKKTLVFYRGRAPKGQKTNWVMHEYRLEGKLSAHNLPKTAKNEWVI

SEQ ID NO: 14675 - protein, 656 aa, Wolinella succinogenes
MKVQYCDSLVIGGGLAGLRAAVATQQKGLSTIVLSLIPVKRSHSAAAQGGMQASLGNSKMSDGDNEDLHFMDTVKGSDWGCDQKVARMFVNTAPKAIRELAAWGVPWTRIHKGDRMAIINAQKTTITEEDFRHGLIHSRDFGGTKKWRTCYTADATGHTMLFAVANECLKLGVSIQDRKEAIALIHQDGKCYGAVVRDLVTGDIIAYVAKGTLIATGGYGRIYKNTTNAVVCEGTGTAIALETGIAQLGNMEAVQFHPTPLFPSGILLTEGCRGDGGILRDVDGHRFMPDYEPEKKELASRDVVSRRMIEHIRKGKGVQSPYGQHLWLDISILGRKHIETNLRDVQEICEYFAGIDPAEKWAPVLPMQHYSMGGIRTDYRGEAKLKGLFSAGEAACWDMHGFNRLGGNSVSEAVVAGMIVGEYFAEHCANTQVDLETKTLEKFVKGQEAYMKSLVESKGTEDVFKIKNRMKDVMDDNVGIFRDGPHLEKSVKELEELYKKSKNVGIKNKRLHANPELEEAYRVPMMLKVALCVAKGALDRTESRGAHNREDYPKRDDINWLNRTLASWPNPEQTLPTLEYEALDVNEMEIAPRYRGYGAKGNYIENPLSVKRQEEIDKIQSELEAAGKDRHAIQEALMPYELPAKYKARNERLGDK

SEQ ID NO: 14676 - protein, 102 aa, Vibrio harveyi
MNIRPLHDRVIVERKEVESKSAGGIVLTGSAAEKSTRGVVLAVGKGRILENGTVLPLDVKVGDTVIFAEGYGTKTEKIDGKEVLVMSENDIMAIVDLIAIVE

SEQ ID NO: 14677 - protein, 548 aa, Vibrio harveyi
MAAKDVKFGNDARVKMLEGVNVLADAVKVTLGPKGRNVVLDKSFGAPTITKDGVSVAREIELEDKFQNMGAQMVKEVASKANDAAGDGTTTATVLAQAIVNEGLKAVAAGMNPMDLKRGIDKAVIAAVEQPKRASVECTDTKAIAQVGTISANSDSSVGNIIAEAMEKVGRDGVITVEEGQALQDELDVVEGMQFDRGYLSPYFINNQEAGSVDLENPFILLIDKKVSNIRELLPALEAVAKASRPLLIIAEDVEGEALATLVVNNMRGIVKVAAVKAPGFGDRRKAMLQDIAILTGGIVISEEVGLELEKVALEDLGQAKRVAITKENTTIIDGVGEEAMIQGRVAQIRQQIEDATSDYDKEKLQERVAKLAGGVAVIKVGAATEVEMKEKKDRVEDALHATRAAVEEGVVAGGGVALIRAASKIVDLEGDNEEQNVGIRVALRAMEAPIRQITKNAGDEESVVANNVKAGEGSYGYNAATGEYGDMLEMGILDPTKVTRSALQFAASVAGLMITTEAMVTDLPQKEGAGMPDMGGMGGMGGMGGMM

SEQ ID NO: 14678 - protein, 235 aa, Arabidopsis thaliana; identical to SEQ ID NO: 1165

SEQ ID NO: 14679 - protein, 413 aa, Deinococcus radiodurans
MKPRVLGMILAGGQGSRLAPLTQKRSKPAVPFGSKYRIIDFAINNFINSGMFSVYVLTQYKAQSLTEHIQRGWRFGTFLSDYFITLVPAQMYRFEELGDAWYRGTADAVYQNMHLIDNFEADYVAIFSGDHIYKMNVEHMLEKHIETRADVTIAAYPMPQSQAHQFGVMQVDERWRVTEFHEKVPDPPTIPGQADLSLTSMGNYIFSRRALEELLEASISGQETGYDFGHNVIPRALSDGYHVQAYDFHKNPIPGQERPNTYWRDVGTLDAYFEANMDLVSVNPEFDIYNPEWPLRTSSEFSPPAKFVHESEGRKGQAFNSIMAGGAIISGGTVRDSVLGRNVRTHSYSLVESCVLFDDVQVGRHSHLRRVIVDKDVVIPPGTTIGLNREHDEQRGFTVTEHGVVVVPKGYVF

SEQ ID NO: 14680 - protein, 434 aa, Methanococcus maripaludis S2
MRTDIVSSGVGELSYEIREIVKVAKKAESSGLEVVWENIGDPIAKGEKLPLWIKEIVSETTMDDSSYGYCPTRGLLETREFLTDLNNSRNGAQITPDEIVFFNGLGDAITNIYGLMRKECRVIGPTPAYSTHSSAEGLYSNCRPVMYELDKDDGWNPDIDDLRNKVKYNPSIASILLINPGNPTGAVYSKKILSEVVDIANEYDLFILADEIYSNLVYNGKKHNYLSEVLDDVPGISLKGISKDLPWPGSRCGWTEFYNTQSDELFKKYTENICKFKMIEVCSTTLPQKVIPKIMSDKRYNKYLEERKSYYETASKYAYNKMKNIDGLNVNRTDGAFYNTIVLEKEYLNENQSLKIQDSELKNYVESISKGIPEDKRFVYYLLASTGICGVPLTSFCSEHNGMRFTLLERDEEKRNWVFETIAEKVEEYFNSSN

SEQ ID NO: 14681 - protein, 138 aa, Yarrowia lipolytica CLIB122
MGFVCSHYFDEPCIYCCISCKSHLSRNDDLKSKSFKGKFGDAFLFDQVVNVKKAEPVLKNMITGQYLVQDITCAQCGSDVGWTYVKSLEEAEKYKEGMYILEVEKICLSKRDGFMRDSSVKESTRGVQSVWTFSRERL

SEQ ID NO: 14682 - protein, 503 aa, Oryza sativa
MSTAAAGAAPVSLHTINPKVLKCEYAVRGEIVTHAQDFLRNLDYDLHFILQNLQQELQKNPDSLPFDEILYCNIGNPQSLGQQPVTFFREVLSLCDHPALLDKSETHALYSSDAIERAWQILDKIPGRATGAYSHSQGIKGLRDEIAAGIAARDGFHASGDNIFLTDGASPAVHMMMQLLIRSENDGILCPIPQYPLYSASIALHGGSLVPYFLDEETGWGLEVDELKKQLEEAQSKGITVRALVVINPGNPTGQVLAEENQKKIVEFCKNEGLVLLADEVYQENIYVEDKKFHSFKRIARSMGYTDDDLPLVSFQSVSKGYYGECGKRGGYMEVTGFSADVREQIYKVASVNLCSNVSGQILASLIMNPPKAGDESYESFMVEKDGILSSLARRAKALEEAFNSLEGITCNKAEGAMYLFPRIYLPQKAIGAAQAAGTAPDAYYARRLLEATGIVVVPGSGFGQVPGTWHFRCTILPQEDKIPAIISKFKEFHEKFMDEFRD

SEQ ID NO: 14683 - protein, 632 aa, Cryptococcus neoformans var. neoformans JEC21
MALSEHSAMVSPTTTISVDGDREKRFSVEEDPLPTASAAIPSSAVANTPDDQSSVQGTGGQTPPKGHSGFTAPLEIPKWRFMAIFGSLMISVFLFALDQLIVATAIPKITAEFNSLTQLSWLTSGFFLTLLSFNLLYSQLMNIFPSKHVIVFAVFIFEMGSLACGVAPNMNVLIFGRALAGAGAAGIFSGGMVIIAELTPLHSRAQYFALFGVCFAIASVIGPLIGGAFSDHVSWRWCFYINLPLGGVAIGCLLFFQPSRPPLGRESSYKGYSKAMLKQLLMCDWVGVVLSMAWAVCFILATQWGGVTRSWDSASVIVTLVFAGVLPIAFCVYEYFIKESISYFRIRLFKRRTVAGAAIVSFCVFGIFMILVYYLSLTFQAVHGTSATSAGVKLLPLILVQVFILILTSRIIPRIGRFKPVICVGPVFLAIASGLFYSTDYSTPIANLYGYQVILAVGIGCCLQNVMVAVQHDLKKEPWLISLGTGLVVFTGFAGRIVALSMSGSVFENMIQRHLKSMVPGISEEIISAVVNDATAVWTSVPEDLREPVLRAYTKTLSQVFIIGLPLSIIALVGALVMKNDKMATKEEEEKGIADARAAQQAKKDEEAGVNGVNERSEEGARGSAEDEEGRA

SEQ ID NO: 14684 - protein, 204 aa, Brassica oleracea
MGSSSTAQEEPQLVDTPATVPSPLAQEPDNDVPAPGNQFAEFAAGCFWGVELAYQRIPGVTETEVGYTQGISHNPSYKDVCTNTTNHAEVVRVQYDPNECTYETLLDLFWSRHDPTTLNRQGKLVGAQYRSGIYFYTPEQEKLARESLENQQKKLEKKIVSEILPAKKFYKAEEYHQHYLSKGGNSGHAQSPAKSCKDPISCFG

SEQ ID NO: 14685 - protein, 478 aa, Pyrobaculum aerophilum str. IM2
MIIVKNYINGEFIEVEERRPKHSPIDGSVIAETPVSKREDAKAAIDAAYDALKAWSQLPAIKRAEYLYKLYEIIKSREEELINILMVEGGGIYKKAWGEVVFTERLVRNAAELARHYGGKTLQSDAEGVVSMVFKRPKGVVGVITPWNYPLSISMKKIAHALATGNTIVYKPASETPVTGFKIAEMIHQAGFPKGVFNLVVGPGSTVGDEIVVNKKVSHVTFTGESATGREIASKAGGALKTVTLELGGSDPLIILDDADLNLAVRIAVFGAFFHQGQICTSSKRIIVHERVYDVFVKKFVERVSQLKVGDPRDRTVEQGPLISPRQADEMERFYQDAVSRGGRALTGGKRAGAYFWPTVFVDVDRNFRIMREEVFGPIRPVVPVKNDDEAVEVANDTEYGLSAAVVTTNINRAFKIAEAIESGMVHINDVTMLEESHVPFGGIKASGFGREGGEWSFHETTYDRWLTITLRERKYPI

SEQ ID NO: 14686 - protein, 856 aa, Pyrococcus horikoshii OT3
MTNPWKIFLVSYAHIDSEWLWKVDETVNICKLTFENTLKLMEKYNFLTFAHGPVFYYELMESHYPNIFRKIKEMVDRKQWKIIDGSYVEFDANIPSGESLIRQFLYGIKYLEEKFGVKPRTLYLPDSFGFPPTLPKILCEVGIENFATSKLNWNDTNPFPYHIFRWKSRSGEEVLAYSTPGSYSDYLSDIKRILWNVEQQREKQEIPVIMQVFGRGDHGGGPEEIEVQNVKKWMEEYKGRLELIASGMDEFFDYVREHYLKDLPIFEDELYLEFHRGIFTTGAWIKRFNRLNEHLILQVEKLYSLLKILYGIEYPWEGILNSWKAILLTQGHDALPASITKEVYDDVMRRSSNVYKGLLSFLRNGLKVIAEKEKARYIVFNPNSFPVSPYIRTWESVNGFYQRLKNGSKLVYLSELPPIGFKGYEEVGERPEDFVNIVEREKDFILENSYLRVTVSKRTGWITSIYDKKNKREILKEPIRPRIMLDYPMPFRGRFVPASMFDAWEVYYREGINKYFHRDLRAKEVFISERGPLYASISAKFHYKQFLGKASTMEFEIGLYADKPYVEVRFRAHWNTHHRFLKLLVPVAIDSDKAVFEVPYGIVERADACRSENPRERAKYEVLGHKWVDISDGSYGVAVINDSKYGFSWCNGVLRISLLRSPSQPLADFIMKFIRMNKKAQEKFQDIKLQKSGKLKREIINIIIWLMVLFNELRNKKKVTPIDRGYHIATVWVYPHEGNYVKGNVPMLATELNTLYILQKGSGSSSTIWNFINVEPQEKLQVVTVKPCENGDCFVLRLFNPTDERLKAILRFNVKVKSAAEATHDERFLRGLPVRDNSVEVSLGSYEVRTLLITVL

SEQ ID NO: 14687 - protein, 520 aa, Brassica napus
MATMAAIGSLKVPSSSSNHTRRLSSSSQRKTLSFSSSSLTGEKLNPTQEIIISNLPRGNERRTPSIVSPKAVSDSQNSQTCLDPDASRSVLGIILGGGAGTRLYPLTKKRAKPAVPLGANYRLIDIPVSNCLNSNISKIYVLTQFNSASLNRHLSRAYASNMGGYKNEGFVEVLAAQQSPENPNWFQGTADAVRQYLWLFEEHNVLEFLVLAGDHLYRMDYEKFIQAHRETDADITVAALPMDEKRATAFGLMKIDDEGRIIEFAEKPKGEQLKAMKVDTTILGLDDERAKEMPFIASMGIYVVSKNVMLDLLRDQFPGANDFGSEVIPGATDLGLRVQAYLYDGYWEDIGTIEAFYNANLGITKKPVPDFSFYDRSAPIYTQPRYLPPSKMLDADVTDSVIGEGCVIKNCKIHHSVIGLRSCISEGAIIEDTLLMGADYYETDADRTLLAAKGSIPIGIGRDSHIKRAIIDKNARIGDNVKIINTDNVQEAARETDGYFIKSGIVTVIKDALIPSGTVI

SEQ ID NO: 14688 - protein, 414 aa, Lycopersicon esculentum
MALSVQEMGQRAKKATAQVAGLSLATRNTLLKNMGAALLMRQDEIIAANQQDLVAYGASLSRPMQKRLTLDSDALTAIAESLAAVATLPDPLAGPYDTWENHAGLKIVKKIVPLGVVAMIYEARPNVTVDAAALALKSGNAVILRGGKEAIHSNTVLATILRDVLIDQNLNPDIIQLITDTTHESVNTLLHMREAIDVLIPRGSAAFIDYVVANATVPVIETGAGNTHIFVDASADQAAALRIIHNAKTQKPAVCNAAEKLLIHEAIAQEFLPKIADRLIAARVALRGDQASLGIDGRLTPASDADWDTEYNDLVMGIKIVPDVTAAIDWINTHTTHHSETIISQDPDNIAAFMNQVDAAVVYQNASSRFTDGFEFGFGAEIGISTQKLHARGPMGLPALTTIKYEALAMAIRA

SEQ ID NO: 14689 - protein, 174 aa, Ammopiptanthus mongolicus
MISSPAVTTVKASMGAPFTGLKSMASFPVPRKVNSDITTIANNGGRVQCMLVWPPLGRKKFETLSYLPPLSIESLTKEVEYLLRKGWVPCLEFELEHGFVYRENNRSPGYYDGRYWTMWKLPMFGCSDASQVMKELEECKKEYPTAFVRIIGFDNKRQVQCISFIAYKPPGFEN

SEQ ID NO: 14690 - protein, 314 aa, Glycine max
MALFSLQNNLFPLPLPTTPSSTKSFPSVTTRRATIFGSSLVLLNSTPPTLAQQLPNDHDELQQQEDHLVQLFQDASLSVVFIKDLELTKVPKSSSKGAMLNDDEDAKVEGTGSGFIWDKFGHIVTNYHVVAKLATDTSGLQRCKVFLVDAKGNSFDREGKIIGFDPAYDLAVLKVDVDGYEIKPVVLGQSNDLRVGQSCFAIGNPYGYENTLTTGVIFNNLYLNMVVSGLGREIPSPNGGAIRGAIQTDAAINAGNSGGPLIDSYGHVVGVNTATFTKKGTGVSSGVNFAIPIDTVVRTVPYLIVYGTPYSNRF

SEQ ID NO: 14691 - protein, 152 aa, Casuarina glauca
MALTEKQEALLKQSWEVLKQNIPAHSLRLFALIIEAAPESKYVFSFLKDSNEIPENNPKLKAHAAVIFKTICESATELRQKGHAVWDNNTLKRLGSIHLKNKITDPHFEVMKGALLGTIKEAIKENWSDEMGQAWTEAYNQLVATIKAEMKE

SEQ ID NO: 14692 - protein, 399 aa, Streptomyces avermitilis MA-4680
MREAVIVSTARTPIGKAYRGAFNDTQAQELAAHALSHAVRRAGLEGGEVEDVIFGCAVQQGSSGGNVARQAALRAGLPDTVSGMTVDRQCSSGLMAIATAAKQIVTDGMQVAVGGGVESISLVQNDRMNTHRMADPWLVEHKPSIYMPMLQTAEIVAERYGVSRERQDEFALVSQQRTAAAQEAGRFDREIVALGSVKKVLDKQTGEVRDEEVTLTRDEGNRASTTLEGLAGLAPVLPDGQVSAHSSVTAGNSSQLSDGASASVLMESKEAERRGLEPLGVYRGMTVAGCGPDEMGIGPVFAIPKLLKQHDLTMDDIGLWELNEAFASQALYCRDELHIDPERFNVDGGAISVGHPYGMTGARLVGHALIEGKRRGVRYVVVSMCVGGGMGAAGLFEVV

SEQ ID NO: 14693 - protein, 146 aa, Shewanella sp. ANA-3
MFNWKSIYNYLDNGTPAPPKKVEKSEEEWKEILTPAQFRVMRMKGTERAHTGELCSFYEAGRYACVGCDTELFDSNLKFDSGTGWPSFSEPVADNVIQYELDTTFGRRIEVLCNVCEAHLGHAFPDGPEPSGVRFCINSESLKFVE

SEQ ID NO: 14694 - protein, 174 aa, uncultured bacterium
  misc_feature (12)..(12): Xaa can be any naturally occurring amino acid
  misc_feature (18)..(18): Xaa can be any naturally occurring amino acid
  misc_feature (29)..(29): Xaa can be any naturally occurring amino acid
  misc_feature (40)..(40): Xaa can be any naturally occurring amino acid
  misc_feature (155)..(155): Xaa can be any naturally occurring amino acid
  misc_feature (171)..(171): Xaa can be any naturally occurring amino acid
  unsure (1)..(174): unsure at all Xaa locations
GHQMIQDGEADXVISGAXESPISPISMAXFDPIKATSQRXDDAAHASRPFDRDRDGFVMGEGCGILILEELGAARARGAHIYAEVVGYGTRGNAYHMTGLRPEAFAMTEAILDAMRQAEVKPEDIDYIDAHGSGTKQNDRHETNAYKKTLGEHAXQVPISSTKSMVGHSLXAIG

SEQ ID NO: 14695 - protein, 281 aa, Sieversia pentapetala
GLPPAMSANGHRVMTISPRYDQYKDAWDTEVTVKVRVGDKTETVRLFHCYKRGVDRVFVDHPLFLEKVWGKTASKIYGPVTGEDYKDNQLRFSLLCQAALEAPRVLNLNSNKYFSGPYGEDVVFIANDWHTALLPCYLKAIYQPKGIYKTAKVAFCIHNIAYQGRFSFADFSLLNLPDVFKSSFDFIDGYDKPIKGRKINWMKAGILESDTVLTVSPYYAKELVSSVEKGVELQNFIRKTKIRGIVNGMDVQEWNPLTDKYTDVKYDATTVTDAKPILKEA

SEQ ID NO: 14696 - protein, 162 aa, Shewanella sp. ANA-3
MKLDYVIVAGGCFWGLEDLLRSLDGVTSTKVGYSGGDFDDPTYADIITGKTGHAEAVRVEYDQDEISLEEILHYFFKIHDPTTKNRQGNDVGTSYRSAAFYRDDAQKAIIENVIDEVNEIGRFENEVVTTVTLETEFYDAEAYHQNYLQRNPSGYSCHFERD

SEQ ID NO: 14697 - protein, 1114 aa, Ustilago maydis 521
MPPPPSSTHNPSANGGIRNAAPSSSAMASSAPQSVNEPSPSSSVKLDNQKHAAYKLPSRPTHLQAPSGANQPQRRQWPQPSSAAQNGNSFNSVAPSSRHDYDDEDEDEEGAIDDSATSKPAANLLSSFRPAPPKTPPYPSNSQPAHEEHRGNDRFQPSDARKDQNHSSSYQLRSPSPPRRSQQSTTTSRAHVAHLRSPSPPESSSRRPGRDHDNGMTRISTNDRYHRGDPHLYHPSASELRSKDDRHDAAGSHMWDRAKQDLKRASNDDWRREDRGWNHDRRAGAGARGGGGGGGGGGGGGGGGGGGGGGARSWDREYDRRYDRNERDRDRPRTHSRYHDPRDELPREKPSNRNGRDKELSPHTAGTEQQYAGWSPTPPQGQPADPLSNGNNGEPFANRPPSRMGRAAPPPLLSNIDHPPTFNANRDLDSSLAKRARSRSPPAGLLKRKANFNAVMPPALAPVNPDASAPAESENVTPGAPLPPKVETLQSPSMPASRLGSESVAATAALGSLPGSAIATAASSGAATATFPTAASGGSVAVPADANFNATCQALDDFTLPSVRLSCLPRKLPDRPSTSGRERRKARGPPVPLNQRKFVGCSSLDDYEISIKLGQGTFGEVLKGRQILTGTQVALKKVTIHDAKDGLPITALREIKLLKKLRHPSVVPVIDMAFRPSGERGKLGDVYMVEPYMDHDLNGMLENPSIRLEHSQIKLYMKQLLEGTLYLHKNRILHRDMKAANLLIDNQGQLQIADFGLARPYRDPGQSWTGKGWTAGTHRYTNMVVTRWYRPPELLAGEKKYGPPIDMWGIGCILAEMITGRPLFKGTSEINQLELIAKLCGSPNETNFPGWSSLPGVKDADPTGRPDPHPEIPGQHAFGDYPRKVKDHFRSVYDAGPGCADLIDKLLVLDPRKRLTAQQALEHEWFWTKPYPADPKSLPKYEHSKEIDRARRDWKPAPAAAAAAPGGGGMAAATMARPRPAMQQLPYIAGAPQQRAYNRPAGFAQSAGYAMPATGMPTPDATDTWDARAAPPPMAGGGARHAFPHPQGGARFTHPNTRPAHHAHPQQPQQPQQAQQAHAYYPNHREPAQQRQQHSLPQRPVGPPRASGGNPYSM

SEQ ID NO: 14698 - protein, 181 aa, uncultured bacterium
  misc_feature (180)..(180): Xaa can be any naturally occurring amino acid
  unsure (1)..(181): unsure at all Xaa locations
GCTSGMDAIGYGHQMIQDGEADIVISGASESPISPISMACFDPIKATSQRNDDAAHASRPFDRDRDGFVMGEGCGILILEELDAARARGAHIYAEVVGYGTRGNAYHMTGLRPEAFAMTEAILDAMRQAEVKPEDIDYINAHGSGTKQNDRHETNAYKKTLGEHAYQVPISSIKSMVGHXP

SEQ ID NO: 14699 - protein, 276 aa, Fallugia paradoxa
GLPPAMSANGHRVMTISPRYDQYKDAWDTEVTVELQVGGKTETVRFFHCYKRGVDRVFVDHPTFLEKVWGKTASKIYGPFTGEDYKDNQLRFSLLCQAALEAPRVLNLNSNKYFSGPYGEDVVFVANDWHTALLPCYLKAIYQPKGIYKSAKVAFCIHNIAYQGRFAFADFSLLNLPDVFKSSFDFIDGYDKPVKGRKINWMKAGILESDKVLTVSPYYAKELVSSVEKGVELDNIIRKAGCLGIVNGMDVQEWNPLTDKYTDVKYDATTVMDAKP

SEQ ID NO: 14700 - protein, 207 aa, Oryza sativa
MFGGGGGGGRKPLDYEELNENVKKVQYAVRGELYLRASELQKEGKKIIFTNVGNPHALGQKPLTFPRQVVALCQAPFLLDDPNVGLIFPADAIARAKHYLAMAPGGLGAYSDSRGIPGIRKEVAEFIERRDGYPSDPELIYLTDGASKGVMQMLNTIIRNERDGILVPVPQYPLYSAAISLFGGSLVPYYLEEEANWGLDFVNLRQT

SEQ ID NO: 14701 - protein, 183 aa, uncultured bacterium
TSGMDAIGYGHQMIQDGEADIVISGASESPISPISMACFDPIKATSQRNDDAAHASRPFDRDRDGFVMGEGCGILILEELDAARARGAHIYAEVVGYGTRGNAYHMTGLRPEAFAMTEAILDAMRQAEVKPEDIDYINAHGSGTKQNDRHETNAYKKTLGEHAYQVPISSIKSMAGHSLGAIG

SEQ ID NO: 14702 - protein, 354 aa, Triticum aestivum
  misc_feature (48)..(48): Xaa can be any naturally occurring amino acid
  unsure (1)..(354): unsure at all Xaa locations
QVCTKKQAGTGPEFPGYRRPTRPKELLSRSTVPGYVVVPHRSAIIPVXKLRHPMTQFATGVGALQVESEFQKAYDKGMPKTKFWEPTYEDCLNLIARLPQVASYVYRRIFKDGKAIAADNTLDYAANFSHMLGFDDPKMLELMRLYITIHTDHEGGNVSAHTGHLVGSALSDPYLSFAAALNGLAGPLHGLANQEVLLWIKSVMEETGSNITTDQLKEYVWKTLKSGKVVPGYGHGVLRNTDPRYSCQREFALKYLPEDPLFQLVSKLYEVVPPILTELGKVKNPWPNVDAHSGVLLNHFGLTEARYYTVLFGVSRSIGIGSQLIWDRALGLPLERPKSVTMEWLENHCKKVAA

SEQ ID NO: 14703 - protein, 185 aa, uncultured bacterium
GCTSGMDAIGYGHQMIQDGEADIVISGASESPISPISMACFDPIKATSQRDDDAAHASRPFDRDRDGFVMGEGCEILILEELDAARARGAHIYAEVVGYGTRGNAYHMTGLRPEAFAMTEAILDAMRQAEVKPEDIDYINAHGSGTKQNDRHETNAYKKTLGEHAYQVPISSIKSMVGHSLGAIG

SEQ ID NO: 14704 - protein, 453 aa, Lycopersicon esculentum
MLSSALSSSARIPRPLSSFSTCVPVVVTTVSSAATSTLFPISCFGVKSRTVGIRKLRCAVFCASKVRGMAEMIEDAMTVSASESHELPQSRDFLDARTGEDLLSAVRKAVEDEKLPLNVAEGMEELYQNYQNAVLQSGVPKADEAILYNMALVFDRVFVDVKDPFEFSPYHKAIREPFDYYKFGQNYIRQLVDFRSSYVGNMSVFSEMAEKLKQGDNVVLMSNHQSEADPAIIALLIESKLPDIAENIIYVAGDRVITDPLCKPFSMGRNLLCVYSKKHMNDDPELAEMKKRANTRSLKEMALLLRGGSKIIWIAPSGGRDRPDPVTKEWYPAPFDASATDNMRRLVQHAGVPGHIYPLAILCHDIMPPPAQVEKNIGEKRVVSFHGAGISVAPKIDFHEVAGALEDPEAKMVYTKAIYDSVSQQYNVLNSAIHGKQGLEASIPSVSLSQPWQ

SEQ ID NO: 14705 - protein, 77 aa, Quercus petraea
TIIVRRDYLHFVKKYQRYEKRHSNIPAHISPCFRVKEGDHVTIGQCRPLSKTVRFNVLKVTSAGSSGGAGKKAFTGM

SEQ ID NO: 14706 - protein, 248 aa, Magnetospirillum magnetotacticum MS-1
MFLPGESHFTSPDSRGFGHVDTWVFDLDNTLYPSDARVWPQVDERITLYVMRLYGLDAISARALQKHFYHRYGTTLKALMVEEGVDPHDFLDFAHDIDHSTIKLDESLGTAIEHLPGRKLILTNGSRRHAERVADKLGILNHFEDVFDIAAADFVPKPDRGTYERFLLRHGVDPHRSALFEDIARNLVVPHDLGMATVLVVPQTPDPFREAFEQEAVKEPHIDHITSDLAAFLKGCVLPVAPREPAAP

SEQ ID NO: 14707 - protein, 294 aa, Gossypium hirsutum
MGRSPCCEKAHTNKGAWTKEEDQRLINYIRVHGEGCWRSLPKAAGLLRCGKSCRLRWINYLRPDLKRGNFTEEEDELIIKLHSLLGNKWSLIAGRLPGRTDNEIKNYWNTHIKRKLISRGIDPQTHRPLNQTANTNTVTAPTELDFRNTPTSVSKSSSIKNPSLDFNYNEFQFKSNTDSLEEPNCTTSSGMTTDEEQQEQLHKQQQYDPSNGQDLNLELSIGIVSADSSRVSSANSAESKPKVDNNNFQFLEQAMVAKAVCLCWQLGFGTSEICRNCQNSNSNGFYSYCRPLDS

SEQ ID NO: 14708 - protein, 236 aa, Avicennia marina
MLGVFSSSIVSPPDELVAAGSRTPSPKVAATKLVGRFLEANSSAVSVKIGDDAQLAYTHHNQSALRPRSFAVKDEIFCLFEGALDNLGSLKQQYGLGKSANEVLLVIEAYKALRDRAPYPPSHVVGHLQGNFAFIVFDKSTSTLFVATDEFAKVPLYWGITADGYVAFADDADLLKGACGKSLASFPQGCFFSTAVGEIRSYENPKNKITAVPAQEEEIWGAKFMVEGPGMIAASK

SEQ ID NO: 14709 - protein, 177 aa, Triticum aestivum
  misc_feature (105)..(105): Xaa can be any naturally occurring amino acid
  misc_feature (123)..(123): Xaa can be any naturally occurring amino acid
  unsure (1)..(177): unsure at all Xaa locations
MAPTVMASSATSVAPFQGLKSTAGLPVSRRSSSAGLSSVSNGGRIRCMQVWPIEGIKKFETLSYLPPLSTEALLKQVDYLIRSKWVPCLEFSKVGFVFREHNSSXPGYYDGRYWTMWKLPMFXGCTDATQVLNEVEEVKKEYPDAYVRVIGFDNLRQVQCVSFIAFRPPGCEESGKA

SEQ ID NO: 14710 - protein, 466 aa, uncultured bacterium 580
MKINFLSKLVTTFLFFMSFSYAVSLPDFTVLAEQQGSKVVNISSIKNAVNRGNQQLSPQEEHMQEFFNRFGIPMPPGMGPNDQQQKQMSATGSGFILESDGYIITNAHVVGEADSIIVKLADKREFQAKLLGIDKRTDVALLKIDAKNLPAVKLGNPKNIKVGEWVAAIGSPFGLENTMTVGVVSAKGRALPQQENYVPFIQTDVAINPGNSGGPLFNTNGEVIGINSQIYSRTGGYMGLSFAIPIDVAMNVADQLKNNGKVVRGWLGIAIQEVTDELTEALGLKDKSGALVAAVNKGAPAGKAGIEAGDVILKFNNKVIKTSSDLPKYVRLTKPNNIVPVEIWRNGKVKTLRVKIGEMPDDRMQASNKKTIKESANRIGLVLKEATTKDKKMLDGRNGLVVTKASGPAVSSQIREGDIILALNNTPVTSVRAFNREINKTPKGKTIALLIYRNGDTLFVPVKVLN

SEQ ID NO: 14711 - protein, 202 aa, Brassica oleracea
MNILNRFGLGSGGQTSTDPSPIAQGPDDDSPAPGNHFAQFAAGCFWGVELAFQRLPGVTQTEVGYAQGITHNPSYEDVCSETTGHAEVVRVQYDPKGCTFESLLDLFWSRHDPTTLNRQGNDVGTRYRSGIYFYTPEQEKLARESLERHQQRMERKIMTQILPAKKFYRAEEQQQQYLSKGGRYGMGQSCAKGCTDPIRCYG

SEQ ID NO: 14712 - protein, 1637 aa, Pirellula sp. 1
MADTKASQNISFGSETEDEDDSSTSSGTHQHVVGIGASAGGLEALEQLFGKMPVATGMSFVVVQHLSPDFKSHMDDLLRRVTDIPVEVVDNGVEVQPDTIYLIPAKKEMVISNGKLLLTDRGSEKILTHPIDQFLRSLAQDLRERAIGIVLSGTGSDGSRGVVEISNNGGLVVIQDPMTCKFDSMPMNARNTGHVDMELAPDKMGEALQQYLFDGQRTKADQPINMGEIQRSGLERVFQLLKKNHGINFHHYKSGTVHRRIQRRMDLLHLDTLTEYVAHINEHADEVNELYRDLLIGVTKFFRDREAFSVLEQRVIPELIEKAKDTIRIWVCGCATGEEAYTIAMLMREGIEQSERHVDFKMFATDPHRGSLQIAATGSYSEAQMSEVSLERRARFFTKRESGYVVKDELRRCVVFAAQNVINDPPFTQMDLVSCRNMLIYLQSPAQRKTLSLFHFSLKANGILFLGPSESVGDIGDEFDAINTQWKIFRKRRDVRLPIELRMPLANQSVSPVTPQTPSIVEPPPQRRNENLLEIYNVLLADKMPPSLVIDTDYRIIHVFPGANRYLTVPSGTPSDNILHMVPKELRASIGAAVTQAIKQQSAVHYQGIPSPVDGPDHVLELIVEPYHVPKLASSCVLIQFKASEMRTAFGDALTTSNESTESEGTLLDFSTAAHSRIEDLEQELSFNRQNLQATIEELETSNEELQATNEEMVASNEELQSTNEELQSVNEELYSVNAELQVRVNEVNEANADMVNLLATTRVGVVFLDDDLRVRRVTPEISRLLSIEPNDLGRSFESFIHPIQDDQFLERVRQARDERVELEWEVSCRDSSYLVRALPYLRNSEINGVVIAFVDVDILRRAERDVLKFKFMADQNIDALVLLDQKGKISYANRKMCDQLGYSNEEILGQLLSRFKSETDPKSFDDRLEKAHAKGGNLFESWLQQRDGTEFPVEVALTPVFLQGKQLLFASIRDISLRKTHESQMRLLSEAVQSAANGIVITDCSLEDHPISFVNKGFTDMTGFSEQEILGRNCRFLQGEHTDNETVLRIRRALGRGESVRELIKNYRKNGEPFWNDLYITPVHDENGILTHFVGVQNDVTERIEAARQTETNERTIRLLLDSTAEGLFGLDVHGKCTFSNEKAARLLGYEHGSQIVGKELAELAQPCDPNGNPFEKDSLQILGAVRAGEAINRYDERFCRKDGESFPVEYWCHPIQEDGKIVGAVVTFVDIETRLQVENELREAKLAADAANEAKSHFLANMSHELRTPLSAILGFTKILQEDPDEGTIQEYLSTIQRNGDYLLRLLGDVLDLSRIEANKFTTATSSVSLGELLADIFETMKMRTQDYQNTLHFDVSEPLPRTITTDSARLRQIMINLIANAIKFTPKGRVEVVVRSEKIDDDSFLLLKVIDDGIGIADEKLRTLFEPFVQADATISNRFGGTGLGLSITKRLTNALGGTIQVSSTEGEGSEFTIRLPVDPIGTMDQLTIELTDEKDNDNSKSSLDQDIQLNARVLIADDMRDVRFVAQHFLKKAGCEVEVAENGRQAVDMVVAASRDGKPFELCLMDMQMPELDGLGAVRELRQRGIELPVIALTADAMKGTRRRLITEGFDEYLSKPLKVNRLLRIAKGLLDA

SEQ ID NO: 14713 - protein, 451 aa, Arabidopsis thaliana
MEEKPAGRRVVLVAVPAQGHISPIMQLAKTLHLKGFSITIAQTKFNYFSPSDDFTDFQFVTIPESLPESDFEDLGPIEFLHKLNKECQVSFKDCLGQLLLQQGNEIACVVYDEFMYFAEAAAKEFKLPNVIFSTTSATAFVCRSAFDKLYANSILTPLKEPKGQQNELVPEFHPLRCKDFPVSHWASLESMMELYRNTVDKRTASSVIINTASCLESSSLSRLQQQLQIPVYPIGPLHLVASASTSLLEENKSCIEWLNKQKKNSVIFVSLGSLALMEINEVIETALGLDSSKQQFLWVIRPGSVRGSEWIENLPKEFSKIISGRGYIVKWAPQKEVLSHPAVGGFWSHCGWNSTLESIGEGVPMICKPFSSDQMVNARYLECVWKIGIQVEGDLDRGAVERAVRRLMVEEEGEGMRKRAISLKEQLRASVISGGSSHNSLEEFVHYMRTL

SEQ ID NO: 14714 - protein, 412 aa, Arabidopsis thaliana
MTSIPLGPPQPPSLAPQPPHLHGGDSLKRRPDIDNDKEMSAAVIEGNDAVTGHIISTTIGGKNGEPKQTISYMAERVVGTGSFGIVFQAKCLETGESVAIKKVLQDRRYKNRELQLMRLMDHPNVVSLKHCFFSTTTRDELFLNLVMEYVPETLYRVLKHYTSSNQRMPIFYVKLYTYQIFRGLAYIHTAPGVCHRDIKPQNLLVDPHTHQCKLCDFGSAKVLVKGEPNISYICSRYYRAPELIFGATEYTSSIDIWSAGCVLAELLLGQPLFPGENSVDQLVEIIKVLGTPTREEIRCMNPNYTDFRFPQIKAHPWHKVFHKRMPPEAIDLASRLLQYSPSLRCTALEACAHPFFNELREPNARLPNGRPLPPLFNFKQELSGASPELINRLIPEHVRRQMNGGFPFQAGP

SEQ ID NO: 14715 - protein, 572 aa, ASPERGILLUS NIDULANS FGSC A4
MVSATAPEIQMDEIASQTAPSQRGSENKPEECITQARCSSHTVEHEAPKSRGSWRIGAILIALALSLFISALDQTIVATATPTISADLHSGGGYVWIGGAYLLANAASGNIWANLSDIWGRKPILLLAVALLFVSSIVCATAVDMAMLIVGRSFQGVAGGGLIQLILITISDLFSVRLRSLFMGLMECTWTVAGALGPVLGGVFTESISWRWIFWINLPVCGTAFVLLILFLDVHNPRTPMLEGIKAVDWFGSLSILAISVMILLGLDFGGDTFPWDSPKVICLIVFGALMSVAFIYSEKRLAKYPLMPLHIFTSRSNIACFLVDFTHGFAFLGAEYYLPLYFQSAKAASPFHSGLLILPFILTESFTSLAVGIVIHRTGRYQEVIWLGMALVLLGTGLFIDYSTSTSLGKIIGYQIISGFGCGLLFFPPLLALQSNIPTKDTATATATFGFVRNVAMALSVVLGGVVFQNSMGLKRDLLEDAGLSSALQEDFTGAEAAANALAVKDITDSLQREAVETAFAWSIRNIWILYTALAAVGLVASFFITKRQLSKEHVETKTGLKEKEKNTAEV

SEQ ID NO: 14716 - protein, 447 aa, Pediococcus pentosaceus ATCC 25745
MADKTSGKGLPTLSKNLIWMINFGFLGVQTAFTLQSSQMSRIFQTIGADPNNLGWFFILPPLAGLIVQPIVGYYSDRTWKPRLGGRRLPYLILGTLIAVIVMLLLPNSGSFGFGYGSLMALWFGAITVAFLDLSSNVAMQPFKMMIGDMVNDKQKSYAYGIQSFLSNTGAVLAAIFPFLLTWLGIANTANKGVVPQSVVISFYAGAILLIITSLFTVFRVKEYDPATYAMYHGISEKENSEGGNWITLLKNAPKAFWTVTLVQFFCWFAFQYLWTYSAGAIAQNVWHTANASSAAYQAAGNWYGVLAAVQSIAAVACSYVLAKLPNRFHKSGYAVSLILGALGFVSVFFVHNQYILIVSYILVGIAWAGMNTYPLTIVTNALSGNHMGTYLGLFNGSICLPQIVASLLSFGLFPLLGSSQANMFLLAGAVMLLGAFAVGTIKETFAE

SEQ ID NO: 14717 - protein, 537 aa, Dehalococcoides ethenogenes 195
MAKQIIFGEKVRVSLKKGVDTLANTVRVTLGPKGHPVALERKWGAPTVIDDGVTIARDIELPDAFENMGAQLVKEAATRTSDAAGDGTTTSIVLAQALINEAFKNIAAGAEPINLKRGIEKAVAALKAQLRKNSTPVKGKQQIVQVATITGKDPEIGNLIADVMDKVGKDGVITIEESRGLRYETSYVEGMQFDRGYISAYFVTDPGRMESIMEDATILMTDRKIETVAELLPALEKILQISKNLVIVAENVEAEALATLVVNKLRGNLNILAVKAPGYGDRQKAMLEDMAILTGGHVISKEAGRKLDSVTEADLGHARRVVSNKDKTTIIDGEGSAEAIKNRIKQIKAQIEETESAFDREKLQERQAALVGGVAVIAVGAATETEMKERKARVEDALAATRAAIEEGILPGGGTGLLNALPCLDALKLEGDEATGVSIVRKALIEPVRWIATNAGKDGNVIVDKVKNSPVGHGYNAEKDVFGDMAEMGIIDPTMVVRSALENASSIANMVLITDSLVADIQDKNPAPPMPEAPGMY

SEQ ID NO: 14718 - protein, 399 aa, Bordetella parapertussis 12822
MDKPFEPECSFSERAKQLTSSAIREILKVTERPEVISFAGGLPAPGGFPVEVVQAAFDKVLATNGRAALQYGPTEGYAPLRQWVADDLNAVGANVTADQILIVSGSQQALDLLGKVLIDKDSPILVEDPSYLGALQSFSLYQPKYVPIPTDDGGLVPEAITAELAEGARFLYALPNFQNPTGRTLNLERRKALVRQAAQFGVPIIEDDPYGELRYAGEPQPGLLALAGECGATVIRLGTFSKVLAPGLRLGYIAAPRNIINKLVQAKQATDLHTPTLTQMAVYEVVKTGFLAEHLPRVREIYRVQGRCMLEAIEREFPASVSWTKPEGGMFIWVTLPEHIDSTKLLAQAVEQNVAFVPGGPFYAGTPRQNTLRLSFATVPEAKIREGIAILGKLLKAAI

SEQ ID NO: 14719 - protein, 384 aa, Pleurotus sajor-caju
MPTQEVFDKQDGAVYTTSNGAPVAEPYAAQRAGLHGPLLLQDFHHIDLLAHFDRERIPERVVHANAAGAHGYFEVTHSCADITSNKLLCSVGKKVRLTARFSTVGGESGSADTARDPRGFALKLRTEEGNWDWVFNNTPIFFIRDPAKFPHFIHTQKRDPQTHLKDADMFWDYLGQNPESIHQMMILFSDRGTPDGVRQMHGYSGHTFKWLKDDGSFTYVQVHCRADSGFKTLDGDTAHRLTADNPDYSTEMLFRTIEAGKFPSWTVYIQTMTPEQAENFRYNILDLTKVWPHKEFPLRPIGRFVLDENPKNYFAEIEQAAFAPSHLVPYIEPSADPVLQSRLFSYPDTHRHRLGANYHQIPVNAPIVPVANFQRDGPMTVNNN

SEQ ID NO: 14720 - protein, 98 aa, Dehalococcoides ethenogenes 195
MATRFEPLHNMVLIQPQEKQDMSKGGIIIPDAAQEKSQEGVIVAVGPGRLDKDGKRELMSIKVGDKVLFPKFGGVELKSGGIDYIIMPESQIMAKIVG

SEQ ID NO: 14721 - protein, 206 aa, Brassica oleracea
MAAFEESSDLDAIQEHLLEDFLVADGFMGDFDFNASFVSGLWCIEPVMNQVPKQEPDSPVLDPDSFVREFLQVEAESSSEQNSSPHETDQSVSPRKEAKRLEEEEEPRHYRGVRRRPWGKFAAEIRDPAKKGSRIWLGTFESNVDAARAYDCAAFKLRGRKAVLNFPLDAGKYEAPVNLGRKRKRSDVQEELQRSQSNSSSSSSDL

SEQ ID NO: 14722 - protein, 399 aa, Synechococcus elongatus PCC 7942
MTQLISIDKEQEEAGMTQATELLDPALKPAETKAKRSSRKKATTAVVEPATTIAPTADVDAIDDEDSVGEDEDAAAKAKAKVRKTYTEDSIRLYLQEIGRIRLLRADEEIELARQIADLLALERIRDELLEQLDRLPSDAEWAAAVDSPLDEFRRRLFRGRRAKDKMVQSNLRLVVSIAKKYMNRGLSFQDLIQEGSLGLIRAAEKFDHEKGYKFSTYATWWIRQAITRAIADQSRTIRLPVHLYETISRIKKTTKLLSQEMGRKPTEEEIATRMEMTIEKLRFIAKSAQLPISLETPIGKEEDSRLGDFIEADGETPEDEVAKNLLREDLEGVLSTLSPRERDVLRLRYGLDDGRMKTLEEIGQLFNVTRERIRQIEAKALRKLRHPNRNSILKEYIR

SEQ ID NO: 14723 - protein, 561 aa, Shewanella sp. ANA-3
MTTLKITGMTCDSCAAHVKEALEKVPGVQSALVSYPKGTAQLAIEAGTSSDALTTAVAGLGYEATLADAPPTDNRAGLLDKMRGWIGAADKPSGNERPLQVVVIGSGGAAMAAALKAVEQGAQVTLIERGTIGGTCVNVGCVPSKIMIRAAHIAHLRRESPFDGGMPPTPPTILRERLLAQQQARVEELRHAKYEGILDGNSAITVLHGEARFKDDQSLIVSLNEGGERVVMFDRCLVATGASPAVPPIPGLKESPYWTSTEALASDTIPERLAVIGSSVVALELAQAFARLGSKVTALARNTLFFREDPAIGEAVTAAFRAEGIEVLEHTQASQVAHMDGEFVLTTTHGELRADKLLVATGRTPNTRSLALEAAGVAVNAQGAIVIDKGMRTSSPNIYAAGDCTDQPQFVYVAAAAGTRAAINMTGGDAALDLTAMPAVVFTDPQVATVGYSEAEAHHDGIETDSRLLTLDNVPRALANFDTRGFIKLVIEEGSGRLIGVQAVAPEAGELIQTAVLAIRNRMTVQELADQLFPYLTMVEGLKLAAQTFSKDVKQLSCCAG

SEQ ID NO: 14724 - protein, 183 aa, Shigella boydii
PGKINLGIGVYKDETGKTPVLTSVKKAEQYLLENETTKNYLGIDGIPEFGRCTQELLFGKGSALINDKRARMAQTPGGTGALRVAADFLAKNTSVKRVWVSNPSWPNHKSVFNSAGLEVREYAYYDAENHTLDFDALINSLNEAQAGDVVLFHGCCHNPTGIDPTLEQWQTLAQLSVEKGWLP

SEQ ID NO: 14725 - protein, 299 aa, Cucumis melo
MALEAVVFSQDPLCYNGSKDLYSLLGGGIWANGSFEYPEIPHDFPENQTENFPFEDWNSSSSVFVPNPSPEAADSRNGLLKPPLEAESITPHPIRPRKRRPKSRKNKEEIENQRMTHIAVERNRRKQMNEYLSVLRSLMPESYVQRGDQASIIGGAINFVKELEQQVQVLSTIETKGKINNSAEGCCNSNSNSNSKIPFAEFFSFPQFKAMEGCSLVSENETQCSSTVADIEVTMVENHANLKIRSKRRPKQILKIVAGLHSLSLSVLHLNISTINQIVLYCLSVKVCFSSFFEMGICV

SEQ ID NO: 14726 - protein, 428 aa, Triticum aestivum
  misc_feature (204)..(204): Xaa can be any naturally occurring amino acid
  unsure (1)..(428): unsure at all Xaa locations
MLHQTLTPSSLAFSASASPDPLPFASNASPAAAAAAAATTLRPSAMPSYAHHHSSLDERMDALKGSSRQEETPDEAAAAAEAPAAWGFAERDGFSVEDLLDLEEFCEPDKDGADEPEEAPAADVKEEKLNDGPNQPVVSYELAPPAPPAPEIVDLPAHDVEEELEWVSRIMDDSLSELPPQPAPPASMMASLAPRPPQHRLPAXQRHPQDGAYRALPSMSDPMRTPTICALSTEALVPVKAKRSKRSRASGWSLSGPAPDSTSSSSTTTTSSCSSSASFSPYFLLDTPHFGASELMEEYNILPPPPKKSKHGKSSKQKAKKRGRKPKNLPAPSSAMEAATQSDRRCSHCGVQKTPQWRAGPEGAKTLCNACGVRYKSGRLLPEYRPACSPTYVSSVHSNSHRKVLEMRRKKEDGPLTVTATAPAVASF

SEQ ID NO: 14727 - protein, 497 aa, Staphylococcus aureus
MSKVQNESNNVVKRGLKDRHISMIAIGGCIGTGLFVTSGGAIHDAGALGALIGYAIIGIMVFFLMTSLGEMATYLPVSGSFSTYATRFVDPSLGFALGWNYWFNWVVTVAADITIAAQVIQYWTPLQGIPAWAWSALFLVIIFSLNSLSVRVYGESEYWLALIKVITVIVFIAIGLLTIVGIMGGHVVGFEIFNKGEGPILGGNLGGSLLSILGVFLIAGFSFQGTELIGITAGESENPERAVPKAIKQVFWRILLFYILAIFVIGMLIPYDSSALMGGSDNVATSPFTLVFKNAGFAFAASFMNAVILTSVLSAGNSGMYASTRMLYSMSKDKLAFEAFGKTNKNGVPYMSLLVTAIIVVIILVLQSLTKGAYEYIVAASGLTGFIAWVGIAVSHYRFRRAFDKQNYDKSKLKYTAKLFPFGPLFAGFLCIVVIIGQDVDFIKTGDFNFSRFLITYMGIPVFLAFFIYHKLRYKTKKIPLEQVDLRQDVSMDEIKG

SEQ ID NO: 14728 - protein, 30 aa, Chassalia parviflora
KIPCGESCVWIPCVTSIFNCKCENKVCYHD

SEQ ID NO: 14729 - protein, 183 aa, uncultured bacterium
TSGIDAIGYGHQMIQDGEADIVISGASESPISPISMACFDPIKATSQRNDDAAHASRPFDRDRDGFVMGEGCGILILEELDAARARGAHIYAEVDGYGTRGNAYHMTGLRPEAFAMTEAILDAMRQAEVKPEDIDYINAHGSGTKQNDRHETNAYKKTLGEHAYQVPISSIKSMVGHSLGAIR

SEQ ID NO: 14730 - protein, 372 aa, Bacillus halodurans C-125
MSVTRGLEGVVATTSSVSSIIESVLTYQGYDIDELAEHASFEEVIYLLWNGKLPNKVELKELADELANNAEIPQEVIEQMKAYPLDRVHPMGALRTAISSLGLYDEEADLMDEAANKRKALKLQAQVSTVVTAFSRIREGKEPVAPRTDLSFAANFLYMLTGEEPDEIAVDAFNKALVLHADHELNASTFTARVCVATLSDVYSGITAAIGALKGPLHGGANEQVMAMLTEIGDVENVEPYIRKALDNKQKIMGFGHRVYKNGDPRAKHLREMSKKLTSITGESKWYEMSVKIEEIVTNEKGLLPNVDFYSASVYHSLGIKHDLFTPIFAVSRMSGWLAHILEQYSNNRLIRPRAEYVGPNKRQYVRLEERN

SEQ ID NO: 14731 - protein, 30 aa, Chassalia parviflora
KIPCGESCVWIPCLTSVFNCKCENKVCYHD

SEQ ID NO: 14732 - protein, 179 aa, uncultured bacterium
  misc_feature (15)..(15): Xaa can be any naturally occurring amino acid
  misc_feature (19)..(19): Xaa can be any naturally occurring amino acid
  misc_feature (45)..(45): Xaa can be any naturally occurring amino acid
  unsure (1)..(179): unsure at all Xaa locations
DAIGYGHQMIQEGEXDIVXSGASESPISPISMACFDPIKATSQRXDDAAHASRPFDRDRDGFVMGEGCGILILEELDAARARGAHIYAEVVGYGTRGNAYHMTGLRPEAFAMTEAILDAMRQAEVKPVDIDYINAHGSGTKQNDRHETNAYKKTLGEHAYQVPISSIKSMVGHSLGAIG

SEQ ID NO: 14733 - protein, 584 aa, Bacillus halodurans C-125
MRKTKIVCTIGPASESVEKLEQLMEAGMNVARLNFSHGDFEEHGARIKNIREAAKRIGKTVAILLDTKGPEIRTQTLEGGVAELKAGQELVISMKEVVGTSERISVTYPGLVHDVVPGAKILLDDGLIGLEVVEVRDQEILTKVLNSGTLKNKKGVNVPNVSVNLPGITEKDAADIKFGIEQGVDFIAASFVRRAQDVLEIRELLEQHGAEHIKIIPKIENQEGVDNIEEILEVSDGLMVARGDLGVEIPAEEVPLVQKSLIKKCNLVAKPVITATQMLDSMQRNPRPTRAEASDVANAIFDGTDAIMLSGETAAGDYPVEAVQTMSRIAERAEQALNYQEILSKHTKEARTTITSAISQSVGHTAFNLNASAILTATESGHTARVVAKYRPKSPIVAVTSNETVVRQLALVWGVYSILGEEAETTDDMLQVTVETALKSQLVKQGDLVVITAGVPVGETGTTNIMKVHVIGEVVAKGQGIGRDTVNGKVVIAANAEEANAKVEEGSILVTFSTDKDMMPAFEKAAAVITEEGGITSHAAVVGLSLNTPVIVGVQNASALFKDGEEITVDTSRGDIYRGQASVL

SEQ ID NO: 14734 - protein, 329 aa, Kluyveromyces lactis NRRL Y-1140
MVKVAINGFGRIGRLVLRIALQRKALEVVAVNDPFISVDYAAYMFKYDSTHGRYKGEVTTSGNDLVIDGHKIAVFQEKDPANLPWGKLGVDIVIDSTGVFKELDSAQKHLDAGAKKVVITAPSKTAPMFVVGVNEDKYNGETIVSNASCTTNCLAPIAKIINDEFGIDEALMTTVHSITATQKTVDGPSHKDWRGGRTASGNIIPSSTGAAKAVGKVLPELQGKLTGMAFRVPTVDVSVVDLTVKLAKEATYDEIKAAVKKASQGKLKNVVGYTEDSVVSSDFLGDTHSTIFDASAGIQLSPKFVKVVAWYDNEYGYSERVVDLVEHVA

SEQ ID NO: 14735 - protein, 268 aa, Gossypium raimondii
GAWTKEEDQRLINYIRVHGEGCWRSLPKAAGLLRCGKSCRLRWINYLRPDLKRGNFTEEEDELIIKLHSLLGNKWSLIAGRLPGRTDNEIKNYWNTHIKRKLISRGIDPQTHRPLNQTANTNTVTAPTELDFRNMPTSVSKSSSIKNPSLDFNYNEFQFKSNTDSLEEPNCTASSGMTTDEEQQEQLHKQQQYDPSNGQDLNLELSIGIVSADSSRVSSANSAESKPKVDNNNFQFLEQAMVAKAVCLCWQLGFGTSEICRNCQNSNS

SEQ ID NO: 14736 - protein, 364 aa, Neurospora crassa
MASLLNQLRGLTTVDCDTLDAHGEQHNTAISAENKAIVLAEITKLDANGKLIYQTLIDEIIPIAHWMFGNQTDATVEELASELLAVGLALRFIPHLNGFIHIQTNPKWCYSTEKTVKNAERIVAHLKHLAPDFDTSRICIKIPATWEGLQACRELERRHSIATLATIVFSMEQVALAVDAGCRYVAPYVNELRVHFDATYTDANKDRAALFCGAAQRYCDEVASSASAAEAAHGSLNLQMQTQVMAASLTSVEEVMRLAGAVKHITVSPPLLMELEATPAAGWPGASTVGAAAAITGSRVNGDAVRLRELVRDQSQWRLAFTRAEAGESERKLGQAIGIFCDMQDQLERLVRRWDLTGKKYARG

SEQ ID NO: 14737 - protein, 696 aa, Ustilago maydis 521
MAQRNGAPNPGQSPLPQAHALPQVQQPTNQMAYGAQYAAPMGYNMNLASNHGPVAYGFSAAGQGGFAQSQAYAQQASAAHQYHAPPHLHAQIHQAAIAAQAQAPPSQLQHPAMSQAAHLQQQQIAASQQQGLQAPNSGYMQRAPGASPINRSPSPSARPLNAAPRSPQPHGQAQTYSQQQQQQQQQQQQQQFYQQQQQQQQQQQQQQQQQYTQSGGSTSPNPANEKPADYVYFERSTNGMQKSTIEAATGAKLKLENFYKVYVEQAVERIKRAAELEDRLTNPPDGVHLSDERKARQLAQLGRRESNFLRLRRTRLGLDDFRTVKVIGKGAFGEVRLVQKTDTGKIYAMKTLRKSEMFKKDQLAHVRAERDVLAESNSPWVVQLYYSFQDTAYLYLLMEFLPGGDLMTMLIKYDTFSEDVTRFYMAECVLALEGIHKLGFIHRDIKPDNILIDAKGHIKLSDFGLSTGFHKQHDSAYYQRLFEGTAAQNPAQTGRNSVAVNSINLTLSSKDTIATWKANRRKLAYSTVGTPDYIAPEIFLQQGYGNECDWWSLGAIMFECLCGYPPFCSENAHDTYRKILAWRETLQFPDDIHLSPEAEDMIRRLISAPENRLGRNSASEIKGHAFFAGVDWATIRQIDAPFIPQLKSITDTSYFPTEDYQDVPETPAGADVGVGSKDLAFLGYTYRRYESNETVL

SEQ ID NO: 14738 - protein, 182 aa, uncultured bacterium
TSGMDAIGYGHQMIQDGEADIVISGASESPISPISMACFDPIKATSQRNDDAAHASRPFDRDRDGFVMGEGCGILILEELDAARARGAHIYAEVVGYGTRGNAYHMTGLRPVAFAMTEAILDAMRQAEVKPEDIDYINAHGSGTKQNDRHETNAYKKTLGEHAYQVPISSIKSMVGHSLGAI

SEQ ID NO: 14739 - protein, 320 aa, Trichodesmium erythraeum IMS101
MGLGILIDGKWISEREQEDAQGRFIRPQTTFRHQITADGSSGFKAEAGRYHLYISWACPWAHRTAIMRKLKGLEDAIGLSVVGAVIDQNSWEFTDEPGSIGDTLNHHSYLWQLYLQADSTYSGRVTVPVLWDKTEGKIVNNESREIIRMFDTQFSGIAKNDVNLCPDDLYNQIEETIDKIYQPINNGVYRAGFAGSQLAYDEGVKDLFAALDHWENVLSKQRYLCGDRLTEADICMFTTLVRFDPVYYVHFKCNLRHIWEYPNLGNYLKDIYQYPGVKETCNFDHIKRHYYMSHPKVNPTKIVPTGPEIDLDSPHNRASI

SEQ ID NO: 14740 - protein, 326 aa, Medicago sativa
MAEGKGRVCVTGGTGFLGSWIIKSLLENGYSVNTTIRADPERKRDVSFLTNLPGASEKLHFFNADLSNPDSFAAAIEGCVGIFHTASPIDFAVSEPEEIVTKRTVDGALGILKACVNSKTVKRFIYTSSGSAVSFNGKDKDVLDESDWSDVDLLRSVKPFGWNYAVSKTLAEKAVLEFGEQNGIDVVTLILPFIVGRFVCPKLPDSIEKALVLVLGKKEQIGVTRFHMVHVDDVARAHIYLLENSVPGGRYNCSPFIVPIEEMSQLLSAKYPEYQILTVDELKEIKGARLPDLNTKKLVDAGFDFKYTIEDMFDDAIQCCKEKGYL

SEQ ID NO: 14741 - protein, 265 aa, Gossypium herbaceum
TKEEDQRLINYIRVHGEGCWRSLPKAAGLLRCGKSCRLRWINYLRPDLKRGNFTEEEDELIIKLHSLLGNKWSLIAGRLPGRTDNEIKNYWNTHIKRKLISRGIDPQTHRPLNQTANTNTVTAPTELDFRNSPTSVSKSSSIKNPSLDFNYNEFQFKSNTDSLEEPNCTASSGMTTDEEQQEQLHKKQQYGPSNGQDINLELSIGIVSADSSRVSSANSAESKPKVDNNNFQFLEQAMVAKAVCLCWQLGFGTSEICRNCQNSNS

SEQ ID NO: 14742 - protein, 188 aa, Triticum aestivum
HYRTSLYKKAGWYRSGIPGISSTHASALDYAANFSHMLGFDDPKMLELMRLYITIHTDHEGGNVSAHTGHLVGSALSDPYLSFAAALNGLAGPLHGLANQEVLLWIKSVMEETGSNITTDQLKEYVWKTLKSGKVVPGYGHVLHRVRSLLDSPVTLGYEPFPSVVFRTRLSTLGRPGYAETRCPDAET

SEQ ID NO: 14743 - protein, 141 aa, Triticum aestivum
MGRLFLTSLAPATGTIYCCKHCDSHLAYAQHIISKMFRCKHGKAYLFDKVVNVVAGESEDDRMMTTGLHTVRDIFCVACGAILGWKYVSAFEKDQRYKEGKFILERCKIHSGGGGPPNRIQLWAEHDARISSSEDDDQGAV

SEQ ID NO: 14744 - protein, 263 aa, Gossypioides kirkii
AWTKEEDQRLIDYIRVHGEGCWRSLPKAAGLLRCGKSCRLRWINYLRPDLKRGNFTEEEDELIIKLHSLLGNKWSLIAGRLPGRTDNEIKNYWNTHIKRKLISRGIDPQTHRPLNQTANTNTVTAPTELDFRNTPTSVSKSSSIKNPNFNYNEFQFKSNTDSLEEPNCTASSGMTTDEEQQEQLHKKQQHDPCNGQDLNLELSIGIVSADSSRVSSANSAESKPKLDNNNFQFLEQAMVAKAVCLCWQLGFRTSEICRNCQNS

SEQ ID NO: 14745 - protein, 792 aa, Cupriavidus necator
MARTHILGFPRIGERRELKFAQEAFWRGDRTEAELRDVAAQLRRRHWQLQADRGLDTVATGDFAYYDQMLSLTALLGALPRRFGLDPARLTLTQYFELARGNREQPAMEMTKWFDTNYHYLVPELDAETTFDGGPAWFFEEADEALALGLRARPVLIGPVTYLWLSKSHVAGFDRLALLPQLLQGYRRILDQLKARGIEWVQIDEPALCLDLEPAWLDAFDTAYAALREAGPKLLLATYFDTAADHAQRAAALPVDGFHIDLVRAPEQLAAWQAALPAHAVLSLGVIDGRNIWRTDLRRVLDTLRPVQAALGERLWLAPSCSLLHVPVSLAHEVRLDVELKSWLAFATEKLDELSVLGRALNQSDAVVAEALAASDAAQASRRASRRVVKPRVQQRLAAVSAGMADRASPFAERIERQRQALQLPLLPTTTIGSFPQTAAIRQTRAAFKRGEIGALEYLERIRAEIAVAVRKQEALGLDVLVHGEAERNDMVEYFGEQLCGYGFTENGWVQSYGSRCVKPPVIYGDVYRPEPMTVDTARYAQSLTERPMKGMLTGPITMLQWSFVRDDQPRATTARQLALAIRDEVCDLEQAGIRVIQIDEPALREGLPLRRADWDAYLDWAVTAFRLSASGVQDQTQIHTHMCYAEFNDILPAIAAMDADVITIETSRSAMELLEGFGDFDYPNEIGPGVYDIHSPRVPSVQAMERLLDRACEVVPPQRLWVNPDCGLKTRGWEETEAALANMVSAARALRARLSARGATTWKRLSKPAAATAAAVPHAGNACTACATHAN

SEQ ID NO: 14746 - protein, 797 aa, Streptococcus pneumoniae R6
MRRLLQVFFFCPKQIYSFKLYQSLIFYNYTDAFFSVKIVSTTNFGGHIMSTTIIGFPRLGEFRELKFTTEKYFRKEISEEELLAAAKDLRAKHWNIVKEKGITEIPSNDFSHYDNFLDAAFLFNVVPASVQNLDLSDLERYFALGRGYQGEKGDVRALPMKKWFNTNYHYIVPKFEKDTQVKLAGHKIFDEFQEAKELGLNTRPVLVGPFTFLQLSDFEEGVKADDFVDSFVAAYQEVFAKLADLGATRIQLDEAALVKDLTAEEKALFLNLYNKLLADKKGLEVLFQTYFGDVRDVYADLVNLPVDAIGLDFVEGKKTLELVKGGFPADKTLYVGIVNGKNIWRNNYEKSLTVLEQIPAENIVLTSSCSLLHVPFTTANEEFEPALLNHFAFAVEKLDEIRDLDAIRNGQGSEALAANKELFATERVGENAELRARIAGLTDADYTRLPAFAEREAIQEEAFKLPALPTTTIGSFPQTKEVRAKRLAYRKGELSQKEYDAFLAETIDEWIKWQEDIDFDVLVHGEFERNDMVEYFGQNLSGYLFSKNGWVQSYGMRGVKPPIIWGDVTRLNPITVKWSSYAQSRTNKPVKGMLTGPVTILNWSFPREDISIKDSTLQIALAIKDEVLDLEAAGVKIIQIDEAALREKLPLRRSDWYEDYLDWAIPAFRLVHSTVAPDTQIHTHMCYSEFTDIIPAIDNMDADVISFEASRSNLEILDELKAKNFQTEVGPGVYDIHSPRVPNEGEIDNTIEAILAKVPSKKVWINPDCGLKTRGIPETKESLIRLVEAAKAAREKL

SEQ ID NO: 14747 - protein, 185 aa, uncultured bacterium
  misc_feature (184)..(184): Xaa can be any naturally occurring amino acid
  unsure (1)..(185): unsure at all Xaa locations
GCTSGLDAVADGAELIEDGRADVVIAGATDAPISPITAACFDAIKATSPNNDDPAHASRPFDISRDGFVQGEGAAVFVLEPADQARRRRAHIYCEIAGYAQRSNAYHMTGLTADGLEMAEAIRVAMGRARLVPEDIDYINAHGSGTRQNDRHETAAFKASLGARAYEIPVSSIKSMVGHSLGAXG

SEQ ID NO: 14748 - protein, 569 aa, Xanthomonas axonopodis pv. citri str. 306
MWPFIQRQRGLFVAWMVALTISAAATLSLPAAVKRMIDQGFSGDAQINQAFALLFVVSVVLAVATAARFYFVALLGEKVVADLRGRLYAHLIGLDAGFHDRSRSGELVSRLSADSELLRGLIGSTMSVALRSVATVIGSVVMLFVTSPRLAGFTLIGIPLAVLPIVLGARRLQKISRASQDRVADANTLAAETLGAVRTVQAHARERYESQRFSTALLTAIDTAKVRIRTQATVTAVAIMLIFGAIVAVLWLGAHDVISGRMTPGTLGQFVLYALIGGGSVGALAEVWNELQRAAGGMGRVSELLDEQPLIVAPATPQALPQPLRGAIHFDQVVFHYPHRPDAPALDGFDLHVSPGETVALVGPSGAGKSTVLSMLLRFHDPVSGKVRIDDIDLRDADPVLLREHIALVPQQPTLFAASAADNIRYGRLHASDAEVEAAAAAAEADVFIRALPQGYASELGERGTRLSGGQQQRVAIARALLKDAPILLLDEATSALDAHSERAVQQALERLMEGRTTLVIAHRLATVLKADRIVVMDAGRIVAQGTHAQLIAEGGLYAELARLQFIDQ

SEQ ID NO: 14749 - protein, 109 aa, Methanococcus maripaludis S2
MSNIGIDVKAPENVCEDPNCPFHGTLSVRGQIFEGIVTSDKGHDTIVIKREVTGYISKYERYEKRTTSLVAHNPACIKAKVGDTVKVMECRPISKTKSFVVIEKTENLE

SEQ ID NO: 14750 - protein, 478 aa, Xanthomonas axonopodis pv. citri str. 306
MSEQFDVVVIGAGPAGYHAAIRAAQLGMKVACIDAALGKDGKPALGGTCLRVGCIPSKALLDSSRQFWNMGHLFGDHGISFNDAKMDVPTMIGRKDKIVKQFTGGIAMLFKANKITPYYGFGQLQPGNIVKVTQHEGGEIELKGTNVILAAGSESIELPFAKFDGDTIVDNVGGLDFTAVPKRLAVIGAGVIGLELGSVWKRLGAEVTILEALPDFLALADAEVAKTALKEFKKQGLDIKLGAKVGKTEITGSDDAKQVVLSYTDATGEQTLTVDKLLVAVGRKAATKNLLADGTGVKVTDRGQIEVDGHCHTGVDGVWAIGDCVRGPMLAHKGFEEGIAVAELIAGLPGHVNFDTIPWVIYTEPEIAWVGKTEQQLKAEGVAYKAGSFPFAAIGRAVAMGEPAGFVKVIADAETDRVLGMHLVGVGVSELVHEGVLTMEFSGSADDLARICHAHPTLSEAIHDAAMAVSKRAIHKAN

SEQ ID NO: 14751 - protein, 338 aa, Dechloromonas aromatica RCB
MKVYYDKDADLSLIKGKKVTIVGYGSQGHAHAQNLKDSGVKVTVGLRKDGASWKKAEAAGLKVEEIAKAVKGADVVMILLPDENIPQVYNEEVAPNLKKGAALAFAHGFNVHYNQVVPRADVDVIMVAPKGPGHTVRSEYLKGGGVPSLIAVYQDVTKKAKDIALSYAAANGGTKGGVIETNFREETETDLFGEQAVLCGGAVELVKMGFETLTEAGYAPEMAYFECLHELKLIVDLMYEGGIANMNYSISNNAEYGEYVTGTEVINEQSRVAMRNALKRIQTGEYAKMFIQEGKTNYPSMTARRRLNAVHPIETVGGQLRDMMPWIRKNKLVDQTKN

SEQ ID NO: 14752 - protein, 571 aa, Candida albicans
MPEDYEKYRMGSSNESHQKSVQPISSSISKSNKKTKHQTDFVQDSDIIEASSINDEFGEVKRDLKARHVSMIAIGGTIGTGLFISTGSLLHTTGPVMSLISFLFVTTICFSVTQSLGEMATYIPISGSFAQFVTRWVSKSCGAANGWLYWFSWAVTFGLELSVVGQVIQFWTDAVPLAAWISIFFVILTIFNFFPVKFYGEVEFWIASIKIIAVFGWIIYAFIMVCGAGKTGPVGFRYWRNGYAWGDGILVNNNGKYVAAFVSGLINSIFTFQGSELVAVTAGEASPRALRSAIRKVMFRILVFYVLCMLFMGLLVPYNDPKLTQDGGFTRNSPFLIAMENSGTKVLPHIFNAVIVTTIISAGNSNIYSGSRILYGLAQAGVAPKFFLRTNKGGVPFFAVAFTAAFGALGYLACSSQGNKAFTWLLNITATAGLISWGFISVSHIRFMKTLQRRGISRDTLPFKAFFMPFSAYYGMVVCFIVVLIQGFTVFWDFNASDFFTAYISVILFVVLWVGFHFFFYGFGKDSFKMSNILVPLDECDIDSGVRDINDAEFDIPPPKNAWDKFWANVA

SEQ ID NO: 14753 - protein, 342 aa, Vaccinium macrocarpon
MKDVNSGLGTTVCVTGAAGFIGSWLIMRLLERGYVVRATVRDPGNLKKVKHLLELPKADTNLTLWKADLNEEGSFDEAIEGCVGVFHVATPMDFESKDPENEVIKPTINGVLSIIKSCTKAKTVKRLVFTSSAGAVVDQEHQPLVFDENNWSDVDFLYDKKMTGWTYFVSKTLAERAAMEAAKEISIDFISIIPTLVVGPFISPTFPPSLITVLSPITGNEAHYSIIKQCQYVHLDDLCKYLMFLLEHPEAEGRYICSSHDATIYDLAKMMRRNGPGTMSPNEFKGIDKELPIMSFSSKKLLVIGFKFKYNLEDMFRGAIDTWQETKGLLPYSNATPNIGKN

SEQ ID NO: 14754 - protein, 126 aa, uncultured bacterium 580
MAYSDKVLDHYENPRNVGSFNKEDSNVGTGMVGAPACGDVMKLQIKMGNDGIIEDAKFKTYGCGSAIASSSLVTEWLKGKSLDQASEIKNSAIAEELALPPVKIHCSVLAEDAIKAAVEDLKSKQK

SEQ ID NO: 14755 - protein, 354 aa, Vaccinium macrocarpon
MKDVNSGLGTTVCVTGAAGFIGSWLIMRLLERGYVVRATVRDPGNLKKVKHLLELPKADTNLTLWKADLNEEGSFDEAIEGCVGVFHVATPMDFESKDPENEVIKPTINGVLSIIKSCTKAKTVKRLVFTSSAGAVVDQEHQPLVFDENNWSDVDFLYDKKMTGWTYFVSKTLAERAAMEAAKEISIDFISIIPTLVVGPFISPTFPPSLITVLSPITGNDPHYSIIKQGQFVHLDDLCESHIYLFEHPEAEGRYICSSHDATIYDLAKIMRRNAPSTMSPTEFKGIPKDLPNVSFPSKKLIGMGFQFKYSLEDMFRGAIDTCQETKGLLPYSNETTANGNGNGNGNGNGNGTI

SEQ ID NO: 14756 - protein, 748 aa, Bacteroides fragilis YCH46
MTIEEIKNQVLQGTAISREQAGWLALYPRKEELYDAAHDITTACASQEFDMCSIINARSGRCPENCKWCAQSSHYKTKADVYDLVSAEECLRQAKYNEAQGVNRFSLVTSGRKPSPKNMKELCVAVRRMRRHSSIRLCASLGLLDEEELQALYDAGVTRYHCNLETAPSHFDSLCTTHTQEQKLKTLYAARRVGMDLCCGGIIGMGETVEQRIEFAFTLRDLNIQSIPINLLQPIPGTPLEHQSPLSEEEILTTVALFRFINPAAYLRFAGGRSQLTPEAVRKSLYIGINSAIVGDLLTTLGSKVSDDKEMILSEGYHFADSQFDREHLWHPYTSTSNPLPVYKVKRADGATITLESGQTLIEGMSSWWCAVHGYNHPILNQAVQDQLSRMSHVMFGGLTHDPAIELGKLLLPLVPPSMQKIFYADSGSVAVEVALKMAVQYWYAAGKPEKNNFVTIRNGYHGDTWNAMSVCDPVTGMHSIFGSALPIRHFLPAPSSRFGDEWNPEDIRPLEHLLEKHADELAAFILEPIVQGAGGMRFYHPEYLREAARLCHRYGVLLIFDEIATGFGRTGKLFAWEHAGVEPDIMCIGKALTGGYMTLSAVLTTNEVADCISNHAPGAFMHGPTFMGNPLACAVACASVRLLLTSGWQENVKRIEAQLNRELAPARELPQVADVRVLGAIGVIEMKEPVNMAYLQRRFVEEGIWLRPFGKLIYVMPPFIITPEQLTKLTEGMIRIISNGLPGSQTK

SEQ ID NO: 14757 - protein, 411 aa, Triticum aestivum
WTPSTRTTSTWTSTQSPPSLQNRCVNMIAHLFNAPIGEDETAIGVSTVGSSEAIMLAGLAFKRKWANKMKEQGKPCDKPNIVTGANVQVCWEKFARYFEVELKEVKLTEGYYVMDPKKAIEMVDENTICVAAILGSTLTGEYEDVKLLNDLLVEKNKKTGWNVPIHVDAASGGFIAPFLQPELEWDFRLPLVKSINVSGHKYGLVYPGVGWVIWRSKDDLPDELIFHINYLGTDQPTFTLNFSKGASQIIAQYYQLIRLGFEGYKHIMENCKLNAAVLKEGIDATGRFDVLSKADGVPLVAIRLKDSTNFSVFDISENLRRFGWIVPAYTMPADAEHVAVLRIVIREDFNRSLAQRLLADINKIVRELDAHAVHAIKLSNAAAAEGASKSTVDAVTEAFKGLAGNKKAGVC

SEQ ID NO: 14758 - protein, 261 aa, Glycine max
  misc_feature (144)..(144): Xaa can be any naturally occurring amino acid
  unsure (1)..(261): unsure at all Xaa locations
PFQEYSDPRTGILNLAVKLPAHVLKPDMGPKTYIAYGIKEELGRGDSVTKLHCDMSDAVNILTHTAEVILTDEQHFTISKLKEAHRAQNEREQCAQERVADHLEDRPYKDNKEHIENKEVLEAKSMKKQPIEIDGNIFPNNVLXEVVHPIHDQCFYLTWEHKKKLKEELGVEPWTFEQKLGEAVFIPAGCPHQVRNLKSCTKVAVDFVSPENIHECLRLTKEFRQLPKNHKAREDKLEIKKMIVYAVDQAVKDLKDLLKCS

SEQ ID NO: 14759 - protein, 590 aa, Azoarcus sp. EbN1
MCGIAGEIRFDGQSPDVGALERMNARQRVRGPDSGGVFVQGALGFGHRRLKIIDLSESAQQPMFDPALGLGIVFNGAIYNHAALRRELETLGYRFYSRGDTEVLLKAYHAWGQDFVQRLNGMFAFAIWERDSGRVVLGRDRLGIKPLYYSAQPGLLRFASSLPALVAAGGVDTTVDAVALNHYLSFHAVVPAPHTILAGVRKLPPATLMTIHTDGRRSERSYWSLAYAHEPGDAARSFEEWTEILLEGLRSAVGRRLVADVPVGALLSGGVDSSLIVGLMAQAGVQGLRTYNVGFEDVGGEKGNEFEYADIVAERFATIHERIFVPEAQLLARLPEAVAAMSEPMVSHDCIGFFLLSEAVSRHSKVVQSGQGADEVFGGYHWYPKLAGSVDPVGDYLAAFRDRDYDEYCRMVGAANRADDCSGAFVAAHFDLPGAIDPVDKALRLDTTVMLVDDPVKRVDNMTMAFGLEARVPFLDHELVELAARIPARHKLAHGGKGVLKEAARQVIPSAVIDRPKGYFPVPGLKYLQGQVLERVRDALTNRAARERGLFRREYVDTLLADPGAHMTPLRGSKLWQLGLLEWWLQTHVR

SEQ ID NO: 14760 - protein, 379 aa, Cucumis melo
MPSLTAPHGLPLFLFLLLFLFSSVSAQFQPAPDPRSDPYQYRLSGSMAVIIVILIAALFFMAFFSVYIRHCNDSPSNTVRPITAAAGRSRRATRGLDPAVIETFPTLIYSDVKEHKIGKSALECAVCLNEFEDDETLRLIPKCDHVFHPECIDAWLASHSTCPVCRANLSPQPTDSVHRADDSNAVVNSDTDGGDIEAQSNDVVSETTAPPTVQIQTESELSTTTSNKALNRTRTRGSRSNRLRWLFPRSHSTGHSLVQPGEDTERFTLRLPVEIRKQVVNRKLHRATSMVVLARQSSSMRGYRFGSGEGSSRGKYYRRLERLDRTSKSDRWVLSMTPPFFTRMSSMKTPRGGSNRAEPGSGRELGQGNTAVDSSRLPV

SEQ ID NO: 14761 - protein, 640 aa, Vibrio cholerae
MRYDVEQPSKLDRVRADYNVHYWSQGFFGIDDQGEVYVSPRKDKAHQTQLSSIVKQLEARDLNLPVLVRFPQILHQRVHNICDAFNQAIEEYDYPNKYLLVYPIKVNQQKEVVDEILASQAELEHKQLGLEAGSKPELLAVLAMAQQASSVIVCNGYKDREYIRLALIGEKLGHKVFIVLEKLSELDLVLKEAKSLGVKPRLGLRIRLASQGAGKWQSSGGEKSKFGLAASQVLTVINRLKAENQLEALQLVHFHLGSQMANIRDVRNGVNEAVRFYCELRELGAHIDFFDVGGGLAVDYDGTRSQSSNSMNYGLHEYARNIVSTVSDVCNLYGQPRPVIISESGRSITAHHAVLITNVIGTEAYSPEEIPAPGADAPMLLKNMWRGFEEVQHGTDDRALIEIYNDTQSDLSEAHSQFATGVLNLEHRAWAEQLSLRIYHELRQKMSNKNRFHRPILDELQERLADKFFVNFSLFQSLPDAWGIDQVFPVLPLSGLEEMNDRRAVMLDITCDSDGAVEQYVEGQGIESTLPVPAWTSDKPYLMGFFLVGAYQEILGDMHNLFGDTHSAVVNINDNGESEIAFINEGDTVEDMMRYVHIDVDKIRTNYRQLVSQRVAKEEQETVLAELELGLSGYTYLEDF

SEQ ID NO: 14762 - protein, 147 aa, Pediococcus pentosaceus ATCC 25745
MNSNNWSKAELKKKLSPEEYEVTQNAATEHPFTGKYDNFYQKGIYVDVVSGEPLFSSTDKYDAHCGWPSFTKPIDPKLVVNHRDSSYGMERVEVRSKDANSHLGHVFDDGPLDQGGNRYCINSAALKFIAYDDLEAHNLGYLKKLFN

SEQ ID NO: 14763 - protein, 171 aa, Pediococcus pentosaceus ATCC 25745
MEETAIFAGGCFWCMVEPFETQPGIINVVSGYTGGHVANPTYEQVTSHTTGHTEAVKITYDPEIISYRQLVQIYWQQTDPTDAMGQFQDRGDNYRPVIFVNSAEQREIAEKSREQLAKSEMFDDPIVTKIEDAQPFYPAEEEHQEFYKKNPLRYQIQEAGGRSEFQKKYWK

SEQ ID NO: 14764 - protein, 191 aa, Shigella sonnei
RPGKINLGIGVYKDETGKTPVLTSVKKAEQYLLENETTKNYLGIDGIPEFGRCTQELLFGKGSALINDKRARTAQTPGGTGALRVAADFLAKNTSVKRVWVSNPSWPNHKSVFNSAGLEVREYAYYDAENHTLDFDALINSLNEAQAGDVVLFHGCCHNPTGIDPTLEQWQTLAQLSVEKGWLPLFDFAYQ

SEQ ID NO: 14765 - protein, 659 aa, Desulfovibrio vulgaris subsp. vulgaris str. Hildenborough
MRVVRHSRGTCNRGLYEVRELARNRTLQQWGVEDSAELYGIRNWGAGYFDVAQNGDVVVYPFGHNRGPAVSIPEIIGGMRERGYDMPVLLRIENILDSQITSLHTSFRNAIGSLGYKGEYRGIFPIKVNQQQQVVEKIAQFGSHYHHGLEVGSKAELIAAVSQLRDREACLVCNGYKDEEFIDLGLHAVRLGFMCIFVLEMPGELDLILERGEALGVKPIIGVRAKLSVKAGGHWTDSGGERSTFGLTTSQIVDVVDRLKEKGMLDCFKLLHYHLGSQVPNIRDIRAAVMEACRIYAGLVQEGAAMGFLDLGGGLAVDYDGSHTNFVSSRNYTLDEYCADIVEAVMTTLDEQNIPHPHIVTESGRATVAYYSMLLFNILDVSRVEIGNLPDALPEDTPEPVRNMREVLAGMTLRNLQECYNDALYYRDAVRQLFLTGQVTLRQRTLSERLFWAIMKRIAQEKQKLKHVPKDLAEIDVALADIYYGNFSVFQSLPDSWAIDQLFPVMPVHRLQELPSRQGILSDITCDSDGRIDHFIDPQGMKGTLDLHPLRDGEEYYLGVFLVGAYQETLGDLHNLLGDTNVVSVRVHEDGTYEFVREIRGDSVADILSYVEYDPRRIYEDIRELAERAVREGRITASDRFRVMQAYEDGLRGYTYFER

SEQ ID NO: 14766 - protein, 99 aa, Mycoplasma capricolum subsp. capripneumoniae
TMVTKLEKDSLVSKLYNSDVALERHRHRYEFNNKYKKDLESVGLRFSGIYEEKNLVEVIEIPSLKFFVASQFHPEFTSRPNKPTPLFKGFIKAIIENNK

SEQ ID NO: 14767 - protein, 429 aa, Sinorhizobium fredii
MSGTNATISIDGKTADLPVRSGSIGPDVVDIWSLYKQTKMFTYDPGFTSTASCESKITYIDGDEGVLLHRGYPIEQLADHGDFLEVCYLLLYGELPTKAQKDDFDYRVTHHTMIHEQMSRFFTGFRRDAHPMAVMCGCVGALSAFYHDSTDITDPHQRMVASLRMIAKMPTIAAMAYKYHIGQPFIYPKNDLDYASNFLRMCFAVPCEDYVVNPVLSRAMDRIFILHADHEQNASTSTVRLAGSSGANPFACIAAGIACLWGPAHGGANEAALNMLAEIGSVDRIPEFITRAKDKNDPFRLMGFGHRVYKNYDPRAKIMQKTTHEVLAELGHKDDPLLEVAMELERIALTDEYFIEKKLYPNIDFYSGITLKALGFPTTMFTVLFALARTVGWIAQWNEMIEDPEQRIGRPRQLYVGAPLRDYVPLSKR

SEQ ID NO: 14768 - protein, 196 aa, Shigella boydii
RADERPGKINLGIGVYKDETGKTPVLTSVKKAEQYLLENETTKNYLGIDGIPEFGRCTQELLFGKGSTLINDKRARTAQTPGGTGALRVAADFLAKNTSVKRVWVSNPSWPNHKSVFNSAGLEVREYAYYDAENHTLDFDALINSLNEAQAGDVVLFHGCCHNPTGIDPTLEQWQTLAQLSVEKGWLPLFDFAYQG

SEQ ID NO: 14769 - protein, 185 aa, uncultured bacterium
GCTSGLDAVADGAELIEDGRADVVIAGATDAPISPITVACFDAIKATSPNNDDPAHASRPFDISRDGFVLGEGAAIFVLEPADQARRRRAHIYCEIAGYAQRSNAYHMTGLTADGLEMAEAIRVAMGRARLVPEDIDYINAHGSGTRQNGRHETAAFKASLGARAYEIPVSSIKSMVGHSLGAIG

SEQ ID NO: 14770 - protein, 155 aa, Archaeoglobus fulgidus DSM 4304
MSFVIWITGPSGAGKTTLANALYKKLESMGYRVELLDGDGVRRKLYPNLGFSEEERWMHNRVVVEMARRLSRNGIITIVSVVSPYRAWREYARKEIEKFVEVYPRCPLEVRMKRDPKGLYSKALRGEIKGLTGLDGEYEEPENPEVVVDTDKNDR

SEQ ID NO: 14771 - protein, 193 aa, Shigella boydii
DERPGKINLGIGVYKDETGKTPVLTSVKKAEQYLLENETTKNYLGIDGIPEFGRCTQELLFGKGSALINDKRARMAQTPGGTGALRVAADFLAKNTSVKRVWVSNPSWPNHKSVFNSAGLEVREYAYYDAENHTLDFDALINSLNEAQAGDVVLFHGCCHNPTGIDPTLEQWQTLAQLSVEKGWLPLFDFAYQ

SEQ ID NO: 14772 - protein, 185 aa, uncultured bacterium
GCTSGMDAVADGAELIEDGRADVVIAGATDAPISPITVACFDAIKATSPNNDDPAHASRPFDISRNGFVLGEGAAVLVLEPTERARARGARIYCEIAGYARRSNAYHMTGLTSDGLEMAEAIRVAMDRARLAPEDIDYINAHGSGTRQNDRHETAAFKASLGARAYEVPVSSIKSMIGHSLGAIG

SEQ ID NO: 14773 - protein, 333 aa, Ustilago maydis 521
MGDTNSTLKQPELVPLSNQVAGHPDGVQSLEGGRLVVKACLPRELEFYAKVKQAAAGLAGLESRQVELLGRLLKAMPECHGSWQEYTGSQTAASPSKDESARIVMENLTYGYEKPNVCDIKLGTQLWDEEASEEKRQRMEKAAASTTSGSHGIRLTGWQVYDSETNTYRSVPKTFGKTIHAEHLALGMRMLLACPEQGDAEEAEALLEGTSISEGTSRHRLASLPEGLVVRLLRDHLINDLEELYAIFAEVEVRMRGASLLSVYEGDPARLDATLSRDGSHGQGRPQVRLIDFGHATIVPGQGPDQGILLGLSTVLELARKTLEKLESKSMQE

SEQ ID NO: 14774 - protein, 157 aa, Gossypium herbaceum
NKGSWTAEEDRRLAKYIEIHGAKRWKTIAIKSGLNRCGKSCRLRWLNYLRPNIKRGNISDEEEDLIIRLHKLLGNRWSLIAGRLPGRTDNEIKNYWNSHLSKKIINHDVRTEQTSSSEQIVPHKAWETVQMEEEEVVKGSDEIENSEFSIDVDEFFD

SEQ ID NO: 14775 - protein, 185 aa, uncultured bacterium
GCTSGLDAVADGAELIEDGRADVVIAGATDAPISPITVACFDAIKATSPNNDDPAHASRPFDISRDGFVLGEGAAVFVLEPADQARRRRAHIYCEIAGYAQRSNAYHMTGLTADGLEMAEAIRVAMGRARLVPEDIDYINAHGSGTRQNDRHETAAFKASLGARAYGIPVSSIKSMVGHSLGAIG

SEQ ID NO: 14776 - protein, 157 aa, Gossypioides kirkii
NKGSWTAEEDRRLAKYIEIHGAKRWKTIAIRSGLNRCGKSCRLRWLNYLRPNIKRGNISDEEEDLIIRLHKLLGNRWSLIAGRLPGRTDNEIKNYWNSRLSKKIINHDVRTEQTSSSEQFVPHKAWETFQMEEEEVVKGSGEIENSELSIDVEDFFD

SEQ ID NO: 14777 - protein, 571 aa, Pirellula sp.
MAKQIVFDDDARGPLLAGVSKLARAVRSTLGPRGRNAVLDKGWGSPKVTKDGVTVAEDIELDDPFENLGAQLVKEAASKTNDVAGDGTTTATVLSEAIFREGLKMVATGADPMALSRGIQKAVDTAIAQIAKMATPINEKSKSDIKQVATIAGNNDPQIGDVLADAFTKVGKNGVITVEEGRSNETYVDVVEGMQFDRGFLSPHFVTNQDEVTVELDDCYILLFEEKISNNKKMIPLLEAISKAKKPLLIIAEDTEGEALATLVVNKMRGILSACAVKAPGYGDRRKAILGDIAALTGGKAIFKDLGIDLESVKVSDLGRAKQIRITSEATTIVGGAGKKADIEGRVAQIRREIEATDSDYDREKLQERLAKLAGGVAQINVGAATETEMKERKALIDDARAATQAALEEGIVPGGGTALLRCRAAVEKLEKATEGDQKLGVRIIRNVLDQPMRAIANNAGLDGAVVVNRVLQMKGKTEGYDANADKYCDLVAAGIVDPAKVVRTSLTNAASVAALLLTTESLVTEIPVEEEPAGGDHHDHGMGGGMPDMGGMGMGGMGGMGGMGGMGGMM

SEQ ID NO: 14778 - protein, 295 aa, Pseudomonas putida
MAGKSPLINLNNGVKMPALGLGVFAASAEETASAIASAISSGYRLIDTARSYNNEAQVGEGIRNSVDRAEMFVTTKLFNCDYGYERALRAFDESLGRLGLDYVDLYLLHWPTKDWNATIQSWKAAEKILGDGRARAIGVCNFLEDQLDELIAASDVVPAVNQIELHPYFAQKPLLAKNRALGIVTEAWSPIGCHQRWQDGDNHGGRKHPLTDPVITTIAEAHGRSAAQVILRWHFQNDVVAIPKSVNPERIAKNIDVFDFALSDAEMAQLDELDTGVRIGPDPRDVDTSSFAEFV

SEQ ID NO: 14779 - protein, 181 aa, Gossypioides kirkii
NKGAWTAEEDRKLAEVIAVHGAKRWKTIPTIAGLNRCGKSCRLRWMNYLRPNIKRGNISDQEEDLILRLHKLLGNRWSLIAGRLPGRTDNEIKNYWNSHLSKKVNQKEKHSGASAGQVCKFAQKRLVENAKEQVREENTSTGVEESNISFDVNDFFDFSNVDTRNFEWVNRFLEVDEGFKF

SEQ ID NO: 14780 - protein, 463 aa, Pseudomonas fluorescens PfO-1
MGIKVLLVEDDRSLREALADTLLLAGHDYHAVGSAEEALNAVEREAFSLVVSDVNMPGMDGHQLLGLLRARQPQLPVLLMTAHGAVERAVDAMRQGAADYLVKPFEPKALLDLVARHALGSLVASDAEGPVAVEPASAQLLDLAARVARSDSTVLISGESGTGKEVLARYIHQQSHRASQPFIAINCAAIPDNMLEATLFGHEKGSFTGAIAAQAGKFEQADGGTILLDEISEMPLGLQAKLLRVLQEREVERVGARKPITLDIRVVATTNRDLAGEVAAGRFREDLYYRLSVFPLAWRPLRERTADILPLAERLLAKHVNKMKHAMAKFSSEAQACLIGYPWPGNVRELDNAVQRALILQQGGLIQPQDFCLSGPALFAPLPAVVPVAPVIREVEIEVDSAGALGDDLRRREFQMIIDTLRTERGRRKEAAEKLGISPRTLRYKLAQMRDAGMDVEGYLFAT

SEQ ID NO: 14781 - protein, 149 aa, Methanococcus maripaludis S2
MDVSTQRRIAAAVLDCGIDRVWIDPENLEKVKMAITKDDIRLLINDGIIVKKQEKGISSARKKEVQEQKRKGKRKGPGSRKGAKGARTPKKEKWMNTIRPLRKMLKELRENEKIERSAYRKLYRMAKGGAFRSRNHMKLYMKEHGILAE

SEQ ID NO: 14782 - protein, 287 aa, Gossypium hirsutum
MDVYKRGFISETSRNEEEMELRKGPWTEEEDSMLKAHVNIHGEGRWNAVARLSGLRRTGKSCRLRWLNYMRPEIKRGNISLEEQLLILELHSRWGNRWSKIAQHLPGRTDNEIKNYWRTRVQKQAKQLNCDVNSKQFKDAMRYVWIPRLVERIRASSESPSSQPSTTTKTTYNDCISNISSSQMSYANASGSVQVDPSLLPELSGTSSDSLDTQVSSVSDLTDCYNPQSLSNYLHKGLGLEKEGAATWGRDEEFQATEEHGNGLLVGGGESSMDTVWNEENVWFLQQ

SEQ ID NO: 14783 - protein, 547 aa, Desulfovibrio vulgaris subsp. vulgaris str. Hildenborough
MKTKFIFITGGVLSSLGKGLAAASVGALLKARGLKVTIQKLDPYINVDPGTMNPFQHGEVYVTDDGAETDLDLGHYERYLAEPMSQKNNYTSGSIYHRVITKERRGDYLGGTVQVIPHVTDEIKNAVLSLAEDDPDVALIEIGGTVGDIEGLPFLEAIRQLRGDLGKDRCLYIHLTLVPYLRAAGEHKTKPTQHSVKELRSIGIQPDIILCRCEEAITADLKRKIALFCNVDQDAVFSAVDVKNIYEVPLRFYEEGFDQKIAIMLRLPAKNPNLEPWETLVDTCAHPQGRVTIGIVGKYVDLKEAYKSLHEALVHGGVANKVAVDLKYVNSEEITEENVAEALKGLDGILVPGGFGYRGVEGKILTIRYARENRVPFFGICLGMQCAVIEFARNVMGLEDANSEEFNELSKNKVIYLMTEWFDHRRQAVERRDSSSDKGGTMRLGSYPCVVVPDTKAHDAYGVKHIDERHRHRFEFNKAYFDAMAQSGMVFSGLSPDGELVEIVELPDHPWFLGCQFHPEFKSNPMQPHPLFREFIRAAKTHPAGKR

SEQ ID NO: 14784 - protein, 346 aa, Crocosphaera watsonii WH 8501
MSRYAEELRTTAKAMVARGKGILAMDESNGTCNKRFDKLGIPTTEEYRQIYRSLILQTPELSNYISGPILYDETIRQTTPDGVPLLKIITDAGMIPGIKVDTGAKDLAGCPNEKVTEGLDGLRDRIAEYYSMGARFAKWRAVITIGNGIPSRGCIKANAHGLARYAALCQEGGLVPIVEPEVLIDGDHTLERCWNVTDETLHEVFNQLYTQNVAFDQMVLKPSMVISGKDCPQQASVEEVAKATISCLLKNVPATVAGIAFLSGGQSKEQSSAHLNAMNQMFGDQCPWPVTFSYARAIQQPALDYWAGDSSRISGAQTRLLKRAQCNGAASLGEYSSEMEKTLATV

SEQ ID NO: 14785 - protein, 598 aa, Ralstonia eutropha JMP134
MRRDPTTGLLLPNLSRRRFVQGLAAGGVLAGLPVWQGSAHAQPAATAFGTAPVLRGTEFDLVVAESMVNFTGKPALATTINGMLPGPTLRWREGDTVTIRVTNRLREHTSIHWHGIILPYQMDGVPGISFGGIAPGETFTYRFKVAQSGSYWYHSHSGFQEMIGLYGGIIVDPAGEDPVRADRDYTVLLSDWTDEDPMRVLSKLKVQSDYYNYNQPTAVDFFRDVSNDGLKAALDKRRMWNQMRMNPTDLADMSGATLTYLTNGLTPAGNWTGLFRPGERVRLRFINGAGNTFFDVRIPGLKLRVVQVDGVNIEPVTVDEFRFGPGETCDVVVEPRDDAYTIFSQSMDRTGYARGTLSVRDGLPAPVPALDKAEWLTMGDMMGDMAGMHGADHGGMAMDHSQHAMDHSQHATHGAAADNPLKVPGKAVRHARTEYGASTDMRVDTPRTNLDDPGIGLRNNGRRVLTLADMHTLGGPPDPRGPGREIELHLTGNMERYTWSFDGVEFGKSTPVHFRHGERLRVILHNDTMMTHPMHMHGMWSDLEAPDGTFQARRHTIPVQPAQRISFLVTADALGRWAWHCHLMLHMDAGMFREVVVS

SEQ ID NO: 14786 - protein, 138 aa, Nocardia brasiliensis
DQVPDFIRSQKRLPGNGLRDHNMQWDFWTLRPESAHQVTWLMGDRGIPKTYRHMNGYGSHTYQWINAAGERFWVKYHFKTDQGIDYLTQADADRIAGENADYHRKDLWDAIERGEFPSWTLHVQVMPVAEAENYRFTR

SEQ ID NO: 14787 - protein, 442 aa, Methanococcus maripaludis S2
MESFLLKIKPILELIPEVKRPLREISFKEKLQWTALVLVLYFILGTIDIYTGGSEMPAIFDFWQTVTASKMGTLITLGIGPIVTAGIIMQLLVGSELISLDLSKPMNRALFQGLQKLFGIALCFLEALMFVGAGAFGALTPLMTAVLVFQLALGAILIIYLDEIVSRYGIGSGIGLFIAAGVSQTIFVGTFGAEGYLWKFFTAMTAGSLWTALEYILPILGTILVFLVVVYVESIRVEIPLAHGRVKGAVGKYPIKFIYVSNLPVILAAALFANIQLWGMFLEKMGFPILGHYTSGRAVDGLAYYFSTPYGISSLTADPLHAVFYTVMMVIFCILFGLFWVETSGLDAKSMAKKLGNLDMAIKGFRKSQKSIEQRLKRYITPITVMGSAFVGFLAAAADFTGALGGGTGVLLTVSIVYRLYEQLVQEQLSELHPSIAKFIRK

SEQ ID NO: 14788 - protein, 294 aa, Zea mays
MEQYEKVEKIGEGTYGVVYKALDKATNETIALKKIRLEQEDEGVPSTAIREISLLKEMNHGNIVRLHDVVHSEKRIYLVFEYLDLDLKKFMDSCPEFAKNPTLIKSYLYQILHGVAYCHSHRVLHRDLKPQNLLIDRRTNALKLADFGLARAFGIPVRTFTHEVVTLWYRAPEILLGARQYSTPVDVWSVGCIFAEMVNQKPLFPGDSEIDELFKIFRILGTPNEQSWPGVSCLPDFKTAFPRWQAQDLATVVPNLDPAGLDLLSKMLRYEPSKRITARQALEHEYFKDLEVVQ

SEQ ID NO: 14789 - protein, 147 aa, Helianthus tuberosus
MAASDIVVQAGPWGGKGGKRWLQTAHGGKITSIIIKGGTCIFSIQFVYKDKDNTEYHSGQFGVQGDKAETITFADDEDITAVSGTFGAYYHMTVVTSLTFQTNKKVYGPFGKVTSSSFSLPLTKGKFAGFFGNSGDVLDSIGGVVVP

SEQ ID NO: 14790 - protein, 143 aa, Zea mays
MTEAMIRKKPGMASVKDMPLLQDGPPPGGFAPVRYARRISNTGPSAMAIFLTVSGAFAWGMYQVGQGNKIRRALKEEKYAARRAILPILQAEEDERFVSEWKKYLDYEADVMKDVPGWKVGENVYNSGRWMPPATGELRPDVW

SEQ ID NO: 14791 - protein, 325 aa, Bordetella parapertussis 12822
MKLEGAKILVIGGAGFIGSFVVAELLKHPVAEVVIYDNFARGKQSNIDEYLSDPRCRIYPNGGDIRDIDLLNDAMQGMDGVVHLAAMWLLHCKDFPRTAFHVNIEGTFNVLEACVRNNVKRLVYSSSASVYGDAVEVPMTEEHPFNNRNFYGASKIAGEAMCHAFHDRYGLSYVGLRYMNVYGPHQDQTAAYTGVIPIMLNKIDANEAPVINGDGTQAYDFVYVEDVARCNVLALTSEATDQFYNVGTGVQTSIKELCDTILDMKDSGLQVQYRPYSEDDARRMVQNRIGCPVKASRDLGFTYQYALTEGLQKLIDWRAKNGAQS

SEQ ID NO: 14792 - protein, 193 aa, Shigella boydii
ADGRPGKINLGIGVYKDETGKTPVLTSVKKAEQYLLENETTKNYLGIDGIPEFGRCTQELLFGKGSTLINDKRARTAQTPGGTGALRVAADFLAKNTSVKRVWVSNPSWPNHKSVFNSAGLEVREYAYYDAENHTLDFDALINSLNEAQAGDVVLFHGCCHNPTGIDPTLEQWQTLAQLSVEKGWLPLFDFAY

SEQ ID NO: 14793 - protein, 501 aa, Pyrobaculum aerophilum str. IM2
MESITSIEMYVADRNAEWLGVPRLVLMENAGAAVARNVLRKFPTAKRILVVCGTGDNGGDGYVAARHLHAAGRTVRVIALGEPREELARINYQAVTRLWGVEVKAAQLPLELLALQDWFMWAEVIVDAVLGTGIRGVLREPHATAIELMNISPAPKVAVDVPSGLDPDTGEVRDKAVRAALTVTFHKAKRGLLAPGAQRYVGELVVEPIGIPPEAELVVGPGDFAYLNFTRRADSKKGDHGRVLVIGGSLEYSGAPVYVALAALRAGVDLAVIAAPEPAAYAAKAISPDIIAIPLEGPRLSTKHVDKLASLAERFNVVAMGPGLGVEEETQEAVRELFRRLAGKRAMVIDADALKALRGVRASGAVVYTPHAGEFKALTGAEPPQSLSERMAVVREQAAALGGVILLKGRYDVISDGVRVKVNMTGTPAMTVGGTGDVLTGLVAAFLTKTSDPLEAAAVAAFVNGLAGEDAAAELGFHITASDLIERLPRVIRRYAFESIR

SEQ ID NO: 14794 - protein, 624 aa, Bordetella parapertussis 12822
MCGVAGLIHLDGAAVDPAVLQGMTDAIAHRGPDGEGHWIDGNVGLGHRRLAIIDLSPAGHQPMISADSRYVLSYNGEIYNFRELRAELETAGYRFKSRTDSEVLLYAVIAWGLKALKRFNGMFAFALWDCHERRLILARDRYGIKPLYYAEQGGTLAFGSEQKAILALPGFRRKLDKAALLEYFTFQNIFTSKVLLEDIQILPAGHYAIVEPDRCASISLTQYWDFCFREPDVAATDQEYREELDRLFVQAVKRQLVTDVELGSYLSGGMDSGSIAAVAAAEHPYIKTFTCGFDLNSASGIELGFDERSKAEYMSYCFKTEHYEMVLKAGDMERILPHVACHLEEPRVGQSYPNFFAAKLASRFVKVVLSGAGGDELFAGYPWRYYRAVVNDDFEHYVDKYYNFWQRLLPNSELKRVFAPIAGEVEHVWTRDIFRNVFRHHADQLYRPEDYINHSLYFEAKTFLHGLLVVEDKLSMAHGLETRVPFLDNDLVEFAMRCPIRLKLNNLAEVVKINENETGNKVRKFFEKNRDGKTILREVMNHRLPADISKAEKQGFSAPDASWFKGESLEFVRRKLLDGHSPLYEIMDAATVRELVNEHLGGIRNRRLLIWSLLSVDAWMRQTF

SEQ ID NO: 14795 - protein, 347 aa, Haemophilus somnus 2336
MKAIVLESNRNMAICDIPKPLVEDPDDVLVKVHYSGLCGSDIPRIFHHGTHFYPIVLGHEFSATVEEVGSDVTELDKGDLVSCAPLQPCFKCDECNRGFYSLCKNYNFIGSRRFGANSEYLCVKKSNLVKLPQGSDTLQASFIEPITVGLHAIHLAGGCKGKNVVIVGAGTIGLLAAQSTKALGANSVSVIDINQEKLVLAKTLGADYVFNSMDLKADEILACLDGNRFDQLILETAGVPKTVELSIQIAGPRAQVVLVGTLHHDLNLDQKEFGLILRKELIIFGSWMNYSKPWPGVEWREAVNLIAENKICFEPLISSINTIEDYVEEVKSLDGKPMNGKLVLKFD

SEQ ID NO: 14796 - protein, 192 aa, Shigella sonnei
DERPGKINLGIGVYKDETGKTPVLTSVKKAEQYLLENETTKNYLGIDGIPEFGRCTQELLFGKGSSLINDKRARTAQTPGGTGALRVAADFLAKNTSVKRVWVSNPSWPNHKSVFNSAGLEVREYAYYDAENHTLDFDALINSLNEAQAGDVVLFHGCCHNPTGIDPTLEQWQTLAQLSVEKGWLPLFDFAY

SEQ ID NO: 14797 - protein, 518 aa, Cryptococcus neoformans var. neoformans JEC21
MIPARPWSALSPVQALVEQTCDPTLPVPNDIANIELAELINRKKANSAREATTALLPHINSRNPNEALLALNVLDYLVKNCGYPIHLQISTKEFLNELVRRFPERPPMVIGRVMGKILDLIHEWKNTLCVTSKYKEDLVHIRDMHRLLSYKGYRFKQFDAARALASANPNENLKSPEELEEEDRAAKSAKLQELIRRGTPRDLAAAQELMKALAGAEPEKAVDYTAQTLKELDKVQAKAILLNDMLNNATQGEKIGIEGDVYDQVAGACRGARPRIQKWIEDDNGEREGMMDRLLLCNDLINTALERFEACKAGDWTKAQAVVERNNPNQKVADLISFDVFDNEPASSSSGGVTLPADNIPSTSNVGMTTSGLPLDLFAPSPVATPSPAGSSTVGAAGQKQKQDPMAFFSTASPQPQATQQWGQAQAQPTSAFGGLGGLQQPTPNTNNNNFAFGGFQSSQSSSPAVGYSLSPQPAALSSQQFIQPQQPQQSQPQQQPQQQQQQQTKKDAFADLVDLMS

SEQ ID NO: 14798 - protein, 531 aa, Zea mays
DDDEDEVLLAIAEELGVFIPYVGGVEHAHVLLPPLETLCTVEETCVRDKAVESLCRIGAQMKETDIVDWFIPVVKRLAAGEWFTARVSSCGLFHIAYPSASDQLKTELRTIYGQLCHDDMPMVRRAAASNLGKFAATVEQNHLKTEIMSIFDDLTQDDQDSVRLLAVEGCAALGKLLEPQDCVAHILPVIVNFSQDKSWRVRYMVANQLYELCEAVGPEPTRADLVPAYVRLLRDNEAEVRIAAAGKVTKFCRILNPQLSVQHILPCVKELSSDSSQHVRSALASVIMGMAPVLGKDATIEQLVPIFLSLLKDEFPDVRLNIISKLDQVNQVIGIDLLSQSLLPAIVELAEDRHWRVRLAIIEYIPLLASQLGVGFFDDKLGALCMQWLEDKVFSIRDAAANNLKRLAEEFGPEWAMQHIIPQVLEKINNPHYLYRMTILQAISLLAPVMGAEITCQKLLPVVINSSKDRVPNIKFNVAKVLQSLVPILDQSVVEKTVKPSLVELSEDPDVDVRYYANQALQACDQMMVSS

SEQ ID NO: 14799 - protein, 180 aa, Rhizobium gallicum bv. gallicum
EFDAFPALEQLPLWGFDGSSTMQAEGRSSDCVLKPVAVYPDPARTNGALVMCEVMMPDGVTPHPSNSRATILDDEDAWFGFEQEYFFYENGRPLGFPEQGYPAPQGPYYTGVGYKNVGSVAREIVEEHLDLCLAAGINHEGINAEVAKGQWEFQIFGKGFKRAADQIWMARYLLLRLCEK

SEQ ID NO: 14800 - protein, 192 aa, Shigella boydii
ADERPGKINLGIGVYKDETGKTPVLTSVKKAEQYLLENETTKNYLGIDGIPEFGRCTQELLFGKGSALINDKRARTAQTPGGTGALRVAADFLAKNTSVKRVWVSNPSWPNHKSVFNSAGLEVREYAYYDAENHTLDFDALINSLNEAQAGDVVLFHGCCHNPTGIDPTLEQWQTLAQLSVEKGWLPLFDFA

SEQ ID NO: 14801 - protein, 423 aa, Ashbya gossypii ATCC 10895
MSQSRGIRRLQTSSYPQKLGHSQPNEFKVLEEIGRGSFGSVRKVLHVPTSKLMVRKEIKYGHMNSKERQQLIAECTILAGLRHENIVEFYNWDHASSRTGNSVDYGNGEVLYLYMEYCSCGDLSQMIKHYKGMRKYVPERDIWRIAVQLLLALYKCHTSCDLPQLDTIYDKISKSAIESEAGKVTSVIHRDLKPGNIFLTGDGVGGRGSVDYSKVEVKLGDFGLAKSLQSAIEFATTYVGTPYYMSPEVLMDQPYSPLSDIWSLGCVIYELCALRVPFPARNFMELQRMIQRADVQPLPDYYSKELQQLVISCINPNEKLRPSAFDLLQCLQLRVARKALQLERFEKNLLVYEKELTEIGEMLEKQASDYDKEINDMRTQCRKDFELAVEKRARELVSGKRIQDVPDIHARYHVRTPTNPWRS

SEQ ID NO: 14802 - protein, 360 aa, Streptomyces coelicolor A3(2)
MTEAILLVGGKGTRLRPLTVNTPKPMVRAAGVPFLTHQLARAKAAGVEHIVLATSYLAEVFEPYFGDGSTLGLHLEYVTEEEPLGTGGAIRNVASRLHSGPDEPVLIFNGDILTGLDIGALVRTHETTGADVSLHLTQVTDPRAYGLVPTDDTGRVLAFLEKPQTPEEIVTDQINAGAYVFRRSVIDTIPAGRPVSVERETFPELLATGAHLQGMVDSTYWLDLGTPAAFVRGSADLVLGRAPSPAVPGRCGDRLVLPTAQVAPDAKLTGGTVVGEGAFVAEGARVFGSTILPGAVIEPGAVITDSLIGTRARVGTRSVLADTVIGDGAVIGADNELRSGARIWCDAHIPPASLRFSPDT

SEQ ID NO: 14803 - protein, 438 aa, Polaromonas sp. JS666
MSQAPIPSASAAAGTHPLPSYLQADKLGPWGNYLQQVDRVIPHLGSLGRWAETLKRPKRILVVDVPINMDDGTIAHFEGYRVQHNVSRGPGKGGVRFHQDVTLSEVMALSAWMSIKNAAVNVPFGGAKGGIRVDPKTVSQGELERITRRYTSEIGIIIGPTKDIPAPDVNTNEQVMAWMMDTYSMNTGSTSTGVVTGKPVDLGGSLGRRDATGRGVFTVGVEAARHIDLDISTSRVAVQGFGNVGGVAGRLFHETGARIVAVQDHGGTIYREAGLDVPALIRHVAETGSVGGFPNAEVIANELFWEVDCDIMIPAALEEQINAANAGRIKARMIIEGANGPTTPEADDILQERNVLVLPDVIANAGGVTVSYFEWVQDFSSFFWDEAEINARLVRIMKEAFAGVWQVAQDHKVTLRTATFIVACKRILHTRQLRGLYP

SEQ ID NO: 14804 - protein, 461 aa, Oryza sativa
MEKKASILMNRYELGRMLGQGTFAKVYHARNLASNQSVAIKVIDKEKVLRVGMIDQIKREISIMRLVRHPNIVQLHEVMASKSKIYFAMEYVRGGELFSRVARGRLKEDAARKYFQQLIGAVDFCHSRGVYHRDLKPENLLVDENGNLKVSDFGLSAFKECQKQDGLLHTTCGTPAYVAPEIINKRGYDGAKADIWSCGVILFVLLAGYLPFHDSNLMEMYRKISKGDVKFPQWFTTDVRRLLSRLLDPNPNIRITVEKLVEHPWFKKGYKPAVMLSQPNESNNLKDVHTAFSADHKDNEGKAKEPASSLKPVSLNAFDIIFLSKGFDLSGLFENDKEQKADSRFMTQKPASAIVSKLEQIAETESFKVKKQDGLVKLQGSKEGRKGQLAIDAEIFEVTPSFFVVEVKKSAGDTLEYEKFCNKGLRPSLRDICWDGQSEHPSLAQSSTLTQSSKSISRHAI

SEQ ID NO: 14805 - protein, 1003 aa, Desulfovibrio desulfuricans G20
METMPDEKIVSRGKEFFTSISGEAPSIFNKGWWTGKVMDWAMKNEDFKVQLFRFVDVFPYLNTSESLSRHIREYFAEGGDVPAVLKWGAGKAGIGGKLTAMLMEKTIRSNIENMGRQFIIGQNAKEAVKSIAKLRKDGFAFTVDLLGEATVNEEEADAYRDGYLEVLDALAREQDKWSPLKGPGPDTDTDWGCTPRVNVSIKPSALYSQAKPVDIEGSVQGIMKRLVPVYRKVVEMNGFLCIDMEALKYKEMTLELYRRLRSEPEFRHYPHLSIVLQAYLRESEKDLADLLHWARTEKLPIAIRLVKGAYWDAETVIAKQNGWDIPVWVHKPQSDMCFERMARTILENSDICYFACGSHNIRTIAATMETARQLGVPETRYEFQVLYGMAEPVRKGLLNVAGRVRLYCPYGELIPGMAYLVRRLLENTANESFLRQSFADGTDMERLLENPELTLQRELAARPAPVEPSGTGGIPPFRNDPMIDFTIPEQRAAFPRAIAEVRAAAGGTVPLFIGGKEVFTQDTMPTTNPADPDEKLADVCQAGIAEIDAAIEAAGRAFLIWRDVSPEDRANYLFKAADAARRSAYRLSAWQILEVGKQWDQAYHDVGEGIDFMEYYAREMLRLGRPRRMGRAPGEHNHLFYQPKGIAAVISPWNFPFAISIGMASAAIVTGNPVIYKPSGIAARIGYNLTEVFREAGLPDGVFNYCPGRSSVMGDYLVEHPAINMICFTGSMEVGLRIQEKAAVVQPGQHHCKRVIAEMGGKNAIIIDDDADLDEAVLQVIYSAFGFQGQKCSACSRVIVLDPIYDRFVKRLVEACNDLKIGPAEDPANYMGPLADASLQKNVGRYIEIAREEGTILVSRDDIPARGCYVPLTVVADITPDSRIAQEEIFGPVLGVMRASTFEEALEIANGTRFALTGGVFSRSPEHLEKARKEFRVGNLYLNKGSTGALVERQAFGGFKLSGVGSKTGGPDYLLQFMDPRVVTENTMRRGFTPIEEDDDWIV

SEQ ID NO: 14806 - protein, 687 aa, Ustilago maydis 521
MSFTKAASDEKAIAAIRVLAADVVAKSNSGHPGAPMGMAPMAHTLFSRFMNVNPAHSKWINRDRFVLSNGHACALIYILNHLLGYKDLPMEQLKQFRQLDSKTPGHPEHGHTEGIEVTTGPLGQGFANSVGLAIAQANLAATFNKDGFPLFTNHTYMFTGDGCLQEGISSEAASLAGHLKLGNLIALYDDNHISIDGDTACSFTEDVEQRFLAYGWHVSHVLDGDKDLEGLFKAITEARNVTDKPSIIRVKTTIGFGSKLQGLAATHGAPLKADDIEAVKTKFGMDPKQSFVVPDDVYAAYKEIADRGAKADKEWTELFKAYGEKYPNEHAEIARRIAGKLPEGWEKSLPTYQPSDAAVASRKLSETVLAKVADAVPELLGGSADLTGSNLTRWGNAVDFQHPSTQLGDYSGKYIRYGVREHAMGAIMNGLAAYGMHIPTAGTFLNFVSYAIGAVRLSALSQHRVIWVATHDSIGLGEDGPTHQPIETAIALRAIPNLMFWRPADGNETSGAYLVAIESKSTPSVLALTRQNLPQLEGSSIEKAAKGGYVVVENESADITLVASGSEVALCVEAVAKLGEKGIKARVVSIPCFSVFDAQPIEYRLSVLPSGKPILSVEAYSTLGWSKYSHAQHGINTFGASAPANQLFKKFKMTGDDVVAKAEHVTKVFQGQTLVSPIELEAKLLQY

SEQ ID NO: 14807 - protein, 588 aa, Geobacillus stearothermophilus
MRKEAIYHRPADNFAYAYDSETLHLRLRTKKDDIDRVELLHGDPYDWQNGAWQFQMMPMRKTGSDELFDYWFAEVKPPYRRLRYGFVLYSGEEKLVYTEKGFYFEVPTDDTAYYFCFPFLHRVDLFEAPDWVKDTVWYQIFPERFANGNPSISPEGSRPWGSEDPTPTSFFGGDLQGIIDHLDYLVDLGITGIYLTPIFRSPSNHKYDTADYFEVDPHFGDKETLKTLIDRCHEKGIRVMLDAVFNHCGYEFAPFQDVWKNGESSKYKDWFHIHEFPLQTEPRPNYDTFRFVPQMPKLNTANPEVKRYLLDVATYWIREFDIDGWRLDVANEIDHEFWREFRQEVKALKPDVYILGEIWHDAMPWLRGDQFDAVMNYPFTDGVLRFFAKEEISARQFANQMMHVLHSYPNNVNEAAFNLLGSHDTSRILTVCGGDIRKVKLLFLFQLTFTGSPCIYYGDEIGMTGGNDPECRKCMVWDPMQQNKELHQHVKQLIALRKQYRSLRRGEISFLHADDEMNYLIYKKTDGDETVLVIINRSDQKADIPIPLDARGTWLVNLLTGERFAAEAETLCTSLPPYGFVLYAIEHW

SEQ ID NO: 14808 - protein, 367 aa, Liquidambar styraciflua
MGSTSETKMSPSEAAAAEEEAFVFAMQLTSASVLPMVLKSAIELDVLEIMAKAGPGAHISTSDIASKLPTKNPDAAVMLDRMLRLLASYSVLTCSLRTLPDGKIERLYGLAPVCKFLTRNDDGVSIAALSLMNQDKVLMESWYHLTEAVLEGGIPFNKAYGMTAFEYHGTDPRFNTVFNNGMSNHSTITMKKILETYKGFEGLGSVVDVGGGTGAHLNMIIAKYPMIKGINFDLPHVIEEAPSYPGVEHVGGDMFVSVPKGDAIFMKWICHDWSDEHCLKFLKKCYEALPTNGKVILAECILPVAPDASLPTKAVVHIDVIMLAHNPGGKERTEKEFEALAKGAGFEGFRVALCAYNTWIIEFLKKI

SEQ ID NO: 14809 - protein, 598 aa, Ehrlichia canis str. Jake
MSSSAYDIIDHEYDVVVVGAGGAGLRATFGMTNVGLSVACISKVFPTRSHTVAAQGGISAALGNVSEDDWRWHMFDTVKGSDWLGDQDAIEYMCKNAPEAVIELERYGVPFSRTSEGKIYQRPFGGMTTEFGKGKPAVRTCAASDKTGHAILHTLYQQSLKYNAKFFVEYFAIDLIMDEEGQCKGVLAWSLCDGTLHRFRAHVVVLATGGYGRIYFSATSAHTCTGDGGGMVSRINLPLEDMEFVQFHPTGIYGAGCLITEGCRGEGGYLINSEGERFMERYAPKAKDLASRDVVSRAMTLEIREGRGVGPKKDHVYLSVSHLGAKVISERLPGISETARTFAGVDVTKDPIPVLPTVHYNMGGIPTNYYGEVVTLSNGQQKVVPGLFAIGEAACVSVHGANRLGSNSLLDLVVFGRAAAIRAKELIKPGMLHVPVKKSSEDWIIDRFDALRFSKGSLRVSEIRNNMQNVMQNHAAVFRTAEVLEEGKKNIKNVAESVSEIAVEDRSMIWNSDLVEALELTNMMPQAVVTMECAANRQESRGAHAREDFPERDDENWMKHSLAWYNPVDCSVNIKYKDVAKTTLTDDVQYFPPQKRVY

SEQ ID NO: 14810 - protein, 87 aa, Gordonia sputi
HNMQWDFWTLRPETAHQVTWLMGDRGIPKSWRHMDGFGSHTYQWVNADGERFWVKYHFKTDQGIEFLTQAEADTLAGSDPDYHRKDL

SEQ ID NO: 14811 - protein, 372 aa, Vibrio cholerae O1 biovar eltor str. N16961
MTIRSFIPPHRILMGPGPSAISPQVLQALSRPTVGHLDPLFIGMMDELKQLLKYAFQTENEFTIAVSAPGSAGMEACFVNLVEPGDKVIVCRNGVFGERMRDNAVRCGAEVVVVDDEWGCPVSVEKVQATIDEHPDAKILAFVQAETSTGALSDAQALGALAKQHGLLTIVDAVTSLGGVPLLVDEWQLDAVYSGSQKCLSCVPGLAPLTFSPRAIEKIQSRKTPIQSWFLDQSLVLGYWSGAGKRSYHHTAPVNSLYALHEALLLLQQEGLEHAWQRHRLMHEKLKQGLEQLGFQFVVAEPYRLPQLNAIYVPEGIEEAKVRSHLLNEYNLEIGAGLGALAGKAWRIGVMGYGARSENIALCLRALEESLR

SEQ ID NO: 14812 - protein, 165 aa, Polaromonas sp. JS666
MSTVASVKDFVSSFMLTELFKGMALTGKYMFSRKITVQFPEEKTPLSPRFRGLHALRRYDNGEERCIACKLCEAVCPALAITIESEVRDDGSRRTSRYDIDLTKCIFCGFCEEACPVDAIVETHIFEYHGEKRGDLYFTKEMLLAVGDRYEAEIAANKAADAKYR

SEQ ID NO: 14813 - protein, 478 aa, Zea mays
MATAAADGPPVEPQSLKKLSLWSLKRSLDLFAPAHALLFTPDAESKRIRTGCKVSAEYGAVKDLTPEQGRGGQGKGPAPPSSTALALPGTQDTKDAHGEGSRNAIVPAPLMLPKAPESTIPGKNTTLSIPGSSDRFSTSALMERIPSRWPRPTWHAPWKNYRVISGHLGWVRSIAFDPANEWFCTGSADRTIKIWDLASGTLKLTLTGHIEQIRGLAVSQRHTYLFSAGDDKQVKCWDLEQNKVIRSYHGHLSGVYCLALHPTIDILLTGGRDSVCRVWDIRTKAHVSALTGHDNTVCSVFARPTDPQVVTGSHDTTIKFWDLVAGRTMCTLTHHKKSVRAMALHPKEKAFASASADNVKKFNLPKGEFLHNMLSQQKTIINSMAVNEDGVLATGGDNGSLWFWDWKSGHNFQQDQTIVQPGSLESEACIYALSYDVSGSRLVSCEADKTIKMWKEDLTATPETHPINFKPPKDIRRY

SEQ ID NO: 14814 - protein, 269 aa, Buchnera aphidicola str. APS (Acyrthosiphon pisum)
MNRYQETFKRLSCLKEGCFIPFVVLGDPSLETSIKIIETLIKSGADALEIGIPFSDPLADGPTVQKSNLRALSKNNTFFEYFKILKQLRKKNKKLPIGILIYANLVYNQGIDNFYFQCFNSGLDSVLIADVPIEESKIFYNIANKYKINPIFICPPDADADFLYKISLYAQGFIYVLSRPGVTGIKNNTIALPRDFINKIKKYNSVPLLQGFGISNPKQIKEAISSGLSGVICGSAIINIIEKYLNQEKKMIKEIKKFTHLLKLSTKLE

SEQ ID NO: 14815 - protein, 122 aa, Brassica napus
  misc_feature (87)..(87): Xaa can be any naturally occurring amino acid
  unsure (1)..(122): unsure at all Xaa locations
EQAWKLCDPEAEKVFKAIKEAGVKVAIVSNFDTRLRPLLRALRCEDWFDAVAVSAEVEAEKPNPTIFLKACELLGVNPEDAVHVGDXRRNDLWGAKDAGCDAWLWGSEVTSFKQVAQRIGVK

SEQ ID NO: 14816 - protein, 355 aa, Glomerella cingulata
MSRANPPNASGSRKISFNVSEQYDIQDVVGEGAYGVVCSAIHKPSGQKVAIKKITPFDHSMFCLRTLREMKLLRYFNHENIISILDIQKPRSYETFNEVYLIQELMETDMHRVIRTQDLSDDHCQYFIYQTLRALKAMHSANVLHRDLKPSNLLLNANCDLKVCDFGLARSAASQEDNSGFMTEYVATRWYRAPEIMLTFKEYTKAIDVWSVGCILAEMLSGKPLFPGKDYHHQLTLILDVLGTPTMEDYYGIKSRRAREYIRSLPFKKKVPFRTLFPKTSDLALDLLEKLLAFNPVKRITVEDALKHPYLEPYHDPDDEPTAPPIPEEFFDFDKHKDNLSKEQLKQLIYQEIMR

SEQ ID NO: 14817 - protein, 327 aa, Ralstonia eutropha JMP134
MPMTKAIRIEQTGGPEVMQWVDVEVGEPGPGEVRVRHEAVGLNFIDVYFRTGLYKQPLPGGLGMEGAGVVEAVGEGVAHLSVGDRVAYAGRPNGAYSQVRVMPADIVVRLPESISFEQGAAMMLQGLTVQYLIRDSYRVQAGDTVLLHAAAGGVGLIACQWLKALGVTVIGTVGSDEKAELARAHGCTHTVVYTRESFVDRVKEITGGKGVPAVYDSIGADTFRGSLDCLAPRGTMVSFGSASGPVPPFDISVLGNKGSLRLTRPTLMTYVVHRELLEPMVADLFDVVSSGKVKIDVRQRYALADVAQAHRDLESRKTTGSTILLPR

SEQ ID NO: 14818 - protein, 362 aa, Oryza sativa
MALDTLCSAGGDVLIYDTFNASAAAAAAVVPPASFLFGNNNAGGAAGTETRVQVAAGAVPEVDQLLKQAQQPGRRKRRRRARSCKSREDAESQRMTHIAVERNRRRQMNEYLAVLRSLMPESYVHRGDQASIVGGAIDFVKELEQLLQSLEAQKRTLLMQPPPPPQQQREPKCDAADSTSAADQETPAAAAAAAAADGPPFARFFTYPQYVWCHNPAQDGGGGGGAAAENRAGVADIEVSLVETHASIRVMAARRPGQLLKMVAGLQALRLTVLHLNVTALGSLALYSISVKRFHGGKAIASLGPLGVFFLCALYLWYSTTVVEEGCGMATVDDIAAAVHHVLCIIDAEAASQMLLAGEASG

SEQ ID NO: 14819 - protein, 344 aa, Zea mays
MSKSGALDLASGLGGKINKVEVKSAVDEYEKYHGYYGGKEEARKSNYTDMVNKYYDLATSFYEYGWGESFHFAHRWNGESLRESIKRHEHFLALQLGLKPGMKVLDVGCGIGGPLREIARFSSTSVTGLNNNEYQITRGKELNRLAGISGTCDFVKADFMKMPFDDNTFDAVYAIEATCHAPDPVGCYKEIYRVLKPGQCFAVYEWCITDHYDPNNATHKRIKDEIELGNGLPDIRSTRQCLQAVKDAGFEVVWDKDLAEDSPLPWYLPLDPSRFSLSGFRLTSVGRMITRTMVKALEYVGLAPQGSERVSNFLEKAAEGLVEGGKKEIFTPMYFFLVRKPLLE

SEQ ID NO: 14820 - protein, 400 aa, Cytophaga hutchinsonii
MKTTSTTTNLFANRVNSVPQSFIREILKVASNPAITSFAGGLPNPAFFPVKELELSAARVFQQEGMQALQYTSTEGYYPLREFISHRYRQRYNLDIPPEQILITNGSQQALDLIGKIFINPGDHVLMERPTYLGALQCLSMFQPNFQEVLLNADGIDIDDLEDQLWSNPIKLFYSIPNFQNPTGIRYSKAIREQAMQVLGRYNTIVIEDDPYGDIFFNGEELPPLYSFMPEKTILLGSFSKTIAPGLRLGWMVASEEIIRKATIMKQASDLHSGNLTQHILYRFLTAYSVDAHIKTIQDVYRFQRDTMMSCLKQYFPSSIKYTHPQGGMFAWVTLPEEITARELLAKAIEQDIIFVPGDAFYASNPDTQTLRLNYSNVEEAAMRKAMNTLGGMVASLVEV

SEQ ID NO: 14821 - protein, 673 aa, Cryptococcus neoformans var. neoformans JEC21
MLSRFLYSQFPTFVVVFKNRNYHTVARMSVNKVQDWDFEKFPIDLKKYKPFPLDPTKDKKLSQEQKDGLIANISLLRDVIVFFTATGAARGLAGHTGGAFDTIPEVVILLSFLLADQDKSKYVDILFDEAGHRVATQYLLSALDGHIPVEHLLHYREANSKLPGHPELGLTPGVKFSSGRLGHMWPLVNGVALAEKNKAVFILGSDGSQQEGDDAEAARLAVAQGLNVKLFVDDNDVTIAGHPSEYLKGYSVARTLEGHGLKVVEANGEDLDSLYSAIVEVMNHKGPAAVVTHRPMAPKIKGIEGSPHAHDAIKVEPAIEYLDARHPKCAAILRAIQPSNYAELLSGSTKERGACRVQFGEAVSAVLDKTSKEQNKAKVLVIDSDLEGSTGLSVIHKKHPEVFLSSGIMERGNFSAAAGWGAFNADRQGVFSTFSAFSEMIISELTMARLNFANVLTHFSHSGVDEMADNTCHFGINQFFLDNGLEDGYETRLYFAADCSQMDAIVDRVFYDKGLRFVFSTRSKVPWILKEDGSRFFDSDYKFVPGKDEVIRKGTKGYVVAYGEILYRALDAVDRLRKEGLDVGLINKSTLNVVDEDMIKEIGSTEFVFVAESLNRKTGLGSKFGTWLLERDLRPRYNYIGTSKEGCGGLGEQIGHQNLGSSDIALKVKQMIK

SEQ ID NO: 14822 - protein, 197 aa, Zea mays
  misc_feature (64)..(64): Xaa can be any naturally occurring amino acid
  misc_feature (120)..(120): Xaa can be any naturally occurring amino acid
  unsure (1)..(197): unsure at all Xaa locations
GPRGSADTGRDVLCFVLKFYTEEGNYDLVGNNMPVFFIQDAIKLPDFVHAVKPEAPNEMPTGAXAHDTFWDFVSLVPETTHTELWLMSDRALPASYRAMDSLGVHTYRFVNAAGAEHFVXFHWRPESGAYSLLWDEAQCIARHDPDFDQLDLWMAIERGGYQELEHGEQLIDPSDASKFDFDMLDPSKLVPPELVPV

SEQ ID NO: 14823 - protein, 634 aa, Pirellula sp. 1
MCGFTGGLWQRDDQAINADLLSRMTNEIAHRGPDDSQIWMDPEHRDATGRPMGVGLGFRRLSIIDVEGARQPLSNEDGRVRMVFNGEIYNYEVLRKRLQGAGHQFATQGDGESIVHLYEDIGTDCFSSLNGMFAIAIWDARRNRIVLARDRIGQKPLYYSYKNGRLVFASELKALRLVPGVCEEVDPNAIDEFLTYQYIPHPGTIFKGVHKLPPGHFAVLDERGLRVERYWNFDPSIERPLGREEAIEKVRDLLADSVRLRMRSDVPLGSFLSGGIDSSLITALAGDHTDTPLRTFSIGFPVADFDETRYAAQVAEHLQTDHTRFEVQPSGIDILEKLVWHYDEPYGDSSAVPTWYLSKLTRESVKVALSGDGGDELFAGYERYRALWMSQKIARLFPLNKFPGIGLIQRLPDSNRRRSVVRRAKRFLEAIDQPVVRRYMNWLQIFPESMRASMYNDEFVQALPGHDPVDFLESVWARSEGRDVVTRASTSDIQSYLPCDLCTKVDIASMAHGLEVRQPMLDYRFVELAASMPVEHKFRGRRGKLILQDAFGDRIPSSIFTRPKMGFGIPIGQWFREDFKPLVHDTMLASDARINAYFRPEAIADLVRSHETGEQNHGYRLWNLLVLETWLRQL

SEQ ID NO: 14824 - protein, 942 aa, Saccharophagus degradans 2-40
MKSQSVQTELFRLITVPVFAACFILASTFFYLQKSHIEDQFSNNKHLATELLNSVVFSNKASTNPFAEAANALLATGDYRSIVVSSATGQQIASYGLPLRTHSYQTQLGVESQWTHEDSLIYSFPLKKSNLQSSTPLWVIIAIDKRSWAISEYQGTITILLAGSLCLFLTFYFARRFRDALATPLQKIETGLRDFLKGNFEKSITIEPSSVFKDLASNINRLGALQKSANDELQLNIDQSTHELRETLETVEIQNIELDIARKSALQASRVKSEFLANTSHEIRTPLNGILGFSELLRKTELNNQQVDYLTTIEESAKGLLTIINDILDFSRLEIGTLTLEYKPVKIRQLIEDTLKLQTPAANEKNIRMLTIIDHDVPENLLGDPLRLKQVLSNLVSNAIKFTDVGYILLGVSKDQSSENQFTLKFRVTDSGIGLSQDQQERLFDPFTQLDSSESRLHGGTGLGLAIAKGLVDRMNGTIGVESTLGKGATFWFTSTLGRSPSASAKQTYLAGTLRGVHALVFDHSNMGRMEITHYLTGWGAKVCETGEMEDIEPQISFFSNSEPVDIAIIDSMIDIKTFDRLRICEHVTQLNHRFNIPVIILAPSSIQRILEPHLAGTNSLFINRPLFCNKLHQTICEQLEIVATENIESRTYLHQHEPLEQQQVNILAVDDNPANLKLVTELLKGLNINVTPVESGEQAIAQIKDSHFDLILMDIQMPSMDGIETTGHIRELETSGPRTPIIALTAHAVSEQKSRLLLAGMDDCLSKPVSESELRHVIERWTNVTIATKIAPTNPAPVASALIEHSPNADKTGENQPATDSQAAAIVDRALGLSLTNQNPSLAGDMLSMLIETLPDVLHKSRTQYENKQFDELQETVHKLHGGCCYCGVPRLKAISEQIDKNLQKNKYNNLANEIQLLEAEIKNLLQWAEEHDIDVLFSDD

SEQ ID NO: 14825 - protein, 348 aa, Listeria monocytogenes str. 1/2a F6854
MKALKLYGKRDLRYEEADMPTIEEPDDVILKVKTVGICGSDISRYSKLGPYVPGMVWGHEFSGEVIEVGSEVTDIEIGDRAAGCPALYCGECEYCKKGEFARCRKLTVIGARHPGAYAEYIKLPAENVVKIPDELDYEAAALVEPSAVVVHGFYHTKLQAGDDVVVVGSGNIGLLAIQWAKVFGARRVIAIDVDDKKLALAKEVGADVVINSLKEDPLEVVAAHTDGLNADLVVEAAGSPITSAQVFAYAKKGGGVVFLGIPYADVTIERFYFEKIVRSELTVWGSWNAISAPFPGKEWQTTIHFLANKQINIEPMITHRLSLAEGPEVFERIYERNEFFGKVLFFPE

SEQ ID NO: 14826 - protein, 298 aa, Bifidobacterium longum DJO10A
MTTPIVLSLGELLWDMLPSGKRAGGAPVNFAYHAMKNGTEGWAISAVGEDELGDELIAKANEAGINTVIQRNAWPTSTVEVALKNGIPEYTIVKGVAWDHILYTRQLIDVVSKADAVCFGTLALRSPESHATITELLKHTKPGAMKFFDINLRGDHYSKELIEELLKAATVFKINDEELLLLRDMFDIRGTSGEDASRWFIEEFGLDYVILTAGSAYSTIISRKGEVSTLDTPHVEVNDTVGAGDSFSGTFTARILLGDTLAEAHRKAVNTAAYVCTQAGAWPQYPAEMPDYLAEIGK

SEQ ID NO: 14827 - protein, 474 aa, Haemophilus somnus 2336
MNKEIKTQVVVLGAGPAGYSAAFRCADLGLETVIVERFSTLGGVCLNVGCIPSKALLHVAKVIEEARSLSAHGIVFGEPTTDIDKIRGWKEKVINQLTSGLAGMAKQRKVQVVNGYGKFSGPNAIIVAGDEGETKITFDNAIIAAGSRPIQLPFIPHEDPRIWDSTDALKLKEVPENLLIMGGGIIGLEMGTVYHALGSKIDVVEMFDQVIPAADKDMVQIYTKRIEKKFNLLLETKVTAVEAKEDGIYVSMEGKAASETRRYDAVLVAIGRVPNGKLIDAGIAGVEVDDRGFIRTDKQMRTNVPHIFAIGDVVGQPMLAHKGVHEGHVAAEVIAGQKHYFDPKVIPSIAYTEPEVAWVGKTEKECKAEGINYEVAKFPWAASGRAIASDCADGMTKLIFDKDTHRVIGGAIVGTNGGELLGEIGLAIEMGCDAEDLALTIHAHPTLHESVGLAAEVFEGSITDLPNPKAKKKK

SEQ ID NO: 14828 - protein, 636 aa, Bordetella parapertussis 12822
MCGIFGALWHQGKSVSAIEQQLQVGIARQQHRGPDGHGTWIDPQGRLGLAHVRLSIIDLVSGAQPMRGNSGNVITYNGEIYNYIELRRELGEDSFETTSDTEVILRAYEKWGERCVDRLEGMFAFAIWDAKRGEMFVARDRFGIKPFYYACVQGGFYFGSEVKALTPFLNRVETDANALHDYFAFQFCLGEKTLFAGVRQLKPAHCGYVGRDLELKQRQYWEVQYDLDWDHTEKYFVEQVREKLQHSVDMHMRSDVEVGAYISGGVDSSLVAAMARHGRRSSRFQGFTGKFALGDAFDESRYAQALADEHDILLHQVDITEDDFVNDIAKVIYHLDQPVAGPGSFPQYAVSRLAKDHVKVVLGGQGSDEMFGGYARYLIAYWEQCIKGALDGTMHDGNYIVTYESIIPNLRTLRNYKPLIQEFMAEGIFDSRDKRYYRLINRSNTFGNVVNWGMFEGIASSFDDFKQIFWGKNVGKESYFDSITHFDFKTLLPALLQVEDRMSMAHGIESRVPFLDHKLIELVATVPANVKFQNGELKRLLRVAFQDMLPQAIRERKDKMGFPVPLQVWMRKGGKAREFILDTFRSQNARSRAYLAPGFDIEKMMEQEGLFSRNIWAFLSLELWQQQFHDVHRQTI

SEQ ID NO: 14829 - protein, 192 aa, Shigella boydii
ERPGKINLGIGVYKDETGKTPVLTSVKKAEQYLLENETTKNYLGIDGIPEFGRCTQELLFGKGSALINDKRARMAQTPGGTGALRVAADFLAKNTSVKRVWVSNPSWPNHKSVFNSAGLEVREYAYYDAENHTLDFDALINSLNEAQAGDVVLFHGCCHNPTGIDPTLEQWQTLAQLSVEKGWLPLFDFAYQ

SEQ ID NO: 14830 - protein, 300 aa, Ashbya gossypii ATCC 10895
MTENRKTVKLFLLRHGESELNHAKIFCGWIDAHLTDKGKDQARSSASLIASFCREHGIEPPLVGYTSRLLRTIETMQVIMKELRRAAVFQTVVDTADALAVVDKVTAAGQTPVLQVWTLNERHYGSWQGQRKSSVLEQFGKSDYMLIRRDYNGRPPAVDLGREMIQEDNEQGPLTGYDFKEPNRRLKYGPELEKAIELPRNESLADVIKRLAPFLNEVVLKLLHELGESAIIVAHGSTVRSVLKILANISEEDIKDIDIPTGNPLVIELNASDMSFVRHFYLDPESARKEAENVRNEGCN

SEQ ID NO: 14831 - protein, 371 aa, Bacillus cereus ATCC 10987
MKTLELQERLTEIFQHLHENPEVSWKEYETTAYITNFLKEEGISYKIFDDCPGVIAEIGSGNPVIAIRADMDALWQEVNGEFKANHSCGHDAHMTIVMGLILQLKNMRWKSGTVRFIFQPAEEKGNGALKMVEKGAVDDADFLFGVHLRPIEELSLKQAAPSIRHGAAGFLEGTIHGEDAHGARPHQGINAIDVISMINIGLKNIWLPPQSSYSVKMTRCQAGGDNLNIIPGNGHFSLDVRAESNTLLEELKKKIEHVIEAAASMGSKTSYEWIDLAPGAEVSEEAERFMRKGILEVYGEDKCTGPLYTTGSDDFHYYTVKKPHLKAVMLGLGADLQPGLHHPYMKFDHSCIMDGVEILKQTVLKVLEDRG

SEQ ID NO: 14832 - protein, 195 aa, Shigella dysenteriae
RADERPGKINLGIGVYKDETGKTPVLTSVKKAEQYLLENETTKNYLGIDGIPEFGRCTQELLFGKGSALINDKRARTAQTPGGTGALRVAADFLAKNTSVKRVWVSNPSWPNHKSVFNSAGLEVREYAYYDAENHTLDFDALINSLNEAQAGDVVLFHGCCHNPTGIDPTLEQWQTLAQLSVEKGWLPLFDFAYQ

SEQ ID NO: 14833 - protein, 386 aa, Synechococcus elongatus PCC 7942
MTAVSEFRPGLEGVPATLSSISFVDGQRGVLEYRGISIEQLAQQSSFLETAYLLIWGHLPTQQELTEFEHEIRYHRRIKFRIRDMMKCFPDSGHPMDALQASAAALGLFYSRRALDDPEYIRAAVVRLLAKIPTMVAAFQLIRKGNDPIQPRDELDYAANFLYMLTEREPDPVAARIFDICLTLHAEHTINASTFSAMVTASTLTDPYAVVASAVGTLAGPLHGGANEEVLDMLEAIGSVENVEPYLDHCIATKTRIMGFGHRVYKVKDPRAVILQNLAEQLFDIFGHDPYYEIAVAVEKAAAERLSHKGIYPNVDFYSGLVYRKLGIPSDLFTPVFAIARVAGWLAHWKEQLNENRIFRPTQIYTGSHNLDYTPIADRDLAIESD

SEQ ID NO: 14834 - protein, 762 aa, Ustilago maydis 521
MLRTGVSAALTATTLSIPHTGRTCLHVTRASRLPWGAALSHPRMSCQSRSFGITTRLYASPQDPRSSTSQDAASSSQKKTKHYDSRPFKKQYPPVRPQPKPINFDQPAIPNPHETAAAHAAFRRNSRRFGAAALIAVIIGLAAYKFRDVVHLDGPQAHIKGLQLPHDEMERQVREAQKSQANGANFALLALTRSTTIAKAVALCVWDYRSTLSKTHASTADEAEELRQCHLRSAHRILAALQANGGLYVKLGQHLSAVILLPVEWTSTLRPLQDQNTPTPLPELEAMFRTETGMSFDEAFSEIDPKPIGVASLAQVHRAVDRKTGQMLAIKMMHPDVERFSDVDMKTVTVLVKWVKRLLPEFSFEWLADEMNENMPLEMDFRHEAQNAKRADDDFAEYRTTSVYIPKVKYVFKRVMAMEFIDGRRPDDLRYLAEHNIDRNRVSQELSRVFSQMLYLHGFFHADPHGGNVLIRPAQPGSRSRYNFEVVLLDHGLYFDIDPELRANYARFWLSLLRRASPEVTAERRRYAKLIANIDDDLYPILESAITGRAGLEGSDPNNPRGVKNRHRAGSLLEMDGGSNLTDDEQEHIRKTVMEKEGLFVSILELLRRLPRRMLMVLKLNDLTRSLDASLHTTHGPTRPFLIAARLCALAVYRDDLKQLKERRDSGRASLLTSLSLWKDYVRAWWSYVYFYRGLAMIEIASDIRARWKKIVQFGSNRVGRGGSAEKAKSAAAGLHDQAERDLKEDEDRKRAQLALEKEPRL

SEQ ID NO: 14835 - protein, 194 aa, Shigella dysenteriae
RADERPGKINLGIGVYKDETGKTPVLTSVKKAEQYLLENETTKNYLGIDGIPEFGRCTQELLFGKGSALINDKRARTAQTPGGTGALRVAADFLAKNTSVKRVWVSNPSWPNHKSVFNSAGLEVREYAYYDAENHTLDFDALINSLNEAQAGDVVLFHGCCHNPTGIDPTLEQWQTLAQLSVEKGWLPLFDFAY

SEQ ID NO: 14836 - protein, 520 aa, Trametes versicolor
MSRFHSLLAFVVASLAAVAHAGIGPVADLTITNAAVSPDGFSRQAVVVNGGTPGPLITGNMGDRFQLNVIDNLTDHTMLKSTSIHWHGFFQKGTNWADGPAFINQCPISSGHSFLYDFQVPDQAGTFWYHSHLSTQYCDGLRGPFVVYDPNDPAADLYDVDNDDTVITLADWYHVAAKLGPAFPLGADATLINGKGRSPSTTTADLTVISVTPGKRYRFRLVSLSCDPNHTFSIDGHNMTIIETDSINTAPLVVDSIQIFAAQRYSFVLEANQAVDNYWIRANPSFGNVGFTGGINSAILRYDGAAAIEPTTTQTTSTEPLNEVNLHPLVATAVPGSPAAGGVDLAINMAFNFNGTNFFINGASFTPPTVPVLLQIISGAQNAQDLLPSGSVYSLPSNADIEISFPATAAAPGAPHPFHLHGHAFAVVRSAGSTVYNYDNPIFRDVVSTGTPAAGDNVTIRFRTDNPGPWFLHCHIDFHLEAGFAVVFAEDIPDVASANPVPQAWSDLCPTYDARDPSDQ

SEQ ID NO: 14837 - protein, 614 aa, Ashbya gossypii ATCC 10895
MTKQFTHTADEQRSSVVYSNSIGKGGLFQPRDYIGAKTTTAAEDEVTNLLGDLEQCNGRYVPMQAHGGHDESDLTPFGTPSHRRTLSMQQSLLEQERELLIDNKLYDARHGSDCAISLVASECGSGNGALLSEQEAQNVMSAWEHAIESGKTITTSYKRESTVLTKNALPLVATFILQNSLSLASVFSVSHLGTKELGGITLGSMTANITGFAAIQGLCTCLDTLCSQAYGARNYTLVGLLLQRCCIISLLVFAPVVWLWVCYSEQVLGYLVSDPELCLFAAKYLRIVAAGLPAFILFECGKRYLQCQDIYHASTIVLLFCAPANAFLNYLLVWNSKVGIGYLGAPVSVVLNYWLMVLGLLLYTIFTKSEIQPRKCWTGWIKPHQIFKNYDKMLGLALPGIIMVEAEFLGFEILTIFASHISVNALAAQSIIATIASLAYQIPFSISISTSTRVANFIGASLYRSCIITCKVSLLLSFGVSLTSMLAIFVFRSNLAHILFLNEAEVIMLIETTLPILAVMQIFDSFNASTAGCLRGQGQQKDWWLLSNVFAFYCIGIPMSYFLSFHCDLGVKGLWYGITCALIVMSVCQSYAVFNCSWEELVKAANLRTSEDVF

SEQ ID NO: 14838 - protein, 631 aa, Vibrio sp. Ex25
MDEKERSQRRFSIGNQLMLAVLTLSLIFTVIISAVSLYRVFNEDLAHLHVELKQVESSYLSSFSASLWVEDRELLLTQAEGAMRMPSVDYLRIANEDEVIVELGTALSGDVVERSWPMQYRVGDKTYDLATLTVQADLSSIYEDLWQQFFFLLTTEAIKILLLIIGVLWVAFRLLVNPLQLLSGAVSDFSGGKVPSKVTLPKRWCFDEVSVLAEKYNRSVEKVREHQTELEEERDRAEVANRKKSEFLATMSHEIRTPMNGIIGVASLLGDTKLDPQQKEFVEIIDSSSHSLMTIIDDILDFSKVEAGKVELENVSYDLRRILDDVISLHTVKAKQKNLQLLSDIDPHLPAEVQGDAARLKQVLNNLLSNAIKFTDRGHVKLLVELTRQEHDVAMIRFRVVDSGIGIAKENQQAIFERFQQADGSTTRKYGGTGLGLAIGAQLVNLMGGEIQLTSELGLGSCFEFSIPVVVKARSTYSELPNVLTFPKVEDNETSLQHDNQPWVLIVEDTIVNQKVVRIMLEKLGVRVSVANHGEEALQLCEKQAFDLVFMDCQMPVMDGFITTERIRQMGEWGKHVPIIALSANVIKEDQQHCFDVGMNEFVAKPVTKDRLHQIFEQFLPKALKISAGPK

SEQ ID NO: 14839 - protein, 483 aa, Arabidopsis thaliana
MLGTTVLIPSALVPQMGGRNEEKAKLIQTILFVAGLNTLLQTVFGTRLPAVIGASYTFVPVTISIMLSGRFNDVADPVERFKRIIRATQGALIVASTLQIILGFSGLWRNVVRFLSPLSAAPLVGLVGYGLYELGFPGVAKCIEIGLPGLIILILISQYMPHVIKGGKHVFARFAVIFSVAIVWLYAFFLTLGGAYNGVGTDTQRSCRTDRAGLISAAPWIRVPWPFQWGAPLFDAGEAFAMMMASFVALVESTGAFIAVSRYASATMPPPSVISRGVGWQGVAILISGLFGTGIGSSVSVENAGLLALTKIGSRRVVQISAGFMIFFSILGKFGAVFASIPSPIIAALYCLFFAYVGAGGLSLLQFCNLNSFRTLFILGFSIFLGLSIPQYFNEHTAIKGYGPVHTGARWFNDMVNVPFSSKAFVGGCVAYLLDTTLHKKDGSIRKDRGKHWWDRFWTFKNDPRTEEFYALPFNLNKYFPSV

SEQ ID NO: 14840 - protein, 327 aa, Acidithiobacillus ferrooxidans
MDATDQKRLLREMLFARRFEERCAEAYHERQIGGFLHLYPGEEACAIGVLEKARTGSDYVVTGYRDHIHALKSGMDPKALMAELFGKETGCSKGRGGSMHLFDPDVHFMGGYALVGGPFPLAAGFAKAIQLRGSDEISICFLGDGANNQGTFHETMNMASLWNLPVLFVCENNLYGIGTAIERSTVEINQYKRVAPYRIEAAQCDGQDIDVVMDHAEKAVQYVREKRKPYFLELMTYRLRGHSMSDSGAYRSKEEVEEWAQRDPIGIYKHRLLEAGVVSEDEFHAMDKAILDEIENEIVRFAAESPEPRLEDIARYVYTEKEAGSHG

SEQ ID NO: 14841 - protein, 288 aa, Zea mays
MERPAPVRKSHTSTADLLIWPEGAPQESPAGATPPSNRRPHQPSEALRKVVFGGQVTEEEAESLNKRKPCSAPKWKEMTGSGIFAAGGEAEEDESANASATPIRTAPKNYQAISTISHISFSEEESISPKKPTSIAEVAKQRELSGTLLSEDDSKMKKQISDLKSKELSGHDIFAPPEDPRPRNSENGSTSQTPGKNAHVSNFKFGEADEDGMVKTAKKIPTKKFTDLAGNIFKGDETPPGTAEKHLSTAKLKEMTGSDIFADGKAPSRDYLGGIRKPPGGESSIALV

SEQ ID NO: 14842 - protein, 139 aa, Desulfovibrio desulfuricans G20
MPTILIVEDDPITRGILRDIVTSYGHKVLDVADGRTAWERLQNDPDIDLMITDVRMPGLDGMELVGMLRSNDRLQGLPVIITSGVVGLRQIARLLRRGASSFIAKPIDPKELQHCIQNTLAAGTGVPHSSRPDDVSARS

SEQ ID NO: 14843 - protein, 344 aa, Glycine max
MASSSPSHSYLTHLPLHPSHQGDSEKRVEDDESRVPIHIVTAASQLPVEFLEPSPQSKLVIGFDCEGVDLCRKGTLCVMQLAFPDAVYLVDAIEGGEELIIACKPALESNYITKVIHDCKRDSEALYFQFGIKLNNVVDTQIAYSLIEEQEGRKRLRDDYISFVGLLADPRYCGKSYDEKEEVRVLLRQDPKFWRHRPLSEQMVRAAADDVRFLLYIYHQMMEKLNERSLWYLAVRGVLYCRCFCLNSNNFADWPSLPPIPVDNLNADGSDPKEEILSVLDIPQGKMGLVIGKRGATILSIKQSCNAEILTGGPKGPPDKVFIIGPVKEVRKAEAMIRGRILDI

SEQ ID NO: 14844 - protein, 347 aa, Magnetospirillum magnetotacticum MS-1
MPGTKIRPSALGLLGLQHVLVMYAGAVAVPLIVGRALKLSPEEVAILVSADLFACGIATLIQSWGLPGIGIRMPVMMGVTFASVTPMIAIGTNPALGLTTIYGSVIVAGLFGLLAAPLVGRLLPLFPPVVTGTIILVIGISLMRVGVNWAAGGVGSPHYGAPLNLGISAFVLLTILALTRFTTGFVSSASVLIGIVLGMLVAAMAGLVDPAKVVAAPWLDVVKPFHFGWPTFDPVSAATLCIVMIVVMIESTGMFLALSAITGDPVGEERLTRGLRADGLGTLLGGVFNTFPYTSFSQNVGLVGVTGVRSRLVTVVGGVIMLGLGLIPKLAALVERSRPACSAAPGS

SEQ ID NO: 14845 - protein, 398 aa, Treponema pallidum subsp. pallidum str. Nichols
MRNKVRVLAVVAALAAACAVGFFLGRWFDFSARSSVLEAADSLSVSSSEAASFSTVVAEGDPYTVDERQNIAVYRSANEAVVNITTEMVGVNWFLEPVPLEGGSGSGAIIDARGYVLTNTHVIEGASKIYLSLHDGSQYKATVVGVDRENDLAVLKFVSPPGARLTVIRFGSSRNLDVGQKVLAIGNPFGLARTLTVGVVSALARPIQNKGSIIRNMIQTDAAINPGNSGGPLLDTQGRMIGINTVIYSTSGSSSGVGFAVPVDTAKRIVSELIRYGRVRRGKIDAELVQVNASIAHYAQLTVGKGLLVSQVKRGSPAAQAGLRGGTTAVRYGLGRRAAVIYLGGDVITAIDNQPVANLSDYYSVLEDKKPDDEVRVTVLRGRRQHVVAVRLTERSDE

SEQ ID NO: 14846 - protein, 417 aa, Candida albicans
MMNIDQHHQLQQQHQQQMLQQQAQAQAQAQAQAQQQQQAAAAAAAANAAATTSSSSPRQVSFNVSDHYQILEIVGEGAYGIVCSAIHKPSQQKVAIKKIEPFERSMLCLRTLRELKLLKHFNHENIISILAIQRPINYESFNEIYLIQELMETDLHRVIRTQNLSDDHIQYFIYQTLRALKAMHSANVLHRDLKPSNLLLNSNCDLKICDFGLARSIASQEDNYGFMTEYVATRWYRAPEIMLTFQEYTTAIDVWSVGCILAEMLSGRPLFPGRDYHNQLWLIMEVLGTPNMEDYYNIKSKRAREYIRSLPFCKKIPFSELFANTNNNTSTSNTGGRTNINPLALDLLEKLLIFNPAKRITVEDALKHPYLQLYHDPNDEPISDKIPEDFFDFDKMKDQLTIEDLKKLLYEEIMKPL

SEQ ID NO: 14847 - protein, 452 aa, Azoarcus sp. EbN1
MRKIDVHELIDKAKFNRFHWQVLFWCALIIIFDGYDLVIYGVVLPVLMKEWDLTPLQAGTLGSYALFGMMFGALIFGPLSDRFGRKRVIAICVMLFSFFTFINGFATTPTEFAICRFIAGLGIGGVMPNVVALMTEYSPKKLRTTLVAIMFSGYSVGGMLSAGLGMYLIPNFGWPSVFFVAGVPLLLLPVILYALPESIGFLLHAKRDAEAGVLLGRVEPNFAARTGDRYEMPTGKTSHVSLVALFKDGRALSTLMFWLAFFMCLLMVYALASWLPKLMTQAGYGLGSSLSFLLVLNFGAIFGAIGGGFIADRLHLKTVLMVFFVIAAFSISLLGFKSPTAVLYLLVAAAGATTIGSQILLYAYVAQFYPMAIRSTGIGWASGVGRSGAIVGPILGGTLLGMAMPLEYNFMFFAIPGAIAAFAVSLVARSAAHAPSEELPLPFAAETGAISD

SEQ ID NO: 14848 - protein, 393 aa, Cytophaga hutchinsonii
MKTLHTINFSDTAIAFASKSTKELKHMKFLFRTMAWSKITNISVSFLKFALKYHFPIKNIVRNTLFKQFCGGETYWECGTTMEKLHASGIFSIPDYSVEGKEDEASFNQTVKELVKGIELAAGLPMVSFSVFKMSGIARFALLEKIQRGEQLSADESKEFDRVKERVTRLCFEAETHNVRLMVDAEETWIQTAIDVLYVGYMKRFNAQRPILFLTIQLYRKDGLERLKNMYAQAQKEGYHIGFKLVRGAYMEKERARANELKYPSPINDTKEQTDALYNQAVSFCLHEDIATCIATHNQLSIERAVREMDPKDQQISGFAQLYGMGDFLSYNLAHAGYNVSKYLPYGPLREVMPYLFRRAEENKSITGETTRELFFIEKELKRRKAAGFKLKA

SEQ ID NO: 14849 - protein, 464 aa, Saccharophagus degradans 2-40
MVRISSWLLVFCVLTFTGVANANLPDFSDLIERSSPAVVKINTSANVAQGRLQLPQGQQVPEWFKHFLDPGRQGIRPNQRVQSMGSGFFISADGYVITNHHVIDNADEITVELVDRREYPATVVGVDPRSDLALLKIDEDNLPFLKVAEGSPLKVGEWVVAIGSPFGLKFSASAGIVSAIGRSIRNQSGEDYVPFVQTDVAINPGNSGGPLFNLKGEVVGVNSQIYSQSGGSIGLSFAIPSSVVNNVVKQLKEKGTVSRGWLGVVIQEVDGDLAASFGLDRPRGALVSEVLEDSPAEKGGLQPGDVIVSFDGGEILTSSDLPHLVGATQPESKVDVEVVRKGKTKKLKVEVGALPGADAVATLGGGPGAAKGGVLGVQVTDAPKDLLEQLKLDGGVLVQAVAPNSPASNAGIKAGDVISEVNFIEVKSVKSLQKVAKELPKGKLLPIRFFSDGRPVFRTIKIAE

SEQ ID NO: 14850 - protein, 570 aa, Candida albicans
MSEHKWWKEAVVYQIWPASYKDSNGDGVGDIPGIISTLDYIASLGVTTVWLSPMYDSPQDDMGYDVSDYENVYSKYGTLQDMDRLIAGCHDRGLKLILDLVINHTSVEHKWFKESRSSKDNPKRDWYIWKPPRIDSNGNKHPPNNWGSYFSGSAWKYDELTGEYYLHLFAESQPDLNWENKECREAIYNSAIKFWLDKGVDGFRIDTAGMYSKYQHFKDAPVAFPDTEFQPCEIYHKNGPRIHEFHKEMAKVMEPYDTMTVGEVGHSTREQALKYVSAAEKEMNMMFLFDVVELGSDPRDRFRYNGFDLVDLKKAIKSQGEFAEGTDAWSTVFIENHDQARAISRFGNDSPEFRVLSGKAIAMLQCCLTGTLFIYQGQEIGMTNVPRSWPIEEYKDINTINYYRAFKEKYGKDADYKQKEEKLVDVINRLARDNARTPVQWSHQQYAGFSEVEPWMRVNDNYKEINVEDQDGDDHSLLNFYRKLLKLRGEYKDLFVYGEMKFLDFDDKKLFTFAKEAPGSPVAYIVINFSGEDVKFEPLIKGNYKLVLTNVDKDSKDALSPYEARMYVVD

SEQ ID NO: 14851 - protein, 454 aa, Cytophaga hutchinsonii
MLNKKHIKETLVLAGPVAFSQLGHISVGVVDTLMAGQIDKEALAAATIALSVFFPLFMLYIGFSYGFTPLISQADGEGDELKIARILKHALVLNLVIGFFLTGLLYLCIYAIPFMHQPAHIVQPATEFFAIIALSMIPVIIFQVFKQFIEGLGNTKQAMVVSILGNVVNIVLIVILVYGWYGLPKLGLNGIAYATLIARIFMAVTMVLFFLFTKNYAHYRSAYKRTKLEWHYFVDVFNKSYPVGLQMSFESGAFSLAAIFVGTFGTAQISAHQIALNLASVTYMVATGIAAAATVRVGYEYGRKEKTELQIAGRTAIILVVALMSTTALMFTLLHQVLPSFYTEDIEVIGIAGSLLWMVAFFQLSDGIQVVSMGSLRGMGDVVVPSSVAFMAYWVLGLPLGAFLAFVLKWEVYGIWVGLTVGLVFASIVLLVRFLKKSKRVVFEEDAKSVMLKA

SEQ ID NO: 14852 - protein, 341 aa, Staphylococcus aureus subsp. aureus COL
MNNKVLATGGTGFVGMRIISRLLEQGYDVQTTIRDLSKADKVIKTMQDNGISTERLMFVEADLSQDEHWDEAMKDCKYVLSVASPVFFGKTDDAEVMAKPAIEGIQRILRAAEHAGVKRVVMTANFGAVGFSNKDKNSITNESHWTNEDEPGLSVYEKSKLLAEKAAWDFVENENTTVEFATINPVAIFGPSLDAHVSGSFHLLENLLNGSMKRVPQIPLNVVDVRDVAELHILAMTNEQANGKRFIATADGQINLLEIAKLIKEKRPEIAQKVSTKKLPDFILSLGAKFNHQAKEGKLLLDMNRNVSNERAKTLLGWEPIATQEEAILAAVDSMAKYHLI

SEQ ID NO: 14853 - protein, 143 aa, Bacillus anthracis str. A2012
MSFNNLDTLYRQVIMDHYKNPRNHGVLEDSVTVNLNNPTCGDRIQLTMKVEEGIVQEAKFEGEGCSISMSSASMMTQAVKGKKIEEALQLSKIFSDMMLGKEYDDSIDLGDIEALQGVCKFPARIKCATLAWKALEKGLNEDK

SEQ ID NO: 14854 - protein, 628 aa, Bordetella parapertussis 12822
MCGVLGAWWRHHDEHEDARFAAGLRKLAHRGPDDRGSEHFAAPHGRLSLGHTRLAVIDLSAAGHQPMHADADRLAVVFNGEIYNYRELRSELRQIDAIFRGDSDTEVLLAAWQHWGVAALRRFKGMFAFALYDRRQQTLTLARDAFGIKPMYYHAAPERLLFGSELPAVQALLPHPPRLNWQRAYDYLAYGQYDQPPDTFIAGIRQLPAGHLLTLDLRTGRAGEPMAWDDPASQECRPIGFQEAAEELRARFLDNVRLHLRSDVPIGAALSGGIDSSAIVCAMRWLEPDLPIQTFSFISDDAHRSEERWVDLVNQHCGATGHKIHIAPHELLDDLDDLIRVQGEPVGSTSIYAQYRVFKLAREHGVVVTLDGQGADELLGGYGGYPTERLASLLETSRLGAAARLLRQQGRGAPARLLQAAALAAGGRHLANLRHATGRQHAPAWLDAQVLRDQGVTMREPAHAWAAATPLRGRRLVNELAHALYHRGLGALLRHGDRNSMRFSVESRVPFLTQDLAEFALSLPERYLVSDSGQTKHIFRKAMRGIVPDLILDRDDKIGFATPEQQWMQATAPQMRQWLVDAADIPFLRNAEVTAQFDAMIAGATPFSWQAWRWVNFQRWMQHATVLP

SEQ ID NO: 14855 - protein, 374 aa, Bacillus licheniformis ATCC 14580
MKLDELAAIRRDLHQIPELGFQEYKTQAYLLNHLAKHPEGRIEIEKWRTGLFVKVKGTAPEKILAYRADMDGLSIREDTGYSFSSVHQDRMHACGHDFHMTIALGIIDHFVRHPVKQDLLFLFQPAEEGPGGAEPMLESDLFKKWEPSMITALHIAPELPVGTIGTKSGLLFANTSELVIELEGKGGHAAYPHLAEDMVVAASSLVTQMQSIVARNVDPLDSAVITIGTITGGSAQNIIAQEARLEGTIRTLSPASMEQVKKRIEAMVRGLETAYQCSGKVSYPAAYYQVCNSSDLVEDFMQFVSENGLAEVVRSKEAMTGEDFGYMLKKYPGFMFWLGVDSPYGLHHAKLQPKEEALETAVRVMTAYFSSKAN

SEQ ID NO: 14856 - protein, 958 aa, Bifidobacterium longum DJO10A
MRVEGQLPETLPEGRAIELVFNLGWLEWPVGGHIEAMAYRADGTVIKALHPRNHWMPLVSADGVKDRVVNPDGSFVVYVEGAYNPNVPSFTVTELGTKPTGKADERYEFSSIDIAALDQDMFDYWADLDVVTGSLENMNDADPRYWKLAKAMQRSINLWDEKDYNTLALARKALDKVMHNPANASAMTLTAMGHSHIDSAWLWPVRETERKVGRTVSNALALMDIDPDFTYVMSAAQHFAWLEERHPDLFERVKARIAEGRFIPVGGMWVESDGTMPCGESLIRQISYGKRYFKEKLGVVPNGIWLPDSFGYTGAWPQIAKRSGYSWFLTQKLCWNDTTRLPHHSFMWEGVDGSQIFTHFPPADKYDSDMSAHDMAYVQSNYKDKDLSDRGILLFGYGDGGGGPIREMTMREHRFESFEGMPKVEYGTPDDFFSKAETEMKAEAGSEMPRWKGEFYFELHRKTLTSQQEMKRGCRKEESMLRTVEYLGAVASLESADYVYPTERIDRIWKTLLLSQFHDILPGSAIEWAHRVAREEYARDLKALSDIARDAIAAIAVANPDVARIAKARISQFADVDPWRPASLVSCGEPVEVNRREDGSATLDNGLLCVHVAADGTVDSMIDLKSGREMVAKDHVMGRYEILKDEPGVFDAWDVERDAFLCATALADGHIVSIETTADGSAVIVTKNSYRDDEISTTITLRPGKSQLDFHADVEWNVPEKLLKVDIPMALSASRAQYECQYGLIERPIVKNTEGEEAMFESCSHRFVRIHDSSYGIGVANGSTYGSDVSSLRDRDDALAGTMVRMSLVAAPTAPDPRTDIGHHEFDWTVLPCASVAPLVAAAGEINAPTIENMPDIAAPITLEPIEGTPVIDWIKLADDGSGDIVARLYEAAGAKAKAMLHVGGTLDGWTVRETNTLEQDESYPDEPAGLIGGKQQAEGAELALNPFQLTTLRLSRA

SEQ ID NO: 14857 - protein, 582 aa, Ashbya gossypii ATCC 10895
MSSYAVYLSDAPPRRNGNAGSSLSRKIHRACRTALEEPDLSLNLDIADYINSKQGAAPREATLTIVKLINSQGTHTAIFALALLDVLVKNCGYPVHLQISRKEFLNALVKRFPERPPMAYTKVQCLILTAIEEWYQTLCKYSKYKEDMKYIRDMHSLLKYKGYVFPKIKQEDLAVLRPGDHLKTPSELQKEQEIAQAAKLEELIRRGRPEDLREANKLMKIMAGFKEDNILNVKQTLTEELTKLKRKADLLSEMLATGDSSALDNDTVTELYSALKSSQPKFQKIIEEDNSDDSMVQDILKFNDKVNQLIQQYQLLKKGKADDVIPLHVPAQSTSKNGEGTTLANEINLIDFSDTTNDEPSSNVTGDNFDDLLGELNSLNLSQPQLFGLGAISLGASTPSAPVETAVHHNTVDLLGDFSSSRLSSVTAASATAASAVTASASPSTDFDLLDGFASSYGSDTGAVKNSTTRSVVSESQNLKLEFEISKINASKIRVTSYFSNMSDSRLDDLSFLVAVPKSCALNLLPQSDNTIPAKTADGITQEGHIVIPEGFSKPLKVKWKVTYKMNAVPIEEGAVFTLPKI

SEQ ID NO: 14858 - protein, 441 aa, Xanthomonas campestris pv. vesicatoria str. 85-10
MSLSPQRDARLPVTVLSGFLGAGKTTLLNRILHNRDGLRVAVIVNDMSEVNIDAQLVREGGAALRRTEETLVEFSNGCICCTLRDDLLQEVRRLAEQGRYDYLLIESTGIAEPMPVAATFAVRDADGFSLSDIARLDTMVTVVDGSRFLEDFGSAATLADLGQQAGPDDTRGLVQLLGEQVEFADVLVISKCDRIDAQQLQRLRAVLRALNRDAAIVDAAHGEVPLQQLLDTGRFDFTRAQLAPGWMQELRGQHTPETEEYGISSFVYRARRPFHPQRFARMVHSGLPQVIRSKGFFWLASRMDWVGELSSVGGATQTSAAGFWFAARHRVDAQSVGQPLQTSVTPLPYTDIGWQRQQTRCWTAPLPQPHEVGDANEYAAMQRLWHPLWGDRRQELAVIGVDMDAPRTRAALDACLLSDQELRQGPAQWQLLDDPFPHWAR

SEQ ID NO: 14859 - protein, 154 aa, Oryza sativa (japonica cultivar-group)
MASYYEITSRGALIKGREFNFSNLYLYHIYNSSEPNQQQIIDNVSSTAMGGLTVNNWTVYDGVASDATLVARGQGLHTYAGNWHCSFTLVFEDERFNGSTLEVKGIFEETHDWAIVGGTGEFAMASGVIKKTVYERTPEGTIIELTIRGFCPDF

SEQ ID NO: 14860 - protein, 351 aa, Triticum sp.
MSDVTAVMDLEVEEPQLALPPGFRFHPTDEEVVTHYLTRKVLRESFSCQVITDVDLNKNEPWELPGLAKMGEKEWFFFAHKGRKYPTGTRTNRATKKGYWKATGKDKEIFRGKGRDAVLVGMKKTLVFYTGRAPSGGKTPWVMHEYRLEGELPHRLPRTAKDDWAVCRVFNKDLAARNAPQMAPAADGGMEDPLAFLDDLLIDTDLFDDADLPMLMDSPSGADDFAGASSSTCSAALPLEPDAELPVLHPQQQQSPNYFFMPATANGNLGGAEYSPYQAMGDQQAAIRRYCKPKAEVASSSALLSPSLGLDTAALAGAETSFLMPSSRSYLDLEELFRGEPLMDYSNMWKI

SEQ ID NO: 14861 - protein, 265 aa, Triticum aestivum
MRKRERENPCGICGHYHKYEEGEPCGVCGHRPPALGPAGAAAAPRQESAFPSEILKDFLFLGSYDNASRSELLKTIGISHILNTVPLCQNLYRNSFTYHCLQDDKTLQFDDAIQFLEQCERDKARVLVHCMSGKSRSAAFVVAFLMKSRGWRLAQCFQWVKERRPQVQLADAAQQQLIEYEQKLFSCNVAPTDSFPSLGFGFPKPSGDVQVPIFNQQAPGSIFERVSPNNIPSNFTFGATEAKLPDGSNFGVVNLAGTDSMMDSS

SEQ ID NO: 14862 - protein, 238 aa, Paenibacillus polymyxa
MMKKKSWFTLMITGVISLFFSVSAFAGNVFWEPLSYFNSSTWQKADGYSNGQMFNCTWRANNVNFTNDGKLKLSLTSPANNKFDCGEYRSTNNYGYGLYEVSMKPAKNTGIVSSFFTYTGPSHGTQWDEIDIEFLGKDTTKVQFNYYTNGVGGHEKIINLGFDASTSFHTYAFDWQPGYIKWYVDGVLKHTATTNIPSTPGKIMMNLWNGTGVDSWLGSYNGANPLYAEYDWVKYTSN

SEQ ID NO: 14863 - protein, 272 aa, Zea mays
TRPTSSRSRAAARDLELDHVRRACSVGVVGGGGGAGSPPGSPGHSLSPRMFVPQTPVPPLQRAADVTPVFNQILMNDQEEYDGPPQKEIPSLIVWTLGGKNVYVEGSWDNWKSRKAMQKSGKDHSLLLVLPAGVYRYRFVVDGERRCLPDLPCEIDAMGNAVNLLDVNDFVPESVESVAEFEPPLSPDSSYSFQAPEDKDFAKEPPVLPSQLHLGVLNSQNSEESCARPQHIVLNHLFIEKGWGAHPLVALGLTHRFESKYVTLVLYKPIER

SEQ ID NO: 14864 - protein, 515 aa, Cryptococcus neoformans var. grubii
MFQKVSDKFHRKQQSSTSPGKTQQVPNSPSSVLAKANSQAQQAYSSQDHSPMEGIQSDSTHIQQPMATQKAPIVGPSTSTSLSTVPVQDGTLPLTPGAQGMLAGTTDGHRQVQSPVSRSSSAGEDKMREKARDAQEQAAQAQANLHRVTQQARVAAINAAATQAALETATQLPATARVPTSGTGAEPGQARRKTAGRYALSDFLIERTLGTGSFGRVHLVRSRHNGRFYAVKVLNKEKVIKMKQVEHTNSEREMLVRVRHPFLVNLWGTFQDVNNLYMVMDFVAGGELFSLLRKSQRFPNSVAKFYAAEVALALDYLHSLDIIYRDLKPENLLLGADGHVKVTDFGFAKYVPDITWTLCGTPDYLAPEVVQSKGYNKSVDWYALGVLIFEMLAGYPPFFTEDGNPMKLYEKIIAGKVRYPTYFDVLAKELLKNLLIGDLTKRYGNLRAGSSDIFAHGWFAEVDWDKLYRREIPAPYVPKIDGEGDASQFDRYQEADVSAYGKVGNGPYDHFFVEF

SEQ ID NO: 14865 - protein, 422 aa, Xenorhabdus nematophila
MRPSDIEFDLRHIWHPYTSMIRPFPAYPVVSATGVELVLSDGRKLIDGMSSWWAAIHGYNHPVLNEAAKSQIDKMSHVMFGGITHPPAVELCKQLVALTPDSLECVFLADSGSVAVEVALKMALQYWQARGEKRQRFLTLRHGYHGDTFGAMSVCDPDNSMHSLYNGYLPNHLFADAPTCQFDDEWQPEDIDSFKRLLRQYHAEITAVVLEPIVQGAGGMRIYHPEYLRQVRQLCDEHQILLIADEIATGFGRTGKLFACEHAQIEPDILCLGKALTGGYMTLSATLTTRHVAEIISQGEAGCFMHGPTFMGNPLACAVASASLKLLSESSWQQHIQSIETQLKTELLPLKIHHSVKDVRVLGAIGVVEMKQPVDVASLQRHFVQQGVWIRPFGRLIYLMPPYIIQSEQLSQLTTAIVDAIN

SEQ ID NO: 14866 - protein, 362 aa, Clostridium thermocellum ATCC 27405
MKKIRLAVIGTGMAWERLHYPAIKELEDKYEIVALCNRTRKDAEEFAKKINLSMDRVYDDYNEMLKRQDIDAVDILVPIESNYTVSEAVAKAGKDFICEKPLAANREEAKKYLELSKKYNVRIMIAENYRYSDEYNKIRDIVNSGKIGDVVYFIKNNISCFPCEMTKDTFAATEWRQHPKFYGGAFLDAAVHDIAAMRHIFGAVECVQAFGKPQAEDFNPYVSVNAHILFKNGVIGYYTYYPSGIETQKPAVGFRIFGTKGEIYLEDKTCGIINVSYHDGTSELVNFIPERGFYNELLNYYNAINGTEQISVTPEMEYGDVKMVFDILDSVSFREIIYVDEEEPKRRLEIADDEAKIHPFLQ

SEQ ID NO: 14867 - protein, 583 aa, Zea mays
MAAASTLAFGHPKTLAAAGAKPLPAATSTSVSFPATHQPACLLSSPAPGSLRRRDVAAMVSAPPAVGTAMPSLDFDTSVFNKEKVSLAGHDEYIVRGGRNLFPLLPEAFKGVKQIGVIGWGSQGPAQAQNLRDSLAEAKSDIVVKIGLRKGSKSFEEARAAGFTEESGTLGDIWETVSGSDLVLLLISDAAQADNYEKIFSHMKPNSILGLSHGFLLGHLQSLGLDFPKNISVIAVCPKGMGPSVRRLYVQGKEVNGAGINSSFAVHQDVDGRATDVALAWSVALGSPFTFATTLEQEYKSDIFGERGILLGAVHGIVEALFRRYTEQGMDEESAYKNTVEGITGIISKTISKKGMLEVYNSLSEEGKKEFNKAYSASFYPCMDILYECYEDVASGSEIRSVVLAGRRFYEKEGLPAFPMGNIDQTRMWKVGEKVRSTRPEGDLGPLHAFTAGVYIALMMAQIEILRKKGHSYSEIINESVIESVDSLNPFMHARGVAFMVDNCSTTARLGSRKWAPRFDYILTQQAFVAVDKDAPINQDLISNFLSDPVHGAIEVCAELRPTVDISVPANADFVRPELRQSS

SEQ ID NO: 14868 - protein, 87 aa, Zea mays
MDWMYANCSTTAQRGALDWWKKFHDASKPIFEELYESVANGTETRRSLTKNSAPNYRAELEAELAEIANHEMWRTGKSVRKLRPENQ

SEQ ID NO: 14869 - protein, 421 aa, Azoarcus sp. EbN1
MNTTNSYAASQAAAHAARYDDIWLVAGSRTPFADYNGVLRDVSPTDLGIFAARALFDRSGIPASEIDAIVAGNMAQASFDAYFLPRHIGLYSGVNPNVPALLVQRLCGTGFETIIAAADQITLGKAKVALAVGTESMSRNPIAAYTHRAGFRMGQLDFRDFLWEATKDTAPGASMGDTAENLAKRYGISRGEVDRFAEQSFAHACAAWESGWFAGEVAPVVNAKWELDGYNARSLKLADRAEVCDRDGHVRPTSFDALQKLKPAFGGVQTGGNSSAIVDGAAAVIVAHGDWVRAHGVKPLARIVAGASVAVPPEIMGIGPAPAIRAAAAKAGLTVGDLGRVEINEAFGAQYLACERELGLDRERANVHGGAIAIGHPLGASGVRLTTTVARELQEARLQFGVSSACCGGGQGVAIVVENVG

SEQ ID NO: 14870 - protein, 351 aa, uncultured bacterium 581
MATTTAVNESTQQALENRLLAPKFYRTDYKAMNTLDVSPVRREWDVMMANFEEDKNRAHFKQSIDFDPEALDVDMDLKRDFLDFLVSSITSEYSGCVLYQEIEKNVDNPDVSKLMRYMARDESRHAGFINRALKQLGVAVDLSVLKQTKEYHYFRPKFIYYATYLSEKIGYARYITIYRHLQRNPQNQFHPIFNWFERWCNDEYAHGEAFALLMRSDPKLLRGHNKLWIRFFLLAVYSTMYVRDHSRPKLYQAFGMDPTKFDYQVFDITSEISQQVFPMTLNTDDPRFRRGMERLLFLSEKAEGLRAKGGLINKCLRLGVMAQSGLTFARLYCLPTKPNTLPDQVCMTPAW

SEQ ID NO: 14871 - protein, 231 aa, Glycine max
MINFEETELRLGLPGGSASDHNESTTVKGSGGKRGFPETASVDLKLNLSSSDDSASDSPSSASTEKTTTAAPLPPSRANDPAKPPAKAQVVGWPPVRSFRKNIVQRNKNEEEAAFVKVSMDGAPYLRKVDIKLYKSYQELSDALAKMFSSFTIEKCGSQGMKDFMNETKLIDLLNGSDYVPTYQDKDGDWMLVGDVPWEMFVESCQRLRIMKGSEAIGLAPRAVEKCKNRS

SEQ ID NO: 14872 - protein, 498 aa, Cicer arietinum
MGILSLLCYSLFYLSFFFIIRLLFQSRKFKNLPPGPPSLPIIGNLHHLKRPLHRTFKGLSKTYGDIISLWFGSRLVVVVSSLSEFQQCFTKNDVVLANRPRFLSGKYIFYNYTTLGSTSYSEHWRNLRRITSLDVLSNHRINNFSGVRRDETQRLITKLAEDSSTSFAEVELSFRFYDMTFNNIMRMIPGKRYYGEDCDMSDLQEASQFRDMVTELLQLSGANNKTDFMPLLKFFDFENLEKRVKNIADKTDAFLRGLLQEQRNKKERTNTMIDHLLNLQESQPEYYTDQIIKGLALAMLLAGTDSSAVTLEWSMSNLLNHPEILKKVKDELDIHVGQDRLVDESDLPKLTYLKNVIYETLRLCTPAPLLLPHSTSDDCIIGGYKVPRDTIVLINAWAIHRDPKSWSEATSFKPERFDKKGEIEKVIAFGMGRRVCPGEALALRTISMTLALLVQCFDWKRTSDDKIDMAERDGFVLTKLIPLKAMCKTRPVVNKVFK

SEQ ID NO: 14873 - protein, 474 aa, Legionella pneumophila str. Paris
MANKIKTDVVVLGSGPGGYTAAFRAADLDKKVVLVERFDSLGGVCLNVGCIPSKALLHIAKVVDEAHEMSEQGVAFGKPKFDNKKLVAWKNSVVAKLTGGLKALAKQRKVEVITGTGKFSGTHQILVETKEGTVEIEFDNAIIAVGSESIKLPFIPEDKRIFSSTGALELADIKGDLLVLGGGIIGLEMATVYSSLGVNVTVVEFMDQLIPNADTDLVNILQKRMTKKGIKFLLKTKVTAVEAKKDGIYVSMEGEHATDKPLCFQQVLVAVGRKPNGGAINAEKAGIKVDERGFIPVDNQLRTNVPHIFAIGDVNGQPMLAHKAIPEGKVAAEVIAGKKHYFEPKCIPSVAYTDPELAWAGLTEKEAKEKGINYEKASFPWAASGRALSMGREEGMTKLLFCPETNRILGAGIVGVNAGDLIAETALAIEMCCDVEDIALTIHPHPTLSETIAQSAEAFEGTITDLYLPKKKKK

SEQ ID NO: 14874 - protein, 485 aa, Saccharophagus degradans 2-40
MSLTLTNSKLQRQGSVIDGAWLQSSDEFVVENPATGQVVATVANAGAAEAEAAVLAAERAGVQWREFSAKKRSTLLKAWYELVVSNANDLAVLLTTEQGKPLAEAKAEILYGASYIEWFAEQAKRIEGAVIPAPASNQRIVTVKQPVGVVAAITPWNFPMAMLARKIAPALAAGCTVVAKPAKETPLSALAMAYLAQEAGIPPGVINLVTGQDSSAIGGVFTQHPSVKKLTFTGSTAVGKTLLEQSAATIKKCSMELGGNAPFIVFDDADIDAAVAGCIAAKFRNAGQTCVCVNRIFVHDKVKAAFTKKLVEAVAKLKVGDGIEEGVAIGPLINAAAFKKVSELVIDACNKGAKAIVAEGHTHLNGALFYPPTVVTEATTQMDVFNEEIFGPVAVVYSFSSEEEAIALANNTPFGLAGYFYSRDIGRVWRVASALEVGMVGVNDTAISNEMAPFGGVKESGFGREGSQMGLDDYLETKYMLMGGL

SEQ ID NO: 14875 - protein, 146 aa, Zea mays
MPVPLAPYPAPPAPFTPPNGAQSQLVCTGCRNLLMYPAGATSVCCAVCSTVTALPRESSAGTEMAQLVCGGCHTLLMYIRGATSVQCSCCHTVNLAMEANQVAHVNCGNCRMLLMYQYGARSVKCAVCSFVTSVGTSPGAEQKPSS

SEQ ID NO: 14876 - protein, 464 aa, Yersinia enterocolitica
AMGPVSSVVAAETASSSSQQLPSLAPMLEKVMPSVVSINVEGSAQVSNAGGIPPQFQQFFGDDSPFCQDGSPFQGSPMCQGGPGSKGEAPSKQDFRALGSGVIIDAAKGYVVTNNHVVDNATKINVKLSDGRSYEAKVIGKDPRTDIALLQLKDAKNLTAIKIADSDQLRVGDYTVAIGNPYGLGETVTSGIVSALGRSGLNVENYENFIQTDAAINRGNSGGALINLNGELIGINTAILAPDGGNIGIGFAIPSNMVKNLTSQMVEFGQVKRGELGIMGTELNSELAKPMKVDAQERGPLSSQGTAQNLAAAKSRGIKRGDVIVSMNGKAINSFAGFRAEIGTLPVGSKMTLGLLRDGKPVNVEVTLEQSSQTQVDSGNLYTGIEGAELSNSDVNGKKGVKVNSVKPGTAAARIGLKKGDVIIGVNQQPVKNLGELRKILDTKPSVLALSIQRGDTSLYLLMQ

SEQ ID NO: 14877 - protein, 306 aa, Haemophilus somnus 2336
MDIAVIGSNMVDLISYINDMPKMGETLEAHDFKMGCGGKGANQAIAAAKLGASVMMMTKVGDDVFADNTINNFKQYGVNTDFVEKVVGVSSGVAPIFVDRSSQNRILIIKGANSYLKPADIDHAEVQLKNCKLLILQLEIPLETVYYAIDFANKHQIPVILNPAPASKELDISYACKCDFFMPNETELEILTGMPVDNMEQIQAAANSLFLKGLKNLIVTLGEKGSVWFHRDQVTHVSSHKVNAIDTSGAGDAFIGCFAHFYIQTNDVKQAMQMASAYSAYSVTGQGTQSSYPDKAQFEQFLQSLK

SEQ ID NO: 14878 - protein, 177 aa, Glycine max
LIFSLIKICRYGYVTPDDVPSLLQHHIIKGEILDPLWRGQMGLSVDEQKKKQEQRLLLNDLRNLEDNTQDFVSCCQSSGVGCCQSNGGDSFFRQNHVLLERRMDPDVIESEAKLSADSKSSETVISRINSGKGASRKFLSMTTWLDGWEQEDTYAALAVVCAAVSVAIAYNCYKQLR

SEQ ID NO: 14879 - protein, 556 aa, Oryza sativa (japonica cultivar-group)
MGMLALRRLMAAQRDRRRRRKAQARNGAITSMAKRKGTFLRGGDSSQGAKRLRYSGPYLTEDIWRHIHSLMPLRDAARAACVSQAFLRSWRRYPNLILTTETLGLEQKKHWKVHMARYFTRVDHILKNHSGIGVKRFQLVCGRRKLICRLNNWLQIAISSGIEEITLSLPSEYSFPCSLLSGGSGRSLQHLELVNCAFRPMAGLGCSRNLTKLHLHSVLITDDELACFLSECFALKHLDLSYCRELVYLKIPCLLEQLSYLNVDLCHLQMIESKAPNLSSLIYSGNLIELSLGQSSQVKTLDINFYDKTNFLCYVITKLQNIVPNLESLTIYSDDERINTPMVDAKFLHLKYLEIYFDGLDGSDEAFPPEYDYLSLVSVLHASPVLDTFILSVQQGGMKHDSVSGDTTTNLRTMPGHKHERLKEVMIIGFCSATSMVELTCHILENTTSLETITLDAVCDVHDLENIGRCCTTTIRKTGSCYPLRREMILEAHRGVMAIERYIRGKVPSIVELTIREPCTWCHDLERLDALEKENRSHYSPPHLKLEDISLLLKPV

SEQ ID NO: 14880 - protein, 260 aa, Oryza sativa (japonica cultivar-group)
MAGINCSIVPCSALMEGKEFNFSNLYLHHTYGGPKPNQSTIINNNGSTGLGMTAVNNWAVYDGLGSDAKVVAHAHGLHIYAGDLVAIIPSAWYLRMKGEFIMASGVIYKKVHERRSEGNIIELTIHGFCPSLKGTKCLPTKVGPWGGNGGTPQDITETPKRLESITIRSGEVVDSISFSYFDQAGQKRVAGPWGGPGGNLNTIELSSSEFLKEVSGTFGTYYGSNVITFIKFVTNVKTYGPFGKQNGTPFISPCRTTAVL

SEQ ID NO: 14881 - protein, 128 aa, Porphyromonas gingivalis W83
MAKKAVAKKKVVRVEAVGQAHIHSSFNNIIISLANSEGQVISWSSAGKMGFRSSKKNTPYAAQMAAQDCAKVAYDMGLRKVTVYVKGPGNGRESAIRTIHGAGIEVMEIIDVTPMPHNGCRPPKKRRV

SEQ ID NO: 14882 - protein, 545 aa, Prochlorococcus marinus str. MIT 9312
MAKRIIYNEQARRALERGIDILAESVAVTLGPKGRNVVLEKKFGAPQIINDGVTIAKEIELEDHIENTGVALIRQAASKTNDAAGDGTTTATVLAHAMVKAGLRNVAAGANAITLKKGIDKATEFLVGKIQENSKPISDSNAIAQCGTIAAGNDDEVGQMIANAMDKVGKEGVISLEEGKSMTTELEVTEGMRFDKGYISPYFATDTERMEAVLDEPYILLTDKKIALVQDLVPVLEQIAKTGKPLVIIAEDIEKEALATLVVNRLRGVLNVAAVKAPGFGDRRKAMLEDMAVLTNGQLITEDAGLKLENATLDMLGTGRRITINKETTTIVAEGNEQAVKARCDQIKKQMDETDSSYDKEKLQERLAKLAGGVAVIKVGAATETEMKDKKLRLEDAINATKAAVEEGIVPGGGTTLAHLSPILKEWADKNLEGEELIGANIVEASLTAPLMRIAENAGSNGAVIAENVKSKPFNDGFNAATGEYVDMSSAGIVDPAKVTRSGLQNAASIAGMVLTTECIVADLPEKKDAATPGGAPGMGGDFDY

SEQ ID NO: 14883 - protein, 103 aa, Prochlorococcus marinus str. MIT 9312
MAAVSLTVSTVKPLGDRIFIKVSASEEKTAGGILLPDSAKEKPQVGEVAQVGPGKLNDDGSRQTPEVSIGDKVLYSKYAGTDIKLGGDEYVLLSEKDILAVVG

SEQ ID NO: 14884 - protein, 372 aa, Brucella melitensis 16M
MAEAEATATTEAGRIPVTVLTGYLGSGKTTLLNRILTENHGKRYAVIVNEFGEIGIDNDLIVESDEEIYEMNNGCICCTVRGDLIRVVEGLMRRPGRFDAIVVETTGLADPVPVAQTFFMDDDVRAKTGLDAVVALVDAKHLPLRLKDSREAEDQIAFADVVLINKTDLVTPEELAAVEATVRAINPHAIIHRTERASIPLDRVLDRGAFDLKRVLDNDPHFLDHDDPDHVCGPDCDHDHHHHGHDHHHHDHHDHDHVCGPDCDHDHDHASPIHDVTVKSVSLRTGEIDPAKFFPWIQNITQTQGPNILRLKGIIAFKDDPDRYVVQGVHMIIEGDHQRAWKPEEKHESRLVFIGRELDPAALKAGFENCRA

SEQ ID NO: 14885 - protein, 125 aa, Glycine max
PRAAEHHLLKGEGVAGGAFMTNQPCFSDDITSLSKKDYPMSHHARLFGLRAAVAIRLRSIYNSTDDFVLEFFLPVDCNDIEEQRKMLTSLSNIIQRVCRSLRVIREKELEEANLSVNEVIALADS

SEQ ID NO: 14886 - protein, 440 aa, Staphylococcus aureus subsp. aureus MW2
MKTYDLIVIGFGEAGKTLAKYAASTGQHVAVIEQSPKMYGGTCINIGCIASKTLVHDGLEGKSFEASYNRKNDVVNALNNKNYHLLADDNNIDVLDFKAQFKSNTEVNLLDQHDDIADSITAPHIIINTGATSVIPNIKGLDQAKHVFDSTGLLNINYQPKHLVIVGGGYIALEFASMFANLGSKVTVLERGESFMPREDQDVVAHAITDLENKGITLHTNVETTELSSDNHHTTVHTNVGNFEADAVLLAIGRKPNTDLALENTDIELGDRGEIKVNAHLQTTVPHIYAAGDVKGGLQFTYISLDDYRIIKSALYGNQSRTTDNRGSVPFTVFIDPPLSRVGLTSKEAAAQHYDYTEHQLLVSAIPRHKINNDPRGLFKVVINNENNMILGATLYGKQSEELINIIKLAIDQNIPYTVLRDNIYTHPTMAESFNDLFNF

SEQ ID NO: 14887 - protein, 263 aa, Nocardia farcinica IFM 10152
MNRMQDKVAVVTGAAGGMGRAHCRRLAEEGADIIALDVAGADLDGTAAAVTELGRRCVTAVADVRDQTALDTAIAAGVRALGTLDVVVANAGVYTDLGPSWELTDAAWQRTLDVNLTGVWHTVRAAAAHLAESAAIVIVGSTNGVRGGANAAHYAASKHAVVGLARTLANELGPRGIRVNLVHPGSVATPMILNETVYAKLRPDLAQPTIDDAAAVLAQRTLLPVPWVDPVDVANAVLFLASDEARTVTGTELVVDAGLTQKV

SEQ ID NO: 14888 - protein, 404 aa, Ehrlichia ruminantium str. Gardel
MYGRKVMIDYEEIFYDKIKHIKEEGRYREFTGFSRVPGQFPYAIECSINDKVTLWCSNDYLGMGQNEQVILAIKNFSSNIGAGGTRNISGTTKEILELEESLADLHKKPAALTFVCGYVANQTTISTLLTIVPNIVVFSDEKNHSSMIEGIRGSKREKYIFKHNDVNHLEDLLKSVDKSLPKIIIFESLYSMDGNIAPIAEICYLANKYGAMTYLDEVHAVGMYGERGGGISEQENLSDKITIIQGTLSKAYGVMGGYIAGSKSLVDVIRSFAPGFIFTTALSPLIASSARISVEYLKKSSSEREKQREVVNKVKSSFTKAGINFVKTDTHIIPIIIGDSVICKDISRTLLRDYKIYIQSINYPTVPVGTERLRITPTPYHTDEMIEILTRALVDILRKFKIMN

SEQ ID NO: 14889 - protein, 433 aa, Bacillus cereus ATCC 10987
MQPSAPPHLESTETIFSSSITKLVVFICWLAILADGYDLGIYGAVLPKLLEDKSWALSPAHAGTIASYALFGMFIGAILVGTITDLIGRKWTLICCLALFSITMGLAALAPSPELFGLSRFIGGIGLGGVIPTASALTVEYSPKKRQSFIYALMFTGYPLGIVLGAILSMFMLEGFGWRTMFGIGMIPLLLIPFIIRYLPESIQFLLSRNRQKEVDQILNRFEIEFYVKDETHQPSSNMRKRNGFLTLFSKEYRKATLLFWITYIMGMFLIYGLNTWLPQMMRQAGYPLGSSLSFLLMLNITAAIGALFAGAIADRIGAKIVISISYLMAAICIGLLTIKPSVTIIYLLIGLAGIGSVGITQILNAYVTQYFPSHIRATSLGWGLGLGRVGAITGPILVGIIMTMQYDLAWNFYLFSFAGLLAAISVFFIPTK

SEQ ID NO: 14890 - protein, 412 aa, Synechococcus elongatus PCC 7942
MDLGGVMRHRRSGQRRLSVRAILSHTLAISLGVLVTVGGLQARPSLAQAAPVEIAQATPANTAAPNSNPDSFVAAAVRQIGPAVVRIDTERTVTRRAAPMFDDPFFREFFGSDFFGNVNPPARQEVQRGQGSGFVVDGNGLIMTNAHVVANADQVRVTLRDGREFTGRVRGADSVTDLALVEVDTKGERLPTARIGNSSNVEVGDWAIAIGNPLGLDNTVTLGIVSSLGRRSSAVGIPDKRLDFIQTDAAINPGNSGGPLVNSRGEVIGINTAIRQAPGAGIGFAIPVNTAKQIETQLLKNGKVSHSYLGVQLLSLTPQMARDNNRDPNSTVRLPEVQGVLIMGVQRNAPAATAGLRRGDVVIAIDGQAVTTADEFQRRVEASQVGQSLNLSVIRDGNRQQIAVRTGELQAG

SEQ ID NO: 14891 - protein, 407 aa, Arabidopsis thaliana
MTMMSDLSEDLVEEILCRVSITSLGAVRSTCKGWYVLSKTRVLCKAETKHQFLGFMKKNYKLCSMRFDLHGNFNEEGGEEFMNPSIKKSGNLLDQLDICKVFQCDGLLLCVTKEENTRLVVWNPYSGQIRWIKCNNSYHRYEGYAIGYNNNRKHKILRFSDMSFSTYKIYDFISNSWRVLDIAPNWHINPDQRGASLKGNTYFFAREKREDEEDEDILWQPVEYLLCFDFTTENFGQLHPLPFEQYIDDAGALSSFGEEKLAALFQSFASSVVEIWVTSMIEANAVSWIPFLKVDMKPHCSFRFRLPFDGGSFFIDEEKKVAVVIHVDVVAESEMNRYEDVAYIIGENGYVKKVCLVEAVNQGGSLNLSKRSCCNYPHVCCSSYVPSLAQINQSVEFENEREEEEAN

SEQ ID NO: 14892 - protein, 135 aa, Ralstonia metallidurans CH34
MTTTKTDAEWRSQLSDIEYRVTREAATERPFTGQYWDHWNQGIYHCVGCGTPLFESATKFDAGCGWPSYFRPINGEVIAEHTDHSHGMTRVEVRCKECGSHLGHVFEDGPAPTGLRYCINSAALKFDDRDPEDRG

SEQ ID NO: 14893 - protein, 390 aa, Bacillus anthracis str. A2012
MREAVIVAGARTPIGKAKRGSLKTVRPDDLGALVVKETLKRANYEGPIDDLIFGCAMPEAEQGLNMARNIGGLAGLSYDVPAITINRYCSSGLQSIAYGAERIMLGHSEAVLSGGAESMSLVPMMGHVVRPNSRLVEAAPEYYMGMGHTAEQVAVKYGISREEQDAFAVRSHQRAAKALAAGNFADETVSVDVTLRTVGANNKLQEETITFAQDEGVRAETTLDILGKLRPAFNVRGSVTAGNSSQMSDGAASVLLMDREKAVSDGMKPLAKFRSFAVAGVPPEVMGIGPIAAIPKALKLAGLELSDIGLFELNEAFASQSIQVIRELGLDEEKVNVNGGAIALGHPLGCTGAKLTLSLIHEMKRRNEQFGIVTMCIGGGMGAAGVFELL

SEQ ID NO: 14894 - protein, 551 aa, Escherichia coli
MTHLPHWWQNGVIYQIYPKSFQDTTGSGTGDLRGVIQHLDYLHKLGVDAIWLTPFYVSPQVDNGYDVANYTAIVPTYGTLDDFDELVTQAKSRGIRIILDMVFNHTSTQHAWFREALNKESPYRQFYIWRDGEPETPPNNWRSKFGGSAWRWHAESEQYYLHLFAPEQADLNWENPAVRAELKKVCEFWADRGVDGLRLDVVNLISKDPRFPEDLDGDGRRFYTDGPRAHEFLHEMNRDVFTPRGLMTVGEMSSTSLEHCQRYAALTGSELSMTFNFHHLKVDYPGGEKWTLAKPDFVALKTLFRHWQQGMHNVAWNALFWCNHDQPRIVSRFGDEGEYRVPAAKMLAMVLHGMQGTPYIYQGEEIGMTNPHFTRITDYRDVESLNMFAELRNDGRDADELLAILASKSRDNSRTPMQWSNGDNAGFTAGEPWIGLGDNYQQINVEAALADDSSVFYTYQKLIALRKQEAILTWGNYQDLLPNSPVLWCYRREWKGQTLLVIANLSREIQPWQAGQMRGNWQLVMHNYEEASPQPCAMNLRPFEAVWWLQK

SEQ ID NO: 14895 - protein, 257 aa, Desulfovibrio vulgaris subsp. vulgaris str. Hildenborough
MSASRLERRIREAQAAGRPALIPFLTAGFPTKERFWDELEALDAAGADIIEVGVPFSDPVADGPVVAAASQRALESGVTLRWIMDGLAARKGRLRAGLVLMGYLNPFMQYGFERFVSDAADAGVAGCIIPDLPLDEDADLRALLAARDMDLIALVGPNTGEGRMREYAAVASGYVYVVSVMGTTGVRDGLPVEVADTLARARQCFSIPVALGFGISRPAQLEGLSHPPDAVIFGSALLRHLDAGGDAASFMKAWAER

SEQ ID NO: 14896 - protein, 354 aa, Amanita muscaria
MANQYHNDLLAPYLALDQGGKFHAEYVWIDGDGGLRSKTTTVDQKVTDISQLRVWDFDGSSTNQAPSGNSDVYLRPSAIFKDPFRGGENILVLSETYNNDGTPNRTNHRHHTAKVMELAKDEIPWFGIEQEYTLFDADGSPYGWPKGGFPGPQGPYYCGAGTGKVFARDLIEAHYRACLYAGVNISGINAEVMPSQWEFQVGPCEGISMGDHLWMARYLLIRVAEQWGVKVSFHPKPLQGDWNGAGAHTNYSTLAMREPGGMKYIEAAIEKLAKRHDEHIAVYGEDNEMRLTGRHETGHIGTFSSGVANRGASIRVPRHVANKGYGYLEDRRPASNIDPYRVTGIIIETTILDK

SEQ ID NO: 14897 - protein, 483 aa, Staphylococcus xylosus
MAYVIGIDIGTSALKTLVVNKSGDVVESYSVSYNTAHPKSGYSEIDPEIWYEATLESLKYILNHYTHNDLTGISFSGQMHGLVVIDQEGNPIRPAILWNDTRTSQEVEDIKKNLGLNSLLQLTQNTVLEGFTLPKLMWLKNHEQDNYKRIYKFMLPKDYIVYKLTGNVYTEPSDAAGTIMFSVKDENWSTELLHRLNIDPSICPEIIASHQKSGQLTEKVKNTLGIDSNINVYQGGANNACGALGSGITDEQKQLVSIGTSGVALSIENSTDYENDGNVHYFNHCVPNQKYIMGVTLSAGYSLEWLKQLISADENFTTFLKDINQSEVGANGLMYTPYLLGERTPHNDASVRGSFIGLDANTTQLDMKRAVIEGITYSINESIHIMKNNAININEIVSIGGGAKNNQWLQIQADIFNTTITTRTEEQGPAYGAAMIAAMGEQWFNTFNEMSEAWIAYHQKVYPIETNTKSYQDLFNIYKTIYD

SEQ ID NO: 14898 - protein, 328 aa, Bacillus thuringiensis serovar konkukian str. 97-27
MKAIILTSFGGPEVMKYTDVDIPAISEDQVLIRVVATSVNFADIKSRYGKKGNKALPFIPGIDAAGIVERVGSHVKNIYPGQRVIAFPQNGSYAEYVVANENLTFVLPDEVDFQTAAACPIVSFTSYNLLANVARIQQGESVLIHAAAGGIGTTAIQLAKLLGAGTVIGTVGSETKKEIALDAGADYVIGHQDEDFVEKVNELTNGEGVDVILDSISGTVSERSLKCLAYYGRLIHFGNASGEIGNFQTKDLHASCRSILGFSFGTTRKKRPELLQETANEVFRYLRDGRLQIKATKSFPLQDAGKAHEWVESRKSTGKVILTVQSSS

SEQ ID NO: 14899 - protein, 397 aa, Xanthomonas campestris pv. vesicatoria str. 85-10
MGPGPVNAHPRVLRAMAADLLGQFDPEMTAYMNEVMALYRPLFGTENRWTFLVDGTARAGIEAALVSLVSPGERVLVLNFGRFGLLLTEILGRLGAEVHTVDASWGQVLPLSAIAEAIERVAPKLVATVHGDTSTTMAQPLDGLGALCRAAGALSYVDATATIGGMPVASDRWEVDVVTGGLQKCLGGPSGSAPITVSERAAEAIFARRHVERGIVRADIANGSGPRIASNYFDLAMIMDYWSDKRLNHHTEATTMLYGARECARVALQEGLDARFARHAAAGRAVSAGIRALGLEVFGDDAHRMRNVTGVVIPPGIDGEAVRRRMRENFEIEIGTAFGPLQGKIWRIGAMGYNAMKHKVLITLAALEAVLRAEGDACTHGLAVEAALAAWHAEAQA

SEQ ID NO: 14900 - protein, 141 aa, Heliobacillus mobilis
MERTYLMIKPDAVQRGLIGEIVSRFEKKGFKLVAMKFLRLTKEMAEKHYAEHVGKPFFAGLVEYIISGPVVAMCWEGKDVVTVSREMMGATNPAKAAPGTIRGTFAVDLPLALRRRVLRRFLEPENPGSEKTDAILEQLQQ

SEQ ID NO: 14901 - protein, 601 aa, Desulfovibrio vulgaris subsp. vulgaris str. Hildenborough
MGEPSTTQRASLPLLRRIGRYFLPHKVSIALSMGCMAIVSATTAGTAYLIKPALDDIFINKDEQALLLVPAFFIVLTALKGFGRYFQNYFMNYAGLRVIESLRDQLFTKIIHLPMRFYEDSQIGLLMSRIINDVSMIRDSLPSTVMIVRQILTMVGLIGVVFYQNAELATWAVLVLPLALYPFIYFGRKLRKLGRRNQEKLADISVILQEVFSGIRVVKAFATEKEEAHRFDAENQRLVKLTLKQICVSELSSPVMELIGALGIGLVILYGGHEVISGKTTPGTFFSFMAALVMLYDPIKSLSMANREVQRALVGAERVFEILDAEDLCIETSGDLKFNRDFKEVCIKDVSFAYADGSPALRDINLCVRAGERVAIVGPSGAGKTTLVNLIPRFYEPSSGCIEIDGVPLQDFDLADLRRSISVVSQDAFLFNLSVSDNITYGTPNVGAGRIEAAAHAAFAHEFVQQLAQGYDTVLGERGVKLSGGQKQRLTIARALLKDAPLLILDEATSALDSQAERIVQKALDNLMENRTSIVIAHRLSTVLNADRIVVMEDGRVVDQGPHAELLGRCELYTRLYSIQFGQEKADADRIDGTSEEKLEA

SEQ ID NO: 14902 - protein, 510 aa, Neorickettsia risticii
MSKSYGGPEVTKDGYKVINNLNPEDEKIAKIVELLNQATSQANEKAGDGTTTATILVGNMIKNAHKHIAAQRSRTKLKSGMKPRTDEVVKYIQSVAKKINSEEEIAQVGSISANGNSEIGNKIAEAMNKVGKEGVITVEEGKGLDEFSVSVVQGMVFDRGYVSPYFITNPEKMIVEFDNPYVLLANKKLSSIQPMVPLLETIVRSNRAVVIIAEDVEGEALTSLVLSKMRGSLKACAVKAPGFGDRRSEMLEDIRILTGAKTLVSDDLGVTVESLTVEDLGTAKSIIISKDSTTIVDGGGVKTSIDARVKQIKTQIDKTTSDYDKEKLQERLAKLAGGGAVLKVGGATEVEVKERKDRVEDALHATRAAVEEGIVPGGGATLLSAIAVLEKLSSDDDDEQAGINIVKSALKAPISQIVENAGEDASVITYNLLESKDPNRIFDARELKYVDAFKAGIIDPAKVVRVALESAVSVASVLVTTEALIVDLPTKDNGSPSMMPGGGMGGMGGF

SEQ ID NO: 14903 - protein, 324 aa, Brucella melitensis 16M
MTKRDTTILVLGNFDDYAVQRLSDEFNVQRMARGDTALLGSDWVKDVKGIASMSKVSADLIDALPNLEIIGNFGVGYDAVDARHAGANNVMVTNTPDVLTEEVADTTIGLLIDTVRELSKAQEFLRRGEWGKQVRYPLSKLSLRGRKVGIFGLGRIGKAVARRIEAFGLPIAYHNRRKAADVAYDYYPSLKELAGAVDTLILVAPGGAETTRAVNMEVLQALGPEGVLINIGRGSVVDEEALAQALKDGTIAAAGLDVFANEPHVPQALLDAPNTVLLPHIGSASVKTRRAMADLVVDNLIAWFDSGTAITPVPETVGVKAVRQ

SEQ ID NO: 14904 - protein, 251 aa, Arabidopsis thaliana
MGLAVGSGSDVEVGFAKLQGEDFEYYMQSYSIILGRNSKKSTVDVDLSSLGGGMNISRNHARIFYDFTRRRFSLEVLGKNGCFVEGVLHLPGNPNVKLDSQDLLQIGDKEFYFLLPVRSILGGPLGPRHHVLGKATVVPYHNYHSGPGSGSGKNGVRSRELYEYDDEDDDEEEDIRGSGKKTWRDGHEGVYASGEKKREGRSKADREADDQQFLQLMHGSGWSVTDIKGVWKRMASQSSKKIPITRRLGYP

SEQ ID NO: 14905 - protein, 176 aa, Triticum aestivum
MVFLSNAISNARIEESHSKGELHHDAVETTIYGTRWASEDIPRFDLPEDEMPSNVAYRLIKDDLALDGNPALNLATFVTTYMEEEAEKLMAENLSKNFIDYEEYPQSVELCNRCVNMIARLYHAPMHSADEEALGCSTVGSSEAIILATLAMKRRWQNARKEKGLPTDKPNLIFGA

SEQ ID NO: 14906 - protein, 295 aa, Xanthomonas campestris pv. vesicatoria str. 85-10
MSHDSTQRIRYRTQQVGDVQVFYREAGRKDAPVLLLLHGFPSASHMFRDLMPLLASQYRLIAPDLPGFGMTKAPPRGQFDYTFEALYKVIEGFTDALGLTRYGLYLFDYGAPVGFRLAAAHPERVSAIISQNGNAYLEGFSDQWDAWQAYWREPSAANREACRASLSPQTIREWQYGTGVAPGALSPDGYMLDIAYMARPGAEEIQLDLILDYRSNVAAYPAFQAYFRTHQPPLLAVWGKHDPAFIPAGAQAYRKDLPKAEVHLLDTGHFALETHAVEIAHSISEFLSRTLAPSV

SEQ ID NO: 14907 - protein, 353 aa, Vibrio cholerae O1 biovar eltor str. N16961
MRKVAKLTLIDCNQIVITIAFDGRIHLITLQTYKRLLSRRFTMKVAVIGAAGGIGQALALLLKNRLPAGSDLALYDIAPVTPGVAADLSHIPTPVTIKGYAGEDPTPALEGADVVLVSAGVARKPGMDRADLFNVNAGIVKALAEKIAVVCPKACVGIITNPVNTTVPIAAEVLKKAGVYDKRKLFGVTTLDVIRSETFVAALKDKDPGQVRVPVIGGHSGVTILPLLSQVEGVSFTDEEVAALTKRIQNAGTEVVEAKAGGGSATLSMGQAACRFGLALVKALQGESDVVEYAYVEGEGEYAPFFAQPIKLGKNGVEALLDIGKLSAYEQAALDGMLDTLKGDIQIGVEFVK

SEQ ID NO: 14908 - protein, 544 aa, Bacillus anthracis str. 'Ames Ancestor'
MAKDIKFSEEARRSMLRGVDTLANAVKVTLGPKGRNVVLEKKFGSPLITNDGVTIAKEIELEDAFENMGAKLVAEVASKTNDVAGDGTTTATVLAQAMIREGLKNVTAGANPMGLRKGIEKAVVAAVEELKTISKPIEGKSSIAQVAAISAADEEVGQLIAEAMERVGNDGVITLEESKGFTTELDVVEGMQFDRGYASPYMITDSDKMEAVLDNPYILITDKKISNIQEILPVLEQVVQQGKPLLIIAEDVEGEALATLVVNKLRGTFNVVAVKAPGFGDRRKAMLEDIAILTGGEVITEELGRDLKSATVESLGRAGKVVVTKENTTVVEGVGSTEQIEARIGQIRAQLEETTSEFDREKLQERLAKLVGGVAVIKVGAATETELKERKLRIEDALNSTRAAVEEGIVAGGGTSLMNVYTKVASIVAEGDEATGINIVLRALEEPVRQIAINAGLEGSVVVERLKGEKVGVGFNAATGEWVNMLETGIVDPAKVTRSALQNAASVAAMFLTTEAVVADKPEPNAPAMPDMGGMGMGGMGGMM

SEQ ID NO: 14909 - protein, 873 aa, uncultured bacterium 581
MTPSSTSNTAQLRQNVRHLGEILGQVIQSQGDAGLFEAVEAIRLQSKQSRDDDDQEALRALLTQLNEKQILDVARAFSHFLNLANIAEQHHTLADYSQSLFSATASLESAFQQLLKDHEHNRLNTVLKNLSIDLVLTAHPTEITRRTLIHKHGEINDCLTRLEILNDKAAASSKDHSRLKELISQIWHTEEFRSDRPTPIDEARWAFAVIENSLWDAVPQFLRVVDDICERYALPIPPPNWSPIRISSWIGGDRDGNPNVTAKVTREVLLLAQWQACTLLENDIATLYEELSVTTASTTLEEATEGALEPYRFLLKPLRDRLQGQRLNIEKALNDQSLAPAPLTLSEIVDPLEACYESLQAVNLDVLARGYLLDTLRRVHCFGPYLIQLDIRQESARHTQAIAELTEALALGDYRDWNEGQRCDWLRGELDNPRPLIPAGWKPTPETQEVIDTFLVIAETPQSALGSYVISMAAEASDVLAVQVLLKATGCTTNMLVAPLFETLDDLESAPRVVEELLSDNAYRDRCDHQIMVMIGYSDSAKDAGMLAAGWAQYRAQESLLGVCKKFAVKLQLFHGRGGSIGRGGAPAHDALLSQPPGSLENGLRVTEQGEMIRTKLGLTPLAVNTLGRYASAILQANLTPPPEPAGEWRVLMNRLAQHSCEDYRRWVRDEPNFVPYFRQATPEQELASLPLGSRPTRRRSDGGIASLRAIPWIFAWSQNRLMLPAWLGAGSALARAAADGREVVLKSMAREWPFFGARLSMLEMVFAKSDLTIAELYDHLLVSPELADLGAALRQQLSNDRAALLAILETGSELEGDNWGRESINLRDIYTAPLNLLQAELLRRQRANPEEATERALMVTIAGVAAGMRNTG

SEQ ID NO: 14910 - protein, 357 aa, Triticum aestivum
  misc_feature (187)..(187): Xaa can be any naturally occurring amino acid
  misc_feature (204)..(204): Xaa can be any naturally occurring amino acid
  unsure (1)..(357): unsure at all Xaa locations
MGSIAAGADEDACMYALQLVSSSILPMTLKNAIELGLLETLMAAGGKLLTPAEVAAKLPSAANPEAPDMVDRMLRLLASYNVVSCKTEEGKDGRLSRRYGAAPVCKYLTPNEDGVSMSALALMNQDKVLMESWYYLKDAVLDGGIPFNKAYGMSAFKYHGTDPRFNRVFNEGMKNHSIIITKKLLEXYKGFEGLNTLVDVGGGXVGATVAAITAHYPTIKGINFDLPHVISEAPPFPGVTHVGGDMFQKVPSGDAILMKWILHDWSDEHCGTLLKNCYNALPPHGKVVLVECILPVNPEATPKAQGVFHVDMIMLAHNPGGRERYEREFEALAKGAGFATMKTTYIYANAWAIEFTK

SEQ ID NO: 14911 - protein, 544 aa, Brucella melitensis biovar Abortus
MAAKDVKFGRTAREKMLRGVDILADAVKVTLGPKANVVIEKSFGAPRITKDGVSVAKEVELEDKFENMGAQMLREVASKTNDTAGDGTTTATVLGQAIVQEGAKAVAAGMNPMDLKRGIDLAVNEVVAELLKKAKKINTSEEVAQVGTISANAKQIGKMIAEAMQKVGNEGVITVEEAKTAETELEVVEGMQFDRGYLSPYFVTNPEKMVADLEDAYILLHEKKLSNLQALLPVLEAVVQTSKPLLIIAEDVEGERLATLVVNKLRGGLKIAAVKRPGFGDRRKRMLEDIAILTGGQVISEDLGIKLESVTLDMLGRAKKVSISKENTTIVDGAGQKAEIDARVGQIKQQIEETTSDYDREKLQERLAKLAGGVAVIRVGGATEVEVKEKKDRVDDALNATRAAVEEGIVAGGGTALLRASTKITAKGVNADQEAGINIVRRAIQAPARQITTNAGEEASVIVGKILENTSETFGYNTANGEYGDLISLGIVDPVKVVRTALQNAASVAGLLITTEAMIAELPKKDAAPAGMPGGMGGMGGMDF

SEQ ID NO: 14912 - protein, 57 aa, Arabidopsis thaliana
KKKFFPEVMKSLYKLDMLSQNTILHWYPTGTHPKGTPTFLKGVEPFVNWLEKAEEEE

SEQ ID NO: 14913 - protein, 275 aa, Arabidopsis thaliana
VQNLIERCLQLYMNQKEVVDTLLEQAKIEPGFTELVWQKLEEENREFFKAYYLRLMVKHQIMEYNELLEQQINHMRQMHPTAGASVRNRNGSHVPPMNQQQLLYERKEPDQSSPNLSSPYLNGGSAINTNIPSYVDFSSHSRRVDPSPNSLSLQATNMPLMQGMIKSETAYQNCAPYMYGGEAQSTVGDVTIASFSNDSSNQSLNDPLVDPDAPTFGSLGQIPQNFSLSDLTADFSQSSDILESYEGSPFLLADAENFLDSSERVEHQGEHLKLC

SEQ ID NO: 14914 - protein, 288 aa, Arabidopsis thaliana
MELFVTPEKQRQHPSVSVEKTPVRRKLIVDDDSEIGSEKKGQSRTSGGGLRQFSVMVCQKLEAKKITTYKEVADEIISDFATIKQNAEKPLNENEYNEKNIRRRVYDALNVFMALDIIARDKKEIRWKGLPITCKKDVEEVKMDRNKVMSSVQKKAAFLKELREKVSSLESLMSRNQEMVVKTQGPAEGFTLPFILLETNPHAVVEIEISEDMQLVHLDFNSTPFSVHDDAYILKLMQEQKQEQNRVSSSSSTHHQSQHSSAHSSSSSCIASGTSGPVCWNSGSIDTR

SEQ ID NO: 14915 - protein, 718 aa, Oryza sativa
MAALAAALVGFLLAVSSAPAGATTDASDAAALGNLYSSWNSPSQLAGWSAGGGGDPCGAGWQGISCSGAGVTEIRLAGVGLDGSLGYELSSLFSLKTLDLSNNNLHGSIPYQLPPNLTYLNLATNNLSGNLPYSISNMVSLEYLNVSHNSLSQQIGDLFGSLNSLSELDVSFNKLTGDLPNSLGSLSNLSSLYMQNNQLTGSVNVLSGLSLTTLNIANNNFNGWIPQEFSSIPDLTLGGNSFTNGPAPPPPPFMPPPRRRPRNRPSHPRGSGDAPEGSVSPAGQGDKKQGLQTGPLVGIVAGSTVGALCALLLLVFCIRNAQKRKDDTSSNSKDFVGPLSVNIERASNREIPEQSPENTSVATMKISPAEKMTPERIYGKTGSMRKTKVPITATPYTVASLQVATNSFCQDSLLGEGSLGRVYKADFPNGKVLAVKKIDSSALSLQEEDNFLEAVSSMSRLRHPNIVPLTGYCVEHGQRLLVYEYIGNGTLHDVLHYSDELSRKLTWNIRVRVALGTARALEYLHEVCLPSVVHRNFKSSNILLDEEHNPHLSDCGLAALTPNTERQVSTEVFGSFGYSAPEFAMSGIYTVKSDVYSFGVVMLELLTGRKPLDSSRERSEQSLVRWATPQLHDIDALAKMVDPALNGMYPAKSLSRFADIIALCVQPEPEFRPPMSEVVQQLVRLMQRASIVRRQSGEELGYSYRAPEREGDMRDLSF

SEQ ID NO: 14916 - protein, 169 aa, Cytophaga hutchinsonii
MKNKLTSIFLTAGLLMSLTACSQQKAQPIKKTDTIQATSNMPLMPIKDQSNYNPLTPEEKYVIINKGTERPFTGKYYNFKEPGTYICKQCNAPLYRSSDKFDSHCGWPSFDDEIPGAVTRVPDADGRRVEIICTNCKAHLGHVFEGERMTDKNVRHCVNSISIEFVPVK

SEQ ID NO: 14917 - protein, 468 aa, Photobacterium profundum SS9
MTEGITMKLLYTLNERPPHGLTFLLALQHMLASIGGIVAVPLIVGTSIGLPVDEVVTLINAALLASGIVTIAQCVGIGPVGIRLPVVMGSSFAFLGVAISIGKEGGVSSIMGASLVGSFVVILASFYMDKIRKLFPTVVSGVVVTLIGLTILPVAMNWVGDAPAVSEEFATLPKLFLAMISLAIVIAVSVYCKGAIAASAIVIGLAGGYIVALSMGMVNLEQVASAEWISGPEPFKYGFTFSFGAIISMSLVYIVVIAEATGDFMALGSNCHAKVTGRDLKRGLLGDGLGSTLSAILTAMPLASFSQNVGIVGITGVASRYVVAGTGGLLILGGLFPKLAALAVTIPKPVLGGVGFVMFGMIAYAGIRMLIKAADTKRNALVICVGLASGLAVTFEPRLIQHLPHDIANFFHSGITTGTIITVLLHQILPESSAKEELEDNEVYEEVRLSPDSDLDEEAEPLATQKNS

SEQ ID NO: 14918 - protein, 491 aa, Arabidopsis thaliana
MDYVLIVLPLALFLIAYKFLFSSKTQGFNLPPGPTPFPIVGHLHLVKPPVHRLFRRFAEKYGDIFSLRYGSRQVVVISSLPLVRESFTGQNDVILTNRPHFLTAKYVAYDYTTIGTAAYGDHWRNLRRICSLEILSSNRLTGFLSVRKDEIRRLLTKLSREYDGRVVELEPLLADLTFNNIVRMVTGRRYYGDQVHNKEEANLFKKLVTDINDNSGASHPGDYLPILKVFGHGYEKKVKALGEAMDAFLQRLLDECRINGESNTMVSHLLSLQLDQPKYYSDVIIKGLMLSMMLAGTDTAAVTLEWAMANLLKKPEVLKKAKAEIDEKIGEERLVDEPDIANLPYLQNIVSETFRLCPAAPLLVPRSPSEDLKIGGYDIPRGTIVLVNAWAIHRDPRLWDEPEKFMPERFEDQEASKKLMVFGNGRRTCPGATLGQRMVLLALGSLIQCFDWEKVNGEDVDMTENPGMAMRKLVQLRAVCHKRPIMTNLLA

SEQ ID NO: 14919 - protein, 545 aa, Azospirillum brasilense
MKLAEALLRALKDRGAQAMFGIPGDFALPFFKVAEETQILPLHTLSHEPAVGFAADAAARYSSTLGVAAVTYGAGAFNMVNAVAGAYAEKSPVVVISGAPGTTEGNAGLLLHHQGRTLDTQFQVFKEITVAQARLDDPAKAPAEIARVLGAARALSRPVYLEIPRNMVNAEVEPVGDDPAWPVDRDALAACADEVLAAMRSATSPVLMVCVEVRRYGLEAKVAELAQRLGVPVVTTFMGRGLLADAPTPPLGTYIGVAGDAEITRLVEESDGLFLLGAILSDTNFAVSQRKIDLRKTIHAFDRAVTLGYHTYADIPLAGLVDALLEGLPPSDRTTRGKEPHAYPTGLQADGEPIAPMDIARAVNDRVRAGQEPLLIAADMGDCLFTAMDMIDAGLMAPGYYAGMGFGVPAGIGAQCVSGGKRILTVVGDGAFQMTGWELGNCRRLGIDPIVILFNNASWEMLRTFQPESAFNDLDDWRFADMAAGMGGDGVRVRTRAELKAALDKAFATRGRFQLIEAMIPRGVLSDTLARFVQGQKRLHAAPRE

SEQ ID NO: 14920 - protein, 148 aa, Brassica napus
MAGGTALTPTSVGSKSLLPLRNHEAAERVNNNNNNNSLKALPKAVQPVSSIDGGMVKRPRGRPAGSKNKPKPPIIVTHDSPNSLRAHAVEISSGNDICEALSDYARRKQRGLCILSANGCVTNVTLRQPASSGAIVTLHGRFEILSLL

SEQ ID NO: 14921 - protein, 391 aa, Listeria monocytogenes str. 1/2a F6854
MNQKIKQIVLNNESEMIAFRRDLHMHPELQWQEFRTTDQVAKELDKLDIPYRRTEPTGLIAELKGGKSGKTVALRADMDALPVQELNQDLPYKSTEDGKMHACGHDAHTAMLITAAKALVEIKDELPGTVRFIFQPSEEIAEGAKEMIAQGAMEDVDHVFGIHIWSQTPSGKISCVVGSTFASADIIQIDFKGQGGHGAMPHDTIDAAVIASSFIMNLQAIVARETDPLDPVVVTIGKMDVGTRYNVIAENARLEGTLRCFNNTTRAKVAKSIEHYAKQTAAIYGGTAEMIYKQGTQPVINDEKSALLVQETITESFSEEMLYFERPTTGGEDFSYFQDEAPGSFALVGCGNPEKDTEWAHHHGRFNIDECVMKNGAELYAQFAYNYLNQN

SEQ ID NO: 14922 - protein, 217 aa, Mesorhizobium sp. BNC1
MKFFVDTADVNEIRELSETGLLDGVTTNPSLIMKSGRPILEVTREICEIVDGPVSAEVTAVDFKEMMREADILSKIADNIAIKVPLTMDGLKACKALTSSGRMVNVTLCFSANQALLAAKAGATFISPFIGRIDDMGIDGMELIAEIRTIYDNYDFDTEILAASIRSVNHVKQAAIIGADVATVPPAVLKSLVKHPLTDKGLEAFLADWAKTGQKIG

SEQ ID NO: 14923 - protein, 535 aa, Ralstonia metallidurans CH34
MSTTVSPSTSPDPDATPDRIALDPAGTDVTPLYDLTTIRRVEHAGLAATPPFTLMSRAGAAAADWLHAWVPNGRILCLAGPGNNGGDALVAALRLHQRGRLVETWLIGEADLLPADAARAWLEARAAGVPLLALPNDADTGIPPWPNGCAAIVDGLLGIGLNRAADGNMARWIDHLNNSHLPVFSLDIPSGLFADTGAGNPAVRAQRTLTFLAAKPGLLTLDGRDCAGEVDIAPLGLDYPPAEHPVAVVNQPPGFSHSLPRREHADNKGSFGSLAVIGGSHGMTGAPLLGARAALYLGAGRVHVGFLAQPAPAIDPVHPELMLHAVTELSPGAMSAYVVGPGMGTGASARKQLTQLIDICANAATAAPLVLDADALNLLATDGTLAQQLVESGVAHVMTPHPLEAARLLGSTVADIQRNRLAAATALATRWQATIVLKGSGSVIASPDGAPPAINPTGNAALSTAGTGDVLAGMIGALIAQGMPIVAAARAAVWIHGRAADRLVASGTGPAGMTASELYLPARDIFNALLRGGGA

SEQ ID NO: 14924 - protein, 451 aa, Cyanophora paradoxa
MGKQKTHINIVVIGHVDSGKSTTTGHLIYKCGGIDKRTIEKFEKEAAEIGKGSFKYAWVLDKLKAERERGITIDIALWKFETPKYYVTIIDAPGHRDFIKNMITGTSQADCAVLVIPAATGEFEAGISKDGQTREHALLAYTLGVKQMIVAVNKMDEKSVNYGQPRFEEIKKEVSAYLKKIGYNPDKIPFVPISGFNGDNMLEPSSNLGWYKGPTLVEALDQVEEPKRPSEKPLRLPLQDVYKIGGIGTVPVGRVETGVIKPGMTVVFAPSAVTTEVKSVEMHHESMPEALPGDNVGFNVKNVSVKDIRRGYVASDVKNDPAKESESFVAQVIILNHPGQIGAGYSPVVDCHTAHIACKFSELITKIDRRSGKELEASPKFVKSGDACMARLIPNKPMCVEAFTNYPPLGRFAVRDMRQTVAVGVIKEVVKKEPSAKGAAGAAKGGKAGKK

SEQ ID NO: 14925 - protein, 369 aa, Bordetella parapertussis 12822
MNTARSLDKMVPVTILTGFLGAGKTTLLKRILTEYHGRRVAVIENEFGPESIDNDLLVQDRDEEIIELSNGCVCCTVRGDLMRTLSDLRARREAGELSFERVIIETTGMANPGPVCQTFFMDDDIAEYYRLDAVVTVVDAKHGMATLDAQDEAQKQVGFADRILVSKKDLVNDVDYAALHQRLVRINPRAPITPVHFGEADLKSIIDISGFNLNSILDIDPAFLADEHPDAAHDHHDHDHGHSHEHDHDHEGECGAHCNHHHHHHHAHHDDEIGAFVFRSNKPFDPARLEEFLGGVVQVYGPDLLRYKGILYMKGINRRMLFQGVHMMMGAEPGKAWTAAEKPSTKMVFIGRKLPQEIFTRGLEQCLVG

SEQ ID NO: 14926 - protein, 214 aa, Rhodopseudomonas palustris CGA009
MTSFPKSLIDGYEAFRTQRLPTEQSRFRELSERGQSPEVMVIGCCDSRVSPEVIFDAGPGEIFVVRNVANLVPVYEPDGGAHGVSAALEFAVQVLRVKHIVVLGHALCGGIKAFTDKTPPLTESDFIGRWMQMFTKPGEVVEKRDHETVQDFRTRIEKAAVFRSIENLMTFPCIKILVERGKLQLHGAYFGVADGDLFVLDQENKQFVPAAEVV

SEQ ID NO: 14927 - protein, 447 aa, Cyanophora paradoxa
MREIVHVQGGQCGNQIGAKFWEVISDEHGVDPTGTYHGDSDLQLERINVYYNEATGGRYVPRAVLMDLEPGTMDSVRAGPYGQLFRPDNFIFGQSGAGNNWAKGHYTEGAELIDSVLDVVRKEAEGCDCLQGFQITHSMGGGTGSGMGTLLIAKVREEYPDRMMCTYSVFPSPKVSDTVVEPYNATLSVHQLVENADEVMVIDNEALYDICFRTLKLTTPTYGDLNHLVSACISGVTCCLRFPGQLNSDLRKLAVNLIPFPRLHFFMIGFVPLTSRGSQQYRALTVPELTQQMFDAKNMMCAADPRHGRYLTASALFRGRMSTKEVDEQMLNVQNKNSSYFVEWIPNNIKASVCDIPPKGLKMSATFIGNSTAIQEMFKRVSEQFTAMFRRKAFLHWYTGEGMDEMEFTEAESNMNDLVSEYQQYQDATAEEEGEGDEEEAEGEAAA

SEQ ID NO: 14928 - protein, 554 aa, Bacillus cereus ATCC 10987
MNKTWWKEAVAYQIYPRSFMDSNGDGIGDLQGIIAKLDYLKDLGIDVIWICPMYKSPNDDNGYDISDYQDIMDEFGTMEDFDALLDEVHKRDMKLIIDLVINHTSDEHPWFIESRSSKDNPKRDWYIWHDGKDGAEPNNWESIFNGSAWEYDEVTGQYYLHLFSRKQPDLNWENKEVREVLYDTVNWWLDKGIDGFRVDAISHIKKEDGFKDMPNPKELKYVPSFDKHMNVDGIQPLLEELKENTFSKYDIMTVGEANGVKIEDAELWVGEEQGKFNMVFQFEHLSLWDAEKKKDLDVVGLKKVLTKWQKGLENKGWNALYIENHDKPRIVSTWGDDKQYWRESATALGAMYFFMHGTPFIYQGQEIGMTNVQFPNIEDYDDVAIKNLYREKIAEGVSHQDMMEIIWASCRDNSRTPMQWNDEMNAGFTTGAPWFGMNPNYKEINVEKQKSEENSIFNFYKKMIALKKEHDVLNYGTYDLLLEDDPQIYAYTRTLSDEKIVVISNISKEEAVYNEGSFAIERKRLLLNNYEVAEHEQVTTITLKPYETRVYRIS

SEQ ID NO: 14929 - protein, 395 aa, Streptomyces coelicolor A3(2)
MRPVHFAAARRTPIGKLRGALSTVRPDDLAAAVLRGLVADVPALDPARVDDVYWGAANQAGEDNRNVARMAALLAGLPETVPGATVNRLCASGLEAVTTAARTIAAGEADIVLAGGSESMSRAPFVLPRPDEALPHRIETADTRLGWRLVNPAMKDLHGLLAMGETAEEVAERYGVPRERQDAFALRSHRLAAEARKNGRFDDEILPVERPDGVVVDTDECVREDTSLEKLGSLKPVFRPGGTVTAGNASPMNDGAAGLLLVSEEALNDLGLESLGRYVAGGSAGVHPDVMGIGPVPATRKVLARAGWGIGDITEAEFNEAFAAQALACVDQLGIDPDLVNPTGGAIALGHPLGCSGARILTTLLHRMRRTGAGRGLATMCVGVGQGSAVLVERH

SEQ ID NO: 14930 - protein, 398 aa, Trichodesmium erythraeum IMS101
MTSYENSNNKLFDVFLNDIPDKFTGKLEVKSSRQSWTIFLCIGHLAWAIGGKHYNRRFYKIWHQFCSNVPLEKIKLGKQDTLFCDYYHIMSVLSRRKILTIPQIKAVVLGNLEEVLFDILQEESQEKLTYDVSNSGFDKTSTIISSIVRLETVISRVNKLWKNWQNSNLAAYSPNLIPTIINYEKLQKIAKNNTYKTITKLVDGKKSLRETAVLFKKDVRELTLFLIPYVKNKLIHFKEGADKKNLERSTQDVHKKTIPKQSQALIICVDDSKETCYILEKIIKKTGYKFMGIQDSIKALFMIIESKPDLIFLDLMMPIANGYEICTQLRRVPMFENTPIIILTGSDGVVDRVRAKMVGATGYLTKPIEPKKVLALVKNYLQNPRSPDTQIKSDESDL

SEQ ID NO: 14931 - protein, 383 aa, Pyrococcus horikoshii OT3
MKFPRIGLPKEKVIELINEKTKKDLTFSSGKILGSMCTMPHDLAIEVYTKYIDRNLGDPGLHPGTRKIEEEVIEMISDLLHLEKGHGHIVSGGTEANILAVRAFRNLSDVEKPELILPKSAHFSFIKAGEMLGVKLVWAELNPDYTVDVRDVEAKISDNTIGIVGIAGTTGLGVVDDIPALSDLARDYGIPLHVDAAFGGFVIPFAKELGYELPDFDFKLKGVQSITIDPHKMGMAPIPAGGIVFRRKKYLKAISVLAPYLAGGKVWQATITGTRPGASVIAVWALIKHLGFEGYMRIVERAMKLSRWFAEEIKKINNAWLVREPMLNIVSFQTKNLKKVERELKSRGWGISAHRGYIRIVFMPHVTREMIEEFLKDLKEVLS

SEQ ID NO: 14932 - protein, 497 aa, Oryza sativa (japonica cultivar-group)
MGRVGLGVAVGCAAVTCAIAAALVARRASARARWRRAVALLREFEEGCATPPARLRQVVDAMVVEMHAGLASDGGSKLKMLLTFVDALPSGSEEGVYYSIDLGGTNFRVLRVQVGAGSVIVNQKVEQQPIPEELTKGTTENFVALALKNFLEGEDDQDGKMALGFTFSFPVRQISVSSGSLIRWTKGFSIRDTVGRDVAQCLNEALANCGLNVRVTALVNDTVGTLALGHYYDEDTVAAVIIGSGTNACYIERTDAIIKCQGLLTNSGGMVVNMEWGNFWSSHLPRTPYDILLDDETHNRNDQGFEKMISGMYLGEIARLVFHRMAQESDVFGDAADSLSNPFILSTPFLAAIREDDSPDLSEVRRILREHLKIPDAPLKTRRLVVKVCDIVTRRAARLAAAGIVGILKKLGRDGSGAASSGRGRGQPRRTVVAIEGGLYQGYPVFREYLDEALVEILGEEVARNVTLRVTEDGSGVGAALLAAVHSSNRQQQGGPI

SEQ ID NO: 14933 - protein, 250 aa, Archaeoglobus fulgidus DSM 4304
MGLSRLGIETAYIGKVGSDEEGRILLADFEREGVSTDFVIRAEGRSGTAMIFVDEKGNRAILVDPGVNDTIAYDEIDVDSARKYDLIHLTSFICKNGLDSLNSQKRIVEEFDSVSFDPGMPYAERGLGDMEKILKNTTIFLPNRQEIEMLFSEDYRTAAERCIEMGIEIVAVKLGSEGCWIKKGDREVTVKPVSTKVVDTTGAGDAFNAGFLYGYLKGKDIEECGRLGNFVAAKCIEKYGAREGLPRSVD

SEQ ID NO: 14934 - protein, 638 aa, GIBBERELLA ZEAE PH-1
MSAPNNTSGPEPQTPPQTSPEMFELNEKKDYDATNAPISDDEHKEIGVGRVEAFNKVLYQSGKKGKILLWLLGVSIGLTMFAYALDMGITTTIFGTLAASTFGVHSQLGTVNTAGQIIRAISKPFIGKLADITSRPTTYVVVLVFYAVGFAVAASASGFTSYVIGICFTSVGKSGLDLLSDIIVADLTPLEWRGFFSACLALPFIVTVPVNGFIAEGFYEDWRWGLGMFAILVPVLLLPAIFTLYTMQRRGEKAGMVTMADSKDVRTGRTEATPKNLTYWAKLAYRGLIDIDIVGLILLGFAFSLILLPITLAKSAKGGWNNPSMVAMIVVGFVVLILFGLYEYFLAPKPMMTKRILQNRAFIAGVIIHIFNQMASSVRNTYFSSYILIIKEWTTYQWTIFLGITTMGLCLVGPIVGLIHRVSHRYKGLMIFGAAARILGYGLLISPNGMMTEDTARLVAAQLIFCLSSLNVVGVRVGVQASVPHDDIASLISIITLWSTLGSSVGSAIATSIWTEQMVDQMHVELPDVDDTTIATIYGNIKTLKKYDFFDPIRQGSIRAYSIVNGHITIVSIVFACIPLIASFFMPNFYLGKQQNAVNNKGLDGEVVDVPKNGATDVNSTETKPATFMQKMAALYRK

SEQ ID NO: 14935 - protein, 140 aa, Ralstonia eutropha JMP134
MTNLRHFDPFSVEPISDMLQGMLRSFRGTADNGLAFKVDVSESESAYTLAAELPGVKKEDIDVSVDRGTVMISAKVEKSSEQKEGERVIRRERYSGSMQRAFTLDASIDEGKVEASYDNGVLRVVLPKKETSPQQRITVK

SEQ ID NO: 14936 - protein, 291 aa, Zea mays
  misc_feature (81)..(81): Xaa can be any naturally occurring amino acid
  unsure (1)..(291): unsure at all Xaa locations
MAAPTTLRSAAARARARAAELVRGRWPQRRLGTTSAAETESKKNKEEEEEGAGWELSAAREYYDYRKSIYGDVTHRALLVXDAVGTLVVPAQPTAQVYKSIGEKYGVKYSEDEILMRYRRAYEQPWGGSRLRYVDDGRTFWQHIVTSSTGCSDAQYFEELYQYFMTEKAWKLCDPDAESVFKALRKAGVKTAVVSNFDTRLRPLLQALKCDHWFDAVAVSAEVAAEKPNPIIFLKACELLGVKPEEAVHVGDDRRNDIWGARDAGCDAWLWGSDVRSFKEVAERIGVEVTK

SEQ ID NO: 14937 - protein, 350 aa, Xanthomonas campestris pv. vesicatoria str. 85-10
MDVAVPALPLHCTFEAADWQRLARHWHAVALSSEVSEAPFKATLLDEPLVLYRLGSELVAARDVCPHRGVPLSMGTADGGGVVCAYHGLRFGAGGRCNHIPASPSQNIPARMRLHTYAVAERYGLIWVCLAKPAGVSDADIQIPPMPGWDEDGFQQIVCPAFDIGGSAARQLEGFIDVAHFAFVHTATFAQPDKREVPAYTTTETPTGFNADYLSTVANYSVDMPLPDVAPDFQWLRHFEVHLPFTATLTIHFPVPGKRLVIMNAASPVSKHATRLLVPIARNFDTHLPVEDVHAFNLRVFEEDRAMVEAQRPEYLPLDPLLEVHIPADRSSIAYRRGLRSQGYSDFFLR

SEQ ID NO: 14938 - protein, 546 aa, Brucella melitensis biovar Abortus
MAAKDVKFGRTAREKMLRGVDILADAVKVTLGPKGRNVVIEKSFGAPRITKDGVSVAKEVELEDKFENMGAQMLREVASKTNDTAGDGTTTATVLGQAIVQEGAKAVAAGMNPMDLKRGIDLAVNEVVAELLKKAKKINTSEEVAQVGTISANAEAEIGKMIAEAMQKVGNEGVITVEEAKTAETELEVVEGMQFDRGYLSPYFVTNPEKMVADLEDAYILLHEKKLSNLQALLPVLEAVVQTSKPLLIIAEDVEGEALATLVVNKLRGGLKIAAVKAPGFGDRRKAMLEDIAILTGGQVISEDLGIKLESVTLDMLGRAKKVSISKENTTIVDGAGQKAEIDARVGQIKQQIEETTSDYDREKLQERLAKLAGGVAVIRVGGATEVEVKEKKDRVDDALNATRAAVEEGIVAGGGTALLRASTKITAKGVNADQEAGINIVRRAIQAPARQITTNAGEEASVIVGKILENTSETFGYNTANGEYGDLISLGIVDPVKVVRTALQNAASVAGLLITTEAMIAELPKKDAAPAGMPGGMGGMGGMDF

SEQ ID NO: 14939 - protein, 118 aa, Citrus reticulata
CMQVWPPTGLKKFETLSYLPPLSDEALLKEISYLLRSGWIPCLEFELEKGWVYREHHSSPGYYDGRYWTMWKLPMYGCTDATQVLKEVGEVQKEYPHSFVRIIGFDNKRQVQCISFIA

SEQ ID NO: 14940 - protein, 551 aa, Methanosarcina acetivorans C2A
MLGKTKRYLEVIKVLLKYNLIPELYRELRTDYISNTDCTCAFDVENRKTAVKLRQAFEELGPTFIKMGQTMSKRPDLVPQPYVIEMANLQDRVKPLLFEEMAESLDLACICEYISPEDRNRKKTEEELKASKERRAKAFIEIFDSFDTNPIASGSIAQVYRGVIEGKPVAVKILRPNLIDTINIDLSILDDFKPVIKKVLGVGKKFDFDAFLREIREMLTREVDLRIEAVSMRRFEDNFKNVKNVAVPKICPEYCSVNVLTMEFIQGTQIKDIIDMPVPQSKKSEYTRTITKSYLKQVYIDGFYHADPHGGNMLVEEDDTIAFIDFGAVDSIDDELKKNMLEFYYAINNRDVEGATQGFLRIGGADPRDVDVCRLRKDMDDLIANQNYGLEGRQSDNYAKLGLKYDIRLPGEFSTLQRAILLIEGVCLELDPRYNIKTIAIPVLMDAYKKLDSSRGTALHIEFSTEPVDEKAELRATIRELADKMEDMGDRFLEGKQKESKRSVFSREFFLSVLLVVSAYILLYGDTFSWIGLLGFGVTVLIALITSLHRE

SEQ ID NO: 14941 - protein, 500 aa, Brucella melitensis biovar Abortus
MSRARISNYRKGVAAVALSASLAGAFVVTGPLGALNEARAEAVHVTPPPQAGFADLVEKVRPAVVSVRVKKDVQETSNRGPQFFGPPGFDQLPDGHPLKRFFRDFGMEPRGDSRSDNRRGKANKPRPGHERPVAQGSGFVISEDGYVVTNNHVVSDGDAYTVVLDDGTELDAKLIGADPRTDLAVLKINAPKRKFVYSPLATIIRCDVGDWVVAVGNPFGLGGTVTSGIVSARGADIGAGPYDDFIQIDAAVNKGNSGGPAFDLSGEVIGINTAIFSPSGGTVGIAFAIPSSTAKQVVDQLIKKGSVERGWIGVQIQPVTKDIAASLGLAEEKGAIVASPQDDGPAAKAGIKAGDVITAVNGETVQDPRDLARKVANIAPGEKAALTVWRKNKAEEINVTIAAMPNDKGKSGSQSNDNDGGQGETLDSYGLTVVPSEDGKGVVVTDVDPDSDAADRGIRSGDVIVSVNNQTVKTAGDINKAITAAEKSGRNGAAAAIAEQ

SEQ ID NO: 14942 - protein, 392 aa, Symbiobacterium thermophilum IAM 14863
MREAVIVTGVRTALGKAPRGSLRHVRPEDLAATVIKEAIARTPGLDPAAVEDVVLGCAFPEGEQGLNIARNAAIRAGLPTSVPGFTINRFCSSGLNAIAIAANAVMAGNLDIAIAGGVESMSRVPMGGHTPRPHPEVVESYPQLYMSMGHTAEVVCARYNVSREDMDAFALASHRKAAAAIDAGKFKDEIVPITVKERVFDGKRVVEKEFVFDTDEGVRRDTSMEALAKLRPAFSANGNVTAGNSSQTTDGAAAVVVMSAEKAQEMGLKPLAIFRSFAVGGVDPEVMGIGPVVAVPKALKQAGITLADVDLIELNEAFASQSLAVIRKLEMDPDKVNVNGGAIALGHPLGCSGARLTVTIMHEARRRKARYGLVTMCVGGGMGAAGVLEFVH

SEQ ID NO: 14943 - protein, 372 aa, Legionella pneumophila str. Paris
MSSKSGGLAGVVAGQSAIATVGLAGKGLNYRGYSINDLAEYASFEEVAYLLHYGELPTQKELNVYIKKLVNLRHMPDVLKTVLKLIPKNTHPMDVLRTACSFLGTIEPEENFKQQYEIADRLLALFPGIMCYWYTYHFKNKEISGLSEEDTTGGHFLALLHGRKPSKIEADMMNVSLILYAEHEFNASTFAARVTAATLADFYSAITSAIGTLRGPLHGGANEAAMELIERFKTPDEAAIGIKQMLASKELIMGFGHRVYTTCDPRSDIIKKWSFRLGEEKGNLLLYHISERIEEIMWQEKKLFPNLDFYSASAYHYCNIPTHLFTPIFVMSRITGWSAHVFEQRANNKLIRPTSEYIGPDSRPFPAIETRG

SEQ ID NO: 14944 - protein, 402 aa, Zea mays
MSPTKLDGTRERFCGFRDPLSMQPKTIVRRKKTEGEGRGSEGHDAHLSHLLFLSLALLTRRRSVGCRLSCLLARPLFMAMVDEGGKGEAQPPGLDPRNRRSAATRATGDMDGGGRGEEWEGPPGYVLSLPAAALPLPVAVSCLDATVRRKGRSHIRHRGHPSGWWAFRLPVPAPEEAKRPVPPASAANNPSEEDRSCPRHQRLPVRQAPAPGPHTPAPAEERPAKRQCLHCGSSSTPQWREGPLGRSTLCNACGVRYRQGRLLPEYRPLASPTFEPSEHANKHSQVMQLHRQRKSQGQHHPLPAEHPRAMDVLQFPQRWQVKEEYPPTPLHQPLPHPVVDGSLASGELRVGDMVDAAADAGHGGGGGKGSDLNNNAPSSLDSRLLEGPSAPLLVDGDKPLVH

SEQ ID NO: 14945 - protein, 282 aa, Zea mays
IDPAIVVAVLASDRRATTTTSRSLACAREPGSRRELAIGRRSMGRGKIVIRRIDNSTSRQVTFSKRRNGIFKKAKELAILCDAEVGLVIFSSTGRLYEYSSTSMKSVIDRYGKAKEEQQVVANPNSELKFWQREAASLRQQLHNLQENYRQLTGDDLSGLNVKELQSLENQLETSLRGVRAKKDHLLIDEIHDLNRKASLFHQENTDLYNKINLIRQENDELHKKIYETEGPSGVNRESPTPFNFAVVETRDVPVQLELSTLPQQNNIEPSTAPKLGLQLIP

SEQ ID NO: 14946 - protein, 428 aa, Legionella pneumophila str. Paris
MSRSSDLFHKAQTIIPGGVNSPVRAFKGVGGEPVFFKSGKGAYLTDVDDKQYIDYVGSWGPLILGHCHPKVIEAVDNVLHSGMSFGAPTELEIQLAEKIASLMPSIEKIRMVNSGTEATMTAIRLARGFTNKNKFIKFNGCYHGHSDSLLVKAGSGLLTLGIPSTPGIPKSITEHTLTADFNNLEQVAQLFEKYPNDIATVILEPVPGNMGFILPKIEFLKGLRELCDQYNALLIFDEVMTGFRVGLHGAQGLFGIKPDITTLGKIIGGGMPVGALGGKREIMSFLAPEGPVYQAGTLSGNPLAMAAGLATLKEIEKINFFEDLSNTTNKLTEALADAAENANIPFFAASLGGMFGFCFTDKNSVENYFDVASSDEVLFKKFFHAMLAQGVYFAPSMYEAGFVSSMHGDLEIQKTYDAAELVLNQLSA

SEQ ID NO: 14947 - protein, 371 aa, Bacillus licheniformis ATCC 14580
MAAKTKKAIVDSKKQFDAIKKQFETFQILNEEGEVVNEAAMPDLSDDQLKELMRRMVYTRILDQRSISLNRQGRLGFYAPTAGQEASQIATHFALEKEDFVLPGYRDVPQLIWHGLPLYQAFLFSRGHFRGNQMPDDVNALSPQIIIGAQYIQTAGVALGLKKRGKQAVAITYTGDGGASQGDFYEGINFAGAYKAPAIFVVQNNRYAISTPVEKQSAAQTIAQKAAAAGIVGVQVDGMDALAVYAATREARERAVNGEGPTLIETLCFRYGPHTMAGDDPTKYRTKEIENEWEQKDPLVRFRKFLENKGLWSEEEENKVIEEAKEEIKQAIKKADEEPKQKVTDLIDIMYEELPYNLVEQKEIYKEKESK

SEQ ID NO: 14948 - protein, 447 aa, Methanosarcina barkeri str. fusaro
MAEDIKSKVIQAKKASIELSSVSTEVKNLALEAMAQALDKERKAILDANAKDLEAAAELKKKGKLTQALVDRLKVSDSKIDGMIAGIRDVIKLKDPVGDTLSTLELDKDLILYQVSCPIGLIGVIFESRPDVVPQVMSLCLKSGNATIFKGGSEARESNRTIFQILVKAIESTDGMPAGAFQLMETREEIMDLLSLDAYVDLLIPRGSNEFVKFIQENTKISVLGHTSGICHIYVDEYVDLDTAWKVCFDAKVQYPAVCNAIETLLINRKIADTFLPKMAEMYLSAGVELRCDEDSYALLEKRGLSPLSRATEEDWSLEYNDLILSIKLVDTIKEAIDHINTFGSHHTDGIITEDASRRKAFTALVDSSSVMVNASTRFADGYRYGKGAEVGISTNKIHSRGPVGMEGLLIYKYILLGKGQVVADYAGENAKPYTHRKLDLKFEDVN

SEQ ID NO: 14949 - protein, 406 aa, Methanosarcina barkeri str. fusaro
MEIRIAAVTNFSCIPKIFYEALLLTDRNEFLNDINKIVIKIGTSSLTKQNCDSTKENCSIDPTFIENIAAQVSELRKLGKEVIVVSSGAIGVGLYELGIAPKPREIPIRQAAAAVGQSILMQYWSEAFSKHGIKVAQILLTYEFYSDRVSYLNLRNSISTLLEYGVVPIINENDCTCTNEIEAIFGDNDKLSAMVASKIDADLLIILSDIDGLFDKNPKIHEDARLISLVEKITPEIESYGGDPTSFKGVGGMRTKIKAAKICSMAGCYVLIANSEIEDVLLKVLSGKEIGTLFLAERHIQKNRARWIILSRASGTIRVDAGAKAAVLGKNSLLSAGVVDVEGNFDRGDVVRLECEGRVFAKGITDYTSEELMKIKGAHTDEIEGILGYNNYSNVIKKENIGIMEN

SEQ ID NO: 14950 - protein, 359 aa, Aspergillus niger
MVRLSNLVSCLGLASAVTAAVVDLVPKNFDDVVLKSGKPALVEFFAPWCGHCKNLAPVYEELGQAFAHASDKVTVGKVDADEHRDLGRKFGVQGFPTLKWFDGKSDEPEDYKGGRDLESLSSFISEKTGVKPRGPKKEPSKVEMLNDATFKGAVGGDNDVLVAFTAPWCGHCKNLAPTWEALANDFVLEPNVVIAKVDADAENGKATAREQGVSGYPTIKFFPKGSTESVPYEGARSEQAFIDFLNEKTGTHRTVGGGLDTKAGTIASLDELIASTSAADLAAAVKKAATELKDKYAQYYVKVADKLSQNAEYAAKELARLEKILAKGGSAPEKVDDLISRSNILRKFVGEEKEAKDEL

SEQ ID NO: 14951 - protein, 470 aa, Bacillus licheniformis ATCC 14580
MVVGDFPIETDTLVIGAGPGGYVAAIRAAQLGQKVTIVEKGNLGGVCLNVGCIPSKALINAGHRYENAKHSEEMGITAENVKVDFTKVQEWKASVVNKLTGGVEGLLKGNKVDIVKGEAYFVDSNSVRVMDENSAQTYTFKNAIIATGSRPIELPNFKYSDRVLNSTGALALKEIPKKLVVIGGGYIGTELGTAYANFGTEVVILEGGEEILPGFEKQMSSLVKRNLKKKGNVEIHTKAMAKGVEEKADGVTVTFEVKGEEQTIDADYVLVTVGRVANTDELGLEQVGVEMTDRGIIKTDKQCRTNIPNIYAIGDIIEGPPLAHKASYEGKIAAEAIAGEAAEIDYLGIPAVVFSEPELASVGYTEAQAKEEGLSVTAAKFPFAANGRALSLNETDGFLKLVTRKEDGLVIGAQIAGASASDMISELSLAIEAGMTAEDIAMTIHAHPTLGEITMEAAEVAIGMPIHVVK

SEQ ID NO: 14952 - protein, 485 aa, Taxus wallichiana var. chinensis
MDALKQLEVSPSILFVTLAVMVGIILFFRSKRHSSVKLPPGNLGFPLVGETLQFVRTLGSSTPQQFIEERMSKFGDVFKTSIIGHPTVVLCGPAGNRLVLSNENKLVQMSWPSSMMKLIGEDCLGGKTGEQHRIVRAALTRFLGPQALQNHFAKMSSGIQRHINEKWRGKDEVTVLPLVKDLVFSVASRLFFGITEEHLQEQLHNLLEVILVGSFSVPLNIPGFSYHKAMQARATLVDIMTSLIEKRRNELRAGTASENQDLLSVLLTFTDERGNSLADKEILDNFSMLLHGSYDSTNSPLTMLIKVLASHPESYEKVAQEQFGILSTKMEGDEIAWKDLKEMKYSWQVAQETLRMFPPIFGTFRKAITDIHYNGYTIPKGWKLLWTTYSTHTKEGYFKGADQFKPSRFEEEGKHVTPYTYLPFGGGMRGCPGWEFAKMETLLFLHHFVKALSGLKAIDPNEKLSGKPLPPLPVNGLPIKLYSRS

SEQ ID NO: 14953 - protein, 109 aa, Triticum aestivum
MAGLQRSSLTFRRSGSSGMVWGERLMSDEHSQWTSGEPEFRELRHSRSVGSVGAQHRRNDGTERGSQAFRTRRVALAMDPPSPKVPGCIFCGIFRKTAPSQPSKARRYH

SEQ ID NO: 14954 - protein, 160 aa, Bacillus thuringiensis serovar konkukian str. 97-27
MTVYDFSAKTIIGEEKSLKDYEGKVLLIVNVASKCGFTPQYKGLQEVYDKYKEQGLEILGFPCNQFGGQEPGTEVDITSFCELNYGVNFPMFAKIDVKGDKAHPLYTYMTEQAPGLLGMKAVKWNFTKFLIGKDGKVVGRFAPQTKPVDLEVEIEKVLGE

SEQ ID NO: 14955 - protein, 324 aa, GIBBERELLA ZEAE PH-1
MVNVPNIKLNSGFDMPQIGFGLWKVDDNCAEVVYNAIKAGYRLLDGACDYGNEKACGEGVARAIKEGIVKREDLFIVSKLWQTYHDKKNVEPITRRQLADWQIDYFDLFLIHFPVALEYVDPEVRYPPGWHYDDAGTEIRWSKATNQETWEGMEDLVEKGLAKSIGISNFQAQGIYDMLKYAKIRPATLQVELHPYHQQSELVSLAKAEGIALTAYSSFGPTGFIELDMDIAKSASPLMQHEVFTTLASKYNKTSAQVLLRWATQQGLAVIPKSTTPQYMAQNFDCFEWSIDEEDMKRISKMNLNLKFNKPTNYFPTEKLWIFG

SEQ ID NO: 14956 - protein, 576 aa, Glycine max
MVTMGLKALFVWCIIWLAFAQLSLGGRVRHYKFDVEYMIRKPDCLEHVVMGINGQFPGPTIRAEVGDILDIALTNKLFTEGTVIHWHGIRQVGTPWADGTAAISQCAINPGETFQYRFTVDRPGTYFYHGHHGMQRSAGLYGSLIVDLPKGQNEPFPYDGEFNLLLSDLWHTSSHEQEVGLSSKPFKWIGEAQTLLINGRGQFNCSLASKFINTTLPQCQLKGGEECAPQILHVEPNKTYRIRIASTTALASLNLAISNHKLVVVEADGNYVTPFAVDDIDIYSGESYSVLLRTDQDPNKNYWLSIGVRGRKPNTPQGLTILNYKPISASVFPTFPPPITPLWNDFERSKAFTKKIIAKMGTPQPPKRSDRTIFLLNTQNRVDGFTKWAINNVSLTLPPTPYLGSIKFKIKNAFDKTPPPVTFPQDYDIFNPPVNPNASIGNGVYMFNLNEVVDVILQNANQLSGSGSEIHPWHLHGHDFWILGYGEGKFKSGDEKKFNLTHAPLRNTAVIFPYGWTALRFKADNPGVWAFHCHIEPHLHMGMGVIFAEAVQKVGKIPRDALTCGLTGKMLGNRHY

SEQ ID NO: 14957 - protein, 529 aa, Bacillus subtilis
MSDDQNKRVNEHSKDEQLEQYRTDNSGKKMTTNQGLRVSEDEHSLKAGVRGPTLMEDFHFREKMTHFDHERIPERVVHARGFGVHGFFQVYEPMTEYTRAKFLQDPSVKTPVFVRFSTVAGSKGSADTVRDARGFATKFYTEEGNYDLVGNNIPVFFIQDAIKFPDLVHAFKPEPHNEMPQAATAHDTFWDFVANNPESAHMVMWTMSDRGIPRSYRMMEGFGVHTFRFVNEQGKARFVKFHWKPVLGVHSLVWDEAQKIAGKDPDFHRRDLWETIENGGKVEYELGVQMIDEEDEFKFDFDILDPTKLWPEELVPVKIIGKMTLNRNQDNVFAETEQVAFHPGNVVPGIDFTNDPLLQGRLFSYTDTQLIRLGGPNFHEIPINRPVCPFHNNQYDGYHRMTINKGPVAYHKNSLQNNDPSPATAEEGGYVHYQEKVEGKKIRQRSDSFNDYYSQAKLFWNSMSPVEKQHIISAFCFEVGKVKSKDVQRQVVDVFSNVDADLAEEIAKGVGVAAPRSVKHLKKFLLRLR

SEQ ID NO: 14958 - protein, 481 aa, GIBBERELLA ZEAE PH-1
MKGSTSLIIASSTLLSATSGLQLNKGHDPAVLSVNFEKRARHVSDSLGRRADNVVDMFVDKHGMRVSYWANYTIGTPPQNLYAEMDTGSSDLLVLTKEIEACKKEKCIGNIFNTDNFNLGDVKLDSFQFVATDVFNATVACIVSIFGVGLPIGQRAAKKFPSLPWALRNAGEINTAAYSLWLDDDQSGHFLFGGVNKAKYKGPLVTFPIPVTAPSDDEPDKLLVVMEGFGTTNDGSSTTIEFYPRSVLLDTGTIKSRLTEDMALHVLATLGGVISETYGAMVPCEENPKYTLDFTFGELTINVPLAYFTSKSNNVVGIDGVSYCSLFYDPKATYIILGDDFLKGAYVVFDHENMEISLAQYNPDGEKDDIHEIVKNVPGATKAKIIPMKFDPFDGTAMGDPTSVPAGLKTVSMTLLSSRTASASMIGDPMSTNAGLSIAQPTETGDAKGSDDEDSAAVRSLPGKVMSIVVFGIITGLLCIW

SEQ ID NO: 14959 - protein, 379 aa, Prochlorococcus marinus str. MIT 9312
MKKIKIPKNRTRKLKTFSLGKKPFELLSLNSHNKKLIDLCSNDYFGLSRDKDLIKAAYEISLLEGIGSGSSRFITGSRPIHELLETELAEWLDQQKVLLFPSGFQANIAAIQALANRNSIVIADKLIHNSLLVGVKAAQAKLVRFSHNNLKDLEEKIIKFNPKKNSILVVVESLYSMEGSIAPLREISEICKKNSVQLLVDEAHAIGILGPEGRGLSFNLRSDITMITGTFGKAFGSGGAFIASNSEIGEYLIQTSGAFRYTTALAPSLAAGALEGLKKILKNKEWGNDLLSSAKVWKDEIIRNFSFPVQGDAHILSIIVGQEENAIYLQKYLEKNGFLAVAIRPPTVPVGQSRIRITIRRNLDLNLLKHFIAVLKEFK

SEQ ID NO: 14960 - protein, 468 aa, Synechocystis sp. PCC 6803
MNPSSSPSQSTANVKFVLLISGVAALGGFLFGFDTAVINGAVAALQKHFQTDSLLTGLSVSLALLGSALGAFGAGPIADRHGRIKTMILAAVLFTLSSIGSGLPFTIWDFIFWRVLGGIGVGAASVIAPAYIAEVSPAHLRGRLGSLQQLAIVSGIFIALLSNWFIALMAGGSAQNPWLFGAAAWRWMFWTELIPALLYGVCAFLIPESPRYLVAQGQGEKAAAILWKVEGGDVPSRIEEIQATVSLDHKPRFSDLLSRRGGLLPIVWIGMGLSALQQFVGINVIFYYSSVLWRSVGFTEEKSLLITVITGFINILTTLVAIAFVDKFGRKPLLLMGSIGMTITLGILSVVFGGATVVNGQPTLTGAAGIIALVTANLYVFSFGFSWGPIVWVLLGEMFNNKIRAAALSVAAGVQWIANFIISTTFPPLLDTVGLGPAYGLYATSAAISIFFIWFFVKETKGKTLEQM

SEQ ID NO: 14961 - protein, 390 aa, Triticum aestivum
NKFVQKSRLVPVRNSRDIVDPRVRVSMDSRYNRPRGRGNGYYGFGSESQDGTIELNRGPRSGRFKNQKAFGHTVTIAVKGHTLPSSENKNASDIPDKAQFNLEDFPVQYDDAKFFVIKSYSEDDIHKSIKYNVWASTTNGNKKLDAAYQEAQAKGSSCPIFLFFSVNTSGQFVGVAEMTGPVDFEKTLEYWQQDKWNGSFSVKWHIVKDVPNNILKHIVLENNEGKPVTNSRDTQDINLEQGIQMLKIFKEHVSKTSILEDFAFYENRQKLMQEKRIKQQQIQKQVWDSRAPNPVAGEKQQEVANGKPKVSVPNGVNGEKQQDAVNGKPKSPVANGVNGDAKVPAEKAAAPPAVTYAAKVAQTAAAEKKPVATEKKPVVANGAVKTGVAA

SEQ ID NO: 14962 - protein, 381 aa, Burkholderia fungorum LB400
MMLVEIVGGSMFGSLALVADGLHMSTHAGAMLIAALAYTYARKHATDSRFVFGTGKLGDLAGFTSAIVLAMIAVLIGYEAVPRFLSPVPIYFGEAIPIAAVGLLVNLASVWLLSGGDHGHSHGHSHGHDEHAREDEMKKIFAQSGVFAVSIFEDGVPPVFRITPATANSRLDLSSLSVKTVRIDGTQQVFAFADCGGYLESKEDVPEPHAFKAIVRMPDGEHEVEFEEHGHDTHDAATRDHNIRSAYIHVMADAAVSVLAIIGLVLARTFGWMWMDPLAGVIGALVIANWSYGLMRDTGAILLDMSPDRRVAENVRHAIEDRGDKVVDLHLWRVGPGHISAVVSVATSESQRDSRFYHAVLGRFKELSHVTVEVQVTPMVA

SEQ ID NO: 14963 - protein, 56 aa, Fragaria vesca subsp. vesca
RATVRDPTNAKKVKHLLDLPKAATHLTLWKADLADEGSFDEAIKGCTGVFHVATPM

SEQ ID NO: 14964 - protein, 242 aa, Vitis vinifera
MATNQEAGRHQEVGHKSLLQSDALYQYILETSVYPREPESMKELRELTAQHPWNIMTTSADEGQFLNMLLKLINAKNTMEIGVYTGYSLLATALALPDDGKILAMDINKENYELGLPVIQKAGVAHKIDFKEGPALPVLDQMIEDGKYHGSFDFIFVDADKDNYLNYHKRLIDLVKVGGIIGYDNTLWNGSVVAPPDAPLRKYVRYYRDFVLELNKALAADPRIEICMLPVGDGITLCRRLS

SEQ ID NO: 14965 - protein, 287 aa, Glycine max
MAKDVEVAERGSFSGKDYQDPPPAPLIDAEELTKWSFYRALIAEFIATLLFLYITVLTVIGYNHQTDLKENGEICGGVGILGIAWAFGGMIFILVYCTAGISGGHINPAVTFGLFLARKVSLIRAIMYMVAQCLGAICGVGLVKAFQKSYFNKYGGGANSLAAGYSTGTGLGAEIIGTFVLVYTVFSATDPKRNARDSHVPVLAPLPIGFAVFMVHLATIPVTGTGINPARSLGAAVIYNQDKPWDDHWIFWVGPFIGAAIAAFYHQFILRAGAAKALGSFRSNPHN

SEQ ID NO: 14966 - protein, 451 aa, Desulfitobacterium hafniense DCB-2
MSISTQFSVPQRMERLPLTSYQKKIFYIIATAWFFDSMDLGMLTFVLGSIKTDLGLTTVQAGLLSSFSFLGMFFGAASAGMAADKFGRKIVFQTSMILWGAASIACAFTQNVEQLALARFFLGLGMGMEFPIGQSLISEFIPAKNRGRYIALLEGFWPIGFIAAGILSYFLLPIGGWRLVFLCEGIPAIFVLIIRRMVPESPRWLADTNQDEKADVVMTAFEKNVEKAYGKELPPPIKDDNLVIGKHEKKFSFLQLWAPGYKKRTIMVWLLWFFALLGYYGLTTWLSAFLQEAGYSVTKSVYYTIMISLAGIPGFFSAAYFIEKNGRKPTLIVVLIGCAVFAYLYGTASSLQTLIGFGLGMQFFLFAMWSSLYAYTPELYPTRARATGTGFASSVGRFGSLLGPYIVAVVLPTLGNSGVFALGAACFIAAALSVAILGEETKGRVLEEISA

SEQ ID NO: 14967 - protein, 159 aa, Brassica napus
  misc_feature (24)..(24): Xaa can be any naturally occurring amino acid
  misc_feature (66)..(66): Xaa can be any naturally occurring amino acid
  unsure (1)..(159): unsure at all Xaa locations
VFGSWRNESKPQMYMQTHIEINVXMRSILLDWLIDVHVKFDLSPETLYLTINIIDLFLSLFTIPRXELQLLGVSALLIASKYEEIWPPQVNDLLYITDNSYQSMQILLMEKTIMGSLEWYLTVPTQYVFLARSIKAANPDPEMENKVHFLAELGLMHTL

SEQ ID NO: 14968 - protein, 105 aa, Methylovorus sp. SS1
MSIRPLYDKVVVKRIEAQRTTASGIVIPDTASEKPEQGEVIATGNGRRLQDGTQVPLEVKVGDQVLFGKYAGQTVKLHGEELLVLREEDILGVVEASDAKLKKVA

SEQ ID NO: 14969 - protein, 455 aa, Methylobacillus flagellatus KT
MLNRRDFFRLGAAAVAAGTVSKVAMAALPEIASMGSAETQVPRAPGNGRPFHPVVTLNGWSLPWRMRDGVKEFHLVAEPVVREIAPGMQAHLWGYNGQSPGPTIEVVEGDRVRIYVTNRLPEATSVHWHGQRLPNGMDGVSGLTQPAIPAGKTFVYEFEAKRAGTFMYHPHADEMVQMAMGMMGFWVTHPKNPDFMRVDRDYVFLINAYDIDPGSYTPKVATMLEHNLWTFNSRVFPGIAPMVAGLNERVRIRVGNLSMTNHPIHLHGHEFTVTGTDGGWVPPAARWPEVTTDVAVGQMRAVEFVADAPGDWAFHCHKSHHTMNAMGHQVPTMIGVEQKGLVDKITQLLPDYMPMGESGMAEMGEMDMPLPENTLPMMSGKGQFGDMHMGGMFTAVKVRAGLKAGDYSDPGDYPNPPGTVAHEVDASGVPVSRAPAASGEGHTLHIRKPGGHEGH

SEQ ID NO: 14970 - protein, 262 aa, Zea mays
  misc_feature (106)..(106): Xaa can be any naturally occurring amino acid
  unsure (1)..(262): unsure at all Xaa locations
MKRPRGASPPLAAMTNPNDDGYGVVGMEADADADADEEMMACGGGGEKKRRLSSEQVRALERSFEVENKLEPERKARLARDLGLQPRQVAVWFQNRRARWKTKQLXERDYSALRQSYDALPLNHDALRRDKDALLAEIKELKAKLGDEEAAASFTSVKAEPAASDGPPPVGVGSSESDSSAVLNDADPPVAEAPVPEVRGTLLDAPGAVAANHGGVFFHGSFLKVEEDETGLLDDDEPSGGFFSVEQPPPMAWWTEPTEHWN

SEQ ID NO: 14971 - protein, 540 aa, Methylovorus sp. SS1
MAAKEVKFHDHARTRIVQGVNVLADAVKVTLAPRAVMCLIERSFGAPVITKDGVSVAKEIELQDKFENMGAQMVKQVASKTADIAGDGTTTATVLAQAIVQEGMKHVVAGVNPMDLKRGIDKAVATVVDELHKLSKPITTNKEIAQVGSISANSDHPIGKIIADAMDKVGKEGVITVEDGKSLDNELDVVEGMQFDRGYLSPYFINNPEKQTVEFDDPLILLYDKKISSIRDLLPTLENVAKAGKPLLIIAEDLEGEALATLVVNSMRGILKVAAVKAPGFGDRRKAMLEDIAILTGATVISEETGKQLEKASLEDLGRAKRVELQKENTIIIDGAGEQKAIEARVKAIQAQIDESTSDYDREKLQERVAKLSGGVAVIKVGAATEVEMKEKKDRVDDALHATRAAVEEGIVPGGGVALLRARSRIVNLKGDNGDQDAGIRIVLRAIEAPLRAIAANAGDEPSVVINKVLAGSGNFGYNAATGEYADLVETGVVDPTKVTRTALQNAASVASLILTTDASIAELPKEEKAAVPAMPDMGY

SEQ ID NO: 14972 - protein, 440 aa, Magnaporthe grisea 70-15
MEGMKEPKPQCGGNKEKGEYDLPLHVAALFLVMAASIFGCGFPVVAKKVKWMKIPPKVFFACKHFGTGVLIATAFVHLLPTAFQSLNNPCLPDLFTENYPPMPGVIMMGSMFALFVVEMWINSKLGGHSHGGVMGYEEHDSHAHAHGPMVAAAPPPRPPRYNASSFEADDIEFEKRMAQQMYEQEAKINPFADPGARRQNPNEPPNVGDSEMPAWFVVFYEQYVRQRLEMMNMIRASERAQGQNTLAAPVGEKGPNNAVAVQDSPFIDEEGQQVDPAVYRKMSLNITMLEGGILFHSVFVGITISLTIDGFIILVIAILFHQMFEGLGLGSRIAAVPYPKNSIRPWLLIVAFGTTAPIGQAIGLAVRDSYDPDSAIGLITVGVFNAISSGLLIYAALVDLLAEDFLSEEAQKTLTKSLRIQAFSWVLLGAAGMSIVGAFA

SEQ ID NO: 14973 - protein, 197 aa, Bacillus thuringiensis serovar konkukian str. 97-27
MDTNITWHTASVSKDERRVKNGHHSFVIWFTGLSASGKSTVANAVARKLFEKNIGNYVLDGDNIRHGLNKDLGFSESDRMENIRRIGEVAKLFVDQGAVVLTAFISPFRVDRKQVRDLLAVDEFIEVFVKCPIEECEKRDPKGLYKKARKGDIKDFTGIDSPYEEPEKAELIVETNKYSIEECAEQIVKYLQERSFI

SEQ ID NO: 14974 - protein, 461 aa, Triticum aestivum
FAPPAASKLTVAAHRLKLSPHGRAQVMRALRQSAPALAPQPPPLLPADEFSLDAIILLQRSMLEKQWQLPFEEEDDDDGGGDGHHVEAIGSAEDDDGKGRSSSVVVARSGVSARQRRMSGRRRGRSKKGSGAVHLSISPELLQSRNRIYLRGTVSKELLTQKQVVHLSKKIKDGIWLQQQRSKLKEKLGNEPSYKQMAQSLRISTPELRSRMRESFLAREVLTMSNIRLVISIAQKYDKLGVELSDLIQGGLIGLLRGIEKFDASRGFRISTYVYWWIRQGVSRALADNSKTFRLPTYLHERLIAIRGAKYALEDQGVSPTTQNIAKLLNISEKKVHNATEAVNKALSLDQQAFPSLNGLPGDTLHSYIEDQNVANDPWHGFEEWYLKEEVNKLLNSNLTERERDIIQLYHGIGKQCHTWEDISRQFGLSRERVRQVGLIAMEKLKQRARRKKLDALLQDY

SEQ ID NO: 14975 - protein, 149 aa, Haloarcula marismortui
MTDLSAQKRLAADVLDVGKNRVWFNPERQGDIADAITREDVRELVDEGAIQAKDKKGNSRGRARERQKKRAYGHQKGAGSRKGKAGARQNSKEDWESRIRAQRTKLRELRDEGTLSSSQYRDLYDKAGGGEFDSVADLERYIDANHGDA

SEQ ID NO: 14976 - protein, 334 aa, Porphyromonas gingivalis W83
MSYLTEEKLTIVGAAGMIGSNMAQTAAMMRLTPNLCLYDPFAVGLEGVAEEIRHCGFEGLNLTFTSDIKEALTDAKYIVSSGGAPRKEGMTREDLLKGNAEIAAQLGKDIKSYCPDCKHVIIIFNPADITGLVTLIYSGLKPSQVTTLAGLDSTRLQSELAKHFGIKQSLVTNTRTYGGHGEQMAVFASTAKVNGTPLTDLIGTDKLTNEQWAELKQRVVKGGANIIKLRGRSSFQSPSYVSIEMIRAAMGGEAFRWPAGCYVNVPGFEHIMMAMETTITKDGVKYSDINQLGNEAERAALKESYSHLAKLRDEVIAMGIIPAIADWKTVNPNL

SEQ ID NO: 14977 - protein, 352 aa, Glycine max
MEKYELVKDIGSGNFGVARLMRHKDTKELVAMKYIERGHKIDENVAREIINHRSLRHPNIIRFKEVVLTPTHLGIVMEYAAGGELFERICSAGRFSEDEARYFFQQLISGVSYCHSMQICHRDLKLENTLLDGSPAPRLKICDFGYSKSSLLHSRPKSTVGTPAYIAPEVLSRREYDGKLADVWSCGVTLYVMLVGAYPFEDQEDPKNFRKTINRIMAVQYKIPDYVHISQDCRHLLSRIFVANPARRITIKEIKSHPWFVKNLPRELTEVAQAAYYRKENPTFSLQSIEDIMNIVEEAKAPPPASRSIGGFGWGGEEEEEDETKEAVAETEEDEYEKRVKEAQASGEFHVS

SEQ ID NO: 14978 - protein, 490 aa, Triticum aestivum
  misc_feature (283)..(283): Xaa can be any naturally occurring amino acid
  unsure (1)..(490): unsure at all Xaa locations
MSAVAPPLCTWIVAACLSATCVADDEGKQRNYIGGGLFGTRRHLAARRRGGARSGVPIAVSFHPERGGVENNKSETKQRRVVVTGMGVVTPLGHEPDEFYNNLLQGVSGISEIEAFDCSSYPTRIAGEIKSFSTDGWVAPKLAKRMDKFMQYLIVAGKKAWENGGVTEDIMNEWDKSRCGVLMGSGMGGMKGFSDAIEALRVSYRKMNPFCVPFATTNMGSAILAMDLGWMGPNYSISTACATRNFCILSAANHIMRGETDLMLCGGSDAPIIPIALPGLVAXCELFSQRNSDPTKASRPWDMDRDGFVMGEGAGVLLLEELEHAKQRGAEIYAEFLGGSFTCDAYHMTEPHPEGKGVILCVENALADAGVTRQDINYVNAHATSTQLGDLKEFEALCRCFGQNPQLRVNSTKSMTGHLLGAAGGIEAVAAIQAIRTGWIHPNINLDNPEKNVDVSLLVGSQKERCDVKVALSNSFGFGGHNSSILFAPF

SEQ ID NO: 14979 - protein, 141 aa, Legionella pneumophila str. Paris
MAKELTLSIIKPDAVAKSVIGEIYTRFEKAGLDIVAAKMIQLSREQAESFYDIHRARPFFKDLVDFMISGPVMIQVLKGDNAVAKNREIMGATNPKEAAPGTIRADFADSIDANAVHGSDSLENAAREIAFFFEPHELCNR

SEQ ID NO: 14980 - protein, 57 aa, Fragaria vesca subsp. vesca
YGLFWSISPKQPGVLEWGDGYYNGDIKTRKTVQAIELDADQMGLQRSEHLRELYESL

SEQ ID NO: 14981 - protein, 188 aa, Gibberella fujikuroi
MKVVLVSGGVISGVGKGIIASSAGLLLKTLGLRVTAIKTDPYINTDAGLLNPLEHGECFVLDDGGETDLDLGNYERYLGIQLSRDSNITTGKIYQQVIEKERRGDYLGKTVQVVPHITDAIQNWIERVAKIPVDASGESPDVCIIELGGTIGDLESGPFVEALSQLRHRLGRDNFLSISVSYVPIING

SEQ ID NO: 14982 - protein, 628 aa, Mesorhizobium sp. BNC1
MPIHQAPDRYKAGEGGILGQAREGKEAMALTSGTEERKSRRSLRPLRNLLPYVRRYRGLALGAGFFLVLAALATLLLPQAVRRVIDHGFSDADAAFITIYFSGLLLVAAILAVASACRYYFVVALGERVVADLRRDVFAHVTRLSPAFFDRAQSGEIISRLTADATQIKSGVGASASQAARNTLMGLGAVAMMVVTSPRLSAFAVGAIPIIVLPLVAFGRSVRRRSRSAQDTLAEATAFASERIGAVRVLQAFNNEEGAARRFGGAVDAAFEAARSSIFARAVLTFFVILGASTSVVAVLWVGSRDVLAGTMTAGTLVQFVLYAVLAAGALSALSEVGGELAQAAGAAERMSELLAEEPAIAAPADPIALPVPARGAVSFRDISFAYPARPGRSALHELSFDVAPGETVAIVGPSGAGKSTIFSLLLRYYDPDRGAVLVDGVDIRKADPQAVRERIAIVPQDVTVFAATAEENIAFGRPGATREQVEAAARAALAHDFIMALEKGYDTQVGERGVMLSGGQRQRLAIARAILRDAPILLLDEATSALDAESETLVQEALEHLMRGRTTIVIAHRLATILKADRILVLDDGRIVEEGCHAELVSRGGIYARLASLQFEAGADVFKGAAE

SEQ ID NO: 14983 - protein, 285 aa, Andrographis paniculata
ISNLTCADFLRAPGVQTPVIVRFSTVIHERGSPETLRDPRGFAVKFYTREGNFDLVGNNFPVFFIRDGIKFPDMVHSLKPNPKSHIQENWRILDFFSHHPESLHMFTFLFDDIGIPQDYRHMDGSGVNTYTLINTAGKVHYVKFHWRPTCGVKSLLEEEAIRVGGANHSHATQDLYDSIAAGNYPEWKLFIQTIDPVHEDRFDFDPLDVTKTWPEDILPLQPVGRMVLNKNIDNFFAENEQLAFCPGIIVPGIYYSDDKLLQTRVFSYSDTQRHRLGPNYLLLPA

SEQ ID NO: 14984 - protein, 392 aa, Glycine max
MIGSPITPQGVIERKRGIGKVEVEVKNMQSDKDREEDMDRLSDLPDFVLLHIMKFMSMKHAVQTCVLSKRWKELWKRLTNLALHSSDFADLAHFSKFLSWVLSNRDSSISLHSLDLRRKGCIDHELLDMIMGYAVSHDVQQLAIEVNLNVKFGFKLHPSIFSCKSLTFLKLSIWAVPWMTELPSSLPLPALKSLHLEHVTLTAGEGDCAEPFSTCHVLNTLVLDRCNLHHGAKFLCICNSNLSTLTIGSTTQETPYKFVLSTPNLRSLSVMRDPIHQLSACDLSFLEQVNIDVEAYFNAHFQRTHLALISLLQVLADYVKTMILSSSTLKILNGLSTSGSMITQIPCFVQLKSLKLKMKSSSSISDEGVSRIVEYLLKKCPLAKVDVINCRE

SEQ ID NO: 14985 - protein, 56 aa, Fragaria nubicola
RATVRDPANLKKVRHLLELPQAATRLTLWKADLDVEGSFNEAITGCTGVFHVATPM

SEQ ID NO: 14986 - protein, 204 aa, Glycine max
MPKKRKSIATSLDEVDRTLYASFCTAANSLSQLYTHSMNHQKLSFNAGERHALEKLYQWIFRQQEGGSRVGTVDVLNYIQNELDYCGEEPSMSPRAPLQHQSQAALHVPSFPVTSASSGQTIAAQGLRSDHCENQSKNSVFSNALSSPVRRSLQHYQIGEGGCYTNGLSMGNGNRNTEPGFLNQQSRDSNAVSSNDSAMDMHAD

SEQ ID NO: 14987 - protein, 630 aa, Candida albicans SC5314
MLKVARLQIRFNSSTAASAAAVAAKTAEVRTRTVKTPVGIKAAIESLKPKATRLSMDGPVECALSGFSLLNSPQFNKGSAFSKEERESFDLTGLLPSQVNSLDEQVERAYRQFSYLKTPLAKNDFCTSMRLQNKVLYYELVRRHIREMLPIIYTPTEGDAIASYSDRFRKPEGCFLDINDPDGIDKRLSAYGEDKDIDYIVVSDGEGILGIGDQGVGAIRIAIAKLGLMTLCGGIHPARVLPIALDVGTNNDRLLNDELYMGNKFPRVRDEKYWDFVDKVIQAIKKRFPSSVLHYEDFGVSTGRDLLYKYREELPSFNDDIQGTGAVVMASITAALKFSKRDLKDIQVLVYGAGSAGLGIADQITNHLVSHGATEEQARARIHCMDRYGLITNESTNASPAQLKYADPASEWDGVDTKSLLACVNKIKPTVLVGCSTQPGAFTEEIVREMYKHNPQPIIFPLSNPTRLHEAVPSDLMKWTDNNALIATGSPFEPVDGYYISENNNCFTFPGIGLGAVLSRCTTISDTMISAAVDRLASMSPKMENPKNGLLPRLEEIDEVSAHVATAVILQSLKEGTARVESEEKPDGGFVEVPRDYEGCLKWVQSQMWKPVYRPYVKVEYVSEIHTYQY

SEQ ID NO: 14988 - protein, 293 aa, Zea mays
IDEHVQREIMNHRSLKHPNIIRFKEVISQTSWKGNVLVVLTPTHLAIVMEYAAGGELFERICSAGRFSEDEQVCHRDLKLENTLLDGSVAPRLKICDFGYSKSSVLHSQPKSTVGTPAYIAPEVLSRKEYDGKVADVWSCGVTLYVMLVGAYPFEDPDDPKNFRKTITRILSVQYSIPDYVRVTMECGHLLSRIFVGNPEQRITIPEIKKHPWFLKNLPIEMTDEYQQSMQLADMNTPGQSLEEVMAIIQEARKPGDAMNLAGQLPCLGSVDLDDIDVDDIDVEDSGDFVCAL

SEQ ID NO: 14989 - protein, 464 aa, Glycine max
MGVVEGLLALALVLSACVMCNGGSSSPFIRKVEKTVDMPLDSDVFAVPPGYNAPQQVHITQGDLVGKAVIVSWVTVDEPGSSEVHYWSENSDKKKIAEGKLVTYRFFNYSSGFIHHTTIRNLEYKTKYYYEVGLGNTTRQFWFVTPPEIGPDVPYTFGLIGDLGQSFDSNKTLSHYELNPRKGQTVLFVGDLSYADNYPNHDNIRWDSWGRFTERSVAYQPWIWTAGNHENHFAPEIGETVPFKPYTHRYHVPYKASQSTSPFWYSIKRASAHIIVLASYSAYGKYTPQYKWLEKELPKVNRTETPWLIVLMHSPWYNSYNYHYMEGETMRVMYEPWFVQYKVDVVFAGHVHAYERSERVSNVAYNIVNGLCAPVNDKSAPVYITIGDGGTLEGLATNMTEPQPKYSAFREASFGHAIFDITNRTHAHYSWHRNQDGVAVEADSLWSFNRYWHPVDDSTAHVSH

SEQ ID NO: 14990 - protein, 647 aa, Flaveria pringlei
MMSLNSSSVVKSSISGVSWTQSQSVRLSVRRPMVVAMVNSNGRPERSVGVSVDGAVKDVNAPVAVEVADSESKKPTAVVGGGVEDVYGEDSATEDHFITPWSVSVASGYSLLRDPHHNKGLAFTEKERDAHYLRGLLPPVVVNHDLQVKKMMHNIRQYEVPLQRYQAMMDLQERNERLFYKLLIENIEELLPIVYTPTVGEACQKYGTIFKNPQGLYISLKDKGKVLEILKNWPQKKIQVIVVTDGERILGLGDLGCQGMGIPVGKLSLYTALGGIRPSACLPITIDVGTNNEKMLNDEFYIGLRQRRASGKEYAELMNEFMSAVKQNYGEKVLIQFEDFANHNAFDLLEKYRTTHLVFNDDIQGTASVVLAGLISALKLVGGSLADHKFLFLGAGEAGTGIAELIALEISKQTNAPLEETRKKIWLVDSKGLIVRSRLDSLQHFKKPWAHDHEPVNKFLDAVKAIKPTVLIGSSGAGQTFTKEVVEAMSSFNEKPIILALSNPTSQSECTAEQAYTWSEGRTIFASGSPFAPVEYNGKVYVSGQSNNAYIFPGFGLGLIISGAIRVHDEMLLAASEALAEQVTQEHFDNGLIYPPFTNIRKISAHIAAKVAAKAYELGLASRLPQPENLVAYAESCMYSPKYRNYR

SEQ ID NO: 14991 - protein, 360 aa, Zea mays
  misc_feature (52)..(52): Xaa can be any naturally occurring amino acid
  unsure (1)..(360): unsure at all Xaa locations
MSMAQVCCDSAVAATAAPVAGPEAEARARARAERRRRAAEAGRWKHAAAAGXAAAADATRKRSLEAGELLVARKHGAASVAGRRREMEDAVSVRESFAAEGEADGGRRRDFYGVFDGHGCSHVAEACRDRMHDLLAEELAAAVAADGSAATWTAAMERSFARMDAEAMSAGGSAAAARSSTCRCDPHKCDHVGSTAVVAVVEERRVVVANCGDSRALLCRGGGAPPLPLSSDHKPDRPDELERIEAAGGRVIFWEGARVLGVLAMSRAIGDGYLKPYVSSVPEVTLTDRSDADECLILASDGLWDVVSNEAACEVARACLRRGRARWCAEAAALLTKLALARRSSDNVSVVVVDLRKRDR

SEQ ID NO: 14992 - protein, 931 aa, Geobacter metallireducens GS-15
MAERELFWKADDQAVRLNELMTLDPALKDIPLRRDVRSLGRLLGEVIKEQAGPAAYDAEEELRRLAISHRALADQEEAVLDSPAEQELQERAVRIVGTMTVAETYQIVKAFGTFFELTNLAETNHRMRRRRATQLSPAAPVKPGSLLGTLMRMRDGGITAEKALDLLRQVEIMPVFTAHPTEVARRVVLFKRRRIARELAELDLLPLAGDEADRRQEAIFAEITALWQTDEVRRRPQGVTDEIRMGLDHYPGSLMAPLAGLYEEMAEDFRQVYGADLPDAAFPTVIRFGSWIGGDRDGNPNVTVGTTRHALESARQMILARYLDGVEELKELLTPSTNRVTVSPQLREALERYVAALAGAAAETGIYPECEPYRKFLRCVHHRLMQTRDGEDHPDAYPDAGAFAADLMLVRTSLAQGEGERLARRYVDPLLRQVETFGFHLHALDIRQHARIHARAVAELAAGAGSCEEGVHPVPPPPSAETTELLDTLRAVAKLKQRYSPKAIRSYVISGASSARDTLSLIWLMELCGIRVAASPDGKDPGVMPVPLFESIEDLRNAPGICRALWCSPEYGPFLDSWGRRQEVMLGYSDSNKDGGMFTSTWEIHKAHRDLQRVAQECGVRLRLFHGRGGTVGRGGGPTHRAIIAQPADGFSGALKITEQGEVINWKYSDPSLAKRNLELMVAASLETLARAGLVETRPEPAWEEALEEMSGSAFTFYRERITGNPDILPYFEQATPVLEFELAKIGSRPARRSRSRDIAELRAIPWGFGWIQSRHVIPGWFGVGFALDRFAVGGEGRLEFLRSMMGRFPFFFDLIRNVELALTKVDLPLARLYASLVTDAGIRERVFAMIVEEYQRTRRMVLAVTGQARLLEKNPALTASLRLRNPYIDPLSMIQIELLRRKRAGEESDELNYVLAATINGIAAGLRNTG

SEQ ID NO: 14993 - protein, 584 aa, Streptomyces coelicolor A3(2)
MKVHKYDTVIVGAGGAGMRAAIESTKRSRTAVLTKLYPTRSHTGAAQGGMAAALANVEEDNWEWHTFDTVKGGDYLVDQDAAEILAKEAIDSVLDLEKMGLPFNRTPDGTIDQRRFGGHSRNHGEAPVRRSCYAADRTGHMILQTLYQNCVKEGVEFFNEFYVLDQLITEVDGVKKSAGVVAYELATGEIHVFQAKSVIYASGGTGKFFKVTSNAHTLTGDGQAAVYRRGLPLEDMEFFQFHPTGIWRMGILLTEGARGEGGILRNKDGERFMEKYAPVMKDLASRDVVSRSIYTEIREGRGCGPEGDHVYLDLTHLPPEQLDAKLPDITEFARTYLGIEPYTDPIPIQPTAHYAMGGIPTNVEGEVLADNTTVVPGLYAAGEVACVSVHGANRLGTNSLLDINVFGRRAGIAAAEYAQKADFVELPEDPETLVVEQIERLRSSTGTERVATIRRELQECMDANVMVFRTEQTIKTAVEKIAELRARYKNVSIQDKGRRFNTDLLEAVELGNLLDLAEVMAVSALARKESRGGHYREDFPNRDDVNFMRHTMAYREVGDDGAESIRLDYKPVVQTRYQPMERKY

SEQ ID NO: 14994 - protein, 359 aa, Pisum sativum
MSHFKSKYHDELIANAAYIGTPGKGILAADESTGTIGKRLSSINVENVESNRQALRELLFTASWLFLQYLSGVILFEETLYQKTAAGKPFVDVLNEAGVLPGIKVDKGTVELAGTDGETTTQGLDGLGARCRKYYEAGARFAKWRAVLKIGANEPSEHSIHENAYGLARYAVICQENGLVPIVEPEILVDGSHDILKCAAITERVLAATYKALSDHHVILEGTLLKPNMVTPGSDAPKVAPEVIAEHTVRALQRTVPAAVPAVVFLSGGQSEEEASVNLNAINQIKGKKPWTLSFSFGRALQQSTLKAWGGKTENVKAAQDALLTRAKANSEATLGTYKGASNLGAGASESLHVKDYKY

SEQ ID NO: 14995 - protein, 357 aa, Pisum sativum
MSAFVGKYADELIKNAKYIATPGKGILAADESTGTIGKRLASINVENIEANRQALRELLFTSPNALQYLSGVILFEETLYQKSSEGKPFVEILQENNVIPGIKVDKGVVELAGTDGETTTQGFDSLGARCQQYYKAGARFAKWRAVLKIGPNEPSELSIQQNAQGLARYAIICQENGLVLFVEPEILTDGSHDIAKCAAVTETVLAACYKALNDQHVLLEGTLLKPNMVTPGSDSPKVSPEVIGEYTVNALRRTVPAAVPGIVFLSGGQSEEQATLNLNAMNKFDVVKPWTLSFSFGRALQQSTLKTWSGKKENVGKAQDVFLARCKANSEATLGKYGGGSGTGLASESLHVKDYKY

SEQ ID NO: 14996 - protein, 784 aa, Bacillus thuringiensis serovar konkukian str. 97-27
MKGVILAGGKGRRLRPLTCNTPKPMLPLLEKPVLEYNIELLRQHGIREIAITVQYMSTAIKQYFGDGSKWGVNLYYFEDSPPLGTAGSIKQAEKFLDETFVVISGDALTDFQLSKGITFHEQQKRMVTMFVKEVENPLSFGLVVMNKEQEVTRYIEKPSWNEVVSNIVNTGIYIMEPEIFSYIPPREFFDFSQDVFPLLANKNALFAYLSEGYWLDIGTFDQYRQAQFDLLTKKLQVPIPYTEVLPMVWMGEGVTIGKGTKIHGPSFIGEGAKIGAGAVIEPYSIIGKNSIVSSYSHLQKSIVFANAHIGQYCELLETTIGEHTMVEDDVTLFQKSIVADHCHIGKSTVIKQKGKLWPYKAIDSYSVVGSAGVQESEKSAGWLQKSRIVGRGNVEITPQFIVKVAMAYGSLFTKGESILIGSQEHIETTSYKNLFLHAIHGIGIHTMECKEMNESLFQYSIQDLQCAGGVFIQVENEKEVIIKLYGQDGAQLTYKQQKAIEQVYMSESFYYVCEKEMGRNKLVHVSLHDYIEAVLERIDIEKIQKQKFHLLINKRNDMLQHLLMLFLQRLGCTVTWIYAGEQKDHVKALMKSSKANMALMFSEQGNYFELYDNHSNIYQGTDFEEVDIPDLLLESAGNIYPMSLKLGECYLLFYTQDEKKSFQARWKRDILYRIGKLFELIALQGKTFLSIVEQSPPLYLLCDEVVCPWNEKGKVMRKLLADMERKEEGIFEGVQFKYTEKEWSYIVSDTKQPKFLVYSHARNPVIARENMKNLIEKIRQYQKV

SEQ ID NO: 14997 - protein, 94 aa, Bacillus cereus ATCC 14579
MLKPLGDRVVIELVQAEEKTASGIVLPDTAKEKPQEGKVVAVGTGRVLENGERVALEVAAGDLIIFSKYAGTEVKYEGTDYLILRESDILAVIG

SEQ ID NO: 14998 - protein, 488 aa, Arabidopsis thaliana
MEKEFDSKLVLQGNSSNGANVSRSKSFSFKAPQENFTSHDFEFGKIYGVGSYSKVVRAKKKETGTVYALKIMDKKFITKENKTAYVKLERIVLDQLEHPGIIKLYFTFQDTSSLYMALESCEGGELFDQITRKGRLSEDEARFYTAEVVDALEYIHSMGLIHRDIKPENLLLTSDGHIKIADFGSVKPMQDSQITVLPNAASDDKACTFVGTAAYVPPEVLNSSPATFGNDLWALGCTLYQMLSGTSPFKDASEWLIFQRIIARDIKFPNHFSEAARDLIDRLLDTEPSRRPGAGSEGYVALKRHPFFNGVDWKNLRSQTPPKLAPDPASQTASPERDDTHGSPWNLTHIGDSLATQNEGHSAPPTSSESSGSITRLASIDSFDSRWQQFLEPGESVLMISAVKKLQKITSKKVQLILTNKPKLIYVDPSKLVVKGNIIWSDNSNDLNVVVTSPSHFKICTPKKVLSFEDAKQRASVWKKAIETLQNR

SEQ ID NO: 14999 - protein, 416 aa, Nostoc sp. PCC 7120
MTDYNRKRVVVTGVGAITPIGNTASEYWEGLLSGRNGIDYITHFDASSHDCRIAGEVKNFDPHEYLERKEAKRMDRFSQFAVAAAKQALVDSQLVINELNAEQVGVIIGSGVGGLKVMEDQQTIYLNRGPDRCSPFMIPMMIANMAAGLTAIHTGAKGPNNCTVTACAAGSNAIGDAFRLVQGGYAQAMICGGAEAAITPLGVAGFAAARALSTRNDDPAHACRPFDRDRDGFVMGEGAGILILEELQHAISRGARIYAEIVGYGMTCDAYHMTSPVPGGEGASRAIQLALKDANITPEQVSYINAHGTSTSANDTTETAAIKRALGDHAYKIAVSSTKSMTGHLLGGSGGIEAVATVLATAHDQIPPTINIENLDPDCDLDYVPDSSRAHKVQVALSNSFGFGGHNVTLAFKKYV

SEQ ID NO: 15000 - protein, 580 aa, Fusarium sp. IFO 7772
MKVVLVSGGVISGVGKGIIASSAGLLLKTLGLRVTAIKTDPYINTDAGLLNPLEHGECFVLDDGGETDLDLGNYERYLGIQLSRDSNITTGKIYKQVIEKERRGDYLGKTVQVVPHITDAIQDWIERVAKIPVDASGEAPDVCIIELGGTIGDLESGPFVEALSQLRHRLGRENFLSISVSYVPIINGEEKTKPTQHAIRQVRSAGLIPDVIACRCERELDQATITKIARSCQVEDEQVIGVRNMDTIYQVPLLLEQEGLLKLLRKGLALENCQVTPPMAQKGQALWDLWKKTVVPDRHLEPVNIVLVGKYVSLDDSYLSVHKALEHSAMRCKRKLNLVSVDSEHLEPEMQEKDPRKYHEAWAHVVRAQGIIVPGGFGTRGIRGMVEVAKWARERKLPYLGICLGMQTAVIEYARNVMGLKEATSEEFSAQAEHRVVIFMPEGSKEQMGGTMRLGSRTSHFKPGTEWSKLRGLYGGVDVVEERHRHRYEVNPDYIEDLEKAGLSLTSMDDQGVRVETIELKDHPFFVGLQAHPEYKSKTLAPAPSLLGLIAASSGCLDEIIEAAHKKQSATNGVSDVTNF

SEQ ID NO: 15001 - protein, 670 aa, Nostoc sp. PCC 7120
MAVATQSLEELSINAIRFLAVDAIEKAKSGHPGLPMGAAPMAFVLWNRFMRYNPKNPKWFNRDRFVLSAGHGSMLQYALLYLTGYDSVSIEDIKQFRQWESKTPGHPENFMTAGVEVTTGPLGQGIANGVGLAIAEAHLAAKFNKPDAKIVDHYTYVILGDGCNMEGVSGEAASFAGHLGLGKLIALYDDNHISIDGSTDVAFTEDVSKRFESYGWHVIHVKDGNTDLEAIHKAIEEAKAVTDKPTMIKVTTIIGYGSPNKSNTAGVHGAALGGDEVALTRQNLGWSHDPFVVPEDVLNYTRKAVERGAGYESDWNKTYADYKAKYPQEAAEFERYLSGKLADGWDKVLPSYTPEDKGLPTRKHSETCLNKLAAVLPELIGGSADLTHSNLTEIKGKGDFQKGQYQNPNIHFGVREHGMGAICNGIALHGSGLIPYGATFLIFSDYMRAPIRLSALSQAGSIWVMTHDSIGQGEDGPTHQPIETLASLRAIPNLTVIRPADGNETSGAYKVAIERAKNNAPTLLAFTRQNVPNLAGTSIDDVAKGGYIVVDTDGTPDLILIGTGSELSLCVTAAEKLKAEGKKVRVVSLAAWDLFDAQDAAYKESVLPKAVTKRLAVEAASSFGWHKYIGSEGDAVTIDRFGASAPGGVCLEKFGFSVDNVLAKAKQLLG

SEQ ID NO: 15002 - protein, 694 aa, Vibrio cholerae O1 biovar eltor str. N16961
MQQQGGFATIAATDFPHPFISLTSHLGVDMSSRKQLANAIRALSMDGVQKANSGHPGAPMGMADIAEVLWRSHLNHNPQNPNWADRDRFVLSNGHGSMLIYSLLHLSGYELSIDDLKNFRQLHSKTPGHPEYGYAPGIETTTGPLGQGITNAVGMAIAEKALAAQFNKPGHDIVDHFTYVFMGDGCLMEGISHEACSLAGTLGLGKLIAFWDDNGISIDGHVEGWFSDDTPKRFEAYGWHVIPAVDGHDADAINAAIEAAKAETSRPTLICTKTIIGFGSPNKAGSHDCHGAPLGNDEIKAAREFLGWEHAPFEIPADIYAAWDAKQAGASKEAAWNEKFAAYAKAYPAEAAEYKRRVAGELPANWEAATSEIIANLQANPANIASRKASQNALEAFGKLLPEFMGGSADLAPSNLTMWSGSKSLTAEDASGNYIHYGVREFGMTAIINGIALHGGFVPYGATFLMFMEYARNAMRMAALMKVQNIQVYTHDSIGLGEDGPTHQPVEQIASLRMTPNMSTWRPCDQVESAVAWKLAIERKDAPSALIFSRQNLAQQPRSAEQVANIAKGGYILKDCAGQPELILIATGSEVELAVAAYEQLSAEGKAVRVVSMPSTDAFDKQDAAYREAVLPAAVTKRIAIEAGIADFWYKYVGFGGRIIGMTSFGESAPAGELFKLFGFTTENVVKQAKELLA

SEQ ID NO: 15003 - protein, 326 aa, Zea mays
MAEQLDLPGFRFHPTEEELLEFYLKQAARGRKLKFDIIPTVHLYRHDPWELPSLARVVGEREWYFFVPRDGGGRAAKQQPGSGGRPSRTTERGFWKATGSDRAVRCAADPKRLIGLKKTLVYYEGRAPRGTKTDWVMNEYRLPDACNNNNNNNNTVAGDSSAAAAASSTTTNNSPKEDIVLCKVYRKAVSLKELEQRVAMEELARATPSASHNAGSPADSMSSSDQDQQTQLGQGGVEIMITMPVGGISPPPPLPPPVMMSMKQEEEVAEPEAPLPAVLMRPSTLSLPQLEVAKQQQEWMQDPFLTQLRSPWMESWSPYYPSVLNF

SEQ ID NO: 15004 - protein, 357 aa, Legionella pneumophila str. Paris
MTTVAQFEITYTQYLNEQGKLVAELPPFADNQSILKELYKIMVLTRTFDKKAIALQRTGKMGTYAPINGQEAISTAIGHALKPEDVLVPYYRDYAAQFQRGVKMSEILAFWGGDERGSHYSNNAEDLPICVPIASQCLHAAGVAFAFKYRNQPRVAVVCIGEGGTSEGDFYEAMNVAGAWKLPVVFVVNNNKWAISVPIEKQTGSQTIAQKAIAAGFSGVQIDGNDIFAARQVIGDAIEKARQGGGPTLIEALTYRLCDHTTADDATRYQPSHEVEEAKAKEPIVRFKHYLMQQNIWTSQDEEKLVIECSETVEKAVEEYLNTKPQPVSSIFDYHYAELPEYLIEQRAIAMEEYSHA

SEQ ID NO: 15005 - protein, 308 aa, Burkholderia vietnamiensis G4
MSAAVPEILALGEAMIEFNQSQPGRPEFLQGFGGDTSNFCIAAARQGASTGFVSAIGDDPFGRLLAGMWADEHVDTRYVRVDRSAPTGVYFVTHGPDGHQFDYLRAGSAASRYTAADLPLDALAAAKAVHLSGISVAISTAACDAAFAAIVHARSNGALISFDTNLRLKLWPLARARAVIREALCHTDICLPSWDDVAALTGANDRDAIVDAMLELGPQIVALKLGREGAYVATPSERRVVPGFAVEAVDATGAGDCFGGAFVARIVAGDDPFAAARYANAAAALSTTGYGAVAPIPHRDAVERLLRG

SEQ ID NO: 15006 - protein, 574 aa, Populus trichocarpa
MEVINRIFANRHCSFFLLLLLASAMSLAIAKTHHHDFTVQATKVKRLCKTHNSITVNGMFPGPTLEVKNGDTLVVKVVNRARYNVTIHWHGIRQMRTGWADGPEFVTQCPIRPGGSYTYRFTIEGTRRNTLGWHAHSSWLRATVYGALIIHPREGSSYSFSKPKRETPILLGEWWDTNPIDVVREATRTGAAPNISDAYTINGQPGDLFNCSSKDTTIVPIDSGETNLLRVINAALNQPLFFTIANHKFTVVGADASYLKPFTTSVIMLGPGQTTDVLISGDQLPGRYYMAARAYQSAQNAPFDNTTTTAILEYKSVLCPAKCTKKPFMPPLPAYNDTATVTAFSRSFRSPRKVEVPTDIDENLFFTIGLGLNNCPKNFRARRCQGPNGTRFTASMNMVSFVFFKASLLQAYKQKIPGVFTTDFPAKPQVKFDYTGNVSRSLFQPARGTKLYKLKYGSRVQIVLQDTSIVTPENHPIHLHGYDFYIIAEGFGNFNPKTDKSKFNLVDPPMRNTVAVPVNGWAVIRFVADNPGVWLMHCHLDVHITWGLAMAFLVEEGIGILQSVEPPPADLPIC

SEQ ID NO: 15007 - protein, 380 aa, Glycine max
MAEDKEMSTSVINGNDSLTGHIISTTIGGKNGEPKQTISYMAERVVGTGSFGIVFQAKCLETGEAVAIKKFLQDRRYKNRELQLMRVMDHPNVISLKHCFFSTTSTDELFLNLVMEYVPESMYRVLKHYSNANQRMPIIYVKLYMYQIFRGLAYIHTVPKVCHRDLKPQNILVDPLTHQVKLCDFGSAKVLVKGEANISYICSRFYRAPELIFGATEYTSSIDIWSAGCVLAELLLGQPLFPGENAVDQLVHIIKVLGTPTREEVRCMNPNYNDFRFPQIKAHPWHKIFHKKMPPEAIDLASRLLQYSPSLRCTALEACAHPFFDELREPNARLPNGRPFPPLFNFKQELSGASPELVNKLIPDHVKRQMGLQFMHLGGS

SEQ ID NO: 15008 - protein, 153 aa, Helianthus annuus
MSIIPSFFTSKRSNIFDPFSLDTWDPFQGIISTEPARETAAIVNARIDWKETPEAHVLKADLPGMKKEEVKVEVEDGRVLQISGERCREQEEKDDTWHRVERSSGKFIRRFRLPENAKMDEVKAMMENGVLTVVVPKEEEEKKPMVKAIDISG

SEQ ID NO: 15009 - protein, 473 aa, Ipomoea batatas
MRLVVVGLWCLILGLILNPTKFCDAGVTSSYVRKSLSALPNAEDVDMPWDSDVFAVPSGYNAPQQVHITQGDYEGRGVIISWTTPYDKAGANKVVYWSENSKSQKRAMGTVVTYKYYNYTSAFIHHCTIKDLEYDTKYYYRLGFGDAKRQFWFVTPPKPGPDVPYVFGLIGDIGQTHDSNTTLTHYEQNSAKGQAVLFMGDLSYSNRWPNHDNNRWDTWGRFSERSVAYQPWIWTAGNHEIDYAPDIGEYQPFVPFTNRYPTPHEASGSGDPLWYAIKRASAHIIVLSSYSGFVKYSPQYKWFTSELEKVNRSETPWLIVLVHAPLYNSYEAHYMEGEAMRAIFEPYFVYYKVDIVFSGHVHSYERSERVSNVAYNIVNAKCTPVSDESAPVYITIGDGGNSEGLASEMTQPQPSYSAFREASFGHGIFDIKNRTHAHFSWHRNQDGASVEADSLWLLNRYWASEDASSMSAM

SEQ ID NO: 15010 - protein, 601 aa, Silicibacter pomeroyi DSS-3
MAAYEYETHEYDVVVVGAGGAGLRATLGMAEQGLRTACVTKVFPTRSHTVAAQGGIAASLSNMGPDHWQWHMYDTVKGSDWLGDTDAMEYLAREAPKAVYELEHYGVPFSRTEEGKIYQRPFGGHTTEFGEGPAVQRTCAAADRTGHAILHTLYGQSLKNNAEFYIEYFAIDLIMSEDGQCQGVVCWKLDDGTFHVFNAKMVVLATGGYGRAYFSATSAHTCTGDGGGMVARAGLALQDMEFVQFHPTGIYGSGCLITEGARGEGGYLTNSEGERFMERYAPQYKDLAPRDYVSRSMTMEIREGRGVGKDGDHIHLNLSHLPAEALAERLPGISESAKIFAGVDVTKEPIPVLPTVHYNMGGIPTNYWGEVLNPTADNPTAIVPGLMAVGEAGCASVHGANRLGSNSLIDLVVFGRASAIRAGKVVDPEAANPVLNLASVEKAFDRFDGLRNAKGSVATADLRLEMQKTMQADAAVFRTAKTMAEGVEKMTAIAAKMDDLSVTDRSLVWNSDLMETLELTNLMPSALATIVGAEARKESRGAHAHEDFPTRDDENWRVHTISRVEGNKVELSYRPVITEPLTTEEQGGIALKKIAPKERTF

SEQ ID NO: 15011 - protein, 465 aa, Ipomoea batatas
MGASRTGCYLLAVVLAAVMNAAIAGITSSFIRKVEKTVDMPLDSDVFRVPPGYNAPQQVHITQGDHVGKAMIVSWVTVDEPGSSKVVYWSENSQHKKVARGNIRTYTYFNYTSGYIHHCTIRNLEYNTKYYYEVGIGNTTRSFWFTTPPEVGPDVPYTFGLIGDLGQSFDSNRTLTHYERNPIKGQAVLFVGDLSYADNYPNHDNVRWDTWGRFVERSTAYQPWIWTAGNHEIDFAPEIGETKPFKPFTKRYHVPYKASGSTETFWYPIKRASAYIIVLSSYSAYGKYTPQYKWLEEELPKVNRTETPWLIVLMHSPWYNSYNYHYMEGETMRVMYEPWFVQHKVDLVFAGHVHAYERSERVSNVAYDIVNGKCTPVRDQSAPVYITIGDGGNLEGLATNMTDPQPEYSAFREASFGHATLDIKNRTHAYYSWHRNQDGYAVEADSMWVSNRFWHPVDDSTTTKL

SEQ ID NO: 15012 - protein, 760 aa, Shewanella oneidensis MR-1
MQLNSLGFPRIGRRRELKFALEKYWRGESTQAELHEVARELRRTHWQWQVAAGIEQVPVGDFAFYDQVLTLSATLNAIPDRHRGEGAIDLDTLFRVARGRAPTGTDAPASEMTKYFNTNYHYLVPELKQDQVFSIAYEQFFDEVAEAQALGYKAKPVLLGPVSYLYLAKTVGQDFDKLSLLPNLLKAYAEILARFAAQGVTWVQLEEPILALELTHEWQAAISESYQALKTAQVKILLTSYYGSISHHQALVSALPVAGLHLDLVTAPEQLALFANALRPDQILSVGVVNGRNVWAAEVDLIVERIGSVARDLCSQDGSRLWIGTSCSLLHSPVDLEVETTLAPTLRQQLAFAKQKLLELANVRQLLQAPESVAAKEIVNTCLARREAKAQAADAKVIARVAALTPADYERVSEFTERQAVQQRKYRLPLLPTTTIGSFPQTPAIRGLRSRWRKGELSDAQYTEQLQQVTRDTIDRQLKLGIDVLVHGEAERNDMVEYFGEQLEGVGFTKNGWVQSYGSRCVKPPLIYGDVSRPKAMTVDWAVFAQSLTDKPVKGMLTGPVTILHWSFAREDISRDTIATQLALAIRDEVVDLQHAGIGIIQIDEPAFREGLPLKQSEWQAYLDWAVNAFKLSAAGVVDETQIHTHMCYSEFNDTIAAIAAMDADVITIETSRSRMELLNAFEDFEYPNEIGPGVYDIHSPNTPSVEAMVHLIEKAAQKVPVRQLWVNPDCGLKTRTWDEVEPALKNMVDATRELRRRLG

SEQ ID NO: 15013 - protein, 235 aa, Methylobacillus flagellatus KT
MQNTTQSLMINDQVSRWQVYTAQEALYSSAVKHIEEAARNAIAGHGKFSIVLAGGSTPKSIYQLLPKIDTDWSKWHVFYGDDRCLPPEHEERNSLMAHEAWLKHVAIPSSQIHDIPAERGPVEAAHAYNQTLAAVGEFDLVLLGLGEDGHTASLFPGHTWDDTQSAVPVFGAPKPPPERVSLTAARLSQSREVIFFVTGAGKQEAVDNWRRGEPIPASLIKPKNGVDVYIFGVNL

SEQ ID NO: 15014 - protein, 470 aa, Vibrio parahaemolyticus RIMD 2210633
MRLARQIMTTSNRSSELVYQLNDRPPLPQTIFAALQHLLAMFVAVITPSLIICQSLGVPADQTNTIISMSLFASGVSSFIQIRTFGPVGSGLLSVQGTSFNFLGPIIGAGLSLKAGGADISTMMAAIFGTILVASFAEILLSRVLEHARRIITPLVSGIVVTLIGLTLIQVGLVSMGGGYAAMGDGTFGSLDKLALAGTVLGLIVILNRSKNPYIRVASIVIAMLVGYVMAYFMGMVDTSKLGETNLVALPIPMQYGLSFDWSLFIPLVLIFFITALEAIGDITATSEVSGEPVKGPIYMKRIKGGVLADGLNSAIAAVFNSFPNSTFSQNNGIIMLTGVASRYVGYFISGMLVILGLFPGVASFVQLIPEPVLGGATIVMFGTIAAAGVRIISRVDLDRRAILIMALSFSMGLGIAQKPEILQFMPEFIKSIFSTGVAAGGITAILLNLLLPEKLTEEDELVAQEVKES

SEQ ID NO: 15015 - protein, 255 aa, Xylella fastidiosa 9a5c
MNPTYDFKGQVALVTGAAAGMGLATARGFAQGGASVVLADRDGERAAQEAAAIVAEGGTAIGLACDVSDEAQVAALVEKTVAEYGRLDFAFNNAGVMAKIAPFAEATSEEFDRVIGINLRGVWLCMKYELQQMQRQGSGVIVNNASVGALTGNVGIGAYIASKHGVLGLTRAAALEYCKKGIRVNAVNPGTIDTQIARDVVGGSDEAFAKLGASAPIGRAGRPEEIASAVLWLCSPGGSYVIGEGLTVDGGYVVP

SEQ ID NO: 15016 - protein, 713 aa, Magnaporthe grisea 70-15
MMSWWSSGANTALDEQIEKATSSSLEDIALNLEISDVIRSKTVPPKDAMRSLKKRIGHKNPNTQLSALELTDTCVKNGGQHFLVEIASREFIDNLVSLLKATGPAAVNADVRARILGLIQSWAAVTQGRVELSYIGEVYKTLQHEGFQFPPKVAVATSMIDSSAPPEWTDSDVCMRCRTPFTFTNRKHHCRNCGSCFDQQCSSKSIPLPHLGIMQPVRVDDGCYAKVTDKSRGSGGAGAGAGYDRKSPSLYSSFPHKNRSSSAMQPRSARVDDGFDEDLKKALAMSLEEVKSHSRNYAPASNGVANSGQSKVNGDSSATKTVEEEDDDLKAAIAASLADMEEQKKKHSAVLHEQTHSTEAASASTFVPPKNDYELTPVEAENINLFATLVDRLQTQPPGTILREPQIQELYDSIGTLRPKLARTYGETMSKHDTLLDLHAKLATVVRYYDRMLEERLSKAYGQRNFAGYNMHVPRQTSSPYPSLQGPSAPANVPGESFYTGQPQHDYAEPSRQPSYPPQASGAQQQFHQYAPPHQASQPSEGWQPSHTPAPAAQYAGQPPQQSTESTHSHSSAHNHQNLAAPSAPDQSLPTPTTDPAASYYFNQQQVSALQTPVSVPAEPVQSPYPNLQQQPPAQYQHSPAPQGQAQQQKPPQQPQQPYWQHSASQNTALPTNHQPWPQVPNRQSASYVQEPLPSAPQHAPQKPVVEEALIEL

SEQ ID NO: 15017 - protein, 567 aa, Geobacter metallireducens GS-15
MEHKFDIVIVGAGGGGLFAALEAVRTNPRVSVAVISKVYPTRSHTSAAQGGVNAALGNKDRDDTVDLHVFDTVKGSDYLADQDAVDYLCSQAPSVVRELENLGAPFSRFADGTIAQRPFGGTVKDRCCYCADKTGHTLLHTLFEQCLRRGVTFFNEYFLLSLEHADGDCQGVITLNMATSAIETFVAPVVILATGGHAKMYWNRSSNAAGNTGDGQAAALRAGIPLKDMEFIQFHPTGLRKSGLLVTEGARGEGGYLLNRHGERFMVRYAPQKMELGPRDLVARSMETEIIEGNGFESDAGSYIELDLRHLGAEAIKKKLPQIRELSMHFEGVDPIAEPIPVRPTAHYSMGGIDAHMAKTAVRGVFAVGECACVSVHGANRLGGNSLLDILVFGKRAGQEAAEEAPRRRALGIPPGAVAGMADEIRSYANPERYERYGIIREEMGKAMGDNVGIYRVEERLRTGVEEILALRERFRRIRLFDTGTVYNTNLIQILELKNMLDLASCVAITALARQESRGSHYREDFPRRDDGAWHIHSLCTMERDGEVRLGHKPVTMGKYSLETRSY

SEQ ID NO: 15018 - protein, 557 aa, Alkaliphilus metalliredigenes QYMF
MGKLRRKYKSLKRYIQISEVLVKYGFSFVAEKLQEKGYIPRFVLRIDPLKEQASQGERLRRACEELGPTFIKLGQIISTRRDIIPEEIINELSKLQDNVVPVAVEEVKKVFRLEMNTEIEDAFAYFNENPIASASIGQVYEARLHSGEAVVVKIQRPNIKYNIQRDIEILFDIAQLLDDHSDKKKPYRLVEIVQEFSYAILKELDYSMEAKNTENFKENFKSDSHIEIPSIFWKYTSNKVITMERIYGIKIMDIDELNKQKWDLERLARIGAKSFMRQVFIHGFFHGDPHPGNIFAVSSSKIAFIDFGIVGYLDKSTMEHIRRMFTAAASKDVDKVVDVLKDMDAISNETNIRRLKEEMSFLINFYYNMPLKKMHLSDVVKQFMAVAYENQVKLPSQFAMLLKAIITVEGSGKLLYPNFTLSMIVKDSIKEIYLHRLKPENMIKEARDYTDEILYGIKYLPKQIRSLLARVEKNEIVFKFDQTGFKIIERELMRLTNKISLSLITSALIVASSLIIQSNMGPLLWGVPVFGLIGYVLSSILGVGIITTILYNIWKQE

SEQ ID NO: 15019 - protein, 434 aa, Lactobacillus sakei subsp. sakei 23K
MTKSTYRNPDAVLDVNERPTTGKWIGLSIQHMFAMFGSTVLVPILVGLNPGIALFSSGVGTLMYLLITKGKIPAYMGSSFSFIVPMLALMKTTGYPGIAQGTMAVGAVYLIVSVLVSLIGSGWIDKALPPIVVGPIVMVIGLSLAGTAAKQATINAAGNYDLKFFAVAILTLLITIAFNMYLKGFMSLIPVLLGIVSGYIIAVLFGIVDFQPVLNAPWFKVPDFQVPFVTYKPGLYWGAILSMAPIAFVTMTEHMGHIMVLNKLTKRNFFKNPGLHRTLAGDGTASIIAAFVGGPPVTSYGENIGVLAITKVHSVWVLGGAAFFAIIFGFIGKLSALIQSIPAPVIGGISFLLFGVIASSGLRVLIDNQVDFDKKRNLMIGSSILVIGIGNAYLQLGQYQFSGLAIATVLGIAMNLILPQKSKSEIELEAQQND

SEQ ID NO: 15020 - protein, 110 aa, Zea mays
KKGPWTPEEDLMLVSYVQEHGPGNWRAVPTNTGLMRCSKSCRLRWTNYLRPGIKRGNFTEQEEKLIVHLQALLGNRWAAIASYLPKRTDNDIKNYWNTHLKKKLKNMQGG

SEQ ID NO: 15021 - protein, 289 aa, Saccharomyces cerevisiae
DPHNQIWIISGRDQKFLNKWLGGKLPQLGLSAEHGCFMKDVSCQDWVNLTEKVDMSWQVRVNEVMEEFTTRTPGSFIERKKVALTWHYRRTVPELGEFHAKELKEKLLSFTDDFDLEVMDGKANIEVRPRFVNKGEIVKRLVWHQHGKPQDMLKGISEKLPKDEMPDFVLCLGDDFTDEDMFRQLNTIETCWKEKYPDQKNQWGNYGFYPVTVGSASKKTVAKAHLTDPQQVLETLGLLVGDVSLFQSAGTVDLDSRGHVKNSESSLKSKLASKAYVMKRSASYTGAKV

SEQ ID NO: 15022 - protein, 472 aa, Colwellia psychrerythraea 34H
MNLADFFTHSKSLLKLTYPILIAQLIQNLMGFVDIVMAGRVSATDLAAVAVANSIWLPLILTIYGLIMALSAIVSQLAGAKNYSKIVEQTYQTAWISLVLGLSLILLYYLLIPIVSPLVTLESNLEELMFDYLGFIVWGAPGFCLYLVLRNYSEGLSYTKPTMIISIIGLLVNIPANYIFIYGKFGMPALGGAGCGVATALVYWSMFISMLIYCFYSKVLKQANLFSAFYWPVLAEIKAILGLGIPIALSLLFEVSLFAIVAIILVPFGAQVVASHQVALNFTGLVFMVPLSIAMATTIKVGFAIGNKDFKQARDYTMYSIVLGLALACITALITVLFRTQIAGIYSTEAPVIELAASLMLLATIYQFSDTIQVVSAGALRGYKDTKSILYITFVSYWLVGLSVGLILGVTDWIVPRIGPYGFWIGFIVGLTTAAILLAWRLRIIQERIKNNTFVPEETDTLIHISSGKIDD

SEQ ID NO: 15023 - protein, 700 aa, Magnaporthe grisea 70-15
MATTQPGKPSNQTKENPPYSADIPGRPVIAGETIPRGHQKTYKHGLLKRPIDAGDDIKTVFNLLQRSAALYSNEPAIGSRTLVKMHTETKKDSNGAEKTMSYPELTSFKYMVYSEFHELVLNLASGLRKLGLQTGDMLHIFASTSPNWLAMSHAAAAQSFTLVTAYDTLGESGVEHSLKQTDARAMVVDAHLLATIRRPLEKVSSVKYIVYNPKSVLQQVNVEDEVQKLKDAFGQRELTFISFDDVVAMGKAHPCEPTLPRPTDNFCIMYTSGSTGLPKGVAITHEAFVAAVAGMHGTVANTVSNEDFVLAYLPLAHIFELILENIVIHVGATLGFASPRTLADSGVRECGGDMKEFRPTIMAGVPQIWDTIRKGIQGRVQNSGLIKRTVFNTALSLKSSLVYYGLPGQAVLDSLVFGQVKAMTGGRLRFIVNGATGISKETAHFLAMVLAPMISGYGLTETCANGALGSPLYRPAPGAIGPPTLSVEVKLVSIPDLNYSTDTKPPRGEVLIRGGPVVREYYNNPEETAKAFTEDGWFRTGDVGEWDADGNLRIIDRVKNLVKLQGGEYIALERLEAVYRGSQFVQGIMIYGDSSHPRPVAVVSPVPKALASIRGGPDADADAADLQALAADPAVQDTVLKDLVRLGKAAGFTRLETIVGVVIVSDEWTPASGLVTATQKLNRKALYEEYKDKIQASLAQ

SEQ ID NO: 15024 - protein, 422 aa, Streptomyces argillaceus
MNRRVVITGIGVVAPGAVGVEAFWEQLTAGRTATRTISLFDASAFRSRIAAEVDFDAARHGFGPAEAERLDRATQFALVSAREAVADAGLDGKTDPSRTGVALGSAVGCTTGLDTQYNVVSEGGSDWYVDHTRAVDHLFDYFVPSSMAAEVAWSIGAQGPVALISTGCTSGLDSLGHAVALIREGSADVMVAGATEAPISPITVACFDAIKATSPRNDDPATASRPFDRSRNGFVLGEGSAVLILESLENARRRDAHVYAEISGFASRCNAYHMTGLRPDGIEMAEAIRTALDEARLDPTAVDYVNAHGSGTKQNDRHETAAFKRSLKDHAYRVPVSSIKSMIGHSLGAIGSLEVAASALAIEHDTVPPTANLHDRDPACDLDYTPITAREQRTDTVLSVGSGFGGFQSAMVLTAPGLREAA

SEQ ID NO: 15025 - protein, 408 aa, Streptomyces argillaceus
MSADASQAVITGIGVAAPNGLSVKAWWDAVLRGESGIRRLSRFDPGRYPARLAGEIRDFVDADHVPGRLLPQTDRVTRLSLAVAREAVEDAGVDLERLPRYAAGVSTASSAGGFEFGQRELQALWSKGGQYVSAYQSFAWFYAVNTGQISIGYDLRGPSGVLVTEQAGGLDAVAQARRLLRRGSELMVTGGVDSALCPWGWTAHLAGGRLSTGDDPARAYLPFSADADGEVVGEGGALLVLERAAAAPSRGARVYGVFAGYAATFDPPPGRGGTPQLARAAELALVDAGMTPDQVDVVFADAAGERAADRAEADALTRVFGARGVPVTAPKTMTGRLSAGGASLDLAAALLALRDQVVPPTVNVTEPADDCPVDLVTGRPRPLPLRAALVLARGRGGFNAAAVVRALS

SEQ ID NO: 15026 - protein, 831 aa, Streptomyces coelicolor A3(2)
MKAVVMAGGEGTRLRPMTSSMPKPLLPVVNRPIMEHVLRLLKRHGLNETVVTVQFLASLVKNYFGDGEELGMELTYANEEKPLGTAGSVKNAEEALKDDAFLVISGDALTDFDLTDLINFHKEKGSLVTVCLTRVPNPLEFGITIVDEEGKVERFLEKPTWGQVFSDTVNTGIYVMEPEVFNYVDPDVPVDWSGDVFPQLMKEGKPIYGYVAEGYWEDVGTHESYVKAQADVLERKVDVDIDGFEISPGVWVAEGAEVHPDAVLRGPLYVGDYAKVEAGAEIREHTVIGSNVVVKSGAFLHKAVVADNVYVGPHSNLRGCVVGKNTDIMRAARIEDGAVIGDECLVGEESIIQGNVRVYPFKTIEAGAFVNTSVIWESRGQAHLFGARGVSGILNVEITPELAVRLAGAYATTLKKGSTVTTARDHSRGARALKRAVISALQASAIDVRDLENVPLPVARQQTARGSAGGIMIRTTLGVPDSVDIMFFDGQGADLSQGSQRKLDRVFARQEYRRAFPGEIGDLHFPSSVFDSYTGSLLRNVDITGIAESGLKVVVDASNGSAGLVLPSLLGKLGVDSLTINPGLDEARPTESADMRRSGLVRLGEIVASSRAAFGVRFDPVGERLSLVDEKGRIIEDDRALLVMLDLIAAERRSGRVALPVTTTRIAEQVAAYHGTQVEWTTTSPDDLTRVGGEEGAIFGGDGKGGFIVPEFSSVYDGTAAFVRLIGLVARTQLTLSQIDARIPRAHVLKRDLATPWAVKGLVMRRVVEAAGDRFVDTTDGVRVVETDGRWVMVLPDPAEAVTHLWAEGPDDASAQALLDEWAAVVDSAGR

SEQ ID NO: 15027 - protein, 496 aa, GIBBERELLA ZEAE PH-1
MTSQHSPSIEPSYRILESFPDEETPLIPHSRNSSLEIKSSSRSPWLTETVVLVKASVPVILAYMLQNSLQTVSVLMVGRLSPEALATAAFSYMFTMATAWLIALGGTTALDTLGSSTFTSSKDKHDLGILLQRGLIVLTGFYGVVAIIWCFSGYIFRSLGQEEFICVQGPRFLQLLIPGGLGYVWFEAMKKFLQAQEIYRPGTYALLVISPLNAVLNWFFIYTLDFGLDGAPIATGISYWLCFLLLVGYTAFIKGSACWGGFNIRQALQHLGPFSKLAFLGVIHVGTEWWAFEIVALAAGRLGTIPLAAQSVVMTLDQIINTIPFGLGVAASSRLGNLLGLGDAVQARRCAHSAALLSIIFGTIILTVLLSTKNVIAKIFNDDEEVVTLVAHIMPYVALFQIADGLNGSCGGALRGMGRQWVGAVVNCISYYGGALPAGIWLAFHGWGLSGLWVGQCVALFLVGALEWVIIALCDWKKEVKRASDRIRVDDLDRNL

SEQ ID NO: 15028 - protein, 323 aa, Arabidopsis thaliana
MKVRTINIIASSEIPNLGLAVNLAKQMHWQVATATAAIAISLWTLEGEQRKKRLQIDILSEKLRVFEEKRIWEKEREREFPKAELSWVKQILRMGRGKIEIKRIENSTNRQVTFCKRRNGLLKKAYELSVLCDAEVALIVFSTRGRLYEYANNNIRSTIERYKKACSDSTNTSTVQEINAAYYQQESAKLRQQIQTIQNSNRNLMGDSLSSLSVKELKQVENRLEKAISRIRSKKHELLLVEIENAQKREIELDNENIYLRTKVAEVERYQQHHHQMVSGSEINAIEALASRNYFAHSIMTAGSGSGNGGSYSDPDKKILHLG

SEQ ID NO: 15029 - protein, 234 aa, Arabidopsis thaliana
MTLREHMERNMELQEGDMSKALVALHPTTTSIPTPKLKNISRLRTEHQVYELPDSHRLLDGMDKREPDDPSPYLLAIWTPGETANSAQPPEQKCGGKASGKMCFDETCSECNSLREANSQTVRGTLLIPCRTAMRGSFPLNGTYFQVNELFADHESSLKPIDVPRDWIWDLPRRTVYFGTSVTSIFRGLSTEQIQFCFWKGFVCVRGFEQKTRAPRPLMARLHFPASKLKNNKT

SEQ ID NO: 15030 - protein, 713 aa, Bacillus sp. B1018
MKKFLKMTAAFSLGLSLAFGLFSPAQAAPDTSVSNKQNFSTDVIYQIFTDRFSDGNPANNPTGAAFDGTCTNLRLYCGGDWQGIINKINDGYLTGMGVTAIWISQPVENIYSIINYSGVNNTAYHGYWARDFKKTNPAYGTIADFQNLIAAAHAKNIKVIIDFAPNHTSPASSDQPSFAENGRLYDNGTLLGGYTNDTQNLFHHNGGTDFSTTENGIYKNLYDLADLNHNNSTSDVYLKDAIKMWLDLGIDGIRMDAVKHMPFGWQKSFMAAVNNYKPVFTFGEWFLGVNEVGPENHKFANESGMSLLDFRFAQKVRQVFRDNTDNMYGLKAMLEGSAADYAQVDDQVTFIDNHDMERFHASNANRRKLEQALAFTLILARVPAIYYGTEQYMSGGTDPDNRARIPSFSTSTTAYQVIQKLAPLRKSNPAIAYGSTQERWINNDVLIYERKFGSNVAVVAVNRNLNAPASISGLVTSLPQGSYNDVLGGLLNGNTLTVGSGGAASNFTLAAGGTAVWQYTAATATPTIGHVGPMMAKPGVTITIDGRGFGSSKGTVYFGTTAVSGANITSWEDTQIKVKIPAVAGGIYNIKVANAAGTASNVYDNFEVLSGDQVSVRFVVNNATTALGQNLYLTGNVSELGNWDPAKAIGPMYNQVVYQYPNWYYDVSVPAGKTIEFKFLKKQGSTVTWEGGSNHTFTAPSSGTATINVNWQP

SEQ ID NO: 15031 - protein, 327 aa, Ehrlichia canis str. Jake
MTKKHSNNLTNEQLVNCYYSMLLMRRFEEKSGQLYGMGLIGGFCHLYIGQEAIAAGIQNAITEGDAIITSYRDHGFMLSVGTDPKYVMAELMGKSTGCSKGKGGSMHMFNIEKNFFGGHGIVAAQVPIGTGIALANKYKKNNNIVFTCFGDGAVNQGQVYEAFNIAALWKLPVIYVIENNEYAMGTSVSRSSYITDLYKKGESFGIPGHQVDGMNLFAVTQAAIDAATYCRSNNGPILLEMKTYRYRGHSMSDPAKYRSKQEVEGIKENKDPITHLKNHLISNNIVSDEECNKYDKEIRNIVKEAVDFSQNSSEPDINTLYTDIYKD

SEQ ID NO: 15032 - protein, 401 aa, Xylella fastidiosa Ann-1
MTRPDLNERILSLRKLRLAQCRTRTRRTIERRNGVRLEINGSWLVEFCSNDYLGLAQHFEIIAALQDAAARNGIGATASHLICGHHAIHKALEYELAEWLGYPRALLFGSGFTANLAVQQALLTKENDICVQDRLNHASLIDATRLAGCRLRRYPHLDVDGAAHQLKNAPEGAAMLATDGIFSMDGDIAPLRALSLVARTQQALMYVDDAHGIGVTGPQGRGCIAAAWLSVEEVPLQLVTLSKALGGYGAAVLGSATLIQHLAETARPYIYTTALPPAQAAAALTAIRIARRDEWRRQRLQELVERFRENSRRHGLEIMDSETPIQPLQCGDETTTMAMSAALEREGFLVNAIRPPTVPEGKSRLRVTLSALHTTEQIDTLVQALARSRDTLATEAAPVQV

SEQ ID NO: 15033 - protein, 469 aa, Arabidopsis thaliana
MADHSWDKTVEEAVNVLESRQILRSLRPICMSRQNEEEIVKSRANGGDGYEVFDGLCQWDRTSVEVSVSIPTFQKWLHDEPSNGEEIFSGDALAECRKGRFKKLLLFSGNDYLGLSSHPTISNAAANAVKEYGMGPKGSALICGYTTYHRLLESSLAQLKKKEDCLVCPTGFAANMAAMVAIGSVASLLAASGKPLKNEKVAIFSDALNHASIIDGVRLAERQGNVEVFVYRHCDISNCKMKRKVVVTDSLFSMDGDFAPMEELSQLRKKYGFLLVIDDAHGTFVCGENGGGVAEEFNCEADVDLCVGTLSKAAGCHGGFIACSKKWKQLIQSRGRSFIFSTAIPVPMAAAAYAAVVVARKEIWRRKAIWERVKEFKELSGVDISSPIISLVVGNQEKALKASRYLLKSGFHVMAIRPPTVPPNSCRLRVTLSAAHTTEDVKKLITALSSCLDFDNTATHIPSFLFPKL

SEQ ID NO: 15034 - protein, 307 aa, Glycine max
DMELETIYPPCFMPNSNWFVQESHSTEWTREDNKKFESALAIYDNDTPDRWFKVAAMIPGKTVFDVIKQYRELEEDVSEIEAGRVPIPGYLASSFTFELVDNHNYDGCRRRLAPVRGSDQERKKGVPWTEDEHRRFLMGLLKYGKGDWRNISRNFVVTKTPTQVASHAQKYYIRQKVSGGKDKRRPSIHDITTVNLTETSASDKNKPQLFNASPVLAPQQKLNSISKVQLGWTSSHYNDGSFMVFTPNSDALFVSSSPDVTSMALKMQGQDLYDCALHEAYAKVKVPGFSMAPRDFNNEAVFGIHAL

SEQ ID NO: 15035 - protein, 160 aa, Burkholderia fungorum LB400
MLGANDGIISTASLIIGVASAHAEHGHLVLTGVAGLVPGAMSMATGEYVSVSSQADTETAALAEDQEELDADGARVHRELAAIYVRRGLDMALAKQVAQALMAHAALGAHARDELGISETTRANPLQAALASASSFSVGAALSLIVTALARSHGWPRASR

SEQ ID NO: 15036 - protein, 725 aa, Triticum aestivum
  misc_feature (49)..(49): Xaa can be any naturally occurring amino acid
  misc_feature (107)..(107): Xaa can be any naturally occurring amino acid
  misc_feature (111)..(111): Xaa can be any naturally occurring amino acid
  misc_feature (370)..(370): Xaa can be any naturally occurring amino acid
  unsure (1)..(725): unsure at all Xaa locations
MAVVAPTPAPPAAPAPAAAAAAPAPALAPAPAADQATDLLQKMSLESQXPKAGEDGTELAGAIKQGPVASQPLSVSIPQDRSITPVVQDFTDPNMFYLPTYYYGGLXDGTXSEWDEYTRYVNQDGVEVTPAVYGDIYGYGYAPYGAYSPASSPVPTVDGQMFAAQHYQYPAYYQPPTPIPSTTQGDQQPSANADNKPAAKADAAKTTTNGVPNVSAQSNSATAPLGSSYQNSSLTPDGTYRAPLLGGVPSTGYVDSTYGYDTTGAHYAWYDGSAYTNAQQRPTTANYTPSSAYNSNGSSARYQTKSPTPQQTGNRRPTTTTGSATPTYPNRMYSSTQSYNQYGNSVKTGLINGYGSSGYGSSGYGSSGYXSRLYGRWGVSMDTRYNRPRGRGNGYYGFGNESQDGTIELNRGPRSGRFKNQKAFGHTVTIAVKGQTLPSSENKDASDIPDKAQFNLEDFPVQYDDAKFFVIKSYSEDDIHKSIKYNVWASTTNGNKKLDAAYQEAQAKGSSCPIFLFFSVNTSGQFVGVAEMTGPVDFEKTLEFWQQDKWNGSFSVKWHIVKDVPNNILKHIVLENNEGKPVTNSRDTQDINLEQGIQMLKIFKEHVSKTSILEDFAFYENRQKLMQEKRIKQQQIQKQVWDSRAPNPVAGEKQQELANGKPKSPVANGVNGDAKVPAEKAAAAAPPAVTYAAKVAQTAAAEKKPVATEKKPVVANGAVKTGVAA

SEQ ID NO: 15037 - protein, 456 aa, Glycine max
LHHLLLLPFPHSSTPHKPPSFQRSKTLLRASTVESPTPKRRGRKKKPETQTPSNNTPPPQNADNKTEEDELHDYDDGVDFPYSDPPLICCFGLARKEFVPAVRVQDYPMHPDIYSEWKMLQWKPPEFARAPGGPPSNVAVAHARLGGRAAFLGKVGDDEFGEEMVLMMNEERVQTRGVKIDSKCRTGCSYMKVKFEEEGRMKMETVREAAEDSLLANELNLAVLKEARIFHFNSEVLTCPSMESTLFRAIKWTKKFDGLVFFDLNLPLPLWRSHDETREIIKKAWNEADIIEVSRSELEFLLDEEYYERKRNYRPQYFAENYEQTKNRQEYYHYTAEEVSPLWHDRLKFLFVTDGTLGIHYYTPSFDGSVMGTEDVLITPYTCDRTGSGDAVVAAILRKLTTCPEMFENQDVLERQLRFAVAAGIISQWTIGAVRGFPTESATQNLKEQVYVPSLW

SEQ ID NO: 15038 - protein, 516 aa, Cucurbita maxima
MPTDMELSPSNVARHRLAVLAAHLSAASLEPPVMASSLEAHCVSAQTMVAPPELVKGTLTIVDERTGKRYQVQVSEEGTIKATDLKKITTGPNDKGLKLYDPGYLNTAPVRSSISYIDGDLGILRYRGYPIEELAESSTYVEVAYLLMYGNLPSQSQLADWEFAISQHSAVPQGLVDIIQAMPHDAHPMGVLVSAMSALSVFHPDANPALRGQDLYKSKQVRDKQIARIIGKAPTIAAAAYLRLAGRPPVLPSSNLSYSENFLYMLDSLGNRSYKPNPRLARVLDILFILHAEHEMNCSTSAARHLASSGVDVFTALSGAVGALYGPLHGGANEAVLKMLSEIGTVNNIPEFIEGVKNRKRKMSGFGHRVYKNYDPRAKVIRKLAEEVFSIVGRDPLIEVAVALEKAALSDEYFVKRKLYPNVDFYSGLIYRAMGFPPEFFTVLFAIPRMAGYLAHWRESLDDPDTKIIRPQQVYTGEWLRHYIPPNERLVPAKADRLGQVSVSNASKRRLSGSGI

SEQ ID NO: 15039 - protein, 294 aa, Glycine max
MEVAVAKALKPSLRSEFIVQKMHCEDIFSLNANTVAVGEDFSVDDLFDFSNGSLHNEHQQECDEEKQSLSASSQSQDRGEDDSNSNSTGVSYDSLFSTELAVPAGDLEDLEWVSHFVDDSLPELSLLYPVRSEEANRFVEPEPSVKKTPRFPWEMKITSKARSVRNRKPNTRVWSLGSTLLSLPSSPPAKKQKKRAEAQVQPVGVQIQRRCSHCQVQKTPQWRTGPLGAKTLCNACGVRYKSGRLFSEYRPACSPTFCSDIHSNSHRKVLEIRKRKEVAEPDTGLAQTQMVPTC

SEQ ID NO: 15040 - protein, 443 aa, Rhodopseudomonas palustris CGA009
MTLLLRRAASAATGYILATFGLAAVGVTPALAQGMATAAPGISPADTAWMTVATAFVLMMTIPGLALFYSGMVRKKNVLATMAQSLAAVALISILWVAFGYSLAFTGSGSLIGSFDRIFLAGMTMDSVNPAAKTIPEALFMLYQMTFAVITVALVAGSVADRMRFSAYLLFSIGWFIFVYVPLAHWIWGGGFLGAMGVLDFAGGLVVHLSAGTGGLVAAIVIGRRHGYGMENLSPFDLSLAVIGTGLLWVGWFGFNGGSALAADSRAVFAITATHLAACSGALTWGAIEWMARRKPSVLGMISGAVAGLGTITPASGYVEPWHGVVIGIVAGLICYWACTWLKHRLRYDDSLDVFGVHGIGGLTGTFLAGIFATASIGGVSGALEGSWMQPLTQLAGILVTFVWSAVATYVLLKAVSLFVALRVSREHEIEGLDISQHGEALQ

SEQ ID NO: 15041 - protein, 157 aa, Helianthus annuus
MSIVSSLFGGRRSSVFDPFSLDVWDPFRDFPISSSSDVSRETSALVNARVDWKETPEAHVFKADLPGIKKEEVKVEVEDGNILKITGERNIEKEDKNDKWHRVERSSGKFTRRFRLPENAKMDQVKAAMENGVLTITVPKEEVKKPDVKSIGDLWLE

SEQ ID NO: 15042 - protein, 480 aa, Rhodopseudomonas palustris CGA009
MTFKRPYGAGLAVLAAGMFAATAAYAEPTVNKGDNAWMLTSTVLVLLMTIPGLALFYGGLVRSKNMLSVLAQVFYTVCIACIIWALYGYSLAFTGGSDFIGGFSKAFLAGVTTDSKAATFSVDANISELVYVCFQMTFCAITPALIVGAFAERTRFAAVALFIPLWITLIYLPMAHMVWYWAGPDAINDAAKALAAAADEAAKTAAQAKLDEVNADSGFLFKKGAIDFAGGTVVHINAGIAGLVGALLVGRRTGYGKELMAPHSLTMTMIGASLLWVGWFGFNAGSNLEASGGAALAMTNSFVATAAAALSWMFAEWIFKGHPSVLGALSGAVAGLVAVTPAAGFSGPMGAIVLGLVVGVVCLFFCTVVKNALKYDDSLDVFGVHAVGGIVGAIGTGILVNPALGGTGVYDYVAGKVGDYDMTTQLISQCWGVGTTVLLSGIGSAILYKVVDVIVGLRAPVEVEREGLDLVEHTERAYNM

SEQ ID NO: 15043 - protein, 288 aa, Zea mays
VPVPLLLLAVARASRRAPEPEPRVKSRVASAPPPPPETPSGWNQNEGDRRRKLRGTPLVECTGDRSVEEQPEHAGVEGKAWKMSSTVPKSSNIFWHDCPVGKTDRQNVLKQKGCVVWITGLSGSGKSTLACTLGRELHTRGKLAYVLDGDNLRHGLNKDLGFKAEDRAENIRRVVAKLFADAGLVCIASLISPHRRDRESCRALLSDSSFIEVFLNMSLELCEARDPKGLYKLARAGKIKGFTGIDDPYEAPLNCEIEIKEVDGVCPPPAEMAGQVVTYLEEKGFLHE

SEQ ID NO: 15044 - protein, 384 aa, Triticum aestivum
  misc_feature (376)..(376): Xaa can be any naturally occurring amino acid
  unsure (1)..(384): unsure at all Xaa locations
MALRAASPPCAAGRCLPSSPPPRVGGRHFFRPLSSAAPAPLRKSAVCTKAISNSDGTPGTSDSPHVVCFGELLIDFVPTVSGVSLADAPAFKKAPGGAPANVAVGIARLGGSAAFIGTSAHASVGYMLSDMLKENNVNNQGLLFDTHARTALAFVTLRSDGEREFMFYRNPSADMLLEEKELDLDLIRKAKIFHHGSISLITEPCKTAHIAASKAAKDAGVLISYDPNLRLPLWTSADDARDGILSIWDTADLIKVSAEEVSFLTNGEDPYDDSVVKKLIHPNTKLLLVTEGPDGCRYYSKEFSGKVGGLKVTAVDTTGAGDAFVAGILSQLAADFSLLQDEARLREALKFANICGALTVTERGAIPALPTRQQVXDALTNVVA

SEQ ID NO: 15045 - protein, 668 aa, Haemophilus somnus 129PT
MVTRRELANAIRFLSMDAVQKAKSGHPGAPMGMADIAEVLWRDFLNHNPTNPQWANRDRFVLSNGHGSMLIYSLLHLTGYDLSIEDLKQFRQLHSKTPGHPEYGYAPGIETTTGPLGQGITNAVGMAIAEKTLAAQFNRAGHDIVDHHTYVFLGDGCLMEGISHEACSLAGTLGLGKLIAFYDDNNISIDGHVDGWFTDDTQKRFEAYGWHVIPAVDGHNAEQIVGAIKQAQAEKNKPTLIMCKTIIGYGSPNKQNTHDSHGAPLGDEEIALTRQALNWNYAPFEIPADIYAKWNAHEKGQVAENAWNEKFAAYEKAYPELAVEFKRRLNGELPANWATESQSFIEKLQANPANIASRKASQNAIEAYAKLLPEFLGGSADLAGSNLTLWSGSKPIRATENVDGNYINYGVREFGMSAIMNGIALHGGFIPYGATFLMFMEYAHNAVRMAALMKQRSLFVYTHDSIGLGEDGPTHQPVEQTTALRLIPNLETWRPCDQVESAIAWKAAVERQDGPSALIFTRQNLAQMNRTSEQLENVKRGGYILRACCEKGDCPDLILIATGSEVELAMKAAEALDAEGVKVRVVSMPSTNVFDKQDVAYREAVLPSAVTKRVAIEAGISDFWYKYVGTNGRIIGMNSFGESAPADQLFKLFGFTVENIVSKAKEIL

SEQ ID NO: 15046 - protein, 1475 aa, Thermoanaerobacter thermohydrosulfuricus
MFKRRALGFLLAFLLVFTAVFGSMPMEFAKAETDTAPAIANVVGNFQSKLGDSDWNINSDKTIMTYKGNGFYEFTTPVALPAGDYEYKVALNHSWEGGGVPSQGNLSFHLDSDSVVTFYYNYNTSSITDSTKYTPIPEDKLPRLVGTIQPAIGAGDDWKPETSTAIMRDYKFNNVYEYTANVPKGNYEFKVTLGPSWDINYGLNGEQNGPNIPLNVAYDTKITFYYDSVSHNIWTDYNPPLTGPDNNIYYDDLRHDTHDPFFRSPFGAIKTGDTVTLRIQAKNHDIESAKISYWDDIKKTRIEVPMYRIGQSPDGKYEYWEVKLSFDHPTRIWYYFILKDGTKTAYYGDNDEQLGGVGKATDTENKDFELTVYDKNLDTPDWMKGSVMYQIFPDRFFNGDSSNDHLKKYSRGFDPVEYHSNWYELPDNPNDKNKLGYTGDGIWSNDFFGGDLKGIDDKLDYLKSLGISVIYLNPIFQSPSNHRYDTTDYTKIDELLGDLSTFKKLMEDAHAKGIKVILDGVFNHTSDDSIYFDRYGKYLNTGVLGAYQAWKQGDQSKSPYGDWYEIKPDGTYEGWWGFDSLPVIRQINGSEYNVKSWADFIINNPNAISKYWLNPDGDKNVGADGWRLDVANEVAHDFWVHFRGAINTVKPNAPMVAENWNDASLDLLGDSFNSVMNYLFRNAVIDFILDKSFDDGNVVHNPIDAAKLDQRLMSIYERYPLPVFYSTMNLLGSHDTMRILTVFGYNSADENQNSQAAKDLAVKRLKLAAILQMGYPGMPSIYYGDEAGQSGGKDPDNRRTFPWGREDTDLQTFFKKVVNIRNENQVLKTGDLETLYANGDVYAFGRRIINGKDTFGKSYPDSVAIVVINKGDAKQVSIDTTKFIRDGVAFTDALSGKTYTVQDGKIVVEVGSMDGAILISDTGQNLTAPQPITDLKAVSGNGKVDLSWSVVDKAVSYNIYRSTVKGGLYEKIASNVTQITYTDTEVTNGLKYVYAVTAVDNDGNESALSNEVEAYPAFPIGWAGNMNQVNTHVIGVNNPVEVYAEVWAQGLTDKPGQGENMIAQLGYRYIGDTVGDAVYNAVYNKVEGVEISKDWTWVDAQYVGDSGNNDKYMAKFVPDMVGTWEYIMRFSSNQGHDWTYTKGPDGKTDEAKQFTVVPSNDVETPTAPVLQQPGIESSRVTLNWSPSADDVAIFGYEIYKSSSETGPFIKIATVSDSVYNYVDTDVVNGNVYYYKVVAVDTSYNRTASNTVKATPDIIPIKVTFNVTIPDYTPDDGVNIAGNFPDAFWNPNANQMTKAGSNTYSITLTLNEGTQIEYKYARGSWDKVEKGEYGNEIDNRKITVVNQGSNTMVVNDTVQRWRDVPIYIYSPKDKTIVDANTSEIEIKGNTYKGAKVTINDESFVQQENGVFTKVVPLEYGVNTIKIHVEPSGDKNNELTKDITITVTREKPARRQNLLLLHQQKQQNHLKKYHKAK

SEQ ID NO: 15047 - protein, 311 aa, Saccharomyces cerevisiae
MLRITVKTLQQRASFHHSFKHISVPDLHTRAQNDQTNCYCQEINARLPSKTDPLDPHIKLPHRTPNYNKHVLLLSPGDRFAQPWKVAWNHNLDTNTNRPYNAISKLRSHLGGSPGILINAVHLQNEFIPRPKQHDEWLYFFVIPDMKLYVIKETDIEEFASFLDEGAIQAPKLSFQDYLSGKAKASQQVHEVHHRKLTRFQGETFLRDWNLVCGHYKRDAKCGEMGPDIIAAFQDEKLFPENNLALISHIGGHIFAGNVIFYKLFGREKMQNKLDSLWFGKVYPHNLKLLCENLENGKIIDEMYRGGISMN

SEQ ID NO: 15048 - protein, 214 aa, Alkaliphilus metalliredigenes QYMF
MKLFIDTANIEEIKEVAQWGILSGVTTNPSLIAKEGRDFKQVIAEITAIVEGPISAEVVSLQAEEMLKEAQDLVAIHPNVVIKVPMTAEGLKAVKGFSEQGIKTNVTLVFSANQALLAARAGASFVSPFVGRLDDIGQEGSELVRQIIEIYDIHGIETEIIAASIRHTQHLTDAALAGAHIATVPYKVLKQSLLHPLTDQGIEKFLKDWEGLVK

SEQ ID NO: 15049 - protein, 429 aa, Methylobacillus flagellatus KT
MQEISKSSKLSNVCYDIRGPVLDRARQMEEDGHRIIKLNIGNPAPFGFAAPEEILQDVIRNMDSASGYTDSKGLFAARKAIMHYTQQKNIQGVTIDDIIIGNGVSELIVMAMQALLNNGDQVLVPMPDYPLWTAAVNLAGGTARHYVCDEQTGWLPDLRDIENKITANTRGIVIINPNNPTGALYPRETLEGIIEIARHHGLVIFADEIYDKVLFDGNTHTSIASLADDVLFVTFNGLSKNYRTCGYRAGWLVISGEKRHAGDYIEGLNMLASMRLCANVPGQLAIQTALGGYQSIDDLVAPTGRLCKQRDLAYKMLTDIPGVSCVKPKAGLYLFPRLDPKIYPIQDDQQFILDLLLEEKVLLVQGTGFNWRAPDHFRVVFLPNVDDLTEAFTRIARFLENYRKQHSTITIVEGKASKEAQTTSQSASA

SEQ ID NO: 15050 - protein, 315 aa, Burkholderia pseudomallei K96243
MPVALSEQVSGRAALAVICMEQPLVLFRDASGAVCAMEDRCAHRRAPLSLGRVTPDGRLQCAYHGWTYDGATGACVAIPNLSASERVPAHYAAHAYKTLERDGFIWACARDAPPPAEAIPRAPRSARRFAGSVTVAIARDEYVAALADGPHLTMRIAGLYITDYVIADATPHDGDIATERGVTWLAHIVDRHFGVRYPWTLRVTSPRDGALASVELASRDGATALWASIAITPAARGATNVLWRGGVAADASGFGAKLFRTWARLHAAPFAMLAHVDGRALSTLDALYSRAWRGPIPEGIAHTRPMPADYRTRSR

SEQ ID NO: 15051 - protein, 489 aa, Burkholderia pseudomallei K96243
MTTAHETLALKDPALLRERAFVAGEWQAADGGATLEVRNPATGALIGTVPAMGAAETRRAIDAANAAWPAWRKKTAKERAAILRKWHDLMIAHADDLALILTTEQGKPLVEAKGEIGYAASFLEWFAEEGKRVYGDTIPTPAADKRIVVTKEPVGVCAAITPWNFPAAMITRKVGPALAAGCPIVVKPAEATPFSALAMAVLAERAGVPAGVFSVVTGEPKAIGGELTSNPIVRKLSFTGSTPVGRLLMAQCAATVKKVSLELGGNAPFIVFDDADLDAAVEGAIASKYRNSGQTCVCTNRFYVHEKVYDAFAEKLTAAVAKLKVGPGTEAGVVQGPLINGAAVRKVEAHIADALDKGARVTTGGQRHPLGHGFFEPTVLTGVTPDMKVAKEETFGPLAPLFRFSTEEEAIRYANDTEFGLAAYFYSRDIGRVWRVAEALEYGMVGINAGIISNEVAPFGGVKQSGLGREGSHYGIDDYVVIKYMCVAV

SEQ ID NO: 15052 - protein, 207 aa, Zea mays
MVSLKPQKRLAAGVLKCGKGKVWLDPNEVYEISMANSRQNIRKLVKDGFIIKKPQKIHSRSRARRAHEAKQKGRHSGYGKRRGTREARLPTKVLWMRRMRVLRRLLRKYREAKKIDKHMYHDMYMKVKGNMFKNKRVLMESIHKSKAEKAREKTLSDQFEAKRAKSKASRERKIARREERLAQGPREPTAPVAAPAPSTGVPKKAKK

SEQ ID NO: 15053 - protein, 291 aa, Oryza sativa
  misc_feature (171)..(171): Xaa can be any naturally occurring amino acid
  unsure (1)..(291): unsure at all Xaa locations
MERPAPVRKSHTSTADLLAWPQQQHQPDGHAASTPSPARRPHQPSEALRKVVFGGQVTEEEAESLNKRKPCSAPKWKEMTGSGIFAAGADGEAEEPGSAAAPGRAAPRNYQPVTVSHISFAEDGSVPPKKPTSVAEVAKQRELSGTLQSEADSKMKKQISNAKSKELSGHXGLFDPQDVRPNGARNTANGTGASHTPVRNANVSSFSFGEANTDSVTKTAKKITGKKFTDLTGNNIFKGDEAPASAEKHLSTAKLKEMTGSNIFAEGQAPTREYHSGNRKPPGGESSIALV

SEQ ID NO: 15054 - protein, 578 aa, Burkholderia fungorum LB400
MQIGAFLARRLTEAGVRHLFGVPGDFNLSFLEQIQEADGIEFVGNCNELNAAYAADGYARTSGIAALVTTFGVGDLGAIGGIAGAYAENVPVVHITGTPPLHAVNSRALVHHTLVNGDYDNIGRCMSEFTVAQTRITPANAAFEIDRVLRSCWLERRPVHLQLPSDVTHVVVEVPEAPLMLADPSSDPHQLREATRRIVEALASARFPAIVVDADADRFGVTELVQKLAEKCSIPCASLTPAKSALNETSRHYVGTYVGAASAEPVRSIVENADCLIGVGLRFTDTSTALFSQHFNPEAFIDLRRHDLSLGTTQIPGVTLRDVLARVVDDAQPVVRERATQALAAASDALPASSGNVPLTHAALWPRIRRFLKPRDVILGEAGTSHASLSAMKLPPGATYIAQPIWGAIGYTLPALFGSLVGTPSRRHLLFIGDGSFQLTAQELSSILRRDLKPVIFLLNNSGYTIERLILGEHSAYNDVANWHYAGLPHAFDRRERALSLVVETVADLEAALNRAESAEHLVFIELKLPMMDAPESLKKFADIFADFDYGERGPRNPSKLVASEAPAHGHSLTDETA

SEQ ID NO: 15055 - protein, 128 aa, Arabidopsis thaliana
MKYRGVRKRPWGKYAAEIRDSARHGARVWLGTFNTAEDAARAYDRAAFGMRGQRAILNFPHEYQMMKDGPNGSHENAVASSSSGYRGGGGGDDGREVIEFEYLDDSLLEELLDYGERSNQDNCNDANR

SEQ ID NO: 15056 - protein, 127 aa, Vibrio vulnificus YJ016
MAYSEKVIDHYENPRNVGSFDKEDPSVGSGMVGAPACGDVMKLQIKVTPEGIIEDAKFKTYGCGSAIASSSLVTEWVKGKSIEEAASIKNSEIAEELELPPVKVHCSILAEDAIKAAVADYKKKHQL

SEQ ID NO: 15057 - protein, 444 aa, Xylella fastidiosa Ann-1
MNHSRSHALFVQAQTRIPGGVNSPVRAFRSVGGEPFFVARADGPYLFDVDGHRYIDYVGSWGPMIVGHNHPAVREAVQVAISNGLSYGAPCAAEVTMAETIARLVPSCEMVRMVNSGTEATLSAIRLARSATGRNYIVKFEGCYHGHGDSFLVKGGSGMLTLGIPSSPGVPTELSKLTITLTYNDFDAATALFEEMGHHIATVIVEPVIGNANCIPPRPGYLQHLRTLCTQYGVLLIFDEVMTGFRVALGGAQALYGVTPDLTTFGKIIGGGMPVGAYGGRRDLMQHIAPTGPIYQAGTLSGNPVAMAAGLAMLELIQAPDFYTHLSNAAAALCTGLQQAASQAGIAMTTQQIGGMFGLFFTDQQVETYAQATACNTDRFNRFFHAMLQRGVFFAPSAYEAGFISSAHSPNIIEATLEAARTAFQTIANEAAILSKSETPIKMR

SEQ ID NO: 15058 - protein, 278 aa, Bacillus pseudofirmus
TSVGSLSKEHIIEPRMATEDELKLVHDPAFIDAVRQGGQGTLSNGIASNFGLGTEDTPLFPNMHEAASLLVGGTLTAVDAVMSGQCKHALHLGGGLHHGFKGRASGFCIYNDSSIAIEYMKQKYGAKVLYIDTDAHHGDGVQWAFYDDPDVCTLSIHETGRYLFPGTGSVGEKGSGKGYGYSINLPVDAFTEDDSFIELYETAFREVIEFFKPDVILTQNGVDAHHYDPLTHLCSSMRTYEFIPKLAHELAHEYCDGKWIAAAAADMICGVWYLELGL

SEQ ID NO: 15059 - protein, 458 aa, Vibrio cholerae non-O1
MSVVSQVLSHMRGDFFRRLIAIALPITLQNIMFSSRGLVDVLMLGQLGEAEIAAVGVAARATFVTTIMLVGVTTGGALLTAQYWGAGDRKGVRESTALTWLVSNFFAFFTVLLFLFFPQQIMSLTTDSEQVNALGSQYLIITSFTMFAVACVSSMAVGLRAMHKPGVSTFFSGIGIVSNVVLNWILIFGKFGFPAMGIQGAAIATVLSGAIEIACLYSYLYGKKHLMAFGLQDIKAVIDWPKISRFLCLSLPTTFNFLIWAAGLFTYHAIMGQTGVQGLAALSVMTPVESISLSLLIGMSTAAAVLVGNQLGAKNYEAVYYQAIGVTACSVLVGIVVAIGLYLVQIPVLGTFTALTPETRELSEKFMLILCLGIVLRSFPMTAIVGVLRAGGDVKFCLGQDIVAQWCIGIPLAAFAALVLKVEPEWIYLLFLTEEAVKWFGSLHRMKSKKWMKNLIEN

SEQ ID NO: 15060 - protein, 308 aa, Mesorhizobium sp. BNC1
MAQTLPSIVSGEGGLTRYLEEIRRFPMLQPEEEYMLAKRYREHDDTDAAHKLVTSHLRLVAKIAMGYRGYGLPIGEVISEGNVGLMQAVKKFEPERGFRLATYAMWWIKAAIQEYILRSWSLVKMGTTANQKRLFFNLRKVKGKIQALDEGDLNPEQVSEIATRLNVSEEEVISMNRRLSGDASLNAPIRATEGESGEWQDWLVDEHENQEEMLVEQDELESRRRMLEDAMDVLNDRERRIFEARRLSDEPMTLEELSGEFDISRERVRQIEVRAFEKVQEAVKASAKRQAQALRSAPLPGESQHASI

SEQ ID NO: 15061 - protein, 106 aa, Triticum aestivum
MAELVGPRVYSCCHCRNHVCLHDDIISKAFQGRNGRAFLFSHAMNVTTGAKEDRQLMTGLHTVADIHCRDCREVLGWKYERAYEESQKYKEGKFIFEKAKIVQDNC

SEQ ID NO: 15062 - protein, 408 aa, Photobacterium profundum SS9
MHNVLLRVRVKMIYSTMPLSNRRFNHKIKHALEARETQGLYRQRACLSRADQSVYHQGTSLLNFSSNDYLGLAQDPAILSAWQEGLTLFGAGSGASPLVTGFHSAHKALEDQLADWLGYDRALLFNSGFSANQAVLFTIPDKHDVLIQDKLNHASLMEAGLLSPATMRRFAHNDLSALTRLLHQTNDKFPSINPLVITEGVFSMDGDLSPLANISEQCSQHDAWLMVDDAHGCGVLGDKGRGSCDLAGVKADILIVTFGKAFGLSGAAVMCNNDTAEYLIQFARHFIYSTSMPPSQAHALSAACRLIQSDDWRREKLHDLGYLLFENVESSIQLVDTHTPIKPLIIGDSHKALSVSNALKAKGLWVSAIRPPTVPVNSARLRITLTAAHTEQDIKRLATTLNEVINDE

SEQ ID NO: 15063 - protein, 382 aa, Mesorhizobium sp. BNC1
MFLSEQDLQELVRFRHELHRHPEISGEEHKTAERVVAFLAPLKPDRIVTGLGGTGVAVVFEAEEPGPTLMFRCELDALPIAETRESDHRSLVPGKGHMCGHDGHMAIISGLARGLARQRPGRGRVVLLFQPAEETGAGALAVLNTAAFESIRPDFSFSLHNVPGVPLGHVELAEGPVNCASRGMRICLSGRTAHASTPHSGRSPMMAVAAIMPALAALSTDAAMGPQFAMVTLTHASLGEPTFGVAPGSAEVWATLRTLTDDRMDELRAAAEAVARKIAKAEGLELSIDYKDIFPHCENSAEAVECLSRALSAEAVPFGPGRLPMLGSEDFGRFRSVGPAAMFFLGSGPDCPALHSPDYDFPDALIGTGARVFMRVVRDILG

SEQ ID NO: 15064 - protein, 428 aa, Photobacterium profundum SS9
MQKTTSKIDLEFDQQHVWHPYTSTINPLPCYPVESANGVYLTLEDGRKLIDGMSSWWSTIHGYNHPALNQAAKDQIDKMSHVMFGGITHEPAVELCRKLIAITPEPLQHVFLADSGSVAVEVSLKMALQYWHAKGQRRPKFLTVRHGYHGDTFAAMSVTDPDNSMHSLYKGFLPEHIFAESSERGFYEEWCESDIADFKEKLNNNKEQLAAVIIEPIVQGAGGMRIYHPMYLKRIRELCDEHDVLLIADEIATGFGRTGKMFACEHAGISPDIMCVGKALTGGYMTLSATLATKHVADTVCSGEAACFMHGPTFMGNPLACAVGNASLEILMQGNWQQQVLSIEQQLSELLPEIGQLDCVKAVRWLGAIGVVELYEPVNMAEIQKSFVDAGVWIRPFGKLIYIMPPFIITPQELSCLTVAILRTLKTQ

SEQ ID NO: 15065 - protein, 805 aa, Lycopersicon esculentum
MAERVLTRVHRLRERVDATLAAHRNEILLFLSRIESHGKGILKPHELLAEFDAIRQDDKDKLNEHAFEELLKSTQEAIVLPPWVALAIRLRPGVWEYVRVNVNALVVEELSVPEYLQFKEELVDGASNGNFVLELDFEPFTASFPKPTLTKSIGNGVEFLNRHLSAKMFHDKESMAPLLEFLRAHHYKGKTMMLNDRIHNSNTLQNVLRKAEEYLIMLPPETPFFEFEHKFQEIGLEKGWGDTAERVLEMVCMLLDLLEAPDSCTLEKFLGRIPMVFNVVILSPHGYLAQENVLGYPDTGGQVVYILDQVPALEREMLKRIKEQGLDIIPRILIVTRLLPDAVGTTCGQRLEKVYGTEHSHILRVPFRTEKGIVRKWISRFEVWPYMETFIEDVAKEISAELQAKPDLIIGNYSEGNLAASLLAHKLGVTQCTIAHALEKTKYPDSDIYWKKFDEKYHFSSQFTADLIAMNHTDFIITSTFQEIAGSKDTVGQYESHMAFTMPGLYRVVHGINVFDPKFNIVSPGADINLYFPYSESEKRLTAFHPEIDELLYSDVENDDHLCVLKDRTKPILFTMARLDRVKNLTGLVEWYAKNPRLRGLVNLVVVGGDRRKESKDLEEQAEMKKMYELIETHNLNGQFRWISSQMNRVRNGELYRYIADTKGAFVQPAFYEAFGLTVVEAMTCGLPTFATNHGGPAEIIVHGKSGFHIDPYHGEQAADLLADFFEKCKKEPSHWETISTGGLKRIQEKYTWQIYSERLLTLAAVYGFWKHVSKLDRLEIRRYLEMFYALKYRKMAEAVPLAAE

SEQ ID NO: 15066 - protein, 539 aa, Burkholderia pseudomallei
MAAKDVVFGDSARAKMVEGVNILANAVKVTLGPKGRNVVLERSFGGPTVTKDGVSVAKEIELKDKLQNMGAQMVKEVASKTSDNAGDGTTTATVLAQSIVREGMKYVASGMNPMDLKRGIDKAVAAAVEELKKISKPCTTNKEIAQVGAISANSDSSIGDRIAEAMDKVGKEGVITVEDGKSLADELDVVEGMQFDRGYLSPYFINNPDKQVAVLENPFVLLHDKKVSNIRDLLPVLEQVAKAGRPLLIIAEDVEGEALATLVVNNIRGILKTVAVKAPGFGDRRKAMLEDIAILTGGQVIAEETGLTLEKATLAELGQAKRIEVGKENTTIIDGAGEAVNIEARVKQIRTQIEEATSDYDREKLQERVAKLAGGVAVIKVGAATEVEMKEKKARVEDALHATRAAVEEGIVPGGGVALIRARTAIASLTGVNADQNAGIKIVLRAMEEPLRQIVTNGGEEASVVVAAVAAGKGNYGYNAATGEYVDMVEAGVVDPTKVTRTALQNAASVAGLLLTTDAAVAELPKEDAPMPGGMPGGM

SEQ ID NO: 15067 - protein, 153 aa, Bdellovibrio bacteriovorus HD100
MANLPNPWRERSLANPFREFGRHQERIDRLLNELMELRSGTLGEDMSLMPSSELVEEEKNYLLKVDLPGIKKEDVKVEVEGDRLTIRAERRSEKEEKSKKRYFSEISYGSCMRSFALPQSIDEKKVDAKFENGVLSVTIPKTTESKSKQISVH

SEQ ID NO: 15068 - protein, 288 aa, Glycine max
  misc_feature (12)..(12): Xaa can be any naturally occurring amino acid
  misc_feature (162)..(162): Xaa can be any naturally occurring amino acid
  misc_feature (176)..(176): Xaa can be any naturally occurring amino acid
  misc_feature (182)..(182): Xaa can be any naturally occurring amino acid
  unsure (1)..(288): unsure at all Xaa locations
MGRSPCCEQAHXKGAWTKEEDQRLVAYIKAHGEGCWRSLPKAAGLLRCGKSCRLRWINYLRPDLKRGNFTEEEDDLIIKFHELFGNKWSLIAGRLPGRTDNEIKNYWNTHIKRKLLARGMDPQTHRPLASATAGQQHYQLQEPQKRAAGGGPAGHPHQDHLXGRRHLELAGRGLQXVAATTXPRSATPPRRHLDIDLNLSISLAAYQPPEETGIIKQPLVMKQEQETAAGGTNAAAVCLCLNSLGYRPGVECVCGDGSSSSSSSHSHSHSHQWALNFLQAAAPCYRGQ

SEQ ID NO: 15069 - protein, 103 aa, Cyanophora paradoxa
MATVTLNVKTVRPLGERVLVKVSQSEEKTAGGILLPDTVKEKPQIGEIIAEGPGRRNDDGSFQPLEVTVNSKVLYSKYAGTDIKLENEEYVLLSEKDILAIIA

SEQ ID NO: 15070 - protein, 365 aa, Escherichia coli
MERSMKPSVILYKALPDDLLQRLQEHFTVHQVANLSPQTVEQNAAIFAEAEGLLGSNENVNAALLEKMPKLRATSTISVGYDNFDVDALTARKILLMHTPTVLTETVADTLMALVLSTARRVVEVAERVKAGEWTASIGPDWYGTDVHHKTLGIVGMGRIGMALAQRAHFGFNMPILYNARRHHKEAEERFNARYCDLDTLLQESDFVCLILPLTDETHHLFGAEQFAKMKSSAIFINAGRGPVVDENALIAALQKGEIHAAGLDVFEQEPLSVDSPLLSMANVVAVPHIGSATHETRYGMAACAVDNLIDALQGKVEKNCVNPHVATKPRLRRVKPDNRSGFYSLLGCSNCCSPGLIKRLMLCR

SEQ ID NO: 15071 - protein, 260 aa, Lolium perenne
MGRGRVELKRIENKINRQVTFSKRRNGLLKKAYELSVLCDAEVALIIFSSRGKLYEFGSAGTTKTLERYQHCCYNAQDSSSALSETQSWYQEMSKLKAKFEALQRTQRHLLGEDLGPLSVKELQQLEKQLECSLSQARQRKTQLMMEQVEELRRKERQLGEINRQLKHKLDAEGSSSNSFRAMQQITWAAGTVVDEGAGAYHMHHQQQPNHSAAMDCEPTLQIGYPHQFAAAEQAANNIPRSSAPGGENNFMLGWVLGAN

SEQ ID NO: 15072 - protein, 605 aa, Yarrowia lipolytica CLIB122
MSSTYSSIQRHRKDTSSSGSNTTPLARRRRFDEGPADPGSAPHLDSFVVPPTRHDDGTKRQPGRRKQRWSHGENKVADLLQMPTALTGHLTPEQAEAYAIYYRIEEISQQLRLGDIVPPEDERSPSPPPQYDSMGKRTNTRDARYTRQLEEERHRLIERAQRLIPNYRPPVDYHKPAKTQEVVYIPVNEYPDINFIGQLLGARGKTLKKMEQESGAKICIRGRGSVKQGKGRTDIPFQSTAEDDLHCLIISEDEEKIARAVQLVQQVIDTAASVPEGQNELKRSQLRELAALNGTLRDDENYGGAPQSSSGDEMDDRNKRRNNFMSSIVCHICGSKGHFARDCLEKGTNAGTSENADREYDALMRELQGEGVIDTASQQQSIAQNPNTNNVSKLPPAVTGSNAAPINMRKPMSERGGSFDRFDRGGFNQSNQREPQQQSHQQNMHNTNGNNYDRYDRNFNNSSNSSPELPPWHRPTPPSQPAAPPWLRRDNYKKHDKVSVQQSMQQSPWNRDTRQHQHQHQPPVHHQSMFNNNQSPIGPPGMSSSGFGGYGGAPAGVPGMSVPPGPPGLSKVPPPPPPPGVPGMDGDQPIRHPPPPPPGVIGPPK

SEQ ID NO: 15073 - protein, 412 aa, Magnaporthe grisea 70-15
MRQSAESIVLGVVRDELREKDGDIRGINDQPLYIHAHPELAYEEFKAHDAFVSLLRKLQFEVTPHAYGVETAFSADYGSGGRLVVYNAEYDALPGIGHACGHNLIASSSLAAFLGLVAALKHHPDQPGRVRLLGTPAEEGGGGKLKLIAAGAYKDAAASLMVHPGPSYLLAAPVEEVAFVRMLANVKMRIYFSGRESHAAMAPWDGINALDAAMLSYNAVSMLRQHIRPYERIHGVVRQGGERPNVTPSSTQVEYYIRSDTRAAAQKLWERVKLCFEGAAIATGCGVRYEPINSYADVRPSRALCREYQAVQAPDTVSFSEPADFLAGSTDMGDVCYECPGFHGAFGIDTEKGQSNHTPAFAAAAALDKSYKKAIECGRGMAMVGWRVLSDDAFAAEVQKEWEEDMRIAKDT

SEQ ID NO: 15074 - protein, 721 aa, Oryza sativa
  misc_feature (54)..(54): Xaa can be any naturally occurring amino acid
  unsure (1)..(721): unsure at all Xaa locations
MLLLHPRPLPAPAPARRFEPAVRVPPPRRRRRRRRPPLPPLASASASAAIYSVXGSSDEDAFTRCSGYLFEEGAATEGELPTAYDLAGIGAVYRRRPLLVVRRALQIGTSFGRWFTLRYLDRVNERSDDMFEIRAAQLRRILLELGPTFVKIAQAVSSRPDVIPPAYLDELSLLQDRIAPFSTEVAFNIIETELGLPLDMIFSEISPEPVAAASLGQVYQARLRSNRKVVAVKVQRPGVQAAISLDIYILRFLAGVARKAGKLNTDLQAVLDEWASSLFREMDYRAEARSGLKFRELYGKFRDVLVPEMYLEQTRRRVLIMEWVEGEKLSEVRDQYLVEVGVYCSLSQLLEYGFYHADPHPGNLLRTVDGKLAYLDFGMMGEFRQELRDGFIEACLHLVNRDFDGLAKDFVTLGLLPPTAQKDEVTKALTGVFQNAVDRGVQNISFGDLSGNLGRTMYKFKFQIPSYFSLVIRSLAVLEGIAISFNPNYKVLGSSYPWIARKVLTDSSPKLRSTLQTLLYKDGTFQIDRLESLLTESLRARTEQSLTRDQQEETDSSKFAIKQVLSFTLTEQGAFVKDLLLQEIAKGLDALGAATLSSATSAAASRLPFAVPSPSPSLDNEDATNLRNLHRLLLLLSKVPQKEDSSPIPGYNSTEENEGDSTDEISLVLYEMRSLPELLPVLSVIPELPPESQQQFLLLPADLTNRLLSRAVARTIRRIFI

SEQ ID NO: 15075 - protein, 454 aa, Bacillus anthracis str. 'Ames Ancestor'
MNTKKFAKVNEQIPGPKAASLLERRQNIVPKGVSNGIPTFVQSANGALVTDVDGNQYIDFAGAIGTINVGHCHPAVKEALHKQVDQYIHTGFNVMMYEPYIELAEKLAALAPGSFDKQVLFLNSGAEAVENAVKIARKYTKRPGIIAFSKGFHGRTLMTMTMTSKVKPYKFGFGPFAPEVYKAPFPYEYRCPEGLTEEQYDDFMIEEFKNFFISEVAPETIAAVVMEPVQGEGGFIVPSKKFAQEVRNICSEHGILFVADEIQTGFSRTGKYFAIDHYDVVPDLITVSKSLGAGVPISGVIGRKEIMNESAPGELGGTYAGSPLGCAAALAVLDVIEKENLNDRAIELGKVVMNRFEEMKNKYNCIGDVRGLGAMCAFELVQDRKTKTPDKTLTANLCTEANKRGLLLLSAGTYGNVIRVLMPLVITDEQLEEGLTIIEESLQICYEKANTARV

SEQ ID NO: 15076 - protein, 497 aa, Camellia sinensis
MASLTCSADQLAQLFGSNTTNAAAATYICDHFTAVSQKFSDAASAIDSTYLLFSAYLVFSMQLGFAMLCAGSVRAKNTLNIMLTNVLDAAAGAIFYYLFGFAFAFGSPSNGFIGSHFFALKSIPTSSFDYSFFLFQWAFAIAAAGITSGSIAERTQFAAYLIYSAFLTGFVYPVVSHWFWSGDGWASASNTNHLLFGSGVIDFAGSGVVHMVGGIAGLYGAFIEGPRIGRFANPGQSVTIKGHSASLVVLGTFLLWFGWYGFNPGSFTKIANPYTSGSYYGQWSAVGRTAVTTTLAGSTAALTTLFLNRVVSGHWNVTDVCNGLLGGFAAITAGCSVVEPWAAVICGLVAALVLIGCNKVAERVKFDDPLEAAQLHGGCGAWGVIFTALFASEKYVNEVYPGKSDRPYGLLMGGGGRLLAAHVIQIVVIVGWVSVTMGPLFFVLHKLKLLRISAEDEIAGMDMTRHGGFAYVYQYHDEDESNKLGMQMRKIDPEDKS

SEQ ID NO: 15077 - protein, 229 aa, Juglans nigra
NGVLSIMKACVQAKTVRRLVFTSSAGALDVSEHQRPVYDESCWSDVEFCRAKKMTGWMYFVSKTQAEQAAWKFAKENNLDFVSVIPPLVVGPFLMPSMPPSLITALSPITGNEAHYSIIKQGQFVHLDDLCMGHIYLFEHPKAEGRYLCSACDATILDVAKLLREKFPECNVPTKFKGVDESLEIISFNSKKIKDLGFQFKYSLEDMFVEAVQTCRAKGLLPPAAEKTL

SEQ ID NO: 15078 - protein, 563 aa, Brassica oleracea
MAMLETKIIIIVILLLLMVLMLFLFSLVILFACKPWRYLPLFRSSTFKLGELQRPLVSDGDGEHLNQGQTGEEGSREYDLEGACYQNEGILQGRAYKQRLPSSSPHLNQGRTLKHPADKVSLGDVETDDLQDNTSQSLQHDLEKERLSELSPGLVIVNDQRSWLCLEVISGPSIGLQFAVHSVSTSKLPLGLGRVPPSGMLLKDPEVSGKHAQITWNSTKFKWELVDMGSLNGTLLNSRSVSHPDLGSRKWGQPVGLASEDIITLGTTTKVYVLISSQNEFKTPFRVGVASDPMAMRRGGRKLPMEDFCYYKWPLPGVNKFGLFCVCDGHGGAGAAQSAVKIIPEVLANILSDSLEKEKVLSQRDASDVLKDVLAKTEARLEDHLYEGCTATVLLVWKDDEENLFAQCANLGDSACVINLDGRYIQMTEDHRVASLTERRRIQEAGLSLRDNETRIFGINLARMLGDKFPKQHDGRFSAEPYISEPLRIDQSNKDVFAVLASDGLWDVVSPSKAVQLVLQMREKERGTEDSAEKIAKGLLDQANVMRTKDNTSIIYLDFDPSL

SEQ ID NO: 15079 - protein, 559 aa, Triticum aestivum
  misc_feature (335)..(335): Xaa can be any naturally occurring amino acid
  misc_feature (474)..(474): Xaa can be any naturally occurring amino acid
  unsure (1)..(559): unsure at all Xaa locations
MGEMNHQPGVPPPVGVPPPMGMQPMMNAPVGAGAMHQPYEQFNQLNYCVHSNPSWVQVAGLAFLHYLVMLGSTVMLVSIIVPAMGGGPGEKARVIQAFLFVSGINTLLQTLVGTRLPTVMNASFAFVVPVLSIARQFNTNDFESNHERFVHTMRATQGALIVASILNMILGYSRAWGAFAKKFSPVIMTPVVCVVGLGLFQIGFPQVGKCVEIGLPMLILAIVVQQYAPLYFRHIHDRTTFLFERYSLLLCIGIVWAFAAILTAAGAYNHVSLKTQQHCRTDKSFLISSAPWIKISYPFHWGPPIFTAGHSFGMMGAVLVSSFESTGAHFATALXGRPGRSPAHVLTRSIGLQGIGIFLAGLCGAPAGSSVSVENIGLLGLTKVGSRRVIQISTGFMIFFSIFGKFGAFFASIPLPIFAAIYCILFGIVAAVGISFSQFANKNSMRNIYIIGLSLFLGISIPQYFAEYTASAGXAGPARTNAGWFNDIINTVFASGPTVALIVASLLDNTLEPRANENDRGLSWFTPFLRRRKGYSDPRNEEFYSYPIRVHDLVPHRFL

SEQ ID NO: 15080 - protein, 552 aa, Wigglesworthia glossinidia endosymbiont of Glossina brevipalpis
MIFNIKMAKYYIFITGGVVSSLGKGITAASLGSVLESRNLKVTLMKLDPYINVNPGTISPIQHGEVFVTEDGAETDLDLGHYERFIKTKMSKKNSFTSGKIYSEVLKNERKGFYLGSTIQVIPHITNEIKKCIINAGKGFDILLVEIGGTVGDIESLPFLESIRQMSIEIGKNKILYIHLTLVPYLKISKEVKTKPTQHSVKELLSIGIQPDILICRSEKNVSKYEKSKIALFCNVPKQAVFSLKNTNSIYKIPILIKKQGLDSYVCDRFCIKRPEADLSKWKEVIYKQKNPLGNVNIGIIGKYTELPDSYRSLISALEHAGLKNRLMINIQLINSKKIESLGISCLKNLHAILIPGGFGYRGVEGKIIAAKYSREKKIPYFGICLGMQVALIEFARNVTGLSEANSTEFINNCKHPVIAKISEWNKSINYLNKSNISSNNYSTMRLGNQKCHLTKGSLAFKIYNNSIILERHRHRYEVNNIFIEKIKFSGLSVSGWAYYDNHKLVEIIEYSNHPWFVGSQFHPEFNSTPRNSHPLFISFVKAAFDFKNKNI

SEQ ID NO: 15081 - protein, 141 aa, Burkholderia vietnamiensis G4
MAIERTLSIIKPDAVAKNVIGQIYSRFEGAGLKIVASRMAHLSRADAEKFYAVHAARPFFKDLVDFMISGPVMIQVLEGEGAILKNRDLMGATDPKKAEKGTIRADFADSIDANAVHGSDAAETAAVEIAFFFPEMNVYSR

SEQ ID NO: 15082 - protein, 349 aa, Silicibacter pomeroyi DSS-3
MQITPVAAPEHEQVVRIADPESGLLGFIAIHSTRRGPAAGGVRMRPYAQEADALNDALRLSRGMTYKNAAAGLDLGGGKAVIMADPATQKTPDLLAAFGSAVETLAGRYWTAEDMGMTPADMARIGTRTTCVAGLADGDFASGDPSPITARGIFYAIRTAAKHRLGSVDLTGRTVAVQGLGHVGHYLCGYLHQAGANLIVTDIDRAQVARVAERYGATAVAPDAIYGVEADIFAPCAIGAILNAETIPQLKVRVVAGGANNQLATPEDATRLHDLGILYAPDYVANGGGIINVATEILKISGREAWVASRLAALDDTMDRILTRARILSVSPAEVADATVDEILQAKAA

SEQ ID NO: 15083 - protein, 188 aa, Zea mays
TRVRERGGGRINRAVWGPLNRTIITAGEDATIRIWDSETGQLLNESDKESGHQKTISSLSKSLDWSHFITGSLDKSAKLWDTRTLTLIKTYVTERPVNAVDISPTHDTVVLGGGQDAMNVTMTDRRAGKFEAKFYHKILQEEIGGVKGHFGPINALAFNPDGRSFSSGGEDGYVRLHHFDSDYFSIKM

SEQ ID NO: 15084 - protein, 361 aa, Burkholderia vietnamiensis G4
MPKSKRHEPQAESEKISRATQASVKRAGASTDDEEDVAETETGLDTREAEADGDDEREGRAEAAPDVDDFRALLQAELTADTIQHYLNRISVKPLLTVEEEQRYSRLAKAGEFDARQVMIERNLRLVVSIAKGYLNRGVPLLDLIEEGNLGLMHAIEKFDPTRGFRFSTYATWWIRQSIERAIMNQARTVRLPVHVIRELNQVLRAKRHLEKNSMSTGDAAERREASIDDIAYLTGKTAEEVTDILALNEHTASLDAPLDLDPASSLLDLLPDDQSQSPDAEVQHRELETLTRAWLSRLSDKHRHVIERRFGLNHIEPATLEELADEMGLTRERVRQIQQEALVRLKRFFASNGVRKDAVL

SEQ ID NO: 15085 - protein, 359 aa, Bdellovibrio bacteriovorus HD100
MTEAFSGFKFFGIAKSTIFERNQLMKAPVRVAVTGAAGQIGYALLFRIASGAMLGADQPVILQLLEIPDEKAQKALKGVMMELEDCAFPLLHSMIATGDPAVAFKDADVALLVGARPRGPGMERKDLLTANGQIFTVQGEAIGKYANPNVKVLVVGNPANTNAYIAMKSAMKHGRVKAKNFTAMLRLDHNRALSQLATKTGKPVASFKKVAVWGNHSPTMYPDVRFATADGAKVPELLKLGTAEGDAWNKDTFIPTVGKRGAAIIEARGLSSAASAASAAVDHIRDWWLGTNGEWVTMGIPSDGSYDIPEGIMYGFPVTCKNGEYEIVKGLEIDAFSREKMNNTLKELNEEKDAVASML

SEQ ID NO: 15086 - protein, 228 aa, Lolium perenne
MGRGKVELKRIDNKISRQVTFAKRRNGLLKKAYELSVLCDAEVALIIFSTRGRLFEFSTSSCMYKTLERYRSCNYNSKATATPETELSNYQEYLKMKTRVEFLQTTQRNLLGEDLGPLSIKELEQLENQIEISLKNIRSTKSQQSLDQLFELKRKEQQLQDVNKDLRRKIQETSAENVLHMSCQDVGPSGSSGQANQANEQELFHSAVCDPTLHIGFHQSYLDQLNNN

SEQ ID NO: 15087 - protein, 150 aa, Glycine max
MSRRKVREPKEENVTLGPAVRDGEHVFGVARIFASFNDTFIHVTDLSGRETLVRITGGMKVKADRDESSPYAAMLAAQDVAARCKELGITALHIRLRATGGNKTKTPGPGAQSALRALARSGMKIGRIEDVTPIPSDSTRRKSGRRGRRL

SEQ ID NO: 15088 - protein, 621 aa, Campylobacter coli RM2228
MNAKTQDMELEELFKENEKDYITYEKLVKYFSKQPNSATAKKVQTLMKKYKVQLFSAAEIAQMKNIEDAKRLQEEKQKLQDTSLENEFDLANENDLLEWSRSDSPVRMYLREMGQIALLNKDEEIEISKKIELGEDIIIDAFCSVPYLIDFILDYREPLINRERRVKELFKSFDDEEKNDDKLDELEDEDEENDEELENEEETPKKTSKKEDERTLKVIEKFKALEKAKKDWLKVSKDKESGDEILDKLGIAFKKNILKEKLMDLGPTSKLISEIVKSMETALKSDEEFDKELKRLEYRLPMFSEELKNRHANILKDITKLSKEEITERALETTMVSTYMEIKKLFQTKEASEKSFDLEKERLKEILEQIKRGKKISDEAKTRMAKSNLRLVVSIAKRYTNRGLPFLDLIQEGNIGLMKAVDKFEYKRGYKFSTYATWWIRQAISRAIADQARTIRIPIHMIETINQINKIIREHLQKDGKEPDVSVIAKEVGLSVDKVKQVIKITKEPISLEAPIGSEDDGKFGDFVEDRNSLSPMDHILKDDLKEQIDEVLDQLNDREKAVIRMRFGLMDDESDRTLEEIGKELNVTRERVRQIESSAIKKLKHPKVGRKLKNYIEGWK

SEQ ID NO: 15089 - protein, 123 aa, Glycine max
  misc_feature (20)..(20): Xaa can be any naturally occurring amino acid
  unsure (1)..(123): unsure at all Xaa locations
NSARGFDTSSVDNMRRLVEXPPGHVYPLAILCHDIMPPPLKVEKEIGEKRIISFHGAGISVAPALSFSETTATSENPEKAKELFSKALYDSVTEQYNVLKSAIHGKKGFEASTPVVSLSQPWK

SEQ ID NO: 15090 - protein, 223 aa, Saccharomyces cerevisiae
MSSEDYGYDYDLLFKIVLIGDSGVGKSNLLSRFTKNEFNMDSKSTIGVEFATRTLEIDGKRIKAQIWDTAGQERYRAITSAYYRGAVGALIVYDISKSSSYENCNHWLSELRENADDNVAVGLIGNKSDLAHLRAVPTEESKTFAQENQLLFTETSALNSENVDKAFEELINTIYQKVSKHQMDLGDSSANGNANGASAPNGPTISLTPTPNENKKANGNNCC

SEQ ID NO: 15091 - protein, 676 aa, Candida albicans SC5314
MTVQDNLHPYLKKPSIKRPLDLLVRLSANFSEIRLPYLDDVSLPPRSPLERSIHHELEEDKKSTYDIEGQTIGRNSFSYELENVDATSSYYAGDDADIHGADVVDYDLEDDNVSISQTTLAMSTSEMGGPSTIKNLKEKEYYYEADAGDGTHATEQYVTGFRLVLTLFSCIVSLFLVVLDQTIVTTIISDVGNNFKAFDKIGWLTSGYLLPMACLSLLNSKIAVAFGRKNCLLVGILIFEIGSLVAALAKNMPMLIGARVIQGLGGGTIQSMISIILTESVPISKRSLSYALLGITYSCSFLGPIVGAAILTHLNWRWCFYINLPIGGAAFIILLMGFNPPKVKGNIKDRLKKIDYMGTFLLTTGLVLILLALSFGGEEFNWKSGYIIQNFIVGGFSIIAFLVWTFKYAPNPMILSIFIKNFTILCACISAFANFAVFIALITYLATYFQVVFNKSAFKSSIAILPMIVSVVVASMLNGPFIRRTSNVKIPMVISGICAPVGAAFLLMLDKDANNSKQIGCQIVIGVSIGLQFQASLLSAQLEVPKDVEGSLIMITVFMSFLKSLGGTLGVVIAQLVYNNSVVVNFKKLLNNLDTTSIQYKTISRFNASEIVASPELLWSAIPDSNIRGLVLDKVIVHALKNVYYVSIGLGVVCAIASLWTTNKKVPKDEEVRKSK

SEQ ID NO: 15092 - protein, 541 aa, Thermoanaerobacter brockii
MAKQIKYGEEARRALERGVNAVADTVKVTLGPRGRNVVLDKKYGSPTVTNDGVTIAREIELEDPFENQGAQLLKEAATKTNDIAGDGTTTATLLAQAMVREGLKNLAAGANPMLLRRGIAKAVDAAVEGLKRISKPIDNKESIAHVASISAADEEIGKLIAEAMDKVGKDGVITVEESKTLGTTLEVVEGMQFDRGYISPYMVTDAEKMEAVLEEPVILITDKKISNIQDLLPLLEQIVQQGKKLLIIADDVEGEALATLIVNKLRGTFTCVAVKAPGFGDRRKEMLQDIAILTGGQVISEELGYDLKDVRLDMLGRARQVKVTKEYTTIVGGAGDPSEIKKRVNQIKAQIEETTSDYDREKLQERLAKLAGGVAVIQAGAATETELKEKKHRIEDALAATKAAVEEGIVPGGGIALLNVIEDVQKVVDSLEGDFKTGAKIVLRALEEPVRQIATNAGVDGSVIVEKIKAAKDPNFGYDAYKEEFTDMFKAGIVDPTKVTRTALQNAASIASMILTTEAIVVDIPEKNTGMPNPGAGMDMM

SEQ ID NO: 15093 - protein, 109 aa, Brassica napus
  misc_feature (45)..(46): Xaa can be any naturally occurring amino acid
  misc_feature (98)..(98): Xaa can be any naturally occurring amino acid
  unsure (1)..(109): unsure at all Xaa locations
MNPENHPTTTHSKVISHVFFTGTAKQGCAGPPLGLVDIGVSDIAXXFRVSLPGIAKNQDKIKCEIQREGRVCIQGVVPEIAIPSDSGCLYRMQVQQLXPPGPFSITFNL

SEQ ID NO: 15094 - protein, 690 aa, Yarrowia lipolytica CLIB122
MTRDTRNHLLFEVATEVANRVGGIYSVIKSKAPVTVYEYGDRYHLIGPLNRKSADIEVEEITDESQIPEAINKTLKSMAERGIQYVYGRWLIEGAPRVILFDLGSAWGYLPEWKSDLWTVAGIPAPEGDKESNDAVVLGYLVAWFLGELTTHETERAVIAHFHEWLSGIALPLCKKRRIDCTTIFTTHATLLGRYLCAGSVDFYNNLQGFDVDAEAGKRGIYHRYCIERAASHSADVFTTVSHITAYESEHLLKRKPDGVVPNGLNVVKFSAMHEFQNLHALMKDKINQFVKGHFYGHLDFDLDDTLYTFTAGRYEYRNKGVDMFIESLARLNHRLKSEKSTKTIVAFIIMPAQTSSYTVETLKGQAVMKALEDTVNEIQQQIGRRMLDHCARHNSHDGKEIPGLDQLLSPSDRVLLKRRVFALKRETFPPIVTHNMVDDSTDPILNQIRRVQLFNRPEDRVKIIFHPEFLNSNNPILPLDYDDFVRGCHLGVFPSYYEPWGYTPAECTVMGVPSITTNLSGFGCYMEDLIENASDYGIYIVDRRLKSIDESVDQLTDYMFEFSKKSRRQRINQRNRTERLSDLLDWKRMGREYIKARQLALRRAYPDQFDHEENPFEDEEPLKLTRPLSVPGSPRDRAGLMTPGDLGSLGEIGEGLDTDDYVGFRLPQDDDDEEETSYPATLTLAGSRK

SEQ ID NO: 15095 - protein, 548 aa, Stenotrophomonas maltophilia
  misc_feature (482)..(482): Xaa can be any naturally occurring amino acid
  unsure (1)..(548): unsure at all Xaa locations
MAAKDVKFGNDARVKMLRGVNVLADAVKVTLGPKGRNVVLDKSFGAPTITKDGVSVAREIELEDKFENMGAQMVKEVASKANDAAGDGTTTATVLAQAIILKVMKAVAAGMNPMDLKRGIDKAVTVAVEELKALSVPCSDSKAIAQVGTISANSDETVGKLIAEAMDKVGKEGVITVEDGTGLQDELDVVEGMQFDRGYLSPYFINKPETGAVELESPFILLADKKISNIREMLPVLEAVAKAGKPLLIIAEDVEGEALATLVVNTMRGIVKVAAVKAPGFGDRRKAMLQDIATLTGGTVISEEIGMELEKATLEDLGQAKRVVINKDTTTIIDGVGEEAAIQGRVAQIRQQIEEATSDYDREKLQERVAKLAGGVAVIKVGAATEVEMKEKKARVEDALHATRAAVEEGVVAGGGVALIRVASKLADLRGQNEDQNVGIKVALRAMEAPLRQIVLNCGEEPSVVANTVKGGDGNYGYNAVXRRIRQHDRHGYPGSNQITRSALQYAASVAGLMITTECMVTDLPKNDAADLGAAGGMGGMGGMGGMM

SEQ ID NO: 15096 - protein, 541 aa, Cyanophora paradoxa
MAKQILYHESARRALEKGMDILAEAVAVTLGPKGRNVVLEKKFGAPQIVNDGVTIAKEIELEDHIENTGVALIRQAASKTNDVAGDGTTTATVLAYAMVKEGMRNVAAGANPMAIKRGIDRATQKVVETIAAHAKPVEDSRAITQVASISAGNDDEVGKMIADAIEKVGKEGVISLEEGKSTTTELEITEGMRFDKGYISPYFVTDPERMEVIQKDAMFLITDKKITLVQDLVPILEQVARARKPLFIIAEDIEKEALATLVVNKLRGNLNVSAVKAPGFGDRRKAMMQDIAVLTNTQVISEQTGLRLDSIKLDVLGKARQVNITKDYTTVIAEGNEEGVSARCEQIRRQIEETDSAYEKEKLQERLAKLAGGVAVIKVGAATETEMKDKKLRLEDAINATKAAVEEGIVPGGGTTLAHLAIELENWVQSNLEHEELIGGMIVARSLTAPLKRIVENAGQNGAVIAEQVKDKPFNIGYNAANAQFVDMFEAGIVDPAKVTRSGLQNAASIAGMVLTTECIVVDKAESQQKAASVNRNSFDY

SEQ ID NO: 15097 - protein, 541 aa, GIBBERELLA ZEAE PH-1
MFVGTNRLLFLLFQLPPTETWNVHTPKKMDEIRSVPDQTQHGVTTSEEKKTHNGESLKQPTQPDIEQDSAEAELEDQSQRLPFFRLLLAYLCLCLCYLISYLDMNSVATSLPTISEALDAGPTVTWVGTSYLLGQLSFQPLYGRTSDITGRKPVLLFSMGCIVSGGVFGIGGGGISSSVATIVSDLVSLRSRGKYQGFISLTIGTGAASGPFVAAGLIQMTTDGWRWAFWVPAIMGAVCFVLLLFLLPLKPVSGSLKEKVGKIDWWGVLASISGIMSISSGGSMWAWKNVKTISMLTIGIVMLLVFIIIEAFFAKIPIIPLRLFKQRSPSVLILTGFFHDFAWQSTQYFIPLYYQTVCGFTPLKSATLIVPFLLAQGIAGAASGLLMARYARYMPILRAGFTVWTLGAGLKLLFNRNTHIALYVVVLAVEGAGIGWVHQPGLVALQANSADEDRAVATGTRNVFRSLGGVIGIAVSTAVHYAVLDKALQTDNAIPNWLRGSVLDGTWSIEDPQTEQYRLVSWLTISSSNMTLIGVAVKVQR

SEQ ID NO: 15098 - protein, 569 aa, Euglena gracilis
MNRAGVLARRGYSSKGKDILFGVDARVKMLAGVNRLSQAVSVTLGPKGRNVVIEQPFGAPKITKDGVTVAKAIEFKDSFENLGAQLVRQVANTTNEIAGDGTTTSTVLANTIFSEGYKAVTQGTSPVDMKRGIDRAVEVVLQSLTEQSKTIVSKEEVTQVATISANGDVEIGQLIGHAMEKVGKAGVITVSDGKTLDTELEVVEGMSLDRGYISPYFVTNAKTQKVEIEDAFILLCQKKVSTIQQILPVLEHIAKANRPLVIIADDVDSEALATLIINKINGKLKVCAVKAPGFGDNKTNMLHDVAIFTGGEVYNEELGMNLEQHFDHRILGFAKKVSVGKDQTIILNGAGDPKAVEERKELIQGMLGKTDSSYEKEKLNERLAKLSGGVAVIKVGGASDVEVGEKKDRVTDALNATRAAVSEGIVPGGGAALLYASSALAELAADPTLTEDQKTGVRIVMSAIKLPAITIVKNAGGEGAVVIHQLLAEKKMQQGYDAQQGKYVNMFEAGIIDPAKVVKTALVDAASVAGLMITTEAAITDIPAPAPAAGGGMDGMGGMGGMGGMGGMY

SEQ ID NO: 15099 - protein, 368 aa, GIBBERELLA ZEAE PH-1
MAPLDNPAVPKGSVVLVTGVNGFLGSHVAKQFLEFGYKVRGTVRDPAKNSWLSTAFDNQYGQGNFELVKLADMTSEEDLKEVVKGVSVIAHTASIMSLNPDPNKVIPDAIAGALTALKVAYGEPSVKRFVLTSSSSAATISMPGKPHALVNEESWSEGAVKIAWSDPPYTMARAGAVYAASKVQSEQAIWKYHKEHQSERPDLVVNTVLPNYNWGKTIDAANQGYPSSSGLPVMLYKNKVATMHRRTAPQYFIDVDDTGRLHVAAAIFDHVKDQRIFGFAGRFNWNQVLDILRKHYPEKTFPENFADGEDANEIEPRDKAEQLLKDLGRPGWTSLEDAIIANVEDLDKDGDDVWYKDYAELESLAQPA

SEQ ID NO: 15100 - protein, 137 aa, Brassica oleracea
FKEAFSLFDKDGDGCITTKELGTVMRSLGQNPTEAELQDMINEVDADGNGTIDFPEFLNLMARKMKDTDSEEELKEAFRVFDKDQNGFISAAELRHVMTNLGEKLTDEEVDEMIREADVDGDGQINYDEFVKVMMAK

SEQ ID NO: 15101 - protein, 580 aa, Chlamydomonas reinhardtii
MAQSQLAKGSRQTTGRPFQNKPARAARRLVIRAADAKEIVFDQESRRRLQAGINKVADAVGVTLGPRGRNVVLEQKFGVPQVINDGVSIRRAIELKDPVENAGAQLIKEVAGRTNDAAGDGTTTASVLAREMIHYGLQSVTAGANPIAVKRGLDKTAEYLVAKLKEHAKPVKGRDDIKNVASISAGNDNAIGEMIADALDKVGSNGVLSIETSNSTETVVEVQEGMEIDRGYISPQFVTNQERLLVEYDNCRVLVTDQKIDAIRDIIPILEQVTRLNAPLLIIAEDVSGEALATLVVNKLRGVLNVCAIKAPGFGERRKSLLQDIAIVTGAEFIAKDLGMKVEQAVVEQLGVARKVTVANNTTTLIADAASKDEIEMRIAQLKKELAETDSVYDTEKLSERIAKLSGGVAVIKVGAATEAELEDRKLRIEDAKNATFAAVEEGIVPGGGAALLHLSELVPAFKETLTDAEEKLGADIVMKSLRAPCRLIADNAGVEGEVIVQRLLGKPFEVGYNAMIDKVENLLDAGVIDPAKVTRNGLLNSVSIAGIMLTTQAVMVEKHKPSEIPGGMTASGMPSGMTI

SEQ ID NO: 15102 - protein, 199 aa, Triticum aestivum
  misc_feature (141)..(141): Xaa can be any naturally occurring amino acid
  unsure (1)..(199): unsure at all Xaa locations
AYLCDFLKQVCTKKHVPTGPEFPGYRRPTRPDVSDPQFLMFPREDQLTGRSATRVRLGEAVSEGTVNNETLGFFIGRVYLFLTQLGIDKDRLRFRQHLPNEMAHYAADCWDAEIECSYAWIECVGIADRPPYDLRAPLHKXSGAPLTPHEKFHISHSKCQKLPSQSHHKKHPRSISLRHAEHQATPPRNYLQPPLALTH

SEQ ID NO: 15103 - protein, 435 aa, Chlamydomonas reinhardtii
KSGMEKTVQELVKELRKMSSVVQTDKDLANVACVSAGGNTDIGSLISDAMAKVGRTGVVTMEEGKTAEDQLVFVEGMQFERGYTSPYFVTDPERMICEYENCKILLVDKKISTARDIITILESAIRGNYPLLIMAEEVEQEALATLVVNKLRGTLKVVAIKAPGFGERRSSYLEDIAILTGGTVVGDEMGVSLEQATDAVLGTAAKITITKERTTVVGDGSTAADVAARVKQIRNLQMQTDQDYEREKLQERIARLSGGVAIIQVGAQTETELKEKKLRVEDALNATRAAVEEGVVPGGGCTLLRLSEKVDVIKRRMTDPEQQMGADIIKRALCYPIKLIAQNAGVNGSVVMNEVMKNLDRPHYGYNAATDSFENLMETGIIDPSKVVRCSMENAVSVAKTFLLADVVVTELKEIEAGAKPNPVAPGAAGFGGGL

SEQ ID NO: 15104 - protein, 213 aa, Picrophilus torridus DSM 9790
MVRNEIKAVKEESKKRNFLESIEISINLKDVDLSDPKKRINEEIVLPSGRGKDLKVALISSEEMKLKAKNADYTFSPEDVSKFVDDKKSFKKLANKVDFFVAESTLMSSIGKNLGVILGPRGKIPRPVPPGQDPTALIENLKKSVRARSRDRRTFHVPIGTREMSDDDLYNNFVTVYKRIVSRLDKGPGNIDSIYIKTTMGKAIKVETGDLND

SEQ ID NO: 15105 - protein, 405 aa, Schizosaccharomyces pombe
MAEEGYVAIVTGATGLNGAAIIKRLSEDDNCKTIHCISRSLKDEYPRKIKHHSIDLLNEEPKDIAKKFSLEGVKGINYAYFAAYKEENNEEKLCEVNGNMLRNFVQALELTSIQTLRRVILTTGLKFYGLHLGEVRLPMIETDIRVPETFSGTPNFYYVQEDILKEFSNGKKWDYTIAMPNDICGVSKGSYMNEAFTIALYALVCRELHEPFRFPGNEKFYLGFDDISYSKLIADFQLWMTFKAECSEEKFNIVNGDIHSWSRTWPKIAEYFGVEVPKNQFATDFTLSTEVTLSTPSPINLYEKELGIKHTPNSKIINQISLQQWVKQKKVQDAWRTIAEREKLNAHALEVGTWAFCDFLFGRTYNVISSMSKARKLGYTDYYDTFDGFKETFDELKKQKQIPQN

SEQ ID NO: 15106 - protein, 422 aa, Triticum aestivum
  misc_feature (390)..(390): Xaa can be any naturally occurring amino acid
  unsure (1)..(422): unsure at all Xaa locations
MAAASFTAAKFLAPAAARSGGDRARPFPAPSASSMRPLRHRPARRLGSVLAVSSDVLKAAPAAAAYPAVTREEALELYEDMILGRNFEDMCAQMYYRGKMFGFVHLYNGQEAVSTGFIKQLNQPDCVVSTYRDHVHALSKGVPARAVMAELFGKATGCCRGQGGSMHMFSEPHNLLGGFAFIGEGIPVATGAAFAAKYRHEVLKQSSPDGLDVTLAFFGDGTCNNGQFFECLNMAQLWKLPIIFVVENNLWAIGMSHLRSTSDPEIWKKGPAFGMPGVHVDGMDVLKVREVAKEAIDRARRGEGPTLVECETYRFRGHSLADPDELRRPDEKSHYAARDPITSLKKYIIEQNLASEAELKSIEKKIDDVVEEAVEFADASPLPPRSQLLXENVFADSKGFGISPDGKYRCEDPKFTQGTAQV

SEQ ID NO: 15107 - protein, 97 aa, Acetobacter aceti
MTKFRPLHDRVVVRRLEGEQKTAGGIIIPDTAQEKPMEGEVVAVGPGARNEQGQIVALDVKAGDRVLFGKWSGTEVKIDGEELLIMKESDIMGVVTA

SEQ ID NO: 15108 - protein, 216 aa, Caragana jubata
MGRRPARCYRQIKNKPYPKSRYCRGVPDPKIRIYDVGMKRKGVDEFPFCVHLVSWEKENVSSEALEAARIACNKYLTKFAGKDAFHLRVRVHPFHVLRINKMLSCAGADRLQTGMRGAFGKPQGTCARVAIGQVLLSVRCKDGNSHHAQEALRRAKFKFPGRQKIIVSRKWGFTKYNRTDYLRWKSENRIVSMQPLGCHGPLANRQPGRAFINASA

SEQ ID NO: 15109 - protein, 546 aa, Acetobacter aceti
MAAKDVKFGADARQRMRAGVDILADAVKVTLGPKGRNVVLDKSFGAPRITKDGVSVAKEIELADKFENMGAQMLREVASKTNDIAGDGTTTATVLAQAIVREGHKAVAAGMNPMDLKRGIDKAVAVVIEELKKNAKKVTTPAETAQVGTISANGESEIGQMISEAMQKVGSEGVITVEEAKHFQTELDVVEGMQFDRGYISPYFVTNPEKMTADLENPYILIHEKKLSSLQPMLPLLESVVQSGRPLLIIAEDVDGEALATLVVNKLRGGLKIAAVKAPGFGDRRNVMLEDIAILTGGQVISEDLGIKLETVTLNMLGTAKKVHIDKENTTIVDGAGKADDIKGRVKQIRAQIEETSSDYDREKLQERLAKLAGGVAVIRVGGSTEVEVKERKDRVDDALHATRAAVEEGIVPGGGTALARATLKLEGLHYHNDDQRVGGDIIRRALQAPLRQIAHNAGEDGAVIANKVLENSDYNFGFDAQAGEYKNLVEAGIIDPAKVVRTALQDAASVAGLLITTEAMVAERPEKKAAPAGGPDMGGMGGMDF

SEQ ID NO: 15110 - protein, 1208 aa, Magnaporthe grisea 70-15
MEVRPQARVPPRPVLEEASMRTNYSISQNSATPPNYQHGGLKTENIRPAQPQKTRRDIPVSSSHVPLNPRLYEIREEAQSTPQSKRESQASTASYKSSSSNTFRKPKTHVGPWQLGKTLGKGSSARVRLARHTSTHQYVAVKIVAKSTCKMTQAGSLAKLDEIDSAAPEKVEGMRRMPIALEREVAILKLIEHPNIVKLYDIWENSNEIYLILEYVERGDLFDFISKHGPMPEEEAIFVFRQIMSALEYCHSYGICHRDLKPENILLKSNGQVKIADFGMAALHQGPRTPLWTFCGSPHYAAPELLREKAYRGEKSDIWSMGVILFAMMAARLPFDDEDMNLMFAKARKAIYHMPSFFSDEAKDLIHRLLQVDPRKRLSMRQMWQHPVVWKYGYLDELGGEGIPEVPNPRTRQEIKPLDLCDIDPQILRPIQSMWHTLSEDELVKKLISDDYRERQLENYDPSLTHSPSDYHHIRPPLWLTKVSTRQFMTNKANGQGRSISKFTVISNVTETGTGANLGTVRSYDPYKSPAVKQPQATHARIVIHRDSTDTDRNAASLGSTSHRRPRANSTGSWKRPARRSQLGSRILTPRSTASSVQSSRKFHARSRTSSRQKRAMDFSTARRKAAAAKLSNQQTLLGTDGSKTVTGWNIQCSSDPDIPGDTADSSNARLRSKDRLHEELRHFSSSIAKDCDEAFNSSLLSVSQFDGDRSRQGSPFSLSLGTPVSATPVTPVVTPTIPRPSARPWDSRPLPPTPPSSSHEKESAVNFGENPSILARRGQPPTQGYNLRSGPVAMTPTPSDRRVVSAPVHGGQYGGCATGKLPSIEEATPNTIQDEVNRSRIVSLPAKPVATAPTSNEARGLEFLSNAEQTIRIVHSPSAQRESGITRRPHPIQANAKPSKMVGTSTGPVKQASIDLYHADDSIISHRNAQLAQTSSHGSASTFAMRKKTSSWFKRLSRESKGSKGSLCDELDDTKSIDVPHGLTSGPIKNERDNSSINMSHRPPEKTSNKKKSFFLPFWRHKSEPRMSLAEPDFEESPSPETNAAVKSHKTSGNNLLNFGDAESAERMIKPQQNWLARLFRVKPVTRVICLSISRRRARQEVAILLRDWRKYGIRDVEVDKKRNVVFARLSSKNHLNIKEVALACEIITVIEHGKRNHLSIVRFTQEKGAASSFQRVVDTMRDVLGNRNLLVTDKSKAKMMIKTLNS

SEQ ID NO: 15111 - protein, 511 aa, Cylindrotheca fusiformis
MAEFDNTFILEFCSGGNESSSDVQVLCQVASLANGTSASAGGLTEGINTFFLLFAGALVFIMQAGFAMLCAGSVRQKNVKNIMLKNMLDACGGAIGFWTIGYAFAYADNSSGNKTFIGGKNFFVNQLDESGGAWIGFFFQFAFAATAATIVAGTVAERCKMSAYLCYSIFLTGFVYPVVVHSIWSADGWLTAFRDDPWQGVGVIDFAGSGVVHMCGGATALVAAIVLGPRKGRFYDEDGNALETPASFPAHSVALQVLGTFLLWFGWYGFNPGSALVIDNAASASTSALCAVTTTLAAASGCVTAMFTDTLIEMMATGEASYDLTMAMNGALAGLVAITAGCSVVTPWASLIIGIIGGWVYLGLSKLLIKLKIDDAVDAVPVHFGNGMWGVLAVGFFAEPDAMVTAGYNDVPGVFYKGDGSLLLCQFVAIVWVCAWVFFLMTPFFVVLNILGMFRVDPLEEEVGLDISHHRGSAYDMTTAKKEDVEELMEHRSSKHGKVEIPKEVQKEDTA

SEQ ID NO: 15112 - protein, 411 aa, Anaplasma phagocytophilum
MVEKAVLECGDRRISLPVLRGTDGTPVVDITTLYRENNVLTYDPGFMSTAACRSEITFIDGNKGTLRYRGIDIENLIGTPNSFSSIVYLLLNGTLPSETEHEEFARILGAEYDVPEQVMNVIRSFPRDSHPMAILIASFSALAANYHASRIDPLTGAIIAIAKVPGIVASIYRHTANLDFIQADANLEYTHHFIRMMFGDMDDAHRDIMHKALDAIFIMHADHEQNASTSTVRMTGSSGAGLFACLCAGVATLWGPAHGGANEAVIKMLAEIGSPENVSSFIDKVKNNKGKSRLMGFGHRVYKSYDPRARVLRTICKDVLDSLGRDENLLAVAEELESQALQDEYFIERKLYPNVDFYSGIVLRAMGVPVDMYTAFFALARTSGWASQWYEMIQSDEGKRISRPRQLYTGK

SEQ ID NO: 15113 - protein, 341 aa, Yersinia pestis KIM
MKALSKLKAEEGIWMTDVPQPELGHNDIMIKIRKTAICGTDVHIYNWDEWSQKTIPVPMVVGHEYVGEVVAIGQEVKGFNIGDRVSGEGHITCGHCRNCRGGRTHLCRNTVGVGVNRPGSFAEYLVIPAFNAFKIPDNISDELAAIFDPFGNAVHTALSFDLVGEDVLVSGAGPIGIMAAAVCKHVGARHVVIADVNEYRLDLARKMGVTRAVNVSKENLNDVMTELGMTEGFDVGLEMSGAPPAFRSLLNSMNHGGRIAMLGIPPSDMSIDWNQVIFKGLFIKGIYGREMFETWYKMAALIQSGLDLTPIITHRFPIDEFQQGFDAMRSGKSGKVVLSWD

SEQ ID NO: 15114 - protein, 323 aa, Glycine max
  misc_feature (106)..(106): Xaa can be any naturally occurring amino acid
  misc_feature (110)..(110): Xaa can be any naturally occurring amino acid
  unsure (1)..(323): unsure at all Xaa locations
FHSADPFAKKDWYDIKAPSLFQVKNIGKTLVSRTQGTKIASEGLKHRVFEVSLADLQGDEDHSFKKIRLRAEDVQGKNVLTNFWGMDFTTDKLRSLVRKWQTLIEXHVDXKTTDNYTLRMFCIGFTKRRSNQVKRTCYAQSSQIRQIRRKMREIMVNQATACDLICLFFFYYYCRILHFNSDLVLMVKDEKTGTCLPCQSPCSKDFLIQHASIEDLDLSSDKVAELKHVLAMLDDFSAEELGAKIKDYGIVSPETKNSLSDPYPFNLMFQTSIGPSGFSPGFMRPETAQGIFVNFKDLYYYNGNKLPFAAAQIGQAFRNEVGS

SEQ ID NO: 15115 - protein, 411 aa, Anaplasma phagocytophilum
MVEKAVLECGDRRISLPVLRGTDGTPVVDITTLYRENNVLTYDPGFMSTAACRSEITFIDGNKGTLRYRGIDIENLIGTPNSFSSIVYLLLKGTLPSETEHEEFARILGAEYDVPEQVMNVIRSFPRDSHPMAILIASFSALAANYHASRIDPLTGAIIAIAKVPGIVASIYRHTANLDFIQADANLEYTHHFIRMMFGDMDDAHRDIMHKALDAIFIMHADHEQNASTSTVRMSGSSGAGLFACLCAGVATLWGPAHGGANEAVIKMLAEIGSPENVSSFIDKVKNNKGKNRLMGFGHRVYKSYDPRARVLRTICKDVLDSLGRDENLLAVAEELESQALRDEYFIERKLYPNVDFYSGIVLRAMGVPVDMYTAFFALARTSGWASQWYEMIQSDEGKRISRPRQLYTGK

SEQ ID NO: 15116 - protein, 413 aa, Yersinia pestis KIM
MQLPILEITEMSLPCNKHPFYQQLEQQLDTTRTEGLYKNERVITSAQQANIAVADGSRVINFCANNYLGLANHPKLIAAAKAGMDSHGFGMASVRFICGTQDIHKELEHKLASFLGMEDAILYSSCFDANGGLFETLLGPEDAIISDALNHASIIDGVRLCKAKRYRYANNDMTELEAQLKQAKAEGARHIMIATDGVFSMDGVIANLKRVCDLADEYQALVMVDDSHAVGVIGANGRGTHEYCEVMDRVDIITGTLGKALGGASGGYTAGRKELVEWLRQRSRPYLFSNSLAPAIVAASIEVLSLLEEGGALRDRLWANARLFREKMSAAGFTLAGADHAIIPVMLGEAKLAQDFANALLKEGIYVTGFFFPVVPKGQARIRTQMSAGHTTEQVERAIEAFVRIGKQLNVIA

SEQ ID NO: 15117 - protein, 335 aa, Burkholderia vietnamiensis G4
MTDTSRDLVLVTGASGFVGSAVARIAQQKGYAVRVLVRPTSPRTNVANLDAEIVTGDMRDEASMRAALSGVRYLLHVAADYRLWAPDPHEIERANLEGAVATMRAARAAGVERIVYTSSVATLKVTSAGDPSDENRPLTAEQAIGVYKRSKVLAERAVERMIADEGLPAVIVNPSTPIGPRDVKPTPTGRIIVEAALGKIPAFVDTGLNLVHVDDVAHGHFLALERGRIGERYILGGENLPLQQMLADIAGMTGRKAPTIALPRWPLYPLALGAEAVAKFTKKEPFVTVDGLRMSKNKMYFTSAKAERELGYRARPYREGLRDALDWFGSAGYLK

SEQ ID NO: 15118 - protein, 279 aa, Halorhodospira halochloris
MATRYDDQAIETARQYYNSEDADNFYAIIWGGEDIHIGLYNDDEEPIADASRRTVERMSSLSRQLGPDSYVLDMGAGYGGSARYLAHKYGCKVAALNLSERENERDRQMNKEQGVDHLIEVVDAAFEDVPYDDGVFDLVWSQDSFLHSPDRERVLREASRVLRSGGEFIFTDPMQADDCPEGVIQPILDRIHLETMGTPNFYRQTLRDLGFEEITFEDHTHQLPRHYGRVRRELDRREGELQGHVSAEYIERMKNGLDHWVNGGNKGYLTWGIFYFRKG

SEQ ID NO: 15119 - protein, 565 aa, Zea mays
MNGDGSKEDANRRLEWATLNMERAVVVSETTKGDGNGNAGRKAPISIVRLFLACMVSGGIQYGWALQLSLLSPYSQTLGISHSYVSLTWICGPIAGFVVQPIVGYYSDRCTSKMGRRRPFILAGCIIICLSVLVIGFSADIGRRLGDTKEHCSTFTGSRWSAAAVYIVGFWFLDFANNTVQGPARAMMADLAAGQHGPNVGQAIFSLWMALGSVLGYLSGANAKWHEYGSLPRSHSSPFVLLCFPFLSFAESCCWLIRISISWLPWLKTAACCDACANLKGAFLTAVVLIIISMSVTLWLAGEERLDKESVDTSGGACSAFMDLFKSLKNLPPAMFSVLAVTAVTWLSWFPFFQYNTDWMGREIFHGEPQGSGSKADLYEAGVREGAIGLLFCSVALGVTSFFIPRLCRKLTSRVVWSVSSLMVFVLMTAMVVLGMVSMKGYRPSLAASLSGPDHSFKGGALAIFALIGIPQAVLYSVPWAVASEVATEDGGGQGLTIGVLNIAIVLPQLVIALGAGPIDGAFNKGNTPAFGIGAAFALICAVLALILLPKTRGVSNATVMAGGH

SEQ ID NO: 15120 - protein, 1765 aa, Shewanella oneidensis MR-1
MDKSKLRTFRSKILSHIALPLILIMATVYGITSWFNYLSIEKRLYENLAQESSHSASRLQFLLEHAQANTQGLSDFIGLLADKDDINNPEKLKTVLTNRIQRNPDFFGSAIAFKPNTFPNKKLFSPYVYRSGSGFNYLDIGADGYDYTDGNWDWWSKAINQVGGYWSKAYFDEGAGNVLMITYAVPFGVQPDYFGVTTVDLALDRLPEQLGIAPSRLVVLDDQGRLIFHSDKEKVLAASSSGWLDKQNIKNIAFATLLNDGQAGQASFVDDKGTVYLASVAEVAKLKWRVVVMVPKHELFASLLDDIASAILNLSLLTLLLLLTCYIAAKRLTRPLEALESGILAFGQGKAQELTIPKGAVSEIVTLSETFNQMAALLAEREQAILDSRGNRFARLIDGMSDKSFYCSLDPDGQLAQVSEGVTKVLGIPPELLKRKYQRLFSANPLNEKNWEYTDLALKGQNVPPHQIELVDAKGQARRLDVFMQPLVSDTGELMSVEMLFTDVTEQFSAAAWSNAVLEAAPEAMLIVDQNGQIVFSNSRCQQLFGYDAKAMLALQIETLLPEELRHLHTGERLDFLREGRDRPMASARHVRALKSDGGEFVAEIALSILPSDFDGRRQVAASIRDMTQKIMVEQKIRDSELRFRGLVTNIPGAVYRTRIGEVWVIEYVSDNIAEITGYAASQFIENRQRTFTSLILEDDRALCNQHIERALAQQETFEVEYRIRHRDGSIRWVHEKGKASYSEEGLPLWFDGSIDDVTESKLAIDEIEASRQQLTNITESIPCTVYQLRWVSPTDRSFTFLSGAALAMLGLHREELLRDFNIIAERIFDEERPEVISALAGKSDDQLRWIREFRYRHPNGGIRWMEAGASGHYADDGSIIWNGYVMDVTERKSIEEELAVSEAHFKALFDGATIGIVNVDIKGLILDCNYQFCEDMGLSRDELRSTPIFDVLSAQDKDVAKAQFKELVEGKIDHYRGERSFVRPSGEPLWMTVNVSTLLDSQNQFESAVVSMVDMTELKLLSDELLVAKDEADAASKAKGDFLANMSHEIRTPMNAIIGMSQLCLQTQLDKKQKNYLEKIERASQSLLSIINDILDFSKIEAGKLDIENVSFQLDTMLEDLSDMFSERAAQKQIELLFAVAPNVPRHLLGDPLRLGQVLINLMNNAIKFTERGEVLLSLSLVEQQNDDVVLRFSVRDSGIGLTQEQQSKLFKSFTQADTSTTRKYGGTGLGLAISKQLVELMGGSIGVESQLGHGSTFFFTVKLCISSGQKLFVGQELDGMSILVADDNATARDIMRTTLESMGFNVDTVRSGDEAIMRCSQQEYAVALIDWKMPNLDGIETAKQIKQQTKNAPRILMVSAHANQDFLTQIEQLGLAGYISKPISASRLLDGIMNALGRSGILPVRRHQDNIAPELLLPLKGKRILLVEDNEMNLEVATEFLEQVGIILSIATNGQIALDKLAQQSFDLVLMDCQMPVMDGYQATKAIRQRPELAQLPVIAMTANAMAGDKEMCLRAGMNDHIAKPIEVNLLYQTLLKYLGAPVPSLENAEFVVNESLNPLNLDVESVVKWPEHPELDIDRGLQLVQNSKRLYQRIFDRFATSQRNVVDQINKALASNKREDAVRMAHTLKGLAGNLSSSKLAELARQLELHLSENADYQVELDQIQILVASICEAIEKAKPQFEETSTSTAEHLPKDALIAALKQLRQSLEDADSDAVTQMDALKPQMSALLWQQLSPALTMINQYQFDEAVDLIDEVLAKLT

SEQ ID NO: 15121 - protein, 545 aa, Candida albicans
MSSKIERIFSGPALKINTYLDKLPKIYNVFFIASISTIAGMMFGFDISSMSAFIGAEHYMRYFNSPGSDIQGFITSSMALGSFFGSIASSFVSEPFGRRLSLLTCAFFWMVGAAIQSSVQNRAQLIIGRIISGIGVGFGSAVAPVYGAELAPRKIRGLIGGMFQFFVTLGIMIMFYLSFGLGHINGVASFRIAWGLQIVPGLCLFLGCFFIPESPRWLAKQGQWEAAEEIVAKIQAHGDRENPDVLIEISEIKDQLLLEESSKQIGYATLFTKKYIQRTFTAIFAQIWQQLTGMNVMMYYIVYIFQMAGYSGNSNLVASSIQYVINTCVTVPALYFIDKVGRRPLLIGGATMMMAFQFGLAGILGQYSIPWPDSGNDSVNIRIPEDNKSASKGAIACCYLFVASFAFTWGVGIWVYCAEIWGDNRVAQRGNAISTSANWILNFAIAMYTPTGFKNISWKTYIIYGVFCFAMATHVYFGFPETKGKRLEEIGQMWEERVPAWRSRSWQPTVPIASDAELARKMEVEHEEDKLMNEDSNSESRENQA

SEQ ID NO: 15122 - protein, 292 aa, Silicibacter pomeroyi DSS-3
MALNDPQDKRMSRQAMKAELLDAETELALAYAWRDHRDEAALHRLITAYMRLAISMAAKFKRYGAPMNDLIQEAGLGLMKAADKFDPDRGVRFSTYAVWWIKASIQDYVMRNWSMVRTGSTSSQKSLFFNMRRVQARLEREAATDGLALDRHQLHQMIASEIGVPLRDVEMMEGRLSGSDFSLNATQASDEEGREWIEALEDESEQAAELVAHRHDTEQLRDWLIEAMQALNERERFIVRERKLRDEPRTLESLGDELGLSKERVRQLEAAAFAKMRKSLEARSREVQHFLV

SEQ ID NO: 15123 - protein, 453 aa, Ralstonia metallidurans CH34
MPPGLPRLASLIADAPPDAQDNPEIPRFRCRQRPAACPDIANTAVKPIQKSHKLQNVCYDIRGPVLEKAKQMEEEGHKIIKLNIGNLAVFGFDAPEEIQQDMMRNLPNSAGYSDSKGIFAARKAIMHYTQEKKIQGVGLDDIYVGNGASELIVMAMNALLNSGDEMLVPAPDYPLWTAAVSLSGGTPVHYVCDEANEWMPDLDDIRRKITPNTRGIVIINPNNPTGALYSDELLKEIVAIAREHGLIIFADEIYDKVLYDGNTHTSIGSLSTDVLTVTFNGLSKNYRSCGYRAGWMVVSGDKRPALDYIEGLNMLSSMRLCANVPGQWAIQTALGGYQSINDLVTEGGRLRRQRDLAYELITKIPGVTCVKPKAALYLFPKLDLSMYPIQDDQEFIYELLQESKVLLVQGTGFNWGAPDHFRIVFLPHEEDLREAITRVGRFLESYRKRHGTA

SEQ ID NO: 15124 - protein, 323 aa, Yarrowia lipolytica CLIB122
MAGGPTLKLNSGHEIPQIGLGTWLSKPNEVAKAVESALKDGYRHIDGATIYQNENEVGAGWKASGVPREEIFLTTKNWNNARTKEGVKKQLDQSLKELQTDYVDLLLIHWPVVFKTGEELFPHNADGTVALGEVPVEETWEAFEELVKEGKVKSIGVSNFTEERIEKLLKTAKIPPAVNQIEYHPYLQQPGLAKYLASKNIVLEAYSPLGNNTYGFPRAIDDERVIDLAKKKGKDAAALIVNWIRSKNHVVLPKSVTPSRIKSNFEVFDLSPEEIKFLDSLDEESRRNDPIEWGVDIFGTATPEEIKKRVDEAAKKYLAEQKK

SEQ ID NO: 15125 - protein, 479 aa, Triticum aestivum
MMGRKALDYEELNENVKKVQYAVRGELYLRASELQKEGKRIIFTNVGNPHALGQKPLTFPRQVVALCQAPFLLDDPNVGLIFPADAIARAKHYLSLAPGGLGAYSDSRGIPGVRQEVAEFIQRRDGYPSDPELIYLTDGASKGVMQMLNAIIRNERDGILVPVPQYPLYSAAISLFGGSLVPYYLEEEANWGLDLVSTRQSVAEARSKGITVRAMVIINPGNPTGQCLSEANIRELLNFCYQENLVLLADEVYQQNVYQDERPFISARKVMFDMGPPVSREVQLISFHTVSKGYWGECGQRGGYFEMTNIPPKTVDEIYKVASIALSPNVPGQIFMGLMVNPPKPGDISYLKYSAESKSILESLRRRAQIMTDGFNSCRNVVCNFTEGAMYSFPQIRLPQRAMDVAKSAGKAPDVYYCLKLLEATGISTVPGSGFGQKEGVFHLRTTILPAEEDMPAIMSSFKKFNDSFMEQYQDHSRL

SEQ ID NO: 15126 - protein, 439 aa, Vibrio parahaemolyticus RIMD 2210633
MSNYKERLLKAIPGGAHTYSRGYDQYPESAPQILSRGKGAYCYDDKGTEYLDYGMSLRAVNLGYANDEVDMAAFEQMRNGNNLTRASLIELQAAELLIDLIDSVDMVKFTKNGSTAVSAAVKLARAYTNRNLVARCAEHPFFSYDDWFIGSTPITKGIPEDTIKQTKMFSYNDINSLKALIEQHPDQFACVVLEPSTMDHPAPSVEVEGETYLHDVQRLCKKHGIVFILDEMITGFRWHIKGAQHYYNIQPDLCTFGKAMANGFSVAAVAGKREIMQLGSIEFAGSERLFLLSTTHGAEMCGLGAFVKTVEYIQKNDTIEHLWDYGQKLIDLMNRKAKEAGVESHFQAGGVPCSPWYMTYGPDGQADLAFRTLFSQEMLKNGVLIPWIALSHSHGEKELEMTEKALEAALNVYKKAIDAGSTEGYLKGDVIKPVFRSIN

SEQ ID NO: 15127 - protein, 625 aa, GIBBERELLA ZEAE PH-1
MLSHPENTDLIVPYLYQLDMVAGLLAVGNQIMALLAWQHQWDHQNGVSNTLRRLSHTPFAMSPFTVGDYLAERIAQIDIRHHFIVPGDYNLILLDKLGGHPSLTEIGCTNELNCSLAAEGYARGHGVSVCIVTYSVGAFSAFNGIGSAYAENLPVILISGSPNTNDVSQHILHHTLGIYDTTYQLEMAKKITCCAVRIRQAAHAPELIDRAIRAALTQRKPVYIEVPTNLAGETCPRPGPISSVISAVPSDRHSLDVAVTKTAEYIGSKQKCVVLVGPKVRRAMAQDALRQFVEAIGSAVVLQPAAKGTFPEDHAQFCGIFWGQVSTLAADTIVNWADLIICIGAIFTDYSTVGWTALPSVPQLFVDLESVTVASKIYCSRVQMSEFLSRLAETVCWNDNTMVEYNRLRPDPTLGEPSCGPERLTRKEITRQTQALISLNPQTVIFADTGDSWFNGLKLNLPFGADFEIEMQWGHIGWSIPASFGYALAKPHKRIVVMVGDGAFQMTAQEVSQMVRFRVPIIILLMNNKGYTIEVEIHDGSYNCVQNWDYARLVQAFSTENGNGHALGLEARTAEELSNSLERAIVHTNGPTLIDCSLHRDDCSRELITWGHFVAAANARMPKKE

SEQ ID NO: 15128 - protein, 512 aa, Schizosaccharomyces pombe
MNSKDSNTVPVYTTNTGCPIFNPMAAARVGKGGPVLLQDSHLIDVFQHFDRERIPERVVHAKGSGAFGEFECTDDITKYTKHTMFSKVGKKTPMVARFSTVGGERGTPDTARDPRGFALKFYTDEGIFDMVGNNTPVFFLRDPAKFPLFIHTQKRNPQNDMKDATMFWDYLSQNAESIHQVMILFSDLGGTPYSYRFMDGFSSHTYKFVNDKGEFYYCKWHFITNQGTKGLTNEEAAALDGSNPDHARQDLFEAIERGDYPSWTLYVQVMTPQEAEKYRYNIFDLTKVWPHKDVPMQRVGRFTLNQNPTNFFADIEQAGFSPSHMVPGIEVSADPVLQVRTFSYPDTHRHRLGANFEQIPVNSPKCPVFNYSRDGPMNVNGNQGNWPNYPSSIRPLAKVQYEPDEGHEKWVGQVTYHMDEITDVDFEQPRAFWQNVLGKKPGQQDNFVKNVAGHLSGAISPVRERQYGVFTRVDSELGRRIREATEAEVKKMEEKAPKPINKGEPHMFQGSS

SEQ ID NO: 15129 - protein, 283 aa, Arabidopsis thaliana
  misc_feature (79)..(79): Xaa can be any naturally occurring amino acid
  misc_feature (100)..(100): Xaa can be any naturally occurring amino acid
  misc_feature (136)..(136): Xaa can be any naturally occurring amino acid
  misc_feature (151)..(151): Xaa can be any naturally occurring amino acid
  misc_feature (163)..(163): Xaa can be any naturally occurring amino acid
  misc_feature (189)..(189): Xaa can be any naturally occurring amino acid
  unsure (1)..(283): unsure at all Xaa locations
IQRDVSAPQLLISFPLILSHRSKKEGKVAFIPYIPASDPDLSTTAKALKVLDACGSDIHRIGVFGYCDALADGAGLQGXKKTKFALDRGICLRLVSLLCXIKLVRKNNSCSGLVVHANKNPDSLDVGFAKFMPTIXAVDFQGLVVLGFSCXETVFMRKKCYLXIYEVFINTVPTKPTKRMKLFFDASEXFIYLVSSIGVTGARSSVSGKVQSLLKDIKEATDKPVAVGFGISKPEHVKQIAGWGADGVIVGSAMVKLLGDAKSPTEGLKELEKLTKSLKSALL

SEQ ID NO: 15130 - protein, 581 aa, Dehalococcoides ethenogenes 195
MARSLKWRLISLFCLLIAASVGLLSIFLSNHLENSYLDNLQSRLVQEATLLSEIVPEHISEDPDSFDAYIKELGASLDIRLTVIDPGGQVLADSLQSPSDMENHSTRVEFIDALKNGLGTSVHQSASLGYEMLYVAIPVKSGTEVLAVVRVALPVEEVYAAVGDVDRTILLSALISILAAGLLAVWVAASLTRPIKELTAIARRIARGQMDAVQIEVSGKGEMEELAHAFRLMTERLRDSINAVSSERDRLSAVLERMGDGIFLLDCEGTISLLNPAAERIFKLEAEHVIGHSFVEAIRDHEIHSIFEHSKSSGKQEMGFVELASGRRFLGIIATPLVSQSGYLVLVQDLSELRRLEKVRRDFVANISHELRTPISSLKLLTETLQEGAASDAAVAAGFIEKIHLEVDKLAQLVTELSDLSAIESGQAVLNLQPGDISTAIKLAAARLSPQAERAGISLGVELPETLPQVKLDENRIEQVLVNLVHNAIKFTPKGGRIKIGARTQGQILVVYVSDSGIGIPEDDLTRVFERFYKVDKARSGGGTGLGLAISKHIVQAHGGNIWAESRYGKGATFSFSLPLG

SEQ ID NO: 15131 - protein, 444 aa, Agrobacterium tumefaciens str. C58
MLSSSNTPLTGPNDRQTSIAFFERASTVFPGGVTRATIELDPHPIFVAYGEGAFVTDVDGHRMLDLNNNFTTLIHGHAYPPITEAIAGLLRTGSCFANPMNHEIDLAELLVGRIPAVEQVRFVASGTEAVMFAIKAARATTGRVAIARVEGAYHGAYDWAEAGQHASSNTPCAAYPGMPASVIDDVVLLQFNCPAELEQQIAMNAGRLAAILIDPMPSRAGLIEPTEEFIATINKVAKQHGIVIIADEVLNLRQGFAGASARYGLKPDLVTMGKIIGGGFPIGAVGGRREIMSAFGKQGSKAPLTQGGTFAANPVSMVAGRLAMEALTQDAFQRLEHMGNLVREGLRSRIERHGANLSVTGAASLFRIHAKKVAPVSYQDSIPTASEDVVLKLLRRHFANNGILMPYGAAASLSTPMTDNDMGDIVSVFDDFLVNLDRHAWEAA

SEQ ID NO: 15132 - protein, 230 aa, Dehalococcoides ethenogenes 195
MPEHKILVVEDDATLRELLCYNLAKEGYQLECAEDGLKALGMYRRFKPSLVILDVMLPGMDGFELCRLIRAESSVPILMLTARSSETDKVNGLEVGADDYLSKPFGMKELLARMRALLRRSQMQNSQPEPVSGLKIDNLEIFFERHLVMRDGEALDFSPKEFDLLSFMVQNRCRVFSREQLLEKVWGYDYPGGTRTVDVHISWLRQKIETDPSRPRHLITVRGTGYKFEE

SEQ ID NO: 15133 - protein, 375 aa, Zea mays
MESRRGGSVAEDASGAMTSFGPPQHGINTDVNSMQPSRVTDFGALAQSAGFRIEDLVNLNANALFNLKSNTHTINNIPLQFGSYGKFEQGLVAVPTASDSSDKSRDKLDQKTLRRLAQNREAARKSRLRKKAYIQNLESSRLKLTQLEQELHQTRQQGIFISTSGDQPQSTSGNGALAFDMEYARWLEEHNKHVNELRLAVNAHAGDNDLRGIVGSVMAHYDEFFRLKGVAARSDVFHVLSGMWKTPAERCFMWLGGFRSSEVLKQSSQQAEDALSQGMEALQQSLAETLASGSLGPAGPSGNVANYMGQMAMAMGKLGTLENFLRQADNLRLQTLQQMQRILTTRQSARALLAISDYFSRLRALSSLWLARPRE

SEQ ID NO: 15134 - protein, 411 aa, Synechocystis sp. PCC 6803
MPGGVSSPVRAFKSVGGQPIVFDRVEGAQIWDVDGNQYIDYVGTWGPAICGHAHPDVISALKQALDKGTSFGAPCAQENVLAEMVIDAVPSIEMVRFVNSGTEACMSVLRLMRAFTGREKIIKFEGCYHGHADMFLVKAGSGVATLGLPDSPGVPSNTTKATLTAPYNDLEAVKALFVENPDSIAGVILEPVVGNAGFILPDAGFLEGLRELTKEYGALLVFDEVMTGFRVSYGGAQARFGITPDLTTLGKVIGGGLPVGAYGGREEIMAMVAPAGPMYQAGTLSGNPLAMTAGIKTLEILQKPGSYEYLDKITKRLVDGLLAAAQDAGHEVCGGSISAMFGIFFAPGPVRNYEDAKLADTNKFARFHRGMLERGIYLAPSQYEAGFPSLAHTQEQIDQTIAVAKEVFATL

SEQ ID NO: 15135 - protein, 94 aa, Thermoanaerobacter brockii
MRLKPLGDRVVVKVIQAEEVTKGGVILPGTAKEKPQQGEVVAVGTGEYIDGKKVELEVKVGDRVIFSKYAGTEVKLDGEEYLLLRESDILAIIE

SEQ ID NO: 15136 - protein, 504 aa, Vibrio parahaemolyticus
MQMSKSFLLITVGLASTSLQAQTLTRDNGAPVGDNQNSITAGENGSVLLQDVHLIQKLQRFARERIPERVVHARGTGAHGEFVASGDFSDLTVSAPFTEKGKVTPVFVRFSTVIHSKGSPETLRDPRGFATKFYTEQGNWDLVGNNLPVFFIRDSIKFPDMVHSLKPSPVTNVQDPNRFFDFFSHEPSATHMLTWVYSNLGTPASYRTMDGFGVHAYKWINQQGDVNYVKFQWKSQQGIKSLRPNKVTEMQGKDFNHLTNDLYAAIGRGNYPKWDLYVKVLSPEALSKLDYNGLDATKVWLNVPDRKVGTMTLNRLPENFFLETEQSAFAPSNLIPGIEPSEDRLLQGRLFAYADTQLYRLGANLFQLPVNRPLTSVNNHNQNGLSNNAQLSNGDVNYEPSRKLNLAEDNQFKAVETKLVGTVQQKAISKPRDFYQAGVLYRSMNEQDRSDLIANLAGDLNKVIDKDIKATMVSYFYRADKEYGSRLAEATDTNLSQVKNKAMM

SEQ ID NO: 15137 - protein, 460 aa, Clostridium acetobutylicum ATCC 824
MEKKELSRGLKARHIELIALGGTIGVGLFMGSASTIKWAGPSVLLAYGVAGIAMYIIMRIMGEMLYLEPLAGSFANYANKYISPLAGYITAWCYWFMWIAVGMSEITAIGIYVKFWFPALPAWIPALIGVAILAAANMASVKFYGEFEFWFSLIKVVTIVVMLIVGVGLIFFGIGNHGVPIGFKNLTAHGGFFAGGLKGWLFALCMVTASYQGVELIGITAGEAQDPKNTLRKATKNIIWRILIFYVGAIFVIVTIYPWDKISTLGSPSVLTFAKIGIAAAAGIINFVVLTAAMSGCNSGIYSCGRMLYTLATNGQAPKFLGKLNKDGVPANGIRTTLVCLLIGVILNYIYPNSKLFVYIYSASVLPGMAPWFVLCISQIKFRKEHAEEMKMHPFKSRLFPYANYIVVAYLCLVLIGMCFNSSTQIPLFIGAVFCAIVTIAYFAFGIHKGKVSKVEELQE

SEQ ID NO: 15138 - protein, 417 aa, Anaplasma centrale
MVEKAILECGDCKVSLPVMRGNDGTLAIDVTGLYKDAKILTYDPGFLSTAACRSEITFIDGDKGILRTRGYDIADLVTTGGGFCSVAHLLLHGALPQGRELDDFASAVGNECHVPAQVVNVIKSLPSSAHPMAILIASFVTLAACYHAENSIDPLKSAIVAISKVPGIVAAIYRHTSGMPAVEADPNLGYVQNFVKMMFGDLGSTRQSVICRALESIFIMHADHEQNASTATVRVTGSAGANLFACLSAGAATLWGPAHGGANEAVVRMLEEIGSPERVGMFIQRVKDKKDGVRLMGFGHRVYKNYDPRALIIRDICKETLHELGTSDPLLDVAFELERVALQDEYFVKRFLYPNVDFYSGIVLKAIGVPVNMFTAFFALARTTGWSAQWYEMVTEHGDSNRICRPRQLYVGNMNAK

SEQ ID NO: 15139 - protein, 542 aa, Burkholderia vietnamiensis G4
MHLARAARRRAARDVRLFRRHALRILRRMRRDPAPGPRGLRRAERDVAIRLASRVGRPPRRRPRRALPALRAHRAAEDARQAPWPAPSRGRVTMLADIRRIVGLAWPVLVGQLAIIAFSVIDTAMVGRYSATDLAALGLGSSIYVSVYIGLTGILSALQPITGQLYGARRYAEIGEEVRQALWLALLLAVPGFLLLHFPDALLQAAHAPPTLHDRTVEYLRILSYGLPASLVFRIYNALTNAAGKPRLAMILQIGALLLKFPLNVWFVFGGFGVPALGGPGCGLASTLINWALAAIGFTLLARLDVFAPLAIFSRFCWPVWARQKAILQLGVPMGLSYLIEVTSYTCMALFIAQFGTTSLAGHQIAGNIGGVLYMTPLSIGVAASTLVARALGAGRHDEARLLGRHSVMLACAVAATYGVLVFVLRPLIVGAYTPDPAVAAAALPLVAIVTCYHFFDALQVTSAFVLRAYKVAVVPTVIYAIALWGVGLGGGYLLGFDVGGITPAWLTGARGFWFANTLSLMLAGAGLAVYLRRVSRAQAGA

SEQ ID NO: 15140 - protein, 416 aa, Ehrlichia muris
MIKEAVLELDDQRIKLPVLYDTNGNKAVDITSLYKDTGVLTYDPGFMSTAACESKITFIDGNKGILCYRGHNIVDLVNGNKSFVEIIYLLFYGVFPSSEDLQNFTLQISQEYTPPQVVYDVIKAFSQDSHPMAILMACFSALAAYYHDREADKDELKCAKLAVAKIASIVALIYRYITNQDFITADTKLSYSENFVHMMFDISSYKFTQVVAKALDIIFVLHADHEQNASTATVRLAGSAGADLFACLVAGTATLWGPAHGGANEAVINMLMTIEKPSNVKQFIQKVKDGSKTTRLMGFGHRVYKNYDPRAKMMCEICREVLNDLGIDDPLLEVAVELENIALQDSYFIERNLYPNVDFYSGIVLKAIGIPVKMFTTLFALARTSGWSAQWYEMVANKNYKICRPRQLYTGHITKI

SEQ ID NO: 15141 - protein, 410 aa, Medicago truncatula
MNHECKATSTITIKGILSLLMESVGENNDDNSKRVISLGMGDPTLSTCFPNAKVAEEAVADALCSGNFHGYAPTAGLLQARNAIAKYLSDDLPYELSSDDVFITCGCTQAIDVSVALLSRPGANILLPRPGFPIYELCAAFRQVEVRHYDLLPEKGWEVDLDAIETLVDQNTVALVIINPGNPCGNVYTYHHLEKIAETAKRLGTIVIADEVYGHLAFGDNPFVPMGVFGSTVPVITLGSLSKRWIVPGWRLGWFVTNDPSGTFRKPKVVERIKKYFDLLGGPATFIQAAVPRIITQTEEVFFRKTIDKLRHTADICCQEMEDIPCISFPCKPQGSMAMMVELNLSLLEDISDDIDFCFKLAKEESVIILPGTAVGLKDWIRITFAADPSALRDGMQRIKSFSQRHARKQ

SEQ ID NO: 15142 - protein, 765 aa, Arabidopsis thaliana
  misc_feature (1)..(1): Xaa can be any naturally occurring amino acid
  misc_feature (11)..(11): Xaa can be any naturally occurring amino acid
  misc_feature (49)..(49): Xaa can be any naturally occurring amino acid
  misc_feature (74)..(74): Xaa can be any naturally occurring amino acid
  misc_feature (97)..(97): Xaa can be any naturally occurring amino acid
  misc_feature (107)..(107): Xaa can be any naturally occurring amino acid
  misc_feature (109)..(109): Xaa can be any naturally occurring amino acid
  misc_feature (212)..(212): Xaa can be any naturally occurring amino acid
  misc_feature (351)..(351): Xaa can be any naturally occurring amino acid
  misc_feature (496)..(496): Xaa can be any naturally occurring amino acid
  misc_feature (538)..(538): Xaa can be any naturally occurring amino acid
  misc_feature (545)..(545): Xaa can be any naturally occurring amino acid
  misc_feature (549)..(549): Xaa can be any naturally occurring amino acid
  misc_feature (554)..(554): Xaa can be any naturally occurring amino acid
  misc_feature (557)..(557): Xaa can be any naturally occurring amino acid
  misc_feature (648)..(648): Xaa can be any naturally occurring amino acid
  misc_feature (663)..(663): Xaa can be any naturally occurring amino acid
  misc_feature (718)..(718): Xaa can be any naturally occurring amino acid
  misc_feature (750)..(750): Xaa can be any naturally occurring amino acid
  unsure (1)..(765): unsure at all Xaa locations
XASHIVGYPRXGPKRELKFALESFWDGKSTAEDLQKVSADLRSSIWKQXSAAGTKFIPSNTFAHYDQVLDTTAXLGAVPPRYGYTGGEIGLDVYFSXARGNASVPAXEXTKWFDTNYHYIVPELGPEVNFSYASHKAVNEYKEAKALGVDTVPVLVGPVSYLLLSKAAKGVDKSFELLSLLPKILPIYKEVITELKAAGATWIQLDEPVLVXDLEGQKLQAFTGAYAELESTLSGLNVLVETYFADIPAEAYKTLTSLKGVTAFGFDLVRGTKTLDLVKAGFPEGKYLFAGVVDGRNIWANDFAASLSTLQALEGIVGKDKLVVSTSCSLLHTAVDLINETKLDDEIKSWXAFAAQKVVEVNALAKALAGQKDEALFSANAAALASRRSSPRVTNEGVQKAAAALKGSDHRRATNVSARLDAQQKKLNLPILPTTTIGSFPQTVELRRVRREYKAKKVSEEDYVKAIKEEIKKVVDLQEELDIDVLVHGEPERNDXVEYFGEQLSGFAFTANGWVQSYGSRCVKPPVIYGDVSRPKAXTVFWSAXAQSXTSRPXKGXLTGPVTILNWSFVRNDQPRHETCYQIALAIKDEVEDLEKGGIGVIQIDEAALREGLPLRKSEHAFYLDWAVHSFRITNCGVQDSTQIHTHXCYSHFNDIIHSIIDXDADVITIENSRSDEKLLSVFREGVKYGAGIGPGVYDIHSPRIPSSEEIADRVNKXLAVLEQNILWVNPDCGLKTRKYTEVKPALKNXVDAAKLIRSQLASAK

SEQ ID NO: 15143 - protein, 407 aa, Zymomonas mobilis subsp. mobilis ZM4
MTAYAENITERPSHSEKKSVFSNLKSQPADALLELIALCREDTRENKIDVGVGVFCDDQGHTPVMRAVKAAEIQLIHEQNTKSYLGSAGDIEFFLRLIPVVFGNDFKDHERLSGLQTPGGTGALRLAFDLIHAGNPNADIHYGNPTWVNHLQIIANTGLNSISHPFYNREKRQIDFDAVLDDLKQVKRGDVILLHGCCHNPTGCDFTFDQWKALSEVISQKGLLPVIDLAYQGLGDGLEEDVAGLRWLSQQVDEMIVTYSCDKNFGLYRERTGAIFVLSQNAESRKIVQSNLIASTRTHWYMPPDHGAAAVRIILENEALYDSWQTELNAMQQRISGNRQSLAKADSYFAPLLQQKGMFSILPLSPEQIKKLRIENAIYMAPSGRINVAGLTPTTIDPFVKAIQKVI

SEQ ID NO: 15144 - protein, 133 aa, Glycine max
IFPLWLQTVVLKVGMSCQGCAGAVNRVLGKMEGVESFDIDLKEQKVTVKGNVEPDEVLQAVSKSGKKTAFWVDEAPQSKNKPLESAPVASENKPSEAATVASAEPENKPSEAAIVDSAEPENKPSDTVVETVA

SEQ ID NO: 15145 - protein, 327 aa, Burkholderia vietnamiensis G4
MTVSTQLSRDTLLDAYRLMRTIREFEERLHVEFSTGEIPGFVHLYAGEEASAVGTMLHLGLEDYVATTHRGHGHCIAKGVDVHGMMAEIYGKKTGVCHGKGGSMHIADLAMGMLGANGIVGAGGPLVCGAALAAKHKKTGGVGVCFFGDGASNQGVIFESMNLASVWRLPAIFVAENNGYAEATSASWSVATDNIADRANGFGMPGVIVDGFDFFAVHEALGEAVARARNGGGPTLVEVKFTRYFGHFEGDAQTYRAPGEVQKLRDEKDCLKHFETRVVRAEVLTTDELRAVDAQVKALIDDAVAQAKAAPLPDAADLLADVYVSYP

SEQ ID NO: 15146 - protein, 409 aa, Ehrlichia sp. Yamaguchi
MIKEATLELDGQKIKLPVLYDTNGDKAVDITSLYKNTGILTYDPGFMSTAACESKITFIDGNKGILCYRGHNIVDLVNKNKSFVEIIYLLFYGVFPSAEDLQNFTLQISQEYMPPQVVYDVIKSFSQDSHPMSILMACFSALASYYHDQEADKDELKYAKLAVAKIASMVALIYRYITNQDFITADTKLSYSKNFVHMMFDISSYKFTQVVAKALDIIFILHADHEQNASTATVRLAGSSGADLFACLVAGTATLWGPAHGGANEAVINMLMTIEKPSNVKQFIQKVKDGSKTTRLMGFGHRVYKNYDPRAKIMCKICREVLNDLGIDDPLLEVAQELENIALQDSYFIERNLYPNVDFYSGIILKAIGIPVRMFTTLFALARTTGWSAQWYEMVANKNYKICRPRQLY

SEQ ID NO: 15147 - protein, 640 aa, Vibrio vulnificus YJ016
MRLDVEQTSKLDRVRADYNVHYWSQGFYGIDDQGEMYVSPRSDNAHQIQLSKIVKQLEERQLNVPVLVRFPQILHQRVHSICDAFNQAIEEYQYPNKYLLVYPIKVNQQREVVDEILASQAQLETKQLGLEAGSKPELLAVLAMAQHASSVIVCNGYKDREYIRLALIGEKLGHKVFIVLEKMSELDLVLREAKSLGVTPRLGIRIRLASQGAGKWQASGGEKSKFGLSASQVLNVISRLKKENQLDTLQLVHFHLGSQMANIRDVRNGVNESARFYCELRTLGANITYFDVGGGLAIDYDGTRSQSSNSMNYGLVEYARNIVNTVGDVCKDYKQPMPVIISESGRSLTAHHAVLISNVIGTETYKPETVTEPEEDFPLLLNNMWRSWLNLHNGTDARALIEIYNDTQSDLAEVHSQFATGVLTLEHRAWAEQTSLRIYYELNRLMSTKNRFHRPILDELSERLADKFFVNFSLFQSLPDSWGIDQVFPVLPLSGLQNAADRRAVMLDITCDSDGAIDAYVDGQGIESTLPVPAWNEDEPYLMGFFLVGAYQEILGDMHNLFGDTHSVVVNVGDQGEINIDFINEGDTVEDMMRYVHIDVDQIRKNYHSLVSQRVDQEEQQQILAELEQGLSGYTYLEDF

SEQ ID NO: 15148 - protein, 636 aa, Rhodopseudomonas palustris CGA009
MAGKLRIRSRLRLLARRHPRITMAGRAVMAFSAGFGGAYGLLLGSNPETSGYDPHAFAVGASFLFALACLALAVQTMRLRRMRGRLRLLTASQEPPPDLQPNQSKTRALIAARESADAANHAKSRLLAMASHEIRTPLNGIIGMSRLLLDTPLSAEQATYAKAVKTSGEALLALTDELLDYARIEAGKIELDCRPFVLSSLIEDIIELLAPRAQARGLEIAADIDERLPVSLIVDAARLRQVLLNLCGNAIKFTETGGVALIVERGDQSGELRIIVRDTGIGIAPDAQARIFHEFEQADAGIARNFGGTGLGLSISDRIVAAMGGRIALESKPGEGSTFTITLPLSTAENDRATAAFAPPDLHGSSVMIVSAHGVEASLAARRLERWGAETCLCDDLAAAIARLPERSWHAVLIDHALGSDAIETLAREAQARATHRLVMLTPAARHELLPDLPAAFTGYLVKPLRSASLAARLGTAVEVATPSIADGDPPPVQDASSAITHEAFAILVAEDNDINALLIRALLHRLGHHAEIVGDGRRAVEAWGAADNTGTPFDLVLMDVQMPILDGLAAARQIRTLEAERARSRVPILALTANTLAEDREACLESGMDGFLVKPIDPDRLAAILAGVAAAHQAA

SEQ ID NO: 15149 - protein, 492 aa, Saccharomyces cerevisiae
MESRTTGPLTTETYDGPTVAFMILGAALVFFMVPGLGFLYSGLARRKSALALIWVVLMATLVGILQWYFWGYSLAFSKSAPNNKFIGNLDSFGFRNVYGKKFDEDAYPELAYATFQMMFSCVNLSIIAGATAERGRLLPHMVFLFILATIGYCPVTYWIWSPGGWAYQWGVLDWAGGGNIEILSAVSGFVYSWFLGKRNEKLLINFRPHNVSLVTLGTSILWFGWLLFNSASSLSPNLRSVYAFMNTCLSAITGGMTWCLLDYRSEKKWSTVGLCSGIISGLVAATPSSGCITLYGSLIQGIVAGVVCNFATKLKYYAKVDDAMDILAEHGVAGVIGLIFNALFGADWVIGMDGTTEHEGGWVTHNYKQMYKQIAYIAASIGYTAAVTAIICFVLGYIPGMRLRISEEAEEAGMDEDQIGEFAYDYVEVRRDYYLWGVDEDSQRSDVNHRVNNAHLAAERSSSGTNSSSDGNGEMIQSEKILPIHQEDPANR

SEQ ID NO: 15150 - protein, 275 aa, Glycine max
MAIFNGHNHLALAFGMLGNVISFMVYLAPLPTFYRIYKKKSTEGFQSLPYLVALFSSMLWLYYASLKPADATLLITINSLGCVIEIVYIVMFTIYATKDARNLTVKLFMVMNVGSFALIFLVTYFAIHGSLRVQVVGWVCVSIAVGVFAAPLSIVAQVIRTKNVEFMPFNLSLFLTLSAVMWFFYGLLLKDICIAIPNILGFTLGLLQMLLYAIYRNGKTNNKEVATKEEKALEAIMKNVVVVNPLGTCEVYPVINKENNNGQGIEGAKEKECPV

SEQ ID NO: 15151 - protein, 338 aa, Yarrowia lipolytica CLIB122
MPTTLVTGATGFLAGHCVDQLLKAGHNVIGTVRNPAKAERLTQALQSSVDSGKLTLETVKDIQNEAEFEALFKKHPKLDYILHTASPFNFTAEDPEEEMLKPAIQGTLSVLKTAKAHAPNVKKIVITSSVASNLDVATFYDPNTTYTEKSWNPMTWEQAAEKGNPFANYMGSKLYAEKAGIEFRDKEKPQFSITWINPTYILGPGVALDMSALNTSNEVLANVLGSKKGQDPEGVAGWFVDVRDCARAHVVALKPELDGERLLLATAKFCTQDIEDIANKIPEFHGKIAIGNPANREKELNHASQCDASYSKKLLDIDWIPFNKTVEDFANQWYEQHK

SEQ ID NO: 15152 - protein, 320 aa, Triticum aestivum
MPSFKAPAPGFSVRFSPFHEHRLLAATSQHFGLVGNGHLLVLDLSAAGPGGPGLTPLFSFPTSDALFDCAWSESHDSLCAAASGDGSVRLFDVTLPPAQNPVRLLREHAREVHGIDWNPVRRDAFLSASWDDTLKLWSPDRPASVRTFRGHEYCVYAAAWSARHPDVFASASGDHTARVWDVREPGPTLVIPAHDHEVLSLDWDKYDPSILATGSVDKSIRIWDVRSPQAPLAQLAGHGYAVKRVKFSPHRQGMLMSCSYDMTVCMWDYRKEDALLQRYGHHTEFVAGIDMSVLTDGLLASTGWDEMIYVWPFGSDPRAM

SEQ ID NO: 15153 - protein, 477 aa, Streptomyces lividans
MAKIIAFDEKARRGLEGGMNQLADAVKVTLGPKGRNVVLEKKWGAPTITNDGVSIAKEIELEDPYEKIGAELVKEVAKKTDDVAGDGTTTATVLAQALVKEGLRNVAAGANPMALKRGIEKAVEAVSGALLEQAKDVETKEQIASTASISAADTQIGELIAEAMDKVGKEGVITVEEFQTFGLELELTEGMGFDKGYISAYFATDMERMEASLDDPYILIANSKIGNVKDLLPLLEKVMQSGKPLLIIAEDVEGEALSTLVVNKIRGTFKSVAVKAPGFGDRRKAMLGDIAILTGGEVISEEVGLKLENAGLDLLGRARKVVITKDETTIVDGAGDTDQVNGRVAQIRAEIENSDSDYDREKLQERLANVAGGVAVIKAGAATEVELKERKERKHRIEDAVRNAKAAVEEGIVAGGGVALLQASQVFEKLELTGDEATGANAVKLALEAPLKQIPSTAVSRAAWSWRRCATSPWATA

SEQ ID NO: 15154 - protein, 385 aa, Yarrowia lipolytica CLIB122
MHFSPTLLASFLALVSAAPSNPKVLAFPFTRHQQDSALVQHHLQLSNHRPDPVFISNEFQYYSIDLTLGTPAQKFNVLLDTGSSDLWVYNVSDTTDCAGGACKNTGTFDSSKSSTYHSIDDKYFIQYVSGNASGNWGTDTLSLEGVSLPDFRFATIDNAQGNTGILGVSLPGSESVRKGESTYDNFPIALQKAGYIDRRVYSLYLNDTNAFNGTFLLGGIDHAKFNGSLTVLPLPSPDEFAVKYENIILDGKPIAKPGYTVLDSGTSFSYIPETVYNTIAKKHNLGDVTFFGLPSIDCKANVSLDFEFDGVTIHAQREQLIIDPGIGFCFFGVLPSTYSQNITLFGDTFLRNAYVVYDLEDLQIGIAQAVYTDKTDIRPVTGPLK

SEQ ID NO: 15155 - protein, 523 aa, Oryza sativa
MANINMADTAPSCDTYLLFNGETLLPIGVRAFIYTAVLAYCFIGLSAITGRFFKSMESIMRHSREVVTVDPHTNATIVKHEKVWNYTIADVALLAFGTSFPQISLATIDAIRNLGQLTAGGLGPGTLVGSAAFDLFPIHAVCVVMPRAGSKKKISDLGVWLVELFWSFWAYIWLYIILEVWTPRVITLWEALLTVLQYGLLLLHAYAQDKRWPYVSIPLARGERPEDWVPAKDASVDYDDNYDGIGDILPGQNEDIVDIFSAHSYSNEGYHHVSEEDVEESSTGLTLKNKWEDTHWFSIWWQQFVDAATLESSVSRKMDSTCLRVIGISWNLIIAPWKMLFAFVPPYEIAHGWIAFICSLIFISGIAYGVTKITDQISCVTGVSPYVIAFTALAAGTSWPDLVASKIAAERQITADSAITNITCSNSVNIYVGIGVPWLVDTMYNYFVYQKPLYIDNAAGLSFSLLVFFATSFGCITVLVLRRVILGAELGGPRMWAWATSVYFMILWVVFVVLSSLKISGVI

SEQ ID NO: 15156 - protein, 102 aa, Streptomyces lividans
MTTTSSKVAIKPLEDRIVVQPLDAEQTTASGLVIPDTAKEKPQEGVVLAVGPGRFEDGNRLPLDVSVGDVVLYSKYGGTEVKYNGEEYLVLSARDVLAIVEK

SEQ ID NO: 15157 - protein, 173 aa, Methanosarcina acetivorans C2A
MVRKPGSMYRNVRQRSFTRRKYMGGVPGSQVIHYDMGDKANTSFPVKISLIVEEKCQIRHTALEAARITANRHLVADTGKMGFYMKLRVYPHEVIRENKQATGAGADRVSSGMRRAFGKNVGTAARVKPMQKIFTVAVEKQNFKAAKEALWHAGQKLPTPCRIVVDEGAELVQ

SEQ ID NO: 15158 - protein, 397 aa, Dehalococcoides sp. CBDB1
MSDNNLADTKSAIIKMINTEKGSLEELSLKLHANPELGYQEHKAVEWLCEYLSSQNFSIEKNIGGLNTAFKATFGHGTPVIGFLAEYDALPQLGHACGHNLIATSAAGAAVASCLAAKLYGGTVCLIGTPAEELSGGKIQMVEKGVFKELDAALIAHPGNEDIATTQALACVTLNVEYFGKEAHAAAHPDKGINALDAIVLAYTSLNSLRQHIEPSARIHGIITDGGEAANIVPGHSAGTFLIRSQTMPYLKELMDRVLDCFKSAAQATGARLEYRFDKSIYAPMNNNLALANLYVKNMDLLGRKTLLEDPDMNFGSTDMGNVSQILPSLHGYYAITRKEVSGHTEEFASAACSVNGLKGALDAAKAMAMTAADLFSNSTNLDKVKIEFQKSTRPSA

SEQ ID NO: 15159 - protein, 541 aa, Streptomyces lividans
MAKILKFDEDARRALERGVNKLADTVKVTIGPKANVVIDKKFGPPTITNDGVTIAREVEVEDPYENLGAQLVKEVATKTNDIAGDGTTTATVLAQALVREGLKNVAAGASPALLKKGIDAAVAAVSEDLLATARPIDEKSDIAAVAALSAQDQQVGELIAEAMDKVGKDGVITVEESNTFGLELDFTEGMAFDKGYRLRLLRTDQERMEAVLDDPYILINQGKISSIADLLPLLEKVIQANASKPLLIIAEDLEGEALSTLVVNQIRGTFNAVAVKAPGFGDRRKAMLQDMAVLTGATVISEEVGLKLDQVGLEVLGTARRITVTKDDTTIVDGPGKRDEVQARIAQIKAEIENTDSDWDREKLQERLAKLAGGVCVIKVGAATEVELKERKHRLEDAISATRAAVEEGIVSGGGSALVHAVKVLEGNLGKTGDEATGVAVVRRAAVEPLRWIAENPGLEGYVITSKVADLDKGQGFNAATGEYGDLVKAGVIDPVKVTRSALENPASIASLLLTTETLVVEKKEEEEPAAGGHSHLGHSH

SEQ ID NO: 15160 - protein, 113 aa, Synechocystis sp. PCC 6803
MKTLPKERRYETLSYLPPLTDQQIAKQVEFLLDQGFIPGVEFEEDPQPETHFWTMWKLPFFGGATANEVLAEVRECRSENPNCYIRVIGFDNIKQCQTVSFIVHKPNQNQGRY

SEQ ID NO: 15161 - protein, 389 aa, Nostoc sp. PCC 7120
MKAMILAAGKGTRVRPITYTIPKPMIPILQKPVMEFLLELLRQHGFDQIMVNVSHLAEEIENYFRDGQRFGVQIAYSFEGKIDDEGKLVGEAIGSAGGMRRIQDFSPFFDDTFVVLCGDALIDLDLTAAVKWHKSKGSIATIITKTVPEEEVSSYGVVVTDENSRVKAFQEKPSIEEALSTNINTGIYIFEPEVFNYIPSGVEYDIGGQLFPKLVEIGAPFYAIAMDFEWVDIGKVPDYWRAIRGVLQGDIKNVQIPGHEVAPGIYTGLNVAVNWDKVDITGPVYIGGMTRIEDGAKIVGPAMIGPNCWICGEATVDNSVIFEWSRLGHGARLVDKLVFGRYCVDKTGAAIDVQAAALDWLITDARQTPPEHTPVERQAIAELLGTNAT

SEQ ID NO: 15162 - protein, 520 aa, Dehalococcoides sp. CBDB1
MPAEKDKKEFSPDDIDDDKDAEQGLANIHDEQDAEAEGDKLAEPDLKDIADTDIPAELTEEELAAEADLIPDTDEEISPLNIDLDIPLEQIDTQGIVDDPVRMYLHEIGRVPLLSAEDEKTLAKKMEEGKRIREIRQECLEKRGRYPSAAESFLCMLRELAQATEVLFQLGQELGMDTSASLKTIIHNPKLRTAIDHEIDQQLTKNISDNTGKSMAEIEQSFINLAINSSLLPKVVLDAIPEKMTIPEISDHTYDTTFINHLERHEASLKYYLDNLEIDAKRAERHLIQANLRLVVSVAKKHIGRGMPLLDLIQEGNIGLIRAVEKFDFHRGFKFSTYATWWIRQAITRAIADQARTIRIPVHMVETINKLLSISRQLSQKLGREPTPDEIALEMDLPPEKVREIAKVSQLPVSLESPIGEEEDSHLGDFIEDQNALAPPDAASRQLLKEQIDTVLGSLTPRERRVLQLRFGLEDGRSRTLEEVGKEFNVTRERIRQIEAKALRKLRHPSRSRKLKDYLE

SEQ ID NO: 15163 - protein, 679 aa, Nostoc sp. PCC 7120
MKHRGQEEMGVESTATSDEVVKVPANGNKLEGKNHKQKKLLPTNTPGDVSRVWKIEDSEALYRIEGWGQPYFSINAAGHVTVSPKGDRGGSLDLFELVNALKQRSLGLPLLIRFSDILEDRIERLNACFAKAIARYNYPGVYRGVFPVKCNQQRHLIEDLVRFGRPHQFGLEAGSKPELMIALALLDTPGSLLICNGYKDREYVETAMLSQRLGQTPIIVLEQVEEVDLVIAASHQLGIKPILGVRAKLSTQGMGRWGTSTGDRAKFGLTIPEIIQAVDKLRDADLLDSLQLMHFHIGSQISAINVIKDAIQEASRIYVELASLGANMKYLDVGGGLGVDYDGSQTNFYASKNYNMQNYANDIVAELKDTCAEKQIPVPTLISESGRAIASHQSVLIFDVLSTSDVPRDNPEPPKEGESPVINYLWETYQSINKENYQEFYHDATQFKEEAISRFNLGILRLRERAKAERLYWACCQKILDIIRQHDYVPDELEDLEKIMASIYYINLSVFQSAPDCWAIDQLFPIMPIHRLDEEPTQRGILADLTCDSDGKIDRFIDLRDVKSVLELHPFQPGEPYYMGMFLNGAYQEIMGNLHNLFGDTNAVHIQLTPKGYQIEHVVKGDTMSEVVSYVQYDSEDMVENIRQRCERALEEKRITLAESQRLLQTYEQSLRRYTYLNS

SEQ ID NO: 15164 - protein, 484 aa, Agrobacterium tumefaciens str. C58
MIKLKNAALLRDACLVNGRWLKAADGKTIAVENPANSMIIGHVPSLSADEVKAAVESAGKAFSEWSRRSAKDRAAILRRWFDLMVANADDLGALMTAEQGKPFAEAKGEALYAASFVEWFAEEAKRVYGDTIPSPTTDKRITILKQPIGVCAAITPWNFPAAMITRKAAPALAAGCAMIVKPAEQTPLTALALGVLAEEAGVPAGVFQVVTGAARDIGKVFTESDTVRKISFTGSTEVGRLLMAQSAPTIKKLSLELGGNAPFIVFDDADLDAAVEGAIVSKYRNAGQTCVCSNRIYVQDGVYDAFAEKLVKRVESLSVGEGTEPGVLIGPLIDQEAVAKVEDHVADALGKGAKIVIGGKRHALGGTFYEPTVLTGATQAMKVAREETFGPVAPLFRFGTEDEAVAMANDTEFGLAAYFYTENVRRTWRVAEALEYGMVGHNTGLISNEVAPFGGVKQSGLGREGSHYGIDEYLEIKYLCSAIG

SEQ ID NO: 15165 - protein, 221 aa, Caulobacter crescentus CB15
MSADLSHVDTWLFDLDNTLYPIETQFMGLIEAKMTDFVARETGLPRDEARALQHGYFTEHGTTLAGLMANHGIEPQRFLDEVHDVSLDCLTPDPALRAAIAALPGRRLIFTNGSVGHAERVLVHLNLRDLFSELFAIETADYVPKPALATFDRICKLHDIDPPMTAFFEDSEKNLVPASRLGMTTVLVGPHAAASTSEHVHFRTNDLAEFLSSARLQGSPA

SEQ ID NO: 15166 - protein, 117 aa, Nostoc sp. PCC 7120
MGLKFLQVSKELAEQHYGVHRERPFFPSLVEFITSGPVVAMVWEGDGVIASARKIIGATNPLTAEPGTIRGDFGINIGRNLIHGSDAPETAQKEVSLWFTDAELVNWQPHLTPWLHE

SEQ ID NO: 15167 - protein, 433 aa, Thermus thermophilus HB27
MDALARLERLPLGRPHYRLLLLLGFGWALDAMDVGLISFTLPALSRDFGLDPVGAGLLGSVGLLGMLFGALLGGRLADRFGRKAVVGYSLFLAGLGSLLTALAPSLSWVFLFRFLTGLGLGAELPVAASLMGEFSPKAHRGRMVVLLEAFWAVGWLLAALVGYLLVPSLGWRAAFLAGALPALYAAYLRLSLPESPRWLVARGRAAEAEALVASWERAFPGPLPEPRPEPAPRPLPYGALFRPPLLRRTLFLALAWFALNAGYYGAFIWLPSLLVAQGYTLVRSLEYVLLITLAQVPGYLVAAFLVERWGRRPVLVGFLGLSALFAWLLSQAASPGEVLLFGALLAFFNLGAWGAIYAYTPELFPTALRGSGAGFVAAVGRVGGILAPYATGALLPLWGPGGVLALHGGLLLLAGVFAFAVGVETRGKPLEEA

SEQ ID NO: 15168 - protein, 443 aa, Clostridium acetobutylicum ATCC 824
MEILKHVMDDVIKRNPNEPEFHQAVKEVLLSLEIVAEKHPEWVKDKIFDKIVEPERQIIFRVPWVDDNGEEHINRGFRIQFNSAIGPYKGGLRFHPSVNLGIVKFLGFEQIFKNSLTGLPIGGGKGGSDFNPKSKSNSEIKRFCQSFMLELNKYIGANTDVPAGDIGVGSREIGYLYGMFKKIRNESTGVLTGKGLTLGGSLVRTEATGYGLCYFMNEALKAKGKSFDGATVIISGSGNVAIYANQKATQLGAKVVAMSDSNGYIYDANGINLNTIRKIKEVERKRIHEYTKYHPNASYTEGCDGIWKLKCDIALPCATQNEIDENSAKTLIANGCYAVGEGANMPSTIEAVDLFIKNKVIFGPAKAANAGGVATSALEMSQNSMRYSWTFEEVDTKLQNIMKNIYIKCSNAANEYGFEDNLVAGANIAGFTKVAEAMYSLGF

SEQ ID NO: 15169 - protein, 398 aa, Neorickettsia risticii
MNSEKVKVNVEEFLKSTAGPSGVSASLEPRGFFYDPGYAKTAPCKSSITFIDGENGILLHRGYPIEELAQTSDFLQVGYLLINGKLPDSIATREFEEKIKHVPQLPECVLKNIRSFPTSAHPMAVLISALASLASVYGEMDFHEKKLLLVAYTPWLVAYIYRHINSQEFIEPDIRLPYTENFLYMMFGEKKPKDAEILDKIFILHADHGQTASTSVARMVVSSGASPIVACSAATASLWGPLHGGANERVLEMLRGIIESGENVENFIERVKRKEERLMGFGHRVYKNYDPRAAILKQKAHDVLKADSPILKTAGKLETIATREEYFLSRKLYPNVDFYSGIVLDALGIPSCMFTPIFALARTVGWVAQIAEFLSDSEQKLCRPRQIYVGEPRRSVHG

SEQ ID NO: 15170 - protein, 281 aa, Zea mays
MEKESSATYEPKRNSEIRVFESSDEISTDLAEYISQVSEISVKERGYFAIALSGGPLVSFLGKLCEAPYNKTLDWSKWYIFWSDERAVAKNHAESNYRLTKEGFLAKVPILNGHVYSINDNATVEDAATDYEFMIRQLVKVRTIGVSERNDCPKFDLILLTMGSDGHVASLFPNHPAMELKDDWVTYITDSPQPPPERITFTLPVINSASNIAIVSTGDDKAKAVHIAVSDMAEGLDAPTSLPARMVQPTDGKLVWFLDKAAASFLDSKNDDDDACYERHE

SEQ ID NO: 15171 - protein, 155 aa, Pseudomonas fluorescens PfO-1
MSDFPGDVLSEQATFGAGCFWGAEASFRALPGVLDTRVGFARSDLGDATLIEVVQVDFDPRLISYSRLVEHFWTLHDPTSVDRQGADVGAKYRSALFFNSAEQSRLALVARQQLDASGQLGKPVATVILPLGEFQKANEEHQRYLEKHGGSACSI

SEQ ID NO: 15172 - protein, 464 aa, Glycine max
MGVVEGLLALALVLSACVMCNGGSSSPFIRKVEKTVDMPLDSDVFAVPPGYNAPQQVHITQGDLVGKAVIVSWVTVDEPGSSEVHYWSENSDKKKIAEGKLVTYRFFNYSSGFIHHTTIRNLEYKTKYYYEVGLGNTTRQFWFVTPPEIGPDVPYTFGLIGDLGQSFDSNKTLSHYELNPRKGQTVLFVGDLSYADNYPNHDNIRWDSWGRFTERSVAYQPWIWTAGNHENHFAPEIGETVPFKPYTHRYHVPYKASQSTSPFWYSIKRASAHIIVLASYSAYGKYTPQYKWLEKELPKVNRTETPWLIVLMHSPWYNSYNYHYMEGETMRVMYEPWFVQYKVDVVFAGHVHAYERSERVSNVAYNIVNGLCAPVNDKSAPVYITIGDGGTLEGLATNMTEPQPKYSAFREASFGHAIFDITNRTHAHYSWHRNQDGVAVEADSLWFFNRYWHPVDDSTAHVSH

SEQ ID NO: 15173 - protein, 398 aa, Neorickettsia sennetsu
MNSEKVKVNVEEFLKSTAGPFGVSASLEPKGFFYDPGYAKTAPCKSSITFIDGENGILLHRGYPIEELAQTSDFLQVGYLLIDGKLPDSAATREFEERIKHVPQLPECVLKNIRSFPTSAHPMAVLISALASLASVYGEMDFNQKKLLLVAYTPWLIAHIYRHINSLEFVEPDIRLPYTENFLYMMFGEKKPKDAEILDKIFILHADHGQTASTSVARMVVSSGASPIAACSAATASLWGPLHGGANERVLEMLRGIVESGEKVENFIERVKRKEERLMGFGHRVYKNYDPRAAILKQKAHDVLKADSPILKTAGELETITAREEYFLSRKLYPNVDFYSGIVLDALGISSCMFTPIFALARTVGWVAQITEFLSDSEQKLCRPRQIYVGEPRRNVHG

SEQ ID NO: 15174 - protein, 473 aa, Salmonella typhimurium LT2
MPTHLVWFRRDLRLQDNLALAAACRDASARVLALYISTPAQWQAHDMAPRQAAFISAQLNALQTALAEKGIPLLFHEVADFNASIETVKNVCRQHDVSHLFYNYQYEFNERQRDAAVEKTLPSVICEGFDDSVILAPGAVMTGNHEMYKVFTPFKNAWLKRLKEDIPPCVPAPKIRVSGALSTPLTPVSLNYPQQAFDAALFPVEENAVIAQLRQFCAQGADEYALRRDFPAVDGTSRLSASLATGGLSPRQCLHRLLAEQPQALDGGPGSVWLNELIWREFYRHLMTWYPALCKHQPFIRWTKRVAWQENPHYFQAWQKGETGYPIVDAAMRQLNATGWMHNRLRMITASFLVKDLLIDWRLGERYFMSQLIDGDLAANNGGWQWAASTGTDAAPYFRIFNPTTQGERFDRDGEFIRQWLPALRDIPGKAIHEPWRWAEKAGVVLDYPRPIVEHKQARIATLSAYEAARKGA

SEQ ID NO: 15175 - protein, 714 aa, Oryza sativa (japonica cultivar-group)
MATATQAPTSPAAASGRGSVLPLLRGRPSTRVRLAVGRRPQTALRAQPPGAAEVVEQSVNTIRFLAVDSVEKAKSGHPGLPMGCAPLGHVLFDEFLRFNPKNPYWFDRDRFILSAGHGCMLQYALLHLAGYDSVTMDDLKAFRQWGSRTPGHPENFETPGVEVTTGPLGQGFANAVGLALAEKHLAARFNKPDLKIVDHHTYVILGDGCQMEGVSNEASSLAGHWGLGKLIAFYDDNHISIDGSTGIAFTEDALARYEALGWHTIWVKNGNTGYDDIRAAIKEAKAVKDKPTLIKVTTTIGYGSPNKANTYSVHGSALGTKEVEATKNNLSWHHEPFHVPDEVKRHWSHHIDEGASLEAEWNKKIVEYEKKYRQEAAELKSIISGELPSGWDNSLPKYTPENPADATRNLSQQCLNALAKAIPGFLGGSADLATSNMTLLKMFGDFQKDTPEERNIRFGVREHAMGAISNGIALHSPGLIPYCATFFVFTDYMRAAIRLSALCGSRVIFVMTHDSIGLGEDGPTHQPVEQLFSLRAMPNILMLRPADGNETSGAYKIAVLNRQRPSVLALSRQKLQQLKGTSAEGVAKGGYIISDNSSGNKPDIILIGTGSELEIVEKAADELRKDGKTVRVVSLVCWELFEEQSEKYKESVFPSEVTSRISVEAGVTFGWEKYIGEKGKAIGVDRFGSSAPAGKIYKELGLTVENVIATAKSL

SEQ ID NO: 15176 - protein, 403 aa, Neorickettsia helminthoeca
MDTDEVTIKIQATVKSSGGPNGILISSEPRSFIYDPGYVSTASCKSEITFVDGEEGVLLYRGYPVDELATQCDFLRVVYLLLYGELPDPVRAKEFRTFIQNFPQLPDCVLENICSFPRDAHPMVILISAFAALASAHHDSDFETHKEVLIANVPRLVAYIYRYITSQDFIPPDACLSYVGNFFYMMFGEKKPDYESILDKILILHADHEQNASTSTARMVVSSGASPIAAVSAATATLWGPLHGGANEKVLHMLGEIEKQGGSVEEFIERVKRKEERLMGFGHRVYKNYDPRAVILKSTAQDILKGSSSILSIASKLESIASNDEYFISRKLYPNVDFYSGIILNALGIPTYMFTPIFALARTSGWVAQIKEFLSDKEQKIARPRQIYIGKPFRKVASQSEKL

SEQ ID NO: 15177 - protein, 155 aa, Hordeum vulgare subsp. vulgare
MQIFVKTLTGKTITLEVESSDTIDNVKAKIQDKEGIPPDQQRLIFAGKQLEDGRTLADYNIQKESTLHLVLRLRGGAKKRKKKTYTKPKKQKHKHKKVKLAVLQFYKVDDSTGKVTRLRKECPNADCGAGTFMANHFDRHYCGKCGLTYVYNQKA

SEQ ID NO: 15178 - protein, 478 aa, Yersinia pestis KIM
MSRIIKMPPLPIWKYHAMSTQSAELDTAPPSPAHPSELIYHLEDRPPLPQTLFAACQHLLAMFVAVITPGLLICQALGLPAEDTQRIISMSLFASGLASLLQIKTWGPVGSGLLSIQGTSFNFVSPLIMGGLALKNGGADIPTMMAALFGTLMVASCTEILLSHVLHLARRIITPLVSGIVVMIIGLSLIQVGLTSIGGGYGAMSDNTFGAPKNLLLAGAVLGVIILLNRQRNPYLRVASLVIAMAVGYLLAWALGMLPESRPVVDTALITIPTPLYYGLSFDWNLLIPLMLIFMVTSLETIGDITATSDVSEQPVRGPLYMKRLKGGVLANGLNSMLSAIFNTFPNSCFGQNNGVIQLTGVASRYVGFVVAIMLIILGLFPAVAGFVQHIPEPVLGGATLVMFGTIAASGVRIVSRETLNRRAIMIMALSLAVGMGVAQQPLILQFAPDWIKTLFSSGIAAGGITAIVLNLLFPQEK

SEQ ID NO: 15179 - protein, 273 aa, Solibacter usitatus Ellin6076
MAKSIDELQSIAKRVRRDIVEMITTAKSGHPGGSLSAVEILVELYFDHMKIDPANPKWADRDRFILSKGHAAPVLYSVMAERGYADTPKEKLNTLRQFGSVFQGHPDMRFIPSLEASTGSLGQGLSLGLGMALGARLDGRASRTFVMLGDGEIQEGQIWEAAMAAAFLKADNLVAIVDYNQIQLDGFVKDIMDVAPLAEKWRSFGWHTLEIDGHSFEAIQAALAEAAATKGKPTCLVAHTVKGKGVSFMENNPKYHGMAPTKDERELALQELN

SEQ ID NO: 15180 - protein, 220 aa, Oryza sativa (japonica cultivar-group)
MAAASPPLLPTTVLPANTTATVSPAPTSVSSADAKPAATRAFLARLLDSVKRALSGARPWPELIDRSALSHSESLSDSGARLRKNLAYFRVNYAAIVALSLAASLLAHPFSLAALLALLAAWCFLYLLRPSDAPPLAAFGRTFSDRETLGGLIVASAFVIFLTSVGSLIFSALALGAAIVCAHGAFRIPEDLFLDEPDQANGAASVNLLSFITSATGGRV

SEQ ID NO: 15181 - protein, 481 aa, Yarrowia lipolytica CLIB122
MGRRKIVIQPLEDERNRSVTFLKRRAGLFKKAHELSVLCQVDIAVIVFGANQKLYEFSSTDTNQLIQRYQKSIPYEKKTPEDYNGKKRAGGHRATGSVTSIKSEPTDEDDEEEEEDSNNGTQNATPQMPPNVTPRMAQSVTPQMPQNVTPQQQLTPQQQAQQSQQAQQVQQAQQQQMPHPHHPEQQRYYDYMSMGQMGQHPHQQQILQQQMMQQQQHHHQLQQQAQHAQQHQQHQHQQHQNHQQQQHHKSQFTPISQEMSSLAGHLLDIRRGTNDMPPSSIPATAGGNPMGQGVAGAGSGYIPGSEGSSRVSSRQNSVTRPKLKVQIPGEKRGSTGGNSGPGGQGSTAGQAGNSRSTSGEGTPIDGSKDENTSHAALLLPPPSPSSYINNSGVGPGNPFAKPTLLNGEQTPLSAALPSRYINDLLPSPSNFYGTEWNFNPGSAGGSSFSAGGSLIPTSACKDKKRVDNSDSKLDPKKQRLG

SEQ ID NO: 15182 - protein, 198 aa, Alkaliphilus metalliredigenes QYMF
MSDNNNIVWHDTNIKREDREALLKQKGAVLWFTGLSGSGKSTVANAVEKKLYEASRATYLLDGDNIRHGLNKGLGFDTKDRIENIRRIAEVSKLFVDAGIITLTAFISPFIKERNDVRGLLGDRFIEIFVDCSLEACEGRDPKGLYQKARAGEIKNFTGIDSPYEKPVSPEIIVQTDIKSVDECANQILQYLNTNGFI

SEQ ID NO: 15183 - protein, 139 aa, Schizosaccharomyces pombe
MATNVGPQIRSGELVFGVAHIFASFNDTFVHITDLTGKETIVRVTGGMKVKTDRDESSPYAAMLAAQDAAAKCKEVGITALHIKIRATGGTATKTPGPVSQAALRALARAGMRIGRIEDVTPIPTDSTRRKGGRRGRRL

SEQ ID NO: 15184 - protein, 197 aa, Oryza sativa; identical to SEQ ID NO: 977

SEQ ID NO: 15185 - protein, 496 aa, Ashbya gossypii ATCC 10895
MLRNVCRPAMRRSFHQTAWMSANKKHDVVVIGGGPGGYVAAIKAAQLGFDTACVEKRGRLGGTCLNVGCIPSKALLNNSHLLHQMQHDAKQRGIDVKGEVTVNMPQFQKAKDTVVKQLTGGIEMLFKKNGVTYYKGLGTFESESSIKVSPVEGLEGAVAEETILEAKNIIVATGSEVTPFPGITIDEERIVSSTGALSLKEVPKRLVVIGGGIIGLEMGSVYSRLGSKVTVIEFQPQIGATMDGEVASTTQKFLKKQGFDFHLWTKVLSAERNGYVVDIKAENVKTGKVESFQADVLLVAIGRRPYIEGLGAENIGLDVDKRGRLVIDEQFNTKFPHIKVIGDVTFGPMLAHKAEEEGIAAAEYIKHGHGHVNYGNIPSVMYSHPEVAWVGKTEEQLKEAGIAYKVGKFPFMANSRAKTNLDTEGFVKVLIDAETERLLGAHIIGPNAGEMIAEAGLALEYGASAEDIARTCHAHPTLSEAFKEANLAAFSKSINF

SEQ ID NO: 15186 - protein, 508 aa, Vibrio vulnificus
MHMSKSFLLISMGLASISVHAQTLTRDNGAPVGDNQNSITAGENGSVLLQDVHLIQKLQRFARERIPERVVHARGTGAHGEFVVSGDFSDLTLSSPFAQSGKVTPVFVRFSTVIHSKGSPETLRDPRGFATKFYTDQGNWDLVGNNLPVFFIRDSIKFPDMVHSLKPSPVTNLQDPNRFFDFFSSQPSATNMLTWVYTNLGTPASYRTMDGFGVHAYKWINRKGEVNYVKFHWKSQQGVKSLRPAEVTKVQGEDFNHLTNDLYTQINAGNFPKWDLYVKVLSPKALSKLDYNGLDATKVWLDVPEKKVGTMTLNRVPDNFFLETEQSAFAPSNIIPGIEPSEDRLLQGRLFAYADTQLYRLGANLFQLPVNSPKSPVANHNQDGPSNNSTGLGNVDSLDVNYEPSRLVNLTVDKQARAVETPLSGHVQQQAIRNPRDFFQAGVLYRSLSEQDKADLIHNLSGDLNKVNDAEVKAIMVSYFYRADKEYGTRLAKATDVNLKQVTKLASM

SEQ ID NO: 15187 - protein, 323 aa, Triticum aestivum
  misc_feature (271)..(271): Xaa can be any naturally occurring amino acid
  misc_feature (289)..(289): Xaa can be any naturally occurring amino acid
  misc_feature (296)..(296): Xaa can be any naturally occurring amino acid
  misc_feature (305)..(305): Xaa can be any naturally occurring amino acid
  unsure (1)..(323): unsure at all Xaa locations
MQIFVKTLTGKTITLEVESSDTIDNVKAKIQDKEGIPPDQQRLIFAGKQLEDGRTLADYNIQKESTLHLVLRLRGGMQIFVKTLTGKTITLEVESSDTIDNVKAKIQDKEGIPPDQQRLIFAGKQLEDGRTLADYNIQKESTLHLVLRLRGGMQIFVKTLTGKTITLEVESSDTIDNVKAKIQDKEGIPPDQQRLIFAGKQLEDGRTLADYNIQKESTLHLVLRLRGGMQIFVKTLTGKTITLEVESSDTIDNVKAKIQDKEGIPPDQATXLSLAGKQLEDGRTLADYXIQKESTXQLVLRLRGXMQILSRPHGQNITLEVIL

SEQ ID NO: 15188 - protein, 51 aa, Passiflora adenopoda
NGEVMPGQWEYQVGPAAGISAGDQLWMSRFILERIPQIAGVVLTFDPKPIQ

SEQ ID NO: 15189 - protein, 613 aa, Oryza sativa
MSSRFVAARLARVNAARLQSIAAPSHSVARLSICSRASRPSLAFSAPSSFAGAVRMNSTNATSLNPPPAPLRLQAPTAEQEQADYDAAVKQVQEWFDSPRFKGIKRPYGPEAVVSKRGSMPVQPPASSLMADKLFNLLSEHFAKGTPAHTMGAIDPIQQSQMAHNQEVVYVSGWACSSVLTTCNNEVGPDLADYPYTTVPNQVQRLFKAQQHHDRKHWDERCQLTPEQKAKTPWVEYLRPIIADADTGHGGLSTVFKLAKLFAEQGAAGIHLEDQLHGGKKCGHQAGKVLVPTSEHVNRLTSTRYAWDILGSSNILIARTDSESAKLISSSIDARDHEYIKGAFNLPEGTSSLADTLAALEARGASGPEVDAAEKAWMEKCELLTFNEAVAKHNAANKQGVEAYNAKVAGGVSNGEARAIAKEVFGAEGVPTWCWDAPRTKEGYYHFRGGVAAATKRVKIFGQYADMLWLETKTPDLKQAQGFAADIHRDLPGKWLVYNLSPSFNWSAHGFSDQDLKNFVWDLAKSGFVFQLISLAGLHSTGAMTCELSQRFKTDGMLAYVELVQRKEKEIGYDVLTHQKWSGAAYVDRMLQAVSSGSSATQAMGADSTERSF

SEQ ID NO: 15190 - protein, 384 aa, Thermus thermophilus HB27
MGEPVILEAVRTPIGKRNGALRAYRPDALYAKVLDALLERTGIDPGLIGDVVTGCVTQVGEQGANVGRLGVLLSRLPKEVPAVSLNRMCGSSQQAVHFAAQAIAAGDVDFAIAGGVESMTRVPMFSDIGGGFHTLNPELGKRYELVHQGESAERIAERYGFCREELDEWGYLSHKRAARATEEGRFSAQILPLEGLDAEGRPFLLTRDEGVRPDVDYEKMLALKPVFRENGVVTAGNSSQISDGAAALLLGDREKALALGLRPRARFLARVVVAGDPTLQLLEVIPAAKKALERAGLSLRDVDVIEVNEAFASVVLAFLRELGADPEKVNPNGGAIAHGHPLGATGAVLMTKLLYELERTGGEFGLQVMCIGHGQATATVIQRL

SEQ ID NO: 15191 - protein, 446 aa, Dianthus caryophyllus
MMKQNQRKQIVLFPFPFQGHVTPMLHLANQLHTKSYSITIIQTRFNSIDPTRFPHFTFHLIEDHMPRNSRVSSDNLVESMSAMQLHCQVPFRECLGRALDDAAAHGDRVCCVIYDAIWSFAGTVADGLKVPGIVLRTSSVSAFVVNDRLPILRDKGYFRPGVKRDELVEELPPFKVRDLPGEEHHDILAAVVKLTKASHGVICNSFEELEPLSISRVREILSIPVFPVGPLHKHSASSTTSIWQQDKSSLTWLNTQAPNSVLYVSFGSVAAMKKSDFVEIAWGLANSSQPFLWVVRSGLSQGLESNDLFPEGYLDMIRGRGHIVKWAPQLEVLAHRAVGGFLTHCGWNSTVESVSEGVPMVCLPFLVDQAMNARYVSDVWKVGVLIEDGIKRDNIERGIRKLMAEPEGEELRKRAKSLMECAKKSYMEGGSSYESLEALSKYISSL

SEQ ID NO: 15192 - protein, 235 aa, Musa acuminata
MGRGKIEIKRIENTTNRQVTFCKRRNGLLKKAYELSVLCDAEVALIVFSSRGRLYEYANNNIKSTIERYKKACADSSSSDAIVDVNSQHYYQQESAKLRHQIQVLQNANRHLMGDALSSLNVKELKQLENRLERSITRIRSKKHELLFAEIEYMQKREVELQSDNMYPRAKIAENERVQQLSIVEAGAEYDAIPGAFDSRNYYHANILEAAAHYSHHQDQTALQLGYETKADSAA

SEQ ID NO: 15193 - protein, 246 aa, Pseudomonas fluorescens
MSSTAQTAEGEKILIVDDDPGLSSLLERFFNSKGYRARAVPNTEQMDRLLGREVFNLVVLDLMLPGEDGLTACKRLRGANNQIPIIMLTAKGDELSRIKGLELGADDYLAKPFNPDELMARVKAVLRRQAAPVPGAPGSEDESVTFGDYELSLATRELKRGEEVHMLTTGEFAVLKALVMNARQPLTRDKLMNLARGREWDALERSIDVQISRLRRMIEPDPSKPRYIQTVWGVGYVFVPDGTATK

SEQ ID NO: 15194 - protein, 412 aa, Burkholderia vietnamiensis G4
MKPIQKSNKLLNVCYDIRGPVLEHAKRLEEEGHRIIKLNIGNLAPFGFDAPDEIIQDMIRNLPASSGYSDSKGVFSARKAVMHYTQQKGVVGVGLDDIYIGNGASELIVMATQALLNDGDEVLLPAPDYPLWTAAVSLSGGTPVHYVCDEQNAWMPDPDDIRRKITPNTKALVVINPNNPTGALYSDELLLELLEIARQHGLIVFADEVYDKIVYDGLEHTALGSLSEDVITVTFNSLSKSYRSCGYRAGWMSVSGLGGDNRRRANDYLEGLGILSSMRLCANVPGQFAIQTALGGYQSINELIVPSGRLYKQRELAYDMLTSIPGVTCVKPQAALYMFPRLDPKLYPIQNDQQFILDLLLEERVLLVQGTGFNWAQPDHFRVVFLPNLDDLADSISRIARFLDGYRKRHSV

SEQ ID NO: 15195 - protein, 311 aa, Yersinia pestis KIM
MGRWWRYKWITFHPSLTTTDGQAGPQGKGGFNAEAHRYHLYVSLACPWAHRALLMRTLKGLESLISVSVVHPLMQENGWTFSSDFPAATGDALYHLDYLYQLYLRAAPDYSGRVTVPVLWDKQQQTVVSNESADIIRMFNNAFDDVGAKAGDYYPTALRNDIDDINGWVYDQVNNGVYKAGFATTQEAYDEAVGTLFSALDRLEQILGQHRYLTGNQLTEADLRLWTTLVRFDPVYVTHFKCDKRRISDYPNLYGFLRDIYQMPGIAETVDFAHIRTHYYRSHGTINPYGIISIGPQQNLLEPHDRANRFV

SEQ ID NO: 15196 - protein, 368 aa, Nicotiana tabacum
MGIQHNEHNQDQTQSFLLDALYCEEERWEETIEDEILEKEATLPLPLPLLEQDLFWEDEELLSLFTKEKETISNFETIKTDPLLCLSRKEAVKWILKVNAHYGFSTFTAILAINYFDRFLSSLHFQKDKPWMIQLVAVTCLSLAAKVEETQVPLLLDFQVEDAKYVFEAKTIQRMELLVLSSLKWRMNPVTPLSFVDHIIRRLGLKSHIHWEFLKQCERILLLVIADCRFLSYMPSVLATATMLHVIHQVEPCNAADYQNQLLEVLNISKEKVNDCYELITEVSYNSISHKRKYESPINSPSAVIDTFYSSENSNESWDLQTSSSIPSTYSPRDQFLPLFKKSRVQEQQMRLTSLSRVFVDYAVGSPR

SEQ ID NO: 15197 - protein, 94 aa, Enterococcus faecalis
MLKPLGDRVVIRVAKEEEKTVGGIVLASVAQEKPQTGEVIAVGEGRVLENGTKVPMEVKIGDTVMFEKYSGTEVKYEGVEYLIVSAKDIIATVE

SEQ ID NO: 15198 - protein, 497 aa, Oryza sativa
  misc_feature (204)..(204): Xaa can be any naturally occurring amino acid
  misc_feature (219)..(219): Xaa can be any naturally occurring amino acid
  unsure (1)..(497): unsure at all Xaa locations
MATCADTLGPLLGTAAANATDYLCNQFADTTSAVDSTYLLFSAYLVFAMQLGFAMLCAGSVRAKNTMNIMLTNVLDAAAGALFYYLFGFAFAFGAPSNGFIGKHFFGLKQVPQVGFDYSFFLFQWAFAIAAAGITSGSIAERTQFVAYLIYSAFLTGFVYPVVSHWIWSADGWASASRTSGSLLFGSGVIDFAGSGVVHMVGGXGRTLGRPHRGPPHWXRFDHAGRSVALRGHSASLVVLGSFLLWFGWYGFNPGSFLTILKSYGPPGSIHGQWSAVGRTAVTTTLAGSTAALTTLFGKRLQTGHWNVIDVCNGLLGGFAAITAGCSVVDPWAAIICGFVSAWVLIGLNALAARLKFDDPLEAAQLHGGCGAWGVIFTALFARKEYVDQIFGQPGRPYGLFMGGGGRLLGAHIVVILVIAAWVSFTMAPLFLVLNKLGLLRISAEDEMAGMDQTRHGGFAYAYHDDDASGKPDRSVGGFMLKSAHGTQVAAEMGGHV

SEQ ID NO: 15199 - protein, 349 aa, Shewanella oneidensis MR-1
MPAEWAAQQAVWMIWPYRPDNWRAAGAYAQATFAKVVDAIGAATPVYMGVPKAFLAKAKTVMPSHVTLVEMDSNDCWARDTGPTVVVNAEGECRGVDWGFNAWGGHNGGLYFPWDKDEQVAQQMLAQHGFARYRAPLILEGGSIHVDGEGTCMTSAECLLNANRNPELTKEQIEGLLRDYLNVKQFIWLQDGVYMDETDGHIDNMCCFARPGEVILHWTDDESDPQYPRSKAALEVLQNTVDAQGRKLKIHLLPQPGPLYCSEEESKGVTEGTGVPRTAGERLAGSYVNFLITNHRIVFPLLDPATDDIAAQKLQEIFPEHEIVGVPAREILLGGGNIHCITQQIPAGK

SEQ ID NO: 15200 - protein, 278 aa, Zea mays
KFKRNIKSWMRGALLGSGSFGMVYEGISDEGAFFAVKEVSLLDQGSNAQQSIFCLFQEIALLSQFEHENIVQYYGTDKEESKLYIFIELVTQGSLSSLYQKYKLRESQVSAYTRQILNGLVYLHERNVVHRDIKCANILVHANGSVKLADFGLAKEMSKINMLRSCKGSVYWMAPEVINPKKMYGPSADIWSLGCTVLEMLTRQIPFPNVEWTNAFFMIGRGEQPTIPNYLSKEAQDFIGQCVRVDPESRPSASQLLEHPFVNRPLRASFESSSPPAI

SEQ ID NO: 15201 - protein, 364 aa, Oryza sativa
MEDDDECPPLAVELSPEKPYSPPPLGPSAASPVGVTVITGYLGAGKSTLVNYILSAQHGKRIAVILNEFGEEIGVERAMINEGQGGALVEEWVELANGCVCCTVKHSLVQALEQLVQRKERMDHILLETTGLADPAPLVSILWLDDQLESSIKLDSIITVIDAKNFRLQIDEHNKSSSFPEAFHQIAFADVVILNKIDLVEGSLEDLERQIHEVNALVTVVQSVRCQVDLNKIFDQQAYGAKNSSQLQELLEYSKSVPPNLRHDNSISTLCICEQDPISLSKVESWLEDLLWERKLDMDIYRCKGILHVHNSDQVHTLQAVREVYEVLPAREWSKTESRTNKIVVIGRNLDINILQDSFSRCKH

SEQ ID NO: 15202 - protein, 615 aa, Mycoplasma hyopneumoniae 232
MLKNNIENLAINSLKMHGVAAVNKANSGHPGVILSAAKMVYALYRDHMNFDVENLNWINRDRFILSAGHASGLLYSLLYNLGILEQKDLENFRQMGSKTPGHPEYGHTLGVEATTGPLGQGIAMGVGLAMAQAHLHSKFPEINHYTYILCGDGDLQEGISYESLSLAGHLKLENLIILYDSNDIQLDSALDVVFSENVRQRIESQGLFYQLVEKNDVNLISEAIAKAKKSKKPSFIEIKTIIGEGTSKEKTSDVHGAPLGNDILTLKKNLNWEYDDFYLADELRQHWKNTLGKRSQKAFAEFKISKELKEFLEKGQNLDLEIDLDLAKNQATRNTSGQILDYISKHLPYWIGGSADLSVSTKAKGSDGIFSCQNYQGRNIMFGVREFAMASIANGIALHSVLRPFVSTFFVFADYLKPALRLSAIMKLPVSYIFSHDSLMVGEDGPTHEPVEQLAMLRSLPNLAVYRPGDENELKAAYELILAKKNQPSALILTRQNIKSFNSCKKGFKKGAYLVRKASSKWALIATGSELGLANEIANKLDVNLISLSNWQNGPIWDPNYAISLELATTFGWKAHAKYNFGHDDFGFSAPADKILEKIGFNFDNLVTKIKKIIV

SEQ ID NO: 15203 - protein, 445 aa, Pseudomonas syringae pv. phaseolicola 1448A
MTLRQFAGLGALLSLALPGLALAADPVAEPVLNSGDTAWMLTSTALVLFMTIPGLALFYGGMVRSKNILSVMMQCFAITGLISILWVVYGYSIAFDTTGMEAGVVNFNSFFGGMGKAFLAGITPASITGPAALFPEAVFVTFQMTFAIITPALIVGAFAERMKFSAMLVFMGIWFTLVYAPIAHMVWGGVGGLMWDWGVLDFAGGTVVHINAGVAGLVACLVLGKRKGFPTTPMAPHNLGYTLIGAAMLWVGWFGFNAGSAAAANGTAGMAMLVTQIATAAAALGWMFAEWLTHGKPSALGIASGVVAGLVAITPAAGTVGPMGALIIGLAAGVICFFCATSLKRKLGYDDSLDAFGVHGIGGIVGAILTGVFAAPALGGFGTVTDIGAQVWIQFKGVAFTVVYTAIVTFIILKVLDAVMGLRVTDEEESVGLDLAQHNERGYNL

SEQ ID NO: 15204 - protein, 369 aa, Burkholderia pseudomallei K96243
MPERDPILLTPGPLTTSRMTRDAMLRDWGSWDAAFNRLTKSVCADLVRIAGGGDAYVCVPLQGSGTFAVEATLGTLVPRDARVLVPNNGAYCARIAAILRRLGIAHVELPFAEDEPASAHAIDAALARDARLTHVALVHLETSAGLLNPLDDIAAVCRARGRALIVDAMSSFGALPIALAASDIDALISASGKCLEGVPGMGFAIVRRSALEAAEGRSPSVALDLHDQYAYMQRTSQWRFTPPTHVLAALRAALDQFFDEGGQPARGARYARNCATLVDGMRALGFEPFLDARAQASVIVTFYAPADPAYAFPAFYAAVRDAGYVLYPGKLTTADTFRVGCIGALGADEMRGAVAAIGGALESLGIAMR

SEQ ID NO: 15205 - protein, 51 aa, Passiflora coriacea
NGEVMPGQWEYQVGPAVGISAGDQLWMSRYILERITEIAGAELTFDPKPIQ

SEQ ID NO: 15206 - protein, 285 aa, Pseudomonas syringae pv. syringae B728a
MSIALKQPTLTGQCVAEFLGTALMIFFGTGCVAALKVAGATFGLWEISIIWGIAVSMGIYLSAGISGAHLNPAVSIALSLFAGFEKRKLPFYISAQIAGAFCGAGLVYLLYISLFFDFEHAHHIIRGSEQSLELASVFSTYPNPAISVGQAFLVEVVITTILMGVIMALGDDSNGLPRGPLAPLLIGLLVAVIGSSMGPLTGFAMNPARDFGPKLMTFFAGWGEMAFTGGRDIPYFLVPIFAPILGACLGAAGYRALIARHLPSAAPVENEKEAPVVRGKVQASS

SEQ ID NO: 15207 - protein, 97 aa, Escherichia coli
MNIRPLHDRVIVKRKEVETKSAGGIVLTGSAAAKSTRGEVLAVGNGRILENGEVKPLDVKVGDIVIFNDGYGVKSEKIDNEEVLIMSENDILAIVEA

SEQ ID NO: 15208 - protein, 177 aa, Brassica napus
MNREKLMKMANTVRTGGKGTVRRKKKAVHKTNTTDDKKLQSTLKRIGVNSIPAIEEVNIFKDDVVIQFTNPKVQASIAANTWVVSGSPQTKKLEDILPQILSQLGPDNMDNLRKLAEQLKKQPPGEGHASATIQEEDDDDVPDLVAGETFEAAAAAAEEKVAAPAAEAKVAAPAASS

SEQ ID NO: 15209 - protein, 705 aa, Arabidopsis thaliana
MTARKRTPSVSNSEKLALPEPASSPTVQKTSVSGEDFQLAPPKLGVIFVISSLLCSLYLYLLCFHYNVDNELKRPILINAGLSLVGFFVTLKLIPVAARYVLRRNMFGFDINKRGTPQGEVRVPESLGIVVGIVFLIVAIVFQFFNFTEDSVWLVEYNAALASICFMILLGFVDDVLDVPWRVKLLLPSFATLPLLMAYAGHTTIVIPKPLVSYIGLEVFDLGRIYKLYMALLAVFCTNSINIHAGLNGLEIGQTVVIAAAILIHNVMQIGASVDTEYHQAHAFSIYLTQPLMATSLAMLAYNWYPSAVFVGDTYTVFAGMTMAVVGILGHFSETLLIFFLPQVLNFLLSLPQLAGIVKCPRHRLPKYDPATGLLTGTKDGTLVNVYLRIFGRKTEKSLCIHLLVFQALACAFCFMLRHFLAVIEAEMGRGKIAIKRINNSTSRQVTFSKRRNGLLKKAKELAILCDAEVGVIIFSSTGRLYDFSSSSWGAENPVPCRQRWLRWMLLGLHYLSTTLYNYETTLFFGSMKSVIERYSDAKGETSSENDPASEIQEMYIVTLEKYAYSEELVLDRQMMGEELSGLSVEALQNLENQLELSLRGVRMKKDQMLIEEIQVLNREGNLVHQENLDLHKKVNLMHQQNMELHEKVSEVEGVKIANKNSLLTNGLDMRDTSNEHVHLQLSQPQHDHETHSKAIQLNYFSFIA

SEQ ID NO: 15210 - protein, 51 aa, Passiflora capsularis
NGEVMPGQWEYQVGPAVGISAGDQLWMSRFILERITEIAGAVLSLDPKPIQ

SEQ ID NO: 15211 - protein, 579 aa, Arabidopsis thaliana
MALAFVGITSSTTQPDIEGGALLQLRDSLNDSSNRLKWTRDFVSPCYSWSYVTCRGQSVVALNLASSGFTGTLSPAITKLKFLVTLELQNNSLSGALPDSLGNMVNLQTLNLSVNSFSGSIPASWSQLSNLKHLDLSSNNLTGSIPTQFFSIPTFDFSGTQLICGKSLNQPCSSSSRLPVTSSKKKLRDITLTASCVASIILFLGAMVMYHHHRVRRTKYDIFFDVAGEDDRKISFGQLKRFSLREIQLATDSFNESNLIGQGGFGKVYRGLLPDKTKVAVKRLADYFSPGGEAAFQREIQLISVAVHKNLLRLIGFCTTSSERILVYPYMENLSVAYRLRDLKAGEEGLDWPTRKRVAFGSAHGLEYLHEHCNPKIIHRDLKAANILLDNNFEPVLGDFGLAKLVDTSLTHVTTQVRGTMGHIAPEYLCTGKSSEKTDVFGYGITLLELVTGQRAIDFSRLEEEENILLLDHIKKLLREQRLRDIVDSNLTTYDSKEVETIVQVALLCTQGSPEDRPAMSEVVKMLQGTGGLAEKWTEWEQLEEVRNKEALLLPTLPATWDEEETTVDQESIRLSTAR

SEQ ID NO: 15212 - protein, 548 aa, Escherichia coli
MAAKDVKFGNDARVKMLRGVNVLADAVKVTLGPKGRNVVLDKSFGAPTITKDGVSVAREIELEDKFENMGAQMVKEVASKANDAAGDGTTTATVLAQAIITEGLKAVAAGMNPMDLKRGIDKAVTAAVEELKALSVPCSDSKAIAQVGTISANSDETVGKLIAEAMDKVGKEGVITVEDGTGLQDELDVVEGMQFDRGYLSPYFINKPETGAVELESPFILLADKKISNIREMLPVLEAVAKAGKPLLIIAEDVEGEALATAVVNTIRGIVKVAAVKAPGFGDRRKAMLQDIATLTGGTVISEEIGMELEKATLEDLGQAKRVVINKDTTTIIDGVGEEAAIQGRVAQIRQQIEEATSDYDREKLQERVAKLAGGVAVIKVGAATEVEMKEKKARVEDALHATRAAVEEGVVAGGGVALIRVASKLADLRGQNEDQNVGIKVALRAMEAPLRQIVLNCGEEPSVVANTVKGGDGNYGYNAATEEYGNMIDMGILDPTKVTRSALQYAASVAGLMITTECMVTDLPKNDAADLGAAGGMGGMGGMGGMM

SEQ ID NO: 15213 - protein, 351 aa, Medicago truncatula
MEKYEVVKDIGSGNFGVARLMRHKDTKQLVAMKYIERGHKIDENVAREIINHRSLRHPNIIRFKEVVLTPTHLGIVMEYAAGGELFDRICSAGRFSEDEARYFFQQLISGVSYCHSMQICHRDLKLENTLLDGSPAPRLKICDFGYSKSSLLHSRPKSTVGTPAYIAPEVLSRREYDGKLADVWSCGVTLYVMLVGAYPFEDQDDPKNFRKTINRIMAVQYKIPDYVHISQECRHLLSRIFVASPARRITIKEIKSHPWFLKNLPRELTEMAQAVYYRKENPTYSLQSIEDIMKIVEEAKNPPQASRSVGGFGWGGEEDDDEINEAEAELEEDEYEKRVKEAQESGEIHVN

SEQ ID NO: 15214 - protein, 324 aa, Arabidopsis thaliana
MMRNFRVYLTSIDIHNNVDPSFTPKGTLISLSDDANHHQVDNVSRVFHCDGLLLCITKDLHYRLVVWNPYFGQTRWIQPRNSYHRKDNYALGYDEKKNHKILRLKDNYYAPRERICEFELYSFESNSWKVVLDVSPDWYIPSYNRGLSLKGNTYWYATEKHVNVDFLICFDFTTEKFGPRLPLPFNATESPTYEDVVTLSSVGEEQLAVLFQSEYTLMMEIWVTSKVESTEVLWNKLFLEVDLIAISSHFQFLAEAGSFFIDQKKNVVVVFDKDMDEATDRDMAYVVGKNGYFKKVDIGEEAYTSCFPLVCSYVPSSEQIRQLT

SEQ ID NO: 15215 - protein, 541 aa, Enterococcus faecalis
MAKEIKFAEDARAAMLRGVDVLADTVKVTLGPKGRNVVLEKSFGSPLITNDGVTIAKEIELEDHFENMGAKLVSEVASKTNDIAGDGTTTATVLTQAIVREGLKNVTAGANPLGIRRGIELATKTAVEELHNISSVVDSKEAIAQVAAVSSGSEKVGQLIADAMEKVGNDGVITIAESKGIETELDVVEGMQFDRGYLSQYMVTDNDKMEAVLENPYILITDKKISNIQDILPLLEQILQQSRPLLIIADDVDGEALPTLVLNKIRGTFNVVAVKAPGFGDRRKAMLEDIAILTGGTVITDDLGLELKDTTIENLGNASKVVVDKDNTTIVEGAGSKEAIDARVHLIKNQIGETTSDFDREKLQERLAKLAGGVAVVKVGAATETELKELKLRIEDALNATRAAVEEGMVSGGGTALVNVIGKVAALEAEGDVATGIKIVVRALEEPIRQIAENAGYEGSVIVDKLKNVDLGIGFNAANGEWVNMVEAGIVDPTKVTRSALQNAASVSALLLTTEAVVADKPEPAAPAPMMDPSMGMGGMM

SEQ ID NO: 15216 - protein, 543 aa, Arabidopsis thaliana
MTSISDKFILVNGGNCLVREYFNHVLAKFPFEFGISQQDNFSMLQSNSAGGEDNPDFKWGAKRGVGRKDNKVRFYESFTLEGIEYRLFDCAYFYVHGQSETSIGKLVTFTRHQQRFLGEYEPQWDELFLACGDEKGVSNINDVETIMGKCNVVCTSDDRRNPRPGTKELRRAKYIFSRTFDTRLRIISEDFADAIAGIGVDKLFNMRRDKQPVKRLNSSAAAITRASPVKSFRPDLGSTKLGKHDNRDAKLMSRTSSLKKVTFLEDRADHVHVKRNPPVNTETTTRGQIPILKTRAFGELYASGSSVNAKPSKKRKLILNTPETDDSDDQGPQSGEKKLIKNPPLVEKAPSQNIEKKSWYKKLPFEDELKPAIEKGRVLLIENLEPSYTSLEVEFLFRQAFKEGVDAKMIPSSPMSSPHSGRALVIFGTTKAADSAMSRLNEDCLMLSGQRALTGSKNVPVEIGRCRSFTGHFNMVDRSLMTAQKVSCCITLRLFSVVISLVMVTHRKPNSPCQITEYYKLTPLFSLIIVNRPHKFVNFQPHP

SEQ ID NO: 15217 - protein, 246 aa, Oryza sativa
  misc_feature (68)..(68): Xaa can be any naturally occurring amino acid
  misc_feature (229)..(229): Xaa can be any naturally occurring amino acid
  unsure (1)..(246): unsure at all Xaa locations
ARWEPMGAREYYDYRRAIYGDITHKAILVDAAGTLLAPTEPMAQVYRTIGEKYGVNYSKDEKSFKFIXADWQPWGRSRSRYVDDGRPFWQHIVSSSTGCSDLQYFEELYQYYTTAKAWQLCDPDAKYVFEALRKAGVKTAVVSNFDTRLRPLLQALNCDHWFDAVAVSAEVAAEKPNPTIFLKACEFLGVKPEEAVHIGDDRRNDLWGARDAGCDAWLWGSDVYSFKEXQKGSELRCKESFVRWVT

SEQ ID NO: 15218 - protein, 407 aa, Wigglesworthia glossinidia endosymbiont of Glossina brevipalpis
MRRVVITGLGLLSSIGNNKEEVLNSLKSGKSGINFSQELKDSGMRSQIWGNIKTDVSGIISRKTSRFMSDASIYAYLSMEQAIFDAKLNFNIISNNRTGLIVGSGGGSPKNQVYGSDAMRYRGLRGVGPYIVTKAMASGISACLSTPFKIRGINYSITSACSTSAHCIGNAMEMIKFGKQDVMFAGGGEELCWEMACEFDAMGALSTSYNNFPQKASRAYDSNRDGFVISGGGGIIVLEELKHALSRNAFIYAEIIGYGATSDGSDMVIPSGEGAVRCMKMALENLDVSSIDYLNVHGTSTSIGDIKELNAIKETFGENSPMISSTKSMTGHALGAAGVHEIIFSILMLNNNFIAPSINIENLDKKAKDLDMKIITKYTKYDLNYVMSNSFGFGGTNATLILKKYNN

SEQ ID NO: 15219 - protein, 427 aa, Salmonella typhimurium LT2
MADTKAKITLTGDTTIELDVLKGTLGQDVIDIRSLGSKGVFTFDPGFTSTASCESKITFIDGDEGILLHRGFPIDQLATDSNYLEVCYILLYGEKPTQEEYDEFRTTVTRHTMIHEQITRLFHAFRRDSHPMAVMCGITGALAAFYHDSLDVNNPRHREIAAFRLLSKMPTMAAMCYKYSIGQPFVYPRNDLSYAGNFLNMMFSTPCETYEVNPVLERAMDRILILHADHEQNASTSTVRTAGSSGANPFACIAAGIASLWGPAHGGANEAALKMLEEISSVKHIPEFVRRAKDKNDSFRLMGFGHRVYKNYDPRATVMRETCHEVLKELGTKDDLLEVAMELEHIALNDPYFIEKKLYPNVDFYSGIILKAMGIPSSMFTVIFAMARTVGWIAHWNEMHTDGMKIARPRQLYTGYDKRDFKSALKR

SEQ ID NO: 15220 - protein, 431 aa, Pirellula sp. 1
MNQTDSKTPQAERLPVTVLSGFLGAGKTTLLNHILINRDGLRVAVIVNDMSEVNIDAALVKSGDANLSRTEEQLVEMSNGCICCTLREDLLIEVRRLARDGRFDYLLIESTGISEPMPVAETFTFEDEEGDSLSLVAELDTMVTVVDAGNFMKDFGSWDDLTDRRLGLSEEDTRNIVDLLVDQVEFANVILVNKTDLISPYELEQLTRILRQLNAESKILTTTESRVELSEIMGTGLYSLSEAETQPGWLEVPRGEEETETEEYGISNFVYRAHRPFHPKRLTNALDADMEEGLFTGVLRSKGLMWIASRHDWAYDWSQAGCSIRMNPAGFWWAAAPENEWPDDSESIAEIRSKFVGEHGDRHQELVFIGNAMSQERITQILDDCLLTDMEFAQGPEAWTNMEDPLPPIELETDLDEMLASDEATAHEVLQ

SEQ ID NO: 15221 - protein, 202 aa, Zea mays
MGDAVEHLKSGFQKFKTEVYDKKPELFEPLKAGQAPKYMVFACSDSRVCPSVTLGLQPGEAFTVRNIAAMVPAYDKTKYTGIGSAIEYAVCALKVEVLVVIGHSCCGGIRALLSLQDGAPDNFHFVENWVKIGFPAKVKVKKEHASVPFDDQCSILEKEAVNVSLENLKTYPFVQEGLAKGTLKLVGAHYDFVSGNFLVWET

SEQ ID NO: 15222 - protein, 352 aa, Oryza sativa (japonica cultivar-group)
MGKPGKLALPSHESTIGKFLTQSGTFKDGDLLVNKDGLRIVSQSEEGEAPPIEPLDHNQLSLDDLDAIKVIGKGSSGIVQLVRHKWTGQFFALKVIQLNIQENIRRQIAQELKISLSTQCQYVVACCQCFYVNGVISIVLEYMDSGSLSDFLKTVKTIPEPYLAAICKQVLKGLMYLHHEKHIIHRDLKPSNILINHMGEVKISDFGVSAIIASSSAQRDTFTGTYNYMAPERISGQKHGYMSDIWSLGLVMLELATGEFPYPPRESFYELLEAVVDHPPPSAPSDQFSEEFCSFVSACIQKNASDRSSAQILLNHPFLSMYDDLNIDLASYFTTDGSPLATFNTSNRYDDR

SEQ ID NO: 15223 - protein, 62 aa, Thermoanaerobacter tengcongensis MB4
MQNLYGFYWTEEEILKREEKIMVEAFNNVYEISCQYNVNLRTAAYMLSVKRVAEAMKAKGWY

SEQ ID NO: 15224 - protein, 286 aa, Triticum aestivum
  misc_feature (268)..(268): Xaa can be any naturally occurring amino acid
  unsure (1)..(286): unsure at all Xaa locations
MGARRRLALLALAVALAAAAATTGHAGVTSPYRRKLEATADMPFDADVFRVPPGYNAPQQVHITLGDQTGTAMTVSWVTASELGNGTVRYGPSPDKMEMSAQGTHTRYDYFNYTSGFIHHCVLRNLKHGVKYYYAMGFGHTVRTFSFTAPPKPGPDVPFKFGLIGDLGQTFDSNSTLSHYEANGGDAVLFVGDLSYADAYPLHDNRRWDSWARFVERSVAYQPWIWTAGNHELDYAPEIGETVPFKPFTRRYRTPYRAVASTEPLWYXSVKVASAHIIVLSSYSSY

SEQ ID NO: 15225 - protein, 653 aa, Cryptococcus neoformans var. neoformans
MIDNEDPSRDVAGAGELGQDWRPIGHTPNQLVLYHPASHALRVRIQPPSPPRSAFPSDIVRANDALRRRSPDSATRSLCLLCRQPVPRNGLGEVAAISGMESYFQTLEHVHSESESFSQGVGIDDLLDAPQPRTSNEENSSAAGYYARFFKEVRKLGMGAEGSVYLAVHHIEGDTLGTYAVKKIAVGESKEYLHKILREVKLLEVLRHTNIIPYYHAWIDTTRFSDLAPPVLALHVLMMYASGGNLDSLLLSRSHSTGFAAGLSADDIADAEPIDQLPKEERIKAFKRRRQSAKTEWANNQRPFTGGRRASRAENRGVLLLSFEEIAQLFGDIIDGLAFLHSNSILHLDLKCSNVLLHWEEGKLVPKAMLSDFGTSEEMLRGQRERTGHTGTMEYAPETLVQDAKGRFRPSDSHADMWSLGMILYKMMFLKLPYEECDSYDVLRAQILSYMGFLPDGSLLQNLQRRHIPKRFAFLLKELLDIHPEKRPSAEKTRSVLADIKHHSNQNEDYSSAIVGQTLASLENLSYPSSRSICRRDSVVVNDVHLDADATTPNNGLLPFFPLPKNNLLPSLTDVPERAMTCLAGPAVRLALLFGKLVSIQPSISGVRLPPVVAVILILLALTDLAHQGSFLWSLTCLIAHCAAVLNFSSHEI

SEQ ID NO: 15226 - protein, 211 aa, Neurospora crassa
MATNITWHPSLSRHERNQLRGQRGFTIWFTGLSASGKSTVATALEQHLLHIGLAAYRLDGDNVRFGLNKDLGFSEKDRNENIRRIAEVAKLFADSATIALTSFISPYRADRQIARDLHANATQAGDDVLPFIEVFVDVPLAEAEKRDPKGLYKKARAGEIKDFTGISAPYEAPESPEITIRTDLLSVEECVKKIVDYLAEAGLISGTKETR

SEQ ID NO: 15227 - protein, 337 aa, Populus tremuloides
MPVDASSLSGQGQTCVTGAGGFIASWMVKLLLDKGYTVRGTARNPADPNNSHLRELEGAQERLTLCKADLLDYESLKEAIQGCDGVFHTASPVTDDPEEMVEPAVNGTKNVIIAAAEAKVRRVVFTSSIGAVYMDPNKGPDVVIDESCWSDLEFCKNTKNWYCYGKAVAEQAAWDMAKEKGVDLVVVNPVLVLGPLFQPTVNASIVHILKYLTGSAKTYANSVQAYVHVRDVALAHILVFETPSASGRYLCSESVLHRGEVVEILAKFFPEYPIPTKCSDEKNPRKQPYKFSNQKLRDLGFEFTPVKQCLYETVKSLQERGHLPIPKQAAEESVKIQ

SEQ ID NO: 15228 - protein, 426 aa, Escherichia coli
MRKSENLYQAARELIPGGVNSPVRAFTGVGGTPLFIEKADGAYLYDVDGKAYIDYVGSWGPMVLGHNHPAIRNAVIEAAERGLSFGAPTEMEVKMAQLVTELVPTMDMVRMVNSGTEATMSAIRLARGFTGRDKIIKFEGCYHGHADCLLVKAGSGALTLGQPNSPGVPADFAKYTLTCTYNDLASVRAAFEQYPQEIACIIVEPVAGNMNCVPPLPEFLPGLRALCDEFGALLIIDEVMTGFRVALAGAQDYYGVVPDLTCLGKIIGGGMPVGAFGGRRDVMDALAPTGPVYQAGTLSGNPIAMAAGFACLNEVAQPGVHETLDELTTRLAEGLLEAAEEAGIPLVVNHVGGMFGIFFTDAESVTCYQDVMACDVERFKRFFHMMLDEGVYLAPSAFEAGFMSVAHSMEDINNTIDAARRVFAKL

SEQ ID NO: 15229 - protein, 51 aa, Passiflora sexflora
NGEVMPGQWEYQVGPAVGISAGDQLWMSRFILERITEIAGAVLSFDPKPIQ

SEQ ID NO: 15230 - protein, 590 aa, ASPERGILLUS NIDULANS FGSC A4
MASLSPPLDLSHHFSLTTKRRAPSAVKDFYKYFMIPGIANLAGGLPNASYFPYDTLEASAAHPQRFPTIPGGKKAKGPQTSERIVVPKESRSATSKKIDITTALQYGTSEGLPPLATFVNQFVREHLHPNIPYAGGPGTLLTTGATDGFSKAIEAFTETWNPDRDGIHLRQGILCEEFVYMNAIQTVKPRGLNIVPVAIDDEGMLPYGPGGLAEVLGNWNHRKGCRPHLMYTITIGQNPTGGTLSVERRKQIYAICQKYDVIIVEDDPYWNLQYPSAQELQARHRNSSVNPALSERNYNAGRKSSGYKFLDSLVPSYLSIDMDGRVVRLDTFSKTIAPGCRLGWITAQPAFIERLARIAESSTQAPSGFVQAMVAELILGQQVDDGSADSAKSKDTERAWKMDGWVRWLEGLRAGYEQRMQQMCSGLEEGKYIALHTRSDEFSLSGNEEDSWEVLEKVQMYDFAWPTGGMFVWVKVNYESHPLRQIYGPERLSKALWVHFTQKPQLCLLGPGTIFSPTDEVQARGHQYFRLCFAAMPADDVVPITQRVVDGFRSFWQRKNLDGLEGDDGIAQTMEQLQMEPSANFLGMGC

SEQ ID NO: 15231 - protein, 51 aa, Passiflora talamancensis
NGEVMPGQWEYQVGPAVGISAGDQLWMSRFILERITEIAGVVLSFDPKPIQ

SEQ ID NO: 15232 - protein, 265 aa, Pseudomonas syringae pv. syringae B728a
MSLSHVVSAVDNSPIFYGGRIVALTQHPDYFHIGADRELQHALQAFWKQDQGVTTTGAELRTWLMARYPQQVPHLKRDQRFQPDWASLLASVAEAGEQGRKPALIGPLTLLWLSDVQGDEVDRLDLLEHLLPVYGEIFGRLAARGVEWIQIDEPILALDLPLAWSNAFERAYHILQYSPLKKLIGLYHGDLRPNLGVAALLPVAGLHLDSVTEPELLAPVFDRLPVYKVLSLGECDTHSNWHQESLLEARARFGENLMVADQVAA

SEQ ID NO: 15233 - protein, 453 aa, Campylobacter upsaliensis RM3195
MQKKLFSIIFSVIFALVFFINAFLILSEEEFFIGQDFSWLLSCVLAEFFLVFLCSFFLARFLSYIFLKPLEKINFENLEHIPYPELKKMLEKIKLENKAVKIQFKHLKRKKQELQSLTQNMNDGLIFISRTGEILSENLSAEKYFANLNLIHNILELKNSQFLELVLKYLKEFKRGKLKGEARENFTFHYPNNLECELVFSPIFSQKKKFKGMLIVLCDITELKRLQNLRKEFSANVTHELKTPLTSIMASSEMIKNKLVAPQDLPNFVDKIHLESKRLLDMINEILKISFLDETQTLPFHRVNLKEVVERAYKRLEFLANQHTIRFELDLEDAYILGIDELLENLVFNLCDNGIKYNHKGGFVKVRLKKLNNFVELSIKDNGIGIPKEFQERVFERFFCVDKSRSKKIGGSGLGLSIVKSVLKLHKASIELKSELGKGCEFKMCFMQNLQKD

SEQ ID NO: 15234 - protein, 648 aa, Yarrowia lipolytica CLIB122
MKWIGTFKNCLVGGSQQQTHDAEERGSTCGSNSVKAAPTETTLIKKIFNPTIVQQKDTCVDNALGGSQEMEQITSLWNKTDLWMAWASMLLVAVAVALEVQTVSVYSTFATSDFDQMSLLSALSVVKAVMYIATRPVMAKFADVLGRFESILMSVVLFTIGFIMLAASPNIGTYFAAHIFYVFGQVGIQFMEQVFAADTSDLKNRMFFVILPNICYLFVPWCSAPITNAIIKHSTWHWGYGMWCIIVPVVSIPVLTIMFRHKMKARALGMQCGKSVRNMKETLLQFDLVGLILFTGGLCLLFLAVTLVKSSKSWTQPHVLPMIIIGPILLLLFPIWEKTYPKYPFLPFSAMKDRTLITGCIFVGLYSLAFYIYYPYYYPWLLVCKGLSVTAATNTSVTFTVASTAASIGAAALIRYTKRIKPIIVAGGFVYILGLGLTYHYRQPDHSLAQFIAAQAVEGVGSGMLQSPTLVLIQSVVNHNQVVSATAIFYSSISVGTVIGDAISGSMYRQSYPKQLTEYAPFLSEADIHKMVNDVRAPLKYAWGSPERVAVIEAFNHVYRKMLYGPLVVAGVMILISFTMPNVDLDELEQRVKGVVFGKSDKPADGEKNPVSNQCPCDILPTDNSSQDGDFEKSESVVSKTIHNEQKI

SEQ ID NO: 15235 - protein, 374 aa, Candida glabrata CBS138
MTVTESYLQISEYFDINETSWGGRACFSKRDLNNGQVVLEVEDCMGTSIDYDFRKEVCHYCYKYNNGKSMKVKISFNDLQDCLYEFPQLATYKAKFKGAGLWFCCDTCRDKYLSIHNITELIESYEILLESFMRMIKNKSLLEEQEQDYNGITITKEYIDNTWEDITTRWIPMVRKTKATKRAKFLPQISEDEYNCCRFVSETLFRIKHLDPGSDTLEAFHNLQSNELSKIQKFPVLLNFQVLVFKTLFVLLPDNLKNSLTVQAFRHILGSEYGNAFGIWQDTEAVDSREYFGYWVFPKASYFNHSCDPNITKTRIDRKMVFTLNRDVACGEELNIDYSGVLDLPVDRRQKFLFENWFFVCGCNRCNSDLKLVH

SEQ ID NO: 15236 - protein, 175 aa, Triticum aestivum
MAPTVMASSATSVAPFQGLKSTAGLPVSRRSNGASLGSVSNGGRIRCMQVWPIEGIKKCETLSYLPPLNTEALLKQVDYLIRSKWVPCLEYSKVGFIFREHNTSPGYYDGRYWTMWKLPMFGCTDATQVINEVEEVNKEYPDAYVRIIGFDNMRQVQCVSFIAFKPPGCEESGKA

SEQ ID NO: 15237 - protein, 361 aa, Caulobacter crescentus CB15
MSAKPRPKIDPSPAWWDVGPMPHDAHGHAHDHGHGHGHHGHDHAHGHGHGHGHGHHHHGHGHHGHHHHAPKDFGRAFAIGTALNLGFVIVEATAGILTHSLALLADAGHNLSDVLGLLLAWGATVLAKRAPSARRTYGLRKGTILASLGNAALLLVAVGAIAWEGVRRFAAPEPVQTGPVMIVAAIGIVINTATALMFMKGSKEDLNVRGAFLHMAADAAVSAGVVIAALAMTFTGWMWLDPVVSLVIVAVIVLGTWGLLRDSLDLALDATPRGIDTQKVRDWLAARPGVSEVHDLHIWAMSTTETALTAHVVRQLDADHDQFLHDACAELASRFNIGHVTIQVESGHGAHACRLAPADVV

SEQ ID NO: 15238 - protein, 607 aa, Caulobacter crescentus CB15
MTAQDRPQPSNRALMGRMWREFLQPRWKGFLVSMISAVIVARLTVMLGEYVEPAVDKLIAHPQPGALIWVPLTIAALAVGRGVFQVIQASLINRIGNGVVGDMQTRLFGRLIRADLARLRGAHSGSYVASVLYDAGLIREAATTGVVNYVREALIVAITLWALFNSDPILAAGVLIIVPGVSGVIRHFAKRTTKAAKGAMGETSNLSTAIMESLDGVKIVKMENREAYEEARVAAVVERRQRHLIKGSNARAMAAPATELFSQLVIAAVFAYAGWRAITGALVVGPFTLPPITPGGFLKFVILLGIAAQSLRQVANLQTVFSEGLTAARRLFEALDVAPTIVDPADAKALPPGESMIALADVTFSYGADIPALSSVNLQARKGETVALVGPSGGGKSSILNLIPRFYDVNAGAVTIDGHDVRSVTIASLRDRIALVTQEPFLFDDTIRANIAYARPGASQLEIEAASRQAAAHEFIQALPEGYDTAVGEGGARLSGGQRQRIAIARAFLKDAPILLLDEATSALDTESEAQVQAALERLMAGRTTILIAHRLSTVKNADRIYVIDKGRVVETGSHAELVRAGGLYARLAKAQDLDHPAPDQDGEITA

SEQ ID NO: 15239 - protein, 293 aa, Crocosphaera watsonii WH 8501
MAKIRVGINGFGRIGRLVFRAGINNPDFEFVGINDLVPAKNIAYLLKYDSTHGRFDGTVEATDEGIVVNGKLIPCFAIRNPEELPWGQLEVDYVVESTGLFTTHETASKHLKAGAKRVVISAPTKDPEKVNTFVVGVNDDQYDPTKDYIVSNASCTTNCLAPIAKVINDNFGLAEGLMTTVHAMTATQPTVDGPSKKDLRGGRGAAQNIIPASTGAAKAVTLVIPELKGKLTGMALRVPTPDVSVVDLTFKTEKATSYEAICAAMKAAANGELKGVLGYTDEDVVSMDFNGRS

SEQ ID NO: 15240 - protein, 131 aa, Burkholderia vietnamiensis G4
MDKSMKILVVDDFPTMRRIVRNLLKELGYTNVDEAEDGAAGLARLRGGGFDFVISDWNMPNLDGLAMLKEIRADATLTHLPVLMVTAESKKENIIAAAQAGASGYVVKPFTAATLDEKLNKIIDKMAKAGS

SEQ ID NO: 15241 - protein, 337 aa, Pirellula sp. 1
MTMPIPTNLITGFLGSGKTTAINRLLTHRPDGERWSIFVNEYGMVTVDEMLIDSESPEVSVQELGGGCLCCTVAFAFDAVFSQFIRRSKPDRLFLEPSGAGHPAALIDKLRDENFRRAIDLRATICLVDPEDWSKPQWRDSEVFHDQVQMADVVAINFTDKRDPELTQQCREWIESFDPPKMLIVETDHGRIDPAWLDIQNTVVRPPKFGEAHSHNHSYAAGHVDAGGLTSIEAPPMLGKPKRIENEGDGQWACGWIFSVDEVFDRDQLLDLLGYLQPVVRLKGVFRCQDDWWVINRSKNETSFSTTAYRRDSRLEVITDRATSGWDEVEQLLLKCK

SEQ ID NO: 15242 - protein, 478 aa, Pseudomonas fluorescens PfO-1
MNNSYDQLYLFIGGEWIDAQGRSTAAVVNPATGREIGRVPLATAGDLDRALEVSRVGFEQWRQTVPDQRAKILKRAADLILERAPHIAAQMTLEEGKPLSESMDEVVRAAEYFEWFAESARRIDGRVVPANRPGVLQLVKRQAIGPVAAFTPWNFPAITPARKLSAALAAGCSVILKPGEESPSTALALARALDDAGLPKGVLQVVFGVPDQVSSQLIASAIIRKVTFTGSVPIGRLLSARAAEGVKPITLELGGHGPVLVFADADVEKAAVEGVANRFRGTGQVCISSTRFIVQRGAYQAFVDHFVTATKALKIGDGFDPQTQVGPLANPRQLVKMEQLIADAVEKGARVLVGGEALPGDGFFFQPTVLADVPMNARIMHEEPFGPIAVLMPFDELADGLQEANRLPYGLSAYAFTSNARTAIDVADGLEAGMIGINQYRIVATELPFGGMKESGHGSEGGVEGIEHYLTHKFISQV

SEQ ID NO: 15243 - protein, 770 aa, Arabidopsis thaliana; identical to SEQ ID NO: 1140

SEQ ID NO: 15244 - protein, 588 aa, Salmonella typhimurium LT2
MKLPVREFDAVVIGAGGAGMRAALQISQSGQTCALLSKVFPTRSHTVSAQGGITVALGNTHEDNWEWHMYDTVKGSDYIGDQDAIEYMCKTGPEAILELEHMGLPFSRLDDGRIYQRPFGGQSKNFGGEQAARTAAAADRTGHALLHTLYQQNLKNHTTIFSEWYALDLVKNQDGAVVGCTALCIETGEVVYFKARATVLATGGAGRIYQSTTNAHINTGDGVGMALRAGVPVQDMEMWQFHPTGIAGAGVLVTEGCRGEGGYLLNKHGERFMERYAPNAKDLAGRDVVARSIMIEIREGRGCDGPWGPHAKLKLDHLGKEVLESRLPGILELSRTFAHVDPVKEPIPVIPTCHYMMGGIPTKVTGQALTVNEQGEDVVIPGLFAVGEIACVSVHGANRLGGNSLLDLVVFGRAAGLHLQESIAEQGVLRDASESDVEGSLERLNRWNNNRNGEDPVAIRKALQECMQHNFSVFREGDAMAKGLEQLKVIRERLKNARLDDTSSEFNTQRVECLELDNLMETAYATAVSANFRTESRGAHSRFDFPERDDANWLCHTLYQPQTESMTRRSVNMEPKLRPAFPPKIRTY

SEQ ID NO: 15245 - protein, 714 aa, Nocardioides sp. JS614
MADDLERNPVTDTAALDWTDLDQKAVDTARVLAMDAVQKVGNGHPGTAMSLAPAAYLLFQKVMRHDPSDPRWIARDRFVLSAGHSSLTLYIQLFLGGFGLELDDLKALRTWGSKTPGHPEYRHTAGVETTTGPLGQGVGNAVGMAMAARRLRGLLDPGAKTGPSVFDHRVYAICSDGDIEEGVSGEASSIAGTQQLGNLTLIYDANKISIEDDTNIALSEDVAARYEAYGWHVQVVDWTNGGTEYREDVHALYDALRAAEAVTDRPSFIELKTIIAWPAPNAQGTGKSHGSALGADEVAATKEVLGFDPAQTFEVPEGVLEHTRRLGERGAAAGKAWDEDFAAWRAKNPDAFDVLMRLRGHELPEGWADDLPVFDADPKGVATRKASGQVINAIAKRVPELWGGSADLAESNNTTIEDVPSFLPVDRSSKMWAGDPYAGRVLHFGIREHAMGSIMNGIALHSGTRVFGGTFLTFSDYMRPAVRLASLMGLPVTYVWTHDSIGLGEDGPTHQPIEHLAALRAIPGLDVIRPADANEVAACWKAVMEHTDRPSALALTRQNVPVFPREQDGFAGTADVHRGGYILIDAPEIDGQGGQPDVVLIGTGSEVQLAVEARALLAEDGIRARVVSMPCREWFAAQHESYREAVIPPIVKARVSVEAGIAQGWHEVVGDHGRIVSIETYGASADYARIYQEYGITARAVADAARDSIRVSSS

SEQ ID NO: 15246 - protein, 370 aa, Nocardioides sp. JS614
MSDLLKALTDAGVSIWLDDLSRERIESGTLAELVEQRSVVGVTSNPTIFAAAISDGERYDAQVAQLVEKGEPVDRIVFELTTEDVRNACDILRPTYEADHANGRVSIEVEPDLANDTQATIASARALWSAVDRPNALVKIPATEEGLAAITAATAEGISVNVTLMFSTQRYREVMDAYLTGLEHAQEAGRDLSRIHSYGSFFVSRVDTEVDKRLEAIGSETALALRGKAAVANALVAYGAFEEVFGSERWRALEAAGANRQRPLWASTGVKNPDYDDTMYVRDLVVAETVNTMPEKTLDAFADHGEVLGDVVTGRAGAGAAILERLGEVGVDFDDVLAVLETEGVDKFKKSWSELTEKVSAQMEKAEASA

SEQ ID NO: 15247 - protein, 107 aa, Glycine max
  misc_feature (31)..(31): Xaa can be any naturally occurring amino acid
  misc_feature (48)..(48): Xaa can be any naturally occurring amino acid
  unsure (1)..(107): unsure at all Xaa locations
GPRFIWNSPLFGTFELENLFLKAGLPMYFSXVWKKSWGAPAREDFKVXNFGDWINPPVGFWENQKVRLGSRPGPFNVLDDGGESFPPQGGGFLKPCYRGGLPCGFHV

SEQ ID NO: 15248 - protein, 245 aa, Lactococcus lactis
RLQDLAGIFYAAMGTGNNSSTATSGNQNSAGETVVENVKVNVDSNITKAVDKVQDAVVSVINLQSHNQSSGFGGLFGQQEESSSSDDSNLEAYSEGSGVIYKKDGNTAYVVTNNHVVDGQQGLEVLMKDGTKVKAELVGTDAYSDLAVLKINSDKVETVASFGDSSALKVGEPAIAIGSPLGSEYANSVTSGIISSLNRQVTSTNESNETVNINAIQTDAAINPGNSGGPLVNIEGQVIGINSSK

SEQ ID NO: 15249 - protein, 588 aa, Wigglesworthia glossinidia endosymbiont of Glossina brevipalpis
MKILKKTFDVIVIGSGGSGMRAALEIAKNKSSCALISKVFPTRSHTVSAQGGITVALGNSHEDDWQWHMYDTIKGSDYIGDQDAIEYMCKNGPKEILELEHMGLPFSRSENGKIYQRAFGGQSINYGERQAERTAAAADRTGHALLHTLYQQNIKNNTKIFSEWYALDLVKNQDESIVGCTAICIETGETFYFESKITILATGGAGRIYQSTTNAYINTGDGIGMALRAGIPVQDMEMWQFHPTGIAGAGILITEGCRGEGGYLLNKNGERFMERYAPNSKDLAGRDVVSRSMMIEILENRGFKNNLGDYVHLKLDHLGTNILNSRLPGILELSRTFAHVDPVKKPIPVIPTCHYMMGGIPTKITGQVISIDDLKNEIEIPGLFAIGENSCVSVHGANRLGGNSLLDLVVFGKSAGVQINKILSSHYSPKKASKSDIEFSLKRYINWNNKKGKENPNNIKKNLQICMQNHFSVFRDGPSMEKGILKIKELKHRLKNSKLQDSSDKFNINRIECLELDNLIDVSYATALSAKFRKESRGAHYRSDFPFRDDENWLCHTIFFLKREIMKKRNINMKPIYRSAFQPKERSY

SEQ ID NO: 15250 - protein, 499 aa, Oryza sativa (japonica cultivar-group)
MSDHRTHASDCHPVASQPDVQCLVCTRPFTLDAQVTDTFEALAICRDCKMTVLNDDERDEITSTYRQNTRRRQISRTASIDFLEDAFLQEFSQLIDLARRQGRETDIDSSSVAPQHASFNSTPSQSQRWHASDDESDGLNYVDSVFGEIESAISLGDYGGDSDTSIEEHSVMTRRRISIQLDNDSYMNTDTDIDPMNARLDQWDSDDQEDVEESGFDEIVNTMTQHQQQSHDIQLSGLSEDESEDGVWNWSVSVRQRANVTNLLDDMEEPEMRTTFVGNPDDYVDARQFEMLLEQFAEDNDSRRGAPPAATSFIENLPSVIISASHQTNGDVICPVCKDPIPTRARAKQLPCMHLYHSSCILPWLSSRNTCPVCRYELPTDDAEYERSKQATTNVRDIQVVEEISDEQEVQVTRQMAAGVIEETNTSEHNVRVDEQPNSARRRSGWLFIAAAPVVSLIGFALVLCFTNPARSGRRQLYCRSPSATEVHVDTKKSWWSMF

SEQ ID NO: 15251 - protein, 463 aa, Yersinia pestis KIM
MREFKSMKKTSLLLSALAISVGLGLASVPMVSAAALPAAVAGQTLPSLAPMLEKVLPAVVSVHVSGSQAQQQRLPEEFKFFFGPNAPSGKESSRPFEGLGSGVIINAEKGYILTNNHVINNADKIRVQLNDGREYDAKLLGRDEQTDIALLQLTDAKNLTAIKIADSDNLRVGDFAVAVGNPFGLGQTATSGIISALGRSGLNLEGLENFIQTDASINRGNSGGALVNLDGELIGINTAILAPGGGNIGIGFAIPSNMAQNLSQQLIEFGEVKRGLLGIRGSEMTADIAKAFNIDAQRGAFVSEVLPKSAAAKAGIKPGDVLISVDGKKISSFAELRAKVGTTGPGKTIKIGLLREGKPLEVSVTLDNSSSTSTSAENLSPSLQGASLSNGELKDGSKGIKVDSVTKGSPAAQSGLQKDDVIIAVNRERVKDIAELRKAIEAKPAVIALNIVRGEDNIYLLIR

SEQ ID NO: 15252 - protein, 94 aa, Thermoanaerobacter tengcongensis MB4
MRLKPLGDRVVVKVIQSEEVTKGGVILPGTAKEKPQQGEVVAVGPGQYIDGKRVEPEVKVGDRVIFSKYAGTEVKLDGEEYLLLRESDILAIIE

SEQ ID NO: 15253 - protein, 540 aa, Thermoanaerobacter tengcongensis MB4
MAKQIKYGEEARKALERGVNAVANTVKVTLGPRGRNVVLDKKYGTPTVTNDGVTIAREIELEDPFENQGAQLLKEAATKTNDVAGDGTTTATLLAQVMVLEGLKNLAAGANPMLLRRGMAKAVEAAVEGLRRISKPIDNKESIAHVAAISAADEEIGQLIAEAMEKVGKDGVITVEESKTIGTTLEVVEGMQFDRGYISPYMVTDAEKMEAVLEEPVILITDKKLSSVQDLLPLLEQIVQHGKKLLIIADDVEGEALATLVVNKLRGTFSCVAVKAPGFGDRRKEMLQDIAILTGGQVISEELGYDLKDVTLDMLGRARQVKVTKEHTTIVGGAGNPEDIKKRINQIKAQIEETTSDYDREKLQERLAKLAGGVAVIQVGAATETELKEKKHRIEDALAATKAAVEEGIVPGGGVALLNVIEDVQKVVDSLEGDFKTGAKIVLKALEAPVRQIAENAGVDGSIIVEKIKAAKDPNFGYDAYREEFTDMIKRGIIDPTKVTRTALQNAASIASMILTTEAIVVDVPEKEKSNIPGAGMDMM

SEQ ID NO: 15254 - protein, 362 aa, Yersinia pestis KIM
MFLKLLRSIILGLIVAGILLVALPMLRSPGYLFSGKSNNVNEEVPTSYNQAVRRAAPAVVNVYNRSLSATQQGLAIRTLGSGVIMSDKGYILTNKHVINDAEQIIVAMQNGRISEALLVGSDNLTDLAVLKIDATNLPVIPININRTPHIGDVVLAIGNPYNLGQTVTQGIISATGRIGLSSSGRQNFLQTDASINQGNSGGALVNTLGELMGINTLSFDKSNNGETPEGIGFAIPTALATKVMEKLIRDGRVIRGYIGITGEEYPPFNANDNGSDRVHGIKVKKVSPDGPAAQAGIHVGDIILNVNNKPATSVIETMDQVAEVRPGTTIPVLLLRNGQQIAVQITITELDQNEMLTTQAAD

SEQ ID NO: 15255 - protein, 554 aa, Zea mays
  misc_feature (356)..(356): Xaa can be any naturally occurring amino acid
  misc_feature (374)..(374): Xaa can be any naturally occurring amino acid
  unsure (1)..(554): unsure at all Xaa locations
MNLWTDDNASMMEAFMASADLPAYPWGAPAGGGNPPPPQMPPAMAMAPGFNQDTLQQRLQAMIEGSRETWTYAIFWQSSLDAATGASLLGWGDGYYKGCDDDKRRHRPPLTPAAQAEQEHRKRVLRELNSLISGGASAAPAPAPDEAVEEEVTDTEWFFLVSMTQSFLNGSGLPGQALFAGHHTWIAAGLSSAPCDRARQAYNFGLRTMVCFPVGTGVLELGSTDVVFQTAETMAKIRSLFGGGPGGGSWPPVQPQAAPQQQHAAEADQAAETDPSVLWLADAPVVDIKDSYSHPSAAEISVSKPPPPPPPPQIHFENGSTSTLTENPSPSVHAPPAPPAPPQRQQQNQGPFRREXLNFSNVASNPSLAAAPPXNPSPAPPASLTTAPGSLFSQSQHTATAAANDAKNNNSNNKRSMEATSLASNTNHHPAAAANEGMLSFSSAPTARPSAGTGAPAKSESDHSDLDASVREVESSRVVAPPPEAEKRPRKRGRKPANGREEPLNHVEAERQRREKLNQRFYALRAVVPNVSKMDKASLLGDAISYINELRGKL

SEQ ID NO: 15256 - protein, 487 aa, Berberis stolonifera
MDYIVGFVSISLVALLYFLLFKPKHTNLPPSPPAWPIVGHLPDLISKNSPPFLDYMSNIAQKYGPLIHLKFGLHSSIFASTKEAAMEVLQTNDKVLSGRQPLPCFRIKPHIDYSILWSDSNSYWKKGRKILHTEIFSQKMLQAQEKNRERVAGNLVNFIMTKVGDVVELRSWLFGCALNVLGHVVFSKDVFEYSDQSDEVGMDKLIHGMLMTGGDFDVASYFPVLARFDLHGLKRKMDEQFKLLIKIWEGEVLARRANRNPEPKDMLDVLIANDFNEHQINAMFMETFGPGSDTNSNIIEWALAQLIKNPDKLAKLREELDRVVGRSSTVKESHFSELPYLQACVKETMRLYPPISIMIPHRCMETCQVMGYTIPKGMDVHVNAHAIGRDPKDWKDPLKFQPERFLDSDIEYNGKQFQFIPFGSGRRICPGRPLAVRIIPLVLASLVHAFGWELPDGVPNEKLDMEELFTLSLCMAKPLRVIPKVRI

SEQ ID NO: 15257 - protein, 156 aa, Brassica napus
AKNMGLYEERVGALSIVCKAADVAGRVESQLKLVIRPMYSNPPIHGASIVAVILRDRNLFNEWTLELKAMADRIISMRKQLFEALRARGTPGDWTHIIKQIGMFTFTGLNPAQVSYMTKEYHIYMTSDGRISMAGLSSKTVPHLADAIHAVVTKAL

SEQ ID NO: 15258 - protein, 615 aa, Mycoplasma hyopneumoniae 232
MYKFKFADIGEGLHEGVVAQIYKKEGETVNEGDSLFSVETDKITADIPSPKTGKIVKVLMAEGDTIHVGQEIYHIDDGSRAETEVEEAKSETEEKPAGGASVVGEVKVSDALLSFDFGPKKVKTTSPEKVLVPSDSKKVEDKIEKTTNSGKIYQGQIEKEFDVIVVGSGPGGYLAAAEAGNAGLSTLIVEKEFWGGVCLNVGCIPTKAMLKTAEVFDYLEQFSDFGLSGNSDLKISWEKMHQRKTEVVNKLVGGVKAIVRSAKATSIFGKAEFVGAREISVDGKVYRGKNVILATGSVDRKLNLPGFDKGYKSGKIITSKEAINLEQKIDSIVIIGGGVIGVEFAQIFSAAGIKVTILQNLPRLLANLDSEISQIITKNLVDKGVKVITNTNILRFEDDQIIYEFEGKTELITGEKILVSIGRQANSQGLAEVGIELDSRGSVIVDDQCRTNVDRVYAIGDLSAKAMLAHVAYRHAVVSVAAILGKTEKYQEKTVPACVYTHPEIAVVGLTEEQARQAGYDFVIGKASFSHIGKAIASGNAYGFAKLIIDKKYGEIIGAHIIGPVATDLISEIVIAMDSEVTVYELAAAIHPHPTYSEIIWEAARSAVTKLKKMK

SEQ ID NO: 15259 - protein, 244 aa, Mesorhizobium loti MAFF303099
MTRLNGKTAVITGGATGIGRAAATRFIEEGAFVFIYGRRQEALDAAVADLGANARAVKGSVSDLADLDRLYAAVKAERGTLDIVFANAGAGGPLPLGQITAEHIDETFDTNVKGTIFTVQQALPLMGPGGSIILTGSSAGTTGAPGFTAYSASKAAVRNLARTWAEDLKGTGIRVNVLSPGATATELAKEALGEEGQKAYGAMTPLQRMADPAEIGAVAAFLASSDSSFMTASEVAVDGGLAQL

SEQ ID NO: 15260 - protein, 326 aa, Bacillus clausii KSM-K16
MGIQFQEGKQFDVIALGRACIDLNAAEYNRPMEETRSFTKYVGGSPANIAIGSAKLGLKVGFVGKIPDDQHGRFISSYMREAGVDTSQLVIDREGHKAGLTFTEILSPEECSILMYREKAADLYLSPDEIDAGYVRSAKVLLISGTALAQSPSREAALKAVSLAKAAGTKVVFELDYRPYTWSSREETSVYYTLLAGMAHIVIGTREEYDIMEGASASGNEQTAKMLFAKEPELVVIKHGVDGSYAYLPSGETFRAGVYKTNVLKTFGAGDSYASAFLYGLLRGYDIDQALRFGSASASIVVSKHSSSEAMPTLSEIKALVEEQHV

SEQ ID NO: 15261 - protein, 309 aa, Thermus thermophilus HB8
MLEVVTAGEPLVALVPQEPGHLRGKRLLEVYVGGAEVNVAVALARLGVKVGFVGRVGEDELGAMVEERLRAEGVDLTHFRRAPGFTGLYLREYLPLGQGRVFYYRKGSAGSALAPGAFDPDYLEGVRFLHLSGITPALSPEARAFSLWAMEEAKRRGVRVSLDVNYRQTLWSPEEARGFLERALPGVDLLFLSEEEAELLFGRVEEALRALSAPEVVLKRGAKGAWAFVDGRRVEGSAFAVEAVDPVGAGDAFAAGYLAGAVWGLPVEERLRLANLLGASVAASRGDHEGAPYREDLEVLLKATQTFMR

SEQ ID NO: 15262 - protein, 250 aa, Mesorhizobium loti MAFF303099
MKKLEGKIAVITGGSSGIGLATAKRFVEEGAHVVITGRREKELKEAAAFIMRNVTTVVGDVSLLEDLDRLYAVVKEKHGHIDVLFANAGAGTIAPLAAATEAHFDQTFDVNVKGLFFTVQKALPLFKDGGSIILNSSVSNVLGLPGFSTYAASKAAVRNFSRAWTLELKDRKIRVNTMSPGAIETPALETTTGLTPEQAEQAVAQFASQIPMGRRGKPEEIAAAVTFLASDDSSYVTGVDLAVDGGMAQV

SEQ ID NO: 15263 - protein, 239 aa, Thermus thermophilus HB8
MERKALVTGGSRGIGRAIAEALVARGYRVAIASRNPEEAAQSLGAVPLPTDLEKDDPKGLVKRALEALGGLHVLVHAAAVNVRKPALELSYEEWRRVLYLHLDVAFLLAQAAAPHMAEAGWGRVLFIGSVTTFTAGGPVPIPAYTTAKTALLGLTRALAKEWARLGIRVNLLCPGYVETEFTLPLRQNPELYEPITARIPMGRWARPEEIARVAAVLCGDEAEYLTGQAVAVDGGFLAY

SEQ ID NO: 15264 - protein, 360 aa, Oryza sativa
MDFPGGSGRQQQQQQLPPMTPLPLARQGSVYSLTFDEFQSTLGGVGKDFGSMNMDELLRSIWTAEESHAVGAATTTTATTASVAAAEHAAVGAPPVQRQGSLTLPRTLSQKTVDEVWRDMMCFGGGGASTAPAAAEPPPPAHRQQTLGEITLEEFLVRAGVVREDMSVPPVPPAPTPTAAAVPPPPPPQQQTPMLFGQSNVFPPMVPPLSLGNGLVSGAVGHGGGGAASLVSPVRPVSSNGFGKMEGGDLSSLSPSPVPYVFKGGLRGRKAPGIEKVVERRQRRMIKNRESAARSRQRKQAYMMELEAEVAKLKELNDELQKKQDEMLEQQKNEVLERMSRQVGPTAKRICLRRTLTGPW

SEQ ID NO: 15265 - protein, 374 aa, Campylobacter upsaliensis RM3195
MQVEKILQTLENEANLRTLAPLKHEGNFVFKQGKKLLNLAGNDYLGLATNSALKKEFLEVVEEEDLYFSSSSSRSLSGNYEIYERLENTLKHKVQKEVLLFNSGYQLNSSCIAALANVPHTLFLADRLIHASMIDGLRGANFLRFRHNDMEHLQILLEKNHAKYENIIILSEALFSMDGDLVKLQELVGLKKKYKNVLLYIDEAHSVGCFGGGLGLVKELELEVDFLIFTFGKALASIGACMITSKQFKDFFINKARALIYSTALPPINVAFSLFIFEKIASFEKQRIKLKALSEYFKKILRAKELEFLGDYYIISLILKENQKALEVALRLEENGIFAPAIKTPTVPKNSARIRFSLHANLSESELDKIAELL

SEQ ID NO: 15266 - protein, 591 aa, Bordetella parapertussis 12822
MSNIVEIKVPDIGDFKEVEVIEVLVAAGDTIKAEQSLITVESDKASMEIPASSAGVVKSVKVKVGDKVAEGTVILDVEAAGEAAAAPKAEAPKAEAPKADAPKAPAAKASAPAAAAYSGSADLECDMLVLGAGPGGYSAAFRAADLGMDTVMVERYATLGGVCLNVGCIPSKALLHNAAVIDEARALAAHGISFGEPKVDLDKLRGYKDGVVAKLTGGLAGMARACKVRVATGTGEFADPHHLTVTDGEGKKQTIRFKQAIIAAGSQSVKLPFLPDDERIVDSTGALQLRAIPKKMLIIGGGIIGLEMGTVYSTLGARLDVVEMLDGLMQGADRDLVKVWQKMNAPRFDNIMLKTKTVGAEARKDGIYVSFEGEGAPKEPQRYDLVLQAVGRSPNGKKIGAERAGVAVTERGFIEVDRQMRTNVPHIYAIGDVVGQPMLAHKAVHEGHVAAEAAHGEKSFFDARVIPSVAYTDPEVAWVGLTEDEAKKQGVKVEKGLFPWAASGRAIANGRDEGFTKLLFDAETHRIVGGGIVGTHAGDLISEIALAIEMGADMVDIGKTIHPHPTLGESVGMAAEVAEGVCTDLPPMRKK

SEQ ID NO: 15267 - protein, 493 aa, Ustilago maydis 521
MMNTKLKDLSLLEASDFLKAPDSLDTSDNESFDVMDPGSGRPICRLTASNLKDVDYAIQAASQAFPSYSAIPARERAMLLLNFDKLIRDNLDDLAWILVYETGKPLEEARAEVQYALTFSWWYVGETERVQGQVVKSATNPSLRYLTVWQPVGPVAILTPWNFPVALFVRKAVSALAAGCTIVAKPSPETPLSTLAVANLLHRAGFPSGSVNIVLASYRNTPAIGQALCTDLRIKKLSFTGSTRVGRLLMQQCAPTLKKLTLELGGLGAYLIFDDADIEAAATALVANKLRHAGQTCISAQRTFVHESIVDRVLKCIIELLDRVTLGHGAQPSTTLGPLQTERSQQKVREHIEDARAKGATVYTSKAAVPSSGYFVAPTLIVGCTAEMLVFQEESFGPLISLTSFATEQEAVALANKTDMGLTSYVFTKDSARLWRMFEQLKAGNVGLNVGGSTTAAEIPFGGVDQSGFGKEAGIGAGLKEYMVEKSATMSIA

SEQ ID NO: 15268 - protein, 385 aa, Arabidopsis thaliana
MFIEKLKKKGTNASLRNRDEETADKQIQFNDQSFGGNDYAPKVRKPYTITKERERWTDEEHKKFVEALKLYGRAWRRIEEHVGSKTAVQIRSHAQKFFSKVAREATGGDGSSVEPIVIPPPRPKRKPAHPYPRKFGNEADQTSRSVSPSERDTQSPTSVLSTVGSEALCSLDSSSPNRSLSPVSSASPPAALTTTANAPEELETLKLELFPSERLLNRESSIKEPTKQSLKLFGKTVLVSDSGMSSSLTTSTYCKSPIQPLPRKLSSSKTLPIIRNSQEELLSCWIQVPLKQEDVENRCLDSGKAVQNEGSSTGSNTGSVDDTGHTEKTTEPETMLCQWEFKPSERSAFSELRRTNSESNSRGFGPYKKRKMVTEEEEHEIHLHL

SEQ ID NO: 15269 - protein, 377 aa, Caulobacter crescentus CB15
MTSGSQGAFEAARRIVFKVGSALLVDAETGAANRAWLEAFCADAADLRAAGKQVLVVSSGAVALGRRRLGLTGRKTTLPEKQAAAAAGQSLLMRAWEEAFEPHGIGVAQILLTRDDTEMRRRWLNARATTETLMGLGVVPVVNENDTVVTEEIRYGDNDRLAARVAQMAGADLLVLLSDIDGLYTADPRKNPKAQHIPRVSEITPEIAGMAEGANAAAGVGTGGMATKIAAARIARAAGCATLITLGSRPRPLAAIAAGEKATLIEAGASPAAAYKAWIAGSLAPQGWVTVDAGAASALLAGKSLLPAGVRAVEGPFDKGDAVRVRDENGREVARGLVRYDSADAQRIAGLRSDAIEAELGFTEGPMIHADDLAVAH

SEQ ID NO: 15270 - protein, 242 aa, Clostridium acetobutylicum ATCC 824
MHYSLAVKLVCEMLGTAILVLFGNGAVANVELKGTKGYRNGWIIIAIGYGVGVMLPALMFNKISGSQTNPAMTIGLAVNGLFPWSEVIPYILAQFVGAIIGQVILYFIYLPFYKQTEDTKSILGTCSTISASGSHINGFVTEFFGTFLLVLGAMFILNSTGVKSTPAVGYVGLGFLVCSLVASLGGPTGPGLNPARDLGPRIVHSLLPLKNKGNSEWTYAWIPVLAPMFGSIIAIFLFNKIY

SEQ ID NO: 15271 - protein, 241 aa, Nocardioides sp. JS614
MSATPRVEVHPDRAALATAVAGELLTRLADAQAAGGVPQIVLTGGTIAEDIHRELARLSPASEVDWSQVVVWWGDERFVPPDSPDRNAGQARAAFLDAVGVDPARVHEMPSTADAADVEAGAASYAAVLSEHAADFDVLMLGIGPDGHIASLFPGFAQLAVTDRAAVGVTGSPKPPPERISLTFPVLNRARSVWFLVSGDGKADAVARALGGADVRDVPAAGVTGHDETIWFLDRPAASRL

SEQ ID NO: 15272 - protein, 153 aa, Brassica napus
MTNYGAIPTSSHGSPVVDLDSISRVKQQIKDGLATRRPWRVMFDFHSMGLPRGVSDAFSRIKKNLVYFQTNYAIVFLVVIFFSLIKHPTSLIVLTVLVFVWIFLYFLRDEPIKLFSYQVDDKTVLVCLSVITIVLLFLTNATLNIAGALLIGA

SEQ ID NO: 15273 - protein, 311 aa, Agrobacterium tumefaciens str. C58
MQSAGGPSVLQVIKQDLHAPRAGEVRLIQDAIGLNFVDTMIRKGQYPMALPAVPGFEAAGTITEVGSGVEGLSVGDRVAYFFSEGAYATERVIPTAPLIRLPADISNETAATFLAKGATAWMGIRGLHDLKSADTVMVLGASGSVGAILSRWARSLGATVIGVAGSPGKFDKVAAGSTHAFHAGEPDIAAKIRAIAPDGVDVVYDLVGRATFALAASSVRDGGVIAAIGAATGQPAPAPDLVRRGVDVRSGGTPQYVRGPAVENATSQLWDALRSGVFDDLETTRYPFDEIARAHDDVDNRRLSGLPVLIA

SEQ ID NO: 15274 - protein, 228 aa, Pinus taeda
MGRRPARCYRQIKNKPYPKSRYCRGVPDPKIRIFDVGAKKRLVDEFPFCVHLVSWEKENVSSEALEAGRIACNKYMVKFAGKDGFHLRVRVHPFHVLRSNKMLSCAGADRLQTGMRGAFGKPQGTCARVAIGQVLLSVRSRDNHSNHAQEALRRAKFKFPGREKIIVNRKWGFTKYTRADYLKWKTENRIVPDGVNPKLLGCRGPLSNRKPGQAFLKPAVVLSSDLVA

SEQ ID NO: 15275 - protein, 130 aa, Brassica napus
LDLVINLSHKMNVRPVIGLRAKLRTKHSGHFGSTSGEKGKFGLTTTQIVRVVRKLREACMLDCLQLLHFHIGSQIPSTSLLSDGVSEAAQFYCELIRLGANMKVIDIGGGLGIDYDGSKSGESGLSVAYT

SEQ ID NO: 15276 - protein, 154 aa, Lycopersicon peruvianum
MSLIPRIFGDRRSTSVFDPFSIDVFDPFKELGFTVSNSGETSAFANTRIDWKETPEAHVFKADLPGLKKEEVKVEVEEDRVLQISGERNVEKEDKNDTWHRVERSSGKFMRRFRLPENAKMDQVKASMENGVLTVTVPKEEVNNPDVKSIEISG

SEQ ID NO: 15277 - protein, 119 aa, Lewia infectoria
STGGKAPRKQLASKAARKSAPSTGGVKKPHRYKPGTVALREIRRYQKSTELLIRKLPFQRLVREIAQDFKSDLRFQSSAIGALQESVEAYLVSLFEDTNLCAIHAKPVTIQSKDIQLPR

SEQ ID NO: 15278 - protein, 713 aa, Oryza sativa (japonica cultivar-group)
MSSFVNGKGDFTLSRRWRQRPTGPHHNTLVRGTRIRCPRKYPRRVASRHHPPRPASRGTANLHRQPRPHPPTNSPLTPQPHHQLPTDSTTPPYPGGRDHPRVSTPPPPPSQIRTPHAIPRRRRRRTPSAPDPHCHNSQVATRASSRDNRSGGSRSPLGRLRGARLLLVRFCFLFKPNAPPHRLRSPPRLTQPPVAMGNRTSRHHRAAPEQPPPQPKPKPQPQQQQQQWPRPQQPTPPPAAAPDAAMGRVLGRPMEDVRATYTFGRELGRGQFGVTYLVTHKATGKRFACKSIATRKLAHRDDIEDVRREVQIMHHLTGHRNIVELRGAYEDRHSVNLIMELCEGGELFDRIIARGHYSERAAAALCREIVAVVHSCHSMGVFHRDLKPENFLFLSKSEDSPLKATDFGLSVFFKPGEHFKDLVGSAYYVAPEVLKRNYGAEADIWSAGVILYILLSGVPPFWAESEDGIFDAVLRGHIDFSSEPWPSISNGAKDLVKKMLRQDPKERLTSAEILNHPWIREDGEAPDKPLDITVISRMKQFRAMNKLKKVALKVVAENLSDEEITGLKEMFRSLDTDNSGTITLEELRSGLPKLGTKISESEIRQLMEAADVDGNGTIDYAEFISATMHMNRLEKEDHILKAFEYFDKDHSGYITVDELEEALKKYDMGDDKTIKEIIAEVDTDHDGRINYQEFVAMMRNNNPEIAPNRRRMF

SEQ ID NO: 15279 - protein, 351 aa, Pseudomonas fluorescens PfO-1
MRKTTLITGGAGYIGSHTALALINAGHKVLVLDNLCNSCRECIRRLEQLTLTRVDFIKGDIRDPVLLDDIFSRYDIEAVVHFASLKSVEESVRKPLDYYANNVAGTLDLCQAMARNNVFQLVFSSSATVYGEPANTPIAEDFGTGKPVNPYGRTKLMIEELLTDLCNSDPRWSIGLLRYFNPIGAHESGMIGEDPSGRPNNLLPCLTQVAIGRIPELTVYGSDYPTVDGTCVRDYIHVVDLAIGHLKALQVLQHDNGIHFWNLGTGVGYSVLQIIHSFEDITGISIPYRFAPRRLGDIAKCWADPAKAGRELGWSAQRGLEQMITDSWRWQSCNPQGYQSSFKIPAPVAVK

SEQ ID NO: 15280 - protein, 155 aa, Lycopersicon peruvianum
MDLRLLGIDNTPLFHTLHHMMEAAGEDSVNAPSKIYVRDAKAMAATPADVKEYPNSYVFVVDMPGLKSGDIKVQVEEDNVLLISGERKREEEKEGAKFIRMERRVGKFMRKFSLPENANTDAISAVCQDGVLTVTVQKLPPPEPKKPKTIEVKVA

SEQ ID NO: 15281 - protein, 237 aa, Lactobacillus sakei
MVHQLLAEFMGTALMIIFGVGVHSDEVLKGSKYRGSGHLFAITTWGFGITVALFIFGDVSINPAMVLAQCVLGNISWAMFIPYSVAEVLGGVVGAIIVYIMYADEFKASEGNVDPVAVRNIFSTAPGIRNLPRNFFVEFFATFVFISSIIAITQIKTPGIAPIAVGLLVWAIGMGMGGPTGFAMNLARDMGPRIAHAILPIKNKANSDWQYGIIVPGIAPFVGGLCAALFMRSFFGI

SEQ ID NO: 15282 - protein, 323 aa, Zea mays
MAAGRELVVSFGEMLIDFVPTVAGVSLAEAPAFLKAAGGAPANVAIAVSRLGGGAAFVGKLGDDEFGRMLAAILRDNGVDGDGVVFDAGARTALAFVTLRADGEREFMFYRNPSADMLLTADELNVGLIRRAAVFHYGSISLIAEPCRTAHLRAMEIAKEAGALLSYDPNLREALWPSREEARTQILSIWDQADIVKVSEVELEFLTGINSVEDDVVMKLWRPTMKLLLVTLGDQGCKYYTRDFHGAVPSFKVQQVDTTGAGDAFVGALLRRIVKDPSSLQDEKKLVESIKFANACGAITATKKGAIPSLPTETEVLLLIEKA

SEQ ID NO: 15283 - protein, 448 aa, Pseudomonas aeruginosa PAO1
MPTPDKNNKIDVQAFIDAQAVSAFQLRVLSLCFLIVAMDGFDTAAIGFIAPALAHDWQLSPAQLSPILGAALAGLALGAFAAGPLADRFGRKSVLLLSVLFFGGWSLASAYAGSVETLALLRFFTGLGLGGAMPNAITLTSEYCPRRHRALMVTAMFCGFTLGSALGGLLAARMVPALGWESVLLLGGGLPLASLPLLWACLPESVRFLARRAPDAARLRRILERLGRLPDGWAGRLELPADESDGTSPLRQILGAELRGGTLLLWATFFMGLLIIYLLTNWLPTLIGGTGFSLGEAATISAMFQLGGTLGALLLGSAMDRFDAHRVLSLAYVGGALFILGIASLYHSFALLALCVAGVGFCISGSQVGANALAADFYPTRSRATGVSWALGLGRIGSIVGSLSGGALLGLGLGFSGILALLVIPALLAAVAVHRLGRRRARPSPTTL

SEQ ID NO: 15284 - protein, 305 aa, Arabidopsis thaliana
MQIFVKTLTGKTITLEVESSDTIDNVKAKIQDKEGIPPDQQRLIFAGKQLEDGRTLADYNIQKESTLHLVLRLRGGMQIFVKTLTGKTITLEVESSDTIDNVKAKIQDKEGIPPDQQRLIFAGKQLEDGRTLADYNIQKESTLHLVLRLRGGMQIFVKTLTGKTITLEVESSDTIDNVKAKIQDKEGIPPDQQRLIFAGKQLEDGRTLADYNIQKESTLHLVLRLRGGMQIFVKTLTGKTITLEVESSDTIDNVKAKIQDKEGIPPDQQRLIFAGKQLEDGRTLADYNIQKESTLHLVLRLRGGF

SEQ ID NO: 15285 - protein, 261 aa, Platismatia glauca
VEHGDVKVVAVNDPFIEPHYAAYMLKYDSQHGQFKGTIEVKGSDLVVNGQTVKFYTEKDPANIPWKDTGAYYIVESTGVFTTTEKAKAHLKGGAKKVVISAPSADAAMFVMGVNEKEYKSDIEIISNASCTTNCLAPLAKVMHDNYTIIEGLMTTIHSYTATQKTVDGPSSKDWRGGRTAAQNIIPSSTGAAKAVGKVIPSLNGKLTGMSMRVPTSNVSVVDLTCRLEKSVTYDQIKATMKKASEGELKGIMSYSEDALVS

SEQ ID NO: 15286 - protein, 278 aa, Cetraria islandica subsp. islandica
VEHGAVKVVAVNDPFIEPHYAAYMLKYDSQHGQFKGTIEVKGSDLVVNGQTVKFYTEKDPANIPWKDTGAYYIVESTGVFTTTEKAKAHLKGGAKKVVISAPSADAAMFVMGVNEKEYKSDIEIISNASCTTNCLAPLAKVMHDNFTIIEGLMTTIHSYTATQKTVDGPSSKDWRGGRTAAQNIIPSSTGAAKAVGKVIPSLNGKLTGMSMRVPTSNVSVVDLTCRLEKSVTYDQIKATMKKASEGELKGIMSYSEDALVSTDLNGDNHSCIFDATAG

SEQ ID NO: 15287 - protein, 433 aa, Haemophilus somnus 2336
  misc_feature (31)..(31): Xaa can be any naturally occurring amino acid
  misc_feature (45)..(45): Xaa can be any naturally occurring amino acid
  unsure (1)..(433): unsure at all Xaa locations
MAVDEQSLPSLAPMLQKVLPAVVSIAVEGKXKNNFSFNNEIPEEXRRFFCDSFCFEGFSSRAPRSFRGIGSGVIIDAEKGYVLTNNHVIDQADKITVKLEDGREFKAKVLGKDDMSDIALIQLENPKNLTAVKIADSDKLRVGDFTVAIGNPFGLGQTATSGIVSALGRSTGFDSGAYENYIQTDAAVNRGNSGGPLVNLNGELIGINTAIISPSGGNAGIAFAIPSNMAISLVKQIIEFGEVRRGLLGIKGGELNANLAKEFNIDVQQGAFVSEVLPNSAAEKAGLQAGDVITAIDGQKLASFAELRAKIATSGAGKEIKLTYLRDGKSKTAKVKLQSDDGDTISAVGNISILEGAELSNYNQKGTKGVEIKEVKSRSLAAQYGLEKGDIIIGVNRHKVENLSDLRKILGKKPSAIALNILRDDSRFYLLIQ

SEQ ID NO: 15288 - protein, 492 aa, Shewanella sp. ANA-3
MANYFNSLNLRQQLAQLGQCRFMDRSEFSDGCNYIKDWNIVILGCGAQGLNQGLNMRDSGLNIAYALRPEAIAQKRASWQKATDNGFKVGTFEELIPTADLVLNLTPDKQHSNVVSAVMPLMKQGATLSYSHGFNIVEEGMQIRPDITVVMVAPKCPGTEVREEYKRGFGVPTLIAVHPENDPNGDGLEIAKAYASATGGDRAGVLQSSFIAEVKSDLMGEQTILCGMLQTGAILGYDKMVADGVEPGYAAKLIQQGWETVTEALKHGGITNMMDRLSNPAKIKAFEIAEDLKEILQPLFEKHMDDIISGEFSRTMMQDWANDDANLLRWRAETAETGFENAPVSSEHIDEQTYFDKGIFLVAMIKAGVELAFDTMVSAGIVEESAYYESLHETPLIANTIARKRLYEMNVVISDTAEYGCYLFNHAAVPMLRDYVNAMSPEYLGAGLKDSSNNVDNLQLIAINDAIRHTSVEYIGAELRGYMTDMKSIVGA

SEQ ID NO: 15289 - protein, 204 aa, Gossypioides kirkii
VKAKIQDKEGIPPDQQRLIFAGKQLEDGRTLADYNIQKESTLHLVLRLRGGMQIFVKTLTGKTITLEVESSDTIDNVKAKIQDKEGIPPDQQRLIFAGKQLEDGRTLADYNIQKESTLHLVLRLRGGMQIFVKTLTGKTITLEVESSDTIDNVKAKIQDKEGIPPDQQRLIFAGKQLEDGRTLADYNIQKESTLHLVLRLRGGF

SEQ ID NO: 15290 - protein, 235 aa, Lactobacillus plantarum WCFS1
MHGFLGEFLGTMVLIVFGVGSGAAMNLKGNYARHQNWTFICLAWGLAVTFGVYVAGQFGSDGHLNPAVTVGFALFGYLPMANVWPYLLGQFLGAFIGAVIVIIQYYPHFQAAKTAADGNQVGIFATGPAISNPVFNFLSETIATFFFIFVLLNLGNFTQGLKPLMVGLLIVVVGQTLGGTTGFAINPARDWAPRLAYTILPVPNKGLANWGYAWVPMFGPLLGGILAAGLETIIS

SEQ ID NO: 15291 - protein, 355 aa, Symbiobacterium thermophilum IAM 14863
MGIFEQMAQYGHEQLVFCYDKSTGLRAIIAIHDTTLGPALGGLRMWPYEREEDAITDVLRLARGMTYKNSAMGLNLGGGKAVLWGDPHTDKSEELFRAFGKFVETLGGRYITAEDVGTTVEDMNYVLMETDHACGRAEVSGDPSPVTAYGVFMGIKACVKQVFGTEELKGKKIAVQGLGKVGYHLCRYLHEAGAELIVTDIDPEAVERAKQEFGAKAVAPDEIYTAECDIFAPCALGAILNDDTIPGLKCRIVAGAANNQLKEPRHGNMLRERGILYAPDFVINGGGVINVAEEYHPQGYSRERALKRVETIYDKLLRVFQIAEQRNISTAEAADVMAEERMHRIHQLNRIYLAE

SEQ ID NO: 15292 - protein, 365 aa, Caulobacter crescentus CB15
MTQTVPTSGKIPVTVLTGYLGAGKTTLLNRILTEEHGKRYAVIVNEFGEVGIDNDLVVGADEEVFEMNNGCVCCTVRGDLIRVLQGLMKRKGGFDAIIVETTGLADPGPVAQTFFVDDDVKARTALDSVTAVVDAKHILLRLSDSKEAVEQIAFADQIVLNKTDLVSEDDLRHVEARIRRINPLAPIHRAQRSNVPLDAILGKHSFDLERITDLEPDFLNPAHGEPGHVHDEHCDHHHHHDHDHVHDEHCGHDHHHHHHDHKSDVHDDGVKGISLTLDKPVDGQKITAWLNDLLARRGPDILRAKGIIDVKGEDKRLVFQAVHMILEGDFQRPWTDKDKRYSRMVFIGRDLDEAELRAGFEATAA

SEQ ID NO: 15293 - protein, 557 aa, Lactobacillus plantarum WCFS1
MSKHWYDQQTIYQIYPKSFNDSNHDGIGDIPGITAKIPYLKQLGITTIWLNPIYQSPQVDNGYDVSDYYQVDSSLGTMTDVETLIKTVHEHGMYLIFDFVLNHTSDQHPWFKQALADPQSKYRDYYLWQDPAADGGRPNNWGSFFGGSVWAKDPAGGSQYYFHLFDKRMPDLNWKNPAVQQAMRDVAEFWVEKGIDGLRLDAFIHLAKADFRQTYPNRTGDSTPIISDMFYAHLPKVHQYLHDFVAVIKAKHPDTYVVGEASSADPHLMVDYTTPGTDECDQVITFRTFADDNTQDDPSFSDTFQPRPMDVTAYKQNTVGIQAALADTSLPTLYWNNHDMARVATRYGDPDYPQASAKALATALYLQRGIPIIYYGEELGLTNIRYHDIADFEDQTVPTFVASAQAAGKSKVEIMRMLNQTHKMAGRGPMQWDNTVYHGFSDHLPWKHGDTDDMNAQAEIADPDSIYHYYQQLLQLKQCAPFTNGQFIMLGSAEQLFTYLIDDGQKQAAIVCNLSAQAQTYLLPFVGGKVLLVQGGATYRGRQVTLPAWSSLVVKSA

SEQ ID NO: 15294 - protein, 362 aa, Dehalococcoides sp. CBDB1
MQNLRIPGPTPCPEEVLKAMGQQMINHRGPEMAAIMKEVAEKLKYFFQTKNDVLVLTGSGTGGLEAAAVNFLSPGDTVLSVSIGVFGERFAKIASIFGAKIIALNFEQGKAADPALVKKALTEHPEIKAVLVTHNETSTGITNDLKPLASVIKGAGKLLLVDAISSLSSINLPVDEWGCDVVVSGSQKGWMVPPGLAFISVSPEAWKANAESKMPRFYWDLAKHKASIEKGQTPWTPCVSVIVALHTALIMMEKEGMQNIFKRHQKIADFTRKGVKELGLTLLAEEKYASNTVTAIVATEGLDVKKLLKIMREEYNTVLAGGQGPLEGKIFRIGHLGWVTENDIKVTLDNLKLALPKAGFRS

SEQ ID NO: 15295 - protein, 377 aa, Shewanella sp. ANA-3
MLPAPHFSAFNPPRRILMGPGPSDVYPEVLAAQARPTVGHLDPLFVGMMDELKSLIQYAFQTKNEMTMAVSAPGSAGMETCFVNLVEPGEKVIVCRNGVFGERMRQNVERVGAIAVLVDNEWGTPVDAAAVEAALKANPDAKFLAFVHAETSTGALSDAKTLCALAKQYGCLSIVDAVTSLGGVELRVDEWGIDAIYSGSQKCLSCVPGLSPVSFSPNAVEKLKNRKTPVQSWFLDQSLVMAYWTSAGGKRSYHHTAPVNALYALHESLRLLAEEGLENAWKRHQDMHLVLRAGLEKLGLKFVVAEASRLPQLNAIYIPEGVDDAAVRARLLKDYNLEIGAGLGALAGKAWRIGLMGFGARRENVALCLRALEEVLN

SEQ ID NO: 15296 - protein, 537 aa, Chlamydophila pneumoniae CWL029
MPFKCIFLTGGVVSSLGKGLTAASLALILERQRLNVAMLKLDPYLNVDPGTMNPFEHGEIYVTDDGVETDLDLGHYHRFSSAALSRHSSATSGQIYARVIKREREGDYLGSTVQVIPHITNEIIQVILDAAKEHSPDVLIVEIGGTIGDIESLPFLEAIRQFRYDHSEDCLNIHMTYVPYLQAADEVKSKPTQHSVQTLRGIGIIPDAILCRSEKPLTQEVKSKISLFCNVPNRAVFNVIDVKHTIYEMPLMLAQEKIANFIGEKLKLATVPENLDDWKVLVNQLSQDLPKVKIGVVGKYVQHRDAYKSIFEALTHAALRLGHAAEIIPIDAEDENLTMELSQCDACLVPGGFGVRGWEGKIAAAKFCREQGIPYFGICLGMQVLVVEYARNVLNLDQANSLEMDPNTPHPIVYVMEGQDPLVATGGTMRLGAYPCLLKPGSKAHKAYNESSLIQERHRHRYEVNPDYIQSLEDHGLRIVGTCPPQGLCEIIEVSDHPWMIGVQFHPEFVSKLISPHPLFIAFIEAALVYSKDASHV

SEQ ID NO: 15297 - protein, 134 aa, Zea mays
MRKHRIVSLVAALLILLALAVSSTRNAQEDSMADNTGTLAGGIKDVPGNENDLHLQELARFAVDEHNKKANALLGFEKLVKAKTQVVAGTMYYLTIEVKDGEVKKLYEAKVWEKPWENFKELQEFKPVDEGASA

SEQ ID NO: 15298 - protein, 357 aa, Symbiobacterium thermophilum IAM 14863
MGVFERMMRDGHEQVVFCYDKATGLRAIIAIHDTTLGPALGGCRMWPYATEEEALEDALRLARGMTYKSAASGQNHGGGKVVIWGDPARDKSEPLFRALGRFVGTLRGRIITGTDVGTDKTDFVWARQESPWFVGLPEDEGGSGDTAVLTAYGVWQGMRACARFLWGESSLRNRRIALQGLGKVGSRLLAHLLEDGARVTVTDLRPERVEAVCARHPEVVGVEPDAIYDVPCDIFSPSALGGVLNDATIPRLRCAAVAGSANNQLAEARHGDLLHARGILYAPDYVINAGGLIQVADEILGFNPERARRKTAAIHDLLLRIFAISRDERIPTYQAADRLAEQRIDRIGRRRGIYIPE

SEQ ID NO: 15299 - protein, 306 aa, Arabidopsis thaliana
MQIFVKTLTGKTITLEVESSDTIDNVKAKIQDKEGIPPDQQRLIFAGKQLEDGRTLADYNIQKESTLHLVLRLRGGMQIFVKTLTGKTITLEVESSDTIDNVKAKIQDKEGIPPDQQRLIFAGKQLEDGRTLADYNIQKESTLHLVLRLRGGMQIFVKTLTGKTITLEVESSDTIDNVKAKIQDKEGIPPDQQRLIFAGKQLEDGRTLADYNIQKESTLHLVLRLRGGMQIFVKTLTGKTITLEVESSDTIDNVKAKIQDKEGIPPDQQRLIFAGKQLEDGRTLADYNIQKESTLHLVLRLRGGSF

SEQ ID NO: 15300 - protein, 427 aa, Candida glabrata CBS138
MSIGDELVDADEVYRQARWKNQFEVLSKLPRVLQERVDAQKPVIEASGNSATPSNASRALVRHQQNPGDVGLVLNKKFADEQGHESVIERHDKLLNQTPRWHAPWHLTRVIHGHHGWVRCIAMDKVDNEWFATGSNDKTIKIWNLASGKLKVTLKAHDMTVRDLAISNRHPYMFSVSEDKTVKCWDLEKNTAIRNYHGHLSGVHTVDIHPTVDVVVTAGRDSVVKVWDIRTRLPVMTLPGHKGPITKVRCLPVDPQVISSSVDASIRLWDLVAGKSMKVLTHHQRTVRDISVHPSEFSFASACTNDIRSWLLPKGELLTNFVSQDLDVINTVSINQDDVLFAGSDNGSLTFFDYKSGHKYQTFKTKEAPGSPESERGILSSTFDGTGLRLLTGETDRTIKIWKQDETASQDTHPNLPWNPKLDSQRL

SEQ ID NO: 15301 - protein, 360 aa, Oryza sativa
MEQPKPPSVAASAAEAQNPNAFTCELPHSIYALAFSPSAPVLAAGSFLEDLHNRVSLLSFDPVHPTAASFRALPALSFDHPYPPTKLQFHPRAASAPHLLASSSDALRLWLAPLDDLAATATAAAPELRSVLDNRKTSASEFCAPLTSFDWNEAEPRRIGTASIDTTCTIWDIERGVVETQLIAHDKAVHDIAWGENGIFASVSADGSVRVFDLRDKEHSTIFYESPRPDTPLLRLAWNRYDFHYMATLLMDSSAVVVLDMRAPGVPVAELHRHRACANAVAWAPQATRHLCSAGDDGQALIWELPATPGAVPAEGIDPVMVYDAGAEINQLQWAAAYPEWISIAFENKVQLLRVRRDVF

SEQ ID NO: 15302 - protein, 1231 aa, Nocardioides sp. JS614
MAQGPQPRAVQVGQVDEPGALDGGSAGQVDVVADQHRGPGRPGLLEPAAAVGQHDGPGACGGRRTHAVHDRGDTLALVVVGAAEEHQQLLVAGADRADLAGMTGDRGGGEARQVGGGDLGGRLPERIDGRQPTRAEHQGDVVPLHTGELREPRGGLGRSVVRVLRAVRLGLLRHASDSSAAAAWCTIRPVWAGGFPGEPGKLELLARNFGPKVPVLPPKLPARVLHRREVGRLRPDRARADHRHDDSDERPSPRASHAAQGAARERLQRQGHRSTRQRRRVGQDPTRCLHRCEHLGRAGQGGPTRVGGAGGRRAVSDQRRRLARLRSALRRCTDLGDQPRPGAHHQEGRQSRTVGGGRGPALREDPRRRRCRAGRAHRDGANPAGVGDDDSCGRRGRGVRGESSAARGHDHHGGASRPLRTDAALAGDAADGSGPPTVRPPLRVGRRVPHVLPLLPRGSTDADPPVRDHGRERSSRRSRGLRVARAGRLPGVRREDQVRGAPQGRATGVGRRGGGEGARVDDLPAHRLAMHPDHLGRLGRSGTDSRDDSPRAGPARRLRPATWPQAQAELELLARSFGPTVPVSPVNRGNRRARPRLQPDRAAGADAERGDVVGGGVGGLGGVGEDAEVRRGGQPTLVRVQDVGPGDQLASHRGDPDASLAVEAQVGGLPAVEGGLVLAGDVVHRDEDLVDRVLDDRRERAVPAVLLAAEGEPPTLEPARRGQRGVRTALAHPDGIQIGPVGGVKRHACRVVERRGAGPGHVSRLATVTHFNVLVLGAGPGGYVAAIRAAQLGQTVAVIEEKYWGGVCLNVGCIPSKALLRNAEIAHIITKEKDTFGISGEATMDFGATHKRSRGVAEASAKGVHYLMKKNKITELDGWGTIKSPREVEVDKDGQKQTYTCDNLIIATGARVRMLPGMSVSQNVVTYEEQILTDQLPKSIIIGGSGAIGVEFAYVLTNFGVDVTIVEFLDRMVPTEDADVSKELLKQYKKLGVKVLLSTKVDQVEDTGSGVRVTVSPAAGGDAQVLEADKMLAAFGFAPRIEGYGLENAGVEVSDRGAIEVDARGRTSVENVYAIGDVTGKLMLAHTAEAMGVVAAETIAGAETHEIDFDMIPRATFCQPQIASFGYSEAQAKEKGYDVKVATFPFSANGKARGMAEGVGFVKIVADATYNEIVGAHMIGPEVTELLPALTLAQQWDLTADEVARNVFAHPTLSEAMKEAVEGIAGHMINL

SEQ ID NO: 15303 - protein, 258 aa, Chlamydophila pneumoniae CWL029
MATLINFNDTNKLLLTKQPSLFIDLASKDWIASANQAIKQRGAFYVALSGGKTPLEIYKDIVINKDKLIDPSKIFLFWGDERLAPITSSESNYGQAMSILRDLNIPDEQIFRMETENPDGAKKYQELIENKIPDASFDMIMLGLGEDGHTLSLFSNTSALEEENDLVVFNSVPHLETERMTLTFPCVHKGKHVVVYVQGENKKPILKSVFFSEGREEKLYPIERVGRDRSPLFWIISPESYDIADFDNISSIYKMDIL

SEQ ID NO: 15304 - protein, 166 aa, Arabidopsis thaliana
MTNYGAIPTSSHPSPAIDLEYISRAKHRIKSGLATRRPWKSMFDFESMTLPHGFFDAISRIKTNLGYFRANYAIGVLFILFLSLLYHPTSLIVLSILVVSHASADAWGDEPLVVFGYQIDDRTVLIGLSVLTVVMLLLTHATSNILGSLLTAAVLVLIHAAVRRSA

SEQ ID NO: 15305 - protein, 440 aa, Lactobacillus plantarum WCFS1
MARDTQTQLRNEMIYSVFVRNYSEAGNFAGVTADLQRIKDLGTDILWLLPINPIGEVNRKGTLGSPYAIKDYRGINPEYGTLADFKALTDRAHELGMKVMLDIVYNHTSPDSVLATEHPEWFYHDADGQLTNKVGDWSDVKDLDYGHHELWQYQIDTLLYWSQFVDGYRCDVAPLVPLDFWLEARKQVNAKYPETLWLAESAGSGFIEELRSQGYTGLSDSELYQAFDMTYDYDVFGDFKDYWQGRSTVERYVDLLQRQDATFPGNYVKMRFLENHDNARMMSLMHSKAEAVNNLTWIFMQRGIPLIYNGQEFLAEHQPSLFDRDTMVADRHGDVTPLIQKLVTIKQLPLLRAADYQLAVVEEGIVKITYRAAGEALTAWIPLKGQVTAVATKLAAGSYQNLLTDGPTEVVDGKLTVDGQPVLIKYVTNTAVTKVADQSN

SEQ ID NO: 15306 - protein, 465 aa, Nocardioides sp. JS614
MTSQRVVIIGGGPGGYEAAHVAAQLGAEVTIVDTDGVGGSAVLTDCVPSKTLIATAEVMSDLADAAELGVTFADAEGDVATSIRVDLATVNARVKRLAAAQSADIGRRLDRDGVTVLRGRGSLVGPDRVLARLADGTEQVLEADAILLATGAAPRTLPTAQPDGERILTWEQVYDLTEVPTELIVVGSGVTGAEFASAYLNLGIPVTLVSSRDHVLPGEDADAAKVLEDVLTRRGMTVLARSRMESVSRDGDRVTVTLTDGRTVEGSHCILALGSVPNTAGLGLEEAGVVLDDGGFVNVDRVSRTSARGIYAAGDCTGVLMLASVAAMQGRIAMWHFLGDAVQPLDLKTVSSNVFTAPEIATVGWSQRAMEEGEILAEVVMLPMSGNPRAKMQGVRDGFVKLLCRPGTRTIVGGVVVGPRASELIHPVAIAVAESLTADQLAQAFTVYPSMSGSIAEAARRLHRA

SEQ ID NO: 15307 - protein, 467 aa, Xanthomonas campestris pv. vesicatoria str. 85-10
MGAGHIHRGIFKLAAGTIQVFSTLDVERGAPHHDPSEGARYWHPKRNVSNLIQAREHVTEERAISRLQDALSMAVDRVSDHRTGSFLSGGTDSSLITSLLQSQRSTPVDTVTIGFEDADHDEMDWAQKVASHLGTRHFQQRISDQQAVAILPEISEAFCEPFADSSQIPTLLAAGSARRQVSHMLTGDGGDELFFGHAAYARALRNARLSSMIPDTLRCSLRRRGVYTKESARLGGWRAAVGETISRSVEESYLLRVSRWRNPHCAVLGSMEYPTIYDTPMEQLTVGSPGERVLFMDIAMELGEGLMTKVDRACMLHGLNTSSPFLDQQVFQLAWQIPLKLKMVRGEQKYILKRLLELYLPQELIYRPKRGFGAPVGRWLRGPLREWAEDLLTPSKLEEQGVFDVGVVTHLWQAFIAGQRKWHTHLWPILMFQAWQQRWQQRPSFCVDEACHRDPEGISHLTIEAFV

SEQ ID NO: 15308 - protein, 427 aa, Cordyceps bassiana
DKTHINVVVIGHVDSGKSTTTGHLIYQCGGIDKRTIEKFEKEAAELGKGSFKYAWVLDKLKAERERGITIDIALWKFETPKYQVTVIDAPGHRDFIKNMITGTSQADCAILIIAAGTGEFEAGISKDGQTREHALLAFTLGVKQLIVAINKMDTTKWSEARYQEIIKETSSFIKKVGYNPKAVAFVPISGFNGDNMLEASTNCPWYKGWEKETKAGKSTGKTLLEAIDAIEPPKRPTDKPLRLPLQDVYKIGGIGTVPVGRVETGIIKPGMVVTFAPANVTTEVKSVEMHHEQLVEGVPGDNVGFNVKNVSVKEIRRGNVAGDSKNDPPSGAASFNAQVIVINHPGQIGAGYAPVLDCHTAHIACKFSELLEKIDRRTGKSVENNPKFIKSGDSAIVKMVPSKPMCVEAFTDYPPLGRFAVRDMRQT

SEQ ID NO: 15309 - protein, 389 aa, Thermoanaerobacter tengcongensis MB4
MDILKEVEKVEEEIIGIRRKIHMHPELGFEEVKTSELVYNYLKDIGLEVKRLAKTGVVGLLKGDGERTIAIRADMDALPIQEENEVEYASKIPGKMHACGHDVHTAILLGTAKVLSRIKNVKGNVKFIFQPAEETTGGALPMIEEGVLEGPRVDAIIGLHVDPDLEVGQIGITYGKAYASSDMFDVIIKGRSSHGAEPHKGIDALVIAANVISALQTFASRKTSPFTPIVVTVGTIKGGYARNIIADRVEMSGIIRMMEEERREEIVESVEKMCKDIAKAYGGAAEFRRVKGYPLLINDKGFTTLVKKSASMIVGEENVLEVSPSMGVEDFAYFLQRVPGTFYKLGCGNKEKGIDKPLHSSRFDVDERCIKVGIAVHVMTVLNYFEGKY

SEQ ID NO: 15310 - protein, 331 aa, Thermococcus litoralis
MKPKVFITRQIPENGIKMIEKFYEIELWKDPKAPPRGVLLEKVREVDALVTLVTDKVDKELLENAPKLKIIAQYAVGYDNIDIEEATKRGIYVTNTPGVLTDATADLAFALLLAVARRIVEADAFVRSGEWKKSEVGWHPLMFLGYGLKGKTLGIVGFGRIGQALAKRAKGFGMKIIYYSRTRKPEAEEEIGAEYVDFETLLKESDFISLHVPLTKETYHMIGEKELKLMKPNAILINTSRGAVVDTNALIKALKEGWIAGAGLDVFEEEPYYNEELFKLKNVVLAPHIGSATHEAREGMAELVAKNLIAFAKGEIPPNLVNKDVLTSSPP

SEQ ID NO: 15311 - protein, 180 aa, Zymomonas mobilis subsp. mobilis ZM4
MEKQAILAGGCFWCIEAIFKDIIGIISVESGYIGGDVPNPSYEQVCEGKTGHAEAVRLTFDPEKISYSDILDLFFDIHDPTQLNRQGDDIGVQYRSAIFPLDKAQEQVAQDAIVKAQAHSKKPIVTKIEPASIFYPAEAYHQDYFYQKGQENRYCSIVVAPKIAKFRKSHQDRIKKQASA

SEQ ID NO: 15312 - protein, 228 aa, Zea mays
  misc_feature (155)..(155): Xaa can be any naturally occurring amino acid
  misc_feature (217)..(217): Xaa can be any naturally occurring amino acid
  unsure (1)..(228): unsure at all Xaa locations
GFLVCSQLPLYGIYSTTGADPFYWMRVILASNRGTVMELGITPIVTSGMVMQLLVGSKIIEVDNSVREDRALLNGAQKLLGILIAIGEAVAYVLSGMYGSVSQLGTGNAILIILQLFFAGIIVICLDELLQKGYGLGSGISLFIATNICENIIWXVRALREAFYRQNLPNVTNLLATVLVFLIVIYFQGFRVVLPVRSKNARGQQGSYPIKLFYTSXMPIILHSALIT

SEQ ID NO: 15313 - protein, 1118 aa, Shewanella sp. MR-4
MGLKYMAFDWFSQFFISSQDSLLLNVYYNPLLVTISILIAIFSAFMAFQVTTQAVLSQSKSRQQIMLLTGSVVLGGGVWSMHFIGMLAFDLCSPVTYDFGLTALSLLPSIGASWVALNLLSKPSFKFSQVLISGILVGAGIGTMHYVGMAAMDMAPLLRYDPWIFALSIVVAVLLAIIALWVRTGLNQLIASNMSAITSNFIASIVMGLAISGMHYTGMAAARFVKPEGLELSEQSSEISFYLALGVSVTTVIIICLVLIVNVIFKYKDLSLLAKSNEDRMRAMMNTAVDGIITIDGQGIIVNVNKAVTTILGWSPAELLGENVKKIVPESIRPHHDGYLARYINTREAQIIGTGREVEAQHKAGHSVPVRLSIGHVMQGKAHYFVGFLSDLSLRNEMEQELKNNEAKFRSLITNIPGIAYRCKSTEGWPMVFISEAVLNITGYPAEDFELPHPKRFFSDLYYPDDIESIYAQAQPPTFSMEYRIIRADGEVRWLFEHGNYILDETSNEVWIDGFLMDITERKVMEQDLVTAKNNAEQAAAARAAFLANMSHEIRTPMNAIIGFSDILLESVLDTEQHKQLSTINRSAKSLMHLLNDVLDSAKLDKGKLELENRVFCLTDEIDTVISTLWLQAKKQRLSLEVDIAPSMAANFIGSPERIRQVLINLIGNAVKFTCEGKVTVSVFPQNDNLVTFEIIDTGIGMTPEQLNRVFEAFAQADASMSRKYGGTGLGTTISKQLVELMGGQLEAESTLGQGSTFRFTIPLQSSSEPLETERADHGSLPPLTLLVVDDIQQNIDLLSVWLTRQGHKVITARDGEQALLRMQKADIDITLMDLQMPVMDGLTAAKMRREQEAESQLPHMPIIALTASVLEQDKSAAEQAGMDGFANKPIDFALLTREIARVLQLNPPQAEAESLQPLGSQLVDEAKGVKLWGSKPQFIKELMKFIAQWPEKSQALQQAISEQDTATIKLLSHSLKGVSGNLGLLQWMSYFAQLEKLTQAESLSFEAMEAIIAKISDSLVEIGDYIESTTVSSASGSELAQSGTDDPAQLLAHIDALLASVVHHSFDESDLEALTARIDEHLRLSVTIITEALDNFDFDIAHNELLELRRIITANQE

SEQ ID NO: 15314 - protein, 369 aa, Oryza sativa (japonica cultivar-group)
MSDPSTPRKIEDAKNISIYNDVIDFTLFELETITKSFRADYVLGEGGFGTVYKGYIDENVRVGLKSLPVAVKVLNKDGHQGHREWLTEVRFLGQLRHPNLVKLIGYCCEDDHRLLVYEFMFRGSLENHLFRRTATPLSWATRMSIALGAAKGLACLHNAERPIIYRDFKTSNILLDSDYTAKLSDFGLAKAGPEGDQTHVSTRVMGTYGYAAPEYVMTGHLTARSDVYSFGVVLLELLTGRKSIDKSRPSREHSLVDWALLKLNDKRRLLQIIDPKLEGQYSVRAAHKACSLAYYCLSQNPKARPLMSDVVETLEPLQGSGGSDGAVQSVLGSGLPSYRVNRRLTTNSVHCRAIPNPKCSPAVPACRVR

SEQ ID NO: 15315 - protein, 278 aa, Cetrariella delisei
  misc_feature (26)..(26): Xaa can be any naturally occurring amino acid
  unsure (1)..(278): unsure at all Xaa locations
VEHGEVKVVAVNDPFIEPHYAAYMLXYDSQHGQFKGTIEVKGSDLVVNGQTVKFYTEKDPANIPWKDTGAYYIVESTGVFTTTEKAKAHLKGGAKKVVISAPSADAAMFVMGVNEKEYKSDLEIISNASCTTNCLAPLAKVMHDNFTIIEGLMTTIHSYTATQKTVDGPSSKDWRGGRTAAQNIIPSSTGAAKAVGKVIPSLNGKLTGMSMRVPTSNVSVVDLTCRLEKSVSYDQIKATMKKASEGELKGIMSYSEDALVSTDLNGDNHSCIFDATAG

SEQ ID NO: 15316 - protein, 123 aa, Brassica napus
  misc_feature (73)..(73): Xaa can be any naturally occurring amino acid
  misc_feature (116)..(116): Xaa can be any naturally occurring amino acid
  unsure (1)..(123): unsure at all Xaa locations
MKNEEQSRSLFGISLSDRPTWQQFLICTSGFFFGYLVNGVCEEYVYNRLQFSFGWYFTFIQGFVYLFLIYLQXGFTTKHIVNPMRTYVKLSAVLMGSHGLTKGSLAYLNYPAQIMXKSTKVYP

SEQ ID NO: 15317 - protein, 278 aa, Cetraria commixta
VEHGDVKVVAVNDPFIEPHYAAYMLKYDSQHGQFKGTIEVKGSDLVVNGQTVKFYTEKDPANIPWKDTGAYYIVESTGVFTTTEKAKAHLKGGAKKVVISAPSADAAMFVMGVNEKEYKSDIEIISNASCTTNCLAPLAKVMHDNFTIIEGLMTTIHSYTATQKTVDGPSSKDWRGGRTAAQNIIPSSTGAAKAVGKVIPSLNGKLTGMSMRVPTSNVSVVDLTCRLEKSVSYDQIKATMKKASEGELKGIMSYSEDALVSTDLNGDNHSCIFDATAG

SEQ ID NO: 15318 - protein, 278 aa, Cetraria sepincola
VEHGEVKVVAVNDPFIEPHYAAYMLKYDSQHGQFKGTIEVKGSDLVVNGQTVKFYTEKDPANIPWKDTGAYYIVESTGVFTTTEKAKAHLKGGAKKVVISAPSADAAMFVMGVNEKEYKSDIEIISNASCTTNCLAPLAKVMHDNFTIIEGLMTTIHSYTATQKTVDGPSSKDWRGGRTAAQNIIPSNTGAAKAVGKVIPSLNGKLTGMSMRVPTSNVSVVDLTCRLEKSVTYDQIKATMKKASEGELKGIMSYSEDALVSTDLNGDNHSCIFDATAG

SEQ ID NO: 15319 - protein, 307 aa, Ashbya gossypii ATCC 10895
MAQDANTASSTPGRIANMKIGLLAAALGGLAAAQNLYDRNPHVMELTAKTFKRAVHGTNHTTLVEFYAPWCGYCQKLKPTMERAARALDGLMQVAAVNCDVDANKQLCVKHDVRGYPTLAVSQPAPPSGRACTQVRELYQGHKKLRPLVDSSLGRIRIHVRRLAATNLRALFDEAGPRPQRCFVSARERVAPLYKSMAIDWLGAVDFAFVAAAKLPKDTPVPDRPGLAPCAEHLAEHLDRSALLLFNPQADECRVYSGELTKPAVAEFLSQAAMPREGPLSKRERFLETLKGKKRTRGPDHDDRDEL

SEQ ID NO: 15320 - protein, 337 aa, Thermosynechococcus elongatus BP-1
MKAVAIAEFGEPDVLVLRQVPEPQIEAADEVKIQLRAASVNPIDTKLRQRGTFFPDRRPAILGCDGAGVVVAVGAAVRRFRVGDEVYFCYGGLGDRGGCYAEYAVVPEAAVAHKPKTLSFIQAAALPLAVITAWEALGDRGAVPPLNVLSTAKTVLIHAGAGGVGHLAIQLARRAGAQVATTISSPAKAQFTEALGATLAINYTTTDWVQAVLDWTGGKGVDLALDTVGGATFAETFKAVRPYGTLATLLEPAVDTPWKIARQRNLLIQLTLMLTPQLLGLREALAHQGQILEQVATLVDRGELRVVVDKTFPLGAAADAHRYLSQRLVQGKVVLIP

SEQ ID NO: 15321 - protein, 326 aa, Thermosynechococcus elongatus BP-1
MVAEAGPAVVSIDTLRLDRGSEDPFLAPFPVPDVPLRQGQGSGFIFTPDGKIMTNAHVVEGASAVRVTLPDGRQYDGKVLGADSLTDVAVVQINAKNLPTVQLGNSDTLRPGEWAIAIGNPLGLSNTVTAGIISAMGRASSEIGAADKRVSFIQTDAAINPGNSGGPLLNAAGQVVGVNTAVISQAQGLGFAIPINTAYGIAEQIITTGRAQHLYLGIRMVPLTPELALQIREQQPNWTLNRTQGTLIIGVAPNSPAAKAGLQAGDWIAKVNDINQPTPQQVQSVVEQTKLGEKITLEIERGDRRQTLRLKPEPMPPEWYPSAQPE

SEQ ID NO: 15322 - protein, 256 aa, Zea mays
  misc_feature (175)..(175): Xaa can be any naturally occurring amino acid
  misc_feature (193)..(193): Xaa can be any naturally occurring amino acid
  misc_feature (209)..(209): Xaa can be any naturally occurring amino acid
  unsure (1)..(256): unsure at all Xaa locations
RTLSLRLKVKIIRYAPCGEIVKHASRLEQEIEENPASIPFQEIIYCNLGNPQVLGQPPLTFFREVLSLCDNPALMDRDEARALFSPCSIRRARRILNSIPSKDTGGYTDCRGIKCLRQVVADGITARDGFPSTADDIFLTDGATSAINLMMQILIRSHEDGILSPLPEYPLYSAXIILHGGTMVPYNLTEDNXWGLEIFEVKRCLEEAXSAGLTGRAMVVINPGNPTGQVYQENIYAENKKFHSFKKGARSLAYDE

SEQ ID NO: 15323 - protein, 246 aa, Arabidopsis thaliana
MNKGAWTKEEDQLLVDYIRKHGEGCWRSLPRAAGLQRCGKSCRLRWMNYLRPDLKRGNFTEEEDELIIKLHSLLGNKWSLIAGRLPGRTDNEIKNYWNTHIKRKLLSRGIDPNSHRLINESVVSPSSLQNDVVETIHLDFSGPVKPEPVREEIGMVNNCESSGTTSEKDYGNEEDWVLNLELSVGPSYRYESTRKVSVVDSAESTRRWGSELFGAHESDAVCLCCRIGLFRNESCRNCRVSDVRTH

SEQ ID NO: 15324 - protein, 420 aa, Thermus thermophilus HB8
MGPLLVWHRGDLRLHDHPALLEALARGPVVGLVVLDPNNLKTTPRRRAWFLENVRALREAYRARGGALWVLEGLPWEKVPEAARRLKAKAVYALTSHTPYGRYRDGRVREALPVPLHLLPAPHLLPPDLPRAYRVYTPFSRLYRGAAPPLPPPEALPKGPEEGEIPREDPGLPLPEPGEEAALAGLRAFLEAKLPRYAEERDRLDGEGGSRLSPYFALGVLSPRLAAWEAERRGGEGARKWVAELLWRDFSYHLLYHFPWMAERPLDPRFQAFPWQEDEALFQAWYEGKTGVPLVDAAMRELHATGFLSNRARMNAAQFAVKHLLLPWKRCEEAFRHLLLDGDRAVNLQGWQWAGGLGVDAAPYFRVFNPVLQGERHDPEGRWLKRWAPEYPSYAPKDPVVDLEEARRRYLRLARDLARG

SEQ ID NO: 15325 - protein, 216 aa, Glycine max
MSKLQSDALREAISGIMADSKEKNRKFVETIELQIGLKNYDPQKDKRFSGSVKLPHIPRPKMKICMLGDAQHVEEAEKIGLDYMDVEALKKLNKNKKLVKKLAKKYHAFLASEAVIKQIPRLLGPGLNKAGKFPTLVTHQESLESKVNETKAMVKFQLKKVLCMGVAVGNVSMEEKQIFQNVQLSVNFLVSLLKKNWQNVRCLYLKSTMGKSYRVF

SEQ ID NO: 15326 - protein, 612 aa, Arabidopsis thaliana
MKMDKKTIVWFRRDLRIEDNPALAAAAHEGSVFPVFIWCPEEEGQFYPGRASRWWMKQSLAHLSQSLKALGSDLTLIKTHNTISAILDCIRVTGATKVVFNHLYDPVSLVRDHTVKEKLVERGISVQSYNGDLLYEPWEIYCEKGKPFTSFNSYWKKCLDMSIESVMLPPPWRLMPITAAAEAIWACSIEELGLENEAEKPSNALLTRAWSPGWSNADKLLNEFIEKQLIDYAKNSKKVVGNSTSLLSPYLHFGEISVRHVFQCARMKQIIWARDKNSEGEESADLFLRGIGLREYSRYICFNFPFTHEQSLLSHLRFFPWDADVDKFKAWRQGRTGYPLVDAGMRELWATGWMHNRIRVIVSSFAVKFLLLPWKWGMKYFWDTLLDADLECDILGWQYISGSIPDGHELDRLDNPALQGAKYDPEGEYIRQWLPELARLPTEWIHHPWDAPLTVLKASGVELGTNYAKPIVDIDTARELLAKAISRTREAQIMIGAAPDEIVADSFEALGANTIKEPGLCPSVSSNDQQVPSAVRYNGSKRVKPEEEEERDMKKSRGFDERELFSTAESSSSSSVFFVSQSCSLASEGENLEGIQDSSDQITTSLGKNGCQ

SEQ ID NO: 15327 - protein, 569 aa, Zea mays
MAAVTPPPQSDLSPQTGRPASSAATAAKPGRGAAGATGRLVGKYKLGRLLGHGTFAKVYQARHVDTGESVAIKVLDKEKAVERGLVSHIKREIAVLRRVRHPNIVHLFEMMATKTKIYFVMELVRGGALFSRVSKGRLREDTARRYFQQLVSAVGFCHVRGVFHRDLKPENLLVDEHGNLKVSDFGLSAVADQFHPDGLLHTLCGTPAYLAPEVLGRRGYDGAKADVWSCGVILFVLMAGYLPFHDKNIMDMYRKIYKGEFRCARWFSQDLTSLLTRILDTDPNTRITLPEIMESRWFMKGFKPVKFYIEDDQLHNIIDDEDVPLDMGSPGSVPPPLPPSPPPLPPPKVDGDESGSDSDSSISSCPASLLSDESQRPRCSLPRPASLNAFDIISFSRGFNLSRLFEDKGDEVRFISVEPMSDITTTLEDIAKLKSFKMRRKDWRICLEITREGVKGPLTIAAEIFELTPPLVMVEVKKKAGDTQEYEDFCNKDLKPGMQHLVHRMVRSQRILLLIFERTDFTNYMLETSEGFELNMHGTIDNRNDIPTGLTFGLSEPHEARDSIDQKRS

SEQ ID NO: 15328 - protein, 501 aa, Ustilago maydis 521
MPHMPQGIVKGGKEDVKLNNQSLWQTKAYINGVWTDADNKSTLKVFNKATGAEIGQVPDMGANETAAAISAADEAFKSWSKTTAKHRHDLLMKLYYAHQENAEDLAKIIVAENGKALPEAKGEISYSNGFLEWFAEEATRTYGHTVPSPLPGVRNVVQMQPVGVAGLITPWNFPAAMITRKAAPALAAGCTVVVKAPAETPFSALAFAHLAEKVGFPKGTINVVTCAKGDNEIAVGKQLCENPAVRKISFTGSTRVGKILMSQSASTLKKLSMELGGNAPFIVFEDADLDKAVEGAIACKFRGSGQTCICANRIYVHASIKDEFLQKLAAKVNDFKVGYGMDKGTTHGPLVSEAGLSKVEEHVNDSVKKGAKVIVGGKRGEGLFFEPTIITDLPEDVPTDREETFGPLAAVYTFTSEQEVVRKANNVDVGLAGYFFSKDTARCWRVAEELQVGMVGINTGLISQHAVPFGGVHESGFGREGGRTGIDEYLVQKLMVFGGVN

SEQ ID NO: 15329 - protein, 255 aa, Wolinella succinogenes
MESFGVLSMKKLVAYITAALPDKEFTIDLALALSASGVDSLELGVPFSDPVADGPIIEHANLLALQKGFSLQDLYEITEKISPSIDTLWMGYLNPFHKVGFEQTCQKAKSLGVSGLIIPDVPFEESAPFEEQCLQNNLALIRFIAPTLGTSRIATIAPMARKFIYLVAYAGITGSGREEPLSPLIEEIRAINPEIPLYLGFGVNEHNAKEKSKEVDGVIVGSALVKVLLDERLTNTQKMTTICALAKSIKESINS

SEQ ID NO: 15330 - protein, 432 aa, Glycine max
MSFTATKFAPSPLPLNSTTPRSNDKPLSFSFDHSKPNPSSSFLGSTRKLLRFNALARPHAHPRASSSPAAAVLLERTSNLLVTKEEGLELYEDMILGRFFEDKCAEMYYRGKMFGFVHLYNGQEAVSTGFIKLLKKEDSVVSTYRDHVHALSKGVPSRQVMSELFGKATGCCRGQGGSMHMFSKEHNLLGGFAFIGEGIPVATGAAFSSKYRREVLKQADCDHVTLAFFGDGTCNNGQFYECLNMAALWKLPIVFVVENNLWAIGMSHLRATSDPQIWKKGPAFGMPGVHVDGMDVLKVREVAKEAVERARRGDGPTLVECETYRFRGHSLADPDELRDPAEKEHYAGRDPITALKQYLIENNLANEQELKAIEKKIDEILEDAVEFADSSPLPPRSQLLENVFADPKGFGIGPDGRYRCEDPKFTEGTAHV

SEQ ID NO: 15331 - protein, 558 aa, Lactobacillus plantarum WCFS1
MAATIKWWQQAVVYQVYPRSFQDTNHDGIGDLKGITAHLDYLKQLGIDVIWLNPIYRSPNDDNGYDISDYQQIAADFGTMADFDELLQAAHDRGLKIIMDLVVNHTSDEHPWFKRSRQDRTNQYRDFYFWRSGNGKKAPNNWDAAFGGSAWQYDEQTQQYYLHTFSTKQPDLNWENPTLRESVYTMMTWWLNKGVDGFRMDVINQISKLPGLPDGPLKPHSQFGDARVTNGPRVHEFLQEMNQEVLSQFDIMTVGETHGVTPADALKYAGADRHELDMVFEFQHLRLDNSQHGLGKWSTRKTPLVALKKVISDWQVGLEGRAWNSLFWNNHDTPRAVSRFGDDRPAYRVRSAKMLATCLHILQGTPYIYQGEELGMTDAHFTELTSYRDIESLNAYRDLVTERQLLSPADMMARLAARSRDNSRTPMQWDTEVNAGFSDAAPWLTVNPNYRQINAAAALADPDSVWYYYQHLIQLRHQYPLVTLGSFELLWADDPQVFLYARQWEGRTWLVCCNFTAETLSRPLDQYLTPTAKCLISNYGEQQPNKLRPYEAWVYQLA

SEQ ID NO: 15332 - protein, 407 aa, Thermococcus litoralis
MDYTKYLAGRANWIKGSALADVMKKASELQKKGVKLISLAAGDPDPELIPRAVLGEIAKEVLEKEPKSVMYTPANGIPELREELAAFLKKYDHLEVSPENIVITIGGTGALDLLGRVLIDPGDVVITENPSYINTLLAFEQLGAKIEGVPVDNDGMRVDLLEEKIKELKAKGQKVKLIYTIPTGQNPMGVTMSMERRKALLEIASKYDLLIIEDTAYNFMRYEGGDIVPLKALDNEGRVIVAGTLSKVLGTGFRIGWIIAEGEILKKVLMQKQPIDFCAPAISQYIALEYLKRGYFEKYHLEGALLGYKEKRDIMLKALENHLPNAEFTKPIAGMFVMFFLPEGADGISFANELMEREGVVVVPGKPFYTDESGKNAIRLNFSRPSKEEIPIGIKKLAKLYKEKFGE

SEQ ID NO: 15333 - protein, 759 aa, Zymomonas mobilis subsp. mobilis ZM4
MSVTIANLGFPRIGPNRELKFALESFWGGRSSEAELKETAASLRRETWLKQKNLGIDYIPSNDFSFYDHVLDTTVMLGAVPERYGFKGGKVDLATYFAMARGTTSAENSVTAMEMTKWFDTNYHYMVPELVKGQKFSLASTKALDLYNEAKAAGVETRPVVLGPVTWLSLAKGRDVDPFDYLDDVLAIYTEVLTSLAKAGAKWVQIDEPAFVLDLNDKQRAAFKKAYDVLSKTGVSLMLTTYFGRVAENIDLLTSLPVAGIHVDLIRGSDDYDALLTKVRPDTVLSLGVIDGRNIWRADLDALVDWIEPLAEKRDLVLAPSCSLLHVPVDLKAEKKIDPEITQWLAFAQQKLEELAVLKTALTKGRNEVAEELAASTKAAKNRRSSPRIHNEAVAKRLAAVTPDMAKRQSPYPVRAAAQQAKLNLPLYPTTTIGSFPQTSEVRQARAKNRRGELDNAGYTQFLREQTAATICWQEEIGLDVLVHGEFERNDMVQYFGEQLDGFAFTNNGWVQSYGSRCVRPPILFGDVTRPKAMTVDWWSFSQQQSEKPVKGMLTGPVTILNWSFVRNDQPRSVSCRQLALAIRDEVVDLEAAGAKIIQIDEAALREGLPLRRAEWQTYLDWAVESFRLTASGVRDDTQIHSHMCYSEFNDILPSIAAMDADALSIETARSQMELLQAFASYQYPNQIGPGVYDIHSPRIPSVEEMVNLLRLARKYLPADRLWVNPDCGLKTRRWEEVKPSLLAMVAAAKEMRAEEKAK

SEQ ID NO: 15334 - protein, 497 aa, Zymomonas mobilis subsp. mobilis ZM4
MLLSKNRTDQEKTIIGHPPGLFLLFFTEMWERFSFYGMRALLIFYLTKHFLFSDSKSYSIYAAYASLVYIMPVIGGFIADKLLGGRKAVLYGAVLITIGHFLMGFEGNGGNQSLAVNCFYIALAFIIVGTGFLKGNISAIVGSLYDKNDLRRDPAFTIFYMGINLGGALGPLICGYVGEKYGWRYGFGMAGVGMAIGLLIFVFCRPLLKGRGESACPEKLAQKVFGLSKEIWIYILSVTAIVFSGILLNYYQIVGQLLGIIGIFLVIYIFYSAIRLPSIARDRLFAAMILMIGSVLFWSLFEQAGSSLNMFTDRYTDRHIAGVDIATSMFQSLNSIYIILLAPVMAGLWTWLNKRNLEPSTFFKFGMGLVGLGLGFLVLVAGAKMNAHQLTPVLFIFLIYLFHTLGELCLSPVGLAAITRLSPVHMAGLMVGTWFFSTAFGEYGAGMIAKMTSNGSGDGFHNILNVYSSIGWLSVVFGGGIFVLTPVLKKLLHENEA

SEQ ID NO: 15335 - protein, 396 aa, Escherichia coli
  misc_feature (246)..(246): Xaa can be any naturally occurring amino acid
  unsure (1)..(396): unsure at all Xaa locations
MFENITAAPADPILGLADLFRADERPGKINLGIGVYKDETGKTPVLTSVKKAEQYLLENETTKNYLGIDGIPEFGRCTQELLFGKGSALINDKRARTAQTPGGTGALRVAADFLAKNTSVKRVWVSNPSWPNHKSVFNSAGLEVREYAYYDAENHTLDFDALINSLNEAQAGDVVLFHGCCHNATGIDPTLEQWQTLAQLSVEKGWLPLFDFAYQGFARGLEEDAEGLRAFAAMHKELIVASSYSXNFGLYNERVGACTLVAADSETVDRAFSQMKAAIRANYSNPPAHGASVVATILSNDALRAIWEQELTDMRQRIQRMRQLFVNTLQEKGANRDFSFIIKQNGMFSFSGLTKEQVLRLREEFGVYAVASGRVNVAGMTPDNMAPLCEAIVAVL

SEQ ID NO: 15336 - protein, 119 aa, Lewia infectoria
STGGKAPRKQLASKAARKSAPSTGGVKKPHRYKPGTVALREIRRYQKSTELLIRKLPFQRLVREIAQDFKSDLRFQSSAIGALQESVEAYLVSLFEDTKLCAIHAKRVTIQSKDIQLAR

SEQ ID NO: 15337 - protein, 358 aa, Oryza sativa (japonica cultivar-group)
MGFLCRRRSSAAPAESFSLLCEEDSESVFGSDDDGVEETATMAPELGKMMSLGFSASHHLGDGGGGGEELVGSFMEKEVEQMVETARGEYLTKLSNGGIELSCRIAAIDWICKVQAYYSFGPLCAYLAVNYLDRFLSSVEFSNDMPWMQQLLIVACLSLAAKMEETAAPGTLDLQVCNPEYVFDAETIHRMEIIVLTTLKWRMQAVTPFTYIGHFLDKINEGNRITSELISRCTEIILSTMKATVFLRFRPSEIATAVALSVVADGGRVLDFGGVLESSKLPVDKDNVGRCHQAMQEMALVMQNSTASPSGVLDTSCFTSKSDDDYSIPGTSPQVDNNNNQACTPASKRARVEEAPMS

SEQ ID NO: 15338 - protein, 396 aa, Escherichia coli
  misc_feature (246)..(246): Xaa can be any naturally occurring amino acid
  unsure (1)..(396): unsure at all Xaa locations
MFENITAAPADPILGLADLFRADERPGKINLGIGVYKDETGKTPVLTSVKKAEQYLLENETTKNYLGIDGIPEFGRCTQELLFGKGSALINDKRARTAQTPGGTGALRVAADFLAKNTSVKRVWVSNASWPNHKSVFNSAGLEVREYAYYDAENHTLDFDALINSLNEAQAGDVVLFHGCCHNATGIDPTLEQWQTLAQLSVEKGWLPLFDFAYQGFARGLEEDAEGLRAFAAMHKELIVASSYSXNFGLYNERVGACTLVAADSETVDRAFSQMKAAIRANYSNPPAHGASVVATILSNDALRAIWEQELTDMRQRIQRMRQLFVNTLQEKGANRDFSFIIKQNGMFSFSGLTKEQVLRLREEFGVYAVASGRVNVAGMTPDNMAPLCEAIVAVL

SEQ ID NO: 15339 - protein, 250 aa, Salmonella typhimurium LT2
MAVTKLVLVRHGESQWNKENRFTGWYDVDLSEKGVSEAKAAGKLLKEEGFSFDFAYTSVLKRAIHTLWNVLDELDQAWLPVEKSWKLNERHYGALQGLNKAETAEKYGDEQVKQWRRGFAVTPPELTKDDERYPGHDPRYAKLSEKELPLTESLALTIDRVIPYWNDTILPRMKSGERVIIAAHGNSLRALVKYLDNMSEDEILELNIPTGVPLVYEFDENFKPLKHYYLGNADEIAAKAAAVANQGKAK

SEQ ID NO: 15340 - protein, 496 aa, Nicotiana tabacum
MATQVHKLHFILFPLMAPGHMIPMIDIAKLLANRGVITTIITTPVNANRFSSTITRAIKSGLRIQILTLKFPSVEVGLPEGCENIDMLPSLDLASKFFAAISMLKQQVENLLEGINPSPSCVISDMGFPWTTQIAQNFNIPRIVFHGTCCFSLLCSYKILSSNILENITSDSEYFVVPDLPDRVELTKAQVSGSTKNTTSVSSSVLKEVTEQIRLAEESSYGVIVNSFEELEQVYEKEYRKARGKKVWCVGPVSLCNKEIEDLVTRGNKTAIDNQDCLKWLDNFETESVVYASLGSLSRLTLLQMVELGLGLEESNRPFVWVLGGGDKLNDLEKWILENGFEQRIKERGVLIRGWAPQVLILSHPAIGGVLTHCGWNSTLEGISAGLPMVTWPLFAEQFCNEKLVVQVLKIGVSLGVKVPVKWGDEENVGVLVKKDDVKKALDKLMDEGEEGQVRRTKAKELGELAKKAFGEGGSSYVNLTSLIEDIIEQQNHKEK

SEQ ID NO: 15341 - protein, 541 aa, Anaplasma phagocytophilum
MSNTVVTGEVLDKSIREVVRILEDAVGCTAGPKGLTVAISKPYGSPEITKDGYKVMKSIKPEEPLAAAIASIITQSASQCNDKVGDGTTTCSILTAKVIEEVSKAKAAGSDIVSIKNGILKAKEAVLTALMSMRREVEEDEIAQVATLSANGDKNIGSKIAQCVKEVGKDGVITVEESKGFKDLEVEKTDGMQFDRGYLSPYFVTNAEKMLVEFENPYIFLTEKKINLVQSILPILENVARSGRPLLIIAEDVEGEALSTLVLNKLRGGLQVAAVKAPGFGDRRKDMLGDIAVIVGAKYVVNDELAVKMEDIALSDLGTAKSVRITKDATTIIGSVDSSSESIASRTNQIKAQIENSSSDYDKEKLRERLAKLSGGVAVLKVGGSSEVEVKERKDRVEDALHATRAAVEEGVVPGGGAALLYALSSLDGLKGKNDDEQWGIDIIRRAACAPIKRIIKNSGSEEAPCVIQHLLKQNDKELIYNVDTMNYANAFTSGVMDPLKVVRIAFDLAVSLAAVFMTLNAVVVDVPSKNDAAGAGAGGM

SEQ ID NO: 15342 - protein, 548 aa, Neorickettsia sennetsu
MANEVISGEQLQRVIRDAADLVVSSAGVTLGPEGRPVIMSKSYGGPEVTKDGYKVMNQLKPEDEKVAKIVELLNQATSQANEKAGDGTTTATILVGNMIKNAHKHIAAQRSRMKLKSGMKRARDEVVKYIQSVAKKINSEEEIAQVGSISANGNSEIGGKIAEAMNKVGKEGVITVEEGKGLDEFSVSVVQGMVFDRGYVSPYFITNPEKMIVEFDNPYVLLANKKLSSIQPMVPLLETIVRSNRAVVIIAEDVEGEALTSLVLSKMRGSLKACAVKAPGFGDRRSEMLEDIRILTGAKTLVSDDLGVTVESLTVEDLGTAKSIIISKDSTTIVDGGGEKTAIEARVKQIKTQIDKTTSDYDKEKLQERLAKLAGGVAVLKVGGATEVEVKERKDRVEDALHATRAAVEEGIVPGGGATLLSAIAVLEKLSSDDDDEQAGINIVKTALKAPISQIVENAGEDASVITYNLLESKDPNRIFDARELKYVDAFKAGIIDPAKVVRVALESAVSVASVLVTTEALIVDLPTKDNGSSSMMPGGGMGGMGGF

SEQ ID NO: 15343 - protein, 415 aa, Neisseria meningitidis Z2491
MSQRRVVITGLGQVSPVGNTVAEAWDTLLAGKSGIGAITRFDASDINSRVAGEVRGFDIGQYISAKEARRMDVFIHYGIAAALQAIADSGLDDVENLDKDRIGVNIGSGIGGLPSIEVTGKAVIEGGARKINPFFIPGSLINLISGHVTILKGYRGPSYGMVSACTTGAHAIGNSARLIKYGDADIMVAGGAEGAISTLGVGGFAAMKALSTRNDDPATASRPWDKGRDGFVIGEGAGILVLEELEHAKKRGAKIYAEIVGFGMSSDAYHITAPNEEGPALAVTRALKDAGINPEDVDYVNAHGTSTPLGDANETKALKRAFGEHAYKTVVSSTKSMTGHLLGAAGGVEAVYSILAIHDGKIPPTINIFEQDVEAGCDLDYCANEARDAEIDVAISNSFGFGGTNGTLVFKRFKG

SEQ ID NO: 15344 - protein, 540 aa, Enterobacter aerogenes
MAAKDVKFGNDARVKMLRGVNVLADAVKVTLGPKGRNVVLDKSFGAPTITKDGVSVAREIELEDKFENMGAQMVKEVASKANDAAGDGTTTATVLAQAIVNEGLKAVAAGMNPMDLKRGIDKAVVAAVEELKALSVPCSDSKAIAQVGTISANSDETVGKLIAEAMDKVGKEGVITVEDGTGLEDELDVVEGMQFDRGYLSPYFINKPDTGAVELESPFILLADKKISNIREMLPVLEAVAKAGKPLVIIAEDVEGEALATLVVNTMRGIVKVAAVKAPGFGDRRKAMLQDIATLTGGTVISEEIGMELEKATLEDLGQAKRVVINKDTTTIIDGVGEEAAIQGRVAQIRKQIEEATSDYDREKLQERVAKLAGGVAVIKVGAATEVEMKEKKARVDDALHATRAAVEEGVVAGGGVALVRVAAKIAGLTGQNEDQNVGIKVALRAMEAPLRQIVSNAGEEPSVVANNVKAGDGNYGYNAATEEYGNMIDFGILDPTKVTRSALQYAASVAGLMITTECMVTDLPKGDAPDLGAAGGMGG

SEQ ID NO: 15345 - protein, 555 aa, Yersinia pestis KIM
MNNPIPWWQHGVIYQIYPKSFQDSTGNGYGDLAGVAQRLDYLQKLGVDAIWLTPVYVSPQVDNGYDVADYCAIDPAYGTLDDFKRLVAGAHQRGIRIIMDMVFNHTSTEHAWFKASQDRNSPYRQFYIWRDGDGGDGSLPNNWRSKFGGHAWQWHAASGQYYLHLFAPEQADLNWEHQPVRDELKKVCEFWADLGVDGLRLDVINLVSKQQDFPNDLDGDGRRFYTDGPRIHEFLQELSRDVFQPRRLMTVGEMSSTRLEHCQRYAALGGDELSMTFNFHHLKVDYLNGEKWSLMPPNRVELKHIFNQWQQGMHNRAWNALFWCNHDQPRIVSRFGHEGALRLPAAKMLAMVLHGMQGTPYIYQGEEIGMTNPNFTDITQYRDVESLNMFAELSVAGREPDELLAILAAKSRDNSRTPMQWDSSDNAGFSQGTPWIAPCSNYHEINVNAALADADSVFYAYQYLIALRKQYDIFTFGDYQDLCPQHPDLWCYLRSWQGKQLLVVANLSEEPQRWQPEGLTLDGNWQLLMSSYDQSAFQPQDMILRGYEGIYWVCE

SEQ ID NO: 15346 - protein, 276 aa, Fragaria vesca
GLPPAMAANGHRVMTISPRYDQYIDAWDTEVIVEIKVGEKTEKVRFFHCHKRGVDRVFVDHPLFLEKVWGKTASKIYGPMTGEDYTDNQLRFSLLCQAALEAPRVLNLTSNKYFSGPYGEDVVFIANDWHTALLPCYLKAIYKPKGIYKSAKVAFCIHNIAYQGRFAFADFSLLNLPAAFKSSFDFIDGYDKPVKGRKLNWMKAGILESDVVLTVSPYYAKEVASSVDKGVELDNIIRKTKIQGIINGMDVQEWNPLTDKYTDVKYDATTVTAAKP

SEQ ID NO: 15347 - protein, 281 aa, Filipendula vulgaris
GLPPALAAYGHRVMTISPRYDQYKDAWDTEVTAQIQVGDKIETVRFFHCFKRGVDRIFVDHPMFLAKVWGKTASKIYGPMTGEDYQDNQLRFSLLCQAALEAPRILNLNSNKYFSGPYGEDVVFIANDWHTALVPCYLKAMYQSKGMYKSAKVAFCIHNIAYQGRFAFADYPKLNLPDGFKSSFDFIDGYDKPVKGRKINWMKAGILESNIVLTVSPYYAKELVSGVDKGVELDNILRITRVHGIVNGMDVQEWNPLTDKYMDVKYDATSVTDAKPILKEA

SEQ ID NO: 15348 - protein, 260 aa, Tuckermannopsis chlorophylla
NDPFIEPHYAAYMLKYDSQHGQFKGTIEVKGSNLVVNGQTVKFYTEKDPANIPWKDTGAYYIVESTGVFTTTEKAKAHLKGGAKKVVISAPSADAAMFVMGVNEKEYKSDIEVISNASCTTNCLAPLAKVMHDNFTIIEGLMTTIHSYTATQKTVDGPSSKDWRGGRTAAQNIIPSSTGAAKAVGKVIPSLNGKLTGMSMRVPTSNVSVVDLTCRLEKSVTYDEIKATMKKASEGDLKGIMSYSEDALVSTDLNGDNHSC

SEQ ID NO: 15349 - protein, 913 aa, Oryza sativa
MMSRSYTNLLDLAEGNFAALGPGGGGGGRRRSGSFGLKRMSRVMTVPGTLSELDGEDDSEHAATNSVASDVPSSVAGDRVIVVSNQLPVVARRRPDGRGWSFSWDDDSLLLQLRDGIPDEMEVFFVGSLRAEIPVADQEEVSQALLDRFRCAPVFLPDPLNERFYHRFCKRHLWPLFHYMLPFSSSASPSPSSSSSSSSSPSSSSGSGHFDRGAWEAYVLANKFFFEKVVEVINPEDDYVWVHDYHLMALPTFLRRRFNRLRIGFFLHSPFPSSEIYRTLPVREEILKALLNCDLIGFHTFDYARHFLSCCSRMLGIEYQSKRGYIGLDYFGRTVGIKIMPVGVHMGQLKTVLSLPDREWRVSELQQQFEGKTVLLGVDDMDIFKGINLKLLAFENMLRTHPKWQGRAVLVQIANPARGKGKDLEAIQAEIHESCKRINGEFGQSGYSPVVFIDRDVSSVEKIAYYTIAECVVVTAVRDGMNLTPYEYIVCRQGSDSTSEVNGPKKSMLVVSEFIGCSPSLSGAIRVNPWNIEATAEALNEAISMSEQEKHLRHEKHYRYVSTHDVAYWSKSFIQDLERACKDHFRRTCWGIGLGFGFRVVALDPHFTKLNMDSIVMAYERSESRAIFLDYDGTLVPQTSISRTPSAEVLRIINTLCSDRRNKVFLVSGRRRDKLGEWFSSCPDLGIAAEHGYFLRWTRDEEWQTCTQTSDFGWMEMAKPVMNLYTEATDGSYIDPKESALVWHHQDADPGFGSSQAKELLDHLESVLANEPVSVKSGQFIVEVKPQGVSKGVVAEKILVSMKERGKQADFVLCIGDDRSDEDMFENIADTIKKGMVATNTSLFACTVGQKPSKAKFYLDDTFEVVTMLSALADATEPEPETDLTDEFDELAVSVSSVDIDDEQTPSDKLIGG

SEQ ID NO: 15350 - protein, 281 aa, Novosieversia glacialis
GLPPAMAVNGHRVMTVSPRYDQYKDAWDTGVTVELQVGDKIETVRFFHCFKRGVDRVFVDHPLFLEKVWGKTASKIYGPVTGEDYKDNQLRFSLLCLAALEAPRVLNLNSNKYFSGPYGEDVIFIANDWHTALLPCYLKAKYQSKGIYMSAKVTFCIHNIAYQGRFAFADFSLLNLPDSFKSSFDFIDGYDKPVKGRKINWMKAGMLESNIVLTVSPFYAKELVSSVDKGVELDNVGRKVGVLGIVNGMDVQEWNPLTDKYTDVKYDATTVMDAKPILKEA

SEQ ID NO: 15351 - protein, 278 aa, Flavocetraria cucullata
VEHGEVKVVAVNDPFIEPHYAAYMLKYDSQHGQFKGTIEVKGSDLVVNGQTVKFYTEKDPANIPWKDTGAYYIVESTGVFTTTEKAKAHLKGGAKKVVISAPSADAAMFVMGVNEKEYKSDIEVISNASCTTNCLAPLAKVMHDNFTIIEGLMTTIHSYTATQKTVDGPSSKDWRGGRTAAQNIIPSSTGAAKAVGKVIPSLNGKLTGMSMRVPTSNVSVVDLTCRLEKSVTYDEIKATMKKASEGELKGIMSYSEDALVSTDLNGDNHSCIFDATAG

SEQ ID NO: 15352 - protein, 268 aa, Oncostylus leiospermus
ATGHRVTVSPRYDQFKDAWDTGVTVELQVGDKIETVRFFHCFKRGVDRVFVDHPLFLEKVWGKTASKIYGPVTGEDYKDNQLRFSLLCLAALEAPRVLNLNSNKYFSGPYGEDVTFIANDWHTALLPCYLKAKYQSKGIYSAKVAFCIHNIAYQGRFTFADFSLLNLPDSFKSSFDFIDGYEKPVKGRKINWKAGLESNKVLTVSPYYAKELVSSIDKGVELDHIGRKVGVLGIVNGDVQEWNPLTDKYTDVKYDATTVDAKPILKEA

SEQ ID NO: 15353 - protein, 278 aa, Ahtiana pallidula
VEHGEVKVVAVNDPFIEPHYAAYMLKYDSQHGQFKGTIEVKGSDLVVNGQTVKFYTEKDPANIPWKDTGAYYIVESTGVFTTTEKAKAHLKGGAKKVVISAPSADAAMFVMGVNEKEYKSDIEVISNASCTTNCLAPLAKVMHDNFTIVEGLMTTIHSYTATQKTVDGPSSKDWRGGRTAAQNIIPSSTGAAKAVGKVIPSLNGKLTGMSMRVPTSNVSVVDLTCRLEKSVTYDEIKATMKKASEGELKGIMSYSEDALVSTDLNGDNHSCIFDATAG

SEQ ID NO: 15354 - protein, 51 aa, Brassica napus
MPSHKTYIIKKKLGKKMRQNRPIPGWIRLRTDNKIRYNAKRRHWRRTKLGF

SEQ ID NO: 15355 - protein, 648 aa, Symbiobacterium thermophilum IAM 14863
MHLRDLTGPEQLKRLAPAELAQLAAEIRRVILETVATNGGHLAPNLGVVELTLALHIVFDSPRDKILWDVSHQSYVHKLLTGRLHQFHTLRQFGGIAGFTDPRESVHDHFHWGHASTSISAAVGMAKARDLAGDDYEVVAVIGDGALTGGMAYEALDHAGHDKTKVIVVLNDNSMSIAPNVGGISNYLARIRTGPSYQRVKHDVAEALRQIPLIGPQALELADRLKEGVKHLLVHNMFFEDLGFTYLGPVDGHNVSALVDVLRQARAYPGPTVVHVVTTKGKGVPYAEQLPDKFHGGGPFDVATGRTGPGSLTYSEVFGNVMCKLAAEDPRVCAITAAMPSGTGLSRFARQFPDRYFDVGIAEQHAVTFAAGLAKGGMRPVFAVYSTFLQRAYDQVIHDVALQNLPVTLAIDRGGLVEDGATHQGVFDVAYLRAIPNMVVMAPKDENELQHMLYTALCHDGPAALRYPRGKAQGVPLDETLQPLPIGRGEVMQEGADVALIGLGTMARVCQEAARLLAEKSISAMVINPRFVKPLDAELLLRAGREVGAVVTVEEACLAGGFGSAVLELYAAHGVNARVERMGIPDEFVDHGQPARYLERYGLTPEGVAQRAEALLLRMRSDLAAQPARRSRSVRRLSGAKAAGNGET

SEQ ID NO: 15356 - protein, 552 aa, Zea mays
MCSVASTAAASTEAAGGDSPLPAPSPPLAIASRPSSDPVRGSDWGLPCARQLRVLALFSSCSLVQLCLQEIGRTEHISIDGDTEIAFTEDVSTRFEALGWHTIWVKNGNTGYDDIRAAIKEAKAVTDKPTLIKVTTTIGFGSPNKANSYSVHGSALGAKEVEATRQNLGWPYDTFFVPEDVKSHWSRHTPEGAALEADWNAKFAEYEKKYADDAATLKSIITGELPTGWVDALPKYTPESPGDATRNLSQQCLNALANVVPGLIGGSADLASSNMTLLKMFGDFQKDTAEERNVRFGVREHGMGAICNGIALHSPGFVPYCATFFVFTDYMRGAMRISALSEAGVIYVMTHDSIGLGEDGPTHQPIEHLVSFRAMPNILMLRPADGNETAGAYKVAVVNRKRPSILALSRQKLPHLPGTSIEGVEKGGYTISDNSTGNKPDLIVMGTGSELEIAAKAADELRKEGKTVRVVSFVSWELFDEQSDEYKESVLPAAVTARISIEAGSTLGWQKYVGAQGKAIGIDKFGASAPAGTIYKEYGITVESIIAAAKSF

SEQ ID NO: 15357 - protein, 503 aa, Vibrio cholerae
  misc_feature (456)..(456): Xaa can be any naturally occurring amino acid
  unsure (1)..(503): unsure at all Xaa locations
MHMSKSFLIISMGFVAVSVQAQTLTRDNGAPVGDNQNSITAGEHGSVLLQDVHLIQKLQRFARERIPERVVHARGTGAHGEFVASGDFSDLTLSAPFTSKGKITPVFVRFSTVIHSKGSPETLRDPRGFATKFYTEQGNWDLVGNNLPVFFIRDSIKFPDMVHSLKPSPVTNLQDPNRFFDFFSHEPGSTHMLTWVYTNLGTPASYRTMDGFGVHAYKWINQKGDVNYVKFHWKSLQGIESLRPDEVVKVQGQDFNHLTNDLYTQINAGNHPKWDLYVQVLTPEQLSKLDYNGLDATKVWLDVPEKKVGTMTLNKVPDNFFLETEQSAFAPSNLIPGIEPSEDRLLQGRLFAYADTQLYRLGANLFQLPINRPLVEVNSHNQEGASNSAQTASDINYQPSRKLELKEDPQFKAVQTQLVGSVQQKAISNPRNFYQAGVLYRSLNEQDKQDLITNLXGBLNKVTDKEIKATMVSHFYRADKDYGTRLARATNTDLKQVAKLAAM

SEQ ID NO: 15358 - protein, 661 aa, Bacillus anthracis str. A2012
MEQLKHHVTDNQRKHALTTNQGVKIAEDEFSLKMGLRGPTLMEDFHFREKMTHFDHERIPERIVHARGVGAHGYFQLYESLEAYTKADFLTNPSKKTPVFVRFSTVQGSKGSNDAVRDVRGFATKFYTDEGNYDLVGNNMPVFFIQDAIKFPDFVHAVKPEPHNDIPQGASAHDTFWDFVAHNPESTHMVMWQMSDRAIPRSLRMMEGFGVHTFRLINKEGKAHFVKFHWKPALGVHSLVWDEAQKIAGKNPDFHRQDLYEAIEKGDYPEWELGLQLIPEEDEHTFDFDILDPTKLWPEEEVPVKLVGKMTLNKNVDNFFAETEQVAFHPGHVVPGIDFSNDPLLQGRLFSYTDTQLSRLGGPNFHQTPINQPVCPFHNNQRDGMHQMQIHRGQTSYHPNGLNDNQPATVQAEQGGYEHYQEKIDGHKIRGRSKSFLNFYSQAKLFYNSMSPIEKQHIKEAFCFEVGKCKSDMVKANVIALLNHVDRQLAQEVANIIGAPLPKENHEVNSDAKSPALSMSNTIFKADSKNVAIVLNGDPSVSLLSEWIQAFAQHRINYSIVDNKIYQFNNSIKVTDTYTTTDSSLFDAVLVFSSESAIHPPVLEFAETTFKHFKPIAHVLSNPHALDNSKIKLDGAGIYNLANTSIESFIEGIAQGRFWNR

SEQ ID NO: 15359 - protein, 393 aa, Thermosynechococcus elongatus BP-1
MLARIRQITHTLTPRLIEIRRHLHRYPELSGQEHQTAAYVAGVLSSAGLSVQQDVGKVGVIAELEGNSKEQRLLAIRTDMDALPIQERTGLEFSSKHAGVMHACGHDVHTTVGLGTAMVLAALKEEFPGRVRFIFQPAEEIAQGASWMIADGAMEAVSAILSLHVFPSIPAGDVAVRYGALTAAADDIELTILGESGHGARPHEAVDAIWIAAQVISALQQAISRTQNPLRPVVLTFGKIQGGRAANVIADQVTLQGTVRSLHPETRATLPTWIEQIVANVCHAYGARYQLHYRRGVPGVENTPYLSQLLAEAATEVVGAPHVHILPEPSLGAEDFALYLEHAPGAMFRLGVGFRDRPNYPLHHPEFDVDEQAIPVGVMTLAHAACRYWQIPY

SEQ ID NO: 15360 - protein, 557 aa, Lactobacillus plantarum WCFS1
MANQWWQSAVVYQVYPRSFQDSNGDGIGDLPGITQRLDYIKQLGADVIWLNPIYRSPGVDNGYDISDYYDINPEFGTMADFDQLLTTAHAKGLKIMMDIVVNHSSDQNKWFTTSAQSKDNPYADYYIWRDPVDGHEPNNWGGFFGGSAWKYVASRDQYYLHSFAVEQPDLNWDNPQLRQAVYDMMNFWVNKGVDGFRLDVINLISKPDSFADGQPEAGEPYAAIGGIIANGPHLHEYLQEMNQQVFAGHQLMTVGETPGATVADAKQLASGQGQELNMVFEFEHMGLDGNPDPALGKWNDQPVRLVDLKQSLSKWQMGLQGTAWNSLYWNNHDQPRIVSRFGDERPAYRERSAKMLATLLHFLQGTPYIYEGEELGMTNAHFTKLTDYQDLESLNAYHHFVDDEQVVQPEQMLGYLAHMSRDNARTPMQWDDSQNAGFSTATPWLAVNANYPRINAQLAQRTPGSVLSYYQRLIKLRHHLPVITTGTYHLLSPDDAAVYAYVRHMGSQHLLVICNFTAATQTRHFAELPADAHLLISNYDEDHQDVLRAYEAKVYQF

SEQ ID NO: 15361 - protein, 346 aa, Streptomyces avermitilis MA-4680
MSTPAADGFRMPAEWTPHERTWMAWPGPNPTFDHPDDLAESCRAWADVARAIRRFEPVTVVCGPGRSAEARDLLGPGIDTVERDLDDAWMRDIGPTFLTDGKGGLAAVDWTFNGWGAQSWARWEHDAKIAAYVGDLAGAKTYASKLVNEGGAIHVDGEGTVLLTETVQLGAERNPGWTREQVETEIHAHLGTSKAIWLPRGLTGDYPPHGFGTLGHVDIVAAFARPGVVVAHHQPDPAHPDHEVSKEVIGLLKAATDAHGRRIEVVEVPAPTVLEADGHWADYSYINHYLCNGGVVLCGFDDPRDETAAGIFRRLFPERTVTLVDARTIFSGGGGIHCITQQQPKN

SEQ ID NO: 15362 - protein, 179 aa, Wolinella succinogenes
MMKLLDISEKYGKITHQYPFAPYKVADHFRGKPAYVFDLCIGCAACGVACPSNAITVELNQEQNKLIWEFDCGRCIFCGRCDEVCPTGAIRLSEEFELAVKFDKSALIQRGELDVHQCTQCQKPFTAKRLVKYTLDRLSKANIGEERLKEAENYAKICPECKKNAAVLHFTRGDEEVIS

SEQ ID NO: 15363 - protein, 390 aa, Zea mays
  misc_feature (327)..(327): Xaa can be any naturally occurring amino acid
  unsure (1)..(390): unsure at all Xaa locations
MSDNLMDKVSAFGERLKITGTEVSKKMTAGMSSMSFKMKELFQGQTPADKIVEGATSEELDGPDWNSNLEICDLINTEKVDSMELIRGIKKRIMLKDARVQYLSLVLLETIVKNCDKAFSEVAAERVLDEMVRLIDDPQTVVNNRNKALMLIEAWGESGDELRYLPVYEETYKSLKSRGVRFPGRDNESLAPIFTPARSVAEADVDASLPQQVFEDVHVHTYTAEETKEAFDVARNSVELLSTVLSSSPEQDALQDDLTTTLVQQCYQSQHTIQMIIETVGDNEAVLFEALSVNDEIQKLLSKYEEMKQPRASEHAEHVPVVIPIAXHEDLNAVGNEDALVRKPAAARATSGGDDDILDDLDEMIFGKKGGSSSQDPKKPDPKKDDLISF

SEQ ID NO: 15364 - protein, 502 aa, Burkholderia sp. 383
MLVDELHSRKNEVIDPSALRARLRDGALLETRAWLASGWQEGTDGRSFPVTNPATGDILARVASLGAAEVEQAIESSALAQQGWQKRTSHERAKLLRAWFDLILANADDLALIMTSEQGKPLAEARGEITYAASFVEWFAEEAKRVYGDVMPHPQGDKRILVIRQPIGVCAAITPWNFPAAMITRKVAPALAAGCSIIVRPADLTPLTALALAVLAERAGIPAGVLQVVCGPSREIGAVLTASPVVRKLSFTGSTEVGRVLMSQSSGTIKRLSLELGGNAPFIVFDDADLDAAIEGAMASKYRNSGQTCVCANRFLVQAGIHDRFVEALTRRVQALKVGNGIEPGVQQGPLIQKSACDHLNQLIDDAVSKGARIVTGGKGHPLGGTFFEPTVIADATPAMRLAREELFGPVGPVFRFDDEAEAIAMANDTEYGLAAYLYTRDNSRIWRVGEALEYGMVGLNTGVISNEVAPFGGVKQSGLGREGSRYGIEEYLEIKYMCSQV

SEQ ID NO: 15365 - protein, 338 aa, Salmonella typhimurium LT2
MRVLVTGGSGYIGSHTCVQLLQNGHDVVILDNLCNSKRSVLPVIERLGGKHPTFVEGDIRNEALITEILHDHAIDTVIHFAGLKAVGESVARPLEYYDNNVNGTLRLVSAMRAANVKNLIFSSSATVYGDQPKIPYVESFPTGTPQSPYGKSKLMVEQILTDLQKAQPEWSIALLRYFNPVGAHPSGDMGEDPQGIPNNLMPYIAQVAVGRRESLAVFGNDYPTEDGTGVRDYIHVMDLADGHVVAMEKLADKSGVHIYNLGAGVGSSVLDVVNAFSKACGKPINYHFAPRRDGDLPAYWADASKADRELNWRVTRTLDEMAQDTWHWQSRHPQGYPD

SEQ ID NO: 15366 - protein, 548 aa, Glycine max
MLPVSSLSLSHHKTTTTIAEATCHCAFFKFSFNKPHHHRTPLLFPNHLPNASPPLLRTTTSLRRNAAADPPPGFSGVADVIVVGAGVAGSALAYTLAKDGRCVHVIERDLREPDRIVGELLQPGGYLKLIELGLQDCLEQIDAQRVLGYVLFKDGKKTKLPYPLENFHADVAGRSFHNGRFIQRMREKAATLHHVRMEQGTVTSLLEQDNGTIIGVQYKTKDGQKLKAYAPFTIVCDGCFSNLRRSLCYPKVEVPSCFVGLVLENCQLPLENYGHVILADPSPILFYRISSTEVRCLVDIPGQKVSPVGKGGMANYLRAMVASQIPPELRDAFISAIDRGNIRTMPNSSMAADPYPTPGALLMGDVFNMRHPLTGGGMTVALSDIVVLRNLLKPICDLNDATSLCRHLESFYILRKPMASTINTLAGALYKVFSTSPNEARKELRQACFDYLSLGHFFSSGPIALLSGLNPSPLNLILHFFAVALYGVGRLLLPFPSFERTWIGAKIVLCAFGIIFPIIKGEGVRQMFFPTSIPAFYRAPPDRWCIEE

SEQ ID NO: 15367 - protein, 756 aa, Candida glabrata CBS138
MTASKRHTYYGGGSISYERTNNSEHDKTQRPQDHQGPKHRKHVTFGPYVIGATLGEGEFGKVKLAWSKSAYQQCDNTEGNAGNKPMTFKVPKQVAIKLIKRDFITKDPSKETKIYREINALKHLSHPNIVKLEEVLQNSKYIGIVLEYAAGGEFYKFIQRKRRLKENHACRLFSQLISAVHYIHSKGLVHRDLKLENLLLDNEENLIITDFGFVNEFLRQNGMMKTSCGSPCYAAPELVVSNRPYDARKADTWSCGIILFAMLAGYLPWDDDPKNPDGHDISRLYNYILNTPLKFPEYINPVPRDLLRKILVIDPKKRINIRSIEKHPWLESHSTFLSITPDEWDRLSNTKNIYRKSKPQFYPNKRPGSTYSNYSSGSKDNKRDSLIIDSALVSLPVPPKEFQSHILARPSSLVVESRYSPLGKRNGHNRSNSAASAALQAVFDASERESLKSVDSKPRSRSNDHKDIIEGIQPQKHAFVKPSRKVRPTSMQAPGSSYIHHGNFEGLHELMKRDNSTASSHQTSISSEARIFDASPTLIPDLTKSPSSSTGNSPKLLPRKSFTVSKPLLDLKFASADIIKANESTDSLSKRIHDQIYEVEHPRQRRHSYRYSGIISDLIFGTLSEEGEINTFENKDHKSDAEESEMTISESKLDSVSICSQQSNIHRNISKQASSVSLLRTTSNHSTNNLNVGSRTYGRAELYDKRHLRQIPSNTLNQINAPGNTHRNSAIYSEDDKRKSTAKRVFEFFKRRSMRV

SEQ ID NO: 15368 - protein, 483 aa, Kineococcus radiotolerans SRS30216
MAGDYDLVVVANRLPVDRVEEPDGSTSWRRSPGGLVTALEPVMQREDGAWVGWAGTPGDPPEPFDAEGVRCVPVGLSEQEVEDYYEGFSNGTLWPLYHDVIVAPGYHRSWWEAYVRVNERFAEAAAEQATEGATVWVQDYQLQLVPRMLRRRRPDLSIGFFNHIPFPPFEIFAQLPWRKAVIDGLLGADLIGFQRAADANNFTRACRRASNLPARSGRIRLDAEGGREVRAASFPISIDFAALDELAEREDVKARAAEIRRDLGNPEHVLLGVDRLDYTKGILHRLKAFEELLDDGGVKVEEASLIQVATPSRERVEQYVQLRQDVEVTVGRINGTHGTIKNTAVHYLHHSYGREEMAALFLAADVMLVTALRDGMNLVAKEYVASRHDERGVLVLSEFTGAADELGQALMINPHDIDGLKDAILRALRMSPREAGRRMRSLRRRVGDHDVQRWAASFLQALADHHTTEAAVSVAAAAERGSS

SEQ ID NO: 15369 - protein, 539 aa, Pantoea agglomerans
  misc_feature (533)..(533): Xaa can be any naturally occurring amino acid
  unsure (1)..(539): unsure at all Xaa locations
MAAKDVKFGNDARVKMLRGVNVLADAVKVTLGPKGRNVVLDKSFGAPTITKDGVSVAREIELEDKFENMGAQMVKEVASKANDAAGDGTTTATVLAQAIITEGLKAVAAGMNPMDLKRGIDKAVASAVEELKALSVPCSDSKAIAQVGTISANSDETVGKLIAEAMDKVGKEGVITVEDGTGLEDELDVVEGMQFDRGYLSPYFINKPETGAVELESPFILLADKKISNIREMLPVLEAVAKAGKPLVIIAEDVEGEALATLVVNTMRGIVKVAAVKAPGFGDRRKAMLQDIATLTGGTVISEEIGMELEKATLEDLGQAKRVVINKDTTTIIDGVGEEAAIQGRVGQIRKQIEEATSDYDREKLQERVAKLAGGVAVIKVGAATEVEMKEKKARVDDALHATRAAVEEGVVAGGGVALVRVAAKLAGLTAQNEDQNVGIKVALRAMEAPLRQIVSNAGEEPSVVANNVKAGEGNYGYNAATEEYGNMIDFGILDPTKVTRSALQYAASVAGLMITTECMVTDMPKGDAPDLXAAGMGG

SEQ ID NO: 15370 - protein, 539 aa, Enterobacter amnigenus
  misc_feature (533)..(533): Xaa can be any naturally occurring amino acid
  misc_feature (535)..(535): Xaa can be any naturally occurring amino acid
  unsure (1)..(539): unsure at all Xaa locations
MAAKDVKFGNDARVKMLRGVNVLADAVKVTLGPKGRNVVLDKSFGAPTITKDGVSVAREIELEDKFENMGAQMVKEVASKANDAAGDGTTTATVLAQAIITEGLKAVAAGMNPMDLKRGIDKAVIAAVEELKTLSVPCSDSKAIAQVGTISANSDETVGKLIAEAMDKVGKEGVITVEDGTGLEDELDVVEGMQFDRGYLSPYFINKPETGAVELESPFILLADKKISNIREMLPVLEAVAKAGKPLLIIAEDVEGEALATLVVNTMRGIVKVAAVKAPGFGDRRKAMLQDIATLTGGTVISEEIGMELEKATLEDMGQAKRVIINKDTTTIIDGVGEEAAIQGRVGQIRKQIEEATSDYDREKLQERVAKLAGGVAVIKVGAATEVEMKEKKARVDDALHATRAAVEEGVVAGGGVALIRVASKLSELRGQNEDQNVGIKVALRAMEAPLRQIVLNCGEEPSVVANTVKAGDGNYGYNAATEEYGNMIDMGILDPTKVTRSALQYAASVAGLMITTECMITDVPKGDGPDLXAXGMGG

SEQ ID NO: 15371 - protein, 356 aa, Rhodococcus sp.
MSIDSALNWDGEMTVTRFDSMTGAHFVIRLDSTQLGPAAGGTRAAQYSNLADALTDAGKLAGAMTLKMAVSNLPMGGGKSVIALPAPRHSIDPSTWARILRIHAENIDKLSGNYWTGPDVNTNSADMDTLNDTTEFVFGRSLERGGAGSSAFTTAVGVFEAMKATVAHRGLGSLDGLTVLVQGLGAVGGSLASLAAEAGAQLLVADTDTERVAHAVALGHTAVALEDVLSTPCDVFAPCAMGGVITTEVARTLDCSVVAGAANNVIADEAASDILHARGILYAPDFVANAGGAIHLVGREVLGWSESVVHERAVAIGDTLNQVFEISDNDGVTPDEAARTLAGRRAREASTTTATA

SEQ ID NO: 15372 - protein, 539 aa, Enterobacter asburiae
  misc_feature (533)..(533): Xaa can be any naturally occurring amino acid
  unsure (1)..(539): unsure at all Xaa locations
MAAKDVKFGNDARVKMLRGVNVLADAVKVTLGPKGRNVVLDKSFGAPTITKDGVSVAREIELEDKFENMGAQMVKEVASKANDAAGDGTTTATVLAQAIITEGLKAVAAGMNPMDLKRGIDKAVTAAVEELKALSVPCSDSKAIAQVGTISANSDETVGKLIAEAMDKVGKEGVITVEDGTGLEDELDVVEGMQFDRGYLSPYFINKPETGAVELESPFILLADKKISNIREMLPVLEAVAKAGKPLVIIAEDVEGEALATLVVNTMRGIVKVAAVKAPGFGDRRKAMLQDIATLTGGTVISEEIGMELEKATLEDLGQAKRVVINKDTTTIIDGVGEEAAIQGRVGQIRKQIEEATSDYDREKLQERVAKLAGGVAVIKVGAATEVEMKEKKARVDDALHATRAAVEEGVVAGGGVALVRVAAKLAGLTAQNEDQNVGIKVALRAMEAPLRQIVSNAGEEPSVVTNNVKAGEGNYGYNAATEEYGNMIDFGILDPTKVTRSALQYAASVAGLMITTECMVTDLPKGDAPDLXAAGMGG

SEQ ID NO: 15373 - protein, 356 aa, Rhodococcus sp.
MSIDSALNWDGEMTVTRFDKMTGAHFVIRLDSTQLGPAAGGTRAAQYSQLADALTDAGKLAGAMTLKMAVSNLPMGGGKSVIALPAPRHSIDPSTWARILRIHAENIDKLSGNYWTGPDVNTNSADMDTLNDTTEFVFGRSLERGGAGSSAFTTAVGVFEAMKATVAHRGLGSLDGLTVLVQGLGAVGGSLASLAAEAGAQLLVADTDTERVAHAVALGHTAVALEDVLSTPCDVFAPCAMGGVITTEVARTLDCSVVAGAANNVIADEAASDILHARGILYAPDFVANAGGAIHLVGREVLGWSESVVHERAVAIGDTLNQVFEISDNDGVTPDEAARTLAGRRAREASTTTATA

SEQ ID NO: 15374 - protein, 589 aa, Xanthomonas campestris pv. vesicatoria str. 85-10
MTEPAAARPNPLRKLGSLRTLWPFVQRQRGLFAAWLVALSISAAATLSLPAAVKRMIDQGFSGDSQINQAFSLLFAVSVVLALATAARFYFVALLGEKVVADLRGRLYAHLIGLDAGFHDRSRSGELVSRLSADSELLRGLIGTTMSVALRSSVTVIGSMVMLLVTSPRLAGFTLIGIPLAVLPIVLGARRLQKISRASQDRVADANTLAAETLGAVRTVQAHARERYESQRFSTALFAAIDTAKLRIRTQATVTAVAIMLIFGAIVAVLWLGAHDVIAGRMTPGTLGQFVLYALIGGGSVGALAEVWNELQRAAGGMGRVSELLDEQPAIVAPATPQALPQPLRGAIHFDRVVFHYPQRPDAPALDGFDLHVSPGETVALVGPSGAGKSTVLSMLLRFHDPVSGKVRIDEIDLRDVDPVLLREHIALVPQQPTLFAASAADNIRYGRLQASDAQVEAAAAAAEADGFIRALPQGYASELGERGTRLSGGQQQRVAIARALLKDAPILLLDEATSALDAQSERAVQQALERLMEGRTTLVIAHRLATVLKADRIVVMDAGRIVAQGTHAQLIAEGGLYAELARLQFIDQ

SEQ ID NO: 15375 - protein, 540 aa, Enterobacter gergoviae
MAAKDVKFGNDARVKMLRGVNVLADAVKVTLGPKGRNVVLDKSFGAPTITKDGVSVAREIELEDKFENMGAQMVKEVASKANDAAGDGTTTATVLAQSIITEGLKAVAAGMNPMDLKRGIDKAVAAAVEELKALSVPCSDSKAIAQVGTISANSDETVGKLIAEAMDKVGKEGVITVEDGTGLQDELDVVEGMQFDRGYLSPYFINKPETGAVELDSPFILLADKKISNIRELLPVLEAVAKAGKPLLIIAEDVEGEALATLVVNTMRGIVKVAAVKAPGFGDRRKAMLQDIATLTAGTVISEEIGMELEKATLEDLGQAKRVVINKDTTTIIDGVGEEVAIQGRVTQIRQQIEEATSDYDREKLQERVAKLAGGVAVIKVGAATEVEMKEKKARVEDALHATRAAVEEGVVAGGGVALIRVASKITELKGQNEDQNVGIKVALRAMEAPLRQIVLNCGEEPSVVANTVKSGDGNYGYNAATEEYGNMIDMGILDPTKVTRSALQYAASVAGLMITTECMVTDLPKADAPDLGGAGGMGG

SEQ ID NO: 15376 - protein, 539 aa, Kluyvera intermedia
MAAKDVKFGNDARVKMLRGVNVLADAVKVTLGPKGRNVVLDKSFGAPTITKDGVSVAREIELEDKFENMGAQMVKEVASKANDAAGDGTTTATVLAQSIIAEGLKAVAAGMNPMDLKRGIDKAVVAAVEELKALSVPCSDSKAIAQVGTISANSDETVGKLIAEAMDKVGKEGVITVEDGTGLEDELDVVEGMQFDRGYLSPYFINKPETGAVELESPFILLADKKISNIREMLPVLEAVAKAGKPLLIIAEDVEGEALATLVVNTMRGIVKVAAVKAPGFGDRRKAMLQDIATLTGGTVISEEIGMELEKATLEDMGQAKRVVINKDTTTIIDGVGEEAAIQGRVAQIRKQIEEATSDYDREKLQERVAKLAGGVAVIKVGAATEVEMKEKKARVDDALHATRAAVEEGVVAGGGVALIRVASKLSNLRGQNEDQNVGIKVALRAMEAPLRQIVLNCGEEPSVVANTVKAGDGNYGYNAATEEYGNMIDMGILDPTKVTRSALQYAASVAGLMITTECMVTDLPKGDAPDLRAAGMGG

SEQ ID NO: 15377 - protein, 373 aa, Arabidopsis thaliana
MGYLFEETLSSNPKTPIVVDDDNELGLMAVRLANAAAFPMVLKASLELGVFDTLYAEASRTDSFLSPSEIASKLPTTPRNPGAPVLLDRMLRLLASYSMVKCEKVSVGKGERVYRAEPICRFFLKNNIQDIGSLASQVIVNFDSVFLNTWAQLKDVVLEGGDAFGRAHGGMKLFDYMGTDERFSKLFNQTGFTIAVVKKALEVYQGFKGVNVLVDVGGGVGNTLGVVTSKYPNIKGINFDLTCALAQAPSYPGVEHVAGDMFVDVPTGDAMILKRILHDWTDEDCVKILKNCWKSLPENGKVVVIELVIPDEAENGDINANIAFDMDMLMFTQCSGGKERSRAEFEALAAASCFTHCKFVCQAYHCWIIEFCK

SEQ ID NO: 15378 - protein, 540 aa, Erwinia aphidicola
MAAKDVKFGNDARVKMLRGVNVLADAVKVTLGPKGRNVVLDKSFGAPTITKDGVSVAREIELEDKFENMGAQMVKEVASKANDAAGDGTTTATVLAQSIITEGLKAVAAGMNPMDLKRGIDQAVIAAVDELKKLSVPCSDSKAIAQVGTISANSDATVGELIAQAMEKVGKEGVITVEEGTGLQDELDVVEGMQFDRGYLSPYFINKPETGAVELESPFILLADKKISNIREMLPVLEAVAKAGKPLLIIAEDVEGEALATLVVNTMRGIVKVAAVKAPGFGDRRKAMLQDIAVLTGGTVISEEIGMELEKAGLEDMGQAKRVVINKDTTIIIDGTGEEATINGRVTQIRQQIEEATSDYDREKLQERVAKLAGGVAVLKVGAATEVEMKEKKARVEDALHATRAAVEEGVVAGGGVALVRVASKLAELRGQNEDQNVGIKVALRAMESPLRQIVSNAGEEPSVVTNNVKAGEGNYGYNAQTEEYGDMIDFGILDPTKVTRSALQYAASVAGLMITTECMVTDLPKGDAPDLGAGGGMGG

SEQ ID NO: 15379 - protein, 587 aa, Chromobacterium violaceum ATCC 12472
MKLERVFDILSHQLANHPRPDCLSAKSGKAWRQLSTAEVRDTVNRVSLGLMEMGIQRGDKVAIAADNSIEWVLADIALQQIGAVSVPLYPTITLDDARYILAHAEVKLAFAGSAALQRKLHEALGRLSCPIYGLADIDGAPSWREIAERARPERMAELDALRDAVRADDVYTIIYTSGTTGRSKGVMLSHRNVLSTVVATAAFTGLPQGRCRALSFLPLSHIFERAGVFYYLYSGTGIYFASVECLSSALADVKPHTFSSVPRVLEKVHEKLVGKARDLTGAKRRIYQWALARAENFDPNRRRSPLDAIQHALADKLVYSKWRAAMGGELISINVGSAALQPRLARMFWAAGIAVAEGYGMTESSPVISANPFTARGVRIGSVGLPLPGVEVRLADDGEILVRGDNVMSGYYKEPEQTSDALRDGWLHTGDIGVLEDGYLRITDRKKEMFKTSNGKYIAPQALENKLKESAFIDQIMVVGDGQKYAAALIVPLFEKLKEWCAEHGISYTTDCEMSRHPKVVELIDREVKRFNRYFGSWEHIKKFSLLDKPWCVDAGELAPTLKLRRKVITERCRALIDGMYGMPEPA

SEQ ID NO: 15380 - protein, 540 aa, Pectobacterium carotovorum
MAAKDVKFGNDARVKMLRGVNVLADAVKVTLGPKGRNVVLDKSFGAPTITKDGVSVAREIELEDKFENMGAQMVKEVASKANDAAGDGTTTATVLAQAIITEGLKAVAAGMNPMDLKRGIDKAVIAAVEELKALSVPCSDSKAIAQVGTISANSDETVGKMIAEAMDKVGKEGVITVEEGTGLQDELDVVEGMQFDRGYLSPYFINKPETGAVELESPFILLADKKISNIREMLPVLEAVAKAGKPLVIVAEDVEGEALATLVVNTMRGIVKVAAVKAPGFGDRRKAMLQDIATLTGGTVISEEIGLELEKATLEDLGQAKRVVINKDTTTIIDGTGEEAAIQGRVAQIRQQVEEATSDYDKEKLQERVAKLAGGVAVIKVGAATEVEMKEKKARVEDALAATRAAVEEGVVAGGGVALVRVAAKLASLTAQNEDQNVGIKVALRAMEAPLRQIVSNAGEEPSVVANNVKAGDGNYGYNAATEEYGNMIDFGILDPTKVTRSALQFAASVAGLMITTECMVTDLPKGDAPDLGGAGGMGG

SEQ ID NO: 15381 - protein, 664 aa, Shewanella sp. MR-4
MSSRKVLANAIRALSMDAVQKANSGHPGAPMGMADIAEVLWNDFLKHNPNNPKWVDRDRFILSNGHGSMLIYSLLHLTGYDLPIDELKQFRQLHSKTPGHPEYGYTPGVETTTGPLGAGISNAVGMAIAEKTLAAQFNREGHEIVDHYTYCFLGDGCLMEGISHEACSLAGTLGLGKLIAFWDDNGISIDGHVEGWFTDDTPKRFESYGWHVIANVDGHDSDAIRAAIEAAKAVTDKPTMICCKTIIGFGSPNKSGSHDCHGAPLGDAEIAAAREFLGWSHAPFEIPADVYAGWDAKEAGNAREAAWNDKFAAYAKAYPELAAEYERRVLKGELPADFEAKAQAFIQECQAKGEGIASRKASQNAIAAFGAVLPELLGGSADLAGSNLTLWAGSKGIQEDPAGNYVYYGVREFGMSGIMNGVSLHGGFINYGATFMMFMEYARNAVRMSALMGIQNIFVYTHDSIGQGEDGPTHQPVEQLANLRMTPNMAVWRPCDAAETAVAWKAAIERRHAPTSLVFSRQNLKAQVRTAEQLANVAKGAYVLQDCAGTPEYILIATGSEVQLAVEAAAALTEQGKQVRVVSMPSNTEFDKQDAAYKESVLPKAVTKRIAIEAAHTDFWYKYVGFEGTVVGMTTFGESAPGNVLLKHFGFTVENVLNAAKSLG

SEQ ID NO: 15382 - protein, 377 aa, Yersinia pestis KIM
MPAQNPLQHQRQHDGIYHIGYFVGGKWSQAQEQFDVYNPATGELVARVAKSGKQETEAAIKAASEAFPAWRKTPAKQRAEILQRWYLLIMEHQQSLAELMVSEQGKPLKEALVEVAYAASFIQWFSEQAKRANGEIIPSAKEGARILATREPIGVVAAITPWNFPLAMLTRKLGPALAAGCTGLIKPANNTPLSAFALLALAEQAGVPAGVLNGVVGDTHAISDAIMASSDVRKISFTGSTNVGKTLMRNAAATMKRISMELGGNAPYIVFDDADLEAAVAGAMACKFRNAGQVCVCVNRFYIQDAIYDEFVNRLAAEVKKLKVGNGMDKDVNMGPLINLAGLEKVEEHVKDALEKGGRLLAGGIAMRWAVISSSQR

SEQ ID NO: 15383 - protein, 554 aa, Holospora obtusa
MSVKQIAFGSKVGESLLNGVIKLANCVQVTLGPNGRNVLIEQSFGDPRVTKDGVTVAKHVELEDRYENLAAQLVKSVASKTADMVGDGTTTATVLARSIYSEAFKGTSAGMNSMELRAGIDHAVEIVVEKLKELSIPVKGDYQKISQVATVSANGDTEIGDMIAQAMEKVGSDGVITVEEAKSFKTELDVVPGMQFDRGYISPYFITRQDKGIAELERSYILLYDGKISSAQSLLPVLEKCAKESASLLIIAEDVEGEALRMLVVNKLRGVLKVAAVKSPGFGDRRKAMLGDIAVLTNGYVVSSEVGMRLEDVRIEDLGRADTIVIEKDNTTVIVNGPARSSVKERCDKIRSEIQEATSDYDKEKLQERLAKLSGGVAVIRVGGATEVELKERKDRVEDAMHATKAAVEEGIIPGGGTAFLRCVKPLEEVIKSAKVQERGRDFICGIDAVRKALSSPCYQIASNAGKEGGVVVAEVLKASDVNVGYDARHDQYVDMIKSGIIDPTKVARTALQNAGSVAGLLNTTEVIIAQVPEKEKPNMGGGMGGGMGGGMDF

SEQ ID NO: 15384 - protein, 355 aa, Rhodococcus equi
  misc_feature (152)..(152): Xaa can be any naturally occurring amino acid
  unsure (1)..(355): unsure at all Xaa locations
MTTNQGVKVSEDEHSLKAGSRGPTLMEDFHFREKMTHFDHERIPERVVHARGFGAHGYFQVYEPMAEYTRAKFLQDPSVKTPVFVRFSTVAGSRGSADSVRDARGFATKFYTEEGNYDLVGNNIPVFFIQDAIKFPDLVHSFKPEPHNEMPXASTAHDTFWDFVANILKQAHMIMWTMSDRAIPRSFRMMEGFGVHTFRFVNEQGKARFVKFHWKPVLGTHSLVFDEAQKLAGKDPDFHRRDLWEAIEMGNYPEFELGVQMIEEEDEFSFDFDILDATKLWPEEMVPVKIIGKMTLNRNQDNVFAETEQAAFHPGHVVPGIDFSNDPLLQGRLFSYTDTQLIRLGGPNFHEIPIK

SEQ ID NO: 15385 - protein, 119 aa, Hydrogenobacter hydrogenophilus
GHYERFTYSRMSRKNNITAGRVYFNVLERERRGGYLGATVQVIPHITDEIKKLIRSIEKDSDIAIVEVGGTVGDIESLPFLEAIRQLSLESKKEDILFVHVTYVPYIKSAGELKTKPTQ

SEQ ID NO: 15386 - protein, 122 aa, Hydrogenobacter hydrogenophilus
GICLGMQLASIEFARNVVGLKEAHSAEFDPNTPHPIIDLLPEQKDIEDLGGTMRLGLYPCKLQEGTLAYERYQDEVIYERHRHRYEFNNHYREMMEQRGVVFSGTSPDDKLVEIIELKDHPW

SEQ ID NO: 15387 - protein, 326 aa, Bartonella vinsonii subsp. arupensis
DGDKGILLYRGYPIEQLAEKGDFLESCYLLLYGELPTKQEKSDFDRCIMQHTMVHEQFARFFHGFRRDSHPMAVMVACLGAMSAFYHDSIDITDPQQRMIASVRLISKVPTLAAMAYKYSIGQAFVYPRNDLSYAANFLRMCFSVPCEEYKTNPVLTRAMDRIFILHADHEQNASTSTVRLAGSSGANPFACIAAGVACLWGPAHGGANEACLKMLQEIGSVKRIPEFIARAKDKNDPFRLMGFGHRVYKNYDPRAKIMQKTCHEVLKELNIQDDPLLDIAIELEKIALNDEYFVEKKLYPNVDFYSGITLKALGFPTEMFTVLFE

SEQ ID NO: 15388 - protein, 267 aa, Flavopunctelia flaventior
NDPFIEPHYAAYMLKYDSQHGQFKGTIEVKGSDLVVNGQTVKFYTEKDPANIPWKDTGAYYIVESTGVFTTTEKAKAHLKGGAKKVVISAPSADAAMFVMGVNEKEYKPDIEIISHASCTTNCLAPLAKVMHDNYTIIEGLMTTIHSYTATQKTVDGPSAKDWRGGRTAAQNIIPSSTGAAKAVGKVIPSLNGKLTGMSMRVPTSNVSVVDLTCRLEKSVTYDQIKETMKKASEGDLKGIMSYSEDALVSTDLNGDNHSCIFDATAG

SEQ ID NO: 15389 - protein, 273 aa, Melanelia stygia
VEHGDVKVAAVNDPFIEPHYAAYMLKYDSQHGQFKGTIEVKGSNLVVNGQTVKFYTEKDPANIPWKDTGAYYIVESTGVFTTTEKAKAHLKGGAKKVVTPAPSADAAMFVMGVNEKEYKSDIEIISNASCTTNCLAPLAKVMHDNFTIIEGLMTTIHSYTATQKTVDGPSSKDWRGGRTAAQNIIPSSTGAAKAVGKVIPSLNGKLTGMSMRVPTSNVSVVDLTCRLEKSVTYDQIKATMKKASEGELKGIMSYSEDALVSTDLNGDNHSCIF

SEQ ID NO: 15390 - protein, 310 aa, Triticum aestivum
  misc_feature (290)..(290): Xaa can be any naturally occurring amino acid
  unsure (1)..(310): unsure at all Xaa locations
MANFQITPRAAFVESNELNFRSLYLFHTPLGSNQNQSGIIDSNVTTGLGATVVNNWPICDGPSPGATVIARAQGLHIYAGNWQNTFSITFEVERFKGSTLQVMGISVEEGEWAIVGGTGQFAMAIGVIYKKFHEQRSDGNIIELTVHGFCPMLKGSQSLRTKVGPWGGNGGSDKDIVEAPRRLESITVSSGTIIDSIKFSYVDQAGQKRTVGPWGGSGGKQNTFVLGTSEFVKEVSGTFGLYGRDNHNIITSLKFVTNVKTYGPFGQAKGTTFTIPVQKNSSIVGFFGRXGYISMHLVSTCTLSKLLASG

SEQ ID NO: 15391 - protein, 549 aa, Streptomyces avermitilis MA-4680
MAVHASRVNPSAAVHPYVWRSLGFAGKFTGMDTPNVGIPERLARRMSMAEQYEYLRTKLSRRGVLLTAGGVAGGLLTGCAGSGTATGTPSSAPATGTVHGSAVAPFGRHLAFGADPKTQMRISWQVPLAVQKPYVRVGLKPTDLSRRMAAEVRDLHTPGLTGQRFAVDQYYLHAALDGLRPGTRYYYGVGHDGFDPASRERLSTVGSFRTAPAAPETFVFTAFGDQGVSYDALANDKVILGRHPSFHLHAGDICYADTTGHGEESDIYDPRVWDQFLAQTESVAKSVPWMVTTGNHDMEAWYSPNGYGGQSARWTLPDNGFDPQKAPGVYSFTYGNVGIVALDANDVSYEIPANKGFTGGRQTAWLDRRLGELRASASVDFVVVFFHHCAYSTSTHASDGGVRDAWLPLFAKHQVDLVINGHNHVYERTDAIKGGRVGRAVPVGASTDPTRDGIVYVTAGGAGKSLYSFPDGVKDSYEGNVADRESVDTFHWTEARHRKHDTVEWSRVRYTGFSFLSVEAETGAAAKLKVSALAQSGERIDYFEVRRGA

SEQ ID NO: 15392 - protein, 263 aa, Menegazzia terebrata
PFIEPHYAAYMLKYDSQHGQFKGTIEVKGSDLVVNGQTVKFYTEKDPANIPWKDTGAYYIVESTGVFTTTEKAKAHLKGGAKKVVISAPSADAAMFVMGVNEKEYKSDIEIISNASCTTNCLAPLAKVMHDNFTIIEGLMTTIHSYSATQKTVDGPSAKDWRGGRTAAQNIIPSSTGAAKAVGKVIPSLNGKLTGMSMRVPTSNVSVVDLTCRLEKSVTYDQIKETMKKASEGELKGIMAYSEDALVSTDLNGDNHSCIFDAT

SEQ ID NO: 15393 - protein, 423 aa, Brassica napus
MATAFSATLPLHGSSQENRLLLPPTRLPPPSSFLGSTRSLPIRRLNHAHAARRSPVVAVQEVVKEKKPTNTLLITKEEGLVLYEDMILGRSFEDMCAQMYYRGKMFGFVHLYNGQEAVSTGFIKLLTQSDSVVSTYRDHVHALSKGVSARAVMSELFGKVTGCCRGQGGSMHMFSKEHNMLGGFAFIGEGIPVATGAAFTSKYKREVLKQDCEDVTVAFFGDGTCNNGQFYECLNMAALYKLPIIFVVENNLWAIGMSHLRSTSDPEIWKKGPAFGMPGVHVDGMDVLKVREVAKEAVTRARRGEGPTLVECETYRFRGHSLADPDELRDAAEKAKYAARDPITALKKYLIENKLANEGELKTIEKKIDDLMEEAVEFADASPQPGRSQLLENVFADPKGFGIGPDGRYRCEDPKFTEGTAQV

SEQ ID NO: 15394 - protein, 475 aa, Caulobacter crescentus CB15
MARPEGDRPMAQYDVVIIGGGPGGYNAAIRAGQLGLKVAIVEGRGKLGGTCLNVGCMPSKALLHASELYAAATGPEFAKLGIEVKPKLNLSQMMAQKAESVEALTKGVEFLMKKNKVEYVKGWGRIDGVGKVVVKAEDGSETTLETKNIVIATGSEPTPLPGVSVDNKRIIDSTGALSLPEVPKRLVVVGAGVIGLELGSVWKRLGAEVTVVEYLDRILPGTDTEVANAFQKILVKQGFKFQLGAKVTGAEAGAKGVKLSFEPVAGGEAQTIEADYVLVAIGRRPYTQGLGLETVGVTPDKRGMIANDHFKTGVAGVWVIGDVTSGPMLAHKAEDEGVACIEMIAGKAGHVNYGIIPGVVYTSPEVATVGKTEDELKAEGVAYKVGKFPFLANSRAKINHETDGFVKILADAKTDRILGAHMIGPNVGDMIAEYCVAMEFGGASEDVARTCHPHPTRSEALRQAAMGVEGWTMQA

SEQ ID NO: 15395 - protein, 289 aa, Streptomyces avermitilis MA-4680
MTTHRIHHRTATVRGHEIHYREAGPAGAPVLLLLHGFPTSSHMFRDLMPLLADRYHLVAPDHLGFGRSSAPAATEFPYTFAGLAEITDEFTEQLGLKEYALYIQDYGAPIGLRLALAHPERVTAIITQNGNAYEDGLGAEAWAPVLALIAERTPATEEPVRALSGPEGIKWQYLHGVPDPTLVSPDAYEHDAALMARPGQSEIQLDLISDYGSNFALYPAFQEYFRTSQVPLLAVWGGHDEIFVPAGALAFQRDLPTAEIHLLPTGHFALETHAGQVAALMDDFLARRV

SEQ ID NO: 15396 - protein, 124 aa, Gossypium barbadense
IEKVVSSIKAMKPKIVTVVEQEANHNGPVFLDRFTEALHYYSTLFDSLEGSGVAPPSQDLAMSELYLGRQICNVVACEGMDRVERHEPLTQWRTRMETAGFSPVHLGSNAYKQASMLLALFASG

SEQ ID NO: 15397 - protein, 480 aa, Xanthomonas campestris pv. vesicatoria str. 85-10
MSEQEQFDVVVIGAGPAGYHAAIRAAQLGMKVACIDAALGKDGKPALGGTCLRVGCIPSKALLDSSRQFWNMGHLFGDHGISFNDAKMDVPTMIGRKDKIVKQFTGGIAMLFKANKITPYYGFGQLLPGNIVKVTQHEGGEIELKGTNVILAAGSESIELPFAKFDGDTIVDNVGGLDFTAVPKRLAVIGAGVIGLELGSVWKRLGAEVTILEALPDFLALADAEVAKTALKEFKKQGLDIKLGAKVSKTEITGSGDAKQVVLSYTDAAGEQTLTVDKLLVAVGRKAATKNLLAEGTGVKVTDRGQIEVDGHCHTGVDGVWAIGDCVRGPMLAHKGFEEGIAVAELIAGLPGHVNFDTIPWVIYTEPEIAWVGKTEQQLKAEGVAYKAGSFPFAAIGRAVAMGEPAGFVKVIADAETDRVLGMHLVGVGVSELVHEGVLTMEFNGSADDLARICHAHPTLSEAIHDAAMAVSKRAIHKAN

SEQ ID NO: 15398 - protein, 852 aa, Escherichia coli O157:H7 EDL933
MKTNRKRVVITGLGILSSLAENIQDFREALLNKKNGVKDSERFAKWFENARAAEVLHDIEYSDLNEDVIDSLDNAALWAYKVGKDALSQAGLMDSRDTLKETGMIVGVSSAGTEAFLPLFEQRMEDFSLRKALFSGAFSSCCSSVSTLLGLQGGVELVATACTASPNAVGMAFDYIQNGKSKTMLAVGTEPIYLPTFAGFYALNVMHPDTCTPFSGQSGMSIGEGAGAIVLEEYEHAVARGATIYGEILSYATSCDAFHETGPDPRASGAVQVMNKAMANAGVTPEQIDYVNAHGTGTEANDRIETLAMKKVFANHDKLLVSSTKSYFGHNIGAAGIVELIACLATLPDNRVLPTLNFSHARPNCDLDYVPNEFRDRKVNIFMKNNYAFGGNNCCMILSMEPASIPVSTYDSKRVAISGVGAVSAIGHTLNQVLENIWAQDHHVELGSVTFPDDTLEEAKELLAVLDESNQFAELFDEEYSFSEATLPETESNFKTFQVSGLEPRKHLRRFDQRKATRGGTFALIALTEALEQAKRKIKRDGDELGMIMGMSRGPQETTYKYLQSLKPDPRKVRTSEFPGSLMNAIPTFCGISEGIKGYTTTLATGENSALGALTYGYEIVRQNLQPQVLVGGADEYFPSMSLYMDAVTQKIHMTAEASDYQIYGKDPQGYVPGEGACMLLLEDPQLAVARGAEVLAEVVGYGKSCSNTYFDASLLEEKSASMALAIERALTHAGISAGDIDLVCGTSNGSDDHSRIEIDAIYNTFAAQNPAVPVVNYNACFGFVASAAGLLNLAVITDCIKKQAVPAIPNTVEFFDERVNFVRQSMKLALNHVLLVGATEGGNYYAFVIKG

SEQ ID NO: 15399 - protein, 213 aa, Candida glabrata CBS138
MGVCVFFPLCLPCPGALTYIREAQFISSWTPADPRHKQLKMFLQRFVTVGGAAIGARSTMGAMGAIGAIGAKGTMNNIGRRMYHPKVIEHYTHPRNVGSMDKTLPNVGTGLVGAPACGDVMRLQIKVNDKTGVIEDVKFKTFGCGSAIASSSYMTELVHGMTLDDAAKIKNTTIAKELSLPPVKLHCSMLAEDAIKAAIKDYKSKRTSTTTLH

SEQ ID NO: 15400 - protein, 356 aa, Rhodococcus sp.
MSIDSALNWDGEMTVTRFDSKTGAHFVIRLDSTQLGPAAGGTRAAQYSQLADALTDAGKLAGAMTLKMAVSNLPMGGGKSVIALPAPRHSIDPSTWARILRIHAENIDKLSGNYWTGPDVNTNSADMDTLNDTTEFVFGRSLERGGAGSSAFTTAVGVFEAMKATVAHRGLGSLDGLTVLVQGLGAVGGSLASLAAEAGAQLLVADTDTERVAHAVALGHTAVALEDVLSTPCDVFAPCAMGGVITTEVARTLDCSVVAGAANNVIADEAASDILHARGILYAPDFVANAGGAIHLVGREVLGWSESVVHERAVAIGDTLNQVFEISDNDGVTPDEAARTLAGRRAREASTTTATA

SEQ ID NO: 15401 - protein, 644 aa, Kineococcus radiotolerans SRS30216
MALPHDLQLLRGVPPRHPGHQGHRRGQAGADLAQGLNRPAEGPSAPRAGPPSSPGRRRRGPVGGPVGGLRARAVAPRGPLRRVRGRATPGRCMRHQDRYLQISRILSRHGLGYFIDALGLERWVRADWDLFGHPREREKHTRAEHVRLVMEELGPTAVKIGQILSTRPDLLSPAFQHELEKLQDSATAVPYETIRAAVEEELGQGPEELFVAFSREPLASASIGQAHTAVLEDGTRVVVKVRRPGVVEEVEGDLEILRALAVQASRRWSVAADYDVVGLASDFADTLRAELDYLTEGHNAERFARNFEGDPDIRIPKVYWDTTTSRVITLERLHGVKISDEAALAEHGVDRSELAARATRLMADMVFEHGFFHADPHPGNFLIEPSGRIGLLDYGMVGEVDERSREHLAMLLAAFDRRDPARIAAAFATIGVTEHRVDRVRLTTDCAHLLRTYEGLPLGRIQVGDVVRDVLAILRRHHLALPRNLALVVKMIVMTEGLGSSLDPDFQLGRVLGPYARRLVRRHFDPREMAKRVRQAGIDVAQLGVELPGQLGRVLDVLDRDGISVSLRTDDLDPLVARLERIGNRVVAGLVVSAGIGALATLGSTDPERLKPHEAKVVAVGVTALGALTGYLGWTARGHRSRRR

SEQ ID NO: 15402 - protein, 356 aa, Rhodococcus sp.
MSIDSALNWDGEMTVTRFDRMTGAHFVIRLDSTQLGPAAGGTRAAQYSQLADALTDAGKLAGAMTLKMAVSNLPMGGGKSVIALPAPRHSIDPSTWARILRIHAENIDKLSGNYWTGPDVNTNSADMDTLNDTTEFVFGRSLERGGAGSSAFTTAVGVFEAMKATVAHRGLGSLDGLTVLVQGLGAVGGSLASLAAEAGAQLLVADTDTERVAHAVALGHTAVALEDVLSTPCDVFAPCAMGGVITTEVARTLDCSVVAGAANNVIADEAASDILHARGILYAPDFVANAGGAIHLVGREVLGWSESVVHERAVAIGDTLNQVFEISDNDGVTPDEAARTLAGRRAREASTTTATA

SEQ ID NO: 15403 - protein, 540 aa, Raoultella ornithinolytica
MAAKDVKFGNDARVKMLRGVNVLADAVKVTLGPKGRNVVLDKSFGAPTITKDGVSVAREIELEDKFENMGAQMVKEVASKANDAAGDGTTTATVLAQAIIAEGLKAVAAGMNPMDLKRGIDKAVVAAVEELKTLSVPCSDSKAIAQVGTISANSDETVGKLIAEAMDKVGKEGVITVEDGTGLEDELDVVEGMQFDRGYLSPYFINKPETGAVELESPFILLADKKVSNIREMLPVLEAVAKAGKPLVIIAEDVEGEALATLVVNTMRGIVKVAAVKAPGFGDRRKAMLQDIATLTGGTVISEEIGMELEKATLEDLGQAKRVVINKDTTTIIDGVGEEGAIQGRVAQIRKQIEEATSDYDREKLQERVAKLAGGVAVIKVGAATEVEMKEKKARVDDALHATRAAVEEGVVAGGGVALVRVAAKLAGLTAQNEDQNVGIKVALRAMEAPLRQIVSNAGEEPSVVANNVKAGEGNYGYNAATEEYGNMIDFGILDPTKVTRSALQYAASVAGLMITTECMVTDLPKSDAADLGAAGGMGG

SEQ ID NO: 15404 - protein, 283 aa, Glycine max
MSNLYNQISLPSPQRANSPNINMRGNFDVDSQYLTELLAERQKLGPFMQVLPLCTRLINQEILRVTGKNESLQNQGFSDFDRMRFINPSHMTSPNSTSNFTGWKSLSHERLAGVQGLSMDWQTSPVVPSSPIVKKILRLDIPKDSYPNFNFVGRLLGPRGNSLKRVEATTGCRVFIRGKGSIKDLDKEELLRGRPGYEHLNDPLHILIEAELPASVVDVRLMQAQEIIQELLKPVDESQDFYKRQQLRELAMLNSNFREESPQLSGRVSPFTSNEIKRAKTDQ

SEQ ID NO: 15405 - protein, 610 aa, Kineococcus radiotolerans SRS30216
MQTHQFDVVIVGAGGAGMRAALESGQRARTAVLTKLYPTRSHTGAAQGGMCAALANVEEDNWEWHTFDTVKGGDYLVDQDAAEVMCKEAIDAVLDLEKMGLPFNRTPEGKIDQRRFGGHTRDHGKSPVRRSCFAADRTGHMILQTLYQQCVKHEVEFFNEFYVLDLLLVPAEEARTGTEIEGAADQPGLATPPTIGVPGDKRIAGVVAYELATGEIHVFQAKSVVLATGGAGKVYKTTSNAHTLTGDGMGIAYRRGLPLEDMEFFQFHPTGLAGLGILLSEAARGEGGILRNADGERFMERYAPTIKDLAPRDIVARSMANEVREGRGAGPNKDYVLLDLTHLEPAHIDAKLPDITEFARTYLGVEPYTEPVPVYPTAHYAMGGVPTNVDAEVLQDNTRVVPGLYAAGEVACVSVHGSNRLGTNSLLDINVFGKRAGIAAAEYATKAEWIAVPEGSELPVVNWMAELRDRAQGERISDIRRELQETMDANAQVFRTEATLKQALTDIERLKERYARASVQDKGKRFNLDLLEGLELGFLLDLAEAMCLGALERKESRGGHFREDYPNRDDVNYMRHTMVYREYAADGSYSTRLDFKPVVQTRYQPMERKY

SEQ ID NO: 15406 - protein, 540 aa, Klebsiella oxytoca
MAAKDVKFGNDARVKMLRGVNVLADAVKVTLGPKGRNVVLDKSFGAPTITKDGVSVAREIELEDKFENMGAQMVKEVASKANDAAGDGTTTATVLAQAIIAEGLKAVAAGMNPMDLKRGIDKAVVAAVEELKTLSVPCSDSKAIAQVGTISANSDETVGKLIAEAMDKVGKEGVITVEDGTGLEDELDVVEGMQFDRGYLSPYFINKPETGAVELESPFILLADKKISNIREMLPVLEAVAKAGKPLVIIAEDVEGEALATLVVNTMRGIVKVAAVKAPGFGDRRKAMLQDIATLTGGTVISEEIGMELEKATLEDLGQAKRVVINKDTTTIIDGVGEEAAIQGRVTQIRKQIEEATSDYDREKLQERVAKLAGGVAVIKVGAATEVEMKEKKARVDDALHATRAAVEEGVVAGGGVALVRVAAKLAGLTAQNEDQNVGIKVALRAMEAPLRQIVSNAGEEPSVVANNVKAGEGNYGYNAATEEYGNMIDFGILDPTKVTRSALQYAASVAGLMITTECMVTDLPKSDAPDLGAAGGMGG

SEQ ID NO: 15407 - protein, 501 aa, Zea mays
MWKQLLSKLPRKSPACGDSGQCSNGTGIQRTSSCGSIPPGRPASAIRRMSSAVFPSSVVAGIEPLVSFKDVPNSEKQNLFVSKLSLCCVVFDFSDPNKSSVEKDIKRQALLDLIEFVESTNARFSEAAIAACSRMCAINLFRAFPPSCRSGSSGGGEGDEEEPMFDPAWCHLQLVYELLLKFIGSSSLDAKVGKKHFDHSFIVKLLNLLDSEDPRERDCLKTILHRVYGKFMVHRPFIRKAVSNIFYQFVFETDRHNGIAELLEVFGSVISGFALPLKEEHKIFLWRVLIPLHKPKSVGVYLQQLTYCVTQFLEKDPKLASSVIIGLLRYWPITNCQKEVMFLSEIEEILESTSQAEFQKCMVPLFRRIAHCITSSHFQVAERALFVWNNDHIISLIAQNRQVIMPLVVPALEQNIQNHWNQAVLNLTVNVKKMLSEMDDDLFSSCLAKYKDEEEKRASLEAKRRLTWEKLESAAAFQPVTGHTAVLVGHRPSANLIATMI

SEQ ID NO: 15408 - protein, 613 aa, Triticum aestivum
MADSPNPSSGDLPSAAGSSPEKPYPADRRVAALAGAGARYKAMSPARLPISREPCLTIPAGFSPSALLDSPVLLTNFKVEPSPTTGSLSMAAIMHKSAHPDILPSPRDKSIRAHEDGGSRDFEFKPHLNSSSQSLAPAMSDLKKHEHSMQNQSMNPSSSSSNMVNENRPPCSRESSLTVNVSAPNQPVGMVGLTDNMPAEVGTSEPQQMNSSDNAMQEPQSENVADKSADDGYNWRKYGQKHVKGSENPRSYYKCTHPNCEVKKLLERAVDGLITEVVYKGRHNHPKPQPNRRLAGGAVPSNQGEERYDGAAAADDKSSNALSNLANPVNSPGMVEPVPVSVSDDDIDAGGGRPYPGDDATEEEDLESKRRKMESAGIDAALMGKPNREPRVVVQTVSEVDILDDGYRWRKYGQKVVKGNPNPRSYYKCTSTGCPVRKHVERASHDPKSVITTYEGKHNHEVPAARNATHEMSAPPMKNVVHQINSNMPSSIGGMMRACEVRNFSNQYSQAAETDNVSLDLGVGISPNHSDATNQMQSTGPDQMQYQMQPMASMYSNMRHPSMAMPTVQGNSAGRMYGSREDKGSEGFTFRATPMDHSANLCYSGAGNLVMGP

SEQ ID NO: 15409 - protein, 540 aa, Raoultella planticola
MAAKDVKFGNDARVKMLRGVNVLADAVKVTLGPKGRNVVLDKSFGAPTITKDGVSVAREIELEDKFENMGAQMVKEVASKANDAAGDGTTTATVLAQSIITEGLKAVAAGMNPMDLKRGIDKAVAAAVEELKTLSVPCSDSKAIAQVGTISANSDETVGKLIAEAMDKVGKEGVITVEDGTGLQDELDVVEGMQFDRGYLSPYFINKPETGAVELESPFILLADKKISNIREMLPVLEAVAKAGKPLLIIAEDVEGEALATLVVNTMRGIVKVAAVKAPGFGDRRKAMLQDIATLTGGTVISEEIGMELEKSTLEDLGQAKRVVINKDTTTIIDGVGEESAIQGRVTQIRQQIEEATSDYDREKLQERVAKLAGGVAVIKVGAATEVEMKEKKARVEDALHATRAAVEEGVVAGGGVALIRVASKIAELKGQNEDQNVGIKVALRAMESPLRQIVLNCGEEPSVVANTVKSGDGNYGYNAATEEYGNMIDMGILDPTKVTRSALQYAASVAGLMITTECMVTDLPKGDAPDLGAAGGMGG

SEQ ID NO: 15410 - protein, 541 aa, Pantoea ananatis
MAAKDVKFGNDARVKMLRGVNVLADAVKVTLGPKGRNVVLDKSFGAPTITKDGVSVAREIELEDKFENMGAQMVKEVASKANDAAGDGTTTATVLAQSIITEGLKAVAAGMNPMDLKRGIDQAVIAAVEELKKLSVPCSDSKAIAQVGTISANSDETVGTLIAQAMEKVGKEGVITVEEGTGLQDELDVVEGMQFDRGYLSPYFINKPETGAVELETPFILLADKKISNIREMLPVLEAVAKAGKPLLIIAEDVEGEALATLVVNTMRGIVKVAAVKAPGFGDRRKAMLQDIAILTGGTVISEEIGMELEKAALEDLGQAKRVVINKDTTTIIDGVGEETTIQGRVTQIRQQIEEATSDYDKEKLQERVAKLAGGVAVLKVGAATEVEMKEKKARVEDALHATRAAVEEGVVAGGGVALVRVAAQLTELRGQNEDQNVGIKVALRAMESPLRQIVSNAGEEPSVVANNVKAGDGNYGYNAQTEEYGNMIDFGILDPTKVTRSALQYAASVAGLMITTECMVTDLPKGDAPDLGAGAGGMGG

SEQ ID NO: 15411 - protein, 415 aa, Kineococcus radiotolerans SRS30216
MSSDTSTTSTPDAAAARTEGLAARVADLVVAHEPTARALRRDVHAHPELAHQEHRTTARIAELLADAGVAVRLLPGTGLIADIGPDGPRVGVRADIDALPVPEATGLPYASTAPGVAHACGHDVHTASVLGAGLVLADLARAGVLRHGVRLVFQPAEEVMPGGALGVIGAGVLDGVAAIYGLHCDPSLDAGTVGLKAGPITSASDHVTVRLRGTGGHTSRPHLAGDLVFALGQVVTQLPAVIARRVDPRAGVNLTWGAVHAGDVANAVPAEGYAAGTLRCMETEAWQHAGELVESVVADLVRPYSVRAEVSLVRGVPPVDNEVHSTAALDEAARALLGPDGVLPTRQSLGGEDFAWYLHHVPGAMVRLGTRTPGGTTYDLHRGDYAPDEAALAVGIGVLAVTAASERALPAGLQG

SEQ ID NO: 15412 - protein, 540 aa, Serratia ficaria
  misc_feature (533)..(533): Xaa can be any naturally occurring amino acid
  unsure (1)..(540): unsure at all Xaa locations
MAAKDVKFGNDARVKMLRGVNVLADAVKVTLGPKGRNVVLDKSFGAPTITKDGVSVAREIELEDKFENMGAQMVKEVASKANDAAGDGTTTATVLAQSIITEGLKAVAAGMNPMDLKRGIDKAVVAAVEELKKLSVPCSDSKAIAQVGTISANSDETVGKLIAEAMEKVGKEGVITVEEGTGLQDELDVVEGMQFDRGYLSPYFINKPETGSVELESPFILLADKKISNIRELLPVLEAVAKAGKPLLIVAEDVEGEALATLVVNTMRGIVKVAAVKAPGFGDRRKAMLQDIATLTAGTVISEEIGLELEKATLEDLGQAKRVVINKDTTIIIDGVGDEATIQGRVTQIRQQIEEATSDYDREKLQERVAKLAGGVAVIKVGAATEVEMKEKKARVEDALHATRAAVEEGVVAGGGVALIRVAGKIAGLKGDNEDQNVGIKVALRAMESPLRQIVINAGEEASVIANNVKAGEGSYGYNAYSEEYGDMIAMGILDPTKVTRSALQYAASVAGLMITTECMVTDLPKADAPDLXGAGGMGG

SEQ ID NO: 15413 - protein, 540 aa, Serratia marcescens
  misc_feature (535)..(535): Xaa can be any naturally occurring amino acid
  unsure (1)..(540): unsure at all Xaa locations
MAAKDVKFGNDARVKMLRGVNVLADAVKVTLGPKGRNVVLDKSFGAPTITKDGVSVAREIELEDKFENMGAQMVKEVASKANDAAGDGTTTATVLAQSIITEGLKAVAAGMNPMDLKRGIDKAVVAAVEELKKLSVPCSDSKAIAQVGTISANSDETVGKLIAEAMEKVGKEGVITVEEGTGLQDELDVVEGMQFDRGYLSPYFINKPETGSVELESPFILLADKKISNIREMLPVLEAVAKAGKPLLIIAEDVEGEALATLVVNTMRGIVKVAAVKAPGFGDRRKDMLQDIATLTAGTVISEEIGLELEKATLEDLGQAKRVVINKDTTIIIDGVGDEATIQGRVAQIRQQIEEATSDYDREKLQERVAKLAGGVAVIKVGAATEVEMKEKKARVEDALHATRAAVEEGVVAGGGVALIRVAGKIAALKGDNEDQNVGIKVALRAMEAPLRQIVVNAGEEASVIANQVKAGEGSYGYNAYSEEYGDMIAMGILDPTKVTRSALQYAASVAGLMITTECMVTDLPKADAPDLGAXGGMGG

SEQ ID NO: 15414 - protein, 539 aa, Serratia rubidaea
MAAKDVKFGNDARVKMLNGVNILADAVKVTLGPKGRNVVLDKSFGAPTITKDGVSVAREIELEDKFENMGAQMVKEVASKANDAAGDGTTTATVLAQAIVNEGLKAVAAGMNPMDLKRGIDKAVIAAVEELKKLSVPCSDSKAIAQVGTISANSDETVGKLIAEAMEKVGKEGVITVEEGTGLQDELDVVEGMQFDRGYLSPYFINKPETGSVELESPFILLADKKVSNIRELLPVLEAVAKAGKPLLIVAEDVEGEALATLVVNTMRGIVKVAAVKAPGFGDRRKAMLQDIATLTAGTVISEEIGMELEKATLEDLGQAKRVVINKDTTIIIDGIGDEATIQGRVAQIRQQIEEATSDYDREKLQERVAKLAGGVAVIKVGAATEVEMKEKKARVEDALHATRAAVEEGVVAGGGVALIRVASKIAELKGDNEDQNVGIKVALRAMEAPLRQIVINAGEEASVIANSVKAGEGSYGYNAYSEEYGDMIGMGILDPTKVTRSALQYAASVAGLMITTECMVTDLPKEDKADMGAAGMGG

SEQ ID NO: 15415 - protein, 657 aa, Yarrowia lipolytica CLIB122
MAWNLTKKLKETTLSSFGGRSSSQTVTNLPTVSTKPQAQTKAPPPKKKQPEGPKQPDGPPTPTLKSGFANKLTTSLSHNSTKSHKSQTTVQTVQSNHTSLKDITAAVATPVSTHASTHTQTSVDADSATAATTATAATTHSTEDLKPVTSISKPHSPHSPSVPAAGVLDVSIFGTEGLSLPDAYKKYSAYFEEQDNGGPPPVYLVLEFDKTQLLLEPTGGTALDCPIWNARSSFDVSRTDEGLTINIYAKLPTTLIQNEIHPLLGRSSALGDEKSTNTVLDVFLGCVRVRPALTHANRSVDGWCSVSSGTGRLKITVDYKPTPKSQSQLSMQSFELLKVLGKGTFGKVMMVKKKDTHQIYAIKSIYKHYIISTDEVAHTLAERTVLAQIRNPFIVPLKFSFQSPEKLYLGLAFVNGGELFYHLQRERFFDLNRARFYTAELLCALECLHDYNIVYRDLKPENILLDYMGHIVLCDFGLCKLNMTSDERTNTRCGTPEYMSPEILLNKGYNKSVDWWTLGVLLYEMLTGLPPFYSDNHNKMYQRILNDPLRFPQGMDPTAVDIITGLLQREPSERLGAGGAQEIKAHPFFKDIDWNRLLAKKYSAPFKPRVLDPTDTSNFDRDYTSMVPQDSVTNDYLSDSVQKQFGGWTYLDQNVLH

SEQ ID NO: 15416 - protein, 151 aa, Glycine max
  misc_feature (137)..(137): Xaa can be any naturally occurring amino acid
  unsure (1)..(151): unsure at all Xaa locations
GYFTRFIVSADSEEFCCRSLPVNYVRLDQDILSPLAGKKQLYIYETNDFWEQIKTPGMSIKCSGLYLAQFRYTSPHLLANGDGIKKASITGDVYIHPSAKVHPSAKIGPSVSISANARIGAGARLKHCIILDDVEIXENALVGHAIVGWKS

SEQ ID NO: 15417 - protein, 129 aa, Glycine max; identical to SEQ ID NO: 1157

SEQ ID NO: 15418 - protein, 278 aa, Hypogymnia physodes
VEHGDVKVVAVNDPFIEPHYAAYMLKYDSQHGQFKGTIEVKGSDLVVNGQTVKFYTERDPANIPWKDTGAYYIVESTGVFTTTEKAKAHLKGGAKKVVISAPSADAAMFVMGVNEKEYKSDIEIISNASCTTNCLAPLAKVMHDNFTIIEGLMTTIHSYTATQKTVDGPSSKDWRGGRTAAQNIIPSSTGAAKAVGKVIPSLNGKLTGMSMRVPTSNVSVVDLTCRLEKSVTYDQIKETMKKASEGELKGIMSYSEDALVSTHLNGDNHSCIFDATAG

SEQ ID NO: 15419 - protein, 345 aa, Ricinus communis
MPPREVHVQVTHSMPPQKIEIFKSLDNWAEENILVHLKPVEKCWQPQDFLPDPASDGFDEQVRELRERAKEIPDDYFVVLVGDMITEEALPTYQTMLNTLDGVRDETGASPTSWAIWTRAWTAEENRHGDLLNKYLYLSGRVDMRQIEKTIQYLIGSGMDPRTENSPYLGFIYTSFQERATFISHGNTARQAKEHGDIKLAQICGTIAADEKRHETAYTKIVEKLFEIDPDGTVLAFADMMRKKISMPAHLMYDGRDDNLFDHFSAVAQRLGVYTAKDYADILEFLVGRWKVDKLTGLSAEGQKAQDYVCRLPPRIRRLEERAQGRAKEAPTMPFSWIFDRQVKL

SEQ ID NO: 15420 - protein, 391 aa, Pseudomonas fragi
MSLNPRDVVIVDFGRTPMGRSKGGMHRNTRAEDMSAHLISKVLERNSKVDPGEVEDVIWGCVNQTLEQGWNIARMASLMTQIPHTSAAQTVSRLCGSSMSALHTAAQAIMTGNGDVFVVGGVEHMGHVSMMHGVDPNPHMSLYAAKASGMMGLTAEMLGKMHGISREQQDAFAVRSHQLAHKATVEGKFKDEIIPMQGYDENGFLKIFDYDETIRPDTTLESLAALKPAFNPKGGTVTAGTSSQITDGASCMIVMSAQRAKDLGLEPLAVIRSMAVAGVDPAIMGYGPVPATQKALKRAGLNMADIDFIELNEAFAAQALPVLKDLKVLDKMNEKVNLHGGAIALGHPFGCSGARISGTLLNVMKQNGGTFGLSTMCIGLGQGIATVFERV

SEQ ID NO: 15421 - protein, 278 aa, Everniastrum sp. Feuerer s.n.
VEHGEVKVVAVNDPFIEPHYAAYMLKYDSQHGQFKGTIEVKGSDLVVNGQTVKFYTEKDPANIPWKDTGAYYIVESTGVFTTTEKAKAHLKGGAKKVVISAPSADAAMFVMGVNEKEYKSDIEVISNASCTTNCLAPLAKVMHDNYTIIEGLMTTIHSYTATQKTVDGPSAKDWRGGRTAAQNIIPSSTGAAKAVGKVIPSLNGKLTGMSMRVPTSNVSVVDLTCRLEKSVTYDQIKETMKKASEGELKGIMSYSEDALVSTDLNGDNHSCIFDATAG

SEQ ID NO: 15422 - protein, 333 aa, Streptomyces avermitilis MA-4680
MAELFYDADADLSIIQGRKVAVIGYGSQGHAHALSLRDSGVDVRVGLHEGSKSKAKAEEQGLRVVTPSEAAAEADVIMILVPDPIQAQVYEESIKDNLKDGDALFFGHGLNIRFGFIKPPAGVDVCMVAPKGPGHLVRRQYEEGRGVPCIAAVEQDATGNGFALALSYAKGIGGTRAGVIKTTFTEETETDLFGEQAVLCGGTAALVKAGFETLTEAGYQPEIAYFECLHELKLIVDLMYEGGLEKMRWSISETAEWGDYVTGPRIITDATKAEMKKVLAEIQDGTFAQAWMDEYHGGLKKYNEYKTQDENHLLETTGKELRKLMSWVNDEEA

SEQ ID NO: 15423 - protein, 276 aa, Everniastrum americanum
VEHGEVKVVAVNDPFIEPHYAAYMLKYDSQHGQFKGTIEVKGSDLVVNGQTVKFYTEKDPANIPWKDTGAYYIVESTGVFTTTEKAKAHLKGGAKKVVISAPSADAAMFVMGVNEKEYKSDIEVISNASCTTNCLAPLAKVMHDNYTIIEGLMTTIHSYTATQKTVDGPSAKDWRGGRTAAQNIIPSSTGAAKAVGKVIPSLNGKLTGMSMRVPTSNVSVVDLTCRLEKSVTYDQIKETMKKASEGELKGIMSYSEDALVSTDLNGDNHSCILDAT

SEQ ID NO: 15424 - protein, 124 aa, Gossypium barbadense
IEKVVSSIKAMKPKIVTVVEQEANHNGPVFLDRFTEALHYYSTLFDSLEGSGVAPASQDLAMSELYLGRQICNVVACEGMDRVERHEPLTQWRTRMETAGFSTVHLGSNAYKQASMLLALFASG

SEQ ID NO: 15425 - protein, 565 aa, Shigella flexneri 2a str. 301
MKSPAPSRPQKMALIPACIFLCFAALSVQAEETPVTPQPPDILLGPLFNDVQNVKLFPDQKTFADAVPNSDPLMILADYRMQQNQSGFDLRHFVNVNFTLPKEGEKYVPPEGQSLREHIDGLWPVLTRSTENTEKWDSLLPLPEPYVVPGGRFREVYYWDNYFTMLGLAESGHWDKVADMVANFAHEINTYGHIPNGNRSYYLSRSQPPFFALMVELLAQHEGDAALKQYLPQMQKEYAYWMDGVENLQAGQQEKRVVKLQDSTLLNRYWDDRDTPRPESWVEDIATAKSNPNRPATEIYRDLRSAAASGWDFSSRWMDNPQQLNTLRTTSIVPVDLNSLMFKMEKILARASKAAGDNAMANQYETLANARQKGIEKYLWNDQQGWYADYDLKSHKVRNQLTAAALFPLYVNAAAKDRANKMATATKTHLLQPGGLNTTSVKSGQQWDAPNGWAPLQWVATEGLQNYGQKEVAMDISWHFLTNVQHTYDREKKLVEKYDVSTTGTGGGGGEYPLQDGFGWTNGVTLKMLDLICPKEQPCDNVPATHPTVKSATTQPSTKEAQPTP

SEQ ID NO: 15426 - protein, 287 aa, Gossypium raimondii
MDVYKRGFISETSRSEEEMELRKGPWTEEEDSMLRAYVNIHGEGRWNAVARLSGLRRTGKSCRLRWLNYMRPEIKRGNISLEEQLLILELHSRWGNRWSKIAQHLPGRTDNEIKNYWRTRVQKQAKQLNCDVNSKQFKDAMRYVWIPRLVERIRASSESPSSQPSTTTNTTYNDRISNISSSQMSYANASGSVQVDPSLLPELSGTSSDSLDTQVSSVSDLTDCYNPQSLSNYLHKGLGLEKEGAATWGRDEEFQATEEHSNGWLVGGGESSMDTVWNEENVWFLQQ

SEQ ID NO: 15427 - protein, 103 aa, Brassica napus
MAKKRKSVATRLDEVDRTMYSTFCSTANSLSHLYTHAMNQQKLSFQAGERHALEKLYQWILRQQQEGSRVATIDIVTHLQNELFNNPGGARTFPQKRIKGPGF

SEQ ID NO: 15428 - protein, 124 aa, Gossypioides kirkii
IEKVVSSIKAMKPKIVTVVEQEANHNGPVFLDRFTEALHYYSTLFDSLEGSGVAPPSQDLAMSELYLGRQICNVVACEGMDRVERHEPLTQWRTRMETAGFSPVHLGSNAYKQASMLLALFAGG

SEQ ID NO: 15429 - protein, 287 aa, Gossypium herbaceum
MDVYKRGFISETSRNEEEMELRKGPWTEEEDSMLKAHVNIHGEGRWNAVARLSGLRRTGKSCRLRWLNYMRPEIKRGNISLEEQLLILELHSRWGNRWSKIAQHLPGRTDNEIKNYWRTRVQKQAKQLNCDVNSKQFKDAMRYVWIPRLVERIRASSESPSSQPSTTTKTTYNDCISNISSSQMSYANASGSVQVDPSLLPELSGTSSDSLDTQVSSVSDLTDCYNPQSLSNYLHKGLGLEKEGAATWGRDEEFQATEEHSNGLLVGGGESSMDTVWNEENVWFLQQ

SEQ ID NO: 15430 - protein, 480 aa, Aspergillus niger
MAANGSSSEGDHRLLIVSNRLPITIRRSGGGKYEFSMSSGGLVTGLSGLSKTTTFQWYGWPGLEVPEDEIDSVKQRLQEEFNATPVFMDDKLADRHYNGFSNSILWPLLHYHPGEIVFDEAAWDAYREANRLFAKTIAHEAREGDLVWVHDYHLMLLPEVLREELAALGKNNIRIGFFLHTPFPSSEIYRILPVRSQLLRGVLQCDLIGFHTYDYARHFLSCCSHILGLVTTPSSVKFKDRSVAVGAFPIGIDPDKFTEGLKSPKVQNRIASLENKFQGTKLMVSVDRLDYIKGIPQKLHALEVFLSQHPEWVGKVVLVQVAVPSRQDVEEYQNLRAVVNELVGRINGKFGTVDYMPIHFMHKSVSFDELIALYAASDACVVSSTRDGMNLVSFEYVATQQKRKGVLILSEFAGAAQSLNGSIVVNPWNTEELASAYHEAVSMSDDLRAQKFEKLYKYISKYTSAFWGKSFVAELSKCST

SEQ ID NO: 15431 - protein, 185 aa, Xanthomonas axonopodis pv. citri str. 306
MLLNRLLALVLTGFFATPAFAAGTPVLDVEYRPLAGKTPINLNRTYGGKVVMVVNTASKCGFTPQYEGLEALNHRFGSRGFTVLGFPSNDFQGQEPGSEKQIQEFCTLTYGVKFPMFEKVHVLGAEATPLYQRLTQATGVAPGWNFHKYLIGRDGRVVAQFPSKIKPDDPSVLAAIERELKAPAR

SEQ ID NO: 15432 - protein, 286 aa, Gossypioides kirkii
MDVYKRGFISETSRSEEEMELRKGPWTEEEDSMLKAYVNIHGEGRWNAVARSSGLRRTGKSCRLRWLNYMRPEIKRGNISLEEQLLILELHSRWGNRWSKIAQHLPGRTDNEIKNYWRTRVQKQAKQLNCDVNSKQFKDTMRYVWIPRLVERIRASSESASGQPSTTTNTTYNDCISNISSSQISYANASGSVQVDPSLLPELSGTSSDSLDTQVSSVSDLTDCFNPQSLSNDLHKGLGLENEGAATWSRDEFQATEEHSNGWLVGGGESSMDTVWNEENVWFLQQ

SEQ ID NO: 15433 - protein, 161 aa, Lactobacillus plantarum WCFS1
MAESVYDFTETEMSGAPLDLSQYRGQVLLIVNTASNCGLAPQFKGLEELYQKYQQEGLVVLGLPSNQFHQEKADDDETHDYCQRHYGVTFPMTKRVMVNGDDADPLFTYLKQAAGHGRIKWNFTKFLIGRDGRVLERYAPTTRPATFEAAIRDALADRSED

SEQ ID NO: 15434 - protein, 136 aa, Bradyrhizobium sp. BTAi1
MSDTKTSDKVVKTEAEWRKELTPMQYAVLREKATERPFSGEYEHEQRAGSYVCAGCGQTLFESDAKFDSGCGWPSFTQPAVESHIDEETDYTHGMVRTEVLCSKCSGHLGHVFPDGPGPTGLRYCINSAALKLKPR

SEQ ID NO: 15435 - protein, 666 aa, Dehalococcoides sp. CBDB1
MSNTKLDSLCINALRFLSVDAVQKANSGHPGAPMGMAAMAYALWQNFLKHNPQDPAWPNRDRFILSAGHASALLYSLLHLTGYDLPLDELKNFRQWGSKTPGHPEYGLTPGVEMTTGPLGQGFASGVGMAMAEAHLAAVFNQPDCKIIDHYTYGIVSDGDLMEGVASEAASLAGHLALGKLIYLYDDNDISIEGSTELAFTENAALRFESYGWQVIDHVDGLDPEAVSQAIKQAQSDTTRPSLIICKTIIGFGSPNKAGKASAHGEPLGTDEVSKSRKSLGWDYEPFVIPVEALTEFREALGKGKTAQQVWLSKLDYYLSHYPEKASLLQDMLSGNLPEDWDKDLDRLFDKAMSSREASGLLINALASRLPSLMGGSADLSPSNKTVIKDGGEYEPHYYEGRNIHFGVREHAMGAIANGLALHGGIIPYVATFLIFYDYMRPAVRLASLMGQRVIYIFTHDSIGLGEDGPTHQPIEQLAGLRSVPGLVTIRPADSYETAQAWKTAILRKNGPTAIALSRQKLPLLDNSQTKSLNLPKGAYILQETDSHPQVALVASGSEVTIAVEAAEILKGKGISSRVVSFPSWQLFDNQPQTYRQSVLPSSLPRVIMEAGNSQGWCKYLGTNGTVISIDHFGASAPAALLYKNFGLTPENMAEKALKLLENEHE

SEQ ID NO: 15436 - protein, 276 aa, Lactobacillus plantarum WCFS1
METYTLRDGLTVPKIGFGTYKLNGAHGVQVIDSAIDRGYRLLDTAFNYENEGAVGKAVRRSSVPRSELLISSKLPGRHHTYTEAINTIQESLYRAGLDYYDLYLIHWPNPKEDHYVEAWQALINAQKLGLIRSIGVSNFLPEHLERLNKETGVLPVINQVELHPYFNQQAQRDYDQAHGILTQDWSPLGRASEMLQNETLKEIAVHYHKNVGQLILRWELQLGTLPIPKSSTPSRQAGNMDVFDFEISAADMATINGLSQVDGRLNNQDPAVYQEF

SEQ ID NO: 15437 - protein, 639 aa, Magnaporthe grisea 70-15
MPICLWHGYAPSSAQRLLNSSIYLPKCSLGQFNTMAPRNQKRKAASPAGSHGSDSKKIKTESVEPISTSDPLRRPHTFYKESEENGIVLREFYPHEMSNERARAYNNDEIPRPIEDLYQAMSQTHPIRQKVKVKGAVVHWFKMDLRVADNTALRLASEKAKSAGVPLIALYTVSPKDWEAHLRAPVRVDFTLRSLEVLRQDLAKLDIPLHVETVDDRRAMKQRVLSLMEEWDASHLYANMEYEVDELRREANLVRLLAENGKSMEVVHDTCVVPPGKLQTGTGRQYAVYSPWYRAWLKHLSGDPELLEPMEPPHKNPASAREKFSHLFDGKIPAAPKSKQMNEEEQQRLAAMWPAGEHEARKRLDAFIKRRIDGYAAKRNFPADDGTSSISVHLAAGTLSARTAVHLAHKASGTRKLDGGSQGIQTWISEVAWRDFYKHVLVNWPYVCLTSAGSCPHSMNKPFKPEYSNIAWSYDMEHFAAWCEGRTGFPIVDAAMRQLRGTGWMHNRCRMIVASFLAKDFLIDWRMGERYFMENLVDGDFASNNGGWGFAASVGVDPQPYFRVFNPLLQSEKFDPNGEYIRKWIPELKGIKGKAIHDPYGRGCGVEAKKKGYPKPLVDHKGCRERALKAYKEGISKEI

SEQ ID NO: 15438 - protein, 668 aa, Shewanella sp. ANA-3
MKLIYTDSLVVGAGLAGLRVAIASKERGLDTLVLSLIPAKRSHSAAAQGGMQASLGNAVKGMGDDEDVHFQDTVKGSDWGCDQEVARMFAHCAPKAVRELANWGVPWTRVTAGPRDVIVNAQKVTLQEAEEAHGLINARDFGGTKKWRTCYTADGTGHSLLYAMDNKAISMDIPVHERVEALSIIHDGQRCHGVIARCLITGELRAYVAKSTTIATGGYGRIYEVSTNAIICEGIGQALALETGVATLGNMEAVQFHPTAIVPVGILTTEGCRGDGGLLRDKDGYRFMPDYEPEKKELASRDVVSRRMTEHMRKGKGVDSPYGPHLWLDITLLGRKHIETNLREVQEICENFLGIDPAKDWIPVRPTQHYSMGGIRTKATGESPQLKGLFSVGEAACWDMHGFNRLGGNSLAETVVGGMIIGKYVADFCENNSLEIDTQLAEKFMRQVQTEIDTLVDGEGHESPFELKREMQRIMMDYVGIFRNGPELDKAVTELKALLERSRKLGVKCKKRHANPELVEALRVKRMLKVALTVACGAAARTESRGAHAREDYPQRNDRDWLNRTLASWPDAEALAPVLSYEPLDVMKMELPPGYRGYGIDNAIAHPDTAKREQQIAEILAGLGDDADRYQRQAALMPFELPPSLQAKNERLSDTLQRPSANVLGEKS

SEQ ID NO: 15439 - protein, 238 aa, Bradyrhizobium sp. BTAi1
MRLTRSLFIKTALLGAIAAAGLLAWQPLHAAEEAVVIPPPAQDQPAGDGLETAVVAGGCFWGVQGVYQHTAGVVSAVSGYAGGTKATADYRTVSSGTTGHAESVQIKFDPKTISYGKILQIFFSVVHDPTQLNRQGPDTGPQYRSAIFTTSDAQKKVAEAYIAQLEKAKVFGKPIVTKVGKLEAFYPAEAYHQDYLTLHPSQPYIAYNDLPKIENLKKIFAENYIEKPTLVSDAKATN

SEQ ID NO: 15440 - protein, 1042 aa, Propionibacterium acnes KPA171202
MHDHTELIQDRIGHLKERLEREITEKICPLQVTAWQVPGEPVSFKEAAAANYQPFPPGTWWGAPWSTWWLHVTGTLPASHAGEEVDLSVDLGFVGDWAGNQSEAMVYTANGRPLKALNPRNHRIGLNHGALAARFTKEGEPLIGADGDVELWVEAAGNPDMTQHLGGPTELGDRRTAGHEPLWQFKGAELSVRRNEVWGLWLDIDVLDGLMRQLPAESTHRARLLRGLEQAADEVDHQGIVAGAGPARQILAGYLDSGANSSAQQMTAIGHAHIDSAWLWPLRETRRKVVRTFSNVVALAQEYPDFHFACTSAQHYAWLQESSPELFERVQEAIERGQWHPVGGMWVESDANLPSGESLVRQFTSGLRWMREHLGVRPDCLWLPDSFGYTGALPQIARLAGMRWFFTQKLSWNTANTLPHHTFWWEGIDGTRIWTHFPPVDCYDCVVSAQEVKKAEANFKEKGVARRSILPFGYGDGGGGPTAEQVERARRFADLEDAPQVRLGSPDDYFDQAQEDHPQASVWRGEMYLEFHRGVYTSAHPLKNGNRRAEVGLAAAEWLAVMAARTGHPYPYQQLEQLWQRTLLLQFHDILPGSSIAWVNQEAIAEFTAIRAELNQLMDDAWQALLQASGGETVGVSLVNPSQADRREVLTVSDRPVLVQVPAMAAKSLTDAVVDPEHPVHVQRGRDAIRMTNGLVDVCIDTRDGLVNSIVDLVSDRELLLSGQRANRLVLHPDYPDCFDAWELQQQYRHSGDPVDRVTDLRVTESLLRAQVRVERHADQSSFVQTITLDADSRAVEFSVDVDWAERARVLKVDFPLDVAARSSRDEIQFGHIGRPIEANTSWDDAHFESCGQQWMLLAEPRYAVALVNQSSYGHDVSPAGGDEHTPTMGVMARLTLLRSPQSPDPHPDQGCHHLVYSLLTDARVESAHVEAARLNQPLQVRSGTVELPSTARIEPVHGTAVIDAVKQAFDGSGDLVIRIHEAEGARSRVRLLLDRDGCVSEVDLLEDPIDEPTQQLPASTCSRVELTLRPFQILTLRVSQR

SEQ ID NO: 15441 - protein, 504 aa, Leptospira interrogans serovar lai str. 56601
MTAILSFSFRIWNKIFFKKANRFFSLGFILFIQPGIYAVENPLPFDELRKGVVQIRVYSQAVNPFTPWTTDAVRAGSGTGFLIGNKRILTNAHVVSNAKFVQVQRYNQTEWYGVKILHLAHDCDLAVLEAENPEFYKDSRDLQLGEIPELNSPLIVVGYPIGGNKVSVTRGIVSRKDQSVYSHSAVDSHLVLQVDAAINPGNSGGPAIQDDKVVGVAFQVATKGENIGYLIPTNVIRHFLKDIEDGKYDGYVELGVRTLNSFNVFLRKAKGIPDHLEGVFVSKVLKNGSAENHLKEGDFLLEIDGQPIGKNGTVMQDKDARVDFVEIVDNKHAGDKISFKLYREGKEISVSFPARRMSDFDFMRNQYDRSYDFEMIGGLLFQEMSRDLITSWGRSGNTSGGSQLLYRFFYFIEDGLNRTKKTDVVLYRKLSHPVNSSSDYFVNMILESVNGIPVGELKDLKKILKESRDRYLRLKFLDIQVPLILNREEAEKADEKIRKIYGLE

SEQ ID NO: 15442 - protein, 221 aa, Arabidopsis thaliana [sequence omitted]

SEQ ID NO: 15443 - protein, 214 aa, Propionibacterium acnes KPA171202
MVTMYPPQQVDAVLFDMDGTLLNTLSAWCVASEHLWGTSLADADSAKVDGGTVDDVVELYLRDHPQADPQATVERFMDILDANLAGNTEPMPGADRLVKRLSGHVPIAVVSNSPTRLVRDGLASQGWLELFDTVLGVDEVAAGKPAPDPYLTAARRLGADPSRCVVIEDSAFGLRAGRAAGAWVLTVGRRLKGQGDMWVSGLDDERVTSWEPHR

SEQ ID NO: 15444 - protein, 522 aa, Mycoplasma mycoides subsp. mycoides SC str. PG1
MKWNWYSEKQKEKEVIMTKFNNKSELKKIASFNDFLDYTVSFANKNNNEISSEDVLEVFANIFPNASDNESEKILDVLQQKGIVFSDLVDDDIEQEELEEVEEEIEDLNLEELEELENLEYLDDLDFDLDSTSNNLDDYDENANDDLDEFKEAKSAAIKGRKSAKSSNHMKYRVGGISNETKIQDIIKTYFYKIGQAPILTKEQEIIYAKMAVSDDPEDVQEGRNKLIESNLKLVISVARKHLNRGLDFADLIEEGNIGLMKAVDKFEYEKGFKFSTYATWWIRQAITRAIADQARTIRIPVHMVETINKLARVERQLTQELGREPNADEIANRVGEGITGDKVIEIKKLSIEPVSLEKPFGDEDDTHFGDFVEDKDMVSPNEYTEKKILKEVMDKVFEDMPPREEKVIRMRYGIVPTRLRTLLRLTQECNDTNAKELKQAIEELDIHLDTPIEKVRKFNNQIINNNLAKYDSARTLEEVGKELNVTRERIRQIEAKTIRKLKQPSPNNKSGKTLKEFYKGY

SEQ ID NO: 15445 - protein, 358 aa, Fragaria x ananassa
MTAYRGKYADELIKNAAYIGTPGKGILAADESTGTIGKRFDSIKVENVEENRRALRELLFTAPGVLQYLSGVILFEETLYQKTAEGKPFVDVLNEGGVLPGIKVDKGVVELKGTDGETTTQGLDGLGARCAKYYEAGARFAKWRAVLKIGPNEPSQLSINENANGLARYAIICQENGLVPIVEPEILVDGPHSIDKCADVTERVLAACYKALNDHHVLLEGTLLKPNMVTPGSEAKKASPEVIAEYTVRALQRTTPAAVPAVVFLSGGQSEEEATLNLNAMNQLKGKKPWTLSFSFGRALQASTLKAWSGKKENVKAAQEALLTRAKANSEATLGTYKGDAKLGEGAAESLHVKDYKY

SEQ ID NO: 15446 - protein, 312 aa, Staphylococcus epidermidis RP62A
MKNSSREYHQINSQKKVLVIGSAVIDVILNVNSIPSSGSDEFAHSEKTIVGGCAYNVGDILSQFKANYDLMVPVGDGLNGTIIENKLKKEGKTSLLNNILGDNGWTLCIVENNGERTFLTIPGVEMTWKKNWFKEIDLNKYDYIYVSGYSFEPPSDEVLLEEFSRLNEKTTIIFDPSPRINKMNCESIRKLLEINTIVHANEGEILQLSSENHVKDAALEVSKQTNQPVIVTLGNKGTLIANKCKVKILEGEKVPVTDTIGAGDSHTAAFIAGLLDNQSIEKACIWGNEVASKIVQERGGNTDIFNPIDKEY

SEQ ID NO: 15447 - protein, 352 aa, Xanthomonas axonopodis pv. citri str. 306
MLPVHRVLRYLGLAVARRTGGGTRMSASKHQVVCFGEALIDMLALPQARPDEARTFAQYAGGAPANVAVAVARLGGAAHFVGMLGRDMFGDFLLQSLQQSGVATDGIVRTDQAKTALAFVALDDAGERSFSFYRPPAADLLFRPEHFAADGFTQAAVLHVCSNSMTEPEIAQCTLDGMRRARADGAIVSLDLNLRPMLWPQDVEPAPLLWEALALADVVKLSREELEYLAGTLDSDASAVTQKLWQGRASWLLVTDGGGPVHWQTRTDSGQVPAFQVQVRDSTAAGDAFVGGLLYQLATRAASLEQLCGDPAVINEVIRFAAAVGALAVTRKGAFAAMPSIDEVHSLIQEQS

SEQ ID NO: 15448 - protein, 88 aa, Zea mays
DEEKKLDFLTRELKGKRPLVPQNIEVAADVKEVLDTFKVAAELGSDSLGAYVISMASNASDVLAVELLQKDARLAVSGDLGRPCPGGT

SEQ ID NO: 15449 - protein, 678 aa, Bacteroides fragilis YCH46
MKKYDIKTTDEQTLRKWYHLMTLGRALDEKAPAYLLQSLGWSYHAPYAGHDGIQLAIGQVFTLGEDYLFPYYRDMLTVLSAGMTPEELILNGISKATDPGSAGRHMSNHFAKPEWHIENISSATGTHDLHAAGVGRAMVYYGHKGVAITSHGESATSEGFVYEAINGASNERLPVIFVFQDNGYGISVPKKDQTANRKVADNFSGFKNLRIIHCNGKDVFDSMNAMTEAREFAIANRTPVIVHANCVRIGSHSNSDKHTLYRDENELAYVKEADPLMKFRRMLLRYKRLTEEDLQQIEAAAKKELAAANRKALAAPDPIPESIYDFVLPEPYIPQKYKDGLPGPVEGEKSFMVNAINETLKEEFRRNPDTFIWGQDVANKDKGGVFNVTKGMQQEFGDARVFSAPIAEDYIVGTANGMCRFDPKIHVVIEGAEFADYFWPAVEQYVECTHEYWRSNGKFTPNITLRLASGGYIGGGLYHSQNLEGALTTLPGARIVCPSFADDAAGLLRTSMRSKGFTLYLEPKALYNSVEAAAVVPEEFEVPFGKARIRREGTDLTIITYGNTTHFCLDVAERLAREEVGSVEVIDLRSLIPLDKEAIFASVRKTGKVMVVHEDKVFSGFGAEIAAQIAGEMFRYLDAPVQRVGSTFTPVGFNPILERAILPNDEKIYKAAKELLEF

SEQ ID NO: 15450 - protein, 185 aa, Xanthomonas campestris pv. vesicatoria str. 85-10
MLLNRLLALVLTGFFATSAFAAGTPVLDVEYRPLAGKTPINLNRTYGGKVVMVVNTASKCGFTPQYEGLEALNQRFGSRGFTVLGFPSNDFQGQEPGSEKQIQEFCTLTYGVKFPMFEKVHVLGAQATPLYQRLTQATGVAPGWNFHKYLISRDGRVVAQFPSKIKPDDPSVLAAIERELKAPAH

SEQ ID NO: 15451 - protein, 462 aa, Cryptococcus neoformans var. neoformans
MHPQNSSTPSTNSPSTFSLPKSSISRKKPPGLDISKSILRPTRTAPVLPANGSSPSNFVSEADRLRDDIANLQLSSRSTGSNHSPEALDSPRAFQSDSSVASGLAKKEKSRDGKERGDKEKRKKKHKDKDGEDLVKDEDLEILHDLGAGNGGTVTKVWNKKRKCVMARKLILVDAKPSIRKQILRELQIMNDCDSPYIVGYYGCFPVDVHVGIVMEFMDAGSLDYIYRHHGAIDIDIVGKVAQAVLEGLIYLYDKHRIIHRDIKPSNVLANTRGEIKICDFGVSGELINSIANTFVGTSTYMSPERIQGAPYTIKSDIWSLGISLIELAVGRFPFSDSPDSEELSPSVSDFDPDPTLPRSVRRPKIESNSRHNGVSQSGGPHAMSILDLLQHIVNEPAPRLASRRRRFPQEAVAFVEGCLIKDPDQRRSPKELLSSSWITNLKTTKEDLQTWAQSMVGPREE

SEQ ID NO: 15452 - protein, 180 aa, Rhizobium gallicum bv. gallicum
DFDAFPALEQLPLWGFDGSSTMQAEGRSSDCVLKPVAVYPDPARTNGALVMCEVMMPDGVTPHPSNSRATILDDEDAWFGFEQEYFFYENGRPLGFPEQGYPAPQGPYYTGVGYKNVGSVAREIVEEHLDLCLAAGINHEGINAEVAKGQWEFQIFGKGFKRAADQIWMARYLLLRLCEK

SEQ ID NO: 15453 - protein, 342 aa, Oryza sativa
ICNQSASTCFAGTISSWCTYVRRHRSPLNSGLWISIEVLVNVSQIVAAIVVLSLSRKEHPQAPLFEWVIGYTVGCFATLPHLYWRYIHRNIVNGENEPAHTLQGSSQNNSTEPSASASERRRNAARNAVLANPRINALFDHFKMALDCFFAVWFVVGNVWIFGGRSSAADAPNLYRLCIVFLTFSCIGYAMPFILCAMICCCLPCIISVMGFREDTNNTRGATSESINSLPTYKFKTKKRRHSSGNEAEGQDGGIVAAGTDKERSLSAEDAVCCICLAKYAHNDELRELPCTHCFHKECVDKWLKINALCPLCKSEIASSSGTSDTRRSDHTDIPVQEIEMH

SEQ ID NO: 15454 - protein, 382 aa, Yarrowia lipolytica CLIB122
MIFSNILLSTVAAAAVINLPLKARDLSDAPEIAAELFKRQAGVFHSTQTKGDIFYEAEIEIGTPPQKVSVCFDTGSPLLWVPGSNSTQCKDSCKGRTYDVSKSSSWQYQKEGKNWGGTGNWGKDTVSYAGQTLEDFNVWVSKDKIANSQGIFGQSISDNKHGSFIQGLADSGKISRAVYSLNAEKPVLFADASTKGVVTNVYYGGFDKAKYEGPLTTINCSHPGGYGMPLGGLSIQGEEIPEEKNKRQIVLDTGGIKVQYSNNTVEALSKKFGGEGQFSEGAWEVGCDQKPEITYHFGETKIDMPLSDYVSKGKDGKCRINKIHLSGNDVKTLLTGPTLISRALVIYDNERSQITIAKAKYTDETDVVEITGDIPGAVPFKP

SEQ ID NO: 15455 - protein, 298 aa, Triticum aestivum
  misc_feature (35)..(35): Xaa can be any naturally occurring amino acid
  misc_feature (61)..(61): Xaa can be any naturally occurring amino acid
  misc_feature (77)..(77): Xaa can be any naturally occurring amino acid
  unsure (1)..(298): unsure at all Xaa locations
TLSGRHQPVGFSLGTPRKGEGEIPGTGGLPPDQRXFFFPGTTLGGRPPGGYKSQKESPPHXVVRLGGGMQIFVKTLXTGKTITFKVEFSDTIDNVKAKIQDKEGIPPDQQRFIFAGKQLEDGRTLADYNIQKESTLHLVLRLRGGMQIFVKTLTGKTITLEVESSDTIDNVKAKIQDKEGIPPDQQRLIFAGKQLEDGRTLADYNIQKESTLHLVLRLRGGMQIFVKTLTGKTITLEVESSDTIDNVKAKIQDKEGIPPDQQRLIFAGKQLEDGRTLADYNIQKESTLHLVLRLRGGQ

SEQ ID NO: 15456 - protein, 271 aa, Parmotrema sp. Feuerer s.n.
VEHGEVKVVAVNDPFIEPHYAAYMLKYDSQHGQFKGTIEVKGSDLVVNGQTVKFYTEKDPANIPWKDTGAYYIVESTGVFTTTEKAKAHLKGGAKKVVISAPSADAAMFVMGVNEKEYKSDIEIISNASCTTNCLAPLAKVMHDNFTIIEGLMTTIHSYTATQKTVDGPSAKDWRGGRTAAQNIIPSSTGAVKAVGKVIPSLNGKLTGMSMRVPTSNVSVVDLTCRLEKSVTYDQIKETMKKASEGPLKGIMSYSEDALVSTELNGDNHSC

SEQ ID NO: 15457 - protein, 278 aa, Parmotrema reticulatum
VEHGEVKVVAVNDPFIEPHYAAYMLKYDSQHGQFKGTIEVKGSDLVVNGQTVKFYTEKDPANIPWKDTGAYYIVESTGVFTTTEKAKAHLKGGAKKVVISAPSADAAMFVMGVNEKEYKSDIEIISNASCTTNCLAPLAKVMHDNFTIIEGLMTTIHSYTATQKTVDGPSAKDWRGGRTAAQNIIPSSTGAAKAVGKVIPSLNGKLTGMSMRVPTSNVSVVDLTCRLEKSVTYDQIKETMKKASEGPLKGIMSYSEDALVSTDLNGDNHSCIFDATAG

SEQ ID NO: 15458 - protein, 490 aa, Erwinia carotovora subsp. atroseptica SCRI1043
MQLKQSISLKQQVLFRQHCLIDGEWQDSQSGERLNVTNPATGEVLGTVPLVTVSQTEQAIAAAEQALVEWRKKTGKERAALLQAWARLIMDNQDDLAVLLTAEQGKPLAEARGEIAYATSFIDWFAEEAKRIEGSVLQSPQGQQRLMVIKQPIGVCAAITPWNFPAAMITRKVGPALAAGCTMIVKPAEQTPFTALALAELAQQAGIPRGVLQVIVGDAQSVGKVLCDSPVVRKLSFTGSTEVGRILMAQSAPTVKKLSLELGGNAPFIVFDDADVDQAVKGILASKFRNSGQTCVCANRIYVQNGIYPTLVERLIEEVRKLNVGDGTQPGVTQGPLIDDDAVSKVEQHIADALSHGATLLLGGQRHERGGTFFTPTIVGDVTREMRFAREETFGPVAPLFRFSDEAEVIAMANDTEFGLAAYVYTRDAIRQWTVPEALDYGMVGINTGLISNEVAPFGGVKQSGLGREGSRFGIEDYLEMKYLCVDLSR

SEQ ID NO: 15459 - protein, 255 aa, Dehalococcoides ethenogenes 195
MSRISDAFQKRKSLIAYITVGYPDIETTLRLVPLLEENGVDIIELGIPFSDPLADGVTIQNASYQALQNGVTPEVCLSVAALLKEKISIPMVFMGYYNPIYNYGLTKFCQKCATAGVSGFIIPDLPPGEAQDIDFAATEAGLDIIFLLAPTSTDERIKLVAAKSRGFIYLVSHSGVTGATANLPADLSSFVNRVRKTARQPLAVGFGISTPEQAQNIAKFSDGIIVGSRILQLVQTDPSLEKVATFIRQLRQSLD

SEQ ID NO: 15460 - protein, 271 aa, Parmotrema perlatum
VEHGDVKVVAVNDPFIEPHYAAYMLKYDSQHGQFKGTIEVKGSDLVVNGQTVKFYTEKDPANIPWKDTGAYYIVESTGVFTTTEKAKAHLKGGAKKVVISAPSADAAMFVMGVNEKEYKSDIEIISNASCTTNCLAPLAKVMHDNFTIIEGLMTTIHSYTATQKTVDGPSAKDWRGGRTAAQNIIPSSTGAAKAVGKVIPSLNGKLTGMSMRVPTSNVSVVDLTCRLEKSVTYDQIKKTMKEASEGPLKGIMSYSEDALVSTDLNGDNHSC

SEQ ID NO: 15461 - protein, 260 aa, Parmotrema tinctorum
HGDVKVVAVNDPFIEPHYAAYMLKYDSQHGQFKGTIEVKGSDLVVNGQTVKFYTEKDPANIPWKDTGAYYIVESTGVFTTTEKAKAHLKGGAKKVVISAPSADAAMFVMGVNEKEYKSDIEIISNASCTTNCLAPLAKVMHDNFTIIEGLMTTIHSYTATQKTVDGPSAKDWRGGRTAAQNIIPSSTGAAKAVGKVIPSLNGKLTGMSMRVPTSNVSVVDLTCRLEKSVTYDQIKKTMKEASEGPLKGIMSYSEDALVST

SEQ ID NO: 15462 - protein, 226 aa, Gossypium raimondii
MRKPCCDKQGTNKGAWSKQEDQKLIDYIRIHGEGCWRSLPKAAGLHRCGKSCRLRWINYLRPDIKRGNFAQDEEDLIIKLHALLGNRWSLIAGRLPGRTDNEVKNYWNSHIKRKLMKMGIDPNNHKLNQYPHHVGPLNPTTTNSMDVACKLRVFSTENDDGVSDAASYLEDETPPTGISNLDLDLTIAFPSSPIKNIIEESQKKTASIVTNNKEEQYTVPTLLLFR

SEQ ID NO: 15463 - protein, 340 aa, Thermosynechococcus elongatus BP-1
MTLRVGINGFGRIGRLVLRAGLACDNLQFVGINDLVPADNLAYLFKYDSTHGMYPGTVKATAEGIEIDGQFIPCTAVRNPAELPWGAVGADYVVESTGLFTSYEGAAQHLQAGAKRVVISAPTKDADKVKTIVVGVNHDTFDPSSDRIVSNASCTTNCLAPVAKVLHASFGLAEGLMTTVHAVTATQPTVDGPSKKDWRGGRGAGQNIIPASTGAAKAVTLVLPELKGKLTGMAFRVPTPDVSVVDLTFKTEKATTYGDICAAMKAAAEGELKGILGYTEEAVVSSDFIGDGRSSIFDATAGIQLNANFFKVVAWYDNEWGYSCRVVDLLKLMAAKEGLL

SEQ ID NO: 15464 - protein, 209 aa, Gossypium herbaceum
KQEDQKLIDYIRIHGEGCWRSLPKAAGLHRCGKSCRLRWINYLRPDIKRGNFAQDEEDLIIKLHALLGNRWSLIAGRLPGRTDNEVKNYWNSHIKRKLMKMGIDPNNHKLNQYPHHVGPLNPTTTNSMDVARKLRVCSTDNDDGVSDAASYLEDATPPTGISNLDLDLTIAFPSSPIKNIIEESQQKIASIVTNDEEEEYTVPTLLLFR

SEQ ID NO: 15465 - protein, 218 aa, Gossypioides kirkii
QGTNKGAWSKQEDQKLIDYIRIHGEGCWRSLPKAAGLHRCGKSCRLRWINYLRPDIKRGNFAQDEEDLIIKLHALLGNRWSLIAGRLPGRTDNEVKNYWNSHIKRKLMKMGIDPNNHKLNQYPHHVVPLNPTTTNSMDVACKLRGCSTDNDDGVSDAASYLEDETPPTGISNLDLDLTIAFPSSPIKNIIKESQQKIASIVTNDEEEQYTAPTLLLFR

SEQ ID NO: 15466 - protein, 329 aa, Propionibacterium acnes KPA171202
MKILITGGAGYIGSTVGSACEEAGHEVVVLDDLSAGRREFVRDRTFYEGDIADQDLLDRVFSENQIDAVVHCAAKIIVPESVDEPLTYYGNNVGKTVALLKGMERNGVHRILFSSSASIYATDEEFKVTEESALDPGSPYATTKFMVEFILRDAAHASDLKALSLRYFNPIGSDPKLRTGQQIEHPTHVLGKMIDAWMEGSTFTVTGVDWPTRDGSGIRDYIHVWDLARAHVAALEHLDEVTTDDPYQVFNIGTGSGVTVKELVKAFEEGTGKSLNVVYGPPRPGDVAGAYTVSRRAKDLLGWSAELTQADGIRDAIAWLPERKKILGY

SEQ ID NO: 15467 - protein, 327 aa, Vibrio harveyi
MSISNTVTKVEEFEYDNAQSEGISNGLEKPSNGTKTAAREEFDASSKSLDATQLYLGEIGFSPLLTAEEEVLYARRALRGDEAARKRMIESNLRLVVKISRRYSNRGLALLDLIEEGNLGLIRAVEKFDPERGFRFSTYATWWIRQTIERALMNQTRTIRLPIHVVKELNIYLRTARELSQKLDHEPTAEEIAAQLDIPVEDVSKMLRLNERISSVDTPIGGDGEKALLDIIPDANNSDPEVSTQDDDIKSSLIHWLEELNPKQKEVLARRFGLLGYEPSTLEEVGREIGLTRERVRQIQVEGLRRLREILIKQGLNMENLFNVEDD

SEQ ID NO: 15468 - protein, 225 aa, Leptospira interrogans serovar lai str. 56601
MSLATILREGTSEEHKAAESSAFIRCFMKGILEKGTYARHLEAFYYVYESMEEELERNKNNLVLKSIYFPELYRKNALLEDLQFFYGTWKPNDHQPSVATQDYVQRIRKISETQPELLAAHSYVRYLGDLSGGQILKKVAARALNLPEGKGISFYEFPMIQDINGFKQNYRTALDSLPVNDSEKQSILAESKQVFLLNQGIFSELEQDLVSAIGKETYDSVLGKG

SEQ ID NO: 15469 - protein, 1063 aa, Burkholderia sp. 383
MKSSSLVPQPPLKPVIGHLMEVLGPSPLAKMMDLARTYGPVYWFEVFGQGYYVVSGQTLVDEVCDETRFQKCVHQSLLELRPAIGDGLFTAFGDEPNWAKAHRVLMQAFGPLSIWSMFDKMVDIADQMFLHWERFGPETPVDVSDHMTRLTLDTIALCAFDCRFNSFYREDQHPFVDAMVNTLSEAGKRELRPKLVSKLMVKRSRQFDADIEVMRSLATKMIEDRRKNPHVNEESMDLLDRMLNGIDPVTGEKLDDENIVFQMITFLIAGHETTSGLLSFATYFLLKNPDILQKARDMVDEVVGSETPRIEHLARLRYVEQILMETLRIWPTAPGFAVKPLADTTFGGKYAVSPDDIIMILTPMLHRDVSVWGEDVEAFRPERFAPENAEQLPPNSWKPFGNGARACIGRPFAMQEAHLVLIMLLQRFDFSFADPDYELDVAETLTLKPAGFRVNVKPRARGALKVPDTALHARSNAQSPSVAPVQSIAPGEDLSNLLVLFGGNTGSAESFARRIAGDASRHGFHATCAPLDDFAGKLGGYPAIVIVTASYEGQPPDNAKSFVPYVEALDEGALDGVHFSVLGCGNKQWARTYQAIPKRVDEALEKAGATRVHFRGELDSGGDFFGEFDRWYTEMWNRFAISAGKEIPVIQHDDVALKVSFAGSSREKVLNLGDMAHASIVDNRELVDISVAGSRSKKHIELKLPEAMTYRSGDYLAVLPRNAKNNVDRVLRRFRVSWDTQVVIEGTSSNPRLPLGQAIGCGELFSSYVELAVPATRSQVSSLAAATRCPPEKVELERLSADGFECEILGKRTTVMDLLERFGSVDLSLEKFLDMLPALKARQYSISSSPLWKADHVTLTVAVVDAPALSGNGRHEGVASSYLARLNTGDSLSVAVRPSNARFRPPAEPDLPMILICAGSGIAPFRGFLQERALQKQRGENVGTSLLFFGIDDPDVDFLYRDELDEWARCGVVEVMPAYSNRPEEGARFVQDKVWLERERISALFSQGATVFVCGDGKNMAPAVRATLGRIYQETTGENDESASAWIDTMEREHGRYVADVFA

SEQ ID NO: 15470 - protein, 244 aa, Gnetum gnemon
  misc_feature (195)..(195): Xaa can be any naturally occurring amino acid
  unsure (1)..(244): unsure at all Xaa locations
MVRGKTQMKRIENATSRQVTFSKRRNGLLKKAYELSILCDAEVGLIIFSPRGKLYEFANPSMQKMLDRYQKCCQESTANTSKNLVEDTQHLKREVAIMEEKIKMLEYAQKKLLGENLESLSMKELTQLENQAERGLVNIRARKTEILMDQINQLKRKSQLLGEENAVLRKKCNGPYMGGGLLSILHAGASGAGPXNNNNNNGGSGVTHHDDNNNNNRSNNVNVEDVETQLNIGPPDVHCSINQC

SEQ ID NO: 15471 - protein, 677 aa, Parachlamydia sp. UWE25
MVKNMSSHLQVSVPQPLDSEQKQIMKQIANTIRGLSMDAVQKADSGHPGLPMGCAELGAYLYGYYLKQNPKNSKWLNRDRFILSAGHGSMWLYSCLHLAGYKITLEDIKNFRQLHSPTPGHPESFMTDGVETTTGPLGQGVGNAVGQALGFKILGEKFNTEKHPIFNNKVYVLMGDGCVMEGISSEVSSLAGHLKLNNLVAIYDANHVSLDGPLAESSSEDTKTRYKAYGWDVFEIDGNDIEAIDTVFSQIRHYQEKPCLVIAHTIIGKGAPNKGGTYKAHGSPLGVEEIKAAKDELGIPQEDFYVPQAVINYFQNKLVSDAKEQNEWKQIFEEWAKENPSKFQELEVMLHHKLPDDFEQKLQHLMIKAPISGRKASQEVLNSLADMIPQLYGGSADLSSSDMTMLKKFSLIAPNEFHGRNIKFGVREFGMATIATGLYQTGMILPFVGTFLTFSDYMRNAIRLAALQHAQVFYQFTHDSIFLGEDGPTHQPVEHYAALRAIPQLQVIRPADSYEVKMSWIAALQYKGPTALILSRQNLPDLAGTNIPYVEGMGRGAYIVKKEKGKADFTLVATGSELSLAMNVANELEKLGKNVRVISMPCWALFEKQPIDYKESLFGGDIGKRVSIEAGVDLGWHKYIGRDGIAICMEHFGASAPAGVLAKEFGFTVEAILERIL

SEQ ID NO: 15472 - protein, 208 aa, Ustilago maydis 521
MLRNSIIPFAKQAVASTSRTASFSTVARPAAVATARASTSSNVFGAAVQRRGYHEKVIDHYENPRNVGSFLKTEKNVGIGLVGAPACGDVMKLSIKVNEEGIIEDVRFKTFGCGSAIASSSYMTERVKGLSLDEAAKIKNTEIAQELCLPPVKLHCSMLAEDAIKSAIKNYRSKREATGNKKQGHIEVVQDVATGNTSATAHVGSGTV

SEQ ID NO: 15473 - protein, 154 aa, Lactobacillus plantarum WCFS1
MANSEKTLVLVKPDGVSEGHIGEVITRLERKGYQIAALKVIKATAEQLQQHYSEKVGKPYFKEIETYMMEGPLVAIIVSGTGVVKAVHRLAGSTRPAEAQPGTIRGDFSHEYPDGILRNVIHTSDSRENAHHEIAIWFPELAVKARKADNKVKA

SEQ ID NO: 15474 - protein, 328 aa, Xanthomonas campestris pv. vesicatoria str. 85-10
MSATKHQVVCFGEALIDMLALPQDGPDQARTFAQYAGGAPANVAVAVARLGGAAHFVGMLGRDMFGDFLLQSLQQSGVATDGIVRTDQAKTALAFVALDDAGERSFSFYRPPAADLLFRPEHFAADGFTQAAVLHVCSNSMTEPEIAQCTLDGMRRARADGAIVSLDLNLRPMLWPQDVDPAALLWEALALADVVKLSREELEYLAGTLDGDASAVTQKLWQGKASCLLVTDGGGPVHWQTRTDAGQVPAFQVQVRDSTAAGDAFVGGLLYQLATRAASLEQLCGDSAAINEVIRFAAAVGALAVTRKGAFAAMPSIDDVHSLIQEQS

SEQ ID NO: 15475 - protein, 458 aa, Vibrio cholerae O1 biovar eltor str. N16961
MSVVSQVLSHMRGDFFRRLIAIALPITLQNIMFSSRGLVDVLMLGQLGEAEIAAVGVAARATFVTTIMLVGVTTGGALLTAQYWGAGDRKGVRESTALTWLVSNFFAFFTVLLFLFFPQQIMSLTTDSEQVNALGSQYLIITSFTMFAVACVSSMAVGLRAMHKPGVSTFFSGIGIVSNVVLNWILIFGKFGFPAMGIQGAAIATVLSGAIEIACLYSYLYGKKHLMAFGWQDIKAVIDWPKISRFLRLSLPTTFNFLIWAAGLFTYHAIMGQTGVQGLAALSVMTPVESISLSLLIGMSTAAAVLVGNQLGAKNYEAVYYQAIGVTACSVLVGIVVAIGLYLVQIPVLGAFTALTPETRELSEKFMLILCLGIVLRSFPMTAIVGVLRAGGDVKFCLGQDIVAQWCIGIPLAAFAALVLKVEPEWIYLLFLTEEVVKWFGSLHRMKSKKWMKNLIEN

SEQ ID NO: 15476 - protein, 486 aa, Shewanella sp. MR-4
MSQQYLTSQSGSPIADDQNSLSAGERGPLLLQDWHLIEKLAHFNRERIPERVVHAKGTGVYGTFTLTKDLSEYTIADHFNGVGKQTETFVRFSTVGGEMGSADAERDPRGFGLRFYTARGNHDIVGNNTPTFFLRDGIKFPDFIHTQKRNPLTNLKDPQAMWDFWSLNPEAMHQVTILMSDRGIPANYRQMHGYGSHTFSFWNAKGERFWVKFHFKSQQGVVNLTNEQADKLKGIDPDSSQRDMVVAVTDGNFPRWTVNVQIMPEADANTYHINPFDLTKVWPHGDYPLIEIGVLELNRLPQNYFAEVEQVALAPSNLVPGVGASPDKMLQARLFAYADAQRYRIGANYNQLPVNCPHATKANHHQRAGAMAGTQCPYHGSQTGGDAAANYGPNSTAGALVEPANFAEPPLRLDGEAARYSRYNQDDYTQAGNLYRIFSEAEKARLVETISGSLRQASVEVQQRMLAHFHKADADYGQRIQTALGL

SEQ ID NO: 15477 - protein, 188 aa, Shigella flexneri
KINLGIGVYKDETGKTPVLTSVKKAEQYLLENETTKNYLGIDGILEFGRCTQELLFGKGSALINDKRARTAQTPGGTGALRVAADFLAKNTSVKRVWVSNPSWPNHKSVFNSAGLEVREYAYYDAENHTLDFDALINSLNEAQAGDVVLFHGCCHNPTGIDPTLEQWQTLAQLSVEKGWLPLFDFAYQ

SEQ ID NO: 15478 - protein, 191 aa, Shigella flexneri
ERPGKINLGIGVYKDETGKTPVLTSVKKAEQYLLENETTKNYLGIDGILEFGRCTQELLFGKGSALINDKRARTAQTPGGTGALRVAADFLAKNTSVKRVWVSNPSWPNHKSVFNSAGLEVREYAYYDAENHTLDFDALINSLNEAQAGDVVLFHGCCHNPTGIDPTLEQWQTLAQLSVEKGWLPLFDFAY

SEQ ID NO: 15479 - protein, 373 aa, Drechslerella dactyloides
MASPTPPNSTASPKPQAPPSQVQACRYKTGKTLGSGSYSVVRECVHIHTGRYYAAKIINQKLMAGREHMVRNEIAVLKKVSMGHQNILTLVDYFETMNNLYLVTDLALGGELFDRICRKGSYFESDAADLIRATLSAVAYLHDHGIVHRDLKPENLLFRTPEDNADLLIADFGLSRIMDEERFHVLTTTCGTPGYMAPEIFKKTGHGKPVDIWAIGVITYFLLCGYTPFDRDSNLEEMQAILKADYKFEPAQYWSDISENAKDFIRRCLTIDPKARPTAHAALEHPFICEDQPEREADLLPTVRKNFNARRTLHAAIDTIRAINKLREGGMMDGALSSAPENQKEKQPQNQPATGLWQGTAQAATAKGLWSKS

SEQ ID NO: 15480 - protein, 257 aa, Parmotrema fistulatum
AYMLKYDSQHGQFKGTIEAKGSDLVVNGQTVKFYTEKDPANIPWKDTGAYYIVESTGVFTTTEKAKAHLKGGAKKVVISAPSADAAMFVMGVNEKEYKSDIEIISNASCTTNCLAPLAKVMHDNFTIIEGLMTTIHSYTATQKTVDGPSAKDWRGGRTAAQNIIPSSTGAAKAVGKVIPSLNGKLTGMSMRVPTSNVSVVDLTCRLEKSVTYDQIKETMKKASEGPLKGIMSYSEDALVSTDLNGDNHSCIFDATAG

SEQ ID NO: 15481 - protein, 544 aa, Dehalococcoides ethenogenes 195
MSKFVFVTGGVVSSVGKGITVASLGNILKSRGLSVSVQKLDPYLNVDPGTMSPYQHGEVFVTQDGAETDLDLGSYERFIDIELTADSTVTSGQVYSEVINKERRGDYLGGTIQVVPHVTQEIKARIQRLADRSKADVVIVEVGGTVGDIEGQPFLEAIRQMRNDMGRDNVIYIHVTLLPYIQSTQELKTKPTQHSVNELRRIGIQPDIIVCRADYPISEGIRDKLSLFCDVERKAVIFMPTVSTIYEVPLKLESEGVGDLLVSRLHLNASPSDLSIWRGLVEKIKEPTPAVRIALVGKYVELKDAYYSVRESLCHAAIHNGRDIQIDWVYAEDIEKNGPEEYLKHVQGIIIPGGFGIRGIEGMITAVKYARENGIPYLGLCLGMQVMVIEFARHVLQSDKAHSTEFEPDSPYPVIDLLPEQRGVDSKGGTMRLGNYPCVIQPGTMAGQAYGNKLINERHRHRFEFNNDYRDTLSKAGMVFSGLSPDGKLVEICEVSGHPFMVGSQFHPEFLSRPNRPHPLFREFINAAKKVIRDGEQPSLPLSP

SEQ ID NO: 15482 - protein, 191 aa, Escherichia coli
ERPGKINLGIGVYKDETGKTPVLTSVKKAEQYLLENETTKNYLGIDGIPEFGRCTQELLFGKGSALINDKRARTAQTPGGTGALRVAADFLAKNTSVKRVWVSNPSWPNHKSVFNSAGLEVREYAYYDAENHTLDFDALINSLNEAQAGDVVLFHGCCHNPTGIDPTLEQWQTLAQLSVEKGWLPLFDFAY

SEQ ID NO: 15483 - protein, 216 aa, Dehalococcoides ethenogenes 195
MRIFLDTANIEEIKKGLKLGVVSGVTTNPTLVAKEGISDYKSVVQQICALLPEGDVSAEITAEDPAEMLKQAREIAKWAPNVVVKIPATAEGLEIISKLSKEGVRFNMTLCFSVNQALLGALAGAAFVSPFVGRLDDAGHDGMMLINDIVSIYKEYGFETQVIAASIRHPLHCTQAAQTGAGIATVPYKVLMQMMQHPLTDSGIARFMADWKSVQK

SEQ ID NO: 15484 - protein, 225 aa, Bacillus subtilis
HGGYAVGGISGAHLNPALTIALAFVGDFPWKEVPVYIAAQMIGAIIGAVIIYLHYLPHWKSTDDPAAKLGVFSTGPSIPHTFANVLSEVIGTFVLVLGILAIGANQFTEGLNPLIVGFLIVAIGISLGGTTGYAINPARDLGPRIAHAFLPIPGKGSSNWKYAWVPVVGPILGGSFGGVFYNAAFKGHITSSFWIVSVILVVVLLGLYVYTKSHSAKTLSNSKYI

SEQ ID NO: 15485 - protein, 273 aa, Cornicularia normoerica
VEHGDVKVVAVNDPFIEPHYAAYMLKYDSQHGQFKGTIEVKGSDLVVNGQTVKFYTEKDPANIPWKDTGAYYIVESTGVFTTTEKAKAHLKGGAKKVVISAPSADAAMFVMGVNEKEYKSDIEIISNASCTTNCLAPLAKVMHDNFTIIEGLMTTIHSYTATQKTVDGPSSKDWRGGRTAAQNIIPSSTGAAKAVGKVIPSLNGKLTGMSMRVPTSNVSVVDLTCRLEKSVTYDQIKETMKKASEGELKGIMSYSEDALVSTELNGDNHSCIF

SEQ ID NO: 15486 - protein, 487 aa, Glycine max
MSFREESGDARDLQKPFLHTGSWYKMGSRQSSIMGSSTHVIRDGAVSVLFCVLIVALGPIQFGFTCGYSSPTQGAIVRDLNLSISEFSFFGSLSNVGAMVGAIASGQIAEYIGRKGSLMIAAIPNIIGWLAISFAKDSSFLYMGRLLEGFGVGIISYVVPVYIAEIAPQHLRGGLGSVNQLSITIGIMLAYLLGLFVNWRMLAILGILPCTVLIPGLFFIPESPRWLAKMGMTDEFETSLQVLRGFDTDISVEVYEIKRSVASTGKRATIRFADLKRKRYWFPLMVGIGLLVLQQLSGINGVLFYSTTIFANAGISSSEAATVGLGAVQVIATGISTWLVDKSGRRLLLMISSSVMTVSLLIVSIAFYLEGVVSEDSHLFSMLGIVSVVGLVVMVIGFSLGLGPIPWLIMSEILPVNIKGLAGSIATMGNWLISWVITMTANLLLNWNSGGTFTIYTVVAAFTIAFIALWVPETKGRTLEEIQFSFR

SEQ ID NO: 15487 - protein, 219 aa, Pseudevernia furfuracea
PANIPWKDTGAYYIVESTGVFTTTEKAKAHLKGGAKKVVISAPSADAAMFVMGVNEKEYKSDIEIISNASCTTNCLAPLAKVMHDNFTIIEGLMTTIHSYTATQKTVDGPSSKDWRGGRTAAQNIIPSSTGAAKAVGKVIPSLNGKLTGMSMRVPTSNVSVVDLTCRLEKSVTYDQIKETMKKASEGELKGIMSYSEDALVSTDLNGDNHSCIFDATAG

SEQ ID NO: 15488 - protein, 705 aa, Kluyveromyces lactis NRRL Y-1140
MSSDSEPEELLMATRSRRANAGNKMQKLLQQELEDVQKQTSMLGDDEINLLFQEDEEDEEFTFESKKRLEDEDMFSDSGDELSEASDADEGEKELQKQERQKRKLIQKKKSRVPVIKRPKKAPVDKISKSTIDEINAESLLTESRRTSKRSAVVANKLKVYENLTQAEKRRKIIQEKLRKQREKQSLKPLTQEERLKVAEETERINVSSLNKYKEQELSKKQTRLAMQLREKMKFKDGEHIIRWLSTQWEVSPLVELEDRAYWELYTSKRDKTKKKYVRRRKAQIEEDNLREENKANTANENEKESSVDVINKSETIPNAENELTASSENSSREDSSCPPIVMSTPERENEIQEETSAKVDVENNTVTTDTPTLDKSLKEASSTESPTAALSVETIESVERTQFGSQEDDCKQICTESPTLSSAESRSNDKIVLKEAADISNQNIETVKHITFAETDQISLINSEDPPIFVQSSMEATDLVESGELGEKVEVKEDSEEKVDDVLEELEPTYEGPVQRVGKNFVILYTFPDHPIATQNSEVRKIILGKNWVLPSKARPDELETLMKITSSEEQEPLQSILIPDMSILDKFPRFGEFNKKTLRTVTIDTTKKDKIEIRTEAPTGVFLPNGIRKNCLITNRECKYFDPKNGVPYSDVEAIKTIQLLQEYYDDNGEPIEPKFKWYGFGRGGIYLDVHQKPASGVPEGFV

SEQ ID NO: 15489 - protein, 428 aa, Buchnera aphidicola str. APS (Acyrthosiphon pisum)
MSQSDTIFDYKHIWHPYSSMNNPHPCYTVISAKGVYLKLKNRKYMIDGMSSWWAAIHGYNHPVLNKALKKQIRKMSHVMFGGITHPPAISLCRKLISLTPEKLDCVFLSDSGSVAIEVAIKMLIQYWQALGQKRKLFLTIRNGYHGDTFSAMSVSDPKNSFHQIYHNLLPKHLFADAPVSSFYKNWDNEDILSFKKIIEKNSFKIAGVILEPIVQGVGGMNFYHPMYLKQIKILCNHYSIPVIFDEIATGFGRTGKMFAFEHANVVPDILCLGKSITGGTITLAATLTSRHIADTISKGKVGCFMHGPTYMGNPLACAVANANIKILKTNQWKIQVLNIEKQLFKSLMPLINHPYVTDVRVLGAIGVVECSRSINMISIQKFFVENGVWIRPFKKLIYIVPPYIISPHTLKKLTNVISNALNKTELFI

SEQ ID NO: 15490 - protein, 216 aa, Gnetum gnemon
MGRGKIEIKKIENSVHRQVTFCKRRGGLMKKAYELSVLCDAEVALIIFSSRGKLYELATSNKSMMSTLERYQRSSATGKQLNLYPGSSNEKLDLEVKFLRNQVEQLKATNRYLMGEELATMSLDELNELEAQLQKGINQVRAKKTDLMLEEIKALQNKEHILRMSNIMLQGKLDECTNCKDSRFHGFITTSSTSHAPAYTCGFNLNNQSLSSTIEM

SEQ ID NO: 15491 - protein, 288 aa, Brassica napus
  misc_feature (264)..(264): Xaa can be any naturally occurring amino acid
  unsure (1)..(288): unsure at all Xaa locations
MLAIFHEVFAHPPEVLYSPGSFFFHCCVLSPSFSRWRKMLAIFHEAFAHPPEELYSPASEKCSKQPKLPEETLNDFLSRHSDNTFSMSFGKAAVLAYVRPSASFSVHQRLFCGFDDIYCLFFGSLNNLCQLNKQYGLTKTTNEAMFVIEAYRTLRDRGPYPADQVVKDLDGSFAFVVYDSKAGSVFTALGSDGGVKLFWGIAADGSVVISDDLEVIKEGCAKSFAPFPTGCMFHSEGGLMSFEHPMNKIKPIPRVHSEGALCGXHFKVDVYTRVNSPPRRGSEPPPPL

SEQ ID NO: 15492 - protein, 327 aa, Listeria monocytogenes str. 1/2a F6854
MGIAVLGGAGYIGSHAVDELITRGYEVVVIDNLRTGHRESIHKKAKFCEGDIRDKAFLSSVFEKEKVDGVIHFAASSLVGESMEVPLDYLNNNVYGTQIVLEVMEEFDVKHIVFSSSAATYGEPERVPITEDMPTNPESTYGETKLIMEKMMKWCDKAYGMKFVALRYFNVAGAKADGSIGEDHKPESHLVPIILQVALGQREKLAIYGDDYNTPDGTCIRDYVQVEDLIDAHIRALEYLKNGGESNIFNLGSSNGFSVKEMLEAARTVTGKEIPAEVVPRRAGDPGTLIASSDKAREILGWEPTYTDVKDIIATAWKWHVSHPNGY

SEQ ID NO: 15493 - protein, 885 aa, Wolinella succinogenes
MTSEKMHQEVQFVFEKMLELLDEVASALKPQFLGLREVFTQGKLDKERVKSLLSSSPLKEQIPELVKAFSLYNMLLNIVEERHSVDSDAMGLIEGMIKELKAEGYERDDVLEVLEELRFYPVFTAHPTESRRRTFLESHHEISTDLERIFHQGDAKEAHEHLRYRLMLLWKSHLVRNEKIEVLFELDNLLYIIESSMLKSAVKVCSEVERLVEAPLKRSPIRLGSWIGGDRDGNPYVTNEVMTRVMKIQHEMIISHYIGKIERLIRELSIASDLCEPSLGLLESLERESSELENSAAKLHKNEPFRAKLILMKKKLQNRLIFVNYASDMEFVYKTPKELIEDIDLVLESLDSLSGKYLREFRNLVLLTGFHLMKLDFREHRDAIRDAISEIFSLLGYSDSDFGQLPPSKRAEILDRALSLPRLNLNALLGRVSHQSEEIISAFLRIEWAKGNISEEIIDSFIISMTQDSTDLLAVLWLAKQSGLWREGQRTRISISPLFETIEDLQKAGMIMEELAKNPHYALYLRDHQGIQEIMIGYSDSSKDGGIFTSNFSLNRAVYHLTELEEKLGIKFRLFHGRGGSVSRGGGTLESALMASPAKSVAGVLKTTEQGEVISSKYLNPLICDFNFSSTIAALLKKSVYDRFGKRIDCGKSDRFTSVMQGVSEASYKAYRRLVYETEGFMDYFKEATPIGFIQKLNIGSRPSKRKETHRVEDLRAIPWVFAWTQNRSIIPAWFGVGSGLESVALAGGEEILKECYGECPFFKTTLDNIAQALLKVDLDVASLYNEFVEDGEVRERIWGMIQEEYQKTLHWILYVRGERELLENERVLRESILLRRPYLTALNLFQIELIKKYRASSYEKQQERIIEQISSTIVGIAQGVRNTG

SEQ ID NO: 15494 - protein, 340 aa, Wolinella succinogenes
MALSVYYDKDCNLDLIRSKKVAVVGFGSQGHAHAENLRDSGVEVVIGLHKGGSSWSKAEAKNFKVMEVAEASRYADVIMILIPDELQAEVFERDILPNLSEGKAIAFGHGFNVHFGQIKAPKGVDVIMIAPKAPGHTVRSEFVKGGGIPDLIAVEQNASGIAKEICLSYASAIGGGRTGIIETTFKDETETDLFGEQAVLCGGVTALVKAGFETLVEAGYPEEMAYFECLHELKLIVDLIFQGGLSDMRYSVSNTAEYGDMVSGPRVVNETSKAAMKEILKDIQEGRFAKDFILERKAGYARMNAERKNLAAHPIEQTGERLRAMMPWIGANKIIDKNRN

SEQ ID NO: 15495 - protein, 313 aa, Eucalyptus globulus
ANLFAMQLATASVLPAVLTAAIELDLLEIMARAGPGAYLTPGEVASQLPTQNPDAPVMLDRIFRLLASYSVLTCTLCDLPEGKVERLYGLAPLCKFLVKNEDGVSLAPLRLIDQDRVFLESWYYMKDAILEGGIPFHKAHGMTAFDYPGTDPRFNKIFNRAMSDHSTIMMKKILETYNGFEGLKTVVDVGGGTGAILNMIVAKYPSIKGINFDLPHVIEDAPSYPGVEHVGGDMFVNIPNGDAVFMKWICHDWSDEHCAKLLKNCYDALPVNGRVIVAEYILPAYPDQSLSTKGVIHMDCIMLTHFSGGKERT

SEQ ID NO: 15496 - protein, 485 aa, Propionibacterium acnes KPA171202
MMTNDRSLPSDLPTQLLIDGEWVDAEASRTFDVINPATEKPLVAIADASVDQGTDALDAAVRAQHSWADTAPRERAEILRKTFNLVTERKDDFARLMTLEMGKPLAESYGEVTYGSEFLRWFSEEAVRIRGDYGLLPEGNIRQLVTKRPVGPCLFITPWNFPLAMATRKIAPALAAGCTVVIRPASATPLTTLLLAKTFLEAGLPAGVLNVITGLDHAVTDAILEDPRLRKLSFTGSTGVGANLLGKAAKHVLRTSMELGGNAPFIVFDDADLDQAIIGAKGAKMRNMGEVCIAANRFIVHESVAEEFTDKMIEMMSGLVVGDGLDEKSEVGPMITERDREKVDGLVRSAIEAGATLRCGGEIPEDKGWFYPPTVLSGVPADAEIMQTEIFGPVAPITTFRTEEEALALANSVPVGLAGYVFTSDTARILRMGQKLETGMIGANLGVFSNAAAPFGGVKESGLGREGSYQGIEEFLETIYVALPA

SEQ ID NO: 15497 - protein, 312 aa, Eucalyptus globulus
ANLFAMQLASASVLPMVLKAAIELDLLEIMAKAGPGAFLSPGEVAAQLPTQNPEAPVMLDRISRLLASYSVLTCTLRNLPDGKVERLYGLAPVCKFLVKNEDGVSIAALNLMNQDKILMESWYYLKDAVLEGGIPFNKAYGMTAFEYHGTDPRFNKIFNRGMSDHSTITMKKILETYKGFEGLETVVDVGGGTGAVLSMIVAKYPSMKGINFDLPHVIEDAPPLPGVKHVGGDMFVSVPKGDAIFMKWICHDWSDDHCAKFLKNCYDALPNNGKVIVAECVLPVYPDTSLATKNVIHIDCIMLAHNPGGKER

SEQ ID NO: 15498 - protein, 336 aa, Buchnera aphidicola str. APS (Acyrthosiphon pisum)
MVKNMTIKVGINGFGRIGRVLFRLAQKRSDIEIIAINDLLAPEYIAYMLKYDSTHGVFKKHITFDKDNIIINGKNIRVTSIKDPEKLMWHDLSIDVVIESTGLFLKREQAYKHILAGSKKVVVTGPSKDDIPMFVRGANFHKYQGESIVSNASCTTNCLAPLSKVIDDNFGIIEGLMTTVHASTATQKIVDGASDKDWRGGRGALQNIIPSSTGAAIAVGKVLPNLNGKLTGMAFRVPVSNVSVVDLTVRYKKSATYSEICQKIQQASQKEMKGIMGYTEDEVVSTDFNGEELTSIFDAKAGLSLNKNFVKLIAWYDNETGYSSKVLDLVSLVSKK

SEQ ID NO: 15499 - protein, 409 aa, Zea mays
MGNCGTREENAVVAAHAQVQQVHLLQHSDKNALADRKHTRTSSDVSDPPTPRKIEDAKNISIYNNVIAFTLFELETITKSFRADYVLGEGGFGTVYKGYIDENVRVGLGPGPVAVKVLNKDGHQGHREWLTEVNCLGQLRHPNLVKLIGYCCEDDHRLLVYEFMFRGSLENHLFRKTATPLPWGTRMSIALGAAKGLACLHNAQRPVIYRDFKTSNILLDSDYTAKLSDFGLAKDGPEGDQTHVSTRVMGTYGYAAPEYVMTGHLTARSDVYSFGVVLLELLTGRKSIDKSRPSREQSLVDWALPKLNDKRRLLQIIDPRLEGQYSARAAHKSCSLAFYCLSQNPKARPLMSDVVETLAPLQQGGGGSDASSGLPDCRGRRRLTGNSVVHFRAIPNPKCTPVVPACRVR

SEQ ID NO: 15500 - protein, 437 aa, Ralstonia eutropha JMP134
MSPTITIEQGIRAAGVGRFQYRLFVIFGLVWLADAMQVLSIGFTAPSIAKTFGIPVPTALQSGTMFFVGMLIGAFVFGRLADRIGRRPVLMMAVVIDAICGVASSFAPDFQWLLVLRFLTGIGVGGTLPVDYTMMAEFLPSDRRGRWLVLLESFWAIGTILLAVLALIAVSRGDAAWRLIFLVTGIPALVGVVCRFFVPESPLYLNKSGRSAEARAVLQRVATANRVSVEIGALEPQQMERKSVLALFASGFRRRSISLLVAWALISIAYYGVFVYLPVKLAGQGFGFMRGQVFLILLALVQLPGFALAAHGVERWGRKPTLIGFLLLSAAGCMLYSLGQSPALVVGSTLLMSFSLLGTWGALYAFTPEVYPTDLRASGMGTAGAMARFGGLFAPAIVAPVMATQFTLALVLLSTCLAVAALAIYMVDIESKDRALD

SEQ ID NO: 15501 - protein, 436 aa, Magnaporthe grisea 70-15
MSYQGYPPYGGQPPPPLGAYYGQPPPQGQYPPPGQYPSQQYHQPPPGQYPPPQHGYPQQQPYGQPPQGYGQPPPQGYGHPPHQQSFPPPGPYGQQPLQQYGAPPPQQQFYPPTPPSLGYGPPQSINWDPNPDADGLRKAMKGFGTDEKALIRILSNKDPLQVDAIRIAFHRMHNRDLIKDIKSETSRYFEDGLVALAQGPLLHDVHLLRSALSGPGTKEKVLNDVLLGRSNADMHAIKRKYMEVFQRRLEEDVRGDLSMKTERHFDMVMQATRAEDSAPVDPGATQRDVQTLYDATEGKIGADQIVVCSIMSMRNDNQIRDIAVQYQNKYGRSLEEVFRKEFSGHMEDALQFQLRHALDKYMHQAALLEDAMAGLGTKDHLLVARVVRSHWDRQNLANVKIAYEKRYGTSLAKRIKGETSGDYQRLMLACIGEGSL

SEQ ID NO: 15502 - protein, 177 aa, Eucalyptus globulus
TTSADEGQFLNMLLKLINAKNTMEIGVFTGYSLLATALALPDDGKILAMDINRENYELGLPVIQKAGVADKIDFREGPALPILDQLIEDGKQGSFDFIFVDADKDNYLNYHKRLIELVKVGGLIGYDNTLWNGSVVAPPDAPLRKYVRYYRDFVLELNKALAADPRIEICMLPVGDG

SEQ ID NO: 15503 - protein, 259 aa, Nocardioides sp. JS614
MTGRIQGRVAVITGGCSGIGLATVQRFVQEGAKVVIGDIDDARGHQLVEQLGGADVATYVHVDVTSKEQVDALFQTAKDAYGSVDIAFNNAGISPPEDDSILDTDLDAWRKVQEVNLTSVYLCCKAALPHMLEQGRGSIINTASFVAVMGAATSQISYSASKGGVLSMTRELGVQFARQGVRVNALCPGPVNTPLLQELFAKDAERAARRLVHVPMGRFGEPEEMASAVLFLASDDSSFMTASTFLVDGGISGAYVTPL

SEQ ID NO: 15504 - protein, 280 aa, Arabidopsis thaliana
MSVLMVKSDQEKLSSSYLTTAFYLFHICFSFPCSILSSVDVHFAYPLRPDVKVLDGLSLTLNSGTVTALVGSSGAGKSTIVQLLARFYEPTQGRITVGGEDVRMFDKSEWAKVVSIVNQEPVLFSLSVAENIAYGLPNEHVSKDDIIKAAKAANAHDFIISLPQGYDTLVGERGGLLSGGQRQRVAIARSLLKNAPILILDEATSALDAVSERLVQSALNRLMKDRTTLVIAHRLSTVQSANQIAVCSDGKIIELGTHSELVAQKGSYASLVGTQRLAFE

SEQ ID NO: 15505 - protein, 753 aa, Escherichia blattae
MTIINHTLGFPRVGLHRELKKAQESYWAGSTTREQLLETGRELRARHWQQQKDAGIDLLPVGDFAWYDHVLTTSLMLGNVPPRHQNADGHIDIDTLFRIGRGRAPTGEPAAASEMTKWFNTNYHYIVPEFTRGQQFSLSWTQLLDEVDEALALGHNVKPVLLGPLTWLWLGKVKGEPFDRLELLASVLPVYQQVLAALAARGIEWVQIDEPILVLDLPDPWRQAYLPAYQALAGQVKLLLTSYFEGVTPNLDVITALPVQGLHVDLVLGDDEIHTLHQRLPEGWVLSAGLVNGRNVWRADLSKQFARVKGLVGQRPLWVGSSCSLLHSPIDLSVETRLDDEVKSWFAFALQKCTELALLRDALNSGDTREIDQWSAPVQARRHSPRVHNPAVAARLAAVTARDSERNQPYARRAEVQRARFSLPDWPTTTIGSFPQTTEIRGLRLDFKRGRLDASGYRTGIATHIRQAIAEQERLGLDVLVHGEAERNDMVEYFGEHLDGFAFTQNGWVQSYGSRCVKPPVVIGDISRPAPITVEWARYAQSLTDKPVKGMLTGPVTILCWSFPREDVSRETIARQIALALRDEVADLEAAGIGIIQIDEPALREGLPLRQRDWQAYLAWAVEVFRLNAAVARDDTQIHTHMCYCEFNDIMDSIAALDADVITIETSRSDMELLESFEAFEYPNEIGPGVYDIHSPNVPSVAWIENLLQKAARYIPAQRLWVNPDCGLKTRGWPETRAALANMVTAAKNLRRA

SEQ ID NO: 15506 - protein, 234 aa, Zea mays
  misc_feature (81)..(81): Xaa can be any naturally occurring amino acid
  unsure (1)..(234): unsure at all Xaa locations
SDSDHCHSARYYLKDAVLDGGIPFNKAYGMTAFEYHGTDPRFNRVFNEGMKNHSVIITKKLLDFYTGFEGVSTLVDVGGGXVGATLHAITSRHPHISGVNFDLPHVISEAPPFPGVRHVGGDMFASVPAGDAILMKWILHEWSDAHCATLLKNCYDALPENGKVIVVECVLPVNTEATPKAQGVFHVDMIMLAHNPGGKERYEREFRELAKGAGFSGFKATYIYANAWAIEFIK

SEQ ID NO: 15507 - protein, 328 aa, Bacteroides fragilis YCH46
MSNKIIKWGFIGCGEVTKYKSGPAFQKVEGSKVVAVMSRDGKKAKAYAKERDIPKWYDDAQELIDDPEVNAVYIATPPSSHATYAIMSMKAGKPVYIEKPMAQTYEECARINRISQETGVPCFVAYYRRYLPYFMKVKELVDKGTIGNVINVQIRFAQPPRDLDYNRENLPWRVQADIAGGGYFYDLAPHQIDLLQEMFGCILEASGYKSNRGGLYPAEDTLSACFQFDNGLVGSGSWCFVAHDSAREDRIEIIGDKGMICFSVFTYDPIALHTERGREEIVVENPEHVQQPLIQAVVDHLLGKSTCSCDGESATTTNWVMDKILGKI

SEQ ID NO: 15508 - protein, 394 aa, Kineococcus radiotolerans SRS30216
MTDAVRVVWDPKFNGYDFGRWHPMAPVRLDLTARLCREFGLFDRPGVQVVTAEPADDDLLTSVHDPAYVAAVKAASADPRQAQEVFGLGTEDDPAFPGMHEAAARIVGGSVDLGRALVAGDALHGVNFCGGMHHAKPGCASGFCVYNDAAAAVVAMLREGAERVVYVDLDCHHGDGTEQVFWDDPRVLTISVHESGTTLFPGTGFADELGGPGALGGAVNLALPARTGDAGWLRAVHAVVPQLVTAFAPDVLVTQHGCDTHALDPLGHLMVSLDAQRVAAASMHRLAHDAAGGRWLALGGGGYEVVDVVPRTWAHLVAEASGAPIAPGTAVPAPWLAHVRDVFGRDAPAAMTDGQPATFTGWESGYDPDDAVDRAILATRRAAFPLHGLDPDFD

SEQ ID NO: 15509 - protein, 195 aa, Arabidopsis thaliana
  misc_feature (74)..(74): Xaa can be any naturally occurring amino acid
  misc_feature (110)..(110): Xaa can be any naturally occurring amino acid
  unsure (1)..(195): unsure at all Xaa locations
MSLIPSFFGNNRRINNNIFDPFSLDVWDPFKELQFPSNSSSAMLLGHQQAKEQHLAHGSHSAFGIHSRNCNSRXSLSGETAAITNARVDWKETADAHVFKADLDGMKKVXVKVEIEDDSVLKISGERHVEKEEKQDTWHRVERSSGQFSRKFKLPENVKMDQVKASMENGVLTVTVPKVEEAKKKAQVKSIDISG

SEQ ID NO: 15510 - protein, 97 aa, Triticum aestivum
  misc_feature (80)..(80): Xaa can be any naturally occurring amino acid
  unsure (1)..(97): unsure at all Xaa locations
KALHQYDCLRANKATSAWGLEVRVPFLDKEFIDVAMSMDPEWKLYDADLGRIEKWVLRKAFDDEKEPYLPRHILYRQKEXFNDGVGYNWIRRLKRFY

SEQ ID NO: 15511 - protein, 432 aa, Yarrowia lipolytica CLIB122
MSTAAIERENKHSAHNYHPLPVVFTKALGAKVWDPEGKEYLDFLSAYSAVNQGHCHPKIVKALCDQAQKLTLSSRAFHAEIFGEFAEYITNYFGFDKVLPMNTGAEAVETGIKIARKWGYLKKGIPAGEALVLAATENFHGRTLAIVSMSTDNEATDNYGPYLEGVGPFIPDSNGKIDPKTAKPLRYNNIGDVEEAFNNAGSKIAAFLVEPIQGEAGIIVPDKEYLQQVRKLCDKHNVLLICDEIQTGIARTGKLLCFEHSEIRPDMVLLGKAISGGVTPVSAVLADNAVMDVITPGTHGSTYGGNPLACAVAMAALDVVKDEQLVERADRLGNEFRAALEPLIKESNGIVTTVRGKGLLNAIVIDSSKANGRSAWDLCVLMSNKGLLAKPTHENIIRLAPPLVITDEDMKKGLEIIRESVLELPNAPHAAH

SEQ ID NO: 15512 - protein, 190 aa, Escherichia coli
ERPGKINLGIGVYKDETGKTPVLTSVKKAEQYLLENETTKNYLGIDGIPEFGRCTQELLFGKGSALINDKRARTAQTPGGTGALRVAADFLAKNTSVKRVWVSNPSWPNHKSVFNSAGLEVREYAYYDAENHTLDFDALINSLNEAQAGDVVLFHGCCHNPTGIDPTLEQWQTLAQLSVEKGWLPLFDFA

SEQ ID NO: 15513 - protein, 193 aa, Escherichia coli
DERPGKINLGIGVYKDETGKTPVLTSVKKAEQYLLENETTKNYLGIDGIPEFGRCTQELLFGKGSALINDKRARTAQTPGGTGALRVAADFLAKNTSVKRVWVSNPSWPNHKSVFNSAGLEVREYAYYDAENHTLDFDALINSLNEAQAGDVVLFHGCCHNPTGIDPTLEQWQTLAQLSVEKGWLPLFDFAYQ

SEQ ID NO: 15514 - protein, 278 aa, Parmeliopsis ambigua
VEHGDVKVVAVNDPFIEPHYAAYMLKYDSQHGQFKGTIEVKGSDLVVNGQTVKFYTEKDPANIPWKDTGAYYIVESTGVFTTTEKAKAHLKGGAKKVVISAPSADAAMFVMGVNEKEYKSDIEIISNASCTTNCLAPLAKVMHDNYTIIEGLMTTIHSYTATQKTVDGPSSKDWRGGRTAAQNIIPSSTGAAKAVGKVIPSLNGKLTGMSMRVPTSNVSVVDLTCRLEKSVTYDQIKATMKKASEGELKGIMSYSEDALVSTDLNGDNHSCIFDATAG

SEQ ID NO: 15515 - protein, 193 aa, Escherichia coli
RADERPGKINLGIGVYKDETGKTPVLTSVKKAEQYLLENETTKNYLGIDGIPEFGRCTQELLFGKGSALINDKRARTAQTPGGTGALRVAADFLAKNTSVKRVWVSNPSWPNHKSVFNSAGLEVREYAYYDAENHTLDFDALINSLNEAQAGDVVLFHGCCHNPTGIDPTLEQWQTLAQLSVEKGWLPLFDFA

SEQ ID NO: 15516 - protein, 273 aa, Allantoparmelia alpicola
VEHGDVKVVAVNDPFIEPHYAAYMLKYDSQHGQFKGTIEVKGSDLVVNGQTVKFYTEKDPANIPWKDTGAYYIVESTGVFTTTEKAKAHLKGGAKKVVISAPSADAAMFVMGVNEKEYKSDIEIISNASCTTNCLAPLAKVMHDNFTIIEGLMTTIHSYTATQKTVDGPSSKDWRGGRTAAQNIIPSSTGAAKAVGKVIPSLNGKLTGMSMRVPTSNVSVVDLTCRVEKSVTYDQIKETMKKASEGELKGIMAYSEDALVSTDLNGDNHSCIF

SEQ ID NO: 15517 - protein, 192 aa, Escherichia coli
DERPGKINLGIGVYKDETGKTPVLTSVKKAEQYLLENETTKNYLGIDGIPEFGRCTQELLFGKGSALINDKRARTAQTPGGTGALRVAADFLAKNTSVKRVWVSNPSWPNHKSVFNSAGLEVREYAYYDAENHTLDFDALINSLNEAQAGDVVLFHGCCHNPTGIDPTLEQWQTLAQLSVEKGWLPLFDFAY

SEQ ID NO: 15518 - protein, 151 aa, Glycine max
  misc_feature (114)..(114): Xaa can be any naturally occurring amino acid
  unsure (1)..(151): unsure at all Xaa locations
AEMLEKQLASELSKMTLEEALPLARAFSHHLTLMGIAETHHRVRKGGNMVLAAKSCDDIFNNLLQDGVSPVELYKTVFKQEVEIVLTAHPTQINHRTLQYKHLKIAHLLDYNDXPDLSPEDRDMWIEDLVGEKTSIWQTDELRRSKPTPVD

SEQ ID NO: 15519 - protein, 313 aa, Candida glabrata CBS138
MVIGNRVLLPLTKRYYNARYRKVLHPELREEIIAHNCYCEEVNSKLHFDDEKIDPGISLKTAVPSYDKHVMLISDINRGMAKKPGVWKNIWESRIENNTTHPYDIISKLNFGPGVLFNAISITSSLESFAPTSLEFYDFLVMPDMRYYRVKKPDIEKFSQYINSGHAVAPKLSFSDYLSGKAAATTVSNNNQITLSLDDSIYYRELKNDAWLFVCGHEKRDMRCGIMGPEILHSVNTANSKPLVNNTGIISHIGGHKFAGNILIYKPIENQNGRKKVDSLWFGKVTPFNVSEIVQSVNEGVIIENNFRGGLSL

SEQ ID NO: 15520 - protein, 185 aa, uncultured bacterium
GCTSGMDAIGYGHQMIQDGEADIVISGASEPPISPISMACFDPIKATSQRNDDAAHASRPFDRDRDGFVMGEGCGILILEELDAARARGAHIYAEVVGYGTRGNAYHMTGLRPEAFAMTEAILDAMRQAEVKPEDIDYINAHGSGTKQNDRHETNAYKKTLGEHAYQVPISSIKSMVGHSLGAIG

SEQ ID NO: 15521 - protein, 252 aa, Xanthoparmelia semiviridis
VEHGDVKVVAVNDPFIEPHYAAYMLKYDSQHGQFKGTIEVKGSDLVVNGQTVKFYTEKDPANIPWKDTGAYYIVESTGVFTTTEKAKAHLKGGAKKVVISAPSADAAMFVMGVNEKEYKSDIEIISNASCTTNCLAPLAKVMHDNFTIIEGLMTTIHSYTATQKTVDGPSAKDWRGGRTAAQNIIPSSTGAAKAVGKVIPSLNGKLTGMSMRVPTSNVSVVDLTCRLEKSVTYDQIKDRMKKASEGNMKGIM

SEQ ID NO: 15522 - protein, 1207 aa, Arabidopsis thaliana
MEKQRREESSFQQPPWIPQTPMKPFSPICPYTVEDQYHSSQLEESWTEKDVILNVGNTEVMQKGTEEVESLSSVSNNVAEQILKTPEKPKRKKHRPKVRREAKPKREPKPRAPRKSVVTDGQESKTPKRKYVRKKVEVSKDQDATPVESSAAVETSTRPKRLCRRVLDFEAENGENQTNGDIREAGEMESALQEKQLDSGNQELKDCLLSAPSTPKRKRSQGKRKGVQPKKNGSNLEEVDISMAQAAKRRQGPTCCDMNLSGIQYDEQCDYQKMHWLYSPNLQQGGMRYDAICSKVFSGQQHNYVSAFHATCYSSTSQLSANRVLTVEERREGIFQGRQESELNVLSDKIDTPIKKKTTGHARFRNLSSMNKLVEVPEHLTSGYCSKPQQNNKILVDTRVTVSKKKPTKSEKSQTKQKNLLPNLCRFPPSFTGLSPDELWKRRNSIETISELLRLLDINREHSETALVPYTMNSQIVLFGGGAGAIVPVTPVKKPRPRPKVDLDDETDRVWKLLLENINSEGVDGSDEQKAKWWEEERNVFRGRADSFIARMHLVQGDRRFTPWKGSVVDSVVGVFLTQNVSDHLSSSAFMSLASQFPVPFVPSSNFDAGTSSMPSIQITYLDSEETMSSPPDHNHSSVTLKNTQPDEEKDYVPSNETSRSSSEIAISAHESVDKTTDSKEYVDSDRKGSSVEVDKTDEKCRVLNLFPSEDSALTCQHSMVSDAPQNTERAGSSSEIDLEGEYRTSFMKLLQGVQVSLEDSNQVSPNMSPGDCSSEIKGFQSMKEPTKSSVDSSEPGCCSQQDGDVLSCQKPTLKEKGKKVLKEEKKAFDWDCLRREAQARAGIREKTRSTMDTVDWKAIRAADVKEVAETIKSRGMNHKLAERIQYLTLNMKIMQGFLDRLVNDHGSIDLEWLRDVPPDKAKYELHYQMITFGKVFCTKSKPNCNACPMKGECRHFASAFASARLALPSTEKGMGTPDKNPLPLHLPEPFQREQGSEVVQHSEPAKKVTCCEPIIEEPASPEPETAEVSIADIEEAFFEDPEEIPTIRLNMDAFTSNLKKIMEHNKELQDGNMSSALVALTAETASLPMPKLKNISQLRTEHRVYELPDEHPLLAQLEKREPDDPCSYLLAIWTPGETADSIQPSVSTCIFQANGMLCDEETCFSCNSIKETRSQIVRGTILVYQLRRYRLAFGKVHFVLSSFFLF

SEQ ID NO: 15523 - protein, 193 aa, Glycine max
MAPRDSRATAFAGPGPGPSPAHKEIRYRGVRKRPWGRYAAEIRDPGKKTRVWLGTFDTAEEAARAYDTAAREFRGAKAKTNFPTPSELILNNNIRSPSQSSTLDSSSPPSPPPPLDLTLTPLSVAVTVFPVARPVLFFDAFARADAMIAVSRREMCGFERPAADFRRNDSDSDYNRRVLLDLDLNVPPLPEVA

SEQ ID NO: 15524 - protein, 185 aa, uncultured bacterium
GCTSGLDAVAEGAEMIEDGRADVVIAGATDAPISPITVACFDAIKATSPNNDDPAHASRPFDASRDGFVLGEGATVFVLEPADEARRRGARIYCEIAGYAQRSNAYHMTGLKADGLEMAEAIRVAMGRARLAPEDIDHINAHGSGTRQNDRHETAAFKASLGARAYEVPVSSIKSMVGHSLGAIG

SEQ ID NO: 15525 - protein, 483 aa, Buchnera aphidicola str. APS (Acyrthosiphon pisum)
MQKNLIWFRNDLRVYDNTALHQACQNDTDKVISLFISTPKQWHNQSVSKKKISFMYYHLISLQKELLKLNIILYYHESTDFLNSIEYLIFFCKKHKVNNLFYNYEYAINERYRDYLVKKKLSQKGFLVKGFHDNLLFSNRQIRNQKNETYKVFTFFKKKVIQNLHNNIPQCFPVPSKRKSDRDIFLTSISLKNVNLNFNKNFFPVGEKEAINRLKNFCIYKFNDYFLKRDYPFLDATSMLSPYLSAGIISSRYCLKVLLKTKNSLPLNVLLTSPWFDQILWREFYYHLLIGFPKISRSESLVTWEKEIHWINNIKHFNAWKEGNTGFPIIDAGMRQLNELGWMHNRLRMITSSFLVKNLLINWREGEEHFISNLIDGDLALNNGGWQWSASVGCDSVPYIRIFNPLHQSKTFDESGNFIKKFIPELKNVPNHHIHQPHEWSKQKNFKIDYPNPIINYSESRKTSLSLFKQARLKLHKNGLKNS

SEQ ID NO: 15526 - protein, 680 aa, Saccharomyces cerevisiae
MYSWKSKFKFGKSKEEKEAKHSGFFHSSKKEEQQNNQATAGEHDASITRSSLDRKGTINPSNSSVVPVRVSYDASSSTSTVRDSNGGNSENTNSSQNLDETANIGSTGTPNDATSSSGMMTIKVYNGDDFILPFPITSSEQILNKLLASGVPPPHKEISKEVDALIAQLSRVQIKNQGPADEDLISSESAAKFIPSTIMLLGSSTLNPLLYFTIEFDNTVATIEAETGTIAKPGFNKISTFDVTRKLPYLKIDVFARIPSILLPSKTWQQEMGLQDEKLQTIFDKINSNQDIHLDSFHLPINLSFDSAASIRLYNHHWITLDNGLGKINISIDYKPSRNKPLSIDDFDLLKVIGKGSFGKVMQVRKKDTQKVYALKAIRKSYIVSKSEVTHTLAERTVLARVDCPFIVPLKFSFQSPEKLYFVLAFINGGELFYHLQKEGRFDLSRARFYTAELLCALDNLHKLDVVYRDLKPENILLDYQGHIALCDFGLCKLNMKDDDKTDTFCGTPEYLAPELLLGLGYTKAVDWWTLGVLLYEMLTGLPPYYDEDVPKIYKKILQEPLVFPDGFDRDAKDLLIGLLSRDPTRRLGYNGADEIRNHPFFSQLSWKRLLMKGYIPPYKPAVSNSMDTSNFDEEFTREKPIDSVVDEYLSESVQKQFGGWTYVGNEQLGSSMVQGRSIR

SEQ ID NO: 15527 - protein, 102 aa, Arabidopsis thaliana
MKLSMRLISAVLLLFMIFVATGMGPVTVEARTCESKSHRFKGPCGSSTNCGNVCHNEGFGGGKCAGFRAGGYCTRHGGSIDRFLYLKSTISQVGGGPLYKIS

SEQ ID NO: 15528 - protein, 178 aa, Eucalyptus globulus
TTSADEGQFLNMLLKLINAKNTMEIGVYTGYSLLATALALPDDGKILAMDINRENFEIGLPVIQKAGLAHKIDFREGPALPLLDQLVQDEKNHGTYDFIFVDADKDNYINYHTRLIDLVKVGGLIGYDNTLWNGSVVAPADAPLRKYVRYYRDFVLELNKALAVDPRIEICMLPVGDG

SEQ ID NO: 15529 - protein, 262 aa, Karoowia sp. Feuerer and Thell 63322a
VEHGDVKVVALNDPFIEPHYAAYMLKYDSQHGQFKGTIEVKGSDLIVNGQTVKFYTEKDPGNIPWKDTGAYYIVESTGVFTTTEKAKAHLKGGAKKVVISAPSADAAMFVMGVNEKEYKSDIEIISNASCTTNCLAPLAKVMHDNFTIIEGLMTTIHSYTATQKTVDGPSAKDWRGGRTAAQNIIPSSTGAAKAVGKVIPSLNGKLTGMAMRVPTSNVSVVDLTCRLEKSVTYDQIKETMKKASEGDLKGIMSYSEDALVST

SEQ ID NO: 15530 - protein, 627 aa, Sinorhizobium sp. BR816
MLSIPPHDIEARLAEHDNKSILRFITCGSVDDGKSTLIGRLLYDAKLIFEDQLANLGRVGVANGEEIDLSLLLDGLEAEREQGITIDVAYRYFATSKRKFIVADTPGHEEYTRNMVTGASTADLAVILIDGRQGILQQTRRHSCIASLLGIRHVVLAVNKIDLVDFRQQVFDEIVADYLAFARELGFASIRPIPISARYGDNVVSASANTSWYKGPALLEYLETVQVDPPTQEKPFRFPVQLVLRPNADFRGYAGQAASGHVTVGDPVVVAKSGQRTTVKAIVTYDGNLERAGEGEAVTLVLADEVDASRGNMLVAPAARRFVADQFQAHVIWFDASPMFPGRSYILRTETDSVSATVTTLKHQVNVNSFAREAAKSLQMNEVGVCNISTQVPIAFDAYKDNRATGNFIIVDRVTNATVGAGLIDFPLRRADNVHWQAFEVNKAARSAMKSQRATVLWFTGLSGSGKSTIGNALDRILHARGKHTYLLDGDNVRHGLNRDLGFTEEDRVENIRRVAEVAKLMADAGLIVLVSFISPFRDERRMARELMDEGEFIEIFVDTPIEECARRDPKGLYEKALAGKIANFTGVSSPYEVPESPELHLKTVEVDPVALALKIEEFLDQRMEEK

SEQ ID NO: 15531 - protein, 185 aa, uncultured bacterium
GCTSGLDAVAEGAEMIEDGRADVVIAGATDAPISPITVACFDAIKATSPNNDDPTHASRPFDASRDGFVLGEGATVFVLEPADEARRRGAHIYCEIAGYAQRSNAYHMTGLKADGLEMAEAIRVAMGRARLAPEDIDYINAHGSGTRQNDRHETAAFKASLGARAYEVPVSSIKSMVGHSLGAIG

SEQ ID NO: 15532 - protein, 122 aa, Arabidopsis thaliana
PGVEHVAGDMFVDVPTGDAMILKRILHDWTDEDCVKILKNCWKSLPESGKVVVIELVTPDEAENGDINANIAFDMDMLMFTQCSGGKERSRAEFEALAAASGFTHCKFVCQAYHCWIIEFCK

SEQ ID NO: 15533 - protein, 226 aa, Xanthomonas axonopodis pv. citri str. 306
MESLLEGFRHFRKEVYPRQSARFQELAGGQSPHTLFITCADSRVMPELIFSAQPGELFVYRNIGNVVPPYSQHVSGVVAAIEYAIAVLGVRHIVICGHTDCGAMKAVLKPESLEDVPSVAAWLKHTDAARHVTAHHGHDPQSPDALNCMTEENVVSQLDHLRTQPVVAARLAAGTLRIHGWIYDIAHGEIRAFDAEKGGFRPLLAESTPEATPRPRLQQVVRAELA

SEQ ID NO: 15534 - protein, 185 aa, uncultured bacterium
GCTSGMDAVADGAELIEDGRADVVIAGATDAPISPITVACFDAIKATSPNNDDPAHASRPFDISRDGFVLGEGAAVFVLEPADQARRRRAHIYCEIAGYAQRSNAYHMTGLTADGLEMAEAIRVAMGRARLVPEDIGYINAHGSGTCQNDRHETAAFKASLGARAYGIPVSSIKSMVGHSLGAIG

SEQ ID NO: 15535 - protein, 247 aa, Eucalyptus globulus
MAANAEPQQTQPAKHSEVGHKSLLQSDALYQYILETSVYPREPESMKELREITAKHPWNLMTTSADEGQFLNMLLKLINAKNTMEIGVYTGYSLLATALALPDDGKILAMDINRENFEIGLPVIEKAGLAHKIDFREGPALPLLDQLVQDEKNHGTYDFIFVDADKDNYINYHKRLIDLVKVGGLIGYDNTLWNGSVVAPADAPLRKYVRYYRDFVLELNKALAVDPRVEICMLPVGDGITLCRRVS

SEQ ID NO: 15536 - protein, 231 aa, Buchnera aphidicola str. APS (Acyrthosiphon pisum)
MKINQVVLIRHGQSEWNTLNKFTGWHDAELDKKGKDEAKFAAILLKKEKFFFDCAHTSLLKRAIHTLQYILDELNQTWLSVKKSWRLNERHYGALEGLNKDEVIEKYGQKQVLLWRRSFDISPPQINIKDKRFPGNDPRYSHLNIHDIPLGESLEKTAKRVIPYWNKIVYPELKNNKKILIVAHGNSLRALIQHLYKIDNKAILDLNIPTAQPIILDFDNEKNPIKWHYLT

SEQ ID NO: 15537 - protein, 263 aa, Buchnera aphidicola str. APS (Acyrthosiphon pisum)
MNIYRKKNIIKKCFMEFFGTGLVMFFGIGCLAASKLTNANFTQFEISCIWGFGVSIAIYFSSSISGAHLNPAVTIFFWLSSKLNKRKVLPYIISQTLGSFFFTMLTYYLYNNLLISFERNNNVVRGTQESLNLASIFCVYPNYNNSFIYDFIIEIFSTALFILIVLEFNNRNSNYFLYNRSVAPILTGFLVCMINLVINPLNNISLNPARDLGPKILLSLTGWGLFSFTGGNDNILYCFIPIMGPILGANLGGWIHKTLINNS

SEQ ID NO: 15538 - protein, 702 aa, Coprinopsis cinerea
MDCVLTRSRGPGCDCLRCFRDRRYPKKEDTVPVLLALQAGGADIIELGIPFSDPIADGPVIQEANTVALKNDIDYPTVLGQIREARQQGLTAPVLLMGYYNPMLAYGEDKAIQDAAEAGANGFIMVDLPPEEAIAFRQKCAASNLSYVPLIAPSTTLKRIQFLASIADSFIYVVSKMGTTGSSANVAVNEELPTILSRIREYTHVPLAVEFGVATRDQFNYVADAGADGVVVIGSRIVNAIKAAGEGQVPQFVENYCREVSGKGEPSRVRSPGAAQRTPSQLTPNAETAKGVENILPARFGQFGGQYVPESLVDALAELEEAHKSAIEDPAFWEEVRSLYTYSNRPSNLYLAENLTKEAGGANIWLKREDLNHTGSHKINNALGQILLAKRIGKTRIIAETGAGQHGVATATVCAKFGLECVIYMGAEDVRRQALKLFRIEMLGGKAWVIPVHSGSCTLKDAVNEAMRDWVTNLSTTHYLVGSAIGPHPFPTIVRDFQKVIGEEIKAQLKEVRGKLPDVVVACVGGGSNAIGTFYDFIPDKSVRLVGVEAGGEGIDGHKHSATLSMGQPGVLHGVRTYILQDKAGQIIETHSISAGLDYPGVGPEHAWLKDSGRADYVVCTDEDALRGFRMLTQKEGIIPALESSHAIWEGVKIAKSLPKDKDIVICLSGRGDKDVEQISELLPKWADKLDWHVSSNAIPSK

SEQ ID NO: 15539 - protein, 169 aa, Streptococcus pyogenes MGAS10394
MERAIFAGGCFWCMVQPFEEQAGILSVRSGYTGGHLPNPSYEQVCAKTTGHTEAVEIIFDPEEISYKELVELYWAQTDPTDAFGQFEDRGDNYRPVIYYTTERQKEIAEQSKANLQASGRFDQPIVTTIEPAEPFYLAEDYHQGFYKKNPKRYAQSSAIRHQFLEENWS

SEQ ID NO: 15540 - protein, 341 aa, Zea mays
MWARFLFFVLSRSPPSQSCVFVTPQLRPSRGPRGPTLGGFTQCTMAFSSSLPPFFPPSGTFRAHPARRLRADAPGRFVASCLPPPDVVVTREQGKNARLISALEKHNVHPLELPLIKHVEGPDTDRLSDVLRNDKFDWIIVTSPEAAAVFLQGWKVAGSPKVRVAVVGEGTARVFHEVSESDDQSLELAFSPSKALGRVLASELPRSNGNSCKVLYPASAKAGHEIEDVLSERGFDVTRLNTYTTVPVEDVDPLTLNLAISAPVVAVASPSALRAWLNLISKSDNWNNSVACIGETTASAAKKQGLKSIYYPTTPGLEGWVESILEALRVHRTASKEAPKR

SEQ ID NO: 15541 - protein, 547 aa, Lactobacillus plantarum WCFS1
MKLSEQVIYQIYPKSFYDSNGDGVGDLRGVIEKIDYLKKLNIDMIWFNPFFVSPQNDNGYDIADYYHIDPMFGTMADFEELVAKLKANGIGVMLDMVLNHTSTEHEWFQKALAGDEKYQKFYYLRPPKADGSLPTNWESKFGGPAWAPFGDTGLYYLHLYDPTQADLDWHNPAVRQACAAVVNFWRQKGVQGFRFDVINVTGKAEKLVDAPKGVPSKTLYTDTPVVHDYLKELNAASFGQDVNSVTVGEMSSTTVANSVGYTNPANHELSMVFNFHHLKTDYVDGRKWSRMAFDFPRLKQLLDSWASGMAAGGGWQALFWNNHDQPRALNRFGDAGRYRVKSAEMLATVIHLLRGTPFIYMGEELGMTDPDYDNMADYVDIEALNAYRALIRSGYSHHDAFTIVKTKARDNSRTPMQWDDSAKAGFTTGKPWLTPTNQATINVAHELASGEIFDYYQRLIKLRKTMPIVADGGYQSWRLDDPQVFGYWRTYRQQKLLVLNNFYGQSTTVTLPEEMVGAQVLLSNYQDVNVTAQLTMQPYQAVALLLG

SEQ ID NO: 15542 - protein, 135 aa, Zea mays
MAGLQRSATTFRRSGSSGLVWDERFLTEADAEAKAGAAEDAQQPELRHSRSVGMLRRAGGGGDSRSTKGKESRQKQAESARRSNQQVFRTKDVAPDMDPPSPRVSCCAFCAVFRGGSGGTGRRAQARRRSKPRKK

SEQ ID NO: 15543 - protein, 483 aa, Propionibacterium acnes KPA171202
MPIDPSKPSTNTNGSPAPSDEYSLTVGADGPVVLHDAHLIDTLAHFNRENIPERKPHAKGSGAFGHLEVTADVSEYTKASFLQKGRETPMLARFSTVAGELGSPDTWRDVRGFSLKFYTDEGNFDMVGNNTPVFFMRDPMKFPHFIRSQKRLPNSGLRSPNMMYDYWSLSPESAHQVAYLMGPRGIPLSYRTMNGYSSHTYSWVNAEGKITWVKYHFISDQGVHNMTADRAKAIVGDHPDIHREDLFNHIADGDYPSWTVKVQLMPYDEAKDYRFNPFDITKVWPHKDYPLHTIGKFTLDRNPENFFAQIEQAAFSPSNTVEGTGLSPDRMLLGRVFAYNDAARNRLGVNYEQLPVNRPTTPTNQYTFDGQMAFEHSGSAPTYAPNSYGRDFATGYRTGSEATWEADGELVRSAQTRHAEDDDFGQAHALVHDVFSDAERDELVDTLVDLMTNFDMEEPVIGNALSYWRNIDAGIAEATEGRI

SEQ ID NO: 15544 - protein, 226 aa, Xanthomonas campestris pv. vesicatoria str. 85-10
MESLLEGFRHFRKEVYPRQSARFQELAGGQSPHTLFITCADSRVMPELIFSAQPGELFVYRNIGNVVPPYSQHVSGVVAAIEYAIAVLGVRHIVICGHTDCGAMKAVLKPESLEDVPSVAAWLKHTDAARHVTAHHGHDPQSHEALSCMTEENVVSQLDHLRTQPVVAARLAAGTLRIHGWIYDIAHGEIRAFDAEKGGFRPLLAESTPEATPRPRLQQVVRAELA

SEQ ID NO: 15545 - protein, 279 aa, Zea mays
MSGLYSQGFSPARNLSPQIRSNPDVDSQYLAELLAEHQKLGPFMQVLPICNKLLSQEIMRVSSIVHNHGFGDHDRHRFRSPSPMSSPNPRANLPGNGFSPWSGLQERLGFPQRASMDWQGAPPSPSTQVVKKILRLEVPVDSYPNFNFVGRILGPRGNSLKRVEASTGCRVFIRGNGSIKDPGKEDKLRGKPGYEHLSDPLHILIEAEFPASIIDARLRHAQEIIEELLKPVDESQDFYKRQQLRELALLNSTLREDSPHPGSVSPFSNGGMKRAKTGQ

SEQ ID NO: 15546 - protein, 211 aa, Chromobacterium violaceum ATCC 12472
MNHKTWIFDLDDTLHHASGGIFDHINKLMTEYMMRQLGVDEAEACALRSRYWAQYGATMHGLSTHHGIDPQQFLIETHPVEVLEQWLQFEDRLAENLSALPGRKIILSNGPQHYVEGILQRMRIQHHFESVYGVERLNYVPKPHLDAFQTVLAREGLNPAHCIMVEDSLPNLLTAKELGMTTIWVSREPRKPAHVDHRVEKISQLLRLHLD

SEQ ID NO: 15547 - protein, 544 aa, ASPERGILLUS NIDULANS FGSC A4
MRSAAKFFYLAVFGFMSQANADKHGEKSMHGYDTCACVRFGPNLKEYSEEDIPLTWRAEELSKLEGPKAGHPGRQQQHERPRDKPLQGMLGEDVGESCVVEYDDECDERDYCVPEDEGSSGKGDYVSLVDNPERFTGYAGAGANQVWDAIYRENCFLKPVPELEQSSFTPLGGLQAIQDFQNVLQKESKRPDLLPLDNECVEKRVFHRLISGMHASISTHLCWDYLNQTTGQWHPNLQCFKERLHNHPERISNLYFNYALVARAVSKLRKHLEGYTYCLGDPAQDQDTKEKISLLTSTLAERPQIFDENVMFQDPGAIDLKEDFRNRFRNVSRLMDCVGCDKCRLWGKLQVNGYGTALKVLFEYDETKNGENPPLRRTELVALINTLGRISHSIAAVRSFHRAMEVTDGQVFAIPAGSTAGQSRAGGKKVRRLVKNGGSTFYYEDDTAEDYQYISQQRPWERQRVKREGDTIIDDFKAEFSVVWDTLIFVLKSWVNIPWTFWEIGVLEANRLWSYWLGLPVPPRAWRIQLPQRPPPPIVVRDEL

SEQ ID NO: 15548 - protein, 260 aa, Glycine max; identical to SEQ ID NO: 869

SEQ ID NO: 15549 - protein, 381 aa, Lactobacillus acidophilus NCFM
MSTEMLGLILAGGKGTRLGKLTSDQAKPAVPFGGRYRIIDFTLSNCANSGVKNIGIITQYQPLLLNEHIGNGVSWGLDGLNASATILQPYTDNSGSKWFEGTAHAIYQNIDYIDSKDPEYVLILSGDHIYKMDYESMLEEHIKNGASLTVAVIDVPMKEASRFGIMNTDVSGRITEFEEKPEHPKSNHASMGIYIFNWKRLREVLTTGFTTNDDMVDFGKNVIPYYLKSDERVFAYHFSGYWKDVGTIDSLWAANMEFLDGSDGLNLYDRSWRIYSKNPIDPAQVITENAEVNNSMIVDGCYVDGTINHSILSTDVDVQRGSEITDSVIMPGVKIGKDVVIKHAIVGENAQIGDGAVVEGNKDNIKVIGNSERIGVLPNED

SEQ ID NO: 15550 - protein, 476 aa, Lactobacillus acidophilus NCFM
MRVLFTGAECAPFFKTGGLGDVLGSLPNQLAKEGVDVGVVLPLYQDLPEKYRKNLKYQGNFIVPVGWRNQYCGIFTLKLNGVNYFFIDNEYYFKRPGIYGYYDDGERYAYFQQAVIMMMERFDFIPDVLHCNDYHTAFIPFLLHEKWGFVDAYKGIKTILTIHNLEFQGKYNAKTLPDFFGMNYDWFDSGIVRMDNDVNWMKTGILYADRVTTVSPSYAREIQTVEFGQGLDAILRMCSHKLTGILNGIDFEKYNPKTDPVIKKNYDVYHLHHKSKDKIALQKELDLPIKPNIPLIGMVSRLTAQKGCQLLLDELDNILQFNVQIVILGNGDPYYEHRLMEIAERYPDKLKVILAFDVKLAQRIYAGADSFLMPSAFEPCGLSQLIALRYGTLPIVHEIGGLADTVWVYDETTNEGTGFGFKEFSGYQMVQAIKKMLALYQQKNNWLKIQKIAMKSDFSWKNSADKYKWMYGELIG

SEQ ID NO: 15551 - protein, 369 aa, Cryptococcus neoformans var. neoformans JEC21
MSDDAADVDACAIDNSESHFGLRIGSIFIILVTSVIGTVLPIILRQSSFVPRPVFDFAKYFGSGVIIATAFIHLLAPAWEELTSECLSGAWEDYDWAPAIVMAAVYFIFFAEVAAYRAGTRRLQRLGINYSSHAHDETDAHAHTHDHEPPLGVDVTAPAPDHHIHPDHSNITSHPHGHHRTSSGEKGKDAESASDVSTVNQLPSQAEAAAQLIAVAVLEFGVVLHSVIIGLTLAVDESFVTLFIVIIFHQMFEGLGLGSRLSILTLPENLWWTRYAAAIFYSLCTPVGVAIGLGVRSTYNGNGAKANIISGVLDATSAGILLYTGLVELLAHEVLLNPRMMKSSNSKLAYVFCCMLLGSGLMALLGRWA

SEQ ID NO: 15552 - protein, 189 aa, Escherichia coli
RPGKINLGIGVYKDETGKTPVLTSVKKAEQYLLENETTKNYLGIDGIPEFGRCTQELLFGKGSALINDKRARTAQTPGGTGALRVAADFLAKNTSVKRVWVSNPSWPNHKSVFNSAGLEVREYAYYDAENHTLDFDALINSLNEAQAGDVVLFHGCCHNPTGIDPTLEQWQTLAQLSVEKGWLPLFDFA

SEQ ID NO: 15553 - protein, 373 aa, Sclerotinia sclerotiorum
MAETTTAAAEERQFVAHFSQKQHVSSPKEIQQNSRDKELGASSGSLSVRDFELVRTLGTGTFARVWLARLANPAEEDRDKVFALKVLRKVEVIKLKQVDHVNHERSVLADVAGHPFITTLITSFADHDSLYMLLDYCPGGEVFSYLRKAKRFDENTARFYAAEIVLILEFLHEREGVAYRDMKPENLLLDAEGHIKLVDFGFAKRLGNRETYTLCGTPEYLAPEVIQSKGHTTAVDWWALGILIYEFLTGYPPFWHSNPIEIYKQIVTKPVSFPAEPAISSAAKDIIRQFCTVDRSHRLGNISGGAARVKDHPFFQGVIWEDVYYRKYRGPIIPPLRYPGDAQNFDLYPDEKEGREPYTEELAAKWDDCFKEF

SEQ ID NO: 15554 - protein, 677 aa, Saccharomyces cerevisiae
MHSWRISKFKLGRSKEDDGSSEDENEKSWGNGLFHFHHGEKHHDGSPKNHNHEHEHHIRKINTNETLPSSLSSPKLRNDASFKNPSGIGNDNSKASERKASQSSTETQGPSSESGLMTVKVYSGKDFTLPFPITSNSTILQKLLSSGILTSSSNDASEVAAIMRQLPRYKRVDQDSAGEGLIDRAFATKFIPSSILLPGSTNSSPLLYFTIEFDNSITTISPDMGTMEQPVFNKISTFDVTRKLRFLKIDVFARIPSLLLPSKNWQQEIGEQDEVLKEILKKINTNQDIHLDSFHLPLNLKIDSAAQIRLYNHHWISLERGYGKLNITVDYKPSKNKPLSIDDFDLLKVIGKGSFGKVMQVRKKDTQKIYALKALRKAYIVSKCEVTHTLAERTVLARVDCPFIVPLKFSFQSPEKLYLVLAFINGGELFYHLQHEGRFSLARSRFYIAELLCALDSLHKLDVIYRDLKPENILLDYQGHIALCDFGLCKLNMKDNDKTDTFCGTPEYLAPEILLGCGYTKTVDWWTLGILLYEMMTGLPPYYDENVPVMYKKILQQPLLFPDGFDPAAKDLLIGLLSRDPSRRLGVNGTDEIRNHPFFKDISWKKLLLKGYIPPYKPIVKSEIDTANFDQEFTKEKPIDSVVDEYLSASIQKQFGGWTYIGDEQLGDSPSQGRSIS

SEQ ID NO: 15555 - protein, 439 aa, Glycine max
MASVSKLSTPNPLASLSEALRPRDSRFLTFKPSSIAFNHKTNLSASLRSIHSLPLKTSLRIKCSQTDGNGSPAKRTVLHDLYEKEGQSPWYDNLCRPVTDLLPLIASGVRGVTSNPAIFQKAISSSNAYNDQFRELVQTGKDIESAYWELVVKDIQDACRLFEPIYDQTDGGDGYVSVEVSPRLADDTEGTIEAAKWLHKVVDRPNVYIKIPATEACVPSIKEVIANGISVNVTLIFSLARYEAVIDAYLDGLEASELNDLSRVTSVASFFVSRVDTLIDKALEKIGTPVALNLRGKAAVAQAALAYQLYQRKFSGPRWEALVKKGAKKQRLLWASTSVKNPAYSDTLYVAPLIGPDTVSTMPDQALQAFIDHGTVSRTIDSNASEAEGIYNALQKLGIDWSFVGSQLELEGVDSFKKSFDSLLDSLQEKANSLKLVSH

SEQ ID NO: 15556 - protein, 403 aa, Arabidopsis thaliana
MATTISNLPRELIEEILSRVPLRAMKAMRLTCKSWNNLSKSESFMKMHIGKAATREEKTMMVAVMPHTLALVSVVVDGVNPSTELKGQFSFLDKEFFIYRVIHYEGLLLCILKDATRIVVWNPYLGQERWIQIRYSHRPHGVDHFKYAVGYADKVSCRSVKLLRFLDYFHKASDKPFFWYEIYDFDSCLWTTLDITPHWGISWTYPRVSLKGNTYWPAREMNTKGFQDHIICFDFTSERFGPLLPLPRAQGCHVSLSCVKEEKLAVLLKHRLHHDSYEYEFEIWITTKIDVEMVSWSKFLRMDMRPKIKLPLSFYVDEEKKVFMGFDHGEYPKLFLNIIGETGFLRKLDLGVHEGHRSPCSYVPSLVQIKHPAGDKMIKQSSLEDRRFAQNSLRLAAIEKLIN

SEQ ID NO: 15557 - protein, 193 aa, Escherichia coli
ERPGKINLGIGVYKDETGKTPVLTSVKKAEQYLLENETTKNYLGIDGIPEFGRCTQELLFGKGSALINDKRARTAQTPGGTGALRVAADFLAKNTSVKRVWVSNPSWPNHKSVFNSAGLEVREYAYYDAENHTLDFDALINSLNEAQAGDVVLFHGCCHNPTGIDPTLEQWQTLAQLSVEKGWLPLFDFAYQG

SEQ ID NO: 15558 - protein, 192 aa, Oryza sativa
PDQQRLIFPGKQLEDGRTLSDYNIQKESTLHLVLRLRGGMQIFVKTLTGKTITLGVESSDTIDNVKAKIQDKEGIPPDQQRLIFAGKQLEDGRTLSDYNIQKESTLHLVLRLRGGMQIFVKTLTGKTITLEVESSDTIDNVKAKIQDKEGIPPDQQRLIFAGKQLEDGRTLSDYNIQKESTLHLVLGLRGGH

SEQ ID NO: 15559 - protein, 195 aa, Escherichia coli
ADERPGKINLGIGVYKDETGKTPVLTSVKKAEQYLLENETTKNYLGIDGIPEFGRCTQELLFGKGSALINDKRARTAQTPGGTGALRVAADFLAKNTSVKRVWVSNPSWPNHKSVFNSAGLEVREYAYYDAENHTLDFDALINSLNEAQAGDVVLFHGCCHNPTGIDPTLEQWQTLAQLSVEKGWLPLFDFAYQG

SEQ ID NO: 15560 - protein, 466 aa, Escherichia coli
MGQSSQPHELGGGLKSRHVTMLSIAGVIGASLFVGSSVAIAEAGPAVLLAYLFAGLLVVMIMRMLAEMAVARPDTGSFSTYADKAIGRWAGYTIGWLYWWFWVLVIPLEANIAAMILHSWVPGIPIWLFSLVITLALTGSNLLSVKNYGEFEFWLALCKVIAILAFIFLGAVAISGFYPYAEVSGISRLWDSGGFMPNGFGAVLSAMLITMFSFMGAEIVTIAAAESDTPEKHIVRATNSVIWRISIFYLCSIFVVVALIPWNMPGLKAVGSYRSVLELLNIPHAKLIMDCVILLSVTSCLNSALYTASRMLYSLSRRGDAPAVMGKINRSKTPYVAVLLSTGAAFLTVVVNYYAPAKVFKFLIDSSGAIALLVYLVIAVSQLRIGKILRAEGSEIRLRMWLYPWLTWLVIGFITFVLVVMLFRPAQQLEVISTGLLAIGIICTVPIMARWKKLVLWQKTPVHNTR

SEQ ID NO: 15561 - protein, 176 aa, Triticum aestivum
  misc_feature (114)..(114): Xaa can be any naturally occurring amino acid
  misc_feature (135)..(135): Xaa can be any naturally occurring amino acid
  unsure (1)..(176): unsure at all Xaa locations
GFDTIELNAGSLKLPEEAILRLVRLIKNNGLRAKPLFSVKFDSSDIPAAGDRAFGAYIAPVKQSSERVEDIDLLIRRAERCLEAGADMIMIDTDDVCQRADSLRADVIAKIVAXLGLERTMFETSGANTSEWFVXRYGPRVNLFADHSEVMNLERLRGLDVRRSVRPLLPSPFFLM

SEQ ID NO: 15562 - protein, 185 aa, uncultured bacterium
  misc_feature (109)..(109): Xaa can be any naturally occurring amino acid
  misc_feature (141)..(141): Xaa can be any naturally occurring amino acid
  unsure (1)..(185): unsure at all Xaa locations
GCTSGLDVVAEGAEMIEDGRADVVIAGATDAPISPITVACFDAIKATSPNNDDPAHASRPFDASRDGFVLGEGATVFVLEPADEARRRGAHIYCEIAGYAQRSNAYHMXGLKADGLEMAEAIRVAMGRARLAPEDIDYINXHGSGTRQNDRHETAAFKASLGARAYQVPVSSIKSMVGHSLGAIG

SEQ ID NO: 15563 - protein, 220 aa, Glycine max
MESMESCVPPGFRFHPTDEELVGYYLRKKVASQKIDLDVIREIDLYRIEPWDLQERCRIGYEEQNEWYFFSHKDKKYPTGTRTNRATMAGFWKATGRDKAVYERAKLIGMRKTLVFYKGRAPNGQKSDWIMHEYRLESDENGPPQEEGWVVCRAFKKKTTGQTKTINIEGWESSYFYDEASGATSTLVDPIELISRQSQSFLAHNFMCKQELEADNLTCM

SEQ ID NO: 15564 - protein, 185 aa, uncultured bacterium
  misc_feature (169)..(169): Xaa can be any naturally occurring amino acid
  unsure (1)..(185): unsure at all Xaa locations
GCTSGLDAVAEGAEMIEDGRADVVIAGATDAPISPITVACFDAIKATSPNNDDPAHASRPFDASRDGFVLGEGATVFVLEPADEARRRGAHIYCEIAGYAQRSNAYHMTGLKADGLEMAEAIRVAMGRARLAPEDIDYINAHGSGTRQNDRHETAAFKASLSARAYEVXVSSIKSMVGHSLGAIG

SEQ ID NO: 15565 - protein, 315 aa, Bacillus clausii KSM-K16
MDVVSIGETMVLFASKEDGQLRYASNFSARVAGAETNTLIGLAKLGHKTGWISRVGADELGAKIIQSVRGEGVDTTYVAMDEQAPTGLFLKEQTTVKTANILYYRKGSAASRLEPADINEDYVKNAKFLYLTGITPLLSKSCEQTTFVLIEMAKKHHVKIVFDPNIRKKLLTEEKQKHLLERLIGTADIVLPGYGEGHYLFGTNNSEEIADRCLQLGAQLTVVKLGEKGAYYKSTDQSGYVAPIPVKEVVDPIGAGDGFAAGVLSGLLDGLAIKEAVGRGCAIGAFVTQVHGDIEGLPSRQTLHAFQQNREDVNR

SEQ ID NO: 15566 - protein, 105 aa, Glycine max
  misc_feature (52)..(52): Xaa can be any naturally occurring amino acid
  misc_feature (90)..(90): Xaa can be any naturally occurring amino acid
  unsure (1)..(105): unsure at all Xaa locations
MEFPNEAIISEGSNSQKKTGRGKIEIKRIENTTNRQVTFCKRRNGLLKKAYXELSVLCDAEVALVVFSSRGRLYEYANNSVRGTIERYKXKACAASTNAESVSEA

SEQ ID NO: 15567 - protein, 357 aa, Arabidopsis thaliana
  misc_feature (159)..(159): Xaa can be any naturally occurring amino acid
  unsure (1)..(357): unsure at all Xaa locations
MVQTETDQRMGLNLNLSIYSLPKPLSQFLDEVSRIKDNHSKLSEIDGYVGKLEEERNKIDVFKRELPLCMLLLNEAIGALKDEARKGLSLMASNGKFDDVERAKPETDKKSWMSSAQLWISNPNSQFRSTNEEEEDRCVSQNPFQTCNYPNQGGVFMPXFNRPPPPPPPAPLSLMTPTSEMMMDYSRIEQSHHHHQFNKPSSQSHHIQKKEQRRRWSQELHRKFVDALHRLGGPQVATPKQIRDLMKVDGLTNDEVKSHLQKYRMHIRKHPLHPTKTLSSSDQPGVLERESQSLISLSRSDSPQIPLVARGLFSSNVGHSSEEDEEEEDEEEEKSDGRSSCRNDETKKKRQVLDLEL

SEQ ID NO: 15568 - protein, 414 aa, Magnetospirillum magnetotacticum MS-1
MLERVTPAVVNISVVSETPATSNPLYNDPYFRRFFDLPEAPPARQRMSAGSGVIVDAAKGHVLTNHHVVANAREITVTLKDGRRLRAELVGSDQATDIALLKVESSNLVALEVGDSDRLKVGDYVVAIGNPFGLGQTVTSGIVSALGRSGISNEGYEDFIQTDASINPGNSGGALVTLDGRLVGINTAILSPAGGNIGIGFAVPSSMAVSVMNQLIEHGEIRRGKLGVGIQDLTPDLAEALKLGELRGAVIANIEPGSPAERAGLQVGDVVTTVDGRPVHGATDLRNRIGLTPAGTAIRLAIKRGDAEQTVSVTIAAETGISADLSGTPLDGARMRNASRSEAQQAGADGIVIESILPSSPAARAGLRAGDVIVAVNRSPVSSVAELRSAVAGQRTILALELIRDGGRFLLVVR

SEQ ID NO: 15569 - protein, 72 aa, Pteris vittata
LIKVAEAEGKTAGGVLLTDSAKEKPVIGTVSAVGPGPYAEDGTRKPLDIAVGNSVMYSKYAGSDFKSSDGTQ

SEQ ID NO: 15570 - protein, 480 aa, Buchnera aphidicola str. APS (Acyrthosiphon pisum)
MLNRLRRTKIVATLGPSTDINNNLEKIIRSGVNVLRFNFSHGSKDEHKSRANQAREIMTRLNFHIALLGDLQGPKIRISKFIKNNIFLNVGDFFILDANLDQNNGNQERVGIDYKQLPYDLKVGDVLLLDDGRIQLKVIKSTGHEILTKVVIGGILSNNKGINKLGGGLSADALTEKDKKDIILATEINVDYLAISFPRCSNDLKQARKLAKEFGSNAKIIAKIERAEAVLNQNTIEDIILASDAIMIARGDLGVEIGDSELAGIQKKLIRTARQLNRIVITATQMMESMITNPLPTRAEVMDVANAVLDGSDAVMLSAETASGEYPAETVIKMAKICKGAEKVPSINVSRHRIHAKFDDIEEAIAMSAMYVANHLKGITAIITMTESGKTALMTSRITSGLPIFALSKNKETLNLASLYRGVTPIYFNSKNNNFKAANEAIVLLRKRGFLCRGELVIITQGDIMGKIGKTNTSRILKVV

SEQ ID NO: 15571 - protein, 331 aa, Shigella flexneri 2a str. 301
MTIKVGINGFGRIGRIVFRAAQKRSDIEIVAINDLLDADYMAYMLKYDSTHGRFDGTVEVKDGHLIVNGKKIRVTAERDPANLKWDEVGVDVVAEATGLFLTDETARKHITAGAKKVVMTGPSKDNTPMFVKGANFDKYAGQDIVSNASCTTNCLAPLAKVINDNFGIIEGLMTTVHATTATQKTVDGPSHKDWRGGRGASQNIIPSSTGAAKAVGKVLPELNGKLTGMAFRVPTPNVSVVDLTVRLEKAATYEQIKAAVKAAAEGEMKGVLGYTEDDVVSTDFNGEVCTSVFDAKAGIALNDNFVKLVSWYDNETGYSNKVLDLIAHISK

SEQ ID NO: 15572 - protein, 91 aa, Magnetospirillum magnetotacticum MS-1
MAVFPEAFVGGYPKGLNFGATVGSRTPAGRDDFLRYYVSAIDVPGPATEAIAAVARAGKLHLVVGVIERSGGTLYCSALTFGPDGALLARR

SEQ ID NO: 15573 - protein, 459 aa, Shigella flexneri 2a str. 301
MEQITKPHCGARLDRLPDCRWHSSMFAIVAFGLLVCWSNAVGGLILAQLKALGWTDNSTTATFSAITTAGMFLGALVGGIIGDKTGRRNAFILYEAIHIASMVVGAFSPNMDFLIACRFVMDVGLGALLVTLFAGFTEYMPGRNRGTWSSRVSFIGNWSYPLCSLIAMGLTPLISAEWNWRVQLLIPAILSLIATALAWRYFPESPRWLESRGRYQEAEKVMRSIEEGVIRQTGKPLPPVVIADDGKAPQAVPYSALLTGVLLKRVILGSCVLITMNVVQYTLINWLPTIFMTQGINLKDSIVLNTMSMFGAPFGIFIAMLVMDKIPRKTMGVGLLILIAVLGYIYSLQTSMLLITLIGFFLITFVYMYVCYASAVYVPEIWPTEAKLRGSGLANAVGRISGIAAPYAVAVLLSSYGVTGVFILLGAVSNIVAIAIATIGIETKGVSVESLSIDAVANK

SEQ ID NO: 15574 - protein, 409 aa, Glycine max
  misc_feature (273)..(273): Xaa can be any naturally occurring amino acid
  unsure (1)..(409): unsure at all Xaa locations
PTRPRMEINRPFPASPADIRRFHSDDYVDFLSSVSPETLADSAFSRHLKRFNVGEDCPVFDGLFPFCQASAGGSLGAAVKLNRADADIAINWAGGLHHAKKSEASGFCYVNDIVLGILELLKAHRRVLYVDIDVHHGDGVEEAFYTTDRVMTVSFHKFGDFFPGTGHVKDIGVGSGKNYAVNVPLNDGMDDESFRSLFRSIIQKVMEVYQPEAVVLQCGADSLSGDRLGCFNLSVRGHADCLRFLRSFNVPLMVLGGGGYTIRNVARCWCYEXVAVGVEPDNKLPYNEYYEYFGPDYTLYVDPSNMENLNTSKDLEKLRNTLLEQISRLPHAPSVPFQTTPPTLQLPEEAEENMDRRPKLRKWDGEDYDSDPEEGGKDNSKFSNITAHMRDIADEMEEEKPEEHPSSCS

SEQ ID NO: 15575 - protein, 614 aa, Arabidopsis thaliana
MASLSFTQFLSFPRCNADVPCLLQSHGFVKFRGERWNGKQSFSMAAGRRKLSESAPLEEEGNDGNGAVVGKKPSKSVKRTTKKKVVVKDEPLEEISEFLVDNDDVLDKESIVSALKPKKTRTRKKAAAASSDVEEVKTEKKVRRKRTVKKDKDVEDDLATIMDAEVSDVEEALAVESTDTESEEEEIDLSKHEGEDISHTYGWPPLVCCFGSAQHAFVPSGRPANRLLDYELHERMRDAKWAPEKYIRAPGGCAGGVAIALASLGGKVAFMGKLGADDYGQAMLYYLNVCKVQTRSVKIDGKRVTACSTMKISKRGRLKSTCIKPCAEDSLSKSEINVDVLKEAKMFYFSTHSLLDKKMMSTTIQAIKISKQLGNVIFYDLNLPLPLWHSSEETKSFIQEVWNLADVIEITKQELEFLCGIEPTEEFDTENNDISKFVHYPPETVEQLWHENLKVLFVTNGTSKIHYYTKEHNGAVSGMEDVPITPFTRDMSASGDGIVAGLIRMLTVQPDLMNNKGYLERTARYAIECGIIDQWLLAQTRGYPPKDDMEEEEDDEEEDEVESDPNGIRSITEKEYRTSKPYDEPDGPYVMKPVEEREYKKLELVGSMFEDGSL

SEQ ID NO: 15576 - protein, 239 aa, Nostoc punctiforme PCC 73102
MSATQSNNLPLWVQDRDKVIAESTDVEWRYQTPPDYSRSKENLAKESIHNHLEGTLEAIVQNLVRTFEMEVSFKANPQQWLSIVNEQFRVSTNGGVEYTAADLSAQGTYNLFMADSEHYKASEESFESSAKVFHTTFPQGFPWEVLEVFSGPPNVTFKWRHWGHFNGEYKGHAPTGETIEIIGMSIAKVTDDLKVISLEHYFDNNLFLEKLTFGGKQTNAQKPGSACPFSSWFKKSRKS

SEQ ID NO: 15577 - protein, 115 aa, Arabidopsis thaliana
MYLVESKGGAIACMLLALLSLGTWPAVLTFLERRGRLPQHTYLDYSITNLLAAIIIAFTFGQIGSTKPDSPNFITQLAQDNWPSVMFAMAGGIVLSLGNLSTQYAWALVRLYNLQ

SEQ ID NO: 15578 - protein, 147 aa, Oryza sativa
  misc_feature (50)..(50): Xaa can be any naturally occurring amino acid
  misc_feature (72)..(72): Xaa can be any naturally occurring amino acid
  misc_feature (127)..(127): Xaa can be any naturally occurring amino acid
  unsure (1)..(147): unsure at all Xaa locations
MSSSSLSPAGSSDGDSAGVVVAADHRREKRRLSNRESARRSRLRKHRHLXDELVQEVARLQADNARVLARAXEKSPGQYARVEQENTVLRARAAELGDRLRSVNEVLRVVEEFSGVAMDIQEECPPXDPLLRPWQIPCPAAAHMLQY

SEQ ID NO: 15579 - protein, 742 aa, Staphylococcus aureus subsp. aureus COL
MTTIKTSNLGFPRLGRKREWKKAIESYWAKKISKEELDQTLTDLHKENLLLQKYYHLDSIPVGDFSLYDHILDTSLLFNIIPERFQGRTIDDDLLFDIARGNKDHVASALIKWFNTNYHYIVPEWDNVEPKVSRNVLLDRFKYAQSLNVNAHPVIVGPITFVKLSKGGHQTFEEKVKTLLPLYKEVFESLIDAGAEYIQVDEPILVTDDSESYENITREAYDYFEKAGVAKKLVIQTYFERAHLKFLSSLPVGGIGLDFVHDNGYNLKQIEAGDFDKSKTLYAGIIDGRNVWASDIEAKKVLIDKLLAHTNELVIQPSSSLLHVPVSLDDETLDTSVGEGLSFATEKLDELDALRRLFNQNDSVKYDKLKARYERFQNQSFKNLDYDFESVRTSRQSPFAQRIEQQQKRLNLPDLPTTTIGSFPQSREVRKYRADWKNKRITDEAYETFLKNEIARWIKIQEDIGLDVLVHGEFERNDMVEFFGEKLQGFLVTKFGWVQSYGSRAVKPPIIYGDVKWTAPLTVDETVYAQSLTDKPVKGMLTGPVTILNWSFERVDLPRKVVQDQIALAINEEVLALEAAGIKVIQVDEPALREGLPLRSEYHEQYLKDAVLSFKLATSSVRDETQIHTHMCYSQFGQIIHAIHDLDADVISIETSRSHGDLIKDFEDINYDLGIGLGVYDIHSPRIPTKEEITTAINRSLQQIDRSLFWVNPDCGLKTRKEEEVKDALTVLVNAVKAKRQE

SEQ ID NO: 15580 - protein, 202 aa, Bacteroides fragilis YCH46
MEENNNIYPIFDRMLTRQDKEELLKQRGVMIWFTGLSGSGKSTIAIALERELHKRGLLCRILDGDNIRTGINNNLSFSETDRVENIRRIAEVSKLFIDTGIITIAAFISPNNDIREMAARIVGPDDFLEIFVSTPLAECEKRDVKGLYAKARRGEIKNFTGISAPFEAPEHPALSLDTSVLSLEESVNRLLEIVLPRVSRHE

SEQ ID NO: 15581 - protein, 103 aa, Arabidopsis thaliana
  misc_feature (78)..(78): Xaa can be any naturally occurring amino acid
  unsure (1)..(103): unsure at all Xaa locations
KIEKVPHFSFYKSMEKIHEEEGIEPDQLMGDVLYYGDNHSAVVQLHGRPDVEKLIDENRTGGKLIVLDVGLKHCGPCXVKVYPTVLKLSRSISETVVFARMNR

SEQ ID NO: 15582 - protein, 591 aa, Brassica napus
MPTWWVRKSSKNKDDSHLLQTQTRSVSDKSIRRISADNSKSSPDPVTPSRCTPRCSREFAGASGFSDEKKCHPLPLPSLSNDQVNGSVSGSGSVSSVSSSGSGEDQSQPTAPRKSNAAAASPKAGARPTSPLHNRFSGMTLESSSTGRNDDGRSSEYHPLPLPPGSPTSPSVVLPCSPTSPSSGVQGSWVVGGSEKEISKWKKGRFIGSGTFGKVYQGFNSEEGRICAIKEVKVISDDKNSKECLKQLNQEINVLSQLCHPNIVQYYGSELSEETLSVYLEFVSGGSIYKLLTEYGAFTEPVIQNYTRQILYGLAYLHGRNTVHRDIKGANILVDPNGEIKLADFGMAKHVTAYSTMLSFTGSPYWMAPEVVMHKNGYTLAVDVWSVGCTILEMATAKPPWSQFEGVAAIFKIGNSKDMPEIPDHLSNDAKNFIRLCLQRNPTVRPTAAQLLEHPFLRVHSPRVANTSMHKDVPPRPYDGSSSMPTREPPYSGRHPVFHPIKSPSRENVRAITSLPVSPCSSPLRQLGPAYKSCFLSPPHPSYAFPVQESGYNHQAEFAASPFRFKKDTSLIEPSSYRAQAPSSPFRSRLV

SEQ ID NO: 15583 - protein, 647 aa, Cryptococcus gattii
MSTDCDGSMGRSDQKSWRPIGHTSRQLILYHPASHAVCVRPDRLPGDVWRAANKSSVACHTVSYDVGSATQRQYCPSCSQPMGDCLPHAFPSRQSTPNYFNTLELVHSNASRSFPPENETNPSPNTSFEDDNDIESCLPAKGYYARFFKEVKQLGMGAEGSVYLAIHHIDGDVLGTYAVKKVAVGHSKSYLHHKLREVKLLEALRHPNIIAYHHAWIDMTRFSELSPPVPSLHVLMMYASGGNLDHYLLSRLHVHPPGTELAAEDIGDFESFNGLPREERIKAFKRRKQQTKMRTNDASRNTGSGSLKIGRHQESGIENRGVLLLGIDEILALLGDVVEGLSFLHENAILHLDLKCSNVLLHREEGKIIPRALLSDFGTSEEILRGQRERTGHTGTLEYMAPETLVFDVAGHYRPSDSHVDMWSIGMILYKMMFLRSPYKDTENYSVLRDEILSYPGFVPDNAVKENLERRNIPSKLVELLVQLLNVSPEKRPSAQKIKMALLNMKGHPENTKSGSATLGRSIMYYSQDPYSSELNPQTIIDPKSHYSTRTTRLLSTLPMMNDESLPESLRCSMARLTKCRITRIVLLFIKIMSIQPSVTGVDLPPAVATTIIAVAVIESAGGHQKSTIWSLFSLIVHCMLLICFAR

SEQ ID NO: 15584 - protein, 196 aa, Escherichia coli
FRADERPGKINLGIGVYKDETGKTPVLTSVKKAEQYLLENETTKNYLGIDGIPEFGRCTQELLFGKGSALINDKRARTAQTPGGTGALRVAADFLAKNTSVKRVWVSNPSWPNHKSVFNSAGLEVREYAYYDAENHTLDFDALINSLNEAQAGDVVLFHGCCHNPTGIDPTLEQWQTLAQLSVEKGWLPLFDFAYQ

SEQ ID NO: 15585 - protein, 687 aa, Cryptococcus neoformans var. neoformans JEC21
MANFSSNDITAVNTIRTLAADVVAKANSGHPGAPMGMAPAAHVLFTRFMRFNSKNPKWINRDRFVLSNGHACALQYILLHLAGYEVSMEDLKQFRQIDSITPGHPEVGVTPGIEVTTGPLGQGIANAVGLAISQAHMGAVFNKENFSLIDNYTYCFLGDGCLQEGVASEACSLAGHLKLGNLVAIYDDNKITIDGDTAVSFTEDVEMRFKSYGWNVLHVEKGDDDLAAIEKAITEAKKSKDAPTIINLKTTIGFGSLHAGGHDVHGSPLKKDDIVQLKKKFGFNPEETFVVPKETSDLYHKVAESGAKAEAEWQALFKSYSEKYPKEAAELQRRVEGRLPDGWEKALPTYTTSDAAVGSRKLSETTITKLVEVLPELVGGSADLTGSNLTRWKGAEDFQHPSTGLGSYAGRYFRFGVREHGMTAVCNGIAAYGGIIPFTATFLNFVSYAAGAVRLSALSHLRVLNVATHDSIGLGEDGPTHQPVETAAWLRAIPNLAFWRPADGNETSAAYLVAILSQHTPSVFAFSRQNLPQLANSSIEKATKGGYVVEEVENADVTLVSTGSEVILCLQALEQLKSKGIKARLVSLPCFEVFNNQPKDYKLSVLPSGAPILSVEAYSTFGWGTYSHDHFGLKAWGASGPYNKVYEKFDITPEGIARRAEKVVDFYKKRGQPVFSPLISALDDISE

SEQ ID NO: 15586 - protein, 511 aa, Cryptococcus gattii
MFARQPLSQHLLRPLSRPSSSFSRPSTLPKLAFLQSARGFASASEPYDVVIIGGGPGGYVAAIKAAQLGFKTACIEKRGALGGTCLNVGCIPSKAMLNNSHIFHQTQHDLKNRGIDVSGVQLNLPKMLAAKEASVKALTGGIETYLFKKNGIDYIKGEASFETANKLSVKLLEGGETQVEAKNVIIATGSEVTPFPGLEIDEERIVSSTGALELKEVPKKMVVIGGGVIGLELGSVWSRLGAEVTVVEYLGSIGAGMDGEVGKQFQRILTKQGFKFKLNTKVVSGHREGDIVKLKVDSAKGGKEETIEADVVLVAIGRRPVTKGLNLEAIGVETDKKGRIVIDNEFNTSAKGVKCIGDVTFGPMLAHKAEEEGIAAVEILKTGHGHVNYDAIPSVVYTHPEVAWVGKNEEELKAAGIQYKIGKFPFAANSRAKTNQDSEGFVKFIVEKDTDQVLGCHIIGPAAGELIAPAVLAMEYKASAEDIARTCHAHPTLSEAFKEAALSSYDKPINF

SEQ ID NO: 15587 - protein, 519 aa, Medicago sativa
MDSLLKFPIMVNLKEEPFLMAIMVIVPLTLLLGLMSRILKRPRYPPGPKGLPIIGNMLMMDQLTHRGLANLAKKYGGIFHLRMGFLHMVAISDADAARQVLQVQDNIFSNRPATVAIKYLTYDRADMAFAHYGPFWRQMRKLCVMKLFSRKHAESWQSVRDEVDYAVRTVSDNIGNPVNIGELVFNLTKNIIYRAAFGSSSREGQDEFIGILQEFSKLFGAFNISDFVPCFGAIDPQGLNARLVKARKDLDSFIDKIIDEHVEKKKSVVDEETDMVDELLAFYSEEAKLNNESDDLHNSIKLTKDNIKAIIMDVMFGGTETVASAIEWVMAELMKSPEDLKKVQQELAEVVGLSRQVEEPDFEKLTYLKCALKETLRLHPPIPLLLHETAEEATVNGYFIPKQARVMINAWAIGRDANCWDEPESFKPSRFLKPGVPDFKGSNFEFIPFGSGRRSCPGMQLGLYALDLAVAHLLHCFTWELPDGMKPSEMDMSDVFGLTAPRASRLIAIPTKRVLCPLD

SEQ ID NO: 15588 - protein, 584 aa, Yarrowia lipolytica CLIB122
MVYLDIYQTAISLTDAMNNSTVLQGKVAEIASRVLDKIPDHVKTQVADHVTKLTDIGKFYYDNRNDYTSTVTDHVISYYDKVATCAGTHYAQLGNAVTMWMHDLPFDEQILIFSFLMVAAVAVVYAGAKAGVCRPFGSRDPDENSELFHICDLQETQTESVGDSEALFMPVFGGLFLCGLYFAIKYLSKETVQWFLTHYMSFAGSMSVGLVVSMGYKGLLRTVFNSNVAHYKIVLCDDRAYRGVGSFSRSDIEQMECDKAEKADGEKKNSKSKAKKKSKKDKTVSKGKSNAGGVGKAVEKSDSVVAVVESAKNTPTKGNKKSKKDKKGETGLNGSQRAGKMSDIDDSFKTESKKSKFNLMAKYFPIITTDDQLYAIHFTVVDILCFFLSIFCLLSMIKYPEIAKNWIINNLLGVCIAITGMSTLKLSTFKSGLIMLAGLFFYDIFFVFGTDIMLTVATSIDGPIKLVVPKNEFGKGALLGLGDIVVPGVYMSLCLRYDVFRYYKDGKEPFHLARKINAPYFVTSLIFYVIALITTMVVLFVFEHGQPALLYICPALMISTFLVGVYQGELGALWAYDGENELEE

SEQ ID NO: 15589 - protein, 496 aa, Arabidopsis thaliana
MGEMIDLFLLALMAGFIAVAYVFRSKQKKNLPPNPVGFPVIGHLHLLKEPVHRSLRDLSRNLGIDVFILRLGSRRAVVVTSASAAEEFLSQQNDVVFANRPLATLTEYMGYNNTLVSTAPYGEHWRRLRRFCAVDILSTARLRDFSDIRRDEVRAMIRKINVELVTSGGSVRLKLQPFLYGLTYNILMSMVAGKREEDEETKEVRKLIREVFDFAGVNYVGDFLPTLKLFDLDGYRKRAKKLASKLDKFMQKLVDEHRKNRGKAELEKTMITRLLSLQESEPECYTDDIIKGLVQVMLLAGTDTTAVTLEWAMANLLNHPEVLRKLKTELNEVSKEGRVFEESDTGKCPYLNNVISETLRLFPAAPLLVPHASSTDCEVAGFDIPRRTWLFINAWAIQRDPNVWDDPETFKPERFESETHRGKFLPFGIGRRACPGMGLAQLVLSLALGSLIQCFDWERDNDVAVDMSEGKGLTMPKSVPLVAKCKSLPILDKLVL

SEQ ID NO: 15590 - protein, 170 aa, Zea mays
MASSSGSGSSGSLSAATAALAAAAGTEEELRALMEQRRAKRMLSNRESARRSRMRKQRHLDELTAQAAHLRRENAHVATALGLTAQGLLAVDAENAVLRTQTAELAARLGSLNDILACMNTNAVGAVAVSLTAAAAAAASSDPCLAFDGATALDDLLRSCPENMFQYQLC

SEQ ID NO: 15591 - protein, 519 aa, Medicago sativa
MDSLLKYPIMENFKEEPFLMAIMFILPLILLLGLVSRILKRPRYPPGPKGLPVIGNMLMMDQLTHRGLANLAKKYGGIFHLRMGFLHMVAISDADAARQVLQVQDNIFSNRPATVAIKYLTYDRADMAFAHYGPFWRQMRKLCVMKLFSRKHAESWQSVRDEVDHAIRTVSDNIGNPVNIGELVFNLTKNIIYRAAFGSSSREGQDEFIGILQEFSKLFGAFNISDFVPCFGAIDPQGLNARLVKARKDLDSFIDKIIDEHVQKKKSVVDEETDMVDELLAFYSEEAKLNNESDDLHNSIKLTKDNIKAIIMDVMFGGTETVASAIEWAMAELMKSPEDLKKVQQELAEVVGLSRQVEEPDFEKLTYLKCALKETLRLHPPIPLLLHETAEEATVNGYFIPKQARVMINAWAIGRDANCWEEPESFKPSRFLKPGVPDFKGSNFEFIPFGSGRRSCPGMQLGLYALDLAVAHLLHCFTWELPDGMKPSEMDMSDVFGLTAPRASRLIAIPTKRVLCPLD

SEQ ID NO: 15592 - protein, 191 aa, Shigella flexneri
RPGKINLGIGVYKDETGKTPVLTSVKKAEQYLLENETTKNYLGIDGILEFGRCTQELLFGKGSALINDKRARTAQTPGGTGALRVAADFLAKNTSVKRVWVSNPSWPNHKSVFNSAGLEVREYAYYDAENHTLDFDALINSLNEAQAGDVVLFHGCCHNPTGIDPTLEQWQTLAQLSVEKGWLPLFDFAYQ

SEQ ID NO: 15593 - protein, 534 aa, Pseudomonas syringae pv. syringae B728a
MSENKTRVDNAATGDIKHQGKDIFFAAVETTRMPMIVTDPNRPDNPIIFANRAFLEMTGYASEEIIGSNCRFLQGPDTDRTAVQSIRDAIDQRVDISTEILNYRKDGSSFWNALFISPVYNDAGELIYFFASQLDISRRRDAEEALRQAQKMEALGQLTGGIAHDFNNLLQVMGGYIDLIGSAAEKPVIDVQRVQRSVHHAKSAVERASTLTKQLLAFARKQKLQGRVLNLNGLVSTTEPLIERTFGPEVIIETDLDPALKNCRIDPTQAEVALLNIFINARDALIGRLNPKIFIETRNLVVDELANMSYDGLLPGRYVSIAVTDNGIGMPASIRDRVMDPFFTTKEEGKGSGLGLSMVYGFAKQSGGAARIYTEEGVGTTLRLYFPVDEAVLSKNDPPKASERRIGSSERILIVEDRPDVAELAKMVLDDYGYVSEIVLNAREALKRFEAGATYDLLFTDLIMPGGMNGVMLAREVRRRFPKVKVLLTTGYAESSIERTDIGGSEFEVVSKPCMPQDLARKVRQVLDGPNGIA

SEQ ID NO: 15594 - protein, 185 aa, uncultured bacterium
  misc_feature (184)..(184): Xaa can be any naturally occurring amino acid
  unsure (1)..(185): unsure at all Xaa locations
GCTSGMDAVADGAELIEDGRADVVIAGATDAPISPITVACFDAIKATSPNNDDPAHASRPFDISRDGFVLGEGAAVFVLEPADQARRRRAHIYCEIAGYAQRSNAYHMTGLTADGLEMAEAIRVAMGRARLVPEDIDYINAHGSGTRQNDRHETAAIKASLGARAYEIPVSSIKSMVGHSLGAXG

SEQ ID NO: 15595 - protein, 302 aa, Bacillus halodurans C-125
MELSIRPNHSYAAPYNYECAEYSTNHFYGYGLYEVSMKPSNVSGVISSFFTYTGPSYNGAPWDEIDIEFLGNDTTKVQFNYYTNGRGGNEILYDLGFDAANSFNTYAFDWQEHYINWYVNGELVATATENIPSNPSKMMMNIWNTYGIDEWAGAYWGQNANASYEWVRYTPNNERSQTPIASDFQLHACEYSDARGVTSWQCGVGSFYPGSWIKFDNVNLSTGYNAFAVSYAATQSGSFDIRLGSPNGRLIGTVNYAPTAGWENYQWSGTPALDATAQGVHDIYIVSRAGAANLREFWFKNE

SEQ ID NO: 15596 - protein, 1362 aa, Ustilago maydis 521
MNPSYTERRASAHPTMSSSAHHASSTPSAASIDPTTSHAISSGIPITSPAALSYFAAHPRRQQVHFGNYLLLQTLGEGEFGKVKLGVHKEWGEEVAVKLIKRDKVANDAAPLHLDDSAQKDPAKMSKVEREIQVLKDVRHPNIVRLYEVIESDRYIGIVLEYASGGELFDHILAHKYLKEEHACRLFAQLISGVSYLHHKKIVHRDLKLENLLLDRNRNVIITDFGFANNFEHKRNDLMATSCGSPCYAAPELVVQDGLYAGSAVDVWSCGVILYAMLAGYLPFDDDPANPDGDNINLLYKYILATPLSFPEYITAQPRDLLSKMLVPDPTRRATLEQVMQHSWLRHYRELFKFSVDDLERAAMEQQTKKRQMYRQQMMYQQQLQEQQRRQQMERSQSVRHNVSHLPVGTAYTANTAVSAVSAANVAHRQTLPISATVPDRLYEPIGSASRGADHSVTPQRAPTASSHQPPVAPTASADAAIAPLPRASTHNNVAAAADAAAAVAAAPSPVDPVTALGNARGEPRTRLDDAVPTIAAAYETEPRQLAAQKVQRHTIQLEYGGDERPRKESAPGSRQASQTQRNASASSTSSKLAEIERTKTAADKPAANANAIVPPSVLQSTSVQVPATSVVVPESEKANISKAGAPDMMRSVSASAASRVSVPPPIMEQTQPSVSAHRSTQPTSSSRVRAPSSASRNNADSGSTGHATRIPTSASQRVVSTSSAASEPVGFPSSATERTIPSADADAAAGRISASRRASNGAEITEPSHRSPSATRHATADNAPVTSASASARHRKGMSTDKFFLSRLLGSNSANQPNGAGVAGDKVSANGSDAAGDKTKRDSMNRPAPERAPSSSSTGKNGRRKAMSLVVGHASGEASSAAADRNRALKAGMPHSATRATFGTQVSGKADDSVSSAQKQRKGSASLASQTTSTSRAAQSSTRPQPLQPSLQQQQQQQDKAFNDGSTIASSSTAGPSSNAAKKVMDWFRKKSLSRGTFNEQPPLGLFERSPTSSYMHGSASQTPSVIVTSAPNGTSRHAEAPSGGSSVPSSRSTSGTHSENSEATEMTQLTNLSDASHQEGDGLKSSASTVQQQATPKASLSAVSNVSDASAAGSLVSTRSQQQQRPQPRVATATSASTTPARFNEARLRYHLGAVDQSALTSRSPIEVLKEVQRVLYEMGIDVRTEKDEDFKLECVRRKRAKTLMSATHGFGMSIRSSVFPPTQADVERSSRMSHRDSLTPSASSPGGGSLRSFLKRSSLQPGATSPKMGSSTLPSSATVTSNLGGAVHDENQPPPLYGDASVDGGQEIRFSVEVTRIKNLTGLYSLDIRRMKGNLWAYKFVYQALLDRCQLGSSTAAVG

SEQ ID NO: 15597 - protein, 851 aa, Bacillus halodurans C-125
MVKSKFLVLFSVFSLLFGVFVVGFSHQGVKAEEERPMGTAFYESFDAFDDERWSKAGVWTNGEMFNATWYPEQVTLSDGLMRLTIDKEDEQVLENDEQAPPYKAGELRTNDFYQYGLFEVSMKPAKVEGTVSSFFTYTGEWDWDGDPWDEIDIEFLGKDTTRIQFNYFTNGVGGNEFYYDLGFDASESFNTYAFEWREDSITWYVNGEAVHTATENIPQTPQKIMMNLWPGVGVDEWTGVFDGDNTPLHADYEWVRYTPLEALDEEESGDDNEEEPVEEVEEEPAEDEEVSVRPIGSAIYETFNTFNEDIWSIAHGWTNGQMFNATWYDSQITFSNGIMRFAIDKEDDEEAHPPYKAAELRTNDFYHYGLFEVSMKPAKVEGTVSSFFTYTGEWDWDGDPWDEIDIEFLGKDTTRIQFNYFTNGVGGNEFYYDLGFDASESFNTYAFEWREDSITWYVNGEAVHTATENIPQTPQKIMMNLWPGVGVDEWTGVFDGDNTPLHADYEWVRYTPLEALDEEESGDDNEEEPVEEVEEEPAEDEEVSVRPIGSAIYETFNTFNEDIWSIAHGWTNGQMFNATWYDSQITFSNGIMRFAIDKEDDEEAHPPYKAAELRTNDFYHYGLFEVSMKPAKVEGTVSSFFTYTGEWDWDGDPWDEIDIEFLGKDTTRIQFNYFTNGVGGNEFYYDLGFDASESFNTYAFEWREDSITWYVNGEAVHTATENIPQTPQKIMMNLWPGVGVDGWTGVFDGDNTPVYSYYDWVRYTPLSELSDPPVTPEPPIEEPTEEPIEEPIEKIEIDENDETKENENDLKESGGERLPNTATSMYHYLLFGLLAFAIGVMVYLRARVTEK

SEQ ID NO: 15598 - protein, 315 aa, Shigella flexneri 2a str. 301
MDNLDVICIGAAIVDIPLQPVSKNIFDVDSYPLERIAMSTGGDAINEATIISRLGHRTALMSRIGKDASGQFILDHCRKENIDIQSLKQDVSIDTSINVGLVTEDGERTFVTNRNGSLWKLNIDDVDFARFPQAKLLSLASIFNSPLLDGKALTEIFTQAKARQMIICADMIKPRLNETLDDICEALSYVDYLFPNFAEEKLLTGKETLDEIADCFLACGVKTVVIKTGKDGCFIKRGDMTMKVPAVAGITAIDTIGAGDNFASGFIAALLEGKNLRECARFANATAAISVLSVGATTGVKNRKLVEQLLEEYEG

SEQ ID NO: 15599 - protein, 480 aa, Polytomella sp. Pringsheim 198.80
MLSFKSDTSIFSGRKGPCANLFPPVSRKLNNAKPILMKAASKLVTTKSEEIFNEALELLPGGVNSPVRAFRSVGGKPIVFSKVKGARCYDVDGNSFLDYVGSWGPAIVGHAHDEVNAAIIDQVSRGTSFGAPGPLENELAKVVISRVPAVEMVRFVSSGTEACLSVLRLMRAATGRDGLIKFAGCYHGHADSFLVKAGSGVATLGLPDSPGVPASTTASTFTATFNDLDSVEKIFAAHPTEIAGIIVEPVVGNGGFIPPSPTFLRGLRALCDKYKALLCFDEVMTGFRVHKNCAQKLFGVTPDLVTLGKVIGGGLPVGAYGGRKDLMLHVAPAGTMYQAGTLSGNPLAMAAGLKTLEILDRPGAYEHLDRISKKLVEGVVAAGRAAGHPLVGGSFGGMFGFFLLKQEELGKEVEKKAPQSFEEAQSRADTAKFARFHRLMLEEGVYLAPSQFEAGFTSLAHTDEDIEFTISAAANAFKRL

SEQ ID NO: 15600 - protein, 529 aa, Mycobacterium tuberculosis H37Rv
MGADLKQPQDADSPPKGVSRRRFLTTGAAAVVGTGVGAGGTALLSSHPRGPAVWYQRGRSGAPPVGGLHLQFGRNASTEMVVSWHTTDTVGNPRVMLGTPTSGFGSVVVAETRSYRDAKSNTEVRVNHAHLTNLTPDTDYVYAAVHDGTTPELGTARTAPSGRKPLRFTSFGDQSTPALGRLADGRYVSDNIGSPFAGDITIAIERIAPLFNLINGDLCYANLAQDRIRTWSDWFDNNTRSARYRPWMPAAGNHENEVGNGPIGYDAYQTYFAVPDSGSSPQLRGLWYSFTAGSVRVISLHNDDVCYQDGGNSYVRGYSGGEQRRWLQAELANARRDSEIDWVVVCMHQTAISTADDNNGADLGIRQEWLPLFDQYQVDLVVCGHEHHYERSHPLRGALGTDTRTPIPVDTRSDLIDSTRGTVHLVIGGGGTSKPTNALLFPQPRCQVITGVGDFDPAIRRKPSIFVLEDAPWSAFRDRDNPYGFVAFDVDPGQPGGTTSIKATYYAVTGPFGGLTVIDQFTLTKPRGG

SEQ ID NO: 15601 - protein, 185 aa, uncultured bacterium
GCTSGMDAVADGAELIEDGRADVVIAGATDAPISPITVACFDAIKATSPNNDDPAHASRPFDISRDGLVLGEGAAVFVLEPADQARRRRAHIYCEIAGYAQRSNAYHMTGLTADGLEMAEAIRVAMGRARLVPEDIDYINAHGSGTRQNDRHETAAFKASLGARAYGIPVSSIKSMVGHSLGAIG

SEQ ID NO: 15602 - protein, 452 aa, Shigella flexneri 2a str. 301
MEQYDQIGARLDRLPLARFHYRIFGIISFSLLLTGFLSYSGNVVLAKLVSNGWSNNFLYAAFTSALMFGYFIGSLTGGFIGDYFGRRRAFRINLLIVGIAATGAAFVPDMYWLIFFRFLMGTGMGALIMVGYASFTEFIPATVRGKWSARLSFVGNWSPMLSAAIGVVVIAFFSWRIMFLLGGIGILLAWFLSGKYFIESPRWLEGKGQIAGAESQLREVEQQIEREKSIRLPQLTLNQSNSKVKVIKGTFRLLFKGEMLRRTLVAITVLIAMNISLYTITVWIPTIFVNSGIDVDKSILMTAVIMIGAPVGIFIAALIIDHFPRRLFGSALLIIIAVLGYIYSSQTTEWAILIYGLVMIFFLYMYVCFASAVYIPELWPTHLRLRGSGFVNAVGRIVAVFTPYGVAALLTHYGSITVFMVLGVMLVLCALVLSIFGIETRKVSLEEISEVN

SEQ ID NO: 15603 - protein, 110 aa, Triticum aestivum
MVKQKIVLKLPLDGERNKRKAFKAAVGMAGVTSATLEGDKIIILGDGVDPIALTTMLRRNLGKAELVSVSSGDDKKKDGGYGYGGYGYGGEKKKDGYGYGSADGGGGKDT

SEQ ID NO: 15604 - protein, 398 aa, Ralstonia metallidurans CH34
MLRRFWLFFAQAVTVVLAVWFVVATLKPEWLQRGRVAVQSGSPIVALKEVVPSVEGSAAPGSYSEAARLAMPAVVNIFTSKNGSKRSPNNPQAEDPWFRFFFGDRLPERQEPVSSLGSGVIVSAEGYILTNHHVVDGADEIEVALTDGRKANAKVVGSDPETDLAVLKVTLKDLPAITLGRIENVKVGDVVLAIGNPFGVGQTVTMGIVSALGRSHLGINTFENFIQTDAAINPGNSGGALVDAQGNLLGINTAIYSRSGGSLGIGFAIPVSTAKQVMESIISTGSVTRGWIGVEPQDLTPEIAESFGLEAKEGALIAAVVQGGPADKAGVKPGDVLVSVDNQSISDTTALLNAIAQLKPGAEVKMKVIRRGKPAELTVTIGKRPPPPRRPMPLDEEE

SEQ ID NO: 15605 - protein, 185 aa, uncultured bacterium
GCTSGMDAVAEGAEMIEDGRADVVIAGATDAPISPITVACSDAIKATSPNNDDPAHASRPFDAGRDGFVLGEGAAVFVLEPADQARRRRAHIYCEIAGYAQRSNAYHMTGLTADGLEMAEAIRVAMGRARLVPEDIDYINAHGSGTRQNDQHETAAFKASLGARAYEVPVSSIKSMVGHSLGAIG

SEQ ID NO: 15606 - protein, 312 aa, Methanothermobacter thermautotrophicus
MLFDAVGLGALNMDQLHMVERIAGPDEEVFVRSILESCGGSAANTIIGLARLGLRTAFIGKVAGDREGSILRENLKGGGVADYVAVSDEGRSGRVMGFVDPQGNRALYVDPGVNDTLSMDEVREEALKTRLLHLTSFAGSGIRVQREVLGVIDDSVTVSLDPGHLYAERGASELEGILERTDILLVNRRELEILTGSPDPAMASAELGVDVVVMKMGSEGVRAFDGSEVMVEALETSCRDTTGAGDAFNAGFLYAWLSGHGLEVSCLFGNYMASRCIEGYGATSSLPGREALEVLEGYLRDTYQEKRGDSGK

SEQ ID NO: 15607 - protein, 356 aa, Arabidopsis thaliana
  misc_feature (202)..(202): Xaa can be any naturally occurring amino acid
  misc_feature (216)..(216): Xaa can be any naturally occurring amino acid
  misc_feature (247)..(247): Xaa can be any naturally occurring amino acid
  unsure (1)..(356): unsure at all Xaa locations
MGNSSEEPKPPTKSDKPSSPPVDQTNVHVYPDWAAMQAYYGPRVAMPPYYNSAMAASGHPPPPYMWNPQHMMSPYGAPYAAVYPHGGGVYAHPGIPMGSLPQGQKDPPLTTPGTLLSIDTPTKSTGNTDNGLMKKLKEFDGLAMSLGNGNPENGADEHKRSRNSSETDGSTDGSDGNTTGADEPKLKRGREGNPKKDGEQLXASSFNLFLLRGDTXVGIIKVWGIISLVTQRDSNRERRQQFNRDSXRRSRLRNQPETEDFARKVEASTAENMALRSELNQLNEKFDKLRGANATLLDKLKCSEPEKRVPANMLSRVKNSGAGDKNKNQGDNDSNSTSKLHQLLDTKPRAKAVAAG

SEQ ID NO: 15608 - protein, 471 aa, Pseudomonas fluorescens PfO-1
MTPDKKVKILATLGPAVDGIEDIRELVEAGVNIFRLNFSHGDHADHAKRYQWIREVERQLNYPLGILMDLQGPKLRVGKFADGKVQLHRGQAFRLDLDATPGDERRVNLPHPEIIAALEAGMDLLLDDGKLRLRVVTKYSDAIDTTVLNGGELSDRKGVNVPQAVLDLSPLTTKDRRDLSFGLELGVDWVALSFVQRPQDILEARELIGDKAFLMAKIEKPSAVEQLREIAELSDAIMVARGDLGVEVPAESVPQIQKNIITTCRHLGKPVVVATQMLESMRFSPAPTRAEVTDVANAVAEGADAVMLSAETASGEYPLEAVQMMSKIIRQVENGPDYQTQLDVSRPKAEATVSDAISCAIRRISNVLPVAVLVNYSESGASSLRAARERPKAPILNLTPNLQTARRLSVAWGIHSVVNDRLRQVDEVCSTALEIAQAQGMAERGDTLLITAGVPFGQPGSTNSLRIETLI

SEQ ID NO: 15609 - protein, 220 aa, Xanthomonas axonopodis pv. citri str. 306
MNELNHLLENNRAWSERIRREDPEFFSKLSTQQTPEYLWIGCSDSRVPANQIIDMAPGEVFVHRNIANVVVHTDLNCLSVIQFAVDVLKVKHVLVVGHYGCGGVFASLTQKRMGLVDNWIRHVTDVADKHEACLHNAGELSVQHARLCELNVLEQVVNVCRTTIVHDAWERGQQLSVHGWVYSLRDGRAHDLGMSIDRPELLQERYDAALAQIQADQTER

SEQ ID NO: 15610 - protein, 929 aa, Oryza sativa
  misc_feature (291)..(291): Xaa can be any naturally occurring amino acid
  misc_feature (328)..(328): Xaa can be any naturally occurring amino acid
  unsure (1)..(929): unsure at all Xaa locations
MAGFADALRPDKFTGVHFKRWQIRVTLWLTAMKCFWVSTGKPEGVLTAEQQKQFEEATTLFVGCILSVLGDRLVEVYMHMTDAKELWDALNTKFGATDASNDLYIMEQFHDYKMADNRSVVEQAHEIQTMAKELELLKCVLPDKFVAGCIIAKLPPSWRSFGTALKHKRQEYSVEGLIASLDVEEKAREKDAASKGDGGQSSANVVHKAQNKSKGKYKAQQTTNFKKQKKNNNNPNQDERTCFVCGQVGHLARKCPQRKGMKAPAGQTSKSANVTIGNTGDGSGYGNLPTXRTGFHRPNGEWVTCFCSWCWHGRSEVYFGKDRAAEEXDTHSGSNQPSEIIPSSITPPEQTEHTHELVSEEDVSEAPRRSKRQRTAKSFGDDFTVYLVDDTPKSISEAYASPDADYWKEAVRSEMDSIIANGTWEVTERPYGCKPVGCKWVFKKKLRPDASHGLLVHQMDVKTAFLNGELDEEIYMDQPDGFVVEGFAVNEADKCVYYRHGGGEGVILCLYVDDILIFGTNLEVINESHYVEKILNRFGYIDSKPSPTPYDPSLLLRKNKRIARNQLEYSQIIGSLMYLASATRPDISFAVSKLSRFTSNPGDDHWRALERVMRYLKGTVELGLHYTGYPAVLEGYSDSNWISDVDEIKATSGYVFTLGGGAVSWRSCKQTILTRSTMEAELTALDTATVEAEWLRDLLMDLPVVEKPVPAILMNCDNQTEIKKLRSYNVGLHPNSEKPGRSLHEGTITKYYSIPLAGVHQRSGEQVSGTSAFDVLHREKAAIRVLTWNDGFYNGEIKTRKIENNLVTELTAEQLLLQRSEQLRELYNSLLSGESADQQRRRPVTALSPEDLGNVEWYYVVCMTYAFRPGQCVPGKSFASNGCAWLCNAQSADSKAFPRKLLAKNASIQTIVCVPFMTGVLELGTTDPG

SEQ ID NO: 15611 - protein, 112 aa, Brassica napus
KERYSGIIDYSSIILWVLESAELAAIALSATSAAAAVGAAVAGGVAADRGIGKDAPTAADSLGKDFYQVILQEEPFRSTTVGTILKSFRYAPFLPVSTESSMLSVLLLLSKY

SEQ ID NO: 15612 - protein, 223 aa, Clostridium thermocellum ATCC 27405
MPKILIVEDDKDIVNNLTEYLRDEGFDVDSAGGQNEAINKMDKNKYDLLLVDISLKDGNGFAVCSAARENNDIPVIFLSASDDEYNIVTGLEIGADDYIVKPFRPRELLSRIRKALRRNGKAGAVIEHDNIRVDTVRGIVTKNGSEIFLSALEYRLFLVFLNNKGAVLSRSRLLEEIWNIAGEYVNDNTLTVYIKRLREKIEDDPQNPTFIKTVRGLGYKVGD

SEQ ID NO: 15613 - protein, 407 aa, Oryza sativa
MERYELLKDIGAGNFGVARLMRNKETKELVAMKYIPRGLKASLLRFFFFFFLSLFVRSVFLIDRWIDENVAREIINHRSLRHPNIIRFKEVVVTPTHLAIVMEYAAGGELFDRICNAGRFSEDEARYFFQQLICGVSYCHFMQICHRDLKLENTLLDGSPAPRLKICDFGYSKSSLLHSKPKSTVGTPAYIAPEVLSRREYDGKTADVWSCGVTLYVMLVGAYPFEDPDDPKNFRKTIGRIMSIQYKIPEYVHVSQDCRQLLSRIFVANPAKRITIREIRNHPWFLKNLPRELTEAAQAMYYKKDNSAPTYSVQSVEEIMKIVEEARTPPRSSTPVAGFGWQEEDEQEDNSKKPEEEQEEEEDAEDEYDKQGHNVESKVYIGNISDNNRKWNNALLKTKFRGLECAL

SEQ ID NO: 15614 - protein, 312 aa, Arabidopsis thaliana
MAIAFKSGVFFLQSPKSQIGFRHSSPPDSSLSFKRFTPMASLSTSSPTLGLADTFTQLKKQGKVAFIPYITAGDPDLSTTAEALKVLDACGSDIIELGVPYSDPLADGPVIQAAATRSLERGTNLDSILEMLDKVVPQISCPISLFTYYNPILKRGLGKFMSSIRAVGVQGLVVPDVPLEETEMLRKEALNNDIELVLLTTPTTPTERMKLIVDASEGFIYLVSSIGVTGARSSVSGKVQSLLKDIKEATDKPVAVGFGISKPEHVKQIAGWGADGVIVGSAMVKLLGDAKSPTEGLKELEKLTKSLKSALL

SEQ ID NO: 15615 - protein, 606 aa, Arabidopsis thaliana
MDTKIGSIDDCKPTNGDVCSPTNGTVATIHNSVPSSAITINYCDATLGRHLARRLVQAGVTDVFSVPGDFNLTLLDHLMAEPDLNLIGCCNELNAGYAADGYARSRGVGACVVTFTVGGLSVLNAIAGAYSENLPLICIVGGPNSNDYGTNRILHHTIGLPDFSQELRCFQTVTCYQAVVNNLDDAHEQIDKAISTALKESKPVYISVSCNLAAIPHHTYSRDPVPFSLAPRLSNKMGLEAAVEATLEFLNKAVKQVMVGGPKLRVAKACDAFVELADASGYALAMMPSAKGFVPEHHPHFIGTYWGAVSTPFCSEIVESADAYIFAGPIFNDYSSVGYSLLLKKEKAIVVQPDRITVANGPTFGCILMSDFFRELSKRVKRNETAYENYHRIFVPEGKPLKCESREPLRVNTMFQHIQKMLSSETAVIAAETGDSWFNCQKLKLPKRYEFQMQYGSIGWSVGATLGYAQASPEKRVLAFIGDGSFQVTVQDISTMLRNGQKTIIFLINNGGYTIEVEIHDGPYNVIKNWNYTGLVDAIHNGEGNCWTAKVRYEEELVEAITTATTEKKDCLCFIEVILHKGETSKELLEWGHASLLLTAVLPNPQ

SEQ ID NO: 15616 - protein, 342 aa, Pseudomonas syringae pv. syringae B728a
MILVTGGAGYIGAHIALELLEDGRDVVVLDNLCNSSREPLRRIEELCGRQVAFIHGDVRSKATLHRLFAQYPVKAVVHCAGLKAVGESVREPLRYFETNVSGSVNLCQAMAEAGVFDLLFSSSATVYGGCEQMPLDENCPLGLPTNPYGHSKLMAEHVMQSVARSDPRWSIGLLRYFNPIGAHPSGLLGESPCNTPNNLLPFLLQVANRLRPALHIFGSDYPTLDGTGVRDYLHVMDLAEGHLKALDKIHDERGVSVWNLGTGQGYSVLEVVHAFERISGKAVPLIFEPRRPGDIAACWSDPGKAARELDWRARFNLDSMLTDAWRWQCMNPQGYRPTALVS

SEQ ID NO: 15617 - protein, 1110 aa, Ashbya gossypii ATCC 10895
MVVIVASLFLPFQPQFEISTSRTEAAALVDSQVVKIPALGGPAESANVVLKAKRASSSHGLTSPFVGPTEQNSGSDDVTDASKTGARGGISSQLLMENITSNVNSAAGTPGAQLGNHGNTSVEEFFASGGTARARDADPGSEVYSTASSPAGESSSSVQPGAVLNNADSTANLLKNVNKKLLYQSVLAGSLSTSALEGHKSTTSSNAHSTVITPRSRQLPDVASSVTNVPKGKAMRQMPVRRLLHRKSSSSIATVHSNLKYPLNINDYDEESVEEEGGRQSSLPHMPYKEAEEQESSDEEELDLDENGNRKNAVPKFGGYSNTARIRAQLMMNSQNIFKTAPWKIVPSSKGNGGLKNALTTALVEKTIEQPVTWIGTVGIPTDAVPPDVLKGITEQLDEAFDSKAVITDDITFKSAYQNFCKKILWPTLNYQIPDNPNSKAFEDHSWNYYQHLNQQFADKIVESYKDGDLVWVHDYHLMLVPEMVRKKLPTAKIGFFLHVSFPSSEVFRCFAQREKILEGILGAHSIGFQTEEYARHFQQTANRLLMCDVADRILRYKGRIIAIESTPIGVDAFDLEVQLKSQETLEWRRLIRERWAGKKLIVSRDQFDRIRGLRKKMLAYERFLKLNPEYIDRVVLIQVCLGSGRDSEMEREVMTVVDRINALSRDISVSQPVVFLHQDLQFPQYLALNCEADMFLVSTMREGMNLTCHEFVICSQEKNAPLLLSEFTGSARVLGSGSLLINPWDIRQVADTIKVGLELSKEQRRRKWKQMFKSVIMHDSDNWMASSLASINNSWEANRERSKVFNLSLDKILDSYETARRHIFILKLSEPPTARMVTVLSELCTRSAVFIINSFSRSMLERLYCRVPNIGLIAENGAFVRLNGIWYNMVQDVSWKEDIIKVIEDKVERLPGSYYKVGETMIRFHTENAEDQDRVSNVVGDAITHVNTLFGDNGIHAYVHKNIVFVQQSGLSVQALRFLLNHYNSVDDTPGSTPAHSPAVSPVMTPVNSSLAMSPSTAASKTPSAATATASYFSNGRSTSRVEFVCVTGTSSPVLEPLFQSINELAKKGDLPYGYTVAYGDAITTYAKEHVEGSNELFGILDKLTFIGC

SEQ ID NO: 15618 - protein, 195 aa, Shigella flexneri
RADERPGKINLGIGVYKDETGKTPVLTSVKKAEQYLLENETTKNYLGIDGIPEFGRCTQELLFGKGSALINDKRARMAQTPGGTGALRVAADFLAKNTSVKRVWVSNPSWPNHKSVFNSAGLEVREYAYYDAENHTLDFDALINSLNEAQAGDVVLFHGCCHNPTGIDPTLEQWQTLAQLSVEKGWLPLFDFAYQ

SEQ ID NO: 15619 - protein, 328 aa, Saccharophagus degradans 2-40
MKKIRWGIVSTAKIAREWLIPALHASQHAEVVAVASRDLAKAEAFAEKAGIPKAYGSYESLLADPNVDAIYNPLPNDQHVPVSMQAIKAGKHVLCEKPLGMDAANIQPLLELAAANPQLVVMEAFMYRFHPQWVKVREIIERGDLGQINAVEADFTYFNRDENNVRNKPGIGGGGLLDIGCYCISAARFIFGREPKRVTGMLDIDPQFGVDRHATGLLDFGPGMATFYCSTQSDSSQWVKISGEKGSLIVENPFYRRDMPSRLLLRNGDTDKEIVVGHYNHYVQQVDAFCTAINESLPAPTPLSDALGNIKVIDAVFKAAETGTWVDV

SEQ ID NO: 15620 - protein, 1847 aa, Cryptococcus gattii
MLPSSQQTTAAGPLPATPNKLSLRRHHSSSKQGTLCNPDEQSRPKSSVPESARRRKPTFFSSMHFSQALPPSIPSMASDEPRPELQRRQRRSKVEALTKIDRAGTPIQLADGPAATSFVPHTIQKSTPPPSAPHYLRNPLHRPKVANPPFSIDSVRTKAPRHPHPRTEPRLFGLEDCPTFYPTPEEFKDPMAYIDSIAQHGKKYGICKIVPPEGWHMPFRLETEIFRFKARLQRLNQLEAASRAKLNFLEQLSMYHMQQGDSKIHIPLIDRQPLDLWKLRREVHRSGGNFELDRTKGWSKITEALGHKPSWTPHIRAAYMNIVFPFDNWAVRAKSTSVSSLASFNPGNNGSPKPPSAFVNDNFPAVPIKQDYGINRMGTISDRPTLKVRLNGTPFVPSPDNRRSPSKRAPVNGGDSLTDVKPINQSDSPSAVAGAPTALRINVPGFSDREGSDSELSDEDSVVSRPSIRRVPFEPEYQKGEVCEICKGEHDPDKILLCDGCDRGFHIYCLDPPLASVPTNEEWYCTSCLLSQGEDFGFEEGDEHSVASFQARDAAFSYAWWNRHMPHNSPQVSVNRAEPEGNGDNEMVKPRQFGKMRVSEDDVEREFWRLTESSLDTVDVEYGADIHSTSHGSAGPTPETHPLDPYSKDPWNLSNIPILPDSLLRYIKSDISGMTVPWIYIGMMFSAFCWHNEDHYTYSINYMYWGETKTWYGVPGSDAEKFEAAIKSEAPDLFEQEPGLLFQLITMMNPGRLREAGVKVVACDQRPNEFVITFPKAYHCGFNHGINMNEAVNFALPDWLPDGKDSVRRYREHNKAPVFSHNELLITITLFSETIRTALWLKDALIEMVEEELAHRDALRTKYPKLVEDVIEEDCPEEQYQCAICKAFCYLAQITCSCTSQVSCLSHADQLCTCGKPRKVLRMRYSETQLEDIRDVVVHRAALPEQWRIRFLSLMESSRPQLKSMRTLVMEGERIAHPIPELGPLKRFVDVATSLMEQIAAVMARKNTGRRKKTRTRDDNRKGKRTRAERDDDEIDGINRRPDLLTGLLKQADRLAFDAPELSQLRQLILTIGDFRTEASSLLSTPEDQLNRQRCKDTLILGQSFGLDFPELASLGQLVQRQEWFRQVEEEVDDANIEYDDVVALLEESMECQIPQDHVLVKELKLREWKGRDWMDSVERLLSSSQIAVDDISALIEASQHIPVSIDILRKLESLRKSAISWRTSARNIFATNGSPIAASRLCKNVAAASKPLSNVIIPEIRQLQAELEHHILWREEASKVLGVPASRLASTMDYIRGEFENNLAPDDDALNDRRICFCRSSSVDNIVVCKVCQHSYHPRCVDVSLRSIPEEFKCAICQRLPNDDGPSLDAFIALISPQRWNFLINPLEFESAQYIASAAIRYAPQAFRLADPLSLSHPCRDLELLRHTIRKIYTLPLVFDTHNSQTNERCVLVNWLFRRMQDAVRMETKEASLLAAGVQSKMGHRSLAFAAGQFALVNDDNGTPSGRAKPRRRARIILAESHPREFRCVCGMPSAGENATAEVECPKCGQGYHGGCVKVTEEFARKSVWRCPCCTVRDGRHYQKDVEVRVQLNSHRGTDQFLDYRTIINDFAEQLVLVTKPTSTDAITLECVNFVPAHIPDDVKMMEKEAGPLNRTKKRKSAGVEGVFRSEQGTNRPATNALKTVAAKSPMGPPSTTPDKISSQTVNSGSCGSSAAMGLQSDFQTKSSAVSCTIYTSAAESDASISVQNRSTFNLPFNVGPKSYFLSTPVAIGPSATSAVRQSDDPSTTTMRIEGRETAVIGKDVHDGSIDSHRDSYSDMGDSIAVEEADHFGHHVVYEDVIMENY

SEQ ID NO: 15621 - protein, 169 aa, Triticum aestivum
RREDVKQQHDNKNNNNNNNNIVGDEVCSAVTTDDSSAAVGSENSKSSASAKGHSKMTSKPASAAAATKSSHGRRKVKVDWTPELHRRFVQAVEQLGLDKAVPSRILELMGNEYRLTRHNIASHLQKYRSHRKHLMAREAEAASWTQKRQMYAAAGGPRKDAAAGGGPWV

SEQ ID NO: 15622 - protein, 607 aa, Arabidopsis thaliana
MDTKIGSIDACNPTNHDIGGPPNGGVSTVQNTSPLHSTTVSPCDATLGRYLARRLVEIGVTDVFSVPGDFNLTLLDHLIAEPNLKLIGCCNELNAGYAADGYARSRGVGACVVTFTVGGLSVLNAIAGAYSENLPLICIVGGPNSNDYGTNRILHHTIGLPDFTQELRCFQAVTCFQAVINNLEEAHELIDTAISTALKESKPVYISISCNLPAIPLPTFSRHPVPFMLPMKVSNQIGLDAAVEAAAEFLNKAVKPVLVGGPKMRVAKAADAFVELADASGYGLAVMPSAKGQVPEHHKHFIGTYWGAVSTAFCAEIVESADAYLFAGPIFNDYSSVGYSLLLKKEKAIIVQPDRVTIGNGPAFGCVFMKDFLSELAKRIKHNNTSYENYHRIYVPEGKPLRDNPNESLRVNVLFQHIQNMLSSESAVLAETGDSWFNCQKLKLPEGCGYEFQMQYGSIGWSVGATLGYAQAMPNRRVIACIGDGSFQVTAQDVSPMIRCGHKTIIFLINNGGYTIEVEIHDGPYNVIKNWNYTAFVEAIHNGEGKCWTPKVRCEEELVKAINTATNEEKESFCFIEVIVHKDDTSKELLEWGSRVSAANSRPPNPQ

SEQ ID NO: 15623 - protein, 354 aa, Pseudomonas syringae pv. syringae B728a
MHPKNAWYVACTADEVADKPLGRQICNEKMVFYRDQNQQVVAVEDFCPHRGAPLSLGYVENGQLVCGYHGLVMGGDGKTVSMPGQRVRGFPCNKTFAAVERYGFIWVWPGDREKADPALIHHLEWAVSDEWAYGGGLFHIQCDYRLMIDNLMDLTHETYVHASSIGQKEIDEAAPVTTVEGEEVVTARHMENIMPPPFWQMALRGNNLADDVPVDRWQICRFTPPSHVLIEVGVAHAGKGGYDAPKEFKASSIVVDFITPETDTSIWYFWGMARNFNPADEALTASIREGQGKIFTEDLEMLERQQQNLLQHPHRNLLKLNIDAGGVQSRKILERLIAAEQAGPGEQIPVMATK

SEQ ID NO: 15624 - protein, 389 aa, Bacillus halodurans C-125
MKKASFVYSENQLSYQFHSTHPFNHQRLRLTYDLLKSMDALDDSEIVAPRVATEAELRLIHDQAFIDAVKAAGNGTLSDGVALNYGLGTEDTPIFKNMHEAAALLVGGTLTAVDQVMEGHAEHACHLGGGLHHGFRGKASGFCVYNDSSIAIEYMRRKFGARVLYIDTDAHHGDGVQWAFYEEDDVCTLSIHETGRYLFPGTGNFNEKGQGEGYGYSINIPLDAFTEDDSFLFAYEQAVTNVVKFFKPDVILTQNGADAHFHDPLTHLCASMRTFRYIPQLAHALAHEYCEGRWIAVGGGGYDIWRVVPRAWAMIWLEMTDQLQKANGPLPERWLSKWTTYAQHPLPSHWEDENEELPTIPRRDEITEKNKKIVEKALYHIYTELKTQT

SEQ ID NO: 15625 - protein, 194 aa, Escherichia coli
ADERPGKINLGIGVYKDETGKTPVLTSVKKAEQYLLENETTKNYLGIDGIPEFGRCTQELLFGKGSALINDKRARTAQTPGGTGALRVAADFLAKNTSVKRVWVSNPSWPNHKSVFNSAGLEVREYAYYDAENHTLDFDALINSLNEAQAGDVVLFHGCCHNPTGIDPTLEQWQTLAQLSVEKGWLPLFDFAYQ

SEQ ID NO: 15626 - protein, 112 aa, Gibberella zeae
RRSTGGKAPRKQLASKAARKSAPSTGGVKKPHRYKPGTVALREIRRYQKSTELLIRKLPFQRLVREIAQDFKSDLRFQSSAIGALQESVESYLVSLFEDTNLCAIHAKRVTI

SEQ ID NO: 15627 - protein, 1186 aa, Cryptococcus gattii
MSVARPTPNLRTPRFPLDHRASLSDGHTNTSSSSRDDALSSHSTGTAFHKFQSYSSFAPHYLNAPPGLAFKTYLDKWGPEQVMGFLAIHGCEHHSGIFIKHSIDGKLLLDFDMSVLTSLGITKVGERIRLMGGIKCLRQRVAHEAKKHNIRSARICDGSLGTDQAKVMIHPKRSASLYAHCQNPFDSDGQSTACRSRLTPSSPADRESDPSPMQRSMNRSIITTFSRRQIIGSLPSEQIHNQSVDSSPTSSLCPPALQRLSPRSTGVSYSDITPKGTPPLITQSTNGAFDHTFSVTGPRDTTSPLGGHLHRPNFFYSTNDISQTCNRPANNTISEQPQRDRESSPSERKENGVICEDEAMGDNSLFAPTFANHPFAISITESNVLEYPRNLSIKNCLPLTSFPSPDKPAAEDTSVMNPSAPSLDDLRRQLIKFVNADDGTTRTVNVMEVTSGAEVLERALKKFGKTGSGRASFLDEDIYGDGKHEGFLCIDGWGVFAENLSGEEMGPMTEGDLLDICSSLRSGAAIQRDALVLRQTSKPQKRKDMRLYLGNTSVLPTPVNLPISFSSPYSGQFVQNSTLQYPAQHQPLLSTNRSRASMMSIMSGLGVSHPGIEKPTDESVQSSTSVTMPSSKKKSMYNFFGHRPPSELISSHLADYFPSAKKRDVAKARGSMLRLNTSHSTEGDPRDVETRPMIEVDDIFFPSTEESSTERRDHYFDPSTFQQRDTSSPRHVGNFTSNRGGSSKGNCKPHSDQKALSTLKTQELHSVNSVTPLLGASPPEVPLTYQPAWLTDFDRDPSFSQLQPLQHSSASSSKQPSSSNRRTMDEITAEMQHRQTSLSCDRPPSKVDSDISAPPSDSETSLGHSSDASDVLESSSGYSDDRSSVSSEDSEEDMAVHTRAFTSNGSKRNIKWIKGALIGAGSFGSVFLGMDAHSGLLMAVKQVELPRGIAKMEARRRDMLSALEREIELLKDLQHDNIVQYLDSSTDANHLNIFLEYVPGGSVAALLSNYGAFEEALAGNFVRQILTGLNYLHKRDIVHRDIKGANILVDNKGGIKISDFGISKKVENSLLNGLHPNRPSLQGSVFWMAPEVVKQTSYTSKADIWSVGCLVVEMLTGTHPWARLTQMQAIFQIGSMGQPEIPSDISVHAADFLSCTFALDYRMRPSAASLLEHTFIIHDGRLNQEM

SEQ ID NO: 15628 - protein, 185 aa, uncultured bacterium
GCTSGLDAVADGAELIEDGRADVVIAGATDAPISPITVACFDAIKATSPNNDDPAHASRPFDISRDGFVLGEGAAVFVLEPADQARRRRAHIYCEIAGYAQRSNAYHMTGLTADGLEMAEAIRVAMGRARLVPEDIDYINAHGSGTRQNDRHETAAFKASLGARAYEIPVSSIKSMVRHSLGAIG

SEQ ID NO: 15629 - protein, 114 aa, Gibberella zeae
RSTGGKAPRKQLASKAARKSAPSTGGVKKPHRYKPGTVALREIRRYQKSTELLIRKLPFQRLVREIAQDFKSDLRFQSSAIGALQESVESYLVSLFEDTNLCAIHAKRVTIQSK

SEQ ID NO: 15630 - protein, 184 aa, uncultured bacterium
CTSGMDAVADGAELIEDGRADVVIAGATDAPISPITVACFDAIKATSPNNDDPAHASRPFDISRDGFVLGEGAAVFVLEPADQARRRRAHIYCEIAGYAQRSNAYHMTGLTADGLEMAEAIRVAMGRARLVPEDIDYINAHGSGTHQNDRHETAAFKASLGARAYEIPVSSIKSMVGHSLGAIG

SEQ ID NO: 15631 - protein, 117 aa, Gibberella zeae
GRRSTGGKAPRKQLASKVARKSAPSTGGVKKPHRYKPGTVALREIRRYQKSTELLIRKLPFQRLVREIAQDFKSDLRFQSSAIGALQESVESYLVSLFEDTNLCAIHAKRVTIQSKD

SEQ ID NO: 15632 - protein, 666 aa, Neurospora crassa
MDGSLMAALPQGQDVIRVISTGGVTKVVKIADCNTCEEVMRVTLRKFGLREDHERNYCFWVLAGVDPDPNQCRRLGDTELWRVIKDHTRPERNRLILRRVPSGEPGKAELERAAAIAMEEAQQTHRPPIEPSDKRSQLKLQKVLGVGWEDLQQQPPLSPMSYQDRERNVSNAARDLERPAPLETPRAMPRRTQALRQFGGLRPPSELIASDLTSYFPDHSREAIDRTARLSMRRSARLSRVNHRLSVASTLSFASSIQDAPPIPTIADSWLTASNQIAKVRPRDVLPRAPHGYRDSVASSVLDTLQEEGSPTEPNRRSFVPFSDSGSDTAAVSVIDPDGNIVRHSYYDSGTNNSADSAVIQEALAEDGEDAADKELQTFLAGDAWDDSMWMKGSLIGQGSFGSVYLALHAITGELLAVKQVETPAPGADSKNDARKKSMIEALKREITLLRDLQHPNIVQYLGCSSSAEYLNIFLEYVPGGSVQTMLNQYGALPESLVRSFVRQILQGLSYLHNRDIIHRDIKGANILVDNKGTIKISDFGISKKLEATNILNGANNNKHRPSLQGSVFWMAPEVVKQTSYTRKADIWSLGCLVVEMMTGTHPFPDCTQLQAIFKIGGSKASPTIPDNASEEAKQFLAQTFEIDHNKRPSADELMLSPFLTPVPGT

SEQ ID NO: 15633 - protein, 185 aa, uncultured bacterium
GCTSGMDAVADGAELIEDGRADVVIAGATDAPISPITVACFDAIKATSPNNDDPAHASRPFDISRDGFVLSEGAAVFVLEPADQARHRRAHIYCEIAGYAQRSNAYHMTGLTADGLEMAEAIRVAMGRARLVPEDIDYINAHGSGTRQNDRHETAAFKASLGARAYEIPVSSIKSMVGHSLGAIG

SEQ ID NO: 15634 - protein, 389 aa, Desulfovibrio vulgaris subsp. vulgaris str. Hildenborough
MLNKPRLLTPGPTPLPERVRLVMAQDMIHHRKPAFKKLMGEVQEKLRILFGTSQPVLPLACSGSGAMTAAVHGLFVPGEKVIVVEGGKFGQRWREIASLRGLEVVSIVVEWGRAVSLAEVEAALDAHPDAKGVLMQLSETSTGVLHPVRGIAAVTRKRDVLLVADGISAVGISPCPMDEWGVDCLLTGSQKGLMLPPGLALIALSERAWRKADTVAPSCFYFNLPGERANCEKGQTLFTTPVSLIVGLGESLDMFLEAGLETVYRKQWALTMLARAGTAALGLAPLAPERFTWGLTSVMLPAGVDGTRLLQVAADNHGVVMAGGQDHLKGRILRIGHMGWVDWADIVAGLHAVASGLRTCGAYVGARDYIETGLAAYEAALQVAPGTPV

SEQ ID NO: 15635 - protein, 185 aa, uncultured bacterium
GCTSGMDAVADGAEFIEDGRADVVIAGATDAPISPITVACFDAIKATSPNNDDPAHASRPFDISRDGFVLGEGAAVFVLEPADQARRRRAHIYCEIAGYAQRSNAYHMTGLTADGLEMAEAIRVAMGRARLVPEDIDYINAHGSGTRQNDRHETAAFKASLGARAYEIPVSSIKSMVGHSLGAIG

SEQ ID NO: 15636 - protein, 341 aa, Polaromonas sp. JS666
MPAELQAFDCRNNRLARLALRQDNFELAVRDVAARVGHRRIGIFLGTSTSGILQTELAYRQRDPATGALPASFIYASTHNPYSVTAFVREYFRLEGPAVTVSSACSSSAKVFASARRMMAAGLIDAAVVGGVDSLCLTTLYGFNSLDLLSRSPCQPFDAARKGISIGEGAAFALLERSPGSLDAKAVLLRGTGESSDAHHMSAPHPEGLGAVMAMRQALASAGLQPGEIDYINLHGTATPSNDAAESKAVAAVFGEHAQPCSSTKGATGHTLGAAGGIEAVISALALQQGFMPGGVNTDNVDPSLPVNYLLKNRDQALTHVLSNSFGFGGTNCSLVFGRAG

SEQ ID NO: 15637 - protein, 391 aa, Azoarcus sp. EbN1
MRDVVIVEAVRTPVGKFRGGLKDVRADHLGALVLDEVIKRANLGAEVVDDVVFGCVTQVGEQCGNIARTSLLSAGWPETIPGMTVDRKCGSSEAAIHVAMGEIASGACDIVVAGGAENMSRVPMGGNRDVHGEPFGWRLRERFHLTSQGEAAERLCDLWGLSRDDIDDFAIESHRRAARAADAGWFEREIVPVPVAEICEQGVKIAVERVAADETIRRDTSREKLATLKTSFRPEGGRVTAGNASQISDGAAALLLMSADKAKALGLKPRARIRAVTTVGSDPELMLTGPIAATRRAVERAGLALGDIDLFEVNEAFAPVPMIWMRELGIGHDRLNVNGGAIALGHPLGGSGARIMTTLLHELERRGATFGAQAICCAGGLGTATVIERLG

SEQ ID NO: 15638 - protein, 286 aa, Kluyveromyces lactis NRRL Y-1140
MRLYVLRHGQSEVNQRNIFGGWVDVHLTEKGLDQARNSAILIKAYCQSQGLELPKLGYTSRLIRTEETMNEILKEFGKQPEFRIVSGELPPQQTSDNGKFPVYQSWRLNERHYGSWQGQSKHKMLEEYGEEQYMYIRRDYLGKPPKADLNREMVQDFDQGDTGYEFKEPNRHVKYLEEEITHDELPNGESLCDVVQRLKPLLENMILPNLKERGDSLIVGHGSTVRSLLKILEGISDTDIKEVNIPNAIPSVIELDDNFRFIRKFYLDPESAKVNAELVRQEGFKE

SEQ ID NO: 15639 - protein, 533 aa, Rubrivivax gelatinosus PM1
MASGTPPTVHPVDEKLPAGRLATLGLQHVLVMYAGAVAVPLIVGRALKLSPEQVAMLISADLFCCGIATLIQSLGATRWFGVKLPVMMGVTFAAVGPMVAMAGPGGTEAARAIFGAIIGAGLLAIFIAPVMGRLLRFFPPVVTGTIIAVIGISLMRVGIGWAMGGPAHLAQFTDVPRLVVMVDQAKAEALAGNAAVAALSAGSAPAAGVATQAAAAATASANAGTNAGAAPVPVVTRLPGPVPQKDNPAYGALDNMAVAAFVLGVILLISKYGRGFVANISVLLGIVAGCVVAVAMGKMGFDKVAKAHWFDVVTPFAFGPPVFDPVLIATMTLVMVVVMIESTGMFLALSDLTGKPIDQRELTAGLRTDGLGTLIGGMFNTFPYTSFSQNVGLVGVTGVRSRYVCVAAGLIMIVLGLLPKMAALVESVPTFVLGGAGLVMFGMVAATGIRILAAVDYKTHRHNLYIVAISIGFGMLPLVAPRWTQQMHHGLHPLLESGILLAALSAVLLNLYFNGAKGGAADAVEAAKLAEAH

SEQ ID NO: 15640 - protein, 456 aa, Clostridium thermocellum ATCC 27405
MMNANFMEFEKNKLEELTELATKCSYIDPELFVKYQVKRGLRDLDGKGVLVGLTEIGEVHSYIIDENEIVPVPGRLIYRGIDIFDLVDGFISEGRFGFEETTYLLLFGDLPTREQLNEFEKLLSSYRELPEEFLNDMILNLPGKDIMNVLARSVLAYYTYDSNPDDTSVKNVLRQCMRLIGSMPTIAVYAYQAMAHYYDRKSLVIHPPRPELSTAENILHMLRPDSKYTDLEARLLDLALVLHAEHGGGNNSTFVTHVVTSTGTDTYSVIAAALGSLKGPRHGGANIKVCQMFEDLKQNVRDWKDDEEIENYLMKLLNKEAFDRAGLIYGIGHAVYSISDPRCILLKEQAEKLAKEKGLEDEFELYDRVERLAPQIIGRVRKMYKGVSANVDFYSGFVYKMLNLPLELYTPIFAISRMSGWAAHRIEEIVNAGKIIRPAYKSVAERRDYVAMKDRK

SEQ ID NO: 15641 - protein, 187 aa, Brassica napus
RPTRPPRVRVGTACSEEKMGKPKKQYNGTYGRLLAFAAHALAEGQNKIEPKELWREPKDQALAWKPCADQRSWKPNDGKNGYIMVTANGGINQQRVAVCNIVVLARLLNATLVVPKFMFSDVWTDSSQFEDIYQVEHFIKYLSPDIRIVKNLPKELQSLDLEAIGSLVTDIDIMKEAKPGFYMKHIL

SEQ ID NO: 15642 - protein, 185 aa, uncultured bacterium
GCTSGLDAVADGAELIEDGRADVVIAGATDAPISPITVACYDAIKATSPNNDDPAHASRPLDISRDGFVLGEGAAVFVLEPADQARRRRAHIYCEIAGYAQRSNAYHMTGLTADGLEMAEAIRVAMGRARLVPEDIDYINAHGSGTRQNDRHESAAFKASLGARAYEIPVSSIKSMVGHSLGAIG

SEQ ID NO: 15643 - protein, 1168 aa, Mycobacterium tuberculosis H37Rv
MSINDQRLTRRVEDLYASDAQFAAASPNEAITQAIDQPGVALPQLIRMVMEGYADRPALGQRALRFVTDPDSGRTMVELLPRFETITYRELWARAGTLATALSAEPAIRPGDRVCVLGFNSVDYTTIDIALIRLGAVSVPLQTSAPVTGLRPIVTETEPTMIATSIDNLGDAVEVLAGHAPARLVVFDYHGKVDTHREAVEAARARLAGSVTIDTLAELIERGRALPATPIADSADDALALLIYTSGSTGAPKGAMYRESQVMSFWRKSSGWFEPSGYPSITLNFMPMSHVGGRQVLYGTLSNGGTAYFVAKSDLSTLFEDLALVRPTELCFVPRIWDMVFAEFHSEVDRRLVDGADRAALEAQVKAELRENVLGGRFVMALTGSAPISAEMTAWVESLLADVHLVEGYGSTEAGMVLNDGMVRRPAVIDYKLVDVPELGYFGTDQPYPRGELLVKTQTMFPGYYQRPDVTAEVFDPDGFYRTGDIMAKVGPDQFVYLDRRNNVLKLSQGEFIAVSKLEAVFGDSPLVRQIFIYGNSARAYPLAVVVPSGDALSRHGIENLKPVISESLQEVARAAGLQSYEIPRDFIIETTPFTLENGLLTGIRKLARPQLKKFYGERLERLYTELADSQSNELRELRQSGPDAPVLPTLCRAAAALLGSTAADVRPDAHFADLGGDSLSALSLANLLHEIFGVDVPVGVIVSPASDLRALADHIEAARTGVRRPSFASIHGRSATEVHASDLTLDKFIDAATLAAAPNLPAPSAQVRTVLLTGATGFLGRYLALEWLDRMDLVNGKLICLVRARSDEEAQARLDATFDSGDPYLVRHYRELGAGRLEVLAGDKGEADLGLDRVTWQRLADTVDLIVDPAALVNHVLPYSQLFGPNAAGTAELLRLALTGKRKPYIYTSTIAVGEQIPPEAFTEDADIRAISPTRRIDDSYANGYANSKWAGEVLLREAHEQCGLPVTVFRCDMILADTSYTGQLNLPDMFTRLMLSLAATGIAPGSFYELDAHGNRQRAHYDGLPVEFVAEAICTLGTHSPDRFVTYHVMNPYDDGIGLDEFVDWLNSPTSGSGCTIQRIADYGEWLQRFETSLRALPDRQRHASLLPLLHNYREPAKPICGSIAPTDQFRAAVQEAKIGPDKDIPHLTAAIIAKYISNLRLLGLL

SEQ ID NO: 15644 - protein, 544 aa, Ralstonia pickettii
MAAKDVIFGDAARAKMVEGVNILANAVKVTLGPKGRNVVLERSFGGPTVTKDGVSVAKEIELKDKLQNMGAQMVKEVASKTSDNAGDGTTTATVLAQSIVREGMKYVAAGMNPMDLKRGIDKAVTAAVEELKKVSKPTTTSKEIAQVGAISANSDTSIGERIAEAMDKVGKEGVITVEDGKSLADELEVVEGMQFDRGYLSPYFINNPEKQVVQLDSPFVLLFDKKVSNIRDLLPVLEQVAKAGRPLLIIAEDVEGEALATLVVNNIRGILKTAAVKAPGFGDRRNGMLEDIAILTGGTVIAEEIGLTLEKATLNDLGQAKRIEIGKENTIIIDGAGDAGAIEGRVKQIRAQIEEATSDYDREKLQERVAKLAGGVAVIKVGAATEVEMKEKKARVEDALHATRAAVEEGIVPGGGVALLRARAAISALTGENADQNAGIKIVLRAMEEPLRQIVLNAGEEASVVVAKVIEGKGNYGYNAASGEYGDLVEMGVLDPTKVTRTALQNAASVASLMLTTDCAVAESPKEESAPAMPGGMGGMEGMM

SEQ ID NO: 15645 - protein, 518 aa, Zea mays
MAAITPPTQSEPSPQTGRPASSAAAAAKRGGGGAGAAGGPLMGKYELGRLLGHGTFAKVYHARHVDTGDNVAIKVLDKEKAVKSGLVPHIKREIAVLRRVRHPNIVHLFEVMATKTKIYFVMELVRGGELFSRVSKGRLREDTARRYFQQLVSAVGFCHARGVFHRDLKPENLLVDEQGNLKVSDFGLSAVAEQFRPDGLLHTFCGTAAYVAPEVLGRRGYDGAKADVWSCGVILFVLMAGYLPFHDKNIMAMYKKIYKGEFRCARWFSKDLTSLLMRILHTNPNTRITLPEIMESRWFKKGFKPVKFYIEDDQLHNVIDDEDGLLDMGPAGPVPPPLPPPPPPLPPPKVDGDESGSDSDSSISSCPASMLSDESQRPRGSLPRPASLNAFDIISFSRGFNLSGLFEEKGDEVRFISAEPMSDIITKLEDIAKLKSFKLRRKDWRICLEGTREGVKGPLTIGAEIFELTPPLVMVEVKKKAGDNEEYENFCDKELKPGMQHLVHHMVRAPSMLLTDAK

SEQ ID NO: 15646 - protein, 307 aa, Ralstonia eutropha JMP134
MPTGYYTHPEFLLHEMGHFHPECPERLQAIEDHLISHGMDGLLERREAAPATREQIERVHGAAYVDSLERASPASGYYPIDPDTSMNSHTLAAAKLAAGAAVAATDAVMAGEVENAFCCVRPPGHHAEPDRAMGFCFFNNVAVAARHALAAHGLERVAVVDFDVHHGNGTEAAFRGDDRVLMCSFFQHPFYPYSGTEHIATNMANIPLPAYTNGLAVREVVDTIWLPRLNEFRPQMLFISAGFDAHREDDLGQMGLVEQDYAWITGQLVDVARAHANGRIVSCLEGGYNLSALGRSVLAHLKVLLER

SEQ ID NO: 15647 - protein, 753 aa, Shigella flexneri 2a str. 301
MSQHNEKNPHQHQSPLHDSSEAKPGMDSLAPEDGSHRPAAEPTPPGAQPTAPGSLKAPDTRNEKLNSLEDVRKGSENYALTTNQGVRIADDQNSLRAGNRGPTLLEDFILREKITHFDHERIPERIVHARGSAAHGYFQPYKSLSDITKADFLSDPNKITPVFVRFSTVQGGAGSADTVRDIRGFATKFYTEEGIFDLVGNNTPIFFIQDAHKFPDFVHAVKPEPHWAIPQGQSAHDTFWDYVSLQPETLHNVMWAMSDRGIPRSYRTMEGFGIHTFRLINAEGKATFVRFHWKPLAGKASLVWDEAQKLTGRDPDFHRRELWEAIEAGDFPEYELGFQLIPEEDEFKFDFDLLDPTKLIPEELVPVQRVGKMVLNRNPDNFFAENEQAAFHPGHIVPGLDFTNDPLLQGRLFSYTDTQISRLGGPNFHEIPINRPTCPYHNFQRDGMHRMGIDTNPANYEPNSINDNWPRETPPGPKRGGFESYQERVEGNKVRERSPSFGEYYSHPRLFWLSQTPFEQRHIVDGFSFELSKVVRPYIRERVVDQLAHIDLTLAQAVAKNLGIELTDDQLNITPPPDVNGLKKDPSLSLYAIPDGDVKGRVVAILLNDEVRSADLLAILKAMKAKGVHAKLLYSRMGEVTADDGTVLPIAATFAGAPSLTVDAVIVPCGNIADIADNGDANYYLMEAYKHLKPIALAGDARKFKATIKVADQGEEGIVEADSTDGSFMDELLTLMAEHRVWSRIPKIDKIPA

SEQ ID NO: 15648 - protein, 547 aa, Ralstonia pickettii
MAAKDVVFGDAARAKMVEGVNILANAVKVTLGPKGRNVVLERSFGGPTVTKDGVSVAKEIELKDKLQNMGAQMVKEVASKTSDNAGDGTTTATVLAQSIVREGMKYVAAGMNPMDLKRGIDKAVTAAVEELKKVSKPTTTSKEIAQVGAISANSDTSIGERIAEAMDKVGKEGVITVEDGKSLADELEVVEGMQFDRGYLSPYFINNPEKQVVQLDSPFVLLFDKKVSNIRDLLPVLEQVAKAGRPLLIIAEDVEGEALATLVVNNIRGILKTAAVKAPGFGDRRKAMLEDIAILTGGTVIAEEIGLTLEKAGLNDLGQAKRIEIGKENTIIIDGAGDAGAIEGRVKQIRAQIEEATSDYDREKLQERVAKLAGGVAVIKVGAATEVEMKEKKARVEDALHATRAAVEEGIVPGGGVALLRARAAISALTGENADQNAGIKIVLRAMEEPLRQIVLNAGEEASVVVAKVIEGKGNYGYNAASGEYGDLVEMGVLDPTKVTRTALQNAASVASLMLTTDCAVAESPKDESAPAMPGGMGGMGGMEGMM

SEQ ID NO: 15649 - protein, 429 aa, Pseudomonas fluorescens PfO-1
MADKKAQLIIEGAAPVELPILTGTVGPDVIDVRGLTATGRFTFDPGFMSTASCESKITYIDGDNGILLHRGYPIEQLAEKSDYLETCYLLLNGELPTAEQKAQFVGTVKNHTMVHEQLKTFFNGFRRDAHPMAVMCGVVGALSAFYHDSLDINNPQHREISAIRLVAKMPTLAAMVYKYSMGQPMMYPRNDLSYAENFLHMMFNTPCEIKPISPVLAKAMDRIFILHADHEQNASTSTVRLAGSSGANPFACIAAGIAALWGPAHGGANEAVLTMLDEIGDVSNIDKFIAKAKDKNDPFKLMGFGHRVYKNRDPRATVMKQTCDEVLKELGIQNDPQLELAMRLEEIALTDPYFIERSLYPNVDFYSGIILKAIGIPTSMFTVIFALARTVGWISHWKEMLSSPYKIGRPRQLYTGYESRDITKLEDRK

SEQ ID NO: 15650 - protein, 432 aa, Ralstonia eutropha JMP134
MTNGEDTGFLPKWRLKTEGVIGPDERLPTGQTVLAGIQHVVAMFGSTAIAPILMGFNPNIAILFSGIGTLIFFLCVRGRVPSYLGSSFAFIAVVIAATGYAGSGPNTNIPVALGGIIAAGALYTVIGLVVQAVGYSWVEKLMPPVVTGAIVAAIGLNLAPVAVKAVSGSSFDTWVGLLTVLAVGLVAVRAPGMIGRLPVLIGGLFGYLIYFVGTNLMGLGKPIDFAGVAAANWFGLPAFTSPVFEFSAMLLIAPVAIVLVAENLGHIKAIGVMTGRNLDPYIGRAFIGDGVATMLSASGGGTGVTTYAENMGVMAVTKIYSTLIFVVAAAVAILLGFSPKFGALILTIPGPVIGGLTIVVFGLIAATAGRIWVQNHVDFSSSRNLITVGATLTVAAGDLTLRLGGMTLGGIGTATFGCILLYHLLGEGNKEA

SEQ ID NO: 15651 - protein, 590 aa, Pseudomonas fluorescens PfO-1
MANIPTISFDAIIIGGGGAGMRAALQLAQGGHKTAVITKVFPTRSHTVSAQGGITCAIASADPNDDWRWHMYDTVKGSDYIGDQDAIEYMCQEGPAAVFELDHMGLPFSRTEQGRIYQRPFGGQSKDYGKGGQAARTCAASDRTGHALLHTLYQGNLKAGTTFLNEYYAVDLVKNQEGEFVGVIAICIETGETTYIRAKATVLATGGAGRIYASTTNALINTGDGVGMALRAGVPVQDIEMWQFHPTGIAGAGVLVTEGCRGEGGYLINKHGERFMERYAPNAKDLAGRDVVARSMVKEIIAGNGCGPNGDHVMLKLDHLGEEVLHSRLPGICELSKTFAHVDPVVAPVPVVPTCHYMMGGVATNIHGQAITQDAEGVDQIIPGLFAVGEVACVSVHGANRLGGNSLLDLVVFGRAAGLHLEKALTDGIEYDDATEADIEAALARLNALNNRTDGEDVATLRRELQSCMQNYFGVFRTGEYMQKGIAQLADLRKRIANVKINDKSQAFNTARIEALELQNLLEVAEATAIAAEVRKESRGAHAREDFEDRDDENWLCHTLYFPGEKRVAKRAVNFSPKTVPTFEPKVRTY

SEQ ID NO: 15652 - protein, 272 aa, Oryza sativa (japonica cultivar-group)
MEGGGGGGGGGGGGGGGGGGGGAPYATRTAEEVFRDLRGRRAGMIKALTTDVEKFYKLCDPEKENLCLYGYPNETWEVTLPAEEVPPEIPEPALGINFARDGMNEKDWLALVAVHSDSWLLSVAFYFGARFGFDREARRRLFNMINNLPTIFEVVTGAAKKQAKEKTPNSSSKSNKPSSKVQSKAESRSKSKLSAPKDEEGSGDDEGEEEEDDHDNTLCGTCGTNDGKDEFWICCDNCEKWYHGKCVKITPARAEHIKQYKCPDCTNKRARA

SEQ ID NO: 15653 - protein, 183 aa, Escherichia coli
LGIGVYKDETGKTPVLTSVKKAEQYLLENETTKNYLGIDGIPEFGRCTQELLFGKGSALINDKRARTAQTPGGTGALRVAADFLAKNTSVKRVWVSNPSWPNHKSVFNSAGLEVREYAYYDAENHTLDFDALINSLNEAQAGDVVLFHGCCHNPTGIDPTLEQWQTLAQLSVEKGWLPLFDFA

SEQ ID NO: 15654 - protein, 196 aa, Escherichia coli
RADERPGKINLGIGVYKDETGKTPVLTSVKKAEQYLLENETTKNYLGIDGIPEFGRCTQELLFGKGSALINDKRARTAQTPGGTGALRVAADFLAKNTSVKRVWVSNPSWPNHKSVFNSAGLEVREYAYYDAENHTLDFDALINSLNEAQAGDVVLFHGCCHNPTGIDPTLEQWQTLAQLSVEKGWLPLFDFAYQG

SEQ ID NO: 15655 - protein, 177 aa, Betula pendula
GVLLLEELEHAKRRGANIYAEFLGGSFTCDAYHMTEPRPDGAGVILCIEKALARSGVSKEDVNYINAHATSTPAGDLKEYQALIHCFGQNPELRVNSTKSMTGHLLGAAGAVEAVAAVQAIRTGWVHPNINLENPDEGVDTNVLVGSKKERLDIKVALSNSFGFGGHNSSIIFAPYK

SEQ ID NO: 15656 - protein, 740 aa, Ustilago maydis 521
MAQPAVRQPTVTRSRISRPGGIPASRSGDRIHLTEAASTSHLAKAKSTKLVGPSTAGKLRADSRSMPQRAALSDVSNRAGVARANALADGAVKLAPGHNGLRSQHTKSMTRLRDARSRSTSEQRLSGPTRSVSEQRDCAPAAAESMHVEASQLLPPFQSSASVKVGISDEAGSSRLHEDADIRDLAGSQHSDHVEEDEMSDVASTSSSDDDTAEDIGVDKANWLDSERLDAEGLVSLHPELEEAARRKVALIKSRYQEEVIQPRAARAQAQHAEAVAAGQLSAELAAHEDELIVMGLDPEEVRDTSMVAEYSNEIFSYMARCERETMANPNYMEFQSEIHWHMRATLVDWLLQVHMRYHMLPETLWIAINVVDRFLSVRVVSLAKLQLVGVTAMFIAAKYEEILAPSVKEFVYMTEGGYSQEEILKGERIILSTLDFNISSYCSPYSWVRKISKADDYDIRTRTLSKFLMELALLDHRFLRARPSLVAAVGMFLAKKMLGGEWDDAFVYYSDFTEEQLVPGANLLLERLLDQGFEEQFVYRKYSNKKFLRASVFARDWAFQNHSALLAAAAAAAGSTQAVHSCLVTTTVQHRFREQRTYVQRRRAGASVWRDERKDPRGSTFGSGCGEWKDKDRIEADVKREASRMKLVHAVSDMAKLYLHTHPHHCSHKRVHAWYESVSVMCIHDFRSAQLAWLRLEPVIARCEAQAIHDRACSQSLWPTQRSCLTRNGTHDEKLSCNS

SEQ ID NO: 15657 - protein, 118 aa, Fusarium pseudograminearum
TARRSTGGKAPRKQLASKAARKSAPSTGGVKKPHRYKPGTVALREIRRYQKSTELLIRKLPFQRLVREIAQDFKSDLRFQSSAIGALQESVESYLVSLFEDTNLCAIHAKRVTIQSKD

SEQ ID NO: 15658 - protein, 658 aa, Candida glabrata CBS138
MFLFRKPSIRSCQRINSLCSLLELQRGYATTTRENTLYPPHADTSSPHKTPVGEAAKEYLKQKKRKLQEKGTPKSTRLTVEGVIECPLESFQLLNSPLFNKGSAFTQEEREAFNLEALLPPQVNTLDEQLERAYKQLCYLKTPLAKNDFMTSLRVQNKVLYFALVRKHIRELVPIIYTPTEGDAIASYSHRFRKPEGVFLDITEPNSVEKRLAVYGEAKDVDYIVVSDSEGILGIGDQGVGGVRIAISKLALMTLCGGIHPGRVLPVCLDVGTNNKKLARDELYMGNKFSRIRGKQYDDFIDSFIQAVKKLYPSAVLHFEDFGVKNARRILDKYRYDLPCFNDDIQGTGAVVTASLLAALKHTDRELKDTKVLVFGAGSAGLGIADQITNHMVTHGLTPEEARSNIYLMDRRGLILESMEENSTVAQHRYAKPDEDWDDIDTTKLFNVVSKMKPTCLVGCSTQAGAFTKEIVQEMYKYNPRPIIFPLSNPTRLHEAVPSDLMEWTNNDALVATGSPFAPVNGYRISENNNCFSFPGIGLGAVLSRATAITDTMISAAVDQLAALSPLKPGDSRPGLLPPLEDITNTSAKLATAVILQSLKEGTARIEDEEVPGSPGEKVTVPRDFDQCLEWVKSQMWEPVYRPMVKVNYDPEVHTNQM

SEQ ID NO: 15659 - protein, 190 aa, Shigella flexneri
ADERPGKINLGIGVYKDETGKTPVLTSVKKAEQYLLENETTKNYLGIDGILEFGRCTQELLFGKGSALINDKRARTAQTPGGTGALRVAADFLAKNTSVKRVWVSNPSWPNHKSVFNSAGLEVREYAYYDAENHTLDFDALINSLNEAQAGDVVLFHGCCHNPTGIDPTLEQWQTLAQLSVEKGWLPLFD

SEQ ID NO: 15660 - protein, 185 aa, uncultured bacterium
GCTSGMDAVADGAELIEDGRADVVIAGATDAPISPITVACFDAIKATSPNNDDPAHASRPFDISRDGFVLGEGAAVFVLEPADQARRRRAHIYCEIAGYAQRSNAYHMTGLIADGLEMAEAIRVAMGRARLVPEDIDYINAHGSGTRQNDRHETAAFKASLGARAYEIPVSSIKSMVGHSLGAIG

SEQ ID NO: 15661 - protein, 327 aa, Brassica napus
  misc_feature (132)..(132): Xaa can be any naturally occurring amino acid
  misc_feature (201)..(201): Xaa can be any naturally occurring amino acid
  misc_feature (234)..(234): Xaa can be any naturally occurring amino acid
  misc_feature (303)..(303): Xaa can be any naturally occurring amino acid
  unsure (1)..(327): unsure at all Xaa locations
MGEKPISGNLKKLTIETGRSETLVVCFGEMLIDFVPTVGGVSLAEAPAFKKAPGGAPANVAVGVSRLGGSSAFVGKVGDDEFGKMLAEILKLNNVDNSGMRFDHKARTALAFVTLRADGEREFLLFLLPRAXYFHYGSISLIKEPCRSTHLAAMKIAKAAGSLLSYDPNLRLPLWPSEEAARKEIMSIWDLADVIKISEDXITFLTGGDDPYSDEVVLQKLFHPNLKLLVVSEXPNGCRYYTKEFKGRVGGVKVKAVDTTGAGDAFVSGLLHSLASDLTLLTDEKKLREALLFANACGAITVXTERGAIPAMPPMDAVQELLKSSGS

SEQ ID NO: 15662 - protein, 308 aa, Oryza sativa
YFETMNNLYLVTDLALGGELFDRICRKGNYYESDAGDLIRATLSAVAYLHDHGIVHRDLKPENLLFRTPEDNADLLIADFGLSRIMDEEQFHVLTTTCGTPGYMAPEIFRKTGHGKPVDIWAIGVITYFLLCGYTPFDRDSNLEEMQAILVADYSFTPLEYWRGVSLTAREFIRRCLTVDPAARMTAHEALSHPWITELGKNNADGEEDLLPTVKKNFNARRTLHAAIDTIRAINQLRAGGAAGMMDGQRSAEPRRGAPHARIPQPADEPDDPMEIDSRGNGHGQTEEMIQEQERRIRETQQGLWGKR

SEQ ID NO: 15663 - protein, 318 aa, Arabidopsis thaliana
MTLGCKQAIELAVDILAKPKANVLLPSPGFPWDLVRSIYKNLEVRHYNFLPEKNFEIDFDSVRALVDENTFAIFIINPHNPNGNTYSEAHLKQLAELAKELKIMVVSDEVFRWTLFGSNPFVPMGKFSSIVPVVTLGSISKGWKVPGWRTGWLTLHDLDGVFRNTKVLQAAQDFLQINNNPPTVIQAAIPDILEKTPQEFFDKRQSFLKDKVEFGYSKLKYIPSLTCYMKPEACTFLWTELDLSSFVDIEDDQDFCNKLAKEENLVVLPGIAFSQKNWLRHSIDMETPVLEDALERLKSFCDRHSNKKAPLKDVNGVK

SEQ ID NO: 15664 - protein, 395 aa, Azoarcus sp. EbN1
MTQREVVVVGAARTAIGTFGGSLRDVPLTRLGTVAVEAALKRSGVNPQEVGHVVMGNVIPTEPRDAYLSRVAAMDAGVPKETPAFNVNRLCGSALQAVVSAAQSILLSDTDIAIGGGAETMSRGAYLLPASRWGARMGDSQVVDYMNGILHDPWKRIHMGVTAENVAERYGITREMQDELALESQRRAANAIAAGYFKEQIVPVEVSSRRGAVLFDTDEHVRADMTAEALVKMKPVFKKEGGTVTAGNASGINDGAAALVLAEAGRAAALGLRPLARLVGYAHAGVEPEYMGIGPVPATQQVLKRCGLSIKDLDVIEANEAFAAQAYAVIRELDLDPAKVNPNGSGISLGHPVGATGAIIITKAIAELHRTGGRYALVTMCIGGGQGIAAIFERL

SEQ ID NO: 15665 - protein, 263 aa, Lotus corniculatus var. japonicus
MAKHSPDQLAIEELKKLIREKEELNESADTKIEDVIAELQLQGCHPTPETAEQRIIDGFTYFKIHNFDKNPDLYKELAKGQSPKFLIFACSDSRVSPTTILNFQPGEAFMVRNIANMVPPFNQLRYSGVGAAIEYAILELKVPNILIIGHSRCGGIARLMSHPEDDSPSFEFIDDWVKIGLPAKIKVLKEHASCDSLEQRTLCEKESVNNSLVNLHTYPFVDEQIRSKGLGLFGVYYDFVNGEFKLWKYESHVTKHISIPHCH

SEQ ID NO: 15666 - protein, 185 aa, uncultured bacterium
GCTSGMDAVADGAELIEDGRADVVIAGAADAPISPITVACFDAIKATSPNNDDPAHASRPFDISRDGFVLGEGAAVFVLEPADQARRRRAHIYCEIAGYAQRSNAYHMTGLTADGLEMAEAIRVAMGRARLGPEDIDYINAHGSGTRQNDRHETAAFKASLGARAYEIPVSSIKSMVGHSLGAIG

SEQ ID NO: 15667 - protein, 274 aa, Arabidopsis thaliana
MNGEARSRVVDQEAGSTPSTLRDEDHPSRQRLFGCLPYDIDLNPLRIVMAELVGTFILMFSVCGVISSTQLSGGHVGLLEYAVTAGLSVVVVVYSIGHISGAHLNPSITIAFAVFGGFPWSQVPLYITAQTLGATAATLVGVSVYGVNADIMATKPALSCVSAFFVELIATSIVVFLASALHCDFVQLGNLTGFVIGTVISLGVLITGPISGGSMNPARSLGPAVVAWDFEDLWIYMTAPVIGAIIGVLTYRSISLKTRPCPSPVSPSVSSLLR

SEQ ID NO: 15668 - protein, 184 aa, uncultured bacterium
CTSGLDAVADGAELIEDGRADVVIAGATDAPISPITVACFDAIKATSPNNDDPAHASRPFDISRDGFVLGEGAAVFVLEPADQARRRRAHIYCEIAGYAQRSNAYHMTGLTADGLEMAEAIRVAMGRARLVPEDIDYINAHGSGTRQNDRHETAAFKASLGARAYEIPVSSIKSMVGHSLGAIG

SEQ ID NO: 15669 - protein, 394 aa, Kluyveromyces lactis NRRL Y-1140
MNRNERQPTYRLLEEIGRGSFGSVRKVVREADNKVMVRKEVRYGHMNAKERQQLISECAILSQLKHDNIVEFFHWDHDAKSNTLFLYMEYCSKGDLSQMIRYYKHQRKYVPEEYVWRIMVQILMALFKCHYGRDLSKLQTIYDAMEEPLKSKGYVVIHRDLKPGNIFLTGYDDEFNQNASDVDYSKVIIKLGDFGLAKSLQASIEFATTYVGTPYYMSPEVLRDQPYSPLSDIWSLGCILYELCSLHVPFQAKTYTELQGKVKAGYFEPLPHFYSKNLQDIITRCIQVDFTKRPSTWSLLNDIQCRICRKALDLEKFERHLLNYEHELTQVGEMLEQHATEMKRDFASAVDQRVREILNGTSKPAATPLITGTGPVTMPGRTPFRNANVNRNYR

SEQ ID NO: 15670 - protein, 432 aa, Vibrio parahaemolyticus RIMD 2210633
MLWTVMPHPILIVAVCFAPLALLFVLNQTFWLVTLFVIFSFFRIHEAFPAIYSFKIPLLLSLGALAALAFHLLLSRQLTAFWHPSLKWLCIFWGLVIIGIVFASSRDIAITVFKNTYWKIIVMTLAITWLITKPQQLAQMSKAIIVAGMLIGLVALNNAANGIDLVEGTRVSIGRSIGSVLGDPNDLALVLMFPLAFTVSQLMEKRSPTLLRLFALITCFILFFAVIQTQSRGGLLGSLSVFAYFAFKHIKSKTLVLVLGAVAALALYAFAGISGRESGGAAEDGIDASAMGRLYAWEAAFKMALHHPFTGVGLDNFYFNYYFYSPHWDGINHAVHSTWFGVLAETGFVGLAVFITLIVSLIRTSLKSISLLTPDSDYALTVGANAVLSGLIGTIVSGTFLTQGFTWPIYILAALTVVVSRIVQSDCQNEKS

SEQ ID NO: 15671 - protein, 478 aa, Pseudomonas fluorescens PfO-1
MSQKFDVVVIGAGPGGYVAAIKAAQLGLSTACIEKYTDAEGKQALGGTCLNVGCIPSKALLDSSWKYKEAKESFNVHGISTGEVKMDVAAMVGRKAGIVKNLTGGVATLFKANGVTSIQGHGKLLAGKKVEVTKPDGSVEVIEAENVILAPGSRPIDIPPAPVDQKVIVDSTGALEFQSVPKRLGVIGAGVIGLELGSVWSRLGAEVTVLEALDTFLMAADTAVSKEALKTLTKQGLDIKLGARVTGSKVNGDEVVVNYTDANGEQTITFDKLIVAVGRRPVTTDLLAADSGVTLDERGFVHVDDHCATTVPGVYAIGDVVRGMMLAHKASEEGIMVVERIKGHKAQMNYDLIPSVIYTHPEIAWVGKTEQALKAEGVEVNVGTFPFAASGRAMAANDTGGFVKVIADAKTDRVLGVHVIGPSAAELVQQGAIGMEFGTSAEDLGMMVFSHPTLSEALHEAALAVNGGAIHIANRKKR

SEQ ID NO: 15672 - protein, 175 aa, Glycine max
KYHFCETSKLNKGSLRDYSKTYARSKYYDEAKPWSERCDVAFACASQNEIDQSDAINLVNSGCRILVEGSNMPCTPEAVQILRKASVLIAPAMAAGAGGVVAGELELNHECSLMHWSPEDFESKLQEAMKQTYQRAMKAATDFGYQKESPEALVHGAVISAFLTIAQAMTDQGSI

SEQ ID NO: 15673 - protein, 358 aa, Oryza sativa
MSEVSVMAEVEETAAAAPLDLPPGFRFHPTDEEIVSHYLTPKALNHRFSSGVIGDVDLNKCEPWHLPAMAKMGEKEWYFFCHKDRKYPTGTRTNRATESGYWKATGKDKEIFRGRGILVGMKKTLVFYLGRAPRGEKTGWVMHEFRLEGKLPSQLPRSAKDQWAVCKVFNKELALAAKNGPMAVTEATADDAGIERVGSFSFLSDFIDPAELPPLMDPSFVADIDGVDDAKVSASTSGQAAIAAGFHVASQVMSYQQVKMEEPLPLPYLHQQPPRMLHSGQYFSLPAVHPGDLTPSAIRRYCKAEQVSGQTSALSASRDTGLSTDPNAAGCAEISSAPTSQPFPEFDDGILGLDDFWN

SEQ ID NO: 15674 - protein, 427 aa, uncultured bacterium 581
MNLFTRIATISFAVLLTPITAADLAESVERRVEAVMPEVVSWRRDLHEHPELGNREFRTAGIIAEHLRGLGMEVRTEVAHTGVIGVLRGGDGPVVALRADMDGLPVTELVDLPFASKARGEYLGQDVGVMHACGHDNHVAILMGVAEVLAGLGDELPGTVLFLFQPAEEGTPDGTVGGAELMLQEGAFDDVLPDAVFGLHVFPYPAGVIATRPGGLMASSDSYKITVTGKQTHGAVPWAGVDPIVTASQIVLGLQTIVSRQLDATLTPSIVTVGKIDGGVRSNIIPESVDLIGTIRTFDADTRLDIHDRIRRTATHIAEAAGATAQVDIDLGYGVTRNDPELFQQMVPTLRGVTGGQFVEAQQTTTAEDFSYFANEAPGLFLFLGVAPDDPTLVYPNHSPRFYADERALPVGVRALTALTLDFMAAN

SEQ ID NO: 15675 - protein, 485 aa, Treponema pallidum subsp. pallidum str. Nichols
MPSADTIARRVAGDSGNAGGRTLLPVGVSRESVQLLERLQNANRQVTAEVLPSVVTLDVVETRKVRVRDPFGGFPWFFFRGPEGPGAGPGGGSGNKGEAEEREYKTEGLGSGVIVKKTGKTHYVLTNYHVAGKANEIEIKLHDGRIVKGKLVGGDQRKDIALVSFEDADPNIRVAVLGDSDAVRVGDIVFAVGSPLGYTSTVTQGIISALGRFGGPGNNINDFIQTDAAINQGNSGGPMVNIYGEVIGINAWIASSSGGSQGIGFSIPINNVKSDIESFIQYGQVKYGWLGVQLVATDADTVASLGIAKGTKGVLAAEIFLGSPAHKGGLKPGDYCVKLNGKEVKDVNQFVRDVGALRIGQTAVFDLIRGGVPMTLSVRITERDEKIVNDYSKLWPGFIPLPLTEAVRKRLDLKASVRGVLVSNAQSKSPAALMGLKSADIVVAVNDQRVSSVREFYAVLARQTREVWFDVLRDGQTLSTVRFRF

SEQ ID NO: 15676 - protein, 422 aa, Staphylococcus aureus subsp. aureus COL
MKNLILSVQHLLAMYAGAILVPIIVGTSLKFTPEQIAYLVTVDIFMCGVATFLQANKVTGTGLPIVLGCTFTAVAPMILIGQTKGIDVLYGSLFLSGILVIIIAPFFSHLVKFFPPVVTGSVVTIIGINLMPVAMNYLAGGQGAKDYGDVKNILLGLMTLIIILLLQRFTTGFIKSIAILIGLVLGTIGAGLLGMVDINQVNHAGWLGIPVPFRFSGFSFDVTSTLVFFIVAIVSLIESTGVYHALSEITGKKLERKDFRKGYTAEGLAIVLGSIFNSFPYTAYSQNVGLVSLSGAKKNNVIYGMVVLLLICGCIPKLGALANIIPLPVLGGAMIAMFGMVMAYGVSILGHIDFKNQNNLLIIAVSVGLGTGISAVPQAFKGLGEQFAWLTQNGIVLGAISAIILNFFFNGIKYKQTEENVK

SEQ ID NO: 15677 - protein, 613 aa, Clostridium thermocellum ATCC 27405
MCGIAGWINLKSDLTNQKEILNSMIDRLTPRGPDASGSWISPNALIAHKRLIVVDPEGGIQPMVRRQGENTYVITYNGELYNTADLRNELESRGHEFLTSSDTEVLLVSYIEWGAKCVEHLNGIYAFGIWDEGKKRLFLGRDRFGVKPLFYAQRGDSLIFGSELKALLANPLVEPKLDAEGLAEIFALGPARTPGHGIFKDVYELKPAHSMIFDINGIQIRKYWSLESYPHTDSEKATISKVRDFVLDAITRQLVADVPVCTFLSGGLDSSAITAVASKTFASQGKGQLNTFSVDYVDNDIYFKPSMFQPNSDEPWIKKMSESFNTCHHYVKFDTPQLVDALIDAVKARDLPGMADIDSSLFLFCREVKKFSVVALSGECADEIFGGYPWFHNEKMLFADTFPWSVSVHERTKILSPEILNLIKPEEYIQRRYRETLSEVPHLKGENRIEARRREIFYLNINWFMATLLDRKDRMSMASGLEVRVPFCDHRLVQYVWNIPWELKMYNKREKGLLRQALKGILPDDIIERKKSPYPKTHNPSYKKAVSKWLLEILNDSSSPLHQLIDVKVVRSMAEGNSDNTDPWFGQLMAQPQMLAYLIQVDFWLRDNHISIV

SEQ ID NO: 15678 - protein, 221 aa, Zea mays
MDGLAAPSPSHSGATSGGGASHRKRKLPPPSLSDATADEDDDTTAPSSPATSLSSPSRPSSPSSSHSDEDDDDSLTTFTAARLDAAPASSSGRPPKPDSSSASAVTAAAPKPDAASAAAGDGKEDSKGLFTDNIQTSGAYSAREEGLKREEDTGKLKFLCYSNDGVDEHMIWLVGLKNIFARQLPNMPKEYIVRLVMDRTHKSMMVIRNNNGVGGITYRPY

SEQ ID NO: 15679 - protein, 447 aa, Azoarcus sp. EbN1
MRYKSLEEFLSHVEQRNPGQPEFIQAVAEVMESLVPFITEYPRYAEHGLLDRLIEPERAIQFRVSWVDDRGEVQVNRGYRIQHSSAIGPFKGGLRFHPSVNLSVLKFLAFEQTFKNALTTLPMGGGKGGSDFDPKGRSPGEVMRFCQSFMTELYRHVGSDTDVPAGDIGVGGREIGFLAGMMKKLSNKASCVFTGKGLSFGGSLIRPEATGYGMVYFAEEMLRHVGKTMAGMTVSVSGSGNVAQYGIEKAMALGAKVITASDSSGTVIDEAGFTPEKLAVLMDVKNVHYGRVSEYAERLGLHFEPGRRPWHVPVDIAFPCATQNELDGDDAAVLVRNGVSCVAEGANMPSNAAAVRVFEKNGVLYAPGKASNAGGVATSGLEMSQNAMRLSWTREEVDGRLLEIMQGIHHMCLQYGTKPDGSVNYSDGANVAGFVKVADAMLSQGVI

SEQ ID NO: 15680 - protein, 532 aa, Yarrowia lipolytica CLIB122
MSFHDKFISDRSKARSHSHFTLNQTAKTTKPHSNPIFISGGLPNPIGFPIDEITVNLTTSPNPRPRFVPAATLFSKPGLVEFPDITENSTRLSQNLKILKFAESLETATNGNGGQLTLERSLQYGEQDGHPQLKKFVTALTKRLHPPKLDEKDWNVIITNGGGDGIHKAVDLLINPGDHVLVEEYCFSPSFDNIKSVGGILVPIKLDYDEGLDVTGLKRILENWDEAKQGPKPRVLYSVPSGQNPYGVSQSLERRKAIYAVLKEHGIVIIEDDPYGALAYESYNKKFTNGNSSKSLNTPEKAHDESVDSEARESDISKADIDHYTSLIAPSYLTIDDVGLVVRIDTFSKVFSPGLRLGWIVSHVNFIEKLSLYTSLSTRAASGVSQLLINNIAHSWGLEGWLRWCLLLRNQYLERRNHLLAQLDKLDQSKITYITPVCGMFVSALVHFDKIASSSFNGVTLPYQSRLVELGIEEGVLIVSGSNMAASEELRQTAKFIRLTFAYEDPDLLDEAIKRLGKAVDRLFEEGEIKQK

SEQ ID NO: 15681 - protein, 444 aa, Pediococcus pentosaceus ATCC 25745
MTESYQFDVLYLGAGHGAFDGAVPLANSGKKVAIVEADKIGGTCPNRGCNAKITLDNPVQLLRHQERLDGIVNGDLKLDWTANVEHEHEVIDGLPDMITGLLDSVDIEIIHGRGKFVDAHTIEVDQQRYTADKIVIATGLRPHHLDVMGSELTHDSTDFMNLKHLPENIVIIGAGYIGMEFATIANAAGANVTVLLRHNRALRKFNQDYVKQVIADLEKRGVKFIYNAQVDRFEEDGSHFTVSYNDHETLTTDWILDATGRIPNIENIGLDEVGVSYNANGIEVNDHLQTNIDNIYASGDVLDKEQPKLTPTAIFESSYLTQLFTGKTTDAINYPAIPTIVFTSPQIAQVGMSVEEAQQNPDYTIKTNHLPDGWFRQVDKETIGNNTLIYDQDHHLVGAAEVSEHAADAINVLLPAIEFQYTAEQLGRIVPLFPTLGADVWSQI

SEQ ID NO: 15682 - protein, 452 aa, Ashbya gossypii ATCC 10895
MSMPLKRRNKQSQGNEPKKIKVEEQEAEEKISEDIPVTDLKEPEALADIQSTSGGDEVSEGAQGDADPAEKSVGGLKEEVEDEEKGIVKFMFDGVEYKFRERPSVIEEKEGKIEFRVVNNDNTRENMMVLTGLKNIFQKQLPKMPKEYIARLVYDRSHLSMAVIRKPLTVVGGITYRPFEKGEFAEIVFCAISSTEQVRGYGAHLMNHLKDYVRATTNIKYFLTYADNYAIGYFKKQGFTKEITLDKSVWMGYIKDYEGGTLMQCFMLPRIRYLDAAKILLLQEAAIQRKIRTISRSHIVRPGLRQFEDLDNIEPIDPMSVPGLREAGWTPEMDELAQRPKRGPHYATMQNVLTELQNHAAAWPFLQPVNRDEVPDYYEFIKEPMDLSTMEIKLENNRYEKMEDFIYDARLIFNNCRAYNGENTSYFKYANRLEKFFNTKMKEIPEYSHLLD

SEQ ID NO: 15683 - protein, 342 aa, Triticum aestivum
MAMAAAASPSKILIPPHRASAATAAASTSCDSLRLLCAPRGRRQRPRGLVARPAPRRPFFFSPRAVSDSKSSQTCLDPDASTSVLGIILGGGAGTRLYPLTKKRAKPAVPLGANYRLIDIPVSNCLNSNISKIYVLTQFNSASLNRHLSRAYGSNIGGYKNEGFVEVLAAQQSPDNPDWFQGTADAVRQYLWLFEEHNVMEYLILAGDHLYRMDYEKFIQAHRETDADITVAALPMDEERATAFGLMKIDEEGRIIEFAEKPKGEQLKAMMVDTTILGLDDARAKEMPYIASMGIYVISKHVMLQLLREQFPGANDFGSEVIPGATSTGMRVQAYLYDDNQC

SEQ ID NO: 15684 - protein, 164 aa, Candida glabrata CBS138
MAAKSFYELECKDKKGETFKFDTLKGKVVLIVNVASKCGFTPQYKDLESLYQKHKDEGLVILGFPCNQFGGQEPGSQEEIGNFCQLNYGVTFPIMHKIEVNGDNTDPVYDFLKSQKSGLLGLNRVKWNFEKFLVDKHGKVHQRYSSLTKPMSIEDDIKQLLAQK

SEQ ID NO: 15685 - protein, 242 aa, Bordetella parapertussis 12822
MDALPTLPPTAAMTDFPFDAVLFDCDGVLVDSEPITNRVLCQMLGELGWELSPEETMRIFTGKAVRDELPLIEARTGTRLTDEWFREFRQRRNDALDRELVEIPGAPQAVRALHAALDGRVAVASGADRLKVEMQLAKVGLADCFTGRVFSGQELPRSKPFPDVYLTAAQALDVAPSRCAIVEDSVIGATAGVAAGATVFGYSPPGQAGHSDAQALLATGVAHVLTDMAELPSVLAAWRAAG

SEQ ID NO: 15686 - protein, 185 aa, Shigella flexneri
ADERPGKINLGIGVYKDETGKTPVLTSVKKAEQYLLENETTKNYLGIDGIPEFGRCTQELLFGKGSALINDKRARTAQTPGGTGALRVAADFLAKNTSVKRVWVSNPSWPNHKSVFNSAGLEVREYAYYDAENHTLDFDALINSLNEAQAGDVVLFHGCCHNPTGIDPTLEQWQTLAQLSVEKGW

SEQ ID NO: 15687 - protein, 659 aa, Cryptococcus gattii
MIDDEDPSRNMVGTEELGLDWRPIGHTSNQLVLYHPASHALRVRTQPPSPPRSTFPSNLVRANDALRRRSPDSATRPLCLLCRQPVPRNGLGEVAAISGMDSYFQTLEHVHSESESFSQGMGVDDLLNSPQTDSSNEENLSATGYYARFFQEVRKLGMGAEGSVYLAVHHIDGDTLGTYAVKKIAVGESKEYLHKMLREVKLLEALRHTNIIPYYHAWIDTTRFSDLAPPVLALHVLMMYASGGNLDSLLLSRSHSTGFATGLSANDVADAESIEKLPKEERIKAFKRRRQTAKTERENRCAGISRLQRPFIGGMGAFRAENRGILLLSFEEIAQLFGDITEGLSFLHSNSILHLDLKCSNVLLHWEEGKLVPKAMLSDFGTSEEMLRGERERTGHTGTMEYAPETLIQDAEGRFRPSDSHADMWSLGMILYKMMFLKLPYEECDNYDVLRAQIISYMGFLPDGSLLQSLQRRHIPQSFVFLLKKLLDIHPEKRPSAEKTRSVLADIKHHSNQMEGSSSKILGQRLTSFESLSYPNEGNCRRDSAVVNGGHLNADATTSNNVLLPFSSLSKSTLLPSLIDAPERTMACFTSPAVRLALLFGKLVSIQPSVSGVRLPAAVAVVLILLAITDLAHQGSLLWSLTCLIAHCAAVSNFFYNEV

SEQ ID NO: 15688 - protein, 511 aa, Cryptococcus gattii
MFARQPLSQHLLRPLSRPSSSFSRSSTLPKLAFLQSARGFASASEPYDVVIIGGGPGGYVAAIKAAQLGFKTACIEKRGALGGTCLNVGCIPSKAMLNNSHIFHQTQHDLKNRGIDVSGVQLNLPKMLAAKEASVKALTGGIETYLFKKNGIDYIKGEASFETANKLSVKLLEGGETQVEAKNVIIATGSEVTPFPGLEIDEERIVSSTGALELKEVPKKMVVIGGGVIGLELGSVWSRLGAEVTVVEYLGSIGAGMDGEVGKQFQRILTKQGFKFKLNTKVVSGHREGDIVKLKVDSAKGGKEETIEADVVLVAIGRRPVTKGLNLEAIGVETDKKGRIVIDNEFNTSAKGVKCIGDVTFGPMLAHKAEEEGIAAVEILKTGHGHVNYDAIPSVVYTHPEVAWVGKNEEELKAAGIQYKIGKFPFAANSRAKTNQDSEGFVKFIVEKETDQVLGCHIIGPAAGELIAPAVLAMEYKASAEDIARTCHAHPTLSEAFKEAALSSYDKPINF

SEQ ID NO: 15689 - protein, 285 aa, Arabidopsis thaliana
MAKDVEGPDGFQTRDYEDPPPTPFFDAEELTKWSLYRAVIAEFVATLLFLYVTVLTVIGYKIQSDTKAGGVDCGGVGILGIAWAFGGMIFILVYCTAGISGGHINPAVTFGLFLARKVSLIRAVLYMVAQCLGAICGVGFVKAFQSSHYVNYGGGANFLADGYNTGTGLAAEIIGTFVLVYTVFSATDPKRNARDSHVPVLAPLPIGFAVFMVHLATIPITGTGINPARSFGAAVIFNKSKPWDDHWIFWVGPFIGATIAAFYHQFVLRASGSKSLGSFRSAANV

SEQ ID NO: 15690 - protein, 193 aa, Shigella flexneri
ADERPGKINLGIGVYKDETGKTPVLTSVKKAEQYLLENETTKNYLGIDGILEFGRCTQELLFGKGSALINDKRARTAQTPGGTGALRVAADFLAKNTSVKRVWVSNPSWPNHKSVFNSAGLEVREYAYYDAENHALDFDALINSLNEAQAGDVVLFHGCCHNPTGIDPTLEQWQTLAQLSVEKGWLPLFDFAY

SEQ ID NO: 15691 - protein, 177 aa, Triticum aestivum
  misc_feature (101)..(101): Xaa can be any naturally occurring amino acid
  misc_feature (126)..(126): Xaa can be any naturally occurring amino acid
  unsure (1)..(177): unsure at all Xaa locations
MAPTVMASSATSVAPFQGLKSTAGLPVSRRSNGASLGSVSNGGRIRCMQVWPIEGIKKFETLSYLPPLSTEALLKQVDYLIRSKWVPCLEFIKVGFIFREXHNASPGYYDGRYWTMWKLPMFGCTXDATQVINEVEEVKKEYPDAYVRIIRFDNMRQVPGVSFIAFNPPGCDDVDKA

SEQ ID NO: 15692 - protein, 185 aa, uncultured bacterium
GCTSGLDAVADGAELIEDGRADVVIAGATDAPISPITVACFDAIKATSPNNDDPAHASRPFDISRDGFVLGEGAAVFVLEPADQARRRRAHIYCEIAGYAQRSNAYHMTGLTADGLEMAEAIRVAMGRARLVPEDIDYINAHGSGTRQNDRRETAAFKASLGARAYEIPVSSIKTMVGHSLGAIG

SEQ ID NO: 15693 - protein, 132 aa, Sulfolobus acidocaldarius
MSSRREIRWGNARIYASQNNTIITITDITGAEIISKASGGMVVKADREKPSPYAAMLAANKAANDAFDKGISAIHIKVRAQGGYGFQTPGPGAQPAIRALARAGFIIGRIEDVTPLPHDTIRRPGGRRGRRV

SEQ ID NO: 15694 - protein, 285 aa, Glycine max
MAKHDVEGGSFSAKDYHDPPPAPLIDAEELTQWSFYRALIAEFIATLLFLYITVLTVIGYKSQSDVKAGGDVCGGVGILGIAWAFGGMIFILVYCTAGISGGHINPAVTFGLFLARKVSLIRAIMYMVAQCLGAICGVGLVKAFQKAYYNRYGGGANELSEGYSTGVGLGAEIIGTFVLVYTVFSATDPKRNARDSHVPVLAPLPIGFAVFMVHLATIPVTGTGINPARSLGAAVMYNQQKAWDDHWIFWVGPFIGAAIAAFYHQFILRAGAAKALGSFRSNPTI

SEQ ID NO: 15695 - protein, 342 aa, Xanthomonas campestris pv. vesicatoria str. 85-10
MTKLLPTSTAGSLPKPSWLAQPETLWSPWKLQDADLIEGKQDALRLSLQEQQHAGIDIVSDGEQTRQHFVTTFIEHLSGVDFEKRQTVRIRDRYDASVPTVVGAVSRPKSVFVDDARFLRQQTRQPIKWALPGPMTMIDTLFDAHYKSREKLAWEFAKILNQEARELEAAGVDIIQFDEPAFNVFFDEVNDWGVATLERAVEGLKCETAVHICYGYGIKANTDWKQTLGSEWRQYEESFPKLQTSSLDIISLECHNSHVPIDLIELVRGKKVMVGAIDVASTTIETPQEVAETLRKALRFVDADKLYPSTNCGMAPLARHVARGKLGALSAGAQIVRDELSA

SEQ ID NO: 15696 - protein, 184 aa, uncultured bacterium
GCTSGLDAVADGAELIEDGRADVVIAGATDAPISPITVACFDAIKATSPNNDDPAHASRPFDISRDGFVLGEGAAVFVLEPADQARRRRAHIYCEIAGYAQRSNAYHMTGLTADGLEMAEAIRVAMGRARLVPEDIDYINAHGSGTRQNDRHETAAFKASLGARAYEIPVSSIKSMVGHSLGAI

SEQ ID NO: 15697 - protein, 762 aa, Hordeum vulgare subsp. vulgare
MAILGELGTEILIPVCGVIGIVFAVAQWFIVSKVKVTPGAASAAAGAKNGYGDYLIEEEEGLNDHNVVVKCAEIQTAISEGATSFLFTMYQYVGMFMVVFAAIIFLFLGSIEGFSTKGQPCTYSKGTCKPALYTALFSTASFLLGAITSLVSGFLGMKIATYANARTTLEARKGVGKAFITAFRSGAVMGFLLSSSGLVVLYITINVFKMYYGDDWEGLFESITGYGLGGSSMALFGRVGGGIYTKAADVGADLVGKVERNIPEDDPRNPAVIADNVGDNVGDIAGMGSDLFGSYAESSCAALVVASISSFGINHDFTAMCYPLLVSSVGIIVCLLTTLFATDFFEIKAANEIEPALKKQLIISTALMTVGVAVISWLALPAKFTIFNFGAQKEVSNWGLFFCVAVGLWAGLIIGFVTEYYTSNAYSPVQDVADSCRTGAATNVIFGLALGYKSVIIPIFAIAVSIYVSFSIAAMYGIAMAALGMLSTMATGLAIDAYGPISDNAGGIAEMAGMSHRIRERTDALDAAGNTTAAIGKGFAIGSAALVSLALFGAFVSRAGVKVVDVLSPKVFIGLIVGAMLPYWFSAMTMKSVGSAALKMVEEVRRQFNTIPGLMEGTAKPDYATCVKISTDASIKEMIPPGALVMLTPLIVGTLFGVETLSGVLAGALVSGVQIAISASNTGGAWDNAKKYIEAGNSEHARSLGPKGSDCHKAAVIGDTIGDPLKDTSGPSLNILIKLMAVESLVFAPFFATYGGLLFKYI

SEQ ID NO: 15698 - protein, 198 aa, Pseudomonas aeruginosa UCBPP-PA14
MKLHDLDLSGNAYKVRLFLSLIGREATLRPVDFLNREHKTQAFLRMNPRGQIPVLEDGELQLGDSHAILVYLARRHADPVWYPLDPVSQGRIAYWLSYSANEVQNGPASARLIARFDLPLDREQTHQRGLEVLRLVERHLAEHRWLAQGEQPSIADVALYPYLALAPEGGLALDHYPALNAWIARIRALPGYIPMPGL

SEQ ID NO: 15699 - protein, 768 aa, Ralstonia eutropha JMP134
MTQSSLPVSQSLAPDEPWRAEAGATLRPGETVLAGLELDLDARLHFTQGWLVVTDRRLLARAPGEKSVREWAIEPGLRLTHTDHAGVGTLELCDAAGRLGSWRYTLGYNPAALRLVDQFEARRDTAPSMVPEDDGEVLCPTCKAPLPPGEEECPQCSRELETPSSTWALLRLWRFARPYRWELLTGFMLTLLSTAATLVPPYLTMPLMDKVLIPFQNGVPINYDLVRLYLAGLLGAALVAWSLGWARTYLLARVSERIGADLRTTTYEHLLKLSLEYFGGKRTGDLMARIGSESDRICVFLSLHLLDFATDVLMIVMTALILVSINPWLALVTLVPLPFIAWMIHLVRDKLRHGFEKIDRIWSEITNVLADTIPGIRVVKAFAQEKREVARFREANKHNLAINDRVNAVWSLFTPTVTLLTEIGLLVVWVFGIWQVSHSAITVGVLVAFLTYISRFYTRLDSMSRIVSVTQKAAAGAKRIFDILDHVSSVPEPVRPAKLDKVEGAIEMRDLGFRYGNRAVIRGLDLSIAPGEMIGLVGHSGSGKSTLVNLICRFYDVSEGAIRVDGIDIRSLPVSEYRRHIGLVLQEPFLFFGTIAENIAYGKPDATREEIVAAARAAHAHEFILRLPHGYDSLVGERGQALSGGERQRISIARALLINPRILIMDEATSSVDTQTEKEIQKALDNLVQGRTTIAIAHRLSTLRKADRLVVMDRGKIVEVGGHDELLAKEGAYYKLYQAQARNVDTEDDDTESESEVLAREAEAANAQ

SEQ ID NO: 15700 - protein, 193 aa, Glycine max
  misc_feature (32)..(32): Xaa can be any naturally occurring amino acid
  misc_feature (117)..(117): Xaa can be any naturally occurring amino acid
  misc_feature (125)..(126): Xaa can be any naturally occurring amino acid
  misc_feature (129)..(130): Xaa can be any naturally occurring amino acid
  unsure (1)..(193): unsure at all Xaa locations
DELRRSKPTPVDEARAEVEESLVLNIVEESLXKAVPHYLRRVSSALKKHTGKPLPLTCTPIKFGSWMGGDRDGNPNVTAKRVTKDVSLLSRWMAIDLYIREVDGLRFELSFDRPPPXLSELAHEXXLKXXMMSEDHHEHWNGSMSRSQSKHPNQQASPLPTKLPAGAHIPSCAWPEEGGSEYPRHMPGADHKQ

SEQ ID NO: 15701 - protein, 570 aa, Debaryomyces hansenii CBS767
MSDRYRPPSGPRSTRGYEDRRNPNPTSSNNNNSNSNNRNYKSSYGQRDTYTPSGPKRYQERDNYRPNSSANERSESYQPSKFRPSGPSGYRGNDRDFHFRPGSKRPHPSESKGYRGGDDYRKRQDRTDFNGPAPGPSSYRDKSSTYRNPRYDNNSYKPKVNLKNLPKGPRSGNVNDSRAKPRPYLKDEEAAPPIKLSKSQIYLIRITRPSEIYKRVQQVGEGTYGKVYKATNSITDEYVALKKLRLESEREGFPITAMREIKLLQSFDHENVVGLLEMMVEHNQIYMIFDYMDHDLTGLLTHPDLKLTESHRKFIFKQLMEGLQYLHKKRVIHRDIKGSNILLDNIGRLKIADFGLARTMNVLNDGEIPDYTNRVITIWYRPPELLLGSTDYGREVDIWGVGCLLIELYSKIAAFQGFDEIGQLYKIFNVMGTPNIENWPDMENLPWFEMLKPKINKASTFKNEYESIMSEQSFDLAVKLLTLNPKKRLTAREALEHPYFTEDPKPEPLHFLKDVKGEWHEFETKKRRRKERKRLQDAKNASSQNIAQLNNGPSMDSVPDSVVPPDGPKD

SEQ ID NO: 15702 - protein, 541 aa, Nocardia farcinica
MAKTIAYDEEARCGLERGLNSLADAVKVTLGPKGRNVVLEKKWGAPTITNDGVSIAKEIELEDPYEKIGAELVKEVAKKTDDVAGDGTTTATVLAQALVREGLRNVAAGANPLGLKRSIEKAVEAVTAKLLDTAKEVETKEQIAATAGISAGDASIGELIAEAMDKVGKEGVITVEESNTFGLQLELTEGMRFDKGYISGYFVTDPERQEAVLEDPYILLVGSKVSTVKDLLPLLEKVIQAGKPLLIIAEDVEGEALSTLVVNKIRGTFKSVAVKAPGFGDRRKAQLADIAILTGGEVISEEVGLSLETAGIELLGQARKVVVTKDETTIVEGAGDAERIKGRVAQIRTEIENSDSDYDREKLQERLAKLAGGVAVIKAGAATVVELKERKHRIEDAVRNAKAAVEEGIVAGGGVALLQAAPALDELKLTGDEATGANIVRVALSAPLKQIAFNAGLEPGVVAEKVSKLEAGHGLNADSGEYEDLLAAGVADPVKVTRSALQNAASIAALFLTTRAVVADKPEKAAAPAGDPTGGMGGMDF

SEQ ID NO: 15703 - protein, 159 aa, Staphylococcus epidermidis RP62A
METVYFAGGCLWGTQAFFNTIPGVIQTEAGRANGTSKCLDAPYDGYAECVKIHFDPAKTSILMLMDYLFEMINPYSLNQQGQDKGQKYRTGVYSESSKHLNEAKDYIKRREDAKQVMVEVQPLSNYVKSAEEHQNHLEKFPEDYYLCHVPPALLNKYKK

SEQ ID NO: 15704 - protein, 401 aa, Azoarcus sp. EbN1
MPSIFAAVEMAPRDPILGLNEAFNTDTRTDKVNLGVGVYYDDNGKIPLLAAVKAAEKARLEAMPPRGYQPIEGAPAYNNAVQNLLFGKDSALIANGQVVTIQALGGTGALKVGGDYLKRLNPAATVYISDPSWENHRAIFESAGFAVDTYPYYDPATRGVNFAGMKAKLGELAAGAVVVLHACCHNPTGADLTEAQWGEVVEACRARGLVPFLDMAYQGFADGIEPDAVAVRLFSASGLQFFVSSSFSKSFSLYGERVGALSIVTADKDEAGRVLSQVKRVIRTNYSNPPTHGGAVVAAVLNAPELRQMWEDELAGMRDRIRAMRVGLVESLKGAGVAQDFSFVIEQRGMFSYTGLSAAQVEQLKNEFGIYAVSTGRICLAALNSRNIGYVAKAIASVAKA

SEQ ID NO: 15705 - protein, 405 aa, Arabidopsis thaliana
MPLSLQSPPCATLSASIRKGRWKTLAAGFSVTPLPAVNFSLRRSIPRILASASSSSSPASSSLEAGENNELNAVSAFSEIVPDTVVFDDFERFPPTAATVSSALLLGICGLPDTIFRNAVDMALADSSCAGLETTESRLSCFFNKAIVNVGGDLVKLVPGRVSTEVDARLAYDTNGIIRKVHDLLRLYNEIDVPHDRLLFKIPATWQGIEAARLLESEGIQTHMTFVYSFAQAAAASQAGASVIQIFVGRLRDWARNHSGDTEIKSAIKSGEDPGLALVKRSYNYIHKYGYKSKLMAAAVRNKQDLFSLLGVDYVIAPLKVLQSLKDSPAIPDDEKYSFVRKLTPETATHYHFTNKELVKWDQLSLASSMGPASVELLSAGVEGYANQAKRVEELFGKIWPPPNV

SEQ ID NO: 15706 - protein, 531 aa, Arabidopsis thaliana
MGCFSSKHRKTQNDGGEKSIPINPVQTHVVPEHRKPQTPTPKPMTQPIHQQISTPSSNPVSVRDPDTILGKPFEDIRKFYSLGKELGRGQFGITYMCKEIGTGNTYACKSILKRKLISKQDKEDVKREIQIMQYLSGQPNIVEIKGAYEDRQSIHLVMELCAGGELFDRIIAQGHYSERAAAGIIRSIVNVVQICHFMGVVHRDLKPENFLLSSKEENAMLKATDFGLSVFIEEGKVYRDIVGSAYYVAPEVLRRSYGKEIDIWSAGVILYILLSGVPPFWAENEKGIFDEVIKGEIDFVSEPWPSISESAKDLVRKMLTKDPKRRITAAQVLEHPWIKGGEAPDKPIDSAVLSRMKQFRAMNKLKKLALKVIAESLSEEEIKGLKTMFANIDTDKSGTITYEELKTGLTRLGSRLSETEVKQLMEAADVDGNGTIDYYEFISATMHRYKLDRDEHVYKAFQHFDKDNSGHITRDELESAMKEYGMGDEASIKEVISEVDTDNDGRINFEEFCAMMRSGSTQPQGKLLPFH

SEQ ID NO: 15707 - protein, 137 aa, Brassica napus
  misc_feature (22)..(23): Xaa can be any naturally occurring amino acid
  misc_feature (38)..(39): Xaa can be any naturally occurring amino acid
  misc_feature (81)..(81): Xaa can be any naturally occurring amino acid
  misc_feature (124)..(124): Xaa can be any naturally occurring amino acid
  misc_feature (131)..(131): Xaa can be any naturally occurring amino acid
  unsure (1)..(137): unsure at all Xaa locations
MSTVSPCSQLVQVVPDNHNNTXXSSGVKYEDLVRNSDXXLEHLRALLGLLGNELKVPTVGGSTLDLHRLFVEVTSRGGIAXVIKDKRWREVIGVFKFPNTITSASFVLRRYYFKFLFQMEQVYXLEQSASXMKSAEE

SEQ ID NO: 15708 - protein, 802 aa, Ruminococcus flavefaciens
MKKSIFKRYAAAVGLMASVLMFTAVPTTSNAADDQKTGKVGGFDWEMWNQNYTGTVSMNPGAGSFTCSWSGIENFLARMGKNYDDQKKNYKAFGDIVLTYDVEYTPRGNSYMCIYGWTRNPLMEYYIVEGWGDWEPPGNDGVDNFGTTTIDGKTYKIRKSMRYNQPSIEGTKTFPQYWSVRTTSGSRNNTTNYMKDQVSVTKHFDAWSKAGLDMSGTLYEVSLNIEGYRSNGSANVKSISFDGGIDIPDPEPIKPDENGYYLKENFESGEGNWSGRGSAKVKSSSGYDGTKGIFVSGREDTWNGASINLDELTFKAGETYSLGTAVMQDFESSVDFKLTLQYTDADGKENYDEVKTVTAAKGQWVDLSNSSYTIPSGATGLVLYVEVPESKTDFYMDGAYAGVKGTKPLISISSQSVDPPVTEPTNPTNPTGPSVTKWGDANCDGGVDLSDAIFIMQFLANPNKYGLTGTETNHMTNQGKVNGDVCEHGSGLTGDDAVSIQKYLIRAISELPESYLEGHDPSKTTTTTTRITTTTTTTTTTTTSKTTTTTTTTSPAMHGGYRDLGTPMNTSATMISDFRTGKAGDFFASDGWTNGKPFDCWWYKRNAVINDGCLQLSIDQKWTNDKNPDWDPRYSGGEFRTNNFYHYGYYECSMQAMKNDGVVSSFFTYTGPSDDNPWDEIDIEILGKNTTQVQFNYYTNGQGKHEKLYDLGFDSSEAYHTYGFDWQPNYIAWYVDGREVYRATQDIPKTPGKIMMNAWPGLTVDDWLKAFNGRTPLTAHYQWVTYNKNGVQHSSQGQNPWG

SEQ ID NO: 15709 - protein, 1227 aa, Neurospora crassa
MVPYYRKTWRDFIDSTRDAIAELGAEIGISDEPERRVRCDKMVFAHYMLGLTLNHTARDWEDEIRAAKECGIDGFALNTGSQDHWLDEQLSLAYQAAERAGGFVLFISFDFAFEWTVQQVVDLINRFKYSPAQCVVDGRPFVSTFEGPQWAENWPIVRQATGGIFLVPDWASLGPHGVAQKLDIIDGAFSWDAWPKGCNHKMGPDEDHLYLQALQIEKPGIFGTPNNKHKYMMGVSPYFYTNLPQWNKNWYCSSESLCYIYDPHRDDQIVPGADAYVKGHSHDAYRAILPHFIQAYKAGKTKAKPREHLEDVAIAWYRRTPASAGHHGETVWGQGGDALAAHGVKDVISVVAITKEENTVTVTLGDGQPREFQTARGSSYFEIPFDETTLGPVRLQLNGQVTEGPDIHCNCEDKIRPINARKRWHAPLNGGRALPGKPVCYVTGDLSVNPGHSPTGHIDQATTSRRFPPDLNHVTYNNNNTNNARKDLRIPRTLGLPLKRYRQTFFPPTQTDRSSSRQRPGADGVTPSRLITCPPCGWQPSPLAGSLVARNRHRHSRPQQGGVPVFFHTTFYGHRRNNRYALLLVFLLQPGQYHVPRDHDYHRHGKRQEEEEEEQGKKEQDMRMLQVSREEIEKKVGEDVTGLKRIGKKIVLFLDFYIWEPLCTGIRFLKLVAIFAPVIITVPVIWFGERQPDRDDERSGTLWWYGFLVQAMEWAGPAFIKLGQWAASRSDIFPDEMCNIMSKLHDDAPAHSLHATKRIVEAAFNGRHFDEIFEEFDEKPLGVGAIAQVYRAKLKPDLTMPADADLSSSTHRFVKNVGTVLKATPKRVPSSHVAIKVLHPGVERTVRRDLRIMRFFASMINAIPTLEWLSLPDEVDQFGDMMKLQLDLRIEAANLSRFRKNFKDRTTAWFPYPYTEFSTRNILVEEFAHGVPLADFMANGGGVFQHDIASEGLDAFLRMLLLDNFVHADLHPGNIMVRFYESEKPPLSLHWDKPSDANPAGKNGDVTEKVLSRLWPYRNNKELWIAELEKIDEEGYRPQLIFIDTGLVTELNATNRRNFLDLFRAVAEFDGYKAGHLMCERCRQPDAVLDKEVFALKMEHLVRDVKNKTLALGNIKIGDILEKVLNMVRQHHVRLEGDFVNVVISILLLEGIGRALDPDVDLLSSSLPILRQLGAQGGKDMLMEGDVHMMAVWLGLEARRFMQASIEDVERLHMYSFGFLGPRRTTI

SEQ ID NO: 15710 - protein, 185 aa, Shigella flexneri
ADERPGKINLGIGVYKDETGKTPVLTSVKKAEQYLLENETTKNYLGIDGILEFGRCTQELLFGKGSALINDKRARTAQTPGGTGALRVAADFLAKNTSVKRVWVSNPSWPNHKSVFNSAGLEVREYAYYDAENHTLDFDALINSLNEAQAGDVVLFHGCCHNPTGIDPTLEQWQTLAQLSVEKGW

SEQ ID NO: 15711 - protein, 126 aa, Oryza sativa
MEIGGLQRSSQTFRRSGSSGLVWDGRLMSEDQNQSDQRATGDAEAGSLESKELRHSRSVGSSIKVQRRCSDSVERSRSGNQAFRTRHVPPAMDPPSPKVSRCLFCGIFSKEEPSQPPKPRSLYWQP

SEQ ID NO: 15712 - protein, 51 aa, Cryptococcus gattii
MPSQKTFIVKQKLAKKARQNRPLPQWFRLKTDNKIQYNAKRRHWRRTKLNL

SEQ ID NO: 15713 - protein, 185 aa, uncultured bacterium
GCTSGMDAVADGAELIEDGRADVVIAGATDAPISPITVACFDAIKATSPNNDDPAHASRPFDISRDGFVLGEGAAVFVLEPADQARRRRAHIYCEIAGYAQRSNAYHMTGLTADGLEMAEAIRVAMGRARLVPEDIDYINAHGSGTRQNDRLETAAFKASLGARAYEIPVSSIKSMVGHSLGAIG

SEQ ID NO: 15714 - protein, 543 aa, Ehrlichia ruminantium str. Gardel
MNNLTSTKFIFVTGGVVSSLGKGLAAASIGALLQARGFKICLRKLDPYLNIDPGTMSPIQHGEVFVTDDGAETDLDLGHYERFTGVKTTKNDNITTGKVYHNLLNKERKGDYLGQTVQIIPHVTDLINSFILHNTDALDFVICEIGGTVGDIESQPFLESIRQIGYKLSKNNTVFVHLTLVPYISATMELKTKPTQHSVKELSSVGIQPDIILYRSKIPLSQEQRDKIANLCNVSPTNIIPALDVKNIYELPISYHQYNLDTQILKHFNITSPEPNLDKWENILNISHVSTKTITIAIIGKYIKLLDAYKSLIEALEHAAIHNKTKLSIHWIDSRSLNNEITNTFDNVHAILIPGGFGDDGVEGKIIAIQYARINNIPFLGICMGMQLAIIEFARNVIHLEDANSTEFNFYCKNPVIHQLPELQQNLGGSMKLGSHPCYLKVDSKIFSIYKEQVINERRRHRYTVNLQYKDLLESHGLIFTGHSHHNNNDSLAEVIELKNHPWFIGVQFHPEFKSDPFQSHPLFMSFIQASLNYQETKRHKIS

SEQ ID NO: 15715 - protein, 154 aa, Sulfolobus acidocaldarius
MSEKERGTELSEEEKAELQKTEKGTVIELLVPLDTYLSAGVHIGTHTCTRYMERFIYRVRPEGLYVLDVRKIDERLRVAAKFISRFRPEAVLTVASRPYAFTPVQKFSEVVRGKEISGRFPPGTLTNPYLDNYIEPEVLIVTDPRTDLQVIKEA

SEQ ID NO: 15716 - protein, 1856 aa, Cryptococcus gattii
MLPSNQQTAAAGPLPATPNKLSLRRRHSSSKQDTPPNLDGPLRFNPSASESARRGKPTFFSSMHFSQALPQPIPSMAPDERRPEHQRSQRKSKVEALTKIDRSGTPIQLDAGPTATSFAPHTIQKSTPPPPAPHYLRNPLHRPKVVNPLFSIDSVRTKAPRHPHPRTEPRLFGLEDCPTFYPTPEEFKDPMAYIESISQQGKKYGMCKVVPPEGWHMPFRLETETFRFKARLQRLNQLEAASRAKLNFLEQLSMYHMQQGDSKIHIPLIDRQPLDLWKLRREVNRSGGNLELDRTKGWSKITEVLGHKPSWTPHVRAAYMNIVLPFDNWAVRAKSASVSPLTKLNPGSSSSPSKPPPVFINDTFSASPIKQGQGISRANTASRRPTIKMRPNGMHFVSPPDKGRPPSKRASVSGGSVLADVIEVNQPGSLSTAPSATASTPTTLRINVPGFSDREGSDSELSDEDSVLSSPSIRKTPFEPEYQKGEVCEICKGEHDPGKILLCDGCDRGFHIYCLDPPLASVPTNEEWYCTSCLLSQGEDFGFEEGDEHSVASFQARDAAFSHAWWNRHNPHNSPRPSVNGAQPTNNDDGERMKPRQFGKVTVSEDDVEREFWRLTESSLDTVDVEYGADIHSTSHGSAGPTPETHPLDPYSRDPWNLNNMPILPDSLLRYIKSDISGMTVPWIYIGMMFSAFCWHNEDHYTYSINYMYWGETKTWYGIPGSDAEKFEAAIKSEAPDLFEQQPGLLFQLITMMNPGRLSDAGVKVVACDQRPNEFVITFPKAYHCGFNHGINMNEAVNFALPDWLPDGKDSVRRYREHNKAPVFSHNELLITITLFSETIRTALWLKDALIEMVEEESARREALRAKYPKLVENLIEEDCPEDQYQCAICKAFCYLAQVTCSCTSQVSCLSHADRLCTCGKPRKVLRMRYSEAQLEDIRDIVVHRAALPEQWRVRFFSLMESPRPQLKSMRTLVSEGERIAHPIPDLGPLKRFVDVATSLIQQIMAIMTRKSVGRRKKASRGDGNRKGKRTRAERDDEEDDGIDRSPGVLSDLLKQADRLAFDAPELPQLRQLMLAIEGFRTEASSLLTTPEDQVDRQRCKNALILGQSFGLNFPELSPLEKLVQRQEWFRQLEEEVDDANMEYDDVVAFLEESLECQIPQDHAMVKELSVRERKGKQWIESVEKLLASSQITLGGISSLIEARQHVPVSTDILRRLESLRKSAISWQTSARNALATHGSPVAASRLCKNVAAASKPLSNVVIPEIRQLQAELKHHALWKEEASKVLGVPVARLASTIDYIRSEFENSLAPDDDAHNDQRVCFCRSSPADNMVMCNVCRHSYHPRCVDVSLRHVPEEFKCAICQRLPNDDGPSLDAFIGLISPQRWNFLINPSEFEPAQYIASAAMRYAPQALRLADPFSLSHPCRDLELLRHTIRKIYTLPLVFDAYNSQTNERCVFVNWLFRRMQDAVRMKTKQISVLDRHSLTLAAGQFTSANSENGTPSGRAKPRRRARIILAESHPHEFYCLCGMSPAGENTAAQVECPKCGQGYHAVCVKVAEELAGKSVWRCPCCTVRDGRHYQKDIEVRVQLRSHRGTDQFLDYRTIINDFAERLVVVTKPTSANAITLECIDFVPAHIPDNVKTMEGGGSSLNRIKKRKSAVVDGAFRNEQAASNSVAHNLIAMTAKCSMDTPSTILGEIPTQITSSGTNGSSVAMSTLSDIQAKSDAASRSIYTSDESNANTSVLALAPTIQNRSIFDMHSNVSPRSCFSSTPVATRASTTSVIRESSVVPSATTMCGGGKEAAVIRKSIYDDNINSHRGSEGINSCPDMGESIAVEEAVTFGRHVVDEDVIMENQ

SEQ ID NO: 15717 - protein, 362 aa, Wolbachia endosymbiont of Drosophila simulans
MDKKVLLELSNGLKIELPVLSGTTGPDVLNIKDLYKMTGLFTYDPGFVSTASCSSTITFIDGDEGVLKYRGHNIADLAENNNFTAVIYLLLYGELPSSEQHKKFLLKIQESSKVSEQVTNVIKAFPKTAHPMSILVACFASLSASYHEKHGNNVNGEDLDFGISAIAQVSTIIAMICRHNNNQEFINANNELSYSENFLKMIFGDAVDNDKSALFAKALDKIFTLHADHEQNASTAAVRLVGSAGSNLFASLSAGVATLWGPAHGGANEAVINMLKEIEQSGDIDKFIEKAKDDKDPFKLMGFGHRVYKNYDPRARILKGACHEVLSKLEQNNELLKIAKKLEEIALKDEYFIVRKLYRIPP

SEQ ID NO: 15718 - protein, 184 aa, uncultured bacterium
CTSGLDAVADGAELIEDGRADVVIAGATDAPISPITVACFDAIKATSPNNDDLAHASRPFDISRDGFVLGEGAAVFVLEPADQARRRRAHIYCEIAGYAQRSNAYHMTGLTADGLEMAEAIRVAMGRARLVPEDIDYINAHGSGTRQNDRHETAAFKASLGARAYEIPVSSIKSMVGHSLGAIG

SEQ ID NO: 15719 - protein, 185 aa, uncultured bacterium
GCTSGMDAVADGAELIEDGRADVVIAGATDAPISPITVACFDAIKATSPNNDDPAHASRPFDISRDGFVLGEGAAVFVLEPADQARRRRVHIYCEIAGYAQRSNAYHMTGLTADGLEMAEAIRVAMGRARLVPEDIDYINAHGSGTRQNDRHETAAFKASLGARAYEIPVSSIKSMVGHSLGAIG

SEQ ID NO: 15720 - protein, 207 aa, Candida glabrata CBS138
MTVTKATNITWHANLSYDERKALRKQDGCTVWLTGLSASGKSTIACALEQLLLQKGLSAYRLDGDNIRFGLNKDLGFSEADRNENIRRISEVSKLFADSCTISITSFISPYRTDRDKARELHKEAGLRFIEVFVDVPLEVAEQRDPKGLYKKARQGIIKDFTGISAPYEEPASPELHLRTNEKSIEECAAIIYDYLTKEKVIPDNTI

SEQ ID NO: 15721 - protein, 185 aa, uncultured bacterium
GCTSGLDAVADGAELIEDGRADVVIAGATGAPISPITVACFDAIKATSPNNDDPAHASRPFDISRDGFVLGEGAAVFVLEPADQARRRRAHIYCEIAGYAQRSNAYHMTGLTADGLEMAEAIRVAMGRARLVPEDIDYINAHGSGTRQNDRHETAAFKASLGARAYEIPVSSIKSMVGHSLGAIG

SEQ ID NO: 15722 - protein, 149 aa, Arabidopsis thaliana
MADQLTDDQISEFKEAFSLFDKDGDGCITTKELGTVMRSLGQNPTEAELQDMINEVDADGNGTIDFPEFLNLMARKMKDTDSEEELKEAFRVFDKDQNGFISAAELRHVMTNLGEKLTDEEVDEMIKEADVDGDGQINYEEFVKVMMAK

SEQ ID NO: 15723 - protein, 92 aa, Arabidopsis thaliana
  misc_feature (20)..(20): Xaa can be any naturally occurring amino acid
  unsure (1)..(92): unsure at all Xaa locations
MAAARRLRTLQSQPENKVCXDCSQKNPQWASISYGIFMCLECSGKHRGLGVHISFVRSVTMDSWSEIQIKKMDAGGNERSQQFFSVSTGSER

SEQ ID NO: 15724 - protein, 456 aa, Vibrio parahaemolyticus RIMD 2210633
MHRYKEEASSLIKLATPVLIASVAQTGMGFVDTVMAGGVSATDMAAVSVASSIWLPSILFGIGLLMALVPVVAQLNGSARREKIPFEIQQGVVLALLISIPIIGVLLQTQFILQLMDVEAVMAGKTVGYIHAVIFAVPAFLLFQTLRSFTDGMSLTKPAMVIGFIGLLLNIPLNWIFVYGKFGAPELGGVGCGVATTIVYWVMFALLLAYVMTSSRLKSINVFGEYHKPQWKAQVRLFKLGFPVAAALFFEVTLFAVVALLVSPLGPIIVAAHQVAINFSSLVFMLPMSVGAAVSIRVGHRLGEENVDGARVASRVGIMVGLALATITAIITVLSRELIAELYTNNPEVISLAMQLLLFAAVYQCTDAVQVIAAGALRGYKDMRAIFNRTFIAYWILGLPTGYILGRTDWIVEPMGAQGFWLGFIIGLTAAALMLGVRLRWMHRQEPDVQLNFSLQ

SEQ ID NO: 15725 - protein, 415 aa, Thermotoga maritima
PEKSLYEMAVEQFNRAASLMDLESDLAEVLRRPKRVLIVEFPVRMDDGHVEVFTGYRVQHNVARGPAKGGIRYHPDVTLDEVKALAFWMTWKTAVMNLPFGGGKGGVRVDPKKLSRRELERLSRRFFREIQVIIGPYNDIPAPDVNTNADVIAWYMDEYEMNVGHTVLGIVTGKPVELGGSKGREEATGRGVKVCAGLAMDVLGIDPKKATVAVQGFGNVGQFAALLISQELGSKVVAVSDSRGGIYNPEGFDVEELIRYKKEHGTVVTYPKGERITNEELLELDVDILVPAALEGAIHAGNAERIKAKAVVEGANGPTTPEADEILSRRGILVVPDILANAGGVTVSYFEWVQDLQSFFWDLDQVRNALEKMMKGAFNDVMKVKEKYNVDMRTAAYILAIDRVAYATKKRGIYP

SEQ ID NO: 15726 - protein, 279 aa, Zea mays
  misc_feature (2)..(2): Xaa can be any naturally occurring amino acid
  unsure (1)..(279): unsure at all Xaa locations
MXFDDHDDGDEEEMAPMPVSSSYDAPPLAAGGFGAPAPPKPPGERAKAPGGRYRECLKNHAVGIGGHAVDGCGEFMPAGEEGTLDALRCAACGCHRNFHRKESPEGSPAALVAYGGGAATPHHHHFSPYYRTPAGSYFHHHHQQQQPIHMAAAGHHTPRPLALPSTSHSWRDDGDDYLSGGMAAAGPVSALGPLGLGGGMSLGGGAGPSGSGGSGKKRFRTKFTQEQKDRMLAFAERVGWRIQKHDEAAVQQFCDEVCVKRHVLKVWMHNNKHTLGKKP

SEQ ID NO: 15727 - protein, 185 aa, uncultured bacterium
GCTSGMDAVADGAELIEDGRADVVVAGATDAPISPITVACFDAIKATSPNNDDPAHASRPFDISRDGFVLGEGAAVLVLEPADQARRRRAHIYCEIAGYAQRSNAYHMTGLTADGLEMAEAIRVAMGRARLVPEDIDYINAHGSGTRQNDRHETAAFKASLGARAYEIPVSSIKSMVGHSLGAIG

SEQ ID NO: 15728 - protein, 118 aa, Brassica napus
  misc_feature (105)..(105): Xaa can be any naturally occurring amino acid
  misc_feature (107)..(107): Xaa can be any naturally occurring amino acid
  misc_feature (111)..(111): Xaa can be any naturally occurring amino acid
  unsure (1)..(118): unsure at all Xaa locations
NKTNNNNKKVNQKPLEQQQYINQHPESIDALIETLFAHISSFKSAYISLQSAHTPYHPDNIQDEDKEVISELKNVSELHNHFTEHNHKHVCVTPQDSRLAAEPPXLXSLDXTFPAPLA

SEQ ID NO: 15729 - protein, 436 aa, Xanthomonas campestris pv. vesicatoria str. 85-10
MPQHTASFGHFVLERMTPFQWRAVAVCVLLTMLDGFDVMAMAFTAPHVSADWQLSGKLLGMLFSAGLIGMALGALGLAPLADRIGRRALTLACLAILTVGMGMSAVASTAWQLGALRLLTGLGIGGMLACVAVTAGEFSSPRWRNTAIVLQVTGYPVGATLGGMIAELLMQQWSWPAVFVLGAVASLLCVPLVLAFLPESLEFLIMRRPPDAVARFNAVLARMGMPPHDALPPLPPQSATQAQGYRALFDAAMRRHTLLIALGFFSLMFAFYFVISWTPKLLVTAGASATDGVTGGVLLNLGGIGGGLLFSGLASCVRLARLTIGSLLLMGLAMLASGLCSTQLSWAFAVALLTGAAMFAAVGGMYAIVPIVFNAAVRSTALGWAIGVGRLGAILSPFCAGVLLDAGWSPAMLYLACSVPLLLAIFAVLAMRLPNR

SEQ ID NO: 15730 - protein, 513 aa, Oryza sativa (japonica cultivar-group)
MVLSHGVSGSDESVHSTFASRYVRTSLPRHARSPLSRAPLAPIDSVIDWEFRMPEQSIPKEAAYQIINDELMLDGNPRLNLASFVTTWMEPECDKLIQASVNKNYVDMDEYPVTTELQNRCVNMIAHLFNAPLGDSETAVGVGTVGSSEAIMLAGLAFKRRWQNKMKAAGKPCDKPNIVTGANVQVCWEKFARYFEVELKEVKLSDGYYVMDPAKAVDMVDENTICVAAILGSTLNGEFEDVKLLNDLLTKKNAETGWDTPIHVDAASGGFIAPFLYPELEWDFRLPLVKSINVSGHKYGLVYAGIGWCIWRSKEDLPEELIFHINYLGADQPTFTLNFSKGSSQVIAQYYQLIRLGFEGYKNIMENCQENAMVLKQGLEKTGRFNIVSKDNGVPLVAFSLKDSARHNEFEISDFLRRFGWIVPAYTMPPDAQHVTVLRVVIREDFSRTLAERLVLDVEKVLHELDALPARVVANGGDAAAASASEREMEKQREVISLWKRAVLAKKKTNGVC

SEQ ID NO: 15731 - protein, 410 aa, Citrus junos
LFEKLADLEAAPAALARLFSVDWYRNRINGKQEVMIGYSDSGKDAGRFSAAWQLYKAQEELIKVAKQYGIKLTMFHGRGGTVGRGGGPTHLAILSQPPDTIHGSLRVTVQGEVIEQSFGEEHLCFRTLQRFTAATLEHGMRPPISPKPEWRAMMDEMAVIATEEYRSIVFKEPRFVEYFRLATPELEYGRMNIGSRPSKRKPSGGIESLRAIPWIFAWTQTRFHLPVWLGFGAAFKHVIQKDIRNLHMLQEMYNNWPFFRVTIDLVEMVFAKGNHKIAALYDQLLVSKDLWSFGEKLRVNYEETKGLLLQIAGHKDLLEGDPYLKQRLRLRDAYITTLNVCQAYTLKRIRDPNYHVKVRPHISREIMESESVKPADELVKLNLSSEYAPGLEDTLILTMKGIAAGLQNTG

SEQ ID NO: 15732 - protein, 145 aa, Magnaporthe grisea 70-15
MADSLTEEQVSEFKEAFSLFVRQITTKELGTVMRSLGQNPSESELQDMINEVDADNNGTIDFPEFLTMMARKMKDTDSEEEIREAFKVFDRDNNGFISAAELRHVMTSIGEKLTDDEVDEMIREADQDGDGRIDYNEFVQLMMQK

SEQ ID NO: 15733 - protein, 408 aa, ASPERGILLUS NIDULANS FGSC A4
MPSQKIISALAEIESSASPQNKLQLYNDLLSETVSASPEPQLADDLIYYLDSVLSEDLSIVAARPILDSFIYTLRKLSSETQIKVAQHAVNLLQSRSASVEEQDAQIREILADAYEAEEEYIAAARALQGIHIDSSQRLVSDSAKVKLWIRIVRLYLEEDDTTSAEAFLNRIKNLPSKIEDHELKLHFRLSQARIQDARRRFLDASQEYFAVSLAAGVDESDRLQALAAAIRCAVLAPAGPQRSRTLATLYKDDRATSVEEFGILEKMFLDRLLTPEEVSAFAQRLAPHQLAQTADGTTVLDKAVVEHNLVAASKLYENIKTDALGAILGLQASGDLTAGEKAEAYAARMVEQGRLSGSIDQIDGIIYFESNTTATGRHIRQWDAGVQGLSEGVERVATNIAEGHLVR

SEQ ID NO: 15734 - protein, 142 aa, Brassica napus
TRPKAARSCSGGGGRRRDDERCGADGNELLRFYCSTFMCDLGQNGNSSLCGHQYCSVCGIIGSGFSPKLDGIATLATGWRGHAAVPEEVEEEFGFMNVKRAMLVCRVVAGRVGCDLIADDDVDKRDGGYDSLTGERSGSKSG

SEQ ID NO: 15735 - protein, 213 aa, Methanococcus voltae
MDSVKIINAVKEARNSAKPRNFTQSVDLIINLKELDLSRPENRMKQQIVLPSGLGKEINIAVIAKGDLAAQAESMGLTVIRQEELEELGKNKKQAKKLANANQFFIAQADMMPIVGKSLGAVLGPRGKMPQPVPANANLKPLVERFGKTISINTRDKAFFQVYVGKESMSDEELAANIEAVLNTVARKYEKGLYHVKNAFTKLTMGASAPIEK

SEQ ID NO: 15736 - protein, 106 aa, Brassica napus
MGDTSPRTSGSTDGDMDQNNLMYDGGHVGESSDRSKEKMDQKTVRRLAQNREAARKSRLRKKAYVQQLENSRLKLTQLEQELQRARQQGVFISSSGDQAHSTTGNG

SEQ ID NO: 15737 - protein, 334 aa, Helianthus annuus
MQIFVKTLTGKTITLEVESSDTIDNVKAKIQDKEGIPPDQQRLIFAGKQLEDGRTLADYNIQKESTLHLVLRLRGGMQIFVKTLTGKTITLEVESSDTIDNVKAKIQDKEGIPPDQQRLIFAGKQLEDGRTLADYNIQKESTLHLVLRLRGGMQIFVKTLTGKTITLEVESSDTIDNVKAKIQDKEGIPPDQQRLIFAGKQLEDGRTLADYNIQKESTLHLVLRLRGGMQIFVKTLTGKTITLEVESSDTIDNVKAKIQDKEGIPPDQQRLIFAGKQLEDGRTLADYNIQKESTLHLVLRLRGGMQIFVKTLTGKTITLEVESSDTIDNVKAKI

SEQ ID NO: 15738 - protein, 290 aa, Juglans nigra x Juglans regia
MDQYEKVEKIGEGTYGVVYKARNRKTNQTLALKKIRLEQEDEGVPSTAIREISLLKEMQHGNIVKLQDVVHGEKRLYLVFEYLDLDLKKHMDSSPEFANDLRQIKMFLHQILRGIAYCHSHRVLHRDLKPQNLLIDRRSNSLKLADFGLARAFGIPVRTFTHEVVTLWYRAPEILLGSRHYSTPVDVWSVGCIFAEMVNQRPLFPGDSEIDELFKIFRVLGTPNEDTWPGVTSLPDYKGAFPKWPPKDLAAVVSSLDSTGVDLLSKMLSLDPSRRITARTALEHEYFKDI

SEQ ID NO: 15739 - protein, 147 aa, Brassica napus
VNNRGPTCGQELGDLRGLVLEKVAGSLGLPGRFYNLGGPGIFPYSSKLNHGFFGNFRPYGGPYAGSKGGVVGDILFLVSNLRDDHKVAMHAGSTLNHRFVRFNPREGENATGMLTGFNGLGQYFCLHFGAFQLGRGPVYMAFLGLMG

SEQ ID NO: 15740 - protein, 271 aa, Glycine max
MAKNRGELRIHESVDELRTDLADYVAELSEASVKERGVFAIALSGGSLIGLMGKLCEAPYNKTVDWSKWYIFWADERVVAKNHADSNYKLAKCFDLMCKNNSPFLSLHVPIIPSHVHSINDSVSAEEAADDYEFVIRQLVKTRVVSVSEISDCPKFDLILLGLGPDGHIASLFPNHSALNEREEWVTFITDFPKPPPERITFTLPVINSASNVAVVVTGESKAESVHLAIGDVGPDGPLIPARMVQPAMGKLVWFLDKLAASKLEDSNLNK

SEQ ID NO: 15741 - protein, 384 aa, Pediococcus pentosaceus ATCC 25745
MTIEPLNLVRIRRQFHESPELALKEFQTHALLLSVIRSLPQNLLEIKTIPELPTALLVRVAGSHPHRTIGYRADIDALPVNEKTGLDFASKTPGIMHACGHDIHMTVALGILEYFANHQPQDNLIFFFQPAEESHSGSVRAFNANIFTNQFRPNEFYGLHSTPTLPAGVIGCRMGTLFAGTTEVNLKLTGKGGHAAYPQDANDMVVAQAYLITQLQTIVARNVNPIEGGVLTLGKVSAGNVRNVIADQAVIEGTIRGLTQKMILLIQQRVQQICEGTAQAFNCQVEVKMNQGGYLPVENDPTLTHELIQFMQSDSAIKFKKTPPAMTGEDFGFLLSKFPGTMFWLGVGATSSLHSATFNPDERAIQLGIDAVIKFLQNRMSKGA

SEQ ID NO: 15742 - protein, 178 aa, Helianthus annuus
MASISSSVATVSRTAPAQANMVAPFTGLKSNAAFPTTKKANDFSTLPSNGGRVQCMKVWPPLGLKKYETLSYLPPLTETQLAKEVDYLLRKKWVPCLEFELEHGFVYRENARSPGYYDGRYWTMWKLPMFGCTDSAQVMKELAECKKEYPQAWIRIIGFDNVRQVQCIMFIASRPDGY

SEQ ID NO: 15743 - protein, 181 aa, Shigella dysenteriae
INLGIGVYKDETGKTPVLTSVKKAEQYLLENETTKNYLGIDGIPEFGRCTQELLFGKGSALINDKRARTAQTPGGTGALRVAADFLAKNTSVKRVWVSNPSWPNHKSVFNSAGLEVREYAYYDAENHTLDFDALINSLNEAQAGDVVLFHGCCHNPTGIDPTLEQWQTLAQLSVEKGWLPL

SEQ ID NO: 15744 - protein, 1081 aa, Candida albicans
MNPTKKPRLSPMQPSVFEILNDPELYSQHCHSLRETLLDHFNHQATLIDTYEHELEKSKNANKAFQQALSEIGTVVISVAMGDLSKKVEIHTVENDPEILKVKITINTMMDQLQTFANEVTKVATEVANGELGGQAKNDGSVGIWRSLTDNVNIMALNLTNQVREIADVTRAVAKGDLSRKINVHAQGEILQLQRTINTMVDQLRTFAFEVSKVARDVGVLGILGGQALIENVEGIWEELTDNVNAMALNLTTQVRNIANVTTAVAKGDLSKKVTADCKGEILDLKLTINQMVDRLQNFALAVTTLSREVGTLGIWGGQANVQDVEGAWKQVTENVNLMATNLTNQVRSIATVTTAVAHGDLSQKIDVHAQGEILQLKNTINKMVDSLQLFASEVSKVAQDVGINGKLGIQAQVSDVDGLWKEITSNVNTMASNLTSQVRAFAQITAAATDGDFTRFITVEASGEMDALKTKINQMVFNLRESLQRNTAAREAAELANSAKSEFLANMSHEIRTPLNGIIGMTQLSLDTELTQYQREMLSIVHNLANSLLTIIDDILDISKIEANRMTVEQIDFSLRGTVFGALKTLAVKAIEKNLDLTYQCDSSFPDNLIGDSFRLRQVILNLAGNAIKFTKEGKVSVSVKKSDKMVLDSKLLLEVCVSDTGIGIEKDKLGLIFDTFCQADGSTTRKFGGTGLGLSISKQLIHLMGGEIWVTSEYGSGSNFYFTVCVSPSNIRYTRQTEQLLPFSSHYVLFVSTEHTQEELDVLRDGIIELGLIPIIVRNIEDATLTEPVKYDIIMIDSIEIAKKLRLLSEVKYIPLVLVHHSIPQLNMRVCIDLGISSYANTPCSITDLASAIIPALESRSISQNSDESVRYKILLAEDNLVNQKLAVRILEKQGHSVEVVENGLEAYEAIKRNKYDVVLMDVQMPVMGGFEATEKIRQWEKKSNPIDSLTFRTPIIALTAHAMLGDREKSLAKGMDDYVSKPLKPKLLMQTINKCIHNINQLKELSRNSRGSDFAKKMTRNTPGSTTRQGSDEGSVEDMIGDTPRQGSVEGGGTSSRPVQRRSATEGSITTISEQIDR

SEQ ID NO: 15745 - protein, 226 aa, Zea mays
SPVKMAAASGLAKLTANLCLFLLAARLLQNKQWLNRLVTVVLLVGLLVGSYGLRQQVDGVEQLATWNDPTSTLAQATRVYSFLGNPNLLAAYLVPMTGLSLSALVVWRRWWPKLLGATMVIVNLLCLFFTQSRGGWLAVLALGATFLALCYFWWLPQLPKFWQRWSLPLAIAVAVILGGGALIAVEPIRLRAMSIFAGREDSSNNFRINVWEGVKAMIPGYRLSKG

SEQ ID NO: 15746 - protein, 606 aa, Neurospora crassa
MPGILVATMFMPGVSIIGFLQALTVFSAATASSLVQRDSSCNTPDNRACWTDGFDITTDWEKEVPYTGRTVHYTLVLEQGDIIGPDGVFKHDAMLFNGSFPGPTITADWGDYVNVTIINKLLYNGTSIHWHGLQMEDNNINDGVGGVTECPIPPNATKSYLFLAEQYGTTWYHSHYSAQYGNGVLGAIVFNGPASANYDVDLGTFPINDWYYESADQILAQVQAPGEHGGPTIPPPPDNILFNGTNVNPADITMGEYARVVLTPGLKYRLRLFNPSVNYAYTFSIVGHNFTVIATDLVPVNTTDPSTTVSSLFIAVGQRFDIIIQGKTEEEIASDGGNGNYWINATQPISGYCGNFYGKPAAILSYDFPDATDELPIVDGLVPEDLRCEDSTDFRPVVVRDVPPSEFSISEYNTLPVHLMNDKKQSKVFWTIDNVAINVSWEQPLLEYIREDITFWPYSENVLEIPPESEWSFWLIENKSKIPHPMHLHGHDFVIVGRSPAPDGPGLSDAMMPVRHFDPVLDTSSLNFTNPARRDVTMLPGNGWLIVAFQNENPGAWLFHCHIAFLERKNEIKEKMDLNLLVDNCAAWQSYIDTNPPYQPKNDSGV

SEQ ID NO: 15747 - protein, 1225 aa, Cryptococcus gattii
MSGFTPALGLHHTHSSSVLPTISNDAEPNPPTSSQPHQLAAYSHLYTTSPNYASKITNESSYSSSTTHHGFKYVRPSTSPLLKPPKGNSFSAYLGDWGSQELFTFLDIHKCGQCLAIFQKNDINGKLLLDLDVAALKSMGIDKISERVRLISGIKDLRRRVTDESVRAPFTLCSCPPERTLLPILPSHSNVLLDRWDCSSSTSCLGKREITFRPPPLDLRGHMPPRLSNHSSQSIASIDTHDVHTTNPQIGAVQQYPLDQPQSVPTNRSDSLTLRAPPSRNIGRRSPSPRHFEGCESQTDRFTTLNVASDQQVLSSTVNSLTLREDCHLQREEGLPSFLQVPHFRNTFTSSHKTLLSRRSDLARDDTTSHQPFGPAIAEQDNHIRCRIPDTITNIRETSQGDPNHPFAVKSSKSQSGMLDGVCDMVHGPMADGTKPKGKASVPLTGMSSPNIFPVNANSAALSLADLRRQLVKFINTEDDTIRTVNVMHVTSGIEILERALKKFGKWGTGMHSGPDVYSDDDVNGTLEIDGWGVYTESNPDESSKPLSESSLLQKCTFHREGTAIPDKGLFLHKKKRSQKRKNIHDFFGETPPPLMSPTLPTLFTGPHLGLVQGKSQPASESAPFSSTRLSTSANKGPNRASMISVMSGLGVPITCTLPSPQGNGLRLTGQVNSHKKKSMYNFFGHRPPSELISNHLADYFPSAKKSDVEKARHSLLRLSGGNSAYQGSWIDQGDNAPDHRSKPGSSQPPSLPPFEPSRDTLSDSLQAYASTAIHLSRPKHSTALRRRRDSDSSSRSHMSELMQTRLNRDHSDTASLLTVDEITAEVENRRTSAVLKGNCIEEAEDPPSIERDMLPKYEESKGLLHAVCSDGNSNVDDGMSYRGNSDLDPEEEEEEEEEEEEEEEGEEEEDEENEQGKAFTSTGSKRIIKWIKGALIGAGSFGSVYLGMDAQSGLLMAVKQVELSAGSAKTEDRKRSMLSALEREIELLKELQHENIVQYLDSSVDANHLNIFLEYVPGGSVAALLNNYGAFEEALVRNFVRQILTGLNYLHMRGIVHRDIKGANILVDNKGGIKISDFGISKKVENSLITGLRTNRPSLQGSVFWMAPEVVKQTSYSPKADVWSVGCLVVEMLTGTHPWADLTQMQAIFRIGSLARPAPPSDISVQADEFLRKTFEIEHTKRPTAAQLLKHPFIGSPRVRATSSNFINGAIVSEKMQVQIVKEM

SEQ ID NO: 15748 - protein, 289 aa, Solanum tuberosum
MGNANAREDGAAVDGDGDGEVSGRRSNVESGIVEDHHALTSRVPSADLMVNSPPQSPHRSASPLLFGPQVPVVPLQGGDGNPVSNQMWGNECEDASDHSLEGGIPTLITWSYGGNNVAIQGSWDNWTSRKILQRSGKDYTVLLVLPSGIYHYKFIVDGEVRYIPELPCVADETGVVFNLLDVNDNVPENLESVAEFEAPPSPDSSYAQALLVDEDFAKEPVAVPPQLHLTVLGSENSEEAPSSPKPQHVVLNHLFIEKGWASQSVVALGLTHRFQSKYVTVVLYKPLKR

SEQ ID NO: 15749 - protein, 175 aa, Mycobacterium avium subsp. paratuberculosis K-10
MFTFLKLIAGFRVTFSAMFKKPVTEGYPEKPGPVAPRYHGRHQLNRWPDGLEKCIGCELCAWACPADAIFVESADNTEAERFSPGERYGRVYQINYLRCIGCGFCIEACPTRALTMINDYEMADDNRADLIYGKDQLLAPLQPGMAAPPHPMAPGSTERDYYLLDNIAAANREAR

SEQ ID NO: 15750 - protein, 176 aa, Shigella dysenteriae
INLGIGVYKDETGKTPVLTSVKKAEQYLLENETTKNYLGIDGIPEFGRCTQELLFGKGSALINDKRARTAQTPGGTGALRVAADFLAKNTSVKRVWVSNPSWPNHKSVFNSAGLEVREYAYYDAENHTLDFDALINSLNEAQAGDVVLFHGCCHNPTGIDPTLEQWQTLAQLSVEK

SEQ ID NO: 15751 - protein, 658 aa, Bordetella parapertussis 12822
MAQSLPASATVPAAAQTFPALLLEHASVRGSRPAIREKDLGIWQTLTWSEVAASVRLTAHGLAALGIGPGMHVAVIGENRPRLYIAMMATQALGAIPVPLYQDAVAQEMVYVLQDAEVSVVVVEDQEQADKMLEVREQCPALAHVVYDDPRGMRHYSDPLLRSFEQLEDTGRAHAASHPGFFEQAVAAVRPHDAGAMFYTSGTTGKPKGVVLTHHALIDRARAVAEMENLTDQEDVLAYLPPAWIGQNMFSYTQLLVSGFTVNHPESPETVSIDMRDIGPTYYFAPPRVLEGLLTHVMIRMEDAGYIKRKLFHACMNLARRVGTRILDGQPVGLWDRLRYRLGDALIYGPLRNALGMSRVRVAYTAGEAIGPDLFVFYRSIGINLKQLYGSTETSVFVCVQPDGHVRDDTVGPPVEGVDIRVADNGEILVKSPGLFKEYYRNPEATAEARDDDGWFHTGDAGYLDSDGQLKIIDRAKDVGKLADGSLFAPKYIENKLKFFPYIKEAVAFGNGRDDVCAFINIDLEAVGNWAERRGLPYAGYTDLAGKDEVYALLQDCVEKVNADLAGDARLAASQVGRFLILRKELDPDDDELTRTRKVRRAFIGQKYGVLVDALYGGKDTQFIETEVKFEDGRVGRISADLKIRAARTFPAITAKAA

SEQ ID NO: 15752 - protein, 1298 aa, Neurospora crassa
MTDGPTLAAIAALVKSLAVDPATTQTSGLRPSTHVRLPGPYTREKGDLERELSALVVRIEQLETAAIAASPPAMPDTPNAPTDALFSNGTLSPSSETPDARYPAPLPRNGFIDEALEGLREHVDDQSKLLDSQRQELAGVNAQLIEQKQLQEKALAIIEQERVATLERELWKHQKANEAFQKALREIGEIVTAVARGDLSKKVRMNSVEMDPEITTFKRTINTMMDQLQVFSSEVSRVAREVGTEGILGGQAQIEGVDGTWKELTDNVNVMAQNLTDQVREIASVTTAVAHGDLTKKIERPAKGEILQLQQTINTMVDQLRTFASEVTRVARDVGTEGILGGQADVEGVQGMWNELTVNVNAMANNLTTQVRDIIKVTTAVAKGDLTQKVQAECRGEIFELKKTINSMVDQLQQFAREVTKIAREVGTEGRLGGQATVHDVQGTWRDLTENVNGMAMNLTTQVREIAKVTTAVAKGDLTKKIGVEVQGEILDLKNTINTMVDRLGTFAFEVSKVAREVGTDGTLGGQAQVDNVEGKWKDLTENVNTMASNLTSQVRGISTVTQAIANGDMSRKIEVEAKGEILILKETINNMVDRLSIFCNEVQRVAKDVGVDGIMGGQADVAGLKGRWKEITTDVNTMANNLTAQVRAFGDITNAATDGDFTKLVEVEASGEMDELKKKINQMVYNLRDSIQRNTQAREAAELANKTKSEFLANMSHEIRTPMNGIIGMTQLTLDTDLTQYQREMLNIVNSLANSLLTIIDDILDLSKIEARRMVIEEIPYTLRGTVFNALKTLAVKANEKFLDLTYRVDHSVPDHVVGDSFRLRQIILNLVGNAIKFTEHGEVSLTIQKASSVQCSTEEYAIEFVVSDTGIGIPADKLDLIFDTFQQADGSMTRKFGGTGLGLSISKRLVNLMGGDVWVKSEYGKGSKFFFTCVVRLANDDISLIAKQLNPYKSHQVLFIDKGRTGHGPEIAKMLHGLGLVPIVVDSERNPALEKARAAGQAPYDVIIVDSIEDARRLRSVDDFKYLPIVLLAPVVHVSLKSCLDLGITSYMTTPCQLIDLGNGMVPALENRATPSLADNTKSFEILLAEDNTVNQRLAVKILEKYHHVVTVVGNGEEAVEAVKRKKFDVILMDVQMPIMGGFEATAKIREYERSLGSQRTPIIALTAHAMMGDREKCIQAQMDEYLSKPLQQNHLIQTILKCATLGGQLLEKNRERELTRAADAVTGGRRDNGMYSASQAAQHAALRPPLATRGLTAADSLVSGLESPSIVTADKEDPLSRARASLSEPNIHKAS

SEQ ID NO: 15753 - protein, 185 aa, uncultured bacterium
GCTSGMDAVADGAELTEDGRADVVIAGATDAPISPITVACFDAIKATSPNNDDPAHASRPFDISRDGFVLGEGAAVFVLEPADLARRRRAHIYCEIAGYAQRSNAYHMTGLTADGLEMAEAIRVAMGRARLVPEDIDYINAHGSGTRQNDRHETAAFKARLGARAYGIPVSSIKSMVGHSLGAIG

SEQ ID NO: 15754 - protein, 422 aa, Yersinia pestis CO92
MTPSDLVFDQQHIWHPYTSMTEPLPCYPVVGAEGVELQLADGRRLIDGMSSWWAAIHGYNHPVLNFAAHQQLDKMSHVMFGGITHPPAVKLCRQLVAMTPPPLECVFLADSGSVSVEVALKMALQYWQAKGERRQRILTLRHGYHGDTFGAMSVCDPQNSMHSLYQGYLAENLFANAPQCGFDDPWDPQDIANFVALITQHANEIAAVILEPVVQGAGGMRIYHPSYLREVRALCDKHQILLIADEIATGFGRTGKLFACEHAQIVPDILCLGKALTGGYLTLSATLTTRAVAETISKGDAGCFMHGPTFMANPLACAVASANLSLLAENSWQQQVSKIEDQLKRELLPLAQEDTVADVRVLGAIGVVEMKKPVNVARLQRSFVEQGVWIRPFGKLIYLMPPYIISQHALTRLTAAVVDRGS

SEQ ID NO: 15755 - protein, 184 aa, Shigella dysenteriae
ADERPGKINLGIGVYKDETGKTPVLTSVKKAEQYLLENETTKNYLGIDGIPEFGRCTQELLFGKGSALINDKRARTAQTPGGTGALRVAADFLAKNTSVKRVWVSNPSWPNHKSVFNSAGLEVREYAYYDAENHTLDFDALINSLNEAQAGDVVLFHGCCHNPTGIDPTLEQWQTLAQLSVEKG

SEQ ID NO: 15756 - protein, 576 aa, Thanatephorus cucumeris
MARTTFLVSVSLFVSAVLARTVEYGLKISDGEIAPDGVKRNATLVNGGYPGPLIFANKGDTLKVKVQNKLTNPEMYRTTSIHWHGLLQHRNADDDGPSFVTQCPIVPRESYTYTIPLDDQTGTYWYHSHLSSQYVDGLRGPLVIYDPKDPHRRLYDVDDEKTVLIIGDWYHESSKAILASGNITRQRPVSATINGKGRFDPDNTPANPDTLYTLKVKRGKRYRLRVINSSEIASFRFSVEGHKVTVIAADGVSTKPYQVDAFDILAGQRIDCVVEANQEPDTYWINAPLTNVPNKTAQALLVYEEDRRPYHPPKGPYRKWSVSEAIIKYWNHKHKHGRGLLSGHGGLKARMIEGSHHLHSRSVVKRQNETTTVVMDESKLVPLEYPGAACGSKPADLVLDLTFGLNFATGHWMINGIPYESPKIPTLLKILTDEDGVTESDFTKEEHTVILPKNKCIEFNIKGNSGIPITHPVHLHGHTWDVVQFGNNPPNYVNPPRRDVVGSTDAGVRIQFKTDNPGPWFLHCHIDWHLEEGFAMVFAEAPEAVKGGPKSVAVDSQWEGLCGKYDNWLKSNPGQL

SEQ ID NO: 15757 - protein, 383 aa, Triticum aestivum
HLYDPISLVRDDKIKNELLGLGISMQSFNGDLLYEPWQVYDENGLAFTTFNMYWEKCMKLHIEISSSLAPWRLVPVSGIENICSSSIDDLGLESSKDEESSNALLSRAWSPGWRNAEKTLEDFVSHGLLDYSKDGMKVAGTTTSLLSPYLHHGEVSVRKVYQLVRMQQIKWENEGKSGAGESVNLFLLSIGLREYSRYLCFNFPFTHERSLLGNLKHYPWRADEDRFKSWRQGMTGYPLVDAGMRELWATGWTHNRIRVIVSSFAVKFLQIPWTWGMKYFWDVLLDADIESDILGWQYISGSLPDGHELGRLDNPEVQGQKYDPDGEYVRTWIPELARMPGEWIHHPWDAPSSILEVAGVELGFNYPMPIVELHTARECLDDV

SEQ ID NO: 15758 - protein, 232 aa, Triticum aestivum
  misc_feature (53)..(53): Xaa can be any naturally occurring amino acid
  unsure (1)..(232): unsure at all Xaa locations
GDSPEQVCTKKQAGTGPEFPGYRRPTRPQVNQVIGIDLLSQFPPLALNFFGVXKHWRVRLAIIEYIPLLASQLGVGFFDDKLGALCMQWLEDKVFSIREAAANNLKRLAEEFGPEWAMQHIIPQVLEKINNPHYLYRMTILQAISLLAPVMGAEITCQKLLPVVINSSKDRVPNIKFNVAKVLQSLVPILDQSVAEKTVKPCLVELSEDPDVDVRYYANQALQACDQIMMSS

SEQ ID NO: 15759 - protein, 184 aa, uncultured bacterium
CTSGLDAVAEGAEMIGDGRADVVIAGATDAPISPITVACFDAIKATSPNNDDPAHASRLFDASRDGFVLGEGATVFVLEPADEARRRGAHIYCEIAGYAQRSNAYHMTGLKADGLEVAEAIRVAMGRARLAPEDIDYINAHGSGTRQNDRHETAAFKASLGARAYEVPVSSIKSMVGHSLGAIG

SEQ ID NO: 15760 - protein, 240 aa, Arabidopsis thaliana; identical to SEQ ID NO: 859

SEQ ID NO: 15761 - protein, 1832 aa, Podospora anserina
MYNPPGQRDATRPFHVPPPPPPMSPPPPTVGINNPMMTIPPPPPRHPNAPSTTGNVLLPPPPSGPPPNSGFPNSAIAPPSALGSTAPWHGAWGRAYDGRTAFNIPPPPPGGGAGGGGGGGSGGVLRAYDPKYHAQVLAAANNGATYTVPPPPPPQQQQQQQQQQQQQQQQQQQQQQQQQQQQQQQQQQQQQQQQQQQQQQQQQQQQQQQQQQQQSDQMGALTSATYIPQGDTYGEGVGIPGLGLEDSAIGWNMGAHLESATATPLDESSGRDRLYANAMAQRGSSTTSNATVSSVSVPPELAAQWPMEKVLGWLQANSFSSHWQETFKYLGLDGARFLELGSSHGGRGNFGMMHQQVYPRLLALSGPEWNQAREREEGKRMRRLVRSIVTGRPVEVKGGRLGGGQQQPQHARQNSTSAPPAVTGGQTGNRSAESPNVSVDDGFWDTGVTDADDGDKQTPNPIKIPEFGFSRRFSQSRATTMPTLSSTMPTDHRNMMKEIDTSRRHSPTLSESGEAGGTFRGGSTPLGGGGGGGGGGGRDSPSAGSPNPASGLFPSSTAGNLSASPHSSRFGHRSRNSTDSVSSSAAIYGSGVPADAAAMLKSGMNIADVVNAARNANDRRHAQDGGRPSPQESGGGDRSAGEPPGSAKGSGSFLSIFTRKKHGRKDDGFGGDEDSPTSPGLSFKPQSLGDNRPGSSAGTYGHHHAGNVRANRGGPRVFILATADCWNYRMLDVTDIETASDLRQLICINLGLPESEGAHLYPTELGKFEHDGEALDDSKLLAIKTQRADAIGTLKLFVRVGGPPQMRQTGAQIAMDEETYVKLNGRMRSSSSPPTSRQNTLTGKEGEDKMLTAEAIEYRTEQLRKQKEYLAKRKQVAENNHVADRSPSSSIVGRTVDFDQPRHSPFEDRKMDTLLPQRKPPAPPSDPSATLIKANSLKKTGHGLRLSGDSGYHPKRKTSSDLRSSGDVVFEKQKRWGPVADPSAGIGALLVGMSDGMASIARPRPGGGMMQQRQPSPHRVATEPITSQELQRGKKAMSTVNFGPAHQRERSGSGGGSPRPGGMPGSPGSYTWSSKNVPFLVPDYSPNGTPAPPTASRMPDGGGNSGDGCLDQNHNHQAQNGTIAKMRNVARAPSPGNVSPSSRRRPSDSFSSQAAVAKKRKSHGPDTDFTDNDVTFSASSTRASKKVDDSDSDDDSDDGLFAIPIAARNSGPDKGKTTAPAEGNSGDSDGASGTGTGKRPSLRLNTRSGSNSRAKKTLSVAFAVSPQSSSAGGKTPLEDDDSGRSSSQRRGTPGTPQSEGGWDSEEKDSKISRRKSFIEKDVWANRPPTDALVNNLEDFFPDLDVDQPVLEEGVDQEPPSPIAEGDENNQGSASVPPLPPLPPGLSTGKLHTFYNDNDTLGSDESTLKALESRPVSMQSLAHRSIRRSGGGGGLGRMKSIREVARGANEFGKRYTQGPGQIDAQSSAAAAGNRNTNLMRRKSTKMFNANIVQIQPDRGSLNLAMGGLTTIPQDSLPTRSTNSRESIPKRQTTFRWFKGQLIGKGTFGRVYLGMNATTGEFLAVKEVEVNPKAAQGDKKKMQELVAALDQEIDTMQHLDHVNIVQYLGCERKETSISIFLEYISGGSIGSCLRKHGKFEEPVVASLTRQTLSGLAYLHREGILHRDLKADNILLDLDGTCKISDFGISKKTDNIYGNDKTNSMQGSVFWMAPEVIRSQGEGYSAKVDIWSLGCVVLEMFAGRRPWSKEEAVGAIYKIANGETPPIPEDIREVISPVAIAFMLDCFTVVSSERPTADVLLSQHPFCELDPTYSFLDTELYAKIAGRVNDLGRGQ

SEQ ID NO: 15762 - protein, 1073 aa, Arabidopsis thaliana
  misc_feature (591)..(591): Xaa can be any naturally occurring amino acid
  unsure (1)..(1073): unsure at all Xaa locations
MASSLKKLISSFLLVLYSTTIIVASSESRCRRFKSIISFGDSIADTGNYLHLSDVNHLPQSAFLPYGESFFHPPSGRASNGRLIIDFIAEFLGLPYVPPYFGSQNVSFEQGINFAVYGATALDRAFLLGKGIESDFTNVSLSVQLDTFKQILPNLCASSTRDCKEMLGDSLILMGEIGGNDYNYPFFEGKSINEIKELVPLGPLIVKAISSAIVDLIDLGGKTFLVPGGFPTGCSAAYLTLFQTVAEKDQDPLTGCYPLLNEFGEHHNEQLKTELKRLQKFYPHVNIIYADYHNSLYRFYQEPAKYGFKNKPLAACCGVGGKYNFTIGKECGYEGVNYCQNPSEYVNWDGYHLTEAAYQKMTEGILNGPYATPAFDWSCLGSDTGNYLHLSDVNHLPQSAFLPYGESFFHPPSGRASNGRLIIDFIAEFLGLPYVPPYFGSQNVSFEQGINFAVYGATALDRAFLLGKGIESDFTNVSLSVQLDTFKQILPNLCASSSRDCREMLGDSLILMGEIGGNDFFYPSSEGKSINETKLQDLIIKAISSAIVDLIALGGKTFLVPGGFPAGCSAACLTQYQNATEEDRDPLTGCXPRLNELGEHHNEQLKTELKRLQKLYPHVNIIYADYHNSLYRFYQEPAKYGFKNKPLAACCGVGGKYNFTIGKECGYEGVNYCQNPSEYVNWDGYHLTEAAYQKMTEGILNGPYATPAFDWSCLGSESRCRRYKSIISFGDSIADTGNYVHLSNVNNLPQAAFLPYGESFFHPPSGRYSDGRLVIDFIAEFLGLPYVPPYFGSQNVSFNQGINFAVYGATALDRAFLVKQGIKSDFTNISLSVQLNTFKQILPNLCASSTRDCREMLGDSLILMGEIGGNDYNYPFFEGKSINEIKELVPLIIKAISSAIVDLIDLGGKTFLVPGNFPIGCSTAYLTLFQTATVEHDPFTGCIPWLNKFGEHHNEQLKIELKQLQKLYPHVNIIYADYYNSLYGLFQEPAKYGFKNRPLAACCGVGGQYNFTIGKECGENGVSYCQNPSEYVNWDGYHLTEATYQKMAQGLLNGRYTTPAFDWSCLGSYDFSG

SEQ ID NO: 15763 - protein, 185 aa, uncultured bacterium
  misc_feature (10)..(10): Xaa can be any naturally occurring amino acid
  unsure (1)..(185): unsure at all Xaa locations
GCTSGLDAVXDGAELIEDGRADVVIAGATDAPISPITVACFDAIKATSPNNDDPAHASRPFDISRDGFVLGEGAAVFVLEPADQARRRRAHIYCEIAGYAQRSNAYHMTGLTADGLEMAEAIRVAMGRARLVPEDIDYINAHGSGTRQNDRHETAAFKASLGARAYEIPVSSIKSMVGHSLGAIG

SEQ ID NO: 15764 - protein, 273 aa, Xanthomonas campestris pv. vesicatoria str. 85-10
MSRQLVGELISEAVAMFIIIALGDSVAAMYILYDPSPYQNAYWGVCIAWGLAVTLAIYVTGSVSGTHANPAVTLALALFRGFSWKKVLPYWFAQVVGAFLGAAIVYQLYGPVIDHFNQVQQLTREAGGAAGVFFTAPGLAVTPMHALVDQIIITAFLIFGIFAITEQFNEAAPTANSGALMIGLLVATLGASMGYLEAWAMNPARDFGPRLLAYFAGWGEAALPAKDNYWWIPIVGPLIGGPIGALAYQWLILPFLPARVRHLQGGSKPLDPL

SEQ ID NO: 15765 - protein, 189 aa, Zea mays
MAITHDDYVSLCLMALAAAGGGGHAAAASARTTTTMTTQECELRFRCSVCGKAFASHQALGGHKASHRKPPPPLAQAPSSSSSVTTNTSSAGGSGAGQGRHRCSVCHRGFATGQALGGHKRCHYWDGLSVSLTASAASGSASSLRGFDLNLVPAAGAARWREEEEVQSPLPVKKRRLSSGPSTELSLTI

SEQ ID NO: 15766 - protein, 158 aa, Glycine max
MFASPNLRLVTRSLETRGNRHYSSQSGSQTTSLKQRLTELIPQKNAEIKEIKEKYGEMKLGDCTVSQAYGGMRSVKSMVWEPSLLDSEEGIRFRGYSIPECQEKLPKAAGGQEPLPEGTFWLLATGEIPTDAHVKELSREWAARSDVPNWVTDLIKSL

SEQ ID NO: 15767 - protein, 224 aa, Triticum aestivum
  misc_feature (27)..(27): Xaa can be any naturally occurring amino acid
  misc_feature (39)..(39): Xaa can be any naturally occurring amino acid
  misc_feature (84)..(84): Xaa can be any naturally occurring amino acid
  misc_feature (216)..(216): Xaa can be any naturally occurring amino acid
  unsure (1)..(224): unsure at all Xaa locations
MADTRFKLNTGAKIPALGLGTWRSGPXLVQKAVTHALSXGYRHIDCAYVYENESEVGEALGEAFSKGLKREDVFITTTLWSTYXSRAGGPRAKSLKSLGLEYVDLYLMHWPFAMNPHGNHDLSPRAPDGTREIVRDWSHVKTWKSMENLLATGKVKAIGVSNCSVPYLEELIAEAKVIPAVNQIENHPSLPQQEIVDYCHSKGIHITAYSPFGSAXCPMFTEPT

SEQ ID NO: 15768 - protein, 299 aa, Methanosarcina acetivorans C2A
MDRIISVVGHTALDYIIDVENIAGKNESSPVIDYEEYPGGGAANIAVAIAKLGGKSQLMSPVGMDFSSSGYEQLLKDAHVDLSRLYSIEALKLSKAFIFTDREDNQTTYFYWGASSKFKELEPEPVDFAHLATADCIYNAKIAQIAGFVSFDPGQDLVTYSQEKLETILAHTDILFANRHEIKRVSEMTGKSFSELRAMIEVIVITYDAEGSRIYTGNEEWKIPVVSVKAVDPTGAGDAYRAGFLLAYTREYSLPTCGKIGSTVASFAVQSRGCQTSLPTWEEMKSRYEASFGKLEVES

SEQ ID NO: 15769 - protein, 533 aa, Pleurotus sp. 'Florida'
MAVAFVALVSLALALVRVEASIGPRGTLNIANKVIQPDGFYRSTVLAGGSYPGPLIKGKTGDRFQINVVNKLADTSMPVDTSIHWHGLFVKGHNWADGPAMVTQCPIVPGHSFLYDFEVPDQAGTFWYHSHLGTQYCDGLRGPLVVYSKNDPHKRLYDVDDESTVLTVGDWYHAPSLSLTGVPHPDSTLFNGLGRSLNGPASPLYVMNVVKGKRYRIRLINTSCDSNYQFSIDGHTFTVIEADGENTQPLQVDQVQIFAGQRYSLVLNANQAVGNYWIRANPNSGDPGFENQMNSAILRYKGARSIDPTTPEQNATNPLHEYNLRPLIKKPAPGKPFPGGADHNINLNFAFDPATALFTANNHTFVPPTVPVLLQILSGTRDAHDLAPAGSIYDIKLGDVVEITMPALVFAGPHPIHLHGHTFAVVRSAGSSTYNYENPVRRDVVSIGDDPTDNVTIRFVADNAGPWFLHCHIDWHLDLGFAVVFAEGVNQTAAANPVPEAWNNLCPIYNSSNPSKLLMGTNAIGRLPAPLKA

SEQ ID NO: 15770 - protein, 308 aa, Oryza sativa
  misc_feature (37)..(37): Xaa can be any naturally occurring amino acid
  unsure (1)..(308): unsure at all Xaa locations
MLVVTKPGQLPVEFLEPSAAQKLVIGFDCEGVDLCRXHGALCIMQIAFPDAVYLVDAIEGGKELIEACKPALESEYVTKVIHDCKRDSEALYFQFGIKLHNVMDTQIAYSLLEEQEGKKRGYDEYISFVSLLADPRYCGMAYPEKEEVRTLLRQDPNFWTHRPLSEMMIRAATDDVRFLLSIHEKMMEKLSKVSLWRLSVRSELYCRCFCINDNKYADWPPLPTVPDEIEPDVYVPEVDILSVLDVPPGKMGRVIGRKGSSIMEVKASCNVEIHIGGAKGPPDRVFIIGPVQEVRKAEAILRGRMLEF

SEQ ID NO: 15771 - protein, 412 aa, Azoarcus sp. EbN1
MTRRRVVITGLGIISPVGNTVPEAWDNIVNGRSGIGEITRFDASSFPVRIAGEVRGFDIGAYLSPKEARRMDVFIHYGLAAGIQAFRDAGLDVTASNAERIGVNLGSGIGGLPMIEATHDDFLKGGARKISPFFIPGTIINMIAGNLSIMLGLKGPCLAMVTACTTATHCIGEAARLIQYGDVDVMVAGGAESTVTPLAVGGFASAKALSTRNDDPLTASRPWDKGRDGFVLGEGAGVLVLEEYEHAKARGARIYAEISGYGMSADAYHMTAPAEDGDGAARCMANAMRDARMTVEEIDYVNAHGTSTPLGDLAETTAVKRCFGDRARSIVVNSTKSMTGHLLGAAGGVEAVFTALALHNQIAPPTINIFEQDERCDLDYVANKARPMEIRAALSNSFGFGGTNGTLAFRRI

SEQ ID NO: 15772 - protein, 435 aa, Saccharomyces cerevisiae
MTLSKYSKPTLNDPNLFRESGYIDGKWVKGTDEVFEVVDPASGEIIARVPEQPVSVVEEAIDVAYETFKTYKNTTPRERAKWLRNMYNLMLENLDDLATIITLENGKALGEAKGEIKYAASYFEWYAEEAPRLYGATIQPLNPHNRVFTIRQPVGVCGIICPWNFPSAMITRKAAAALAVGCTVVIKPDSQTPLSALAMAYLAEKAGFPKGSFNVILSHANTPKLGKTLCESPKVKKVTFTGSTNVGKILMKQSSSTLKKLSFELGGNAPFIVFEDADLDQALEQAMACKFRGLGQTCVCANRLYVHSSIIDKFAKLLAERVKKFVIGHGLDPKTTHGCVINSSAIEKVERHKQDAIDKGAKVVLEGGRLTELGPNFYAPVILSHVPSTAIVSKEETFGPLCPIFSFDTMEEVVGYANDTEFGLAAYVFSKNVNT

SEQ ID NO: 15773 - protein, 446 aa, Solanum habrochaites
RMSVDVGAPSPRSIQMDEQVNPGEEYAPKIRKPYTISKQRERWSEEEHKKFLEALKLHGRAWRRIEEHVGTKTAVQIRSHAQKFFSKVVRESSNGDASSVKSIDIPPPRPKRKPMHPYPRKMATPLKSGTLASEKLNRSGSPDLCLSEPENQSPTSVLSTLGSDAFGTVDSTKPSEQSSPVSSAVAENSGDLVLSEPFDFVVEESRSSPARAYDSSNPANQACVKLELFPEDNDFVKEGSDEASSTQCLKLFGKTVLVTDAHKPPTDETLTRSSFPAKYLPWDSECPQSTFSIVPPTPSYYFPTPNGSPGPNQSGVATHLPWGSSCAVPCTQVHSPIPMKGRPLFNDRDLEGKEAQKEGSSTGSNAESVDAELSGDKNMEIEAQSSRNVVEESVRASVPSLFERRANSTKRVKGFVPYKRCLAERGMSSSTLTGEEREEQRTRLCL

SEQ ID NO: 15774 - protein, 308 aa, Glycine max
MVELAMSKTMMEEVVMTTSWSEGSEDDDLVRELLDDGSPLLIEPPNTTTKASSSDDQDQAFNKFISNIYSGPTISDIENALSVTNQRDHFPQLSSARVSILERGLSKIENKYTLKIKCFGNVMGDDGYKWRKYGQKSIKNSPNPRSYYRCTNPRCSAKKQVERSNEDPDTLIITYEGLHLHFAYPYFLMGQLQQSNSHPPIKKSKPISPQAQAQAHREDYVHEAQSNATLGVMSSTSLDSTLDMAHENLGSQGLLEDMVPFMVRNPSNNVNSAHTKFSCSSYSSPPTSPLWTSTYSTTCYTVGLNSST

SEQ ID NO: 15775 - protein, 317 aa, Nicotiana tabacum
MATINYPENPSPVADAEAIRKACQGWGTDEKAIISIFGHRNATQKKLIRRAYEELYNEDLVKRLESELSGHFEKAVYRWILDPEDRDAVMLHAAIKETPIPDYRVIIEYSCIYSPEEFLAVKRAYQARYKRSVEEDLAEHSAGDLRKLLVALVGIYRYAGKEINARVANTEADNLHSAICNKEFNHEEIVRIISTRSIPQLIATLNRYKDDYGSSITKHLRDDANAAKEYLVALRTTIRCINDPQKYHEKVIRYAINESGTDEESLTRVIVTRAEKDLKDIKEIYYKRNSVTLDHAVSKHTSGDYKAFLLTLLGNDN

SEQ ID NO: 15776 - protein, 354 aa, Bacillus cereus ATCC 10987
MKSMFNKIFLIVALIGVPLSVLGKTLHWPQTIMFAVYCITIIALAGFMGRATESLAIVSGPRIGGLLNATFGNAVELIISIFALQAGLIEVVLASLTGSVLGNLLLVGGLSFFVGGLKYKRQSFNVYDARHNSALLIFAVVVAFVIPEIFSMKMDAGKTYQLSIGVSIIMIIMYLAALLFKLVTHRGVYQHKSDEVAHEEEPEWSKGKALLILAIATIAVAYVSEALVHTFETVAKSFGWSELFIGVIIVAIVGNAAEHASAIIMAYKNKVNIAVEIAIGSTLQIAMFVAPVLVLLSMFFTQRMPLVFTIPELVSMITAVFLTIAISNDGDTNWFEGGTLLAAYVIMGIGFYLL

SEQ ID NO: 15777 - protein, 183 aa, Shigella dysenteriae
GIGVYKDETGKTPVLTSVKKAEQYLLENETTKNYLGIDGIPEFGRCTQELLFGKGSALINDKRARTAQTPGGTGALRVAADFLAKNTSVKRVWVSNPSWPNHKSVFNSAGLEVREYAYYDAENHTLDFDALINSLNEAQAGDVVLFHGCCHNPTGIDPTLEQWQTLAQLSVEKGWLPLFDFAY

SEQ ID NO: 15778 - protein, 356 aa, Burkholderia pseudomallei K96243
MPFIADSSRAALRGVLYVALSAVAFGAMAIFGRYAYAGGADVLGLLIVRFSIAGALLVAVARRRRVRWPRGRALAAIVGMGALGYVGQSLCYFSALQHAQASLVALLLYLYPAFVTLLAAWWLGERLTRAKAVALALCVAGSALMVGGGRGEPLGIALALGAAVVYSLYIVVGAKAARGVDPLATVAVICCAAAAMLAMLALARAAAFDAPPHWPRAAAGWAALVAIALVSTVAAMLAFFAGLARLGAARTSMLSTLEPVVTVALAAALFGETLTPLQWAGGVAILAAVLWLVRAGDAADSRGAGDDRERRRLGRRDDEPSAPGGSGAGGGLAGFVDPNECGIRRVRSADENARPM

SEQ ID NO: 15779 - protein, 526 aa, Arabidopsis thaliana
MATKTDDFAPFPVKDQLPGVEFCVSSSPNWPEGIVLGFQHYIVMLGTTVIIPSILVPLMGGGDVEKAEVINTVLFVSGINTLLQSLFGSRLPVVMGASYAYLIPALYITFSYRFTYYLHPHLRFEETMRAIQGALIIASISHMIMGFFGLWRILVRFLSPLSAAPLVILTGVGLLAFAFPQLARCIEIGLPALIILIILSQYLPHLFKCKRSICEQFAVLFTIAIVWAYAEILTAAGAYDKRPDNTQLSCRTDRSGLISASPWVRIPYPLQWGRPSFHGSDAFAMMAATYVAIVETTGSFIAASRFGSATHIPPSVLSRGIGWQGIGVLLNGLFGTATGSTALVENTGLLGLTKVGSRRVVQISAGFMIFFSIFGKFGAVLASIPLPIFAALYCVLFAYVASAGLGLLQFCNLNSFRNKFILGFSIFIGLSVAQYFTEYLFISGRGPVHTRTSAFNVIMQVIFSSAATVGIMAAFLLDCTHSYGHASVRRDSGRHWWEKFRVYHTDTRTEEFYALPYNLNRFFPSF

SEQ ID NO: 15780 - protein, 447 aa, Burkholderia pseudomallei
MNQPLPVTVLSGFLGAGKTTLLNHILANRAGMKVAVIVNDLAAANVDATFVRGATELSHVEAHLVEMSNGCICCTLRDDLLVEIRRLAAENRFDAIRGRIDGHSPSRCRYAETFTFVDDDGSTIADVARLDTMVTVIDAFNFLHDYARDDALAEHGLAATDEDDRTLVELLIEQIEFCDVLVINKADLVDADALARLQRILANLNPRAQQIVSRFGDVPLAEVINTGRFDFDAAANAPGWLASLEHRRDADEAECGQGQSQGDGRVHSEADEYGIGHFVYRARRPFHPQRLWALLHEEWKGVLRSKGFFWLATRNDIAGSLSQAGGVCRHGPAGHWWAAQDRTEWPEAGDELYDEIVADWHGELADTSIGDRRQELVLIGIGLDAAAWRAKFDACLLTGAEYAQGKQAWAGYADPFPAWDVDDHDHDHAHDHHDHDHGDDSEIVHRH

SEQ ID NO: 15781 - protein, 467 aa, Actinidia deliciosa
MKLLSRKAACNSHGQDSSYFLGWQEYEKKPYDEVRNPTGIIQMGLAENQLSFDLLESWLANNPEPAGFMRDGQSIFRELALFQDYHGLPAFKNAMVDFMSEIRGNKVSFDPKKLVLTAGATSANETLMFCLAEPGEAFLLPTPYYPGFDRDLQWRTGVEIVPIHCTSANSFQITDSALEEAYQSAQKRNLRVKGVLVTNPSNPLGTTLTRPELNLLLTFITSKNIHLISDEIYSGTVFSSPDFVSIMEVLKDSSHSTEVWNRVHIVYSLSKDLGLPGFRVGAIYSNDDVVVAAATKMSSFGLVSSQTQYLLASMLSDKNFTKHYISENQKRLKKRQEMLISGLQSAGIGCLKSNAGLFCWVDMRHLLSSKSFDSEMELWKKIVYQVGLNISPGSSCHCSEPGWFRVCFANMSEDTLDIAIQRIKTFVQTTNNNHSQRIHPSVKKSKRKSLTKWVFRLSFDGREPDER

SEQ ID NO: 15782 - protein, 1667 aa, Ustilago maydis 521
MSDRPSSITQPAPSENDGSAVVFASPSSMDTNFPQLDGPARPYQAMLPLHTSPPKSPPAAAPSVSTTPMSAPTPLHAPFGPTPSSATSSAAVSRVSSTRSNAPPSSSASTTRIRKGLLSRAGSEAEDRYSRAASASHTQLTTDDDDDEYMISDSGPMPRRFASQNRAPSGPYSSSRQSSNSSLPHTTPANRYNAASYPLNASSVSIASGNRSGSGEASEGAASGVGSVSLGRAMSVSSVSSVNSTSSLEAVPFREAPLGNVRLGFGGSALRVSGRNARTNPYSSLAITTQPPAAGQAAPLQAADHHLPTTTSVSDSHSTNNDAACPPFLFAAPTAASSGQSTTFRSPLPASDRHKGVPKPATDAWMYRVGPGMRTNRPPRPSSTASPELPESPLDEGQSPSSPAKRSREALRQKFAKGAGRLGIKTNIVTSYAPSASEQYTVYNPVDSSEDEIGLVPPSRTPLPRSSSYFSAAPHSANTAAGSPLQSYPLLTPVPADFRTSSITNAPLFVPKFAEDLPSVRPTPESSATPSSAANGMVHDPRLATSADASLAPFLPPLSYGAQVGSISSDLSPYLAGGAALPATSNSQHRHRLSATQKPVLMRNQSSNDALDRLASPGLFIRDPSAATAPSAEPALYTSSTSAASTQRSPQVELALKPVTSVQASPHPTPAQVVQMEAQAGIASLPDSPSEPSPVPASYSPAIADAAIANAPVKAKLRRPSSGTGSEASLSLGPATTGSSRRPESLQRQRMWSNPKRPAILRTQTSESTISKARRSHSADRRAYSPSRQSPTEAVLHDTQFDRPGTHSKNSSSSTATGGDLGARVSAHVAVIPEDDDGVSGSVGAPFHPVVIVQDDSSRNSLRLASGIEADHGRALSPTITMRPMPGPRSASPASQYATSQYARSPETIRIGPSRITDSLYGRSPASISNLQSPLLQPSPTPAAPERATTPSLRASSARGPHDFHFGETLGEGSYSTVLEAWDLVCGPSAKEPGVIDPNATSAAAAMVGSESSRKRRRRIDLTGRKAYAIKVLDKVHILKQGKQKYVSIEKEALSRMIRHPGVVTLFWTFQDRESLYFVLELANNGELLNFIRKHGSFDRESARFYAAQLADTIDAMHTAGVVHRDVKPENILLDAKYRIKITDFGSAKIVHPVGEAEATPAASAEKETTSAAQPSRAASFVGTAEYVSPELLVEKAQPAGKPADWWAFGCVLFQMLAGRPPFKGVNEYQTLQKVKNREFSFPHGFPEDAQDLINKVLVLDPARRPSAREIKAHRFFEAIAWDELWEMDVPQIKTGLVQPTPTHQQQRGEETSDFSFDEGFGSSDESQAYNGDTQSIDREGEESELSVDRLPDARREHDADDSDLSDDSSNRAEPHLPKRQSGLQRLADGFQSRFMSSVGASASPQANGGAPRRRFSNMSIEAPAPAPVASGATLESIGVEGSSSGATRPMRPFSRSTQTMSTHTHTHTHTHSSSPNSTTRAQQACVSSAAATSAGGGGGGLQQSWAALLLPKEMMLYSLPVAQKKTGTGKMFTKRRQLVLTDFPRLLCVKETATALKVKSEVILAIPRSNATMGGDATGDLVENSSGRQAFKVASDGEQVGEAQGTSQVRSTREQVIPNLLTALEYRGGRSFTVRTANARVFLYETLAGDAGALVKCIQDARRTAN

SEQ ID NO: 15783 - protein, 358 aa, Xanthomonas campestris pv. vesicatoria str. 85-10
MSQSKPLFPLNAWYAVAWDHEIKHVLSPRKLCNLDVVVYRTTAGAVVALEDACWHRLVPLSMGKLRGDDVVCGYHGLVYNTQGRCVHMPSQDTINPSACVRSFPVAEKHRYVWIWPGDPAKADTRLIPDLHWSHDPAWAGDGRTIHAKCDYRLVLDNLMDLTHETFVHGSSIGQDEVAEAPFDVVHGDRGVIVSRWMRNIDPPPFWASQIARHLDYRGKVDRWQIIRFEAPSTIAIDVGVAIAGTGAPEGDRSQGVNGYVLNTITPETDTTCHYFWAFMRNYALHDQSLTTLTRDGVTGVFGEDEAVLEAQQRAIDAHPDHTFYNLNVDAGGMWARRVIDRLIAQEQRAQDLSLRMVG

SEQ ID NO: 15784 - protein, 415 aa, Streptomyces sp. R1128
MTQAAPTTRRAVVTGLGAVAPNGFGTEEYWKATLRGRSGIHPLHRYDASGFPSRLAGQILGFEAEQHIPGRLLPQTDRVTRLALVAGQSALDDAGVDPQALVDYSMGVVTSSAIGGFEFTHGEVHKLWTKGPQHVSVYESFAWFYAVNTGQLSIRHGMRGPSGVLVGEQAGGLDAIGHARRNLRRGIDLVVTGGCDSALDPWGYVSHLTTGRISRATEPELAYRPFDAAADGYVPGEGGAILVLEDERAARARGAATLYGEIAGYAATFDPPPGSERPPGLARAARLALDDAGVRPEDVDAVFADAAGVPDLDRAEAEAINEVFGAGAVPVTAPKSLVGRLNSGGPPLDVVAALLSIRDDVVPPTPNTTDVPADYGLDLVLSEPRNARVRTVLVLARGHGGFNAAVVVRAMNPEL

SEQ ID NO: 15785 - protein, 288 aa, Oryza sativa
MVSSSNPGRTPPLVAAIVCSVLLLAGGAAGNFYQDVDITWGDGRGKILGNGQLLTLSLDRSSGSGFQSKNQYLYGRFDMQIKLVPGNSAGTVATFYLSSQGSQHDEIDFEFLGNASGEPYTVHTNVYSQGKGGREQQFRMWFDPTKDFHTYSVLWNPSHILFYVDGTPIREYRNTEATTGVAFPRAQAMRVYASLWDAEEWATQGGRVRTDWSRAPFTASYRGLAASGCTSQDATACANPGSPWMYQQQLDSASQDRLRQVQRDYMIYNYCADTYRFPQGLPPECTAK

SEQ ID NO: 15786 - protein, 417 aa, Streptomyces sp. R1128
MITGMGVVAPGGTGTKGFWDLLTSGRTATRRISHFDPSPFRSQVAAECDFDPVLAGFTHREIRRLDRASLFAVASARDCAADSGLAFADLDPTRIGVSVGSAVGATTSLEREYLVLSDSGRDWVVDADYATPHMYDYFTPGAIAAEVAWSVGAEGPATIVSSGCTSGLDSVGYAYQLIVEGTADIMVTGATDAPISPIAVACFDAIKATTPRNDEPESASRPFDLTRSGFVIGEGAAMFVLEEYEHAKARGAHIYAEVTGYATRCNAYHMTGLKADGREMADAITYALNESRIDPTAVDYINAHGSGTKQNDRHETNAFKVALGDHAYDVPVSSIKSMIGHSLGAIGSIEIAASVLAIQHNVVPPTANLTQSDPECDLDYVPVTAREHRTDTVLSVGSGFGGFQSAMVLRRLQEDAR

SEQ ID NO: 15787 - protein, 402 aa, Xanthomonas campestris pv. vesicatoria str. 85-10
MSEVYLIDGIRTPIGRYGGALSSVRADDLGAVPIAALLARQSQLEPASIDDVYLGCANQAGEDNRNVARMSLLLAGLPSSVPGSTLNRLCGSGLDAIGTVARGIRAGELDLAIAGGVESMSRAPWVMGKADSAFARTQQLEDTTMGWRFINPRLQAVYGTELMGETAENVAQRYAIAREDQDAFALRSQQRVAAAQAAGFFDAEITPVAVAARKGGDASTVKHDEAPRPNTTADMLAKLKPVFRQPGTVTAGNASGLNDGAAALLLASAQAVQTHRLTPRARVLGFASAGVEPAYMGIGPVPATQRLLARLHLRIAQFDAIELNEAFAAQALACTRALGLADDAAHVNANGGAIALGHPLGMSGARLALTLLRQLEAGNGRLGLASMCIGVGQGVALAIERL

SEQ ID NO: 15788 - protein, 186 aa, Pseudomonas fluorescens PfO-1
MLKRWCAVPALLMALTGLAQAADCPDLLQGSLPKLRAKESIDLCQRYADKPLVVINTASFCGFAPQFEGLEALNQRYKAQGLEMLGVPSNDFKQESKDSAETAKVCYANYGVTFTMTEPQKVRGDDATHLFQVLARQSSAPKWNFYKYVIDRQGKVIANFSSLTKPDDPEFLAAIEKAIASQSLKP

SEQ ID NO: 15789 - protein, 155 aa, Oryza sativa
MAPKAEKKPAAKKPAEEEPAAEKAEKAPAGKKPKAEKRLPAGKGEKGSGEGKKDRAGRKKAKKSVETYKIYIFKVLKQVHPDIGISSKAMSIMNSFINDIFEKLAAEAAKLARYNKKPTITSREIQTSVRLVLPGELAKHAVSEGTKAVTKFTSA

SEQ ID NO: 15790 - protein, 502 aa, Glycine max
MGMLLVVVSYAVLFLVLFLGVKFVFQSRKLRNIPPGPPPLPIIGNLNLLEQPIHRFFQRMSKQYGNVVSLWFGSRLAVVISSPTAYQECFTKHDVALANRLPSLSGKYIFYNNTTVGSCSHGEHWRNLRRITALDVLSTQRVHSFSGIRSDETKRLMQRLVLAKNSNEEEFARVEISSMFNDLTYNNIMRMISGKRFYGEESEMKNVEEAREFRETVTEMLELMGLANKGDHLPFLRWFDFQNVEKRLKSISKRYDSILNKILHENRASNDRQNSMIDHLLKLQETQPQYYTDQIIKGLALAMLFGGTDSSTGTLEWSLSNLLNHPEVLKKARDELDTQVGQDRLLNESDLPKLPYLRKIILETLRLYPPAPILIPHVSSEDITIEGFNIPRDTIVIINGWGMQRDPQLWNDATCFKPERFDVEGEEKKLVAFGMGRRACPGEPMAMQSVSFTLGLLIQCFDWKRVSEEKLDMTENNWITLSRLIPLEAMCKARPLATKIGI

SEQ ID NO: 15791 - protein, 470 aa, Azoarcus sp. EbN1
MTSWSTVFRCLVAVLMASLMPIAAAMSLPDFTELVQRQGAAVVNISTSQSPKEGTTLFPGFDENDPMFDFFRRFIPRKPELPRADPENRSLGSGFVISPDGYILTNAHVVDAADEILVRLVDKREFRARVIGADARSDVALIKIEATDLPKLVIGDPDKLKVGEWVVAIGSPFGFDHSVTAGIVSATGRSLPDENFVPFIQTDVAINPGNSGGPLFNLQGEVVGINSQIYSQTGGFMGLSFAIPINVAMDVQQQLRTTGRVQRGRIGVAIQEVTRGLAESFGLPRAAGALVSAVEPGGPAASAGVEQGDVIVSFAGKSVEASADLPRIVAASRPSTRVNVRVYRNGEPHELSVTVGEWQDDAPARTRRSERPQVAPNKLGLVVAEPTPAQRREREVEHGLIVERVQGAAARAELQRGDFILALVSGGRQVPLNSVAAFTRVVGGLKDGQQVTLLVQRGEGISYVTLQAGE

SEQ ID NO: 15792 - protein, 446 aa, Solanum habrochaites
RMSVDVGAPSPRSIQMDEQVNPGEEYAPKIRKPYTISKQRERWSEEEHKKFLEALKLHGRAWRRIEEHVGTKTAVQIRSHAQKFFSKVVRESSNGDASSVKSIEIPPPRPKRKPMHPYPRKMATPLKSGTLASEKLNRSGSPDLCLSEPENQSPTSVLSTLGSDAFGTVDSTKPSEQSSPVSSAVAENSGDLVLSEPFDFVVEESRSSPARAYDSSNPANQACVKLELFPEDNDFVKEGSDEASSTQCLKLFGKTVLVTDAHKPPTDETLTRSSFPAKYLPWDSECPQSTFSIVPPTPSYYFPTPNGSPGPNQSGVATHLPWGSSCAVPCTQVHSPIPMKGRPLFNDRDLEGKEAQKEGSSTGSNAESVDAELSGDKNMEIEAQSSRNVVEESVRASVPSLFERRANSTKRVKGFVPYKRCLAERGMSSSTLTGEEREEQRTRLCL

SEQ ID NO: 15793 - protein, 623 aa, Cryptococcus neoformans var. neoformans B-3501A
MSDNEQVAFFTYILERLKQCGVKQIFGVPGDFNLTALDYIEKDPELQWVGNANELNAAYASDGYARVKGTLAVVITTFGVGELSALCGIAGCLSERVPVLHIVGAPSTSLQAKQSLLHHTLNLPESFSTFSSMSAPLSCSQALINNIEPKTPTSWTEAFDKTLKAVLEQCRPGYVEVPTDAVHAKVSAEGLKQPLPPPHSAPPPESMGTSLSNTSASAASRGAAQVSLSTAPTNVPSAPSSDDVTAHVVEDITKRFGEAKKPIILVDACAGRFGMAIEVRKLVDACGIRFFETPMGKSLMDERHPLYGGCYAGANSLPTVQKEVESADFVLYVGALKSDFNSGSFSVNIDPKVIVELHSFTTTIGYASYPTTDIRTILPLLRPAFEKLGRGKQSEGQSVEQKVEDKSVDSPVVPDPKGDEIKHEWLWPRVGKWFQDTDIIITETGTSSFGLTNVVLPSNSTYIAQILWGAIGWSVGACLGAAMAAKENGNNRRTVLFVGDGSLQLTLQEIGTMLRRGVHPYIFVLNNDGYEIERQIHGWTAEYNDIQLYDHQLLLPFLAGKKTKTPYQSYAVHTPQEFSKLLDDEEFNKPDRLRLIEVFMPRGDAPAGLIRQAKLTAEANDRI

SEQ ID NO: 15794 - protein, 347 aa, Cytophaga hutchinsonii
MNKNTPAQQGYSFPAEWAKHKATWLSWPHKEASWPGKLDSIFPQYAQFIKLIAEGEEVRINVANAAMEAFARGYIEKAGADMHNVFFHHFPTNDAWCRDHGPAFLVNPAAEQKKVIVDWGYNAWGGKYPPYDLDDVIPTKIAQMYNIPVFHPGIVMEGGSVEFNGRGTLLTSTSCLLNPNRNPSKSREQIEEYLEDYYGVEHILWLGEGIVGDDTDGHIDDITRFVNEDTVVTVVEENKSDDNYFLLKDNLKDLHKMRLENGKQLNVIELPMPSAVIYDDQRLPASYANFYISNNHVVVPTFRDKNDEVALEILQQLFTDRKVTGLDSTDIIWGLGSFHCLSQQEPA

SEQ ID NO: 15795 - protein, 238 aa, Glycine max
TVCPTTLKRICRQHGISRWPSRKINKVNRSLKKIQTVLDSVQGVEGGLKFDPYTGGFIAGGSIMQETEAHKYLVFPEKSSVKDPKPATQKKVSVAPAPASTIENSTIKLNDDEGVCLVGNKLVHSRSIPNSNSGEGELKKDNVSSDDSKSMTMNDGSCHKACHWKKTKDCPEQTCSMSLVTDEVEVGVDRVEGADEHNHPTSSSTTNSSNGSGSMMHGSSSCSHENHKYSKVKSNCVD

SEQ ID NO: 15796 - protein, 425 aa, Blastocladiella emersonii
MTLIDKLMEKTKKVVGSSDKDAPAPASPSSPSTAAGAGSASSTASSTTTAAASGNLSIPSPLVAGSTTSSSISHAQKMATAAHTNSDYSPSPAATPSAPLDAVAERRRRKTTLADLELRQTLGTGSFGRVHLVRLRSTGKYYAMKVLKKAEVVKHKQVEHTLNEKGILEQIDHPFLVALHSSFQDSANLYMVMEYVTGGELFTYLRRSQRFSNNVAKFYAAEVVLAFEYLHSKDIIYRDLKPENLLLDAQGHVKITDFGFAKHVPDITWTLCGTPDYLAPEIIQSRGYGRAVDWYALGVLIFEMLAGYPPFYDEDHVRMYEKILQGKVKWPSHFDPAAKDLLKRLLTTDLTKRYGNLKGGSKDIKMHKWFAGLDWTKLFNKQIPPPYTPPNRGDGDTSNFDAYPEETEPYGKVQPDPYAQLFKDF

SEQ ID NO: 15797 - protein, 435 aa, Ipomoea nil
MGSGEESFDLESDEVPLSSSHGASKMETLHYEAPHNHIASPRAFVSTRLLRKMRQISVLRSIYIVLIKAKINVLLPFGPLAILLHHVTGKHAWVFFFSLLGIIPLAERLGYATEQLSFYTGPTVGGLLNATFGNATEMIISIYALKNDMIRVVKQSLLGSILSNMLLVLGCAFFSGGIIHHKKVQVFNKATAIVNSGLLLMAVMGLLFPAVLHFTRTEVHFGKSELALSRFSSCIMLVAYASYLFFQLKSERSSYTSIDEEGENNAEDPDEEEAPEITHWEAIGWLAILTIWISVLSGYLVDAIEGASDTLNMPVAFISVILLPIVGNAAEHASAIMFAMKDKLDISLGVAIGSSTQISMFVIPFCVVVGWFMGKDMDLNFQLFETATLFITVLVVAFMLQEGTSNYFKGLMLILCYLIVAASFFVHNDQSNDKL

SEQ ID NO: 15798 - protein, 176 aa, Perilla frutescens var. crispa
MAADEEPNTSLNKGAWTADEDGILAQYVAQHGPKRWKSLAIDAGLNRCGKSCRLRWLNYLRPDIKRGNFSDAEDDLILRFHRLLGNRWSLIAKRIPGRTDNEIKNYWNTHLRKKARLMEKLPAISVTAAMELNIWHDESSSSGTEIRDDDESFDFTAQGTSGLDWVKTFLELEEDA

SEQ ID NO: 15799 - protein, 468 aa, Photobacterium profundum SS9
MELLREREMEKPRLSFWQIWNMSFGFMGIQFGFGLQNANVSRIFETLGASIDQIPILWIAAPLTGLLVQPIIGYFSDRTWTPLGRRRPYFLFGAIASSLALVVMPYSPYLWVAAGMLWILDASINVSMEPFRALVADNLPSDQRTEGFAVQTFFIGVGSVIASAMPYVLSNVFNVANTAPVGEVPPSVKISFICGAVVFLGSILWTVYRTKEYSPKELAVFNGEDISDVKMASEPEEKASMKEILTDLRAMPKTMMQLAMVQFFSWFALFAMWIYTTSAVTSQIFGATDSSSALYNEGADWVGLCFAAYNGISALAAFALPWLARRTSRKFVHSLSLIIGGISLATVSLVESPNMLMLNMVGIGLAWASILCMPYAILAGALPAKKMGFYMGVFNFFIVLPQILAAGILGFFTRWAFNGDTMMAIVLGGVSMVFAGMLVVFVKDEDEPNKIPSATQRSSTLKSQVTTA

SEQ ID NO: 15800 - protein, 534 aa, Listeria monocytogenes str. 1/2a F6854
MIDTLLPGKDFGLIITAALALLFFYILNTFMQYIVTYFGHMLGLNIETDMRRDLFSHLQKQPFGFYDNQKTGKLMSRMTTDLFEIGEVAHHGPEDIFISIMSLFGAFFLMLNINVKLAISTFILVPILTVLIVYFNKRMTKVTTGIFKDLGNFNAGVENAISGVRVVQAFANEPHEKGRFKVLNQAYRKSKLMFYKVMGLSFSFNYFLMRLISLFALLFGAYFTINGEISYGEFVGFILLTNVFIRPIEKINNVIESYPKGFAGFKRFLEVMDTEPAIQDEKDAKPAEAFRGDIAYSQVSFEYSDGKNVLNHINLSIKAGETVAFVGPSGAGKTTICNLLPRFYDVSAGEITIDGENIKRFTLPSLRAQIGVVQQDVFLFSGTVRENIAYGKLDASEEEIEHVVKLAHLSKVVEEMPDGLDTIIGERGVKLSGGQKQRLAIARMFLKNPPILILDEATSALDTETEQVIQASLEELAEGRTTLIIAHRLATIKHADRIIVVNETGIAETGTHDELLAQDNGAYKRLYDAQFNTI

SEQ ID NO: 15801 - protein, 770 aa, Oryza sativa (japonica cultivar-group)
MAAAAILPELAAQVVIPVAAAVGIAFAVLQWALVSKVKLTAEPRRGEAGGAAGGKSGPSDYLIEEEEGLNDHNVVSKCAEIQTAISEGATSFLFTEYKYVGLFMSIFAVLIFLFLGSVEGFSTKSQPCHYSKDKTCKPALANAIFSTIAFVLGAVTSLVSGFLGMKIATYANARTTLEARKGVGKAFITAFRSGAVMGFLLAASGLLVLYIAINLFGIYYGDDWEGLFEAITGYGLGGSSMALFGRVGGGIYTKAADVGADLVGKVERNIPEDDPRNPAVIADNVGDNVGDIAGMGSDLFGSYAESSCAALVVASISSFGINHEFTPMVYPLLVSSVGIIACLITTLFATDFFEIKAVSEIEPALKKQLIISTAFMTVGIALVSWLGLPYTFTIFNFGAQKTVQSWQLFLCVAVGLWAGLIIGFVTEYYTSNAYSPVQDVADSCRTGAATNVIFGLALGYKSVIIPIFAIAFSIFLSFSLAAMYGVAVAALGMLSTIATGLAIDAYGPISDNAGGIAEMAGMSHRIRERTDALDAAGNTTAAIGKGFAIGSAALVSLALFGAFVSRAAISTVDVLTPKVFIGLIVGAMLPYWFSAMTMKSVGSAALKMVEEVRRQFNTIPGLMEGTTKPDYATCVKISTDASIKEMIPPGALVMLTPLIVGILFGVETLSGVLAGALVSGVQIAISASNTGGAWDNAKKYIEAGASGHARTLGPKGSDPHKAAVIGDTIGDPLKDTSGPSLNILIKLMAVESLVFAPFFATHGGILFKLF

SEQ ID NO: 15802 - protein, 396 aa, Photobacterium profundum SS9
MFEKITAAPADPILGLTDEFKNDTRPEKINLGVGIYKDESGNTPVLATVKKAEAILLEKETTKSYLGIPGTAEYGLAVQQLLFGANATIISDKRAQTAQAPGGTGALRVAAEFIKRQLGDVKVWISNPTWANHIGVFAAAGLETASYSYYNAETKDIDFDAALADLANANEGDIVLLHGCCHNPTGIDPVEAQWHQLAALCVEKKLLPMFDFAYQGFAVGVEEDAQGLRIFAEQCSELLVASSFSKNFGLYNERVGAFTLVGKNAEQAATAFSQVKSIARVIYSNPPAHGAAIVTLILNDEALRNEWEQEVADMRNRIQEMRTLFVQTLKDCGVDADFSFIERQNGMFSFSGLNKDQVNRLKEEFGIYIVGSGRISVAGMTKNNMLPLCKGIAAVL

SEQ ID NO: 15803 - protein, 491 aa, Ehrlichia ruminantium str. Gardel
MLHLQTTVLFFIITEFSFKVINMNKHEFLIIGSGPGGYIAAIRAAQLGYNVAIIEKENTLGGVCLNWGCIPTKSLLHSALIYHNIKKADVFGINVTNVTCNFTKIIERSRNVVEKLSNGISGLMKKNNIKVYSGTAKLLGEGTVEVLDNNNDKINITSKHIIIATGSHPRNLPNINFDNNIIWNAKNAMTPNILPKSLAIIGTGAIGIEFASFYNTFGTQVTMIELRDNILPLEDHEVSKSMHQILNQKGIKIYTKSSVTKLEKSNNNARIQISNTIDLEVDKVILAVGIQPNTDNLGLDNTKIQIDQAGFIITDKYCCTSESGVYAIGDVAGPPCLAHKASHEAILCVENIAAQEKKITDRNIHHINKENIPSCIFSIPQIASIGLTEHQAKSMGYDIKIGKFNANCSGKAIAIDETEGFVKVIINKTTGELLGAHMIGAEVTEMINGYIIGKQLEATDRDIISSIFPHPTLSEMIHEAVLASNNESLNS

SEQ ID NO: 15804 - protein, 143 aa, Oryza sativa (japonica cultivar-group); identical to SEQ ID NO: 1269

SEQ ID NO: 15805 - protein, 317 aa, Nicotiana tabacum
MATINYPENPSPVADAEAIRKACQGWGTDEKAIISIFGHRNATQKKLIRRAYEELYNEDLVKRLESELSGHFEKAVYRWILDPEDRDAVMLHAAIKETPIPDYRVIIEYSCIYSPEEFLAVKRAYQARYKRSVEEDLAEHSAGDLRKLLVALVGIYRYAGKEINARVANTEADNLHSAICNKEFNHEEIVRIISTRSIPQLIATLNRYKDDYGSSITKHLRDDANAAKEYLVALRTTIRCINDPQKYYEKVIRYAINESGTDEESLTRVIVTRAEKDLKDIKELYYKRNSVTLDHALSKHTSGDYKAFLLALLGNDN

SEQ ID NO: 15806 - protein, 559 aa, Nicotiana tabacum
MASSGGNMNTFMNSFTSNYSFSSFSDLLSDNDNNNNNMRNNNSSMNQEKNSLNWGFSDQRMHQQNKDEVPKFKSFPPCSLPMISSSSPASPSSYLAFPPSLSPSVLLDSPVLFNNSNTLPSPTTGSFGNLNSKEDDSRISDFSFQSRAATSSSMFQSSAPRNSLEDLMTRQQHANQQNEFSTAKTTGVKSEVVPIQSFSQEKMQSNPPPVHYTQPSQYVREQKAEDGYNWRKYGQKQVKGSENPRSYYKCTFPNCPTKKKVERNLDGHITEIVYKGNHNHPKPQSTRRSSSQSIQNLAYSNLDITNQPNAFLDNAQRDSFAGTDNSSASFGDEDIDQGSPVSKSGEDDGNEPEAKRWKGDNENEVISSASRTVREPRIVVQTTSDIDILDDGYRWRKYGQKVVKGNPNPRSYYKCTFTGCPVRKHVERASHDLRAVITTYEGKHNHDVPAARGSGSYAMNKPPSGNSNNSMPVVPRPSMLANNSNQGMNFNDTFFNTRVQTTQNQPPITLQMLQSSGSSSYSGFDTSSGSYMNQMQSMSNIKPITKEEPKDDFFSSFLN

SEQ ID NO: 15807 - protein, 473 aa, Bacillus cereus ATCC 10987
MMDQNQGLKRELKSRHIFMIALGGVIGTGLFLGSGYTIHEAGPGGAIVAYLVGGFVMYLTMLCLGELAVAMPDAGSYQTYATKHISPAAGYVVGWMSWLNWSATIGIELIAVSILMKRWFPDVPSWIWCVVFAVLLFAINALSSRSFAEVEFWFASIKVITIIAFIILGGAAMFGFLDMKGNEPAPMFSSFTDYGGLFPNGLSAILITMIAVNFSFQGTELVGIAAGESENPEKTIPKAINNTVWRILVFFVLSIFILAGLFPWQQAGVIESPFVVVFDKIGIPYAADIINFVIITAVLSVANSGLYATSRMLWSMSNQGMISPIFSKLSKSGVPIYALIVSTIVGCLSLLSGIYAEDTVYLWLLSIAGFGAILVWASIALSNLLARRAYIKQGGDVKDLKFKTPLYPFVPLLALVLNVTVIVAMAFIPEQRMALYCGIPFMIVCLLFYRATRNKGSNLEHIEKTKTTEIESL

SEQ ID NO: 15808 - protein, 269 aa, Triticum aestivum
MKRPGGGNPSSLHQMASPNDMDYGVVGMEADGDAEEEMMACGGGGGCGGGEKKRRLSAEQVRALERSFEVENKLEPERKARLARDLGLQPRQVAVWFQNRRARWKTKQLERDYNALRHSYDALRVDHDALRRDKEALLAEIKDLKGKLGDEEAAASFTSVKEEPAASDGPPPAGMGSSDSDSSGVLNDTDATGATPTEEAPAPEMGTLLGGPGAAGAAAAGHGQMFLHGNFLKVEEDETGFLDDEEPCGGFFADEPPLAWWTEPTDPWK

SEQ ID NO: 15809 - protein, 591 aa, Ustilago maydis 521
MPLTAEYKAKWPVFALAWSNHPSTSSSSSSFHPRNPSGSARYIPSSPSPLGRQDSLGGPPPSTTPGPPDSARIAVGSFVEQYTNRIQILGFDQRDSTSLTLLADASHPYPPTKLGFQPSTLFDASSSERREASLERERNPGERGYASPTTKLAKRGSWGAKARPSLSGEGVESPDYYPDRELLASTADCLRIWEIYRNEYSDPYQSSYVGGNGGGGVQQGEGSQLPFALREKSVLAHSKNTKSPPAPLTSFSWNTPSPNLIVTSSIDTTCTIWDLPTRTALTQLIAHDREVYDVDWCPGSADVFASVGADGSVRVFDLRSLEHSTIIYETGTAPGATESRPGTSMSMSSRATSTRSVPAAPLLRIAFNPWDANYLATFHLESDSVQILDVRAPGSPILELRGHSAAVNAIAWGPPSVGAGVLGPSKGMVCSAADDAQVLVYDLASTTLRTASAQGRRSRNGHAPSPAPGSLGYSHSTSSFGGTSSPAPTSSIAGSIGIGAEIPFLAYTTPNQDMVNNVSWLRAGGGGLPPGVGGFGGGGGGGSSSHKSVVQEWNEFTAGSTGGGSSSSGFAPHDSDWIALAAGNSVRALKV

SEQ ID NO: 15810 - protein, 402 aa, Phaseolus acutifolius
MDEALGSSCSLPPFLAKTYEMVDDLSTNSIVSWSVSSKSFIVWNPPEFARDLLPRFFKHNNFSSFIRQLNTYGFKKIDPEQWEFANDDFVRGQPHLMKNIHRRKPVHSHSLQNLQAQGPLGDSERQGFTDGIEKLKRDKERLLVELQKFQHEWQTYEIQIHCSNDRLEKLEQKQHKMVSSISHVLQKPVLAVNILPLTETMDRKRRLPRSGHYYDESSIEDAIETSQMLPRENAENTTVLTLNVERLDQLESSVAFWEAIAHDIGDNFAQIQSNMDFDESTSCADSPSISCAQLDVDVRPKSSGIDMNSEPTAAAVPDPLASKDQPAGITVAATGVNDVFWEQFLTEDPGASETQEVQSERKDCDGRKNEGKPNDHSKFWWNIRNANNLSEPMGHVGQAEKT

SEQ ID NO: 15811 - protein, 378 aa, Nicotiana tabacum
KNYSDFSFQPQFASVSPSQTNPVPLGKQSWNYQESRKQNDENANGTSELQSLKNNGQSNQYNKQSSRSEDGYNWRKYGQKQVKGSENPRSYYKCTFPNCPTKKKVERCLDGQITEIVYKGNHNHPKPTQSTRRSSSLAIQPYNTQTNEIPDHQSTPENSSISFGDDDHEKSRSRGDDFDEEEEPDSKEPDPKRWKRESESEGLSAPGSRTVREPRVVVQTTSDIDILDDGYRWRKYGQKVVKGNPNPRSYYKCTSPGCPVRKHVERASQDIRSVITTYEGKHNHDVPAARGSAINRPVAPTITYNNAIPIRPSVTSQIPLPQQSPFTLEMLHKPSNYNGFSGYATSEDSYENQLQDNNVFSRAKDEPRDDMFMETLLC

SEQ ID NO: 15812 - protein, 180 aa, Nicotiana tabacum
MASSVLSSAAVATRSNVAQANMVAPFTGLKSAASFPVSRKQNLDITSIASNGGRVQCMQVWPPINKKKYETLSYLPDLSQEQLLSEVEYLLKNGWVPCLEFETEHGFVYRENNKSPGYYDGRYWTMWKLPMFGCTDATQVLAEVEEAKKAYPQAWIRIIGFDNVRQVQCISFIAYKPEGY

SEQ ID NO: 15813 - protein, 320 aa, Streptomyces coelicolor A3(2)
MAESVPRFDLITMGRIGVDLYPLQTGVPLAEVETFGKFLGGSASNVAVAAARLGRATAVITRTGDDPFGGYLHDALKEFGVDDRWVTPVAAYPTPVTFCEIFPPDDFPLYFYRRPKAPDLEIHPEELDLDAIRAASIFWMTGTGLSEEPSRTATLSALAHRAKSGTTVFDLDWRPMFWADPDQARPYYAEALAHATVAVGNLDECEIATGVREPRACAEALLAAGVELAVVKQGPKGVLAAHRDGRSAEVPPVPVEVVNGLGAGDAFGGSLCHGLLSGWELERIMRYANAAGALVASRLACSSAMPTEAEVDDLLARATP

SEQ ID NO: 15814 - protein, 356 aa, Bacillus thuringiensis serovar konkukian str. 97-27
MVIKVTIDRVCTIGPASNNKETLAQLINNGMKIVRLNLSHGTHESHKDIIRLVKSLDDSIKILGDVQGPKIRLGEIKGEQITLQAGDSFLLHTQPVTGSSTEASVDYEGIANDVKVGSRILMNDGEVELIVEKVSTDKIETKVKTGGNISSHKGVNLPGAIVSLPAITEKDKKDIQFLLEEGVDFIACSFVRKPSHIKEIRDFIQQYRETSPNLIAKIETMEAIENFQDICKEADGIMIARGDLGVELPFQFIPLLQKMMIQECNRTNTYVITATQMLQSMVDHSIPTRAEVTDVFQAVLDGTNAVMLSAESASGEHPVESVSTLRLVSEFAEHVKQDGPFVMKDVLELLHKSLGE

SEQ ID NO: 15815 - protein, 202 aa, Brassica oleracea
DQVVYILDQVRAMETEMLQRIQQQGLNITPRILILTRLLPDAVGTTCGERLERVDGSEYCDILRVPFRTEKGIVRKWISRFEVWPYLETYTEDAAVELAKELRGKPDLIIGNYSDGNLVASLLAHKLGVTQCTIAHALEKTKYPDSDIYWKKLDDKYHFSCQFTADLFAMNHTDFIITSTLPEIAGSKDTVGQYESHTAFTL

SEQ ID NO: 15816 - protein, 727 aa, Nicotiana tabacum
MGGFDDHVAIMGDWMPPSPSPRSFFSSLLGDDIGSRSTFEFPNENQRGNLASEPQEHVGISDGAQADATTVKSDQKMSSRGGLLERMAARAGFNAPKLNTESLRPADLSQNQGVRSPYLTIPPGLSPTSLLESPVFLSNSLVQPSPTTGKFQFASGIESRNSTFMMEDPDKRKENALESINSSSFSFKPVPETAPSLFPGTTSRVNSSNISQQCFPNIKVSVHSQNSLLSHSVEATQMQTQSEKGLHQSSDFPRFSAEKGVRDSNVTPESRNFQSVGSNMEHSPPLDEPQDEEIDQRVGGDPNVVGAPAEDGYNWRKYGQKQVKGSEYPRSYYKCTHPNCPVKKKVERSHEGHITEIIYKGAHNHPKPPPNRRSALGSTNSLGELQLDGAEQGVSGSNGDLGRANIQKAPDAGGLDWRNNNLDVTSSAHLGSAYCNGSASFPVQNNTQLESGGAVDVSSTFSNDEDEDDRGTHGSVSQGYDGEGDESESKRRKLETYSTDMSGATRAIREPRVVVQTTSEVDILDDGYRWRKYGQKVVKGNPNPRSYYKCTSAGCNVRKHVERASHDLKSVITTYEGKHNHDVPAARNSSHVNSGASNTLPAPVTAPPAQSHLHRPEPAQLQNAMARFDRQPSLGSFGPTPGYSYGINQQGLASLAMAGFHPNQSKSQQQIPVHSYLGQPRPMHDGGFMFPKEEPKAEPMSDPGLDLSNGSSIYQQFMSRLPLGPQM

SEQ ID NO: 15817 - protein, 185 aa, Candida glabrata CBS138
MSKVIAKSIKYNPETEKLITLGAGCFWGTEHIYRKHLGDKIHDSKVGYANGDESSKDLLNRVSYKRVCKGDTNFCEVLQISYDPKKVSLKELIDFFFRIHDPTTVNAQGPDVGTQYRSAIFTHSPEDLKEVQKLKEEWQPKWNNKIVTEVGPIETFYEAEEYHQIYLDRNPNGYACPTHFVRNLK

SEQ ID NO: 15818 - protein, 596 aa, Burkholderia pseudomallei K96243
MSVKPTLSKPIGGQDASSPAVVMRRLWPYVKPLVWVLVAGVLAMAAVAATEAGIPALLKPLLDHGFGSKGDMTTKLYVPAAVVGLALARAIAQYASGYLLQYVSNRILLDLRIQMFERMIHTGVSFFQRETASTVINAVVFEVNQVLSVLMGVTITLVRDSLTVVFLLGYLFYLNWRLTLIVAILLPCIGWLVGKINRRLRRLNREHQTLTNQLAYIVEETVGGYKVVKVHNGEPYEIGRFNELSRKLRGYSMRMTVSGGLAQPLTQFLASIALAVVLTIAVVQSANDQTTVGGFVAFVTAMLLIISPLKHLMDVNQPLQRGMTAAELIFGLIDEPREPEGGGKPLARASGAIEFSHVSFSYGMSRDGRQTLDDVSFTVAPGEMVALAGPSGSGKTTLVNLLPRFFDPSSGSVRVDGVALPEYSLRDLRNQIAMVSQDVVLFNDTIAANVAYGQAPERDRVEAALRAANLWETVTAMPDGIDTLVGDNGMRLSGGQRQRLAIARAIYKDAPILILDEATSALDSESERHVQAALETLMKGRTTLVIAHRLSTIERADRILVLEGGKIVESGSHRELLEQGGLYAHLHRIQFQQDAG

SEQ ID NO: 15819 - protein, 380 aa, Trichodesmium erythraeum IMS101
MVTNHLLEIENLGQSIWMDNLSRNIIESGELKSMIGKKGIRGITSNPAIFEKAIAGNAIYDADIEAGIKASKSVIEIYESLVFKDIRDACDIFMPVYEETKGLDGYISIEVPPTIAKDTESTISEAIRYYTAIGRENLMIKIPGTPEGLPAVTRVISEGINVNVTLLFSVESYINTAWAYIEGLEARAAKGEDIDKIASVASFFLSRIDSNIDGLIDEKLKKVTDETVKAKLEAVKGKVAIANAKIAYQEYKKIIQSDRWKALSAKGAKEQRLLWASTSTKNPAYSDVMYVDELIGPNTVNTLPPPTIDACADHCDVDNRVETNIEVTKEVMENLKDPDININIDQVMEQLLVEGIDKFIKPFTSLINSLEEKVKKLTPV

SEQ ID NO: 15820 - protein, 191 aa, Suillus bovinus
MQTIKVVVVGDGAVGKTCLLISYTTNKFPSDYVPTVFDNYAVTVMIGEDPYTLGLFDTAGQEDYDRLRPLSYPQTDVFLVCFSVTSPPSFENVREKWIPEVHHHCPGVPCLIVGTQIDLRDDAQVIEKLSRQKQRPVPTEHGERLSRELGAVKYVECSALTQKGLKNVFDEAIVAALEPPVVKKTHKCVVV

SEQ ID NO: 15821 - protein, 313 aa, Polaromonas sp. JS666
MTKIAIIQRPPVLLDRGATITRAVQWVAEAAAAGASLIVFPESFIPGYPSWIWRLAAGRDGAVMGQLHARLLANAVDLGGGDLAELCEAARAHNVTIVCGINERDRERGGGTLYNTVVTIGADGRVQNRHRKLMPTNPERMVHGLGDASGLRVVDTPAGRIGCLICWENYMPLARYALYAQGVEIYIAPTYDSGDAWIGTMRHIALEGRCWVVGSGTALRASDIPQDFPARAELFPDPEEWINDGDSVVVDPMGKVVAGPLRREAGILYAEIDTARVAPSRRTLDVTGHYARPDIFELQVRRTPVTPVRYVDG

SEQ ID NO: 15822 - protein, 732 aa, Glycine max
MASSTSSISLSQALLRPTTTSLPSSSSSSLRLTPTLRPTPPALSLRRRLTTSIRAAASVKTVEKATADAALVEKSVNTIRFLAIDAVEKANSGHPGLPMGCAPMGHVLYDETMKYNPKNPFWFNRDRFVLSAGHGCMLQYALLHLAGFDSVKEEDLREFRQWGSRTPGHPENFETLGIEVTTGPLGQGIANAVGLALAEKHLAARFNKPDNEIVDHYTYVILGDGCQMEGISNEACSLAGHWGLGKLIALYDDNHISIDGDTEIAFTENVDQRFEALGWHVIWVKNGNTGYDEIRAAIKEAKAVKDKPTLIKVTTTIGFGSPNKANSYSVHGSALGAKEVDATRKNLGWPYEPFHVPEDVKKHWSRHTPEGAKLEAEWNAKFAEYEKKYSEEAAELKAIITGELPAGWEKALPTYTPESPADATRNLSQQNLNALVKVLPGLLGGSADLASSNMTLLKSYGDFQKNTPEERNVRFGVREHGMGAICNGIALHSPGFIPYCATFFVFTDYMRAAIRISALCEAGVIYVMTHDSIGLGEDGPTHQPIEHLASFRAMPNTLMLRPADGNETAGSYKVAVVNRKRPSILALSRQKLTQLPGTSIEGVEKGGYTISDNSTGNKPDVILIGTGSELEIAAKAADDLRKEGKAVRVVSLVSWELFDEQSEAYKESVFPAAVSARVSIEAGSTFGWEKIVGAKGKAIGIDRFGASAPAGRIYKEFGITKEAVVAAAKELI

SEQ ID NO: 15823 - protein, 278 aa, Podophyllum peltatum
MGSTSTPDSSTNRLQDKVAIITGGAGGIGETTAKLFVRYGAKVVIADIADDHGQKVCNNIGSPDVISFVHCDVTKDEDVRNLVDTTIAKHGKLDIMFGNVGVLSTTPYSILEAGNEDFKRVMDINVYGAFLVAKHAARVMIPAKKGSIVFTASISSFTAGEGVSHVYTATKHAVLGLTTSLCTELGEYGIRVNCVSPYIVASPLLTDVFGVDSSRVEELAHQAANLKGTLLRAEDVADAVAYLAGDESKYVSGLNLVIDGGYTRTNPAFPTALKHGLA

SEQ ID NO: 15824 - protein, 449 aa, Avicennia marina
MGKEKSHINLVVIGHVDSGKSTTTGHLIYKLGGIDKRVIERFEKEAAEMNKRSFKYAWVLDKLKAERERGITIDIALWKFETTKYYCTVIDAPGHRDFIKNMITGTSQADCAVLIIDSTTGGFEAGISKDGQTREHALLSFTLGVKQMICCCNKMDATTPKYSKARYDEIVKEVSSYIKKVGYNPEKIPFVPISGFEGDNMIERSTNLDWYKGPTLLEALDMVQEPKRPSDKPLRLPLQDVYKIGGIGTVPVGRVETGMLKPGMLVTFGPSGLTTEVKSVEMHHEALQEALPGDNVGFNVKNVSVKDLKRGYVASNSKDDPAKGAASFTSQVIIMNHPGQIGNGYAPVLDCHTSHIAVKFAELVTKIDRRSGKELEKEPKFLKNGDAGFVKMIPTKPMVVETFSEYPPLGRFAVRDMRQTVAVGVIKSVEKKEPSGAKVTKAAVKKGAK

SEQ ID NO: 15825 - protein, 206 aa, Zea mays
MDDPVERLKDGFHKFKTEVYDKKPELFEPLKAGQAPKYMVFACSDSRVCPSVTLGLQPGEAFTVRNIAAMVPAYDKTKYTGIGSAIEYAVCALKVEVLVVIGHSCCGGIRALLSLQDGAPDTFHFVENWVKIGFPAKIKVKKDHASVPFDDQCSILEKEAVNLSLENLKTYPFVKDGLANGTLKLVGGHYNFVSGEFLTWDNKQPS

SEQ ID NO: 15826 - protein, 277 aa, Forsythia x intermedia
MAATSQVLTAIARRLEGKVALITGGASGIGETTAKLFSQHGAKVAIADVQDELGHSVVEAIGTSNSTYIHCDVTNEDGVKNAVDNTVSTYGKLDIMFSNAGISDPNRPRIIDNEKADFERVFSVNVTGVFLCMKHAARVMIPARSGNIISTASLSSTMGGGSSHAYCGSKHAVLGLTRNLAVELGQFGIRVNCLSPFGLPTALGKKFSGIKNEEEFENVINFAGNLKGPKFNVEDVANAALYLASDEAKYVSGHNLFIDGGFSVCNSVIKVFQYPDS

SEQ ID NO: 15827 - protein, 94 aa, Triticum aestivum
  misc_feature (14)..(14): Xaa can be any naturally occurring amino acid
  misc_feature (22)..(22): Xaa can be any naturally occurring amino acid
  misc_feature (32)..(32): Xaa can be any naturally occurring amino acid
  unsure (1)..(94): unsure at all Xaa locations
RRVSEPKMSKVTVXGFVEPSKXLARLKSTGKXAEMWPYVPYSLTTYPYVGGAYDKKAPAGFVRGAPQAMADPGAPEVRYMNMFNDEDVNSCAIM

SEQ ID NO: 15828 - protein, 575 aa, Proteus mirabilis
MIKELIKSGYLLSNKKDKDLMVGLCLAVVEGLFATIPYILLYFLLIDLFANKITLAQLFYYFLSILLSIVLRIVIGTYSMPMIFIGAYKMMGQARLRIADHLRKIPIGWFSSQRSGDLASRLTADLEIIQNIWSHFLGMFISTLAMPVFLSLFLVWVDWQLTLIILFSIPIALFALSISHKIMLKAAQQAADANANVQSELLDYIQGIMVIRSFGRLGPAWKKLKAALETQNKTQIVLDSKPAPWIALYGFILESGFILLMIIGTSRLISGSLSPSQFVFFLVLALPIYRQFFDLGLSSMLLNYAQKSLQRIEEVMKVVPLSEPKYTQLPIRTDIYFNNVSFIYPYNSQLTLDNISCCFPEKSFTAIVGPSGSGKSTLLQLISRLWDVNQGEILLDDININQINSDKLCSYVSSVYQDVVLFSGTIKDNILMGKTDAHDDEIITAAKLANAHEFIIQKPQNYDTPIGYGGMLLSGGERQRLSLARTLLKNAPILLIDEATSSIDCSSEVLIQQALSLLSKDKTIIMIAHRLNSIKNADNIIVMENGKIAEQGKHAELLAKNGLYAHLWLQQKALC

SEQ ID NO: 15829 - protein, 501 aa, Avena sativa
MAMTPPTSFPPASPSSYFNNMSTGFLDSPILLTPSLFPSPTTGSFPLEPLNWMGTAPESNDGLQLGSVKDGQQRQYSGFTFQTTAAPVPAAMPGTNTTASSFLQSSMPMAQQGHDSYTGEQQQPWSYQDAGSMDAMTTRPASFSTPYEAPDMVGNGGYNNAPVSSSGTTAGYGRVQSRRPSSDDGYNWRKYGQKQMKGSENPRSYYKCSFAGCSTKKKVEQAPDGQVTEIVYKGTHNHPKPQNPRRSSAPASSSYASPDASSDALSGTPENSSASYGDDETNGVSSALAGQFGGGGEEFADNEPDSKRWRTDSDAEGVPVGANRTVREPRVVVQTMSDIDILDDGYRWRKYGQKVVKGNPNPRSYYKCTTAGCPVRKHVERASQDLRAVVTTYEGKHNHDVPALRGSAAAAARYRAAPMQAASYLQGGGGGYSSLRPDGFGGGAPAQPADQSGFALSGFDYNNSSYSYSGMQQQNDAMYYDAARTKDEPRDDMFFEQSLMF

SEQ ID NO: 15830 - protein, 371 aa, Bacillus anthracis str. 'Ames Ancestor'
MKTLELQERLTEIFQHLHENPEVSWKEYETTAYITNFLKEEGISYKTFDDCPGVIAEIGNGNPVVAIRADMDALWQEVNGEFKANHSCGHDAHMTIVMGLILQLKNMRWKSGTVRFIFQPAEEKGNGALKMVEKGAVDDADFLFGVHLRPIEELSLKQAASSIRHGAAGFLEGTIHGEDAHGARPHQGINAIDVISMINIGLKNIWLRPQSSYSVKMTRCQAGGDNLNIIPGNGHFSLDVRAENNTLLEELKKRIEHVIESAASMGSKTSYEWIDLAPGAEVSEEAERFMRKGILEVYGEDKCTGPLYTTGSDDFHYYTVKRPYLKAVMLGLGADLQPGLHHPYMKFDHSCIMDGVEILKQTVLKVLEDRG

SEQ ID NO: 15831 - protein, 263 aa, Streptomyces coelicolor
MSTTGTTPATTGYAAEFAGRTALVTGAASGIGLATARRLGAGGARVVVADFNAEGAEKAAAELRAGGVEAAAVELDVTRPESVEAAVGFAVDTFGSLDLAVNNAGIGGPSAPTGEYDVAAYQRVVRTNLDGVFYSMRYELPAIEAAGKGGSIVNVASILGSVGFAGSPAYVAAKHGVVGLTKAAAAEYAARGIRINAVGPGFIDTPLLKTMDEAAYKGWSPCTRPAASGAPRRSRTLIAFLLSDRASFVAGSYHLVDGAYTAV

SEQ ID NO: 15832 - protein, 206 aa, Triticum aestivum
  misc_feature (159)..(159): Xaa can be any naturally occurring amino acid
  misc_feature (180)..(180): Xaa can be any naturally occurring amino acid
  misc_feature (187)..(187): Xaa can be any naturally occurring amino acid
  unsure (1)..(206): unsure at all Xaa locations
MPTANVRAAQPSADRRLSTLVRHLLPSSPRTSAATATSADSLQPFPTMASPSVFAGIAQGPEDPILGVTVAYNKDPSPVKVNLGVGAYRTEEGKPLVLNVVKRAEQMLIHNESRVKEYLPITGLADFNKLSAKLIFGADSPAIQENRVATVQCLSGTGXSLRVGGEFLARHYHERTIYIXPQPTWGXNHPKVFTLAGLTARSYRVL

SEQ ID NO: 15833 - protein, 263 aa, Arabidopsis thaliana
DRHEQDATTNPSLILAATRNPGYARLIDIAVAYGKAQGGTIDEQIDATLDRLLVEFGKEILNVVPGKVSTEVDAAFSFSITGSVEKALHIIKLYKSINIDKSRILIKIASTWEGIQAARILQRDHGINVNLTLMFSQVQAIAAAEAGAFLISPFVGRILDWHKAKTGKTYSKEEDPGVESVKNIFNYYKKFGYQTIVMGASFRNVGEITELAGCDYLTISPNLLEELSASHEPVHKKLDASTATSLNIEKKSYIAYESNFRFD

SEQ ID NO: 15834 - protein, 175 aa, Zea mays subsp. mexicana
MEGGAGASEKGKVLVTGASGFVGSWLVMKLLQAGYTVRATVRDPANVGKTKPLMDLPGATERLSIWKADLAEEGSFHDAIRGCTGVFHVATPMDFLSKDPENEVIKPTVEGMISIMRACKEAGTVRRIVFTSSAGTVNLEERQRPVYDEESWTDVDFCRRVKMTGWMYFVSKTLA

SEQ ID NO: 15835 - protein, 570 aa, Pirellula sp. 1
MRLNKSTACYAPWLLPMELIEVPQLIRNVERFREVVTILTRHGLADWMSGVPSIWPERLRGAADESMTTAGRIRVAFGELGTTFIKLGQVLSTREDLVGSELACELAQLRANTPSDPPDVVIAMIESELGAGMEKLFLTFDSTAMASASIGQVHRATTHDGDDVVVKVQHPGIERRIVNDLEIMQKLAEIAEQQSERLSQYRPVDTIREFQRSLMRELDFQRELKNMNRFRANFKDEPDVHFATPYPTLSSRRVLTMQRLDGISISSKAALMKSGADLNEVAHRGAVVFLDMIFRDGFYHADPHPGNLMLLNQRHSDATPPVKQVIGLLDCGMVGRIDDVLKEDLEAALIAAVTGDAESIAEIAVRLGDVPCDFDEPSLVSEIHDMLDDYSDQKIREFDVSACLRDVTGIIREHRIYLPAKVAMLLKVLAMLEGTAHQLDPNFSLAELLEPYGQRAMRRRLSPRRVFERIKNRVEDWDHLLSILPKDLGDVLHSLKQGNFDIHLQHRRLEPIVNRLVMGILTAALFVGSASLWSSGVPPLLFGVSIPGMLGCSLAMFMGVRLSWQISRVR

SEQ ID NO: 15836 - protein, 405 aa, Debaryomyces hansenii CBS767
MMTGKEARITFLIVLDTFFFLLEAIVGYSVHSLALVADSFHMLNDIISLVIALWAVRYKNTKPADGKYTYGWQRAEILGALINAVFLLALCFTIVLEAIQRFFEPQEITQPKLILIVGICGLLSNGVGLVLFHEHGHSHSHGGSEGNHGHSHGDIEAGESDVANESHDHSESNSDLMEFMPNNVVGRYNENSPLIKNDNAGKNNVKRKSMNMEGVFLHVLGDALGNVGVIATALFIWKTDYSWRFYFDPVISLLITVIIFTSALSLCRKSSKILLQATPAHVNSNLILNEIIKLESVKSVHDFHIWNLNEDILIASLHVELNHGPEVNNTSNDTIDQIDRVTFVNAVTQVREILHRFGIHSATIQPEFSNGSKKLKKKASAYGQTNIENCIVDGASGCDNDQCLK

SEQ ID NO: 15837 - protein, 630 aa, Oryza sativa
  misc_feature (232)..(232): Xaa can be any naturally occurring amino acid
  misc_feature (269)..(269): Xaa can be any naturally occurring amino acid
  unsure (1)..(630): unsure at all Xaa locations
MEVVSSSHSCLAFNRTPSSAWRFPGNGLGPGHAKLTRPRSAILCVRSGTASNPADSGKVHASHGFYVSDVDAALQGIPKKVGEIEKMIIPSLPEGPESSLISTGFWEWKPKLSVYYEKSGIDNSKAPSVLFLPGFGVGTFHFEKQLKDLGRDYKVWTMDFLGQGMSLPCEDPAPKSTSGELDEDTYWGFGQELQPWAEELVWQKISDPRSIQGILKQVYADHSTNVDMVPKXRVPESPYYEISPAGHCPHDEVPEVPGKSLAWWITGRXRHRNPLGRCEVPFLEEPSYAENGVSRELEFVRGGSKKSVHNVGSFGVSYVTVFFPFIIATWKALQALLVGVERHSLTKNRHCSIRLRTYKRMRIFVMEWMEVYFLCNSSRFLTFADTNLSGPATIAERRTRLMLTIADPAITGFAAVTDGAHGQETGRVLEMAMDSEMAAASEEAPDSQVDGAPDSVDVVPDSVEVALESVETLDSGMALNSVEVDGASDSVDVVPDSVKALDSEMALNSVEVDGASDSVDVVPDSINVVPDSVEFLCARCGTFHASGIFGEAYFQAHRHARSCARCGLLHEDYDMPARWLHDMEKFDCEIYIPDVENLQMDGNTIILPEQVIKKLEEHIEKKQTKTNKGD

SEQ ID NO: 15838 - protein, 416 aa, Pyrococcus horikoshii OT3
MNKMKAVILAGGFGTRLRPISSTRPKPMVPVLGKPNLQYILEALEKVKEIDEIILSVHYMRGEIREFIQEKMRDYPKDIRFVNDPMPLETGGALKNVEEYVSDDFLVIYGDVFTNFDYSELIEAHKKNDGLITVALTKVYDPERFGVVITDEEGKIVEFEEKPRKPKTNLVDAGIYMVNKDVLKEIPKNKEIYFEREILPKFVNQGLVYGYKMPKQYYWVDLGTPEDFFYAHQIALDELSKENGYMILGENVEIPDDVEVQGPVYIDDNAKIGHGVKIKAYTYIGPNTIIEDKAYFKRSILLGNDIIKERAELKDAILGEGVVVGKDVIIKENAVIGDYAKIYDNLVIYGAKVLPWKKVEEYEAYIKIKLDPTKVRPGQYPDHCPLGLPECIYKKFKAIAGEKPPCDECIENQWLF

SEQ ID NO: 15839 - protein, 326 aa, Rhizobium sp. NGR234
MQNNNILVVGGAGYIGSHTCLRLAEKGYNPIVYDNLSNGHEEFVRWGVLEKGDIRDRRRLDEVLARHKPRAVLHFAAMIEVGESVKDPVAFYDNNVIGTLTLLSATLAAGIEAFVFSSTCATYGLPDSVPMDETHKQAPINPYGRTKWVCEQALKDYGLYKGLRSVILRYFNAAGADLEGRIGEWHEPETHAIPLAIDAALGRRDGFKVFGTDYETRDGTCVRDYIHVLDLADAHVRAVDYLLEGGDSVELNLGTGTGTTVKELLTAIEKVSRRPFNVSYVGRRDGDSTTLVANNDKARQVLGWEPQYDLAAITESAWNWHSRRNG

SEQ ID NO: 15840 - protein, 500 aa, Citrus sinensis
LLLIPLLLILKKLKAQNKQQLPPSPPKLPVIGNFHQLGELPHQSLWQLSKKYGPVMLLKLGRVPLVVISSAEAARDVLKVHDLDCCSRPPLIGSGKFTYNYSDIAFSPYSDYWRELRKISVLEVFSLRRVQSFGFIREEEVALLMNSISESSSSASPVDLSEKMFALTGSIVFRMAFGRRFRGSNFDNHSFQELVHAVESLLGGFAAAECFPYVGWIIDRLNGYHAKLERVFQELDTLFQQIIDDHLKPAETTKQEHVQQDIIDVMLKIERDQAESHESEAWLTKNHIKAVLLNIFLGGVDTSAITVIWAMAELCKNPRLMKKAQAEIRNHIGNKGRVTEADIDQLQYLKMVIKETLRLHPPAPLLIARDTLYRFKVNGYDIYPKTLIQVNAWAIGRDSKYWESPEEFIPERFIDKPVDVKGQDFEYLPFGSGRRICPGINLGLIMSELALANLLYCFDWKLPNGREEDCVNMNMEEATGVSLTLSKKTPLILVPVNYLQ

SEQ ID NO: 15841 - protein, 259 aa, Bacillus licheniformis ATCC 14580
MSRNKVEICGVDTSKLPVLKNEEMRKLFKQMQDEGDTTAREKLVNGNLRLVLSVIQRFNNRGEYVDDLFQVGCIGLMKSIDNFDLSHNVKFSTYAVPMIIGEIRRYLRDNNPIRVSRSLRDIAYKALQVRERLISETSREPTAQEIAKELEVSHEEIVFALDAIQDPVSLFEPIYNDGGDPIYVMDQISDERNKDSQWIEELALKEGMRRLNEREKMILRKRFFQGKTQMEVADEIGISQAQVSRLEKAAIKQMNKNIH

SEQ ID NO: 15842 - protein, 314 aa, Candida glabrata CBS138
MTNYKTVYRDAIKRQLELNREHLESLDYEGSQLSPNFQIDNYTYSKTNVITTNDLLGSSTSLKTLNNPVPVEEEEGITVFFDIDNTLYSKYTGVQRMMQESIQRYCVHELDLEPEYAHALMEQYYQEYGLSIRGIMQDFPDTDPLMFNAMVDDSLPLQDAIKGPDLKLRRILLNLKQNKNVTKLWLFTNAYKTHAIRCIRILGIADLFDGITYCYYSAPPDSIICKPDPRSFEMAKLQSGISSFEKAWFIDDSFPNIQTALNVGLNHCIFIDYEAKHINKYEDTSENLNAKSTVMATYSIPNIHELQSVELTTL

SEQ ID NO: 15843 - protein, 216 aa, Ustilago maydis 521
MSKIQVSSVRNTLKELIQASEDKRRNFNETVELQIGLKNYDPQRDKRFSGTVKLPHVPRPRMSLCILADAADVDRAKLINLEFMTVEDLKKLNKNKKLVKKLAKKYDAFLASEALIKQIPRLLGPGLSKAGKFPTPVSHNEDLEKKVTEVKSTIKFQLKKVLCLGVAIGHVQMSDDQLLANVMLAINFLISLLKKQWQNIKSLHVKSTMGKVYRLF

SEQ ID NO: 15844 - protein, 149 aa, Nicotiana tabacum
MLAVFEQSIGRPPPELSLPQAGIQKKEAKTREEIAESFKTWKQDSTFYHLFNGNFMAFSHGNENPLQPRSIVVMDDVFCIFSGALDNTFDLRKHYGLSRQATEAMIMVEAYKVLRDRAPYPPDQVIKELEGKFAFILFDSKASTLFLAR

SEQ ID NO: 15845 - protein, 1230 aa, Cryptococcus neoformans var. neoformans
MSSFTPAFRLHHTHSSSVSPTASNDVAPSSPTPNQPHQLAARSPLYANSPNCASKITKGSSLSSSTAHHGLKYVRPSTSPLLRSPKGESFSAYLGNWGSQELITFLNIHKCGQYLAIFQKNDINGKILLDLDMTALKSMGIGKISERVRLIGGIKDLRRCVADESIRAPFTQRSYPSERTLLPSLPSHSNVLLDKWDCSSSASRLGKRQITLRPPPLDLQGHMPPRLLSHASLGIATIDTHDIHTTNSKIEVYIQQNPPGQPQSMPTKRSDSLTLCAAPSRNVGRRSPSSRHFEGCKSQTDGLTTLNLTLDRQVPSSTMNNVTLREDCHLQREERLPLSHQVPHSRNAFASPHKTSLSGRCPLARGDTTSHQPSGPAIAEQDSPVNYRISNTVTNTKEISQGDLKQPFVMKSLESQSHLLAGVSDMSHDPVTDGFKPKGKASVPLTVMSSSDISAVNANPAALSLADLRRQLVKFINTEDDTIRTVNVMHVTSGVEILERALKKFGKFGTGIHGSPDVYGDEDGDGTLEIGGWEVYTESTPDESSKPLSEFNLLKTCTFHREGTAIQDKGLFLRKKQRMQKRKNIQDFFGETPPPSMSPTSPTLITGPHLSLVQGKSQPTSGSAFSSSSRLSTLTHKGRNRASMISVMSGLGVPIINTLPSPQGNGLRLTGSVHSHEKKSMYNFFGHRPPSELISNHLTDYFPSAKKSDVEKARHSLLRLSGGTVAYKKSGIYEGDSTPDHWSKPGDNQPPSLPPFEPSQDTLSDSLQAFASSTPVHLSRPKHTVALRRRRDSDSSSRSHTSMLMQTRRNRDHSDTTSLLTVDEITAEVENRRVSTIQRGDYIEETEDSSSIEGDTLPQDDESKGVLRAICSDSNKLVDSGKSYQGDSDIDQQHELEDEEEDKLDDDEEEEEEEEEEDNEQGKAFTSTGSKRIIKWIKGALIGAGSFGSVYLGMDAQSGLLMAVKQVELSAGSAKNEDRKRSMLSALEREIELLKELQHENIVQYLDSSVDANHLNIFLEYVPGGSVAALLNNYGAFEEALVRNFVRQILTGLNYLHMRGIVHRDIKGANILVDNKGGIKISDFGISKKVENSLITGLRTNRPSLQGSVFWMAPEVVKQTSYSPKADIWSVGCLVVEMLTGTHPWADLTQMQAIFRIGSLARPAPPSDISVQADEFLRKTFEIEHAKRPTAAQLLKHPFIGSPRVRTAASNFINGAIASETMEVQVVEES

SEQ ID NO: 15846 - protein, 806 aa, Anabaena sp.
MSELMQAILDSEEKHDLRGFISELRQQDKNYLLRNDILNVYAEYCSKCQKPETSYKFSNLSKLIYYTQEIIPEDSNFCFIIRPKIAAQEVYRLTADLDVEPMTVQELLDLRDRLVNKFHPYEGDILELDFGPFYDYTPTIRDPKNIGKGVQYLNRYLSSKLFQDSQQWLESLFNFLRLHNYNGIQLLINHQIQSQQQLSQQVKNALNFVSDRPNDEPYEQFRLQLQTMGFEPGWGNTASRVRDTLNILDELIDSPDPQTLEAFISRIPMIFRIVLVSAHGWFGQEGVLGRPDTGGQVVYVLDQAKNLEKQLQEDAILAGLEVLNVQPKVIILTRLIPNSDGTLCNQRLEKVYGTENAWILRVPLREFNPKMTQNWISRFEFWPYLETFAIDSERELLAEFQGRPDLIVGNYTDGNLVAFLLTRRMKVTQCNIAHALEKSKYLFSNLYWQDLEEKYHFSLQFTADLIAMNAANFVISSTYQEIVGTPDSIGQYESYKCFTMPELYHVVNGIELFSPKFNVVPPGVNENSYFPYTQTQNRIESDRDRLEEMLFTLEDSSQIFGKLDDPNKRPIFSMARLDRIKNLTGLAECFGQSQELQERCNLILVAGKLRIEESEDNEEKDEIVKLYRIIDEYNLHGKIRWLGVRLSKNDSGEIYRVICDRQGIFVQPALFEAFGLTILESMISGLPTFATQFGGPLEIIQDKINGFYINPTHLEETATKILDFVTKCEQNPNYWNIISEKAIDRVYSTYTWKIHTTKLLTLARIYGFWNFTSKEKREDLLRYLESLFYLIYKPRAQQLLEQHKYR

SEQ ID NO: 15847 - protein, 491 aa, Nicotiana tabacum
MVLSKTSSESDVSVHSTFASRYVRTSLPRFEMAENSIPKEAAFQIINDELMLDGNPRLNLASFVTTWMEPECDKLMMDSINKNYVDMDEYPVTTELQNRCVNMIARLFNAPLEEKETAVGVGTVGSSEAIMLAGLAFKRNWQNKRKAEGKPYNKPNIVTGANVQVCWEKFANYFEVELKEVKLREGYYVMDPVQAVEMVDENTICVAAILGSTLNGEFEDVKLLNDLLIEKNKQTGWNTPIHVDAASGGFIAPFLYPELEWDFRLPLVKSINVSGHKYGLVYAGIGWVIWRTKQDLPEELIFHINYLGADQPTFTLNFSKGSSQVIAQYYQLIRLGYEGYRNVMENCRENAIVLREGLEKTGRFNIVSKDEGVPLVAFSLKDNSRHNEFEVSETLRRFGWIVPAYTMPADAQHVTVLRVVIREDFSRTLAERLVLDIVKVLHELDTLPARLSAKLEEVKLVKNGKKFELEVQREVTNYWKKFVLARKAPVC

SEQ ID NO: 15848 - protein, 458 aa, Arabidopsis thaliana
MEELGVKRRIVLVPVPAQGHVTPIMQLGKALYSKGFSITVVLTQYNRVSSSKDFSDFHFLTIPGSLTESDLKNLGPFKFLFKLNQICEASFKQCIGQLLQEQGNDIACVVYDEYMYFSQAAVKEFQLPSVLFSTTSATAFVCRSVLSRVNAESFLLDMKDPKVSDKEFPGLHPLRYKDLPTSAFGPLESILKVYSETVNIRTASAVIINSTSCLESSSLAWLQKQLQVPVYPIGPLHIAASAPSSLLEEDRSCLEWLNKQKIGSVIYISLGSLALMETKDMLEMAWGLRNSNQPFLWVIRPGSIPGSEWTESLPEEFSRLVSERGYIVKWAPQIEVLRHPAVGGFWSHCGWNSTLESIGEGVPMICRPFTGDQKVNARYLERVWRIGVQLEGELDKGTVERAVERLIMDEEGAEMRKRVINLKEKLQASVKSRVKTVSEEILYNHHESNGIKGDGFYF

SEQ ID NO: 15849 - protein, 126 aa, Magnetospirillum magnetotacticum MS-1
MAYSDKVIDHYEHPRNVGALDKDDSAVGTGLVGAPACGDVMKLQIKVSAEGIIEDAKFKTFGCGSAIASSSLVTEWVKGKTLDEAASIKNTDIAQELALPPVKIHCSVLAEDAIKAAIADYKKKSG

SEQ ID NO: 15850 - protein, 369 aa, Polaromonas sp. JS666
MKAEKPSFPLNAWYAAAYDVEVVRALLPRTICKQKLVMFRKTDGTVAALEDACWHRLLPLSMGRLDGDELTCGYHGLVYNAQGRCTHMPSQETLNPSACVRAYPVLEKHRFVWVWPGDPAKADPALVPDLHWNDDAEWAGDGKMIKVKCDYRLVVDNLMDLTHETFVHSSSIGQRAVAEAPFVATHGDRTATVTRWMENIDAPPFWAGQINHSLGYQGPVDRWQVIKFEAPCTVTIDVGVAEAGTGAVPPGGNAGDACLSNRSRGVNGFVLNTITPETDGTCHYFWAFARNYCLGEQRLTHQLREGVASIFREDEHVLEAQQIAMDEHPDHQFYNLNIDAGSMWARKLIDKMISKEARPSAVIPIRSAA

SEQ ID NO: 15851 - protein, 427 aa, Vibrio parahaemolyticus RIMD 2210633
MVMTLTLMHRMSALQITEINIMSVTADQVHGVVQALTQSSDTLFLLLGAIMVFLMHAGFAFLEVGTVRQKNQVNALVKIIADFGISAIAYFFIGYWVAYGGTFFSDAQTLSQDNGYELVKFFFLLTFAAAIPAIVSGGIAERARFYPILIATFFTVGVVYPLFEGMIWNGNFGVQAWFESTFGYGFHDFAGSVVVHGVGGWIALVAVTFLGMRRGRIRAGKHTNFAPSNIPFLALGAWILCVGWFGFNVMSAQTLSGISGLVAMNSLMAMVGGIVASLLAGKNDPGFIHNGPLAGLVAVCAGSDLMHPLGALVTGAVAGVLFVYLFTYLQNRTKIDDVLGVWPLHGVCGAWGGIAAGVFGQSGFGGMGGVSFAVQVLGTFFGISIAVLGALVVYGAINALTGLRLSEEDEFNGADLAIHKISSTNED

SEQ ID NO: 15852 - protein, 457 aa, Xanthomonas campestris pv. vesicatoria str. 85-10
MRPSTIIPAPSMRRSPAARPASTPPDPAPGTGRRWRLGAPSPARYASGPSLPLNAPMARPDLHERISSLRKLRVAQERVRVRRQVGRRDGVRLEIDGRWLTGFCSNDYLGLSQQFEVVAALQDAAARDGAGATASHLICGHHTAHETLEREIADWLGYPSALLFGSGFIANLAVQQALLSEEDDVCVQDRLNHASLLDATRLAGCRLRRYPHLDVEGAMRQLKGAPEGAAMLATDGVFSMDGDVAPLRALSLVARMQHALFYVDDAHGVGVLGPQGRGCVADAGLGVAEVPLQLVTLGKALGGYGAVVVGEEALVRHLAETARPYIYTTALPPAQVAATLAAVRLARRDDWRRTRLVELIGAFRDGARKHGFELMASDTPIQPLLCGEEATVMAMSAALEHAGFMVGAIRPPTVPEGKARLRVTLSALHTPQQVQALIEAIVQARDVVSRQPLRASA

SEQ ID NO: 15853 - protein, 429 aa, Zea mays
MASAGISGSGDDDAGGKLLADRYQKGEVLGEGTYGVVFKAFDTKTGNTVAVKRIWVGKDKKEGVNFTALREIKLLKELKGPNIIELIDCFPYKENLHLVFEFMETDLEALIKDKNIILSPADTKSYLQMLLKGLSFCHKKWVIHRDMKPNNLLIGADGQLKLADFGLARMFGSPGRNFTHQVFARWYRAPELLFGSKQYGSGVDIWAAGCIFAELLTRRAFLQGSSDIDQLGKIFAALGTPKSSQWPDMVYLPDYVEYQYVAAPPLRTLLPMASDDALDLLSKMLTYDPKARISAQQALEHRYFSSLPAPTRPSQLLRSRWKGDQGNNKMPDLNLQHGPLVLSPPRKLRRVIAHEWMEGMHRADKVDEHPSGMRHTDDMPSQKSSRIPMSVDVGAVFGTRPAPRPTLNSADKSRLKRKLDMDPEFGFAE

SEQ ID NO: 15854 - protein, 396 aa, Escherichia coli
MFENITAAPADPILGLADLFRADERPGKINLGIGVYKDETGKTPVLTSVKKAEQYLLENETTKNYLGIDGIPEFGRCTQELLFGKGSALINDKRARTAQTPGGTGALRVAADFLAKNTSVKRVWVSNPSWPNHKSVFNSAGLEVREYAYYDAENHTLDFDALINSLNEAQAGDVVLFHGCCHNPTGIDPTLEQWQTLAQLSVEKGWLPLFDFAYQGFARGLEEDAEGLRAFAAMHKELIVASSYSKNFGLYNERVGACTLVAADSETVDRAFSQMKAAIRANYSNPPAHGASVVATILSNDALRAIWEQELTDMRQRIQRMRQLFVNTLQEKGANRDFSFIIKQNGMFSFSGLTKEQVLRLREEFGVYAVASGFVNVAGMTPDNMAPLCEAIVAVL

SEQ ID NO: 15855 - protein, 80 aa, Glycine max
  misc_feature (34)..(34): Xaa can be any naturally occurring amino acid
  unsure (1)..(80): unsure at all Xaa locations
PTRPHTLFVLPHSKTAIGIGIAKKGRSVTTRLDXVDRTMYSTFCSTVNFFSHLYTHSMNQQKLLFQAGERHSFEKLYHWI

SEQ ID NO: 15856 - protein, 723 aa, Zea mays
  misc_feature (80)..(80): Xaa can be any naturally occurring amino acid
  misc_feature (87)..(87): Xaa can be any naturally occurring amino acid
  unsure (1)..(723): unsure at all Xaa locations
MATQAERLGYEFARLLGVHTPQARVVYNSSSEWLAIRHAAENARTVAISNNDEVGEMTCSELLEALELSRCLLLMSYIHXSPLLESXKAFHSREAACVTASSLGRVLMLDLILRNEDRLPCRQLGWRGNPANLMISDKSSLPNLDRLDDFKSSTDSPNQLITHFLHREKRSHSLNGKFGSPGLDPMSPKLEPLINEKENAERTNGDFRIVAIDTGVPRRPPVGRRVKDHERYPKVVELILNSSDYSASILYEISGCKLGHPRPDEVTSSDSCCSLSDEDNAGVIHEFRGSFRAALRDLEGFHLFLLQLYQKLDGVLRVFLSIITKTSEESDNNDAALSDFPSPGASYSTPRLPSKHLNNELHSDSEMLKSAMKSSSVGSRGSSDSVSPLPRESWNNKSFKGSAEAPRSLRMTMKLRDFYKTPKVDPELLKEIEQWNEALKNDVIKFCQENNFHSGFFDGTENNMVADAYELKVRLEHIIERIALISDAANTERPSLVVNNLFIGGALAARSKYTLQHLGITHVLCLCSNEIGQSDSQFPDLFEYKNFSISDDDDANISDLFEEASDFIDHVDHVGGKVLVHCFEGKSRSATVVLAYLMLREGFTLAKAWNLLKKVHRRAQPNDGFAKALLALDKRLHGKVSMDWQHKRPEMKVCPICSKNVGLSTSSLKLHLQKAHKRLSAGSVDSAMTMEIQKSIESLQISRGGSLSPSQKLTKVFSNELSF

SEQ ID NO: 15857 - protein, 153 aa, Chorispora bungeana
MNSVSAFSEMFGSDYEPQGGDYCPTLATSCPKEPAGRKKFRETRHPIYRGVRQRNSGKWVSEVREPNKKTRIWLGTFRTAEMAARAHDVAALALRGRSACLNFADSAWRLRIPESTCAKDIQKAAAEAALAFQDETCDTTTTNHGLDMEGRCG

SEQ ID NO: 15858 - protein, 276 aa, Bdellovibrio bacteriovorus HD100
MSSELVVAAVQMTSVDDVTTNLAQMEELLKEAFNGAQPRFVSFPENCLYLRLKEGEKIEGLTLSHPAFARLSELAKHYNTYLHLGSIPLYLEGHLYNSSALITPEGEVQPTYQKMHLFDIQLDGQAPLRESDVFRHGQTPNVIDIDGWKVGEAICYDVRFAELFSQYARREVDVILLPAAFLVKTGEAHWEILLRARAIENQSYVIAAAQGGTHTGLRGGTRETYGHSLIIDPWGAVVGQVEKRQPGVTISKFTRERIDSVRRQIPMKFHRRLPVG

SEQ ID NO: 15859 - protein, 535 aa, Mycoplasma penetrans HF-2
MNDKTKILIVTGGVFSSLGKGVACSSLGAMLKCFGQEVLIMKFDPYLNVDAGTMAPGQHGEVFVTFDGRETDLDIGNYERFLNINLPKESNVTAGRVYYETIAKERDGKFLGATIQVVPHITEAISQKIILLSNKYQPDFLIVEVGGTVGDIESIPFLEATRQLQAKYRSQVMFIHTVPLIELLTGSDLKTKPLQHSVKDLMSAGIFPNLLLVRSKDAVSNKLKEKISLTTGIENENIYSLINLKHIYLLPESLENQKVQNSIFNFFKMEVPNRIGYKHWDTFTSLIKEPKKYKARIAVVGKYSDSPDAYLSIISSLEISSFYLKTDLSIEFINSSSLNENNISELSEFDAILVPGGFGKRDIEGKILAIQYARENNIPFFGICLGMQLASIEFARNVLKMHDADSTEFNENTANPIITILEGKNRETNLGGTLRLGNYNCELKDGSKILEIYKRKSIVERHRHRYEFNPKYMDIFEKHGFVFSGINKENNLVEIIELENHKFFIAVQFHPEFTSKILSPNPIFYSFLNVSKKPI

SEQ ID NO: 15860 - protein, 771 aa, Legionella pneumophila str. Paris
MKENVSHLPRELSRMVFWSLTCLKKAIAEVYGKETYERIEQIRLSMQDTIGSESFSLGKALHSLQIELSKLEKKQLYQIAHGFSLMMELINTCENAYRIFRINQRKEQVYSDMPQGIHYVLTAHPTEARTNEFLKLFKEIRDYLIEVLKSPYLMNESHLDQMLKISLQINISYHEKPSVEDEAQYIYQYALHPLNIKLYHSFLAKGVPIQLRTWVGGDKDGHSGVNEKIMLKSLELSRSFFIAYIQECLREVLEIIKLSTSLDKNKPLADQINQLIKKAYGLKKIQSKEHEKISIFKNELTATQINTLKFLNFEPEQFSIISSIFHLYPALVMPIELREDSAVVKESLTSIKKTTITKMLEQVHSITHGTDPKNYIRGFILSMVESAEDIKNGINLVKKVFKSYALPVVPLFENQLALTNADTILNNSITEAIRQKHLKQWDGNYEVMLGYSDSSKENGVLPSRLMIAKSLKNIQSTLENKNLRPIFFHGSGGSIERGGGDIKEQTASWSKEIMSNYKVTVQGEMVARLFGSSSILKSQIDKFLDIYSQKGKSNDNDYPEELSLFSTRVSQKYKTLIQSDWFWQIVEQASPYHFLKELKIGSRPTKRKSGPDQRKLRAIPWILCWTQTRLLFPTWWGIGSTWSELNGIEKNRLKALYKENALFAAFVKQLGVTLSKVYLPVWEQYLLQLTGSIEYLRPFQSELESTIQFFYQITGEKDFCFHQPWLGESIQLRSTLIHPLNLIQIEAMKRKDLPLLRKTVTGISCGMLTTG

SEQ ID NO: 15861 - protein, 401 aa, Debaryomyces hansenii CBS767
MSKNKDGDPTSQHRRLPSFTELIQSFDPYLRQENARPKTLRSSSSSEILPTIITQPISGGDLTSPKDLKIDESAIDKRRTYSYGHGGFRYGSYRFPTKNAEVTSPGDHPRPIHSKSSSLPNIAYTDVSEESTRKNDEENLLSSLSRMLDSSAHNNEMQAIRNNYLTLVEQAPDRTIEGSKLLHGYVNNSNHPKFTTHESFKQFILNTSPQSIDNLIAEYNDNIATMTAFKAMILQYIKEEEVAANKALTKMSPPKLQPLYSTQLSPTRKPSTGTKISSKRHKSSMGNIDSSHKTESTVLDIGGSIVPLEIKKQTLYSGSSTSPLDLGALNPDLSVRQEIRCNHCGSKNTPEWRKGLDGNRTLCNACGLFYSKLTKKYNAEEAARIMKERKDTGSVNNRRIK

SEQ ID NO: 15862 - protein, 417 aa, Legionella pneumophila str. Paris
MNTDIANQLRVAKKATTDLNLIQSDTRTIILKTLAANLEKHIENIIQENQKDLSLMLEQDPRYDRLLLNKERILSLANDVRKVASLPNPLGVNLLEKSMPNGLSIKKITVPLGVIAVIYESRPNVTIDIFSLCFKSGNVCILKGGKEAHFTNSYLLLLIKNTLKNFNINTDIVCLLPPERALITPLLNATGLVDLCIPRGSQNLINFVRDNAKIPVIETGAGIVHTYFDKSGDLEKGKKIINNAKTRRVSVCNALDTLIIHADRLKDLPELVETLSQKNVIIYADQDAYQVLDKNYPEQLLMKAKPQDFGHEFLDYKLAIKTVPNIKAAIDHIQQFSSYHSEAVIAEDESAIDKFLTEVDAAAVYANASTAFTDGGEFGLGAEIGISTQKVHARGPMGLEALTSYKWVIRGTGQIRD

SEQ ID NO: 15863 - protein, 457 aa, Staphylococcus aureus subsp. aureus MW2
MAIAVLLNRMFRMEHNPLFEYIYQQKEDIDACYFIIPEEDMSSASDLKAQFYRGTLQRFYQSLHAEKLTPYVMSYDDIISFCKENNISEVVTAGDIMSYHLEEYDILHQRSLFNEARIAVTLIRGNHYFKASKTMNQQGEPYKVFTSFYKKWRPYLRHRDVYHYDLKSFEDFVIASPDDLVFDDIAFGSSQIIEQNKWQHFLDQDIQNYESGRDYLPEVLTSQLSVALAYGLLDIIEIFNDLLARYDEDEANYEAFIRELIFREFYYVLMTQYPETSYQAFKPKYRQIKWSQNEADFNAWCEGQTGFPIIDAAIMELTQTGFMHNRMRMVVSQFLTKDLFIDWTWGEKFFRKHLIDYDAASNIHGWQWSASTGTDAVPYFRMFNPIRQSERFDAKALYIKTYLPIFNQIDAKYLHDTQRNESNLFEQGIELGSHYPRQIVDHQEKRTQVLATFKALD

SEQ ID NO: 15864 - protein, 303 aa, Ipomoea batatas
RMDYERFIQAHRETDADITVAALPMDEKRATAFGLMKIDEEGRIIEFAEKPKREQLKAMKVDTTILGLDDQRAKELPFIASMGIYVISKNVMLNLLREKFPGANDFGSEVIPGATSIGMRVQAYLFDGYWEDIGTIEAFYNANLGITKKPVPDFSFYDRSAPISTTPRYLPPSKMLDADVTDSVIGEGCVIKNCKIHHSVVGLRSCISEGAIIEDSLLMGADYYETDADRRLLAAKGSVPIGIGRNSHIKRAIIHNIARIGNDVKIINNDNVQEAARETEGYFIKSGIVTIIKDALIPSGTII

SEQ ID NO: 15865 - protein, 356 aa, Legionella pneumophila str. Paris
MKIIIKVGTQSILSVDGSPIYSVLNNLVNQIIYLKNLGHQVILVSSGAVGSGRKIAKNSLGKTYGDTVGEKQLLASIGQPELMNLYSSLFKNENILVSQLLLTKQDFHTRQHYLNIARLLTELLKHQNIIPIVNENDSVAIEELMFTDNDELAGLIAAQINADYLILLTNVDGVFTSHPNDSESKLINTIDPSSGWPNVSAVKSKLGRGGMVSKLDTARKMAGLGINTVIANVNVESIVPKILNREAVGTIILASKRKSSIKRWIAFSHRTSLPSIVINDNLITLLRNGNRVMSILPIGIEDFRGECKKGDLIDILNSNNEKIGVGIARYDFLRLKDYLRLQNKPAFIHYDQSHIL

SEQ ID NO: 15866 - protein, 249 aa, Triticum aestivum
  misc_feature (55)..(55): Xaa can be any naturally occurring amino acid
  misc_feature (61)..(61): Xaa can be any naturally occurring amino acid
  misc_feature (95)..(95): Xaa can be any naturally occurring amino acid
  misc_feature (225)..(225): Xaa can be any naturally occurring amino acid
  unsure (1)..(249): unsure at all Xaa locations
INRPTKSSPKKSFTVKLPKVTNWLERSGFFYSIQFQGFRVGLSVRSKNAVGRQGXTRIKLXYTSHMPIILHFALITNLYFISQLLYRRYSGNFLXNLLGIWKESEYSGHSIPVGGLAYYVTAPSSMADILANPFHALFYVVFMLSACALFSKTWIEVSGSSAKDVAKQLKEQQMVMPGHRESNLQKELNRYIPTAAAFGGVCIGALTVLADFMGAIGSGTGILFXVTHISQYFETFEKERATELGFFGF

SEQ ID NO: 15867 - protein, 159 aa, Oryza sativa (japonica cultivar-group)
AADYLEQAEYNTGNPEEDLKTQSLVKQLLYNPKLRSACPLPFDEAKLWQGENGPELKQEIQKQFRNISAIMDCVGCEKCRLWGKLQVLGLGTALKILFSVDGENHLNQSLQLQRNEVIALVNLLNRLSESVNFVHEKGPSIEDVIKQQSSSTVKPVFPI

SEQ ID NO: 15868 - protein, 548 aa, Listeria monocytogenes str. 4b F2365
MTKFAQKTIYQVYPKSFYDTTGDGTGDIPGITAKLDYLQKLGIEMIWLNPFYPSPQNDNGYDIADYTAVDPLFGTMDDVTTLIKEAKKRNIGIMIDLVLNHTSTEHPWFKKALAGDPFYRDFYYFRPAKADGSPPTNWVSKFGGNAWEKLPDSSEYYLHLYDVTQADLDWANPNVREALFDVVNFWIDKGVEGFRLDVLNVIAKPKFLEDDFEGDGRRFYTDGPGIHAYLKELHERTFGDKPIITVGEMSSTDIDNCIRYSNPDEKELSMVFHFHHLKVDYPDGEKWRLADVNFENLKSIFHMWQVAMSEENGWDALFWNNHDQPRALGRFASDKPEHYYHSATLLGATIHFMRGTPFVYMGEEIGMMNPKFPTIDDYVDVETLNHFDILQKNGLSEQEVMAIIKERSRDNSRTPMQWDDSQNAGFTTGTPWLKVADNASEINVQAALSNKTSIFYFYQKLIALRKEYPVIQTGDYTPYWTDEDLIIAYKRSNEITSLLSIHHFGSTTKKIQLPNEFLNAKVLLSNYERQTISSELELAPYETLTLIR

SEQ ID NO: 15869 - protein, 267 aa, Nicotiana tabacum
NSAHGGVYAHPGVPIGSHPPGHGMATSPAVSQAMDGASLSLDASAKSSENSDRGLLAMSLGNGSADNIEGGADHGNSQSGDTEDSTDGSDTNGAGVSERSKKRSRETTPDNSGDSKSHLRRCQPTGEINDDSEKAIVAVRPGKVGEKVMGTVLSPSMTTTLEMRNPASTHLKASPTNVSQLSPALPNEAWLQNERELKREKRKQSNRESARRSRLRKQAEAEELAIRVQSLTAENMTLKSEINKLMENSEKLKLENAALMERLKMNS

SEQ ID NO: 15870 - protein, 510 aa, Listeria monocytogenes str. 1/2a F6854
MEFWRRSVFYEIYMKSFQDSNGDGLGDFKGLTSRLDYLVDLGIDGIWLTPFYPSPQVDNGYDVSDYCDINPDYGDMTDFRAFMKAADSRGIKVIIDLVLNHSSTEHAWFKESRSSKTNSKRDYYIWREKPNNWESFFGGSAWEMDELTGEYYYHSFAKEQADLNWANEAVRAEIEEVLAFWLNEGVAGFRLDVINNLTLALEFPDNPVASGEMEHVYDRNQNGLEQALEDIASFCRKERDVFLVGEISSDKLPEITRYSSKKMLDVTFNFNFGSVDQLDAESVFTTLNEMETALNEGQWPTLFFGSHDMSRFRSRLASGDLVKTQLLAFLMLTAKGVPFIYYGEEVGMPDLTFSSVKEMRDIQGTAAYYRALQTGTDKKQALEIAIEKTRDKARGPMIFPDGKPFTLGEPWIKMATLPEEEARMMWDFYRALLAFRKENDFKEMEYTFLKLDGEVLSYQRGEFIFLLHFGEEEVTYLLQGNYQLVFGEAMMVENGIRMGAHTGIALRVEE

SEQ ID NO: 15871 - protein, 234 aa, Haemophilus somnus 2336
MNTKIFDTAQHAVEQIAQEFVQYSKQNRAVHISLSGGSTPKLLFKTLAQEPFKSEVRWENLHFWWGDDRMVEPNNPESNYGEVKKLLFDHIRIPTENIHRIRGEENVEQELARFSQELIACVPNLTFDWIILGMGTDGHTASLFPYQTDFSDSNVAVIAKHPETGQIRISKTAKLIEQAKRITYLVTGEAKAEILKEIQTALPENLPYPAAKIKAKNGVTEWYLDKAAGKLLLS

SEQ ID NO: 15872 - protein, 415 aa, Listeria monocytogenes str. 4b F2365
MTELIKKGSGAKEASQFLAQATTKHKNAALLNLSNDLLIHTATLLQENEKDILRAQQKGTPETMIDRLRLTEERIKEISEAVKQVVALKDPIGEVTNMWKNEAELTIGKTRVPLGVIGIIYESRPNVTVDASVLCFKTGNAVILRGGSDAIDSNKALMSVIQDSLEASGFPRSSVQLIEDTSRETARDMMRLNRFLDVLIPRGGARLIQTVLENATVPVIETGTGNCHIYVDKAAEKQMAIDILVNAKCSRPSVCNAAETLLIHRDVAEDYLPAMETALKEYDVELRADERAKGILQEAKAATESDWEDEFLDFILAIKVVDSAEEAIDHINKYGTKHSEAIISNDYATGQAFHQKVDAAAVYINASTRFTDGFAMGFGAEIGISTQKLHARGPMGLTELTSTKYIIFGDGQIRN

SEQ ID NO: 15873 - protein, 564 aa, Desulfovibrio desulfuricans G20
MQSLEIFTLRHVLDRSAELFADQPALSAVGGTPVTYSEFKEQVETLSGLLIEQGIAPGDRVALLAENSPNWGIAFFAITTMGAVAVPILPEFHPDAVHHIIRHSESKAVFVSEKLFSKVEDGHYDETPVFLLMETFRPVELGTSRDLVREFKAAGLREFRRLKEKAMRLAQMEPAEVKEDDVASLIYTSGTTGHSKGVVLLHRNIVFDADAVKSIVQVGPGDRLLSILPLSHTYECTLGLVLPVLNGAHIHYMDKPPTARALIPAMGKVRPTCMLSVPLVIEKIYKSAILPKLTGSFFKRLLYGIAPVRKKLNAVAGKKLLETFGGKLRIFCIGGASLAPDVEQFLREAAFPYAIGYGLTETSPLVAGSGPAHTRFTSTGWPLIGVEVRIDAPDPATGEGEILVKGPNVMREYYKAPEITKNTFTEDGWFRTGDLGKFDADGYLYIKGRLKNVIVGPSGENIYPEEIEAVIQQSPYVLETLVYRHEGKLAARIHLDYARLDEEYGSLPAAKMAKKTDDLLEEIRTAANQQVASFARLHKVFEQTEPFEKTPTHKIKRYLYVEQQ

SEQ ID NO: 15874 - protein, 276 aa, Listeria monocytogenes str. 4b F2365
MRESLKNSKRLVIKVGTSTLMYGNGHINLRTIEKLAMVLSDLRNEGKEVILVSSGAIGVGCHKLQLSVRPTSIPDLQAVASVGQSELMHIYSKFFGEYGQVVGQVLLTRDVTDFPISRENVMNTLDSLLSRGIIPIVNENDTVAVEELEHVTKYGDNDLLSAIVAKLVQADLLIMLSDIDGFYGSNPATDPEAVMFSEINQITPEIEALAGGRGSKFGTGGMLTKLSAASYCMDSNQKMILTNGKNPTVIFNIMQGEQIGTLFASKKEELSHDRTH

SEQ ID NO: 15875 - protein, 352 aa, Frankia alni
MSYQAEYIWIDGTEPEPLMRSKTRIIKDGKEPEIWGFDGSSTNQAPGSNSDCVLRPVFETPDPIRGGDNRLVLCEVQLTDFTPPTNTRAAALGVAERYADMSPMFGIEQEYTFFKDGRPYGWPEVGYPAPQGPYYCGVGGSKMPGRQIVERHTQACLDAGLAIEGTNAEVMMGQWEFQIGVLPAPAIGDQIWLGRWLLHRIAEDYGVEVSFAAKPIPGDWNGAGAHTNFSTKQTMEGWDAIVTCCEALGTRVTEHVTHYGKGIEDRLTGKHETAPWNKYSWGASDRGASVRIPWAVEKAKKGWLEDRRPNANMDPYLVTALMIDTCCSALAGDKPTLFVPSQTTPAPAEASV

SEQ ID NO: 15876 - protein, 1434 aa, GIBBERELLA ZEAE PH-1
MVAHDEEAYALLDEHDLCSEDSSVRDDRALSSAYTAPFSHRFKRPCVVRWVVALILVSLLSPFGAIIYHALEQSSETGQDTPLGYRLHAQEHTSRPPKTLIYNWNITAGFRSPDGVEKRVYLINGPIIEARSSDTVVVHVHNGLSQEGLSIHWHGLRMKNQNGMDGAVGFTQSPILPGDSFNYIFTIGDDEYGTFWWHSHSDVQRADGLWGGLVVHSPDESNQQPEDYLIMISDWFHRNQTEVLSWFADASSRGNEPVPDSLLVNGQGRFDCSMAVPARPVVCSQATMNELKPLFRQTNDRRARIRVVNTGSIAGLTIRIDAAMMRPVRVDGGFDVHSEATEAVGILYPGERVDIDVEWKDDHAPNRWLTVYMDDENFSYPNEALNPVQDFPIFDHGNKIPSRKDLESNETQILDPRNLKAAAKIVDIPLVADHTILLYAKIEKLAHMDYEPVGFINHTSWKPQDPPLISQSRSGWDDNQLIPFIATTREKPTRVDIIINNLDDGAHPFHLHGHSFYVLSTHRDEGRVGWGSYNSYSGEAPPNGLDLDFPLRKDTNLISETRSAYKSPDGYPKVVNDLSTVINDLADVSHRIRHVIDVSVSQANNASDNTLIRLCRESQDIAGEMNSALLSLQAKGTSKLGQAKSSVIVALKAMWSKDKLAKLEQRLQQIRSEMTMAMLVVLWEKERRRDDKGDSELKNQIEEISKAVNRNNGMLDDFLRELDATASDDDKLGPIIRSLHFPGIEARERLIPEPYAKTYQWIYRDEMRYKQASTTMRVQSLPQWLQDSTNKVYWITGKPGSGKSTLMNFVIHNPLTKQYLKDWAAPFPLVQAQFYFWEAGQSSMQRSQQGMMQTLLWQCLRQKPDLIPRVTPRRWMVHQVLRGLETPAPPWTWEELRTAFTIIASQNDHSFKLVLFLDGLDEFAGDPAVVVSFVKDLVASYGVKICVGSRPWTDFADAFDQYPMLIMQSQTRNDISEYITGKFEACRAFRERKAVFPDQAKRLLQDISNKAQGVFLWVFLVVRDLIHSLSRGRSLSDLQMIVDDLPTDLEALYTKMRERVEPKDMENSARYYQLIVSALKPLHMVTIWMIDGEALPDGDTFTKEMEDNIRKILQRRLDSSTKGLLELDDNGFINFLHRTARDWVIQGSQSAQFKAQAPRSFDPNLALVQVLTKQLPHEKIYQHIGHSHISFWSFAVLGFLYAGQVGSSPHTDHLLIQAIEEFDAALCQRATYLGNKGFVFTSNTIKPQPGVVDTRLADKTHPWYFFGRRNREDMTPPDPCFDHWTCTQYGASNFLFTHSTILGTIGIAAQFGIVPYVLEMMRRDKNLLKGGALSALLQDSLFGWQLYKYRTYEDVSEFYNIDEQAQERMENQRIGILMTILGHGKSLYTPCYDALALIEKLDNAFKIRIGSKSYWEKATMILDTSMRRRGSKKK

SEQ ID NO: 15877 - protein, 314 aa, Arabidopsis thaliana
MAEEIRFFELNTGAKIPSVGLGTWQADPGLVGNAVDAAVKIGYRHIDCAQIYGNEKEIGLVLKKLFDGGVVKREEMFITSKLWCTYHDPQEVPEALNRTLQDLQLDYVDLYLIHWPVSLKKGSTGFKPENILPTDIPSTWKAMESLFDSGKARAIGVSNFSSKKLADLLVVARVPPAVNQVECHPSWQQNVLRDFCKSKGVHLSGYSPLGSPGTTWLTSDVLKNPILGGVAEKLGKTPAQVALRWGLQMGQSVLPKSTHEDRIKQNFDVFNWSIPEDMLSKFSEIGQGRLVRGMSFVHETSPYKSLEELWDGEI

SEQ ID NO: 15878 - protein, 572 aa, Magnaporthe grisea 70-15
MVLSRHVNPDDIVQHLHNSSLKEQDGDNDTRTQAAISHLTPYSSRYASNVSLPKYKLPKEGAEADTVYSMIRDELDLDGKPNLNLASFVGTYLEDNAQKLMVENIAKNLSDADEYPAMISMQQRCVSILAHLWNVQKGEKAIGSATTGSSEAIQLGGLAMKRRWQEARRAAGKDDSKPNIIMGANAQVALEKFARYFDVEARILPVSEKSRYRLDADMVRDNIDENTIGIFIILGSTYTGHYEPIEEISEILDKYQAETGHDIPIHVDGASGAFIAPFTHAQAGGPKWDFSLPRVKSINTSGHKYGLVTAGVGWIVWRDESFLPKHLIFELHYLGGTEESYTLNFSRPGAQVITQYFNLVHLGFSGYRAIMENCLANARLLSKSLEATGWYTCVSDIHRRVETAGSNGSNGKQKEPEVTPEHAKETSADYVAGLPVVAFCFSDEFRRQFPHVKQETVSVLLRARQWIIPNYALPPNEEKTEILRVVVRESMSLDLLDRLLSDICEVTQKLMDEDELDLNVLQGSRHKGPCTKADVSKEGRAQAKKERDDRHKKHQATGRTGRMETGVHRSTC

SEQ ID NO: 15879 - protein, 421 aa, Pyrobaculum islandicum
MERTGFLEYVLNYVKKGVELGGFPEDFYKILSRPRRVLIVNIPVRLDGGGFEVFEGYRVQHCDVLGPYKGGVRFHPEVTLADDVALAILMTLKNSLAGLPYGGAKGAVRVDPKKLSQRELEELSRGYARAIAPLIGDVVDIPAPDVGTNAQIMAWMVDEYSKIKGYNVPGVFTSKPPELWGNPVREYATGFGVAVATREMAKKLWGGIEGKTVAIQGMGNVGRWTAYWLEKMGAKVIAVSDINGVAYRKEGLNVELIQKNKGLTGPALVELFTTKDNAEFVKNPDAIFKLDVDIFVPAAIENVIRGDNAGLVKARLVVEGANGPTTPEAERILYERGVVVVPDILANAGGVIMSYLEWVENLQWYIWDEEETRKRLENIMVNNVERVYKRWQREKGWTMRDAAIVTALERIYNAMKIRGWI

SEQ ID NO: 15880 - protein, 220 aa, Xylella fastidiosa Ann-1
MHSLERLLQNNRNWCERINQEDPEFFARLSKQQSPEYLWIGCSDSRVPANQIIDMAPGEVFVHRNVANVVVHTDLNCLSVIQFAIDVLKVKHILVVGHYGCGGVLASLTRARLGLVDNWIRHVTDVAEKHNPYLETLGALPDQHARLCELNVLEQVMNVCSTSIVRDAWSRTQPLSVHGWVYSLSNGLVHDLGIDVDRFEMLPSCYADALARIQADRLVR

SEQ ID NO: 15881 - protein, 412 aa, Thermobifida fusca YX
MSNREVVVTGLGASSPLGGDVATTWSALLEGRSGITSLPEEWHEKLPVHFAGLLAEEPSEKLERHRLRRLDRTQQLALITAREAWDDAGSPEVDPLRLGVVMSSGIGGILTTLHQYDIFREKGWKRVSPFTVPMLMPNSPAAAVALEFTARAGAHAAVSACASSAEAIADGINMIRSGRADVVIAGGCEAAIHPLNIAAFAAMRALSTRNDDPQGASRPFDVNRDGFVMGEGAATLILESAEHAAARGARVYAVAAGAGYTCDAYDIVQPDPVGAGASRAISAAIADAGLSPSDIAHINAHATSTPAGDVPETVAIRSALGDSAADAVAVTSTKSMTGHLLGGAGALESVATVLALYHGVVPATINVEEIDPGVVVDVVVDKPRELPSSAVAALNNSFGFGGHNIALAFRRP

SEQ ID NO: 15882 - protein, 399 aa, uncultured bacterium 582
MTLSQGRSYLAIPGPSVVPDQVLQAMHRAAPNIYEGALVELTHGLVPDLRRVARTQGEVAMYIANGHGAWEAALSNVVAAGERVLCVATGRFGVGWGEMAQALGIEVDMVDFGLHAPLDPERIGTALRRDHAQKLKAVLISHVDTSTSVVNDVAAVRAELDRLGHPALLMVDCIASLACDRFEMDAWGVDVMVAASQKGLMLPPGMGFVFFNDHAAQSRKAMTRVSRYWDWQPRSRPELYYEYFNGTALTHHLYGLRVSLDMLHDEGMEQVWARHETLAQAIWAACDAWSSGGDLRLNVGDPAHRSRAVTAAALTAPDATRLRQWLSERAGVTLGIGLGMAPPGDPACDGFFRFGHMGHINAHMVLGMLSSVQAGMAALDIAHGAGGMDAATAIVADCA

SEQ ID NO: 15883 - protein, 424 aa, Triticum aestivum
NKFVQKSRLVPVRNSRDIVDPRVRYGASESSAESSNFESSTEEVSSDKRVRAEKGIIRKINCDHRETVGENEPHTSLPAVFSCQPQQDKLGGQSRAQGTTSVVQKMLLQGMGTAIGSKDIIGIHRTPFLNNYREDRYNLFQKQAEITKSQHGNANVRYAWLPCSKAAVDEMMLNGTLQIKKPTRCPPYGTGVLLAPANCSINCVNYSDVDENGIIYMMLCRVVMGNVEIVHHGSKQHQPSNEYFDSGVDDLKNPQHYIVWDMNLNSHIYSEFVVTIKLPSKAKDSLFTQEDCQDSSDASLVLSPSSADSVSQDMNLEASPALGGQYEAPMLGGSMAKAPSTPWMPFSMLFAAISTKLPREKMDMINNCYEEFKAKKISRIDLVKRLRLIVGDRMLVSTIIRLQDKLPPMVKREAANAPAKARGQ

SEQ ID NO: 15884 - protein, 583 aa, uncultured bacterium 582
MSDSPQQGLFRWLWHAYMARHIWVILLAMLFMTIEGSMLGAMSYIMKPMFDQVFVGGDADAALFVGLLILGIFILRASASIAQKVLLARLSEVTAAHIRTDMIGHLMRLDGDFHATHPPGLVMQRIEGDVGSINQVWATIITGAGRDFVAVIALMAVAVSVDWRWTLIACIATPFLILPSILVQHFVRSNARLVRDISADLSTRLNEIFHGINPIKLNTLEDYQVNRYRALAKKRINFQTKAVLGQGGMSGIMDVMSGIGFLAVVVYGANEIISGQKSVGDFMSFFTAIGLAFEPLRRLGTLSATLQIAAAGIERVKGLLDFKPSLLSPETPDTAPSGAPVIALENVSLSYAGTEVLKNVSFTAEAGKTTALVGASGAGKSTIFNLLTRLVDPQIGKITLSGVSVDSLRLEDLRQLYSVVAQDALLFDESLRENILLGQTDIAPETLQVVLDAAHISDFLPRLTKGLETPVGPRGSLLSGGQRQRVAIARALLRNTPILLLDEATSALDAQSENMVQAALDKLSKGRTTLVIAHRLATIRNADKIIVMAHGKVVEIGTHEALMARNGAYAELYNLQLNEAKTA

SEQ ID NO: 15885 - protein, 477 aa, Methylobacillus flagellatus KT
MFKKLIAMSAICLFVGMAGATPVLAKELPDFTELAEKQGAAVVNISVTQVVQSGIGGSPFPGFPEDEALNEFFRRFGIPGFPGVPRGQGGPQQPEFKSQSLGSGFIISSDGYILTNAHVVREADEVIVKLNDKREFQAKIVGVDRRTDVALLKIDATGLPKVTIGNPEQLKVGEWVVAIGSPFGLESTLTAGVVSAKGRALPQENFVPFIQTDVAINPGNSGGPLFNLKGEVVGINSQIYSRTGGYMGLSFAIPIDVAMDVANQLKISGRVARGWLGIGIQEMTKELAESFGMKNTKGALVAGVEKGSPAEKGGLEPGDVVIKFDGKDVNVSSDLPRIVGSTKPGKKVQVEVLRRGASKTLNITLGEMPADKDEVVPTAQPDAKPESNRLGLTLRELTPQQRRSLNGRNALVVVDAQGAAAQAGIRRGDLILALNNTEVQSLEQFTKQVNAVPAGKTVALLVQRENNTLYVPVKVGK

SEQ ID NO: 15886 - protein, 483 aa, Rhodobacter sphaeroides
MKDRDRMETARGRVLSVASECVPLLKTGGLADVVGALPGALAAEGWEMRVLMPCYRPLKWRLEEMEEVFAEEDLFGGPGRVMAGEVAGRKMLLLDAPHLYDRGRPYAGPDGDWGDNAQRFAALSWIGAGSRARGSGTGWRPDVVHAHDWQAGFTPAYMNYWGSGGASSVLTVHNIAFQGWAPASLLSALRLPPQKFHPAALEYYGGLSSLKAGLVSADHITTVSPTYACELMRPEFGMGLQGVIAQRAGQVTGILNGVDTDIWSPEVEERPYDAESLKAKAENRAVLSGAFKLSVPGPLAILVSRLTYQKGIDLIPEVLPDFIAAGGGLAVLGTGDAPLEAAMRELEVRFPGRVGVRIGYDEGLSHLMFAGGDAVLVPSRFEPCGLTQMYGLRYGAIPVVALTGGLADTIINANPAAMAAGCATGLTFHPTEPPAFAEALRRLIHLYADPAAWETVQRNAMRHPVGWETSAAAYAALYRELVA

SEQ ID NO: 15887 - protein, 447 aa, Lycopersicon pimpinellifolium
RMSVDVGAPSPRSIQMDEQVNPGEEYAPKIRKPYTISKQRERWSEEEHKKFLEALKLHGRAWRRIEEHVGTKTAVQIRSHAQKFFSKVVRESSNGDASSVKSIEIPPPRPKRKPMHPYPRKMATPLKSGTLASEKLNRSGSPDLCLSEPENQSPTSVLSTLGSDAFGTVDSTKPSEQSSPVSSAVAENSGDLVLSEPFDLVVEESRSSPARAYATSNPANQACVKLELFPEDNDFVKEGSDEASSTQCLKLFGKTVLVTDAHMPPTDETLTRSSFPAKYLPWDSECPQSTFSIVPPTPSYYFTTPNGSPGPNQSGVATTHLPWGSSCAVPCTQVHSPIPMKGRPLFNDRYLEGKETQKEGSSTGSNAESVDAELSGEKNMEIEAQSSRNVVEESVRASVPSLFERRANSTKRVKGFVPYKRCLAERGVSSSTLTGEEREEQRTRLCL

SEQ ID NO: 15888 - protein, 387 aa, Pyrococcus horikoshii OT3
MDEFIIKRAKELQGYIVEKRRDFHMYPELKYEEERTSKIVEEELKKLGYEVVRTAKTGVIGILKGKEDGKTVALRADMDALPIQEENDVPYKSRVPGKMHACGHDAHTAMLLGAAKILAEMKDELQGTVKLIFQPAEEGGLGAKKIVEEGHLDDVDAIFGIHVWAELPSGIIGIKSGPLLASADAFRVLIKGKGGHGAAPHLSIDPIALAVDLVNAYQKIISREVDPLQPAVLSVTSIKAGTTFNVIPESAEILGTIRTFDEEVRDYIVRRMKEITENFANGMRCEGKFELTIEHIPPTINNEKLANFARDVLKVLGEIREPKPTMGAEDFAFYTTKAPGLFIFLGIRNEEKGIIYPHHHPKFNVDEDILWMGAAIHSLLTYHYLSL

SEQ ID NO: 15889 - protein, 143 aa, Desulfovibrio vulgaris subsp. vulgaris str. Hildenborough
MKPSREELKKRLTPLQYDVTQEEGTEPPFRNEYWDEKREGLYVDIVSGEPLFSSRDKYDSGTGWPSFTRPVDPQGIVERVDRKLFTTRTEVRSRNGDSHLGHVFPDGPQPTGLRYCINSAALRFVPVEDLEQQGYGHLLHLFQ

SEQ ID NO: 15890 - protein, 579 aa, Guillardia theta
MTLLFVNNWSLNKSKSKSTMNLKYKNNKLNTKMMAKKVVFGEESRKALVNGINSVADAVKITLGPKGRNVVLERSFGSPQVINDGVTIARDIELENPLYNTGARLLQEVASKTDLKAGDGTTTSTVLTQSIVNQGIKAVSSGVNPLALKRGIEKTCRFLIEEIKKKSKPCNGIEDIRNIATIASGGNDEIGRIISSAFEKVGQNGSTTVEESQSLQDEVDFTEGMELDRGYISPYFVKDMERQIAEFINPRILVTDKKISSVQELVPILEMIVKHKEPLVIIAEDVTGEALSTLVVNKMRGVLDVCAIKSPGFGERKKAYLEDISVLTGATFIAEEVGLTLDKIKIEQLGKANRVVVAKEACTIISDSTNQESVNKRIELIKKQIANTDSDFDREKGEERIARLGGGIARIKVGAATETELKDKKLRYEDSINSTKAAIEMGILPGGGSTLISLIRLIPSIQEKLEDEEEKLGASILAKAMEAPILQIAKNSGQEGEVVLDKCKKMEFGMGYNAATNSYENLLESGVVDPAKVTCWALENSCSIASMVLTTEALVVEIPEKNKTNSTDNMGDLPGENYM

SEQ ID NO: 15891 - protein, 450 aa, Borrelia afzelii
QMDSGESIIENILKNEGLVIENYYNLINTIYSRMEREEFFKREKDKDKESNPDYYNKKKRIASFYKIPLKPIQDRLISYVDNKHRVYELGGDIFEKNLKSERLALKELLRDVPLYQDELRIFSDDYIDSANKIKDLQRQQRIILSRLKIEKIRDLRVLGRDLTIAEKRIEIEKSLKLKEDAIKEQITEAQLAQKELERIEMYYEYPMDKIISMSEEIAKGKQMMQHAKDQLIKANLRLVVSIAKKYANRGLHFFDLVQEGNIGLIKAVEKFEYKRGFKFSTYATWWIRQAITRSISDQARTIRVPVHMIEQINRLNRETRYLVQVLGKDPTDEELSDRLGWELKKVKTVKSVSREPVSLETPIGEEEDSVLSDFIEDKAIKNPANHTSFVVLQDQIRSILGTLPEREQEVVKMRFGLEDGYSLTLEEVGLHFNVTRERIRQIESKALRRL

SEQ ID NO: 15892 - protein, 340 aa, Streptomyces hygroscopicus
MSIKAEYIWIDGTQPTAKLRSKTKILSDGSRLPRWGFDGSSTNQAEGHASDLVLEPVFSCPDPIRGGDHLLVLCEVLHTDLTPHPSNTRALLRPVAERFAGQEPIFGIEQEYTFLKGDRPLGFPEGGGYPAPQADYYCGVGADAIFGREIVEKHLDLCLAAGLGLSGINAEVMPGQWEFQVGALPPLEVSDHMWVARWLLHRVAEEFGVTASLDAKPAKGDWNGAGAHTNFSTRAMREGYDPIITACEALGQDDKPLEHVRQYGTGIEDRLTGAHETAPWDAYSYGASDRGASVRIPWQVEVEKKGYIEDRRPNANVDPYVVTRLMVDTCCTELARREQI

SEQ ID NO: 15893 - protein, 224 aa, Magnetospirillum magnetotacticum MS-1
MQGPYSMKFFIDTAEVAEIRELAATGLVDGVTTNPSLIAKSGRKILDVIAEICDIVPGPISAEVAATDFDTMLAEGRKLAALRPNVAVKVPLTLAGLKTCKVLADDGVKVNVTLCFSANQAILAAKAGAAFISPFVGRLDDIGQDGMDLIADIVSIYREYPAFRTEVLAASIRHPMHVTEAARLGAHVVTMPASVLRQMVQHPLTDKGLAAFMADWAKTGQSIL

SEQ ID NO: 15894 - protein, 534 aa, Streptomyces coelicolor A3(2)
MAAPNSHRAEDWWRDAVIYQVYPRSFADGDGDGTGDLAGVRARLPYLAELGVDAVWFTPWYVSPLVDGGYDVADYRTIDPAFGTLGEAEKLIAEARELGIRTIVDIVPNHVSDRHAWFRAALEAGPGSAERERFHFRPGRGADGELPPNDWPSQFSGRTWTRVPDGEWYLHLFTPEQPDLNWAHPEVRREHEEVLRFWFERGVAGVRIDSAALLAKDPALADFVEGVDPHPYIDQDELHDIYRSWRKVADEYGGVFVGEVWLPDAERFARYLRPDELHTAFNFNFLSCPWEADRLRRTIDDTLAEHAPVGAPATWVLCNHDVTRTVTRYGRADTGFDFAKKAFGTPTDLVLGTRRARAAALLTLALPGSVYLYQGEELGLPEADIPRDRIQDPMHFRSGGVDPGRDGCRVPLPWAADAPYCGFGSETEPWLPQPEGWAAYAADRQGADPESMLSLYRRALGLRRSTAGFGDGGLDWLPAPDGVLAFRRAGGPVCVVNLSAAPVELPAHSAVLLVSGPLDEAGRLPADTAVWLRA

SEQ ID NO: 15895 - protein, 462 aa, Zea mays
AASASSSWQDLPPRLQSYDNRAPLLLPVKIMDAAADDKPEISDDTAHQISVDPWYQVGFVLTTGVNSAYVLGYSGSIMVPLGWIGGTCGLLLAAAISMYANALLARLHEVGGKRHIRYRDLAGHIYGPKIYGLTWALQYINLFMINTGFIILAGQALKATYGLFSDDGVLKLPYCIAISGFVCALFAIGIPYLSALRIWLGFSTLFSLMYIVIAVVLSSRDGITAPARDYSIPKSSQSTRVFTTIGSIADLVFAYNTGMLPEIQATIRPPVVKNMEKALWFQFTIGSLPLYAVVFVGYWAYGSSTSGYLLNSVTGPVWVKAVANLSAFFQTVIALHIFASPMYEFLDTKYGSGRGGPFEIHNVAFRVAVRGGYLTVNTLVAAVLPFLGDFMSLTGALSTFPLTFVLANHMYLMVKGPKLGAIQKSWHWLNVLGFTALAVAAAVSAIRLIMRDSSTYHFFADL

SEQ ID NO: 15896 - protein, 450 aa, Borrelia burgdorferi
QMDSGESIIENILKNEGLVIENYYNLVNTIYSRMEREEFFKREKDKDKESSPDYYNKKKRIASFYKIPLKPIQDRLISYVDNKHRVYDLGGDIFEKNLKKERLALKELLRDIPLYQEELRIFSDDYIDSANKIKDLQRQQRIILSRLKIEKIRDLRVLGRDLTIAEKKIEIEKSLKLKEDAIKEQITEAQLAQKELERIEMYYEYPTDKIISMSEEIAKGKQMMQHAKDQLIKANLRLVVSIAKKYANRGLHFFDLVQEGNIGLIKAVEKFEYKRGFKFSTYATWWIRQAITRSISDQARTIRVPVHMIEQINRLNRETRYLIQVLGKDPTDEELSDRLGWELKKVKTVKSVSREPVSLETPIGEEEDSVLSDFIEDKAIKNPANHTSFVVLQDQIRAILGTLPEREQEVVKMRFGLEDGYSLTLEEVGLHFNVTRERIRQIESKALRRL

SEQ ID NO: 15897 - protein, 450 aa, Borrelia garinii
QMDSGESIIENILKNEGLVIENYYNLINTIYSRMEREEFFKREKDKDKESNPNYYNKKKRIASFYKVPLKPIQDRLISYVDSKHRVYELGGDIFEKNLKSERLALKELLRNVPLYQDELRIFSDDYIDSANKIKDLQRQQRIILSRLKIEKIRDLRVLGRDLTIAEKRIEIEKSLKLKEDAIKEQITEAQLAQKELERIEMYYEYPMDKIISMSEEIAKGKQMMQHAKDQLIKANLRLVVSIAKKYANRGLHFFDLVQEGNIGLIKAVEKFEYKRGFKFSTYATWWIRQAITRSISDQARTIRVPVHMIEQINRLNRETRYLVQVLGKDPTDEELSDRLGWELKKVKTVKSVSREPVSLETPIGEEEDSVLSDFIEDKAIKNPANHTSFVVLQDQIRSILGTLPEREQEVVKMRFGLEDGYSLTLEEVGLHFNVTRERIRQIESKALRRL

SEQ ID NO: 15898 - protein, 471 aa, Ehrlichia canis str. Jake
MRRFLLLLTLILANIPISNLIAQGTEQYDPRSGFSKLIKESTPAVVNVSIVHDVTNEQFPLITIEELLRSILEGKQIKKDVPQEILSAGSGFVVDESGIIVTNYHVVHNAKEVYITFSNNKSIPAKILGVDPQTDLAVLKVEVNEKLPYLDFGDSDTAMVGDWVVAIGNPFGLGGSASIGIISARARDLNIGTATEFLQTDAAINKGNSGGPLFNVDGKVIGINTAILSTQKGGGNIGVGFAIPSNSAVPIIKVLSQGKKVEHGWLGVVMQPITEELVEPFKLKEVSGALITNIVKGSPADKAKLLPGDIILEFNGTKINSISQLHQLVLRSEANNEVTLVVSRNGSIINISVKIGKFENPDPSENELPKDSVQSHELGLTVGNIKHNQIMSNDTTEEEVKGVMILNVDYTSNASTKNIRKGDIILQINQSPINNLEDFKNVMKKVRKNKSAALLISRDNISMFVTVKLKQ

SEQ ID NO: 15899 - protein, 681 aa, Synechocystis sp. PCC 6803; identical to SEQ ID NO: 1397

SEQ ID NO: 15900 - protein, 590 aa, Desulfovibrio vulgaris subsp. vulgaris str. Hildenborough
MSNIKEIQQIKSLIAKGKVSGFLTFDEVNKALPAEVNTPEQIEEIIGIFDQLDIAIVDSEKDGKKISMSPGESEEEAPSEGGLDLSDDEETVDYSSRSTDPVRMYLREMGSVPLLDRDGEVVIAKKIEMGEQDVLYALVEVPVAVEELVNVGEDLKQNRIKLKDVVKTIEEDDPSEDEMNQRQRVILLLEEIRTTFKKKRKVYSKLDECCTLERRVASVQREIMNYKEDIVSRLRDIKLEKTLIDRIIETVEDYVRQMHNCQRDLSAYILSTGKTQAEIQALFSGLEAREVSPVAASAALNMTVEELFSFKEMILGKIEILSRLQDKCCHNVNDLEEVLWRIKRGNSIAMRAKQELIRSNLRLVVSIAKKYTNRGLQFLDLIQEGNIGLMKAVDKFEYQRGYKFSTYATWWIRQAITRAIADQARTIRIPVHMIETINKLIRTSRYLVQELGRDPTPEEIAERMDYPIDKVKKVLKIAKEPISLETPIGDEEDSSLGDFIEDKKAVAPAEEVVNTKLGEQIASVLADLTPREEQVLRKRFGIGEKSDHTLEEVGKLFNVTRERIRQIEAKALRKLRHPVRSQTLRSYYES

SEQ ID NO: 15901 - protein, 276 aa, Triticum aestivum
MATVQAVAKGTLVSPCGNRAAGFGARRRGAVAARMSPCAPAAVRIGRKSPFLGARLTVGPRRSKLVPRNLVASPVQMNLAFAKSTKWWEKGLQPNMREIESAQDLVDSLANAGDRLVVVDFFSPGCGGCRALHPKICQFAEQNPDVLFLQVNYEEHKSMCYSLHVHVLPFFRFYRGAQGRLCSFSCTNATIKKFRDALAKHNPDRCSIGPTRGLEESELLALAANKDLEFTYTKQPEPVPSGDREVIAPGSPRLPPPAKPLVRQGSGERTLVSSGR

SEQ ID NO: 15902 - protein, 447 aa, Lycopersicon pimpinellifolium
RMSVDVGAPSPRSIQMDEQVNPGEEYAPKIRKPYTISKQRERWSEEEHKKFLEALKLHGRAWRRIEEHVGTKTAVQIRSHAQKFFSKVVRESSNGDASSVKSIEIPPPRPKRKPMHPYPRKMATPLKSGTLASEKLNRSGSPDLCLSEPENQSPTSVLSTLGSDAFGTVDSTKPSEQSSPVSSAVAENSGDLVLSEPFDLVVEESRSSPARAYATSNPANQACVKLELFPEDNDFVKEGSDEASSTQCLKLFGKTVLVTDAHMPLTDETLTRSSFPAKYLPWDSECPQSTFSIVPPTPSYYFTTPNGSPGPNQSGVATTHLPWGSSCAVPCTQVHSPIPMKGRPLFNDRYLEGKETQKEGSSTGSNAESVDAELSGEKNMEIEAQSSRNVVEESVRASVPSLFERRANSTKRVKGFVPYKRCLAERGVSSSTLTGEEREEQRTRLCL

SEQ ID NO: 15903 - protein, 479 aa, Pisum sativum
MEEPTFLFPPPDSDLDLSFTSTTTDRTFTSSSARTSLARTSSLALSFNDRLSTASAAAGDTVSSAIIRRPHRSSDPNWTAIKAATNLSSDGRLHLRHLKLLRHLGSGDLGRVFLCRLRDYDGANFALKVVDKDLLTLKKSTHAETEAEILHALDHPFLPTLYARIDVSHYTCLLIDYCPGGDLHSLLRKQPGNRFTLSAARFFAAEILVALEYLHALGVVYRDLKPENVLIREDGHVMLSDFDLCYKADVSPTFEFSTNHKLHVDPTHGCFSYNRSKSRESVTAEFVAEPTTAFSRSCVGTHEYLAPELVSGNGHGNGVDWWAFGVFIYELLYGTTPFKGCNKESTLRNIASNKDVKFHVAENEEVGMVGARDLIEKLLVKDPRRRLGCARGATDIKRHPFFDGIKWPLIRTYKAPEVKGLLRRKKSESSLSQLSSKRKRGWWKRLGCVLRNKGARFDLLSNYSNNNHYYCYVNNSKVR

SEQ ID NO: 15904 - protein, 427 aa, Bacillus cereus E33L
MKTFLSALQWALFILAGSLIVPISVATSYGLDGAEAIAFVQRTLFVLGFAGLLQAIFGHKLPIQEGPAGLWWGIFSLYASLGVVLFGSSNETLKVLQYAFLLSGIICIILSVLGLIDKLVRYFTPTVIGTYLFLLVAQLSGAFLKGMFGLDGQHTEVQADVFILSLIVILLSFFIMKLPIIGQYSVLFSIVCGWILFACFGLSNPITPVTDIIRLPSLFVFGMPRIEWNMAITVVFVTLLLLTNMLASIRVVQKVVSKYEENATPDRFKQAGIITGINQLLGGLFSAIGPVAISGSAGFIATTNIYKRLPFMLGSSFIIVVSIFPKITSFFAAIPVAVGYAAIYPVFASMIGLAFREYDTVQNKERLFKVAGLSIFTGVGVMFVPAGAFSTLPPFLASFLSNGLVLGSVMAILLEILFSRSTEKQLS

SEQ ID NO: 15905 - protein, 293 aa, Pisum sativum
MGSSFWTVCLILASLVSSSFCALPRKPVDVPFGRNYYPTWAFDHIKYFNGGSEIQLHLDKSTGTGFQSKGSYLFGHFSMNIKMVPGDSAGTVTAFYLSSQNAEHDEIDFEFLGNRTGQPYILQTNVFTGGQGNKEQRIFLWFDPTKEFHRYSILWNMYQIVFYVDDVPIRVFKNSKDLGVKFPFDQPMKIYNSLWNADDWATRGGLEKTDCSKAPFIAGYKSFHIDGCEASVNSKFCATQGMRWWDQAEFRDFDAAQWRSLKWVREKYTIYNYCTDRKRLPQIPSECKRDGDI

SEQ ID NO: 15906 - protein, 217 aa, Ophioglossum pedunculosum
RSGLLKKAYELSVLCDAEVALIIFSGTGKLFEFASSSMKKILERYRKYGGGLHDNSIATRDAEYWRNEVMRMKEHIACLEESQRHLLGENLVSLSVKNLQKLEHQLEIGANRIRTRKTQILLEQIQELQKKEHFLHGENNILKTKLEQLSTRQVPSLGTLIYTSTVTTTSTTSAGAGVEDNAGGHDSMNAMQKMTLHSNFQPATSAQNTLQLGYYPD

SEQ ID NO: 15907 - protein, 376 aa, Bdellovibrio bacteriovorus HD100
MAKKTTVKAGGKAAAGKTTKKAAKPAAKSTVKASKKATAPAKKKQSFGGLSEEILLRMHNLMVKSRVLEERLIKIYKAGEAYFWIGGPGEEAWGVALGMLARKGSGPENDWLHLHYRCTPTMVALGMDMIDSIRLMMNRATDPSTGGRNFSSHYCFPQWNVAPVTSPLEVQYPIACGTAHVQKRAGKGAISIVTGGDAGTAEGDFASCLILASRKGQELPMLITVQNNGYGISTPYEGQHGETNIADRAAAFNIRSRVINGNDPIETYLALKEEMEYIRKTGKPSFIEAKVTRLYGHSSADGANKKPHLFDPVLTFEKNLIDAGILDPKVAKKIWEDYEAEGVSAQEQARQEPVPTPESVWDHVYVNSENADWRKF

SEQ ID NO: 15908 - protein, 448 aa, Schizosaccharomyces pombe
MREIVHIQAGQCGNQVGAAFWSTIADEHGLDSAGIYHGTSEAQHERLNVYFNEAAGGKYVPRAVLVDLEPGTMDAVKSGKFGNLFRPDNIIYGQSGAGNIWAKGHYTEGAELADAVLDVVRREAEACDALQGFQLTHSLGGGTGSGMGTLLLSKIREEYPDRMMATFSVAPAPKSSDTVVEPYNATLSMHQLVENSDETFCIDNEALSSIFANTLKIKSPSYDDLNHLVSAVMAGVTTSFRFPGELNSDLRKLAVNMVPFPRLHFFMVGFAPLAAIGSSSFQAVSVPELTQQMFDANNMMVAADPRHGRYLTVAALFRGKVSMKEVDEQIRSVQTKNSAYFVEWIPDNVLKAVCSVPPKDLKMSATFIGNSTSIQEIFRRLGDQFSAMFRRKAFLHWYTGEGMDEMEFTEAESNMNDLVSEHQQYQEAGIDEGDEDYEIEEEKEPLEY

SEQ ID NO: 15909 - protein, 674 aa, Mycoplasma penetrans HF-2
MNKGTKTPAINKNDRFVNLTIDTLRVLSCEMIAEAKSGHPGIALGAAPILYTLFKNHLVADPTKSFLNRDRFVMSAGHGSALLYAVMHLSGYDISLNDLKNFRKINSKTAGHPENILIDGVDISTGPLGQGVGAAVGMAIAETKMNQYFKKYNLVNYYTYCLLGDGCFQEGVSFEALSIAAKYKLNKLIFLYDSNDVQLEGRVADSTVIDTKKYFESIGLNYIKVANGNDYNEINEAILLAKKSEEKPTIIEIKTKIGFGSVHEDSPKSHGAPLSEEEIDLLKNKLNYHNEKFEISKNAYFDFESFKKRGTKARESFEEKVKKLKAADPTKYKVLENILNKEISFDKKAFSDYQKTKDSTRNLSNYVLSKIAEINPLLTLLSPDISSSTKINFAKGGVYSTDNRLGMNLNLGVREFAMGTIINGICSTGLKAIGSTFLPFSDYCKAAIRLSSVSKNPGVFVFSHDSIAVGEDGPTHQAVEQLWGLRLIPNHYLIRPCNLDETIKAFEIALTNTESTFSIITSRQEFDLPNGAASKVSRGAYAIKSDRQAIVNILATGSEVALAFQVESILSSKYNIKANIISVPCVELFLKQIESYEKAVLGTTLDASRTVSIEFGSSLPWSRYAGIRIGVNKFGLSGTFESVCKKMKLTAEDIAEKINNSLPKLKKGETLVNN

SEQ ID NO: 15910 - protein, 586 aa, Bacillus cereus ATCC 10987
MQGIKRYLQFVKPYRWLIAITIMIGLVKFGIPLIMPWLLKYIIDDVIQGGGSFQDKTSQLVTAIGIAFFIFAVLRPPIEYYRQYFAQRIANTILYDLRKHIFGHLQKLSLRYYSNTKTGEIISRVIHDVEQTKDFVITGLMNVWLDTATIAIAIIVMFSMNIKLTFVALLILPIYVVAVKYFFGRLRKLTKERSQALATMQGYLHERIQGMQVTRSFALEEYEGKQFEKRNNEFLTKALTHTSWTARTFSAVNTLTDLGPLLVIGFAAYEVIQGQLTLGTMVAFVGYMDSLYSPLRRLVNSSTTLTQSFASMDRVFELLDEKYDIVNVPGAVQTKKLNGEVIFDNVSFRYNSDEKEVLHNLSLTMLPGEKVALVGASGGGKSSLASLIPRFYDVSSGAVYVDGIDVRKYDMRNLRSHIGIVLQDNLLFSDTIGANILYGNPKATEEEVIAAAKAAQIHDFIIELPDGYDTVVGERGVKLSGGQRQRVAIARVFLKNPSLLILDEATSALDLENERYIQEALQTLAADRTTIIIAHRLATITHVDTIIYIEDGEIKETGSHEELMKKRGFYYNLYQLQHITETAPLA

SEQ ID NO: 15911 - protein, 355 aa, Pisum sativum
MSLSDLINLDLSGTTEKIIAEYIWIGGSGLDLRCKARTLPGPVTDPSELPKWNYDGSSTGQAPGQDSEVILYPQAIFKDPFRRGNHILVMCDAYSPAGEPIPTNKRHAAAKVFSHPDVVAEETWYGIEQEYTLLQKDINWPLGWPAGGYPGPQGPYYCSVGADKAFGRDVVEAHYKACLFAGINISGINGEVMPGQWEFQVGPSVGISAGDEIWVARYILERITEVAGVVLTFDPKPIKGDWNGAGAHTNYSTKSMREDGGYEIIKKAIEKLGKRLPEHISAYGEGNERRLTGKHETADINTFSWGVANRGASVRVGRDTEKEGKGYFEDRRPASNMDPYVVTSMIAETTILLKP

SEQ ID NO: 15912 - protein, 714 aa, Oryza sativa
MATATQAPTSPAAASGRGSVLPLLRGRPSTRVRLAVGRRPQTALRAQPPGAAEVVEQSVNTIRFLAVDSVEKAKSGHPGLPMGCAPLGHVLFDEFLRFNPKNPYWFDRDRFILSAGHGCMLQYALLHLAGYDSVTMDDLKAFRQWGSITPGHPENFETPGVEVTTGPLGQGFANAVGLALAEKHLAARFNKPDLKIVDHHTYVILGDGCQMEGVSNEASSLAGHWGLGKLIAFYDDNHISIDGSTGIAFTEDALARYEALGWHTIWVKNGNTGYDDIRAAIKEAKAVKDKPTLIKVTTTIGYGSPNKANTYSVHGSALGTKEVEATKNNLSWHHEPFHVPDEVKRHWSHHIDEGASLEAEWNKKIVEYEKKYRQEAAELKSIISGELPSGWDNSLPKYTPENPADATRNLSQQCLNALAKAIPGFLGGSADLATSNMTLLKMFGDFQKDTPEERNIRFGVREHAMGAISNGIALHSPGLIPYCATFFVFTDYMRAAIRLSALCGSRVIFVMTHDSIGLGEDGPTHQPVEQLFSLRAMPNILMLRPADGNETSGAYKIAVLNRQRPSVLALSRQKLQQLKGTSAEGVAKGGYIISDNSSGNKPDIILIGTGSELEIVEKAADELRKDGKTVRVVSLVCWELFEEQSEKYKESVFPSEVTSRISVEAGVTFGWEKYIGEKGKAIGVDRFGSSAPAGKIYKELGLTVENVIATAKSL

SEQ ID NO: 15913 - protein, 158 aa, Brassica napus
MERSSDPHHSTADLLSWPQIHHSSAANPSNQPSDDIGDVLGRGGRTTNKEAESLNKNVSYRKNCSGHKLKEMNGSDIFSDNGNVTNGDPTHTSRIHYHHDQDTQISFCGEENSVAATPKKPTTSSAEAAKLKELGRSVQTQADSKSKKKQLSSSKTKH

SEQ ID NO: 15914 - protein, 434 aa, Bacillus cereus ATCC 10987
MVVKFTKSEALHKEALEHIVGGVNSPSRSFKAVGGGAPVAMERGKGAYFWDVDGNKYIDYLAAYGPIITGHAHPHITKAITTAAENGVLYGTPTALEVKFAKMLKEAMPALDKVRFVNSGTEAVMTTIRVARAYTGRTKIMKFAGCYHGHSDLVLVAAGSGPSTLGTPDSAGVPQSIAQEVITVPFNNVETLKEALDKWGHEVAAILVEPIVGNFGIVEPKTGFLEKVNELVHEAGALVIYDEVITAFRFMYGGAQDLLGVTPDLTALGKVIGGGLPIGAYGGKKEIMEQVAPLGPAYQAGTMAGNPASMASGIACLEVLQQEGLYEKLDELGAMLEKGILEQAEKHNIDITLNRLKGALTVYFTTNTIEDYDAAQDTDGEMFGKFFKLMLQEGINLAPSKYEAWFLTTEHTKEDIEYTIEAVGRAFAALANNK

SEQ ID NO: 15915 - protein, 197 aa, Bacillus licheniformis ATCC 14580
MVNKDIVWHEASITKREYHEKNQHKSSIIWLTGLSGSGKSTIANAAARELFAQGYQVTVLDGDNVRHGLNKDLGFSDEDRKENIRRIGEVAKLFVEQGTIVITAFISPFKEDRGLVRQLVEEDEFHEVYVKCDLATCEERDPKGLYKKARNGEIPFFTGIDSPYEEPETPELVLDTGAHNREECKNQLVQYVKDQTK

SEQ ID NO: 15916 - protein, 134 aa, Candida albicans
MYYTSYRSQVFGVARIFASFNDTFVHVTDLSGKETIARVTGGMKVKADRDESSPYAAMLAAQDVAAKCKEVGITAVHIKLRATGGTKTKTPGPGGQSALRALARSGLRIGRIEDVTPVPSDSTRRKGGRRGRRL

SEQ ID NO: 15917 - protein, 128 aa, Zea mays
MSLITWSSELASRLSVTTGPARRSRTATCSAASRRERRKRRMVSNRESARRSRVRKQKQLSELWAQVVHLRGTNRQHLDQLNRVIRDCDRVLLENSRLRDERTRLQQQLEELPVETTETGGMSRPPDS

SEQ ID NO: 15918 - protein, 388 aa, Trichodesmium erythraeum IMS101
MSANKQLIKLAKILDELSQLNATGKLLLNSLPKERQINLSYGRILYSTSEIHRVRRWERRVKLYCPKWNPITSQIQLQLEPYKPWEYLLLYDGISKNQITVAQAKAVIRTVTLEILFSISYYPDLIHKWEENPGSKSELSLGLSLSYSEIKPIFAKVAQIQYLSRKAGFENLNLNLVPVPKKPVASEALSGFGKYLQGDLTLWDIVCKLQKSILVVTHTLLPLVKKGLVQLQTISDLPGPNFTSSLAKTNSHKNRDKTIPKKKPLIACIDDSKVVAETLRKIVEPAGYNLIGIQDPIKGFVKIAEHKPDLIFLDLEMPNANGYNVYQFLHNTPAFKKIPVIILTSKNNLIDRSRAKLIGTADFLNKPPKPEAILKIIKKHLSVTPKFN

SEQ ID NO: 15919 - protein, 266 aa, Brassica napus
  misc_feature (150)..(150): Xaa can be any naturally occurring amino acid
  unsure (1)..(266): unsure at all Xaa locations
RPTRPKRWSLQGMTALVTGGASGIGYAIVEELASFGARIHVCDISKTLLNQSLSEWEKKGFQVSGSVCDVTSRPEGETLIQKVSSLFDGKLNIFVNNVGVLRGKPTTEYGADDFAFHISTNLESAYHFCQLSHPLLKASGYGSIVFLSSXVAGVVSTSGGSIYSLTKGALNQLARNLACEWAEDSIRANAVAPNIIKTPLALPYLEDVGSREGLFRRTPLGRAGDPHEVASVVVFLCLPAASYITGQTICVDGGLTINGFSYQPHA

SEQ ID NO: 15920 - protein, 450 aa, Borrelia garinii
QMDSGESIIENILKNEGLVIENYYNLVNTIYSRMEREEFFKREKDRDKESNPDYYNKKKRIASFYKIPLKPVQDRLISYVDNKHRVYELGGDIFEKNLKKERLALKELLRDIPLYQDELRIFSDDYIDSANKIKDLQRQQRIILSRLKIEKIRDLRVLGRDLTIAEKRIEIEKSLKLKEDAIKEQITEAQLAQKELERIEMYYEYPMDKIISMSEEIAKGKQMMQHAKDQLIKANLRLVVSIAKKYANRGLHFFDLVQEGNIGLIKAVEKFEYKRGFKFSTYATWWIRQAITRSISDQARTIRVPVHMIEQINRLNRETRYLVQVLGKDPTDEELSDRLGWELKKVKTVKSVSREPVSLETPIGEEEDSVLSDFIEDKAIKNPANHTSFVVLQDQIRAILGTLPEREQEVVKMRFGLEDGYSLTLEEVGLHFNVTRERIRQIESKALRRL

SEQ ID NO: 15921 - protein, 450 aa, Salmonella typhimurium
MPTHLVWFRRDLRLQDNLAAAACRDASARVLALYISTPQWQAHDMAPRQAAFISAQLALQTALAEKGIPLLFHEVAFNASIETVKNVCRQHDVSHFYNYQYEFNERQRDRAVEKLPSVICEGFDDSVILAPGAMTGNHEMYKVFTPFKNAWLRLKEDIPPCVPAPKIRVSGLSTPLTPVSLNYPQQEFDALFPVEENAVIAQLRQFCAQADEYALRRDFPAVDGTSRLASLATGGLSPRQCLHRLLAQPQALDGGPGSVWLNELIWEFYRHLMTWYPALCKHQPFRWTKRVAWQENPHYFQAWQGETGYPIVDAAMRQLNATGMHNRLRMITASFLVKDLLIWRLGERYFMSQLIDGDLAANGGWQWAASTGTDAAPYFRFNPTTQGERFDRDGEFIRQLPALRDIPGKAIHEPWRWAKAGVVLDYPRPIVEHKQARATLSAYEAARKGA

SEQ ID NO: 15922 - protein, 636 aa, Trichodesmium erythraeum IMS101
MTTARATFPINIESYKPLSLDPTNSILTDEQRQTLKANIQLCRDMIVFFTATGAARGVGGHTGGPYDTVPEVMILDAFFRGAAEKFVPIFFDEAGHRVATQYLMAAIQGDLPVENLVNYRAANSHLPGHPELGLTPGVKFSSGRLGHMWPYINGVAMANPNKAVFCLGSDGSQQEGNDAEAARMAVAQNLNIKLLIDDNDVTIAGHPSNYLKGYDLNKTLTGHGIKVLEGDGEDLDSLYQRMCQAVTTAGPIAIVNKRKMCVGIEGLEGSIHGHDVIPLKLAIGYLKDRGITEAVKYLESIEKPLQSYTYLGVSDKLGSNRNVFGDTVVSIVSGMSETERSNHLFIDSDLEGSCGLKQIRTAFPDRFVSGGIMERGNFSAAAGFGMEPGKQGIFGTFSAFLEMCISEITMARLNKSNILCHFSHAGIDDMADNTCHFGLNNMFADNGLDDAYETRLYFPADANQMKACVEAVFTQSGMRFIFSTRSKVPILLDSNGKDFFGEDYKFIPGKDEVIREGTAGYIVSFGDALYRSLDALERLRLEGIDVGLINKPTLNVIDEEMLRKVGTAPFVLVVEAFNRRTGLGSRFGSWLLERGMSPKFAYIATHKEGCGGLWEQFPHQGIGPEGIMSKVKELVK

SEQ ID NO: 15923 - protein, 450 aa, Borrelia garinii
QMDSGESIIENILKNEGLVIENYYNLINTIYSRMEREEFFKREKDKDKESNPDYYNKKKRIASFYKVPLKPIQDRLISYVDNKHRVYELGGDILEKNLKSERLALKELLRNVPLYQDELRIFSDDYIDSANKIKDLQRQQRIILSRLKIEKIRDLRVLGRDLTIAEKRIEIEKSLKLKEDAIKEQITEAQLAQKELERIEMYYEYPMDKIISMSEEIAKGKQMMQHAKDQLIKANLRLVVSIAKKYANRGLHFFDLVQEGNIGLIKAVEKFEYKRGFKFSTYATWWIRQAITRSISDQARTIRVPVHMIEQINRLNRETRYLVQVLGKDPTDEELSDRLGWELKKVKTVKSVSREPVSLETPIGEEEDSVLSDFIEDKAIKNPANHTSFVVLQDQIRSILGTLPEREQEVVKMRFGLEDGYSLTLEEVGLHFNVTRERIRQIESKALRRL

SEQ ID NO: 15924 - protein, 444 aa, Microbotryum violaceum
MREIVSLQAGQCGNQIGTKFWEVVSEEHGIDGSGQYTGTTDLQLERINVYYNEAGTGKYVPRAVLVDLEPGTMDVIQGGPLGGLFRPDNFVFGQSGAGNNWAKGHYTEGAELVDQVLDVVRKEAEGTDCLQGFQLTHSLGGGTGSGMGTLLVSKIREEFPDRMMATFSVVPSPKVSDTVVEPYNAVLSVHQLVENSDETFCIDNEALYDICFRTLKLSAPTHGDLNGLVSIVMSGITTCLRFPGQLNSDLRKLAVNMVPFPRLHFFTVGFAPLTARGSSQYRAVTVAELTAQMFDAKNMMAASDPRHGRYLTVAAYFRSKVSMKEVEDQMVSIQQKNSQYFVEWIPNNVQSAHCEVAPRGLKMSVTFIGNNTSIQELFKRVGDHFDVMFRRRAFLHWYTGEGMDEMEFSEASANMHDLIAEYTQYQEAGVDDEEEVAYAEEPQE

SEQ ID NO: 15925 - protein, 450 aa, Borrelia garinii
QMDSGESIIENILKNEGLVIENYYNLINTIYSRMEREEFFKREKDKDKESNPDYYNKKKRIASFYKIPLKPIQDRLISYVDNKHRVYELGGDIFEKNLKSERLALKELLRNVPLYQDELRIFSDDYIDSANKIKDLQRQQRIILSRLKIEKIRDLRVLGRDLTIAEKRIEIEKSLKLKEDAIKEQITEAQLAQKELERIEMYYEYPMDKIISMSEEIAKGKQMMQHAKDQLIKANLRLVVSIAKKYANRGLHFFDLVQEGNIGLIKAVEKFEYKRGFKFSTYATWWIRQAITRSISDQARTIRVPVHMIEQINRLNRETRYLVQVLGKDPTDEELSDRLGWELKKVKTVKSVSREPVSLETPIGEEEDSVLSDFIEDKAIKNPANHTSFVVLQDQIRSILGTLPEREQEVVKMRFGLEDGYSLTLEEVGLHFNVTRERIRQIESKALRRL

SEQ ID NO: 15926 - protein, 558 aa, Bacillus sp.
MFLEAVYHRPRKNWSYAYNGTTVHLRIRTKKDDMTAVYALAGDKYMWDHTMEYVPMTKLATDELFDYWECEVTPPYRRVKYGFLLQQGHEKRWMTEYDFLTEPPRNPDRLFEYPFINPVDVFQPPAWVKDAIFYQIFPERFANGDTRNDPEGTLPWGSADPTPSCFFGGDLQGVIDHLDHLSKLGVNAVYFTPLFKATTNHKYDTEDYFQIDPQFGDKDTLKKLVDLCHERGIRVLLDAVFNHSGRTFPPFVDVLKNGEKSKYKDWFHIRSLPLEVVDGIPTYDTFAFEPLMPKLNTEHPDVKEYLLKAAEYWIRETGIDGWRLDVANEVSHQFWREFRRVVKQANPDAYILGEVWHESSIWLEGDQFDAVMNYPFTNAVLDFFIHQIADAEKFSFMLGKQLAGYPRQASEVMFNLLDSHDTARLLTQADGDKRKMKLAVLFQFTYFGTPCIYYGDEVGLDGGHDPGCRKCMEWDETKHDKDLFAFYQTVIRLRQAHAALRTGTFKFLTAEKNSRQIAYLREDDQDTILVVMNNDKAGHTLRCLSGMHSGPICGTTMS

SEQ ID NO: 15927 - protein, 554 aa, Bacillus anthracis str. 'Ames Ancestor'
MNKTWWKEAVAYQIYPRSFMDSNGDGIGDLQGIIAKLDYLKDLGIDVIWICPMYKSPNDDNGYDISDYQDIMDEFGTMEDFDALLDEVHKRDMKLIIDLVINHTSDEHPWFIESRSSKDNPKRDWYIWHDGKDGAEPNNWESIFNGSAWEYDEVTGQYYLHLFSRKQPDLNWENKEVREVLYDTVNWWLDKGIDGFRVDAISHIKKEDGFKDMPNPKGLKYVPSFDKHMNVDGIQPLLEELKENTFSKYDIMTVGEANGVKIEDAELWVGEEQGKFNMVFQFEHLSLWDAEKKKDLDVVGLKKVLTKWQKGLENKGWNALYIENHDKPRIVSTWGDDKQYWRESATALGAMYFFMHGTPFIYQGQEIGMTNVQFPNIEDYDDVAIKNLYREKIAEGVSHQDMMEIIWASCRDNSRTPMHWDDEINAGFTTGTPWFGMNQNYKEINVAKQKNEENSIFNFYKKMIALKKEHDVLNYGTYDLLLEDDPQIYAYTRTLNDEKIVVISNISKEEAVYNEDLFALERKRLLLNNYEVAEHEQLTTITLKPYETRVYRIS

SEQ ID NO: 15928 - protein, 450 aa, Borrelia garinii
QMDSGESIIENILKNEGLVIENYYNLINTIYSRMEREEFFKREKDKDKESNPDYYNKKKRIASFYKVPLKPIQDRLIRYVDNKHRVYELGGDIFEKNLKSERLALKELLRNVPLYQDELRIFSDDYIDSANKIKDLQRQQRIILSRLKIEKIRDLRVLGRDLTIAEKRIEIEKSLKLKEDAIKEQITEAQLAQKELERIEMYYEYPMDKIISMSEEIAKGKQMMQHAKDQLIKANLRLVVSIAKKYANRGLHFFDLVQEGNIGLIKAVEKFEYKRGFKFSTYATWWIRQAITRSISDQARTIRVPVHMIEQINRLNRETRYLVQVLGKDPTDEELSDRLGWELKKVKTVKSVSREPVSLETPIGEEEDSVLSDFIEDKAIKNPANHTSFVVLQDQIRSILGTLPEREQEVVKMRFGLEDGYSLTLEEVGLHFNVTRERIRQIESKALRRL

SEQ ID NO: 15929 - protein, 819 aa, GIBBERELLA ZEAE PH-1
MESTDIPIWGPMSPLSSIVSSLDDLTPADSDIASDADSDAEVQKGTSTSKDVDSQVNSEGTVEWLATTRERRSTAGNRMKSMLANEEPDSDLELLFAEDENDQGFSEVDENGSDVQMDSSDDEDDNGNNDDDLEGEKELEKQAKERRSAQRKRKAQEAIPAKFRKKVRIDPTTRTPAAPMRPAPRPKKKSERTSWLPSAADLPTRASSRQTTRLSKEQLHQQMVEREERRVKQLAQMQKKAAKLEAMKKPPMTQEERLREAAIVEKRNSKSLNRWEEAEKQREEERRAKLAALHNRTLKGPVITFWSGIGEWMGRHMVIEEPAKEKRKRGEKAKGKDMEKMTTVEEQKPKGQTALGDATSNTKEQLAQSQPPVTASPTPPVASESKETKASDPIKGDDCISKPRDSSSTAKDGTTMLKTEDANPSLAMPPPPHPPPTPPNGLAAPTLPPSKTISPLSPPASGLAAPSPPPPTPVGPTTTISFAPPTSGLSRPPDSKPSGVLAAPILAPPLGIGGNGAVPPMMGFGNPKSNVLAPPNTSQSAMPPTLSATAPTKNASSTIPSSQANPSTTATPASSTTNLRPTVNSSTLQVTSSTPNNSNIAQALESQPQPSTGARNAIVFQSFDENALKDRSIQTQVIFGRKMNRLSKPSPAPLCVITNHPARYRDPRTGLHYYNAYAYQEIQRLTRGEYQWSHILDAWVGCGTYAARGVPERFLNPDAKGPEKKPISHEGVKQNEATIDTQNRSPEIKAPEVTSEIRPSGEKMTGIGQGSSTPPNIEPSKATQPSTASPAVIGSANATNPAAATTPTPVLTNSTKSNP

SEQ ID NO: 15930 - protein, 141 aa, Brassica napus
MRKRERENPCSLCGHYHKYEEGEVCGICGHRMPDPSDVPAPQVHVSAFPSEILPDFLFLGSYDNASRSELLKTQGISRILNTVPMCQNLYRNSFTYHGLSDEKVLQFDDAIKFLDQCEKDKARVLVHCMSGKSRSPAVVIA

SEQ ID NO: 15931 - protein, 421 aa, Burkholderia fungorum LB400
MDTPARLNDLQRTTLAIVLAGGRGTRLGPLTNKRVKPAVHFGGKYRIIDFALSNCLNSGIRRIAVVTQYKAHSLLRHLQRGWSFLRGEFGEFIDLWPAQQRVEGAHWYRGTADAVFQNLDIIRSIRPKYVVVLAGDHIYKMDYTRMIADHAESGADCTVGCIEVPRMDAVAFGVMHVDENRRVTGFVEKPADPPAIPGRPDTALASMGIYVFSADYLYSLLEENISSVDTDHDFGKDILPRVVTQGTAIAHPFSMSCVSSDPNVEPYWRDVGTIDAYWAANLDLASTIPTLDLYDRSWPIWTYQEQLPPAKFVRDMKGLQGSGNNLIVCGGCVISGSQISRSVLSSNVKVSSFCNINEAVLLPQVTVGASCRLQKVVIDRGCAIPDGTVIGEDPVSDAERFYRTDDGVVLVTPEALRQMPK

SEQ ID NO: 15932 - protein, 147 aa, GIBBERELLA ZEAE PH-1
MSNNKFESQASTNYKEAFALFDKRGNGRVTVDSLGDLLRACGQNPTLSEIQDLEKNVGGEFDFETFQRVLNRPGGFRDPGEPEEYCRGFQVFDKDMTGFIGVGQLKYILTNLGEKMTDEEVDELLKAVDTSSGQVNYTDLVRTILAN

SEQ ID NO: 15933 - protein, 158 aa, Lycopersicon esculentum
MDLRLLGIDNTPLFHTLHHMMEAAGEDSDKSVNAPSRNYVRDAKAMAATPADVKEYPNSYVFVVDMPGLKSGDIKVQVEEDNVLLISGERKREEEKEGAKFIRMERRVGKFMRKFSLPENANTDAISAVCQDGVLTVTVQKLPPPEPKKPKTIEVKVA

SEQ ID NO: 15934 - protein, 509 aa, Nicotiana tabacum
MEGTNLTTYAAVFLGTLFLLFLSKLLRQRKLNLPPGPKPWPIIGNLNLIGNLPYRSIHELSLKYGPVMQLQFGSFPVVVGSSVEMAKIFLKSMDINFVGRPKTAAGKYTTYNYSDITWSPYGPYWRQARRMCLTELFSTKCLDSYEYIRAEELHSLLHNLNKISGKPIVLKDYLTTLSLNVISRMVLGKRYLDESENSFVNPEEFKKMLDELFLLNGVLNIGDSIPWIDFMDLQGYVKRMKVVSKKFDKFLEHVIDEHNIRRNGVENYVAKDMEDVLLQLADDPKLEVKLERHGVKAFTQDMLAGGTESSAVTVEWAISELSKKPEIFKKATEELDRVIGQNRWVQEKDIPNLPYIEAIVKETMRLHPVAPMKATECRENSKVAGYDVQKGTRVLVSVWTIGRDPTLWDEPEVFKPERFHEKASIDVKGHDYELLPFGVGRRMCPGYSLGLKVIQASLANLLHGFNWSLPDNMTPEDLNMDEIFGLSTPKKFPLATVIEPRLSPKLYSV

SEQ ID NO: 15935 - protein, 486 aa, Burkholderia fungorum LB400
MTIRALHVASELYPLLKTGGLADVAGALPPALIERGADVRVLLPGFPAVVAGLTELAPVAQLGRQFDAPGVTLERGTLASSGLIVYVIRASTLYDRPGNPYLNDEHVPYGDNAQRFALLGWVAAQLAQHLDPAWSPQIVHAHDWHAGLAPAYLKAAERQHGRSFARSVFTVHNLAYQGVFPAPQFGQLGLPADYFSMHGVEFYGQLSFLKAGLYFSDRITTVSPTYAREIQTLAQGGGLDGLLRHRSHDLSGILNGVDYTVWNPASDALLEDHYSATRLAGKLACKEALQKRFGLAQKSDALLFGVVSRLTEQKGLDLLLEAVPEIIKHGGQLVVFGTGDPALENGLKRVAHAHPEAVAVELGFDEKLAHTIVAGSDVIAVPSRFEPCGLTQLYALAYGSLPLVHCVGGLADTVVDASLENLADDLATGFMFERFELKGIGAAIRRAFALRERRTEWKATQRRAMRQDFGWGASAERYLALYRELA

SEQ ID NO: 15936 - protein, 1353 aa, Thermosynechococcus elongatus BP-1
MPAAPLPANEPERQRALEQYQVLDTPPEPIFDEITNLAAAICETPIALISLVDRQRQWFKSKVGIDACETPRNVAFCAHVILQDQLVIVPDARLDPRFADNPFVTGPPYIRFYAGMPLVTPQGYGIGTLCVVDYQPRQLNPVQQQTLRTLARQVINELEIRHHLEVTQQQLAYIQQMSSLQEAVFNSSNHAIIATRTDGIITLMNRAAQQWLGYPASELVGKATPERFHDPQEMERYAQILSAQLGEPIPAGFETLVARARRGLADEQEWTFVRRDGSCFPVSLSVTPMHDRQGQLIGFLESAVDITDKKQIEAALRLRERAIIASTNGIVITDYRQPDNPVIYVNPAFERMTGYRATEVIGKNCRFLQGSDRHQPGATAIRNAIKKGQSCRVVLRNYRKNGQLFWNELAISPIYNEFGEITHYIGIQSDVTERQRAQLFLQQQVKRTLLLNRITEEIRQQIEREHICRTAVQQVGVTLNVSRCLLFVYQENAPTPMELVAEYCGPGVPSVNECDLDLTQMRAPFLASVFASDEVFSCDDVQNDDRLAPLHAYCEALRVKSALIVRTAYRNQANGLLILHQCDRQRRWTDAIQSLLKSVAAQVGIGLAQVQLLEQETRQRQQLQQQMQRALLLNQITEQIRQSLDTETVFATTVTQIGQAFGVNRCLIHRYDPGPPPHIPDVAEYLQPGYASMRGISIPVENNPHALAVLSGDTAVVSNDVTQDPLLANAMHLCHQFQIQSMLAIRTSYKGVPNGIIGLHQCDRQRQWTPEEIELLEAVAAQVGIAIAQAELLRHEQQQRQLLAQQNQELEQARLQAELANRAKSEFLATMSHEIRTPMNAVLGFTNLLLDTPLNEQQRDFLQTLHQAGEALLTIINDILDFSKIESGKLVLEQQPFDVRECVEDVLSLLASKAQEKELELLYTCTPETPAQIKGDVTRLRQILVNLVGNGIKFTHEGQVAVHVGVLKREGKDFLQFQVQDTGIGIPRDRLDRLFKPFSQVDASTTREYGGTGLGLVISKRLCELMGGDMSVESTEGQGTTFTFTILAEGQKPYVPPKVHPALEGKRVLVIDDNAASRENLCTLLHNWGMVPIGYSDPRLVLEAAPPWDLAVIDLNMPQMTGLQLAERLQSEPNFNQQPMILLTPLSWLETASRKELITAHVPKPIRPLTLRQTLIRTLSSESATQPALTKTGIDLNLGNRFPLRILLAEDNAVNQKVALHILKRMGYRADVAANGLEVLEALQQRPYDVILMDVQMPKMDGLETTERICAQWPPSQRPWIIAMTANALAGDRERCFAAGMDDYISKPIKIEALAAALNRCRCLNPKSTYPQLCDQINIDSDQGHQSATESMT

SEQ ID NO: 15937 - protein, 214 aa, Zea mays
MASSASRFIKCVTVGDGAVGKTCMLICYTSNKFPTDYIPTVFDNFSANVVVDGTTVNLGLWDTAGQEDYNRLRPLSYRGADVFVLAFSLVSRASYENIMKKWIPELQHYARGVPVVLVGTKFDLREDKHYLMDHPGLVPVTTAQGEELRRQIGAMYYIECSSKTQQNVKAVFDAAIKVVIQPPTKLREKKKKKSRKGCSMVNILSGRKMLCFKS

SEQ ID NO: 15938 - protein, 478 aa, Zea mays
MQAAAASVKSSTTAAAAAATCKAGFKPLHLPPLPAAGSRPLSLSVSARPLYRQDHVLATTVAMAAAGRSDRAASPAPPSATADGARPVVEVAAPAETARRAKIGVYFATWWALNVIFNIYNKKVLNAFPYPWLTSTLSLAAGSAIMLASWATRIAEAPQTDLDFWKALTPSSRGRGRPAEQVAIAHTIGHVAATVSMAKVAVSFTHIIKSGEPAFSVLVSRFFLGEHFPAPVYFSLLPIIGGCALAAVTELNFNMVGFMGAMISNLAFVVRTIFSKKGMKGKSVSGMNYYACLSIMSLVILLPFAVAMEGPKLWAAGWQQAVAEIGPNFVWWVAAQSVFYHLYNQVSYMSLDEISPLTFSIGNTMKRISVIVASIIIFQTPVQPINALGAAIAILGTFIYSQAQGSMAVPDGKRRAICTLRSSRWIQRWSVADLSLCALADCSFGSAHFCCSAWAFGRADMPSSQAGATFGALWAVAF

SEQ ID NO: 15939 - protein, 498 aa, Mycoplasma penetrans HF-2
MKMIKKTKITATLGPSITGKIFTLADFNKPENKGVIETAKKNLAALFDAGVNVVRFNFSHGDYEEQTIRLNLVREVAKEKGVNISTMLDTKGPEIRVYKTSEKEVEIKSDSKVRIYTTKKEIGTSEKFSVLDSTGTYNMAKDVQPGNTIFVDDGKLKLEVISSNVEEGIIETIARNTWILRENKRINLPDSNYSIPFMSDKDRNDIIFAIKNKFDYIAASFVNTGDNVREIKKILKEHGGEHIQIISKIETMTGIKSLDDIIDESDSIMVARGDLGLEVPYYDVPTYEKYIIKDCRHKGKTVIVATQMLDSLETKIQPTRAEVTDVFFAVERGTDCTMLSGETANGMYPINAVEVMAKIDVSSENFFDYGRAIDVYFKETPFMKEKVGTLATTIATLVAPKRVIDNHGFDYSSIVVFGNDTRLIQALSNIRCAAPIFFVTDKKEYATRFGLNYGVFVKVVDNVEHAIANKTEIIDAINSQLPEVKKTVVVINDSIYKH

SEQ ID NO: 15940 - protein, 585 aa, Photobacterium profundum SS9
MTQSTEQSTLDTYKRLWPYISFYKAGLSVAVVALIINALGDTLMLSMIKPLLDESFGGLDNIESDFLSMMPYYLVGLMILRGASGFVSTYCLSWVSGKVVMNLRRGLFNHFMKMPVSFFDKESSGALLSRITYDSEQVASATSSALVSMVREGASIIGLMALMFWNSWQLSAILLVIAPVVAFSIRLVSKRFRKISKNMQDAMGSVTSSAEQMLKGHKVVLSYGGQEVEKQRFDSVSNNMRQQTMKLVSAQAIANPVIQVIASFALVVVLVLANSEALRAELTPGTFAVVFGAMFGLMRPLKALTNVTSQFQRGMAACQTLFELMDLEAEEDNGKHKIARVNGDIQVKNVTFTYPTKDTPALRNVSFDLPAGKTLALVGRSGSGKSTIANLLTRFYDIDSGELILDGREVKDYQLSNLRDQVAVVSQNVHLFNDTIANNIAYASGDSFSRADIEKAAELAYAMDFIKGMPKGLDTMIGENGVSLSGGQRQRLAIARALLRNAPVLILDEATSALDTESERAIQSALEELQKDRTVLVIAHRLSTIEGADQILVVDDGEIIERGTHGELIKHDGAYAQLHRIQFGD

SEQ ID NO: 15941 - protein, 576 aa, Pichia angusta
MKVATLFFLASSVCVLGDPQFVKLEASVLRGSTYKDSQKGAKPFMLEKRADDGSVTMELQNAQSFYQVEIEIGSDKQKVGVLIDTGSSDLWVMNSNNSYCSSSSTKKLKRDGPADALQKGRDLSDLYNFNSPNEDNNAKGFLGGWGDLTTVETATQDETQTALAAQATVDCSLYGTFNPSTSNSFHNNGTTFEISYADRTFARGTWGYDDVTFNGVTVNDLSLAVADETDSSTGVFGIGLRELETTYSGGGPQHYIYDNLPFKMVDQGLINRAAYSVYLNSTESSTASILFGAVDQSKYTGSLGLLPIINTAASYGYQKPLRLQITLSAITVSDSRGQQASIGSGAAAALLDTGTTLTYAPSEIVEKLAETLGFDYSSSVGAYVARCRDVDSYAVNFDFQGKVIEAPLSSFLIALQTNSGEVSSYCALGIFSSGDESFTLGDTFLRNAYFVADLEGYQIAIANVNLNPGAEQIEVISGNSIPSASSVSDYSNTWGASATALDTDRPTTLGSVTAVGDERVTSTKKVSSVKTSTSSGSGSTSESSTSSSHSSNGPRTVGFSLCAVLCAFLISILVVC

SEQ ID NO: 15942 - protein, 104 aa, Mesorhizobium sp. BNC1
MKFRPLHDRLLVRRIEAEEKTAGGVIIPDTAKEKPQEGEVLAVGPGVRDEKGELIALEVKVGDRILFGKWSGTEIRLQGEDLLIMKESDVLGILDKEAEVKKAA

SEQ ID NO: 15943 - protein, 303 aa, Cytophaga hutchinsonii
MEHNHTHHHDHSIILTHVNTAFIVGIILNLLFVVIEAIVGLSVHSLSLLSDAGHNLADVASLALSLLAFRLLKIKSNESYTYGYRKTSILVALFNSMILIASIGAIFYEAAHRFFNPEPLPGQTIAVVAGIGILINAATALMFLRHKEKDLNVKSAYLHLMSDALVSLGLVIGGIIMFYTQWFWIDSVLSMIVAIIILFSTWKLLKDSLRLSLDGVPEYIHIHEIKETALKIAGVKDLHHIHAWAISTTENALTAHLVLDKNTTIADENIIKRELKHELEHKNIHHVTLETERENDPCGAEVC

SEQ ID NO: 15944 - protein, 542 aa, Mesorhizobium sp. BNC1
MAAKDVKFHSDARERMLRGVDVLANAVKVTLGPKGRNVVIDKSFGAPRITKDGVTVAKEIELEDKFENMGAQMVREVASKTNDAAGDGTTTATVLTQAIVKEGAKAVASGMNPMDLKRGIDKAVEAIVEELKKNARKVTKNDEIAQVGTISANGDQEIGRFLAQAMEKVGNEGVITVEEAKTAETELEVVEGMQFDRGYLSPYFITNQEKMRVELDEPYLLIHEKKLASLQPLLPVLEAVVQSGKPLLIIAEDVEGEALATLVVNKLRGGLKVAAVKAPGFGDRRKAMLQDIAILTGGTAISEDLGIKLENVTLEMLGRAKKVVIEKENTTIVDGAGSKDEIQGRVNQIKAQIEETTSDYDREKLQERLAKLAGGVAVIRVGGATEVEVKERKDRVDDAMHATRAAVEEGLLPGGGVALLRAAKALDNVTGENEDQKVGISIVRRAIEAPIRQIAENAGAEGSIIVGRVREKPDFGYGWNAQTGEYGDLYQMGVIDPVKVVRAALQDAASVAGLLITTEAMVADRPKKETAPAMPAGAGMDF

SEQ ID NO: 15945 - protein, 213 aa, Triticum aestivum
MEDERSTQSYQGGEAAEQVEVTDRGLLGNLLGKKKAEEDKEKKEEELVTGMEKVSVEEPEVKKEEHVDGEKKETLFSKLHRSSSSSSSSSDEEEEEVIDDNGEVIKRKKKKGLKEKLQEKLHGHKDTEGEHVTGLPAPAAPASVQTHHDTDVVVEKIDGDVKTEATPAVPEEEKKGFLEKIKENLPGRPLEITSPAACRSTIWESSQRVGCIA

SEQ ID NO: 15946 - protein, 717 aa, Oryza sativa
MAAVAPPQVPVVAPAPAAAAAPPAPAPAAAATAAPVADQTTDLLQKLSLDSQPKAVDAATEPAGAKKQGPAASQPLSVAIPPERSITPVLQDFMDPNMFYLPAYYYGELCWFAKLPGYDGSVSEWDDYPRYVNPDGVEITPAVYGDIYGYGYAPYGAYSPASSPVPTVDGQMFGQHYQYPTSYYQPPTPVPSTTQGDLQPSANPDKPTAKADPAKTTTNGAPNGTVHSNSGTVPLGSSQQNSSLTPDGTYRAPLLGGVPSAGYLDSTYGYDSTGAHFAWYDGSAYTNGQQRTTTTNHMSSSTFSNGSSARTQNKGSTPQQMGMNNRRPTTTTGSAAPTYPNRMYPSTRSYSQYGNSYKTGLSYSTNGYGSNGYGSNGYDSRLYGRWGLSMDNRYKPRGRGNGYYGFGNESQDGTIELNRGPRSGRFKNQKLFGHTVTIAVKGQSLPTSDSMNATDVPDRTQFNRDDFPVQYDDAKFFVIKSYSEDDIHKSIKYNVWASTTNGNKKLDAAYQEAQAKSSKCPIFLFFSVNTSGQFVGVAEMTGAVDFEKTLEYWQQDKWNGSLSLKWHIVKDVPNNILKHIILENNENKPVTNSRDTQEVNLDQGIQMLKIFKEHVSKTSILDDFAFYENRQKLMQEKRVKQQQIQKQVWDSRAPSSVTGEKQQDAATAKPKLPNGVNGELKVPAENGTAPVVTYAAKVAQTAATEKPALANGTVKAS

SEQ ID NO: 15947 - protein, 409 aa, Glycine max
MDWGLAISSHPKPYSVTTGGNLWRSKHTTKNIYFASSWISKASRHKRETQIEHNVLRFQQPSLDHHYKCIRGGSTYQECNRKFVVKAISKQPLGFEAHASNPKNILDSVKNVLSAFYWFSYPYTMIGITLCAFSSSLLAVEKLSDISLSFLIGVLQGVLPQLFIEIYLCGVNQLYDLEIDKINKPHLPMASGQFSFKTGVIISAAFLALSFGFTWITGSWPLICNLVVIASSWTAYSIDVPLLRWKRYPFVAAMCMISTWALALPISYFHHMQTVVLKRPIGFPRSLGFLVAFMTFYSLGLALSKDIPDVEGDKEHGIDSFAVRLGQKRAFWICVSFFEMAFGVGILAGASCSHFWTKIFTGMGNAVLASILWYQAKSVDLSDKASTGSFYMFIWKLLYAGFFLMALIR

SEQ ID NO: 15948 - protein, 354 aa, Bradyrhizobium japonicum USDA 110
MGVRPMTKPFPMNAWYAAAWDAEVKPALLPRTICGKHVVMYRKADGAVAALEDACWHRLVPLSKGRLEGDTVVCGYHGLKYNAQGRCTFMPSQETINPSACVRAYPVVERHRYIWLWMGDPALADPALVPDMHWNHDPAWAGDGKTIRVNCDYRLVLDNLMDLTHETFVHGSSIGNDAVAEAPFDVTHGEKTVTVTRWMRNIEPPPFWAKQLGKPGLVDRWQIIRFEAPCTIAIDVGVAPTGTGAPEGDRSQGVNGFVLNTITPETEKTCHYFWAFVRNYQIGEQRITTEIREGVSGIFHEDELILEAQQRAMDENPDRVFYNLNIDAGAMWTRKLIDKMVAKENAPQHLQAAE

SEQ ID NO: 15949 - protein, 450 aa, Borrelia garinii
QMDSGESIIENILKNEGLVIENYYNLINTIYSRMEREEFFKREKDKDKESNPDYYNKKKRIASFYKVPLKPIQDRLISYVDNKHRVYELGGDIFEKNLKSERLALKELLRNVPLYQDELRIFSDDYIDSANKIKDLQRQQRIILSRLKIEKIRDLRVLGRDLTIAEKRIEIEKSLKLKEDAIKEQITEAQLAQKELERIEMYYEYPMDKIISMSEEIAKGKQMMQHAKDQLIKANLRLVVSIAKKYANRGLHFFDLVQEGNIGLIKAVEKFEYKRGFKFSTYATWWIRQAITRSISDQARTIRVPVHMIEQINRLNRETRYLVQVLGKDPTDEELSDRLGWELKKVKTVKSVSREPVSLETPIGEEEDSVLSDFIEDKAIKNPANHTSFVVLQDQIRSILGTLPEREQEVVKMRFGLEDGYSLTLEEVGLHFNVTRERIRQIESKALRRL

SEQ ID NO: 15950 - protein, 579 aa, Geobacter metallireducens GS-15
MAKKSSDEVKQQLVDIGKEKGFLTYDEVNDVLPPDFSTEQIDDVMSMFGEMDIDLVDSSQKVKIPKMKLDLEEEEEMEGEQEEMEYEPGVLGRTSDPVRMYLREMGSVSLLTREGEVEIAKRIEEGERDIARVILTTPITVKEIIALGDKLRKFQISAAEISKEVEEEELEEDEEDVQANRVLSIIDEIRDLDVRMEAIAEELDAEGAAAKRQKELHAEQHEIREKFADLVKSLRLKDRHITKIAQRLKELSGKVEAILTEIAAVETEAGINGERLKEIVAKGDEKAKGLKVNLEDAQKLDKKIRAAEKKLKKLEHESGFKAQELSDALHAIDRGEAKAKLAKSELVEANLRLVVSIAKKYTNRGLQFLDLIQEGNIGLMKAVDKFEYQRGYKFSTYATWWIRQAITRAIADQARTIRIPVHMIETINKLIRTSRQLVQEIGREPSPEEIAERMNLPLDKVRKVLKIAKEPISLETPIGEEEDSHLGDFIEDKGVVSPLEAVIKANLSEQTSRVLSTLTPREEKVLRMRFGIGEKSDHTLEEVGQDFEVTRERIRQIEAKALRKLRHPSRAKKLKSFVE

SEQ ID NO: 15951 - protein, 214 aa, Glycine max
MASSPSSSSSSSSSMVSNPVPNTDRSRDAKRRKKKAQLRQQLRQEDQSNPKWKSQAQQQIYSSKLRQALARVNLGSSAPPRRGKAVRDAADRVLAVTAKGRTRWSRAILTNRLKLKFTKHKRQRVTITTPPTRSKKPRVSVYRLKGKGSPGVQRKVRFLGRLVPGCRKEPLPVILEEAIDYIPALEMQVRAMSALFNLLSGGAAASTSAPPSSS

SEQ ID NO: 15952 - protein, 450 aa, Borrelia japonica
QMDSGESIIENILKNEGLVIENYYNLVNTIYSRMEREEFFKREKDKDKESSPDYYNKKKRIASFYKIPLKPIQDRLISYVDNKHRVYELGGDIFEKNLKRERLALKELLQDIPLYQDELRIFSDDYIDSANKIKDLSRQQRIILNRLKIEKIRDLRVLGRDLTIAEKGIEIEKSLKLKEDAIKEQITEAQLAQKELERIEMYYEYPMDKIISMSEEIAKGKQMMQHAKDQLIKANLRLVVSIAKKYANRGLHFFDLVQEGNIGLIKAVEKFEYKRGFKFSTYATWWIRQAITRSISDQARTIRVPVHMIEQINRLNRETRYLIQVLGKDPTDEELSDRLGWELKKVKTVKSVSREPVSLETPIGEEEDSVLSDFIEDKAIKNPANHTSFVVLQDQIRAILGTLPEREQEVVKMRFGLEDGYSLTLEEVGLHFNVTRERIRQIESKALRRL

SEQ ID NO: 15953 - protein, 248 aa, Arabidopsis thaliana
  misc_feature (227)..(227): Xaa can be any naturally occurring amino acid
  unsure (1)..(248): unsure at all Xaa locations
MLGIFSGAIVSPPEELVAAGSRTPSPKTTGSTLVNRFVEKNPSAVSVQVGDYVQLAYSHHNESPLRPRSFGAKDEIFCLFQGSLDNLGSLKQQYGLAKNANEVLLVIEAYKTLRDRAPYPANHVVAHLSGDFAFVVFDKSTSTLFVASDQVGKVPLYWGITADGYVAFADDVDLLKGACGKSLASFPQGCYYSTALGGLRSFENPKNKITAVPANEGEIWGATFKVXKEQQFLQIENERETQKKFHVS

SEQ ID NO: 15954 - protein, 541 aa, Nicotiana tabacum
AITGYGLGGSSMALFGRVAGGIYTKAADVGADLVGKVERNIPEDDPRNPAVIADNVGDNVGDIAGMGSDLFGSYAESSCAALVVASISSFGVNHEFTAMLYPLLVSSVGILVCLLTTLFATDFFEVKAVKEIEPALKQQLVISTALMTDGIAVVTWIALPSTFTIFNFGAQKEVKSWQLFLCVGVGLWAGLIIGFVTEYYTSNAYSPVQDVADSCRTGAATNVIFGLALGYKSVIIPIFAIAVSIFVSFSFAAMYGIAVAALGMLSTIATGLAIDAYGPISDNAGGIAEMAGMSHRIRERTDALDAAGNTTAAIGKGFAIGSAALVSLALFGAFVSRAAISTVDVLTPKVFIGLLVGAMLPYWFSAMTMKSVGSAALKMVEEVRRQFNTIPGLMEGTAKPDYATCVKISTDASIKEMIAPGALVMLTPLIVGILFGVETLSGVLAGSLVSGVQIAISASNTGGAWDNAKKYIEAGVSEHARTLGPKGSTAHKAAVIGDTVGDPLKDTSGPSLNILIKLMAVESLVFAPFFATHGGLLFKLF

SEQ ID NO: 15955 - protein, 240 aa, Cleistachne sorghoides
GITGIVNGMDVSEWDPSKDKYIAVKYDVSTAVEAKTLNKEALQAEVGLPVDRKVPLVAFIGRLEEQKGPDVMAAAIPLLMEEDVQIVLLGTGKKKFERMLMSAEEKYPDKVRAVVKFNAALAHHIMAGADLLAVTSRFEPCGLIQLQGMRYGTPCVCASTGGLVDTVIEGKTGFHMGRLSVDCNVVEPADVKKVATTVKRAIKVVGTPAYEEMVKNCMIQDLSWKGPAKNWENVLLSLGV

SEQ ID NO: 15956 - protein, 205 aa, Arabidopsis thaliana
IQKIDDSTSRQVTFSKRRKGLIKKAKELAILCDAEVCLIIFSNTDKLYDFASSSVKSTIERFNTAKMEEQELMNPASEVKFWQREAETLRQELHSLQENYRQLTGVELNGLSVKELQNIESQLEMSLRGIRMKREQILTNEIKELTRKRNLVHHENLELSRKVQRIHQENVELYKKAYGTSNTNGLGHHELVDQFMNPMHRLGCS

SEQ ID NO: 15957 - protein, 255 aa, Microstegium nudum
CELDNIMRLNGITGIVNGMDVSEWDPSKDKYIAVKYDVSTAVEAKALNKEALQAEVGLPVDRKIPLVAFIGRLEEQKGPDVMAAAIPQLMEEDVQIVLLGTGKKKFERMLMSAEEKYPDKVRAVVKFNAALAHHIMAGADLLAVTSRFEPCGLIQLQGMRYGTPCACASTGGLVNTIIEGKTGFHMGRLSVDCNVVEPADVKKVATTLKRAIKVVGTPAYEEMVKNCMIQDLSWKGPAKNWENALFSLGVAGGEP

SEQ ID NO: 15958 - protein, 437 aa, Thermosynechococcus elongatus BP-1
MAVQMEFSMKRVLAIILGGGAGTRLYPLTKRRAKPAVPLAGKYRLIDIPVSNCINSEIHNIYVLTQFNSASLNRHIARTYTFPGLTGGFVEVLAAQQTPENPNWFQGTADAVRQYLWLLADWDVDEYLILSGDHLYRMDYRLFVQRHRDTGADVTLSVLPVEEKAASGFGLLKVDGTGRVTDFREKPTGDALRDMRVDTTRYGLTIEEAHRKPYIASMGIYVFKRQVLIDLLQQMADATDFGKEIIPAAARSHLVQTYLFNGYWEDIGTIGSFYEANLALTQQPQPPFSFYDENAPIYTRPRYLPPSKILSSTITESIISEGCILKECQVHRSVLGVRSRVESGCVIDHSLLMGADYYQDSAQRSQLRLQHKIPIGIGANSVIRRAIVDKNACIGRDVKIINKDNVEESNREDQGFYIRSGVVVIIKNAVIPDGTII

SEQ ID NO: 15959 - protein, 188 aa, Methanosarcina acetivorans C2A
MEGNEKAEQKNATSEESTDIFENPGEGLEKATFAAGCFWGIEEAFRQVKGVVATAVGYSGGHFEKPTYEQVCTLDTGHAEAVRVIFDPKVVSYKNLLDVFWKIHDPTTKNRQGPDVGKQYRSVIFYHNEEQKAAALASKEELEKAGVFKNPIVTEIVPVSEFYMAEDYHQQYFEKKGFLQNILRSFKK

SEQ ID NO: 15960 - protein, 765 aa, Nicotiana tabacum
MGAALLPDLGAEIVIPVCAVIGIVFSLVQWYLVSNVKLTPESSSPSNNGKNGYGDYLIEEEEGINEQNVVVKCAEIQNAISEGATSFLFTEYQYVGIFMIAFAILIFLFLGSVEGFSTKSQPCTYNKEKLCKPALATAIFSTVSFLLGAVTSVVSGFLGMKIATYANARTTLEARKGVGKAFIVAFRSGAVMGFLLAANGLLVLYIAINLFKLYYGDDWEGLFEAITGYGLGGSSMALFGRVGGGIYTKAADVGADLVGKVERNIPEDDPRNPAVIADNVGDNVGDIAGMGSDLFGSYAEASCAALVVASISSFGINHEFTAMLYPLLISSMGILICLITTLFATDFFEIKAVKEIEPALKNQLIISTALMTVGIAIVTWTCLPSSFTIFNFGAQKVVKNWQLFLCVAVGLWAGLIIGFVTEYYTSNAYSPVQDVADSCRTGAATNVIFGLALGYKSVIIPIFAIAIAIFVSFSFAAMYGIAVAALGMLSTIATGLAIDAYGPISDNAGGIAEMAGMSHRIRERTDALDAAGNTTAAIGKGFAIGSAALVSLALFGAFVSRAAITTVDVLTPQVFIGLIVGAMLPYWFSAMTMKSVGSAALKMVEEVRRQFNTIPGLMEGTAKPDYATCVKISTDASIKEMIPPGALVMLTPLIVGIFFGVETLSGVLAGALVSGVQIAISASNTGGAWDNAKKYIEAGASEHARTLGPKGSDPHKAAVIGDTIGDPLKDTSGPSLNILIKLMAVESLVFAPFFATHGGLLFKIF

SEQ ID NO: 15961 - protein, 255 aa, Miscanthus japonicus
  misc_feature (148)..(148): Xaa can be any naturally occurring amino acid
  misc_feature (187)..(187): Xaa can be any naturally occurring amino acid
  unsure (1)..(255): unsure at all Xaa locations
CELDNIMRLTGITGIVNGMDVSEWDPSKDKYIAVKYDVSTAVEAKALNKEALQAEVGLPVDRKIPLVAFIGRLEEQKGPDVMAAAIPQLMEEDVQIVLLGTGKKKFERMLMSAKEKYPDKVRAVVKFNAALAHHIMAGADLLAVTNRXEPCGLIQLQGMRYGTPCACASTGGLVDTIIEGKTGFHMXRLSVDCNVVEPADVKKVATTLKRAIKVVGTPAYEEMVKNCMIQDLSWKGPAKNWENVLLSLGVAGGEP

SEQ ID NO: 15962 - protein, 424 aa, Streptococcus agalactiae NEM316
MKFNEQSNSQAALLGLQHLLAMYAGSILVPIMIASALGYNAEQLTYLIATDIFMCGIATLLQLQLSKHFGVGLPVVLGCAFQSVAPLSIIGAQQGSGYMFGALIASGIYVVLVAGIFSKVANFFPPIVTGSVITTIGLTLIPVAMGNMGDNAKEPSLQSLTLSLVTIGVVLLINIFAKGFLKSISILIGLISGTILAAFMGLVDASVVAEAPLVHIPKPFYFGAPRFEFTSILMMCIIATVSMVESTGVYLALSDITNDKLDSKRLRNGYRSEGLAVLLGGLFNTFPYTGFSQNVGLVQISGIRTRKPIYFTALFLVILGLLPKFGAMAQMIPSPVLGGAMLVLFGMVALQGMKMLNQVDFEHNEHNFIIAAVSIAAGVGFNGTNLFISLPNTLQMFLTNGIVISTLTAVVLNIILNGLPKKLI

SEQ ID NO: 15963 - protein, 142 aa, Brassica napus
VVLSITERLVQAVEHIRDYTTERGSLIQLWVPVNRGGKRVLTTREQPYSHDPTCQRLANYREVSVNYHFSAEKDDSKALAGLPGRVFLGRLPEWTPDVRFFRSEEYPRVHHAQDCDVRGTLAIPVFEQGSKVCLGVIEPTRP

SEQ ID NO: 15964 - protein, 230 aa, Thermotoga maritima
MGSDKIHHHHHHMKIFLDTANLEEIKKGVEWGIVDGVTTNPTLISKEGAEFKQRVKEICDLVKGPVSAEVVSLDYEGMVREARELAQISEYVVIKIPMTPDGIKAVKTLSAEGIKTNVTLVFSPAQAILAAKAGATYVSPFVGRMDDLSNDGMRMLGEIVEIYNNYGFETEIIAASIRHPMHVVEAALMGVDIVTMPFAVLEKLFKHPMTDLGIERFMEDWKKYLENLKK

SEQ ID NO: 15965 - protein, 699 aa, Glycine max
  misc_feature (546)..(546): Xaa can be any naturally occurring amino acid
  misc_feature (593)..(593): Xaa can be any naturally occurring amino acid
  unsure (1)..(699): unsure at all Xaa locations
LHSWTQGRIKEVESCLDPQLWHACAGGIVQMPAVNSKVYYFPQGHAEHACGPVNFRTCPKVPPFVPCRVTAVKYRADPETDEVYAKLKLIPLNANDVDYDRDVVGGAETQDKPASFAKTLTQSDANNGGGFSVPRYCAETIFPRLDYSVDPPVQNILAKDVHGETWKFRHIYRGTPRRHLLTTGWSTFVNHKKLVAGDSIVFLRAENGDLCVGIRRAKKGICGGLETSSGWNPAGGNCHIPYGGFSPFFREDDNRISRNGNSNGLNPSVSMMGKGKVRPEAVSEASNLAANKKPFEVVYYPRASTPEFCVKASLVEAALQIRWCSGIRFKMAFETEDSSRISWFMGTISSAQVADPLNWPNSPWRLLQVTWDEPDLLQNVRRVSPWLVELVSNMPAIHFSPFSPPRKKLRLPQQPDFPLDGQIPLSTFPSNLLGPSNTNQFGCLLESTPAGMQGARHAHYGLSLSDLHLSKLQSGLFSTGFPSLDHAATPMRVSNSITLQKPNLSENVSCLLTMANSTQSSKKLDVGKTPSLVLFGQKILTEQQIXSQVALVNTLSPVLTRNCSSDGNVDKVTNFSDGSGSALHQEGLREHSXCERFQWCKDNHQETEAGLEIGHCKVFMESEDVGRTMDLSLLRSYDELHRKLADMFGIEKSEMLSHVLYRDSTGAVKRISDESFSDFTRTAKRLTILMDSGSNNVGV

SEQ ID NO: 15966 - protein, 390 aa, Pseudomonas fragi
SLNPRDVVIVDFGRTPMGRSKGGMHRNTRAEDMSAHLISKVLERNSKVDPGEVEDVIWGCVNQTLEQGWNIARMASLMTQIPHTSAAQTVSRLCGSSMSALHTAAQAIMTGNGDVFVVGGVEHMGHVSMMHGVDPNPHMSLYAAKASGMMGLTAEMLGKMHGISREQQDAFAVRSHQLAHKATVEGKFKDEIIPMQGYDENGFLKIFDYDETIRPDTTLESLAALKPAFNPKGGTVTAGTSSQITDGASCMIVMSAQRAKDLGLEPLAVIRSMAVAGVDPAIMGYGPVPATQKALKRAGLNMADIDFIELNEAFAAQALPVLKDLKVLDKMNEKVNLHGGAIALGHPFGCSGARISGTLLNVMKQNGGTFGLSTMCIGLGQGIATVFERV

SEQ ID NO: 15967 - protein, 405 aa, Triticum aestivum
  misc_feature (404)..(404): Xaa can be any naturally occurring amino acid
  unsure (1)..(405): unsure at all Xaa locations
KTGCLLIKAVAVHLPPPGCGVDGVERPRAPPQPPAHHLFDETPLSSDPMAEASGDGSMEDRISALPDELLIHVLSHLRSREAVQTCVLARRWRYLWRSVTCIDVSFEEFEDRAAANDLEREEMFKMFVNHLLILRERVDLKEFHLEYSLVVGVSRLSAKSDEANLWIRHALQYKAQTVKIGNHSEPLQLLPSVFTSTYLKRLHITNAQLILGFFDRLRKGCPALEYLFLSTCDIEDLDIFSDTLKVLILSDAIGFSFSFEHDAQVSISAPSLISLSVKECPSGARLPILKNMSSLETASVLLSEGDITTCDADGIRQFLGGLSGVRSLDFYYGDRQLEVKNNHGWCPTFNNLTNLTLDRWCMHADLYAMIVFLQNSPNLKKLTLKLNEPRYHNEVVSAVIGELXG

SEQ ID NO: 15968 - protein, 801 aa, Arabidopsis thaliana
MNFGSLFDNTPGGGSTGARLLSGLSYGNHTAATNVLPGGAMAQAAAAASLFSPPLTKSVYASSGLSLALEQPERGTNRGEASMRNNNNVGGGGDTFDGSVNRRSREEEHESRSGSDNVEGISGEDQDAADKPPRKKRYHRHTPQQIQELESMFKECPHPDEKQRLELSKRLCLETRQVKFWFQNRRTQMKTQLERHENALLRQENDKLRAENMSIREAMRNPICTNCGGPAMLGDVSLEEHHLRIENARLKDELDRVCNLTGKFLGHHHNHHYNSSLELAVGTNNGGHFAFPPDFGGGGGCLPPQQQQSTVINGIDQKSVLLELALTAMDELVKLAQSEEPLWVKSLDGERDELNQDEYMRTFSSTKPTGLATEASRTSGMVIINSLALVETLMDSNRWTEMFPCNVARATTTDVISGGMAGTINGALQLMNAELQVLSPLVPVRNVNFLRFCKQHAEGVWPVVDVSIDPVRENSGGAPVIRRLPSGCVVQDVSNGYSKVTWVEHAEYDENQIHQLYRPLLRSGLGFGSQRWLATLQRQCECLAILMSSSVTSHDNTSITPGGRKSMLKLAQRMTFNFCSGISAPSVHNWSKLTVGNVDPDVRVMTRKSVDDPGEPPGIVLSAATSVWLPAAPQRLYDFLRNERMRCEWDILSNGGPMQEMAHITKGQDQGVSLLRSNAMNANQSSMLILQETCIDASGALVVYAPVDIPAMHVVMNGGDSSYVALLPSGFAVSSDGGIDGGGSGDGDQRPVGGGSLLTVAFQILVNNLPTAKLTVESVETVNNLISCTVQKIRAALQCGS

SEQ ID NO: 15969 - protein, 219 aa, Oryza sativa
SLFKMQIFVKTLTGKTITLEVESSDTIDNVKAKIQDKEGIPPDQQRLIFAGKQLEDGRTLADYNIQKESTLHLVLRLRGGMQIFVKTLTGKTITLEVESSDTIDNVKAKIQDKEGIPPDQQRLIFAGKQLEDGRTLADYNIQKESTLHLVLRLRGGMQIFVKTLTGKTITLEVESSDTIDNVKAKIQDKEGIPPDQQRLIFAGKQLEDGRTLADYKYAV

SEQ ID NO: 15970 - protein, 356 aa, Nicotiana plumbaginifolia
MSLLSDLINLNLSDSTEKIIAEYIWIGGSGMDLRSKARTLSGPVTDPAKLPKWNYDGSSTGQAPGEDSEVILYPQAIFKDPFRRGNNILVMCDAYTPAGEPIPTNKRHAAAKIFSNPDVVAEEPWYGIEQEYTLLQRDINWPLGWPIGGFPGPQGPYYCGTGADKAFGRDIVDSHYKAYLYAGINISGINGEVMPGQWEFQVGPSVGISAGDEVWVARYILERIAEIAGVVVSFDPKPIPGDWNGAGAHTNYSTKSMREDGGYEVILKAIEKLGLKHKEHIAAYGEGNERRLTGKHETANISTFKWGVANRGASVRVGRDTEKAGKGYFEDRRPASNMDPYVVTAMIADTTIIGKS

SEQ ID NO: 15971 - protein, 547 aa, Magnaporthe grisea 70-15
MDIQTCAVLSALETVAWVGFHEYRSLALTTRKELVAVFSVFFLVQYLCAKIYRIFIYPVHVSPLRHLPTPKGNHFMLGQLVNQFRASCPNELYLKWTSQWPDSPFVRFFTIGNKESLLINGIEANREVFATHCYAFTKPSLFLRFVGDIAGTGLLFTEGDEHKRHRKMILNVFSVPNLKKMFPIFQEKAEELSQHLDATIAASTGGSIDVQCIYSKATIDIIGITALGLDLRNLKSTKLRMDFLQCYRRMHEQPFSAALISFINVHVPIRRLLWFVRANRDFVEASQEVRAMLRTCIRERIRDVDSRKGAEVKFQSRDLLTYMVEERLLAQCKDPLTTEDILGHLLNFLSAGHETTTGVMTWASYVLATNPRIQDRLRAEVEALLKESPCPSYSDIERMKYMHNFVREVLRLYSPAVATYREAAKDVTICGTLIPKGTHLVLCPSVCNKSKRIWGADAEEFVPERWEKLDGEAASPYSIMTFLAGPRQCIGKQYALQEVKVLLIEVISKFRLLPTEELVSNDFKVNISNPGVVLRPKGGMVLRVERL

SEQ ID NO: 15972 - protein, 211 aa, Saccharum officinarum
  misc_feature (97)..(97): Xaa can be any naturally occurring amino acid
  misc_feature (137)..(137): Xaa can be any naturally occurring amino acid
  unsure (1)..(211): unsure at all Xaa locations
KALNKEALQAEVGLPVDRKIPLVAFIGRLEEQKGPDVMAAAIPQLMEEDVQIVLLGIGKKKFERMLMSAEEKFPDKVRAVVKFNAALAHHIMAGADXLAVTSRFEPCGLIQLQGMRYGTPCACASTGGLVYTIIERXTGFHLGRLSVDCNVVEPADVKKVATTVKRAIKVVGTPAYEEMVKNCMIQDLSWKGPAKSWENVLLSLGVAGGEP

SEQ ID NO: 15973 - protein, 99 aa, Citrus x paradisi
YVFIVDMPGLKSGDIKVQVEDDNVLLISGERKREEEKDGAKYVRMERRVGKFMRKFVLPENANVEAISAVCQDGVLTVTVDKLPPPEPKKPKTIEVKIA

SEQ ID NO: 15974 - protein, 433 aa, Porphyromonas gingivalis W83
MTIDEMLRLDRNHLWHPYTSTIDPLPVFPVKRAEGVRIYLEDGRELIDGMSSWWAAIHGYNHPRLNAAVERQLREMSHIMFGGFTHRPAVELAELLLSILPSELNKIFYADSGSVAVEVAMKMALQYQQACGQSRRTRFATIRSGYHGDTWHAMSVCDPVTGMHGIFSGALPVQYFLPQPKSRFGGEWLPADIEPLRDLLSAKGAELAALILEPIVQGAGGMYFYYPRYLVEARRLCSEAGVLLIFDEIATGFGRTGELFALRHAATVPDILCLGKSLTGGYMTLSATITTEAIARTICSGEAGCFMHGPTFMGNPLACAVAAESIRLLLESPWQERVRAIEAQLREELSPAISFDGVAEVRVLGAIGVVEMKRPVDMATLQQRFIREGIWVRPFGRLCYLEPPFIISPEDLRILTHGLLRVLGQDRSISFTR

SEQ ID NO: 15975 - protein, 237 aa, Lycopersicon esculentum
IANMADQSNGAGASGTLAFDAEYSRWLEEHNKHINELRTAVNSHASDPELRSIVNNVTAHYDEVFRVKGNAAKADVFHVLSGMWKTPAERCFMWIGGFRPSELLKLLVNQLEPLTEQQLAGIYNLQQSSHQAEDALSQGMEALQQSLAETLANGSPATEGSSGDVANYMGQMAMAMGKLGTLEGFLRQADNLRQQTLQQMHRILTTRQSARALLAISEYFSRLRALSSLWLARPREQ

SEQ ID NO: 15976 - protein, 381 aa, Zea mays
  misc_feature (338)..(338): Xaa can be any naturally occurring amino acid
  unsure (1)..(381): unsure at all Xaa locations
MQIFVKTLTGKTITLEVESSDTIDNVKAKIQDKEGIPPDQQRLIFAGKQLEDGRTLADYNIQKESTLHLVLRLRGGMQIFVKTLTGKTITLEVESSDTIDNVKAKIQDKEGIPPDQQRLIFAGKQLEDGRTLADYNIQKESTLHLVLRLRGGMQIFVKTLTGKTITLEVESSDTIDNVKAKIQDKEGIPPDQQRLIFAGKQLEDGRTLADYNIQKESTLHLVLRLRGGMQIFVKTLTGKTITLEVESSDTIDNVKAKIQDKEGIPPDQQRLIFAGKQLEDVRTLADYNIQKESTLHLVLRLRGGMQIFVKPLTGKTITLEVESSDTIDNVKAKIQHKXGIPPGQQRLIFAGKQLEDGRTLAGYSIQKESSLHLVLRLPGGQ

SEQ ID NO: 15977 - protein, 315 aa, Oryza sativa (japonica cultivar-group)
MAMEKSRVLIVGGTGYIGRRIVAASLAEGHPTFVLLRPEIGLDIDKLQILLAFKAQGARLLEASLDDHDGLVAAVRQVDVVVSAMSGVHLRSHNLMLQLKLVEAIKEAGNVKRFLPSEFGMDPSRMGNALEPGRVTFDEKMEIRRAIEDAKIPHTYVSSNCFAAYFCPNLSQLTSFLPPKERVNVYGDGNVKAFFVDEDDVGTYTIKSIDDPRTLNKTIYIRPQDNCLTHNELIAMWEKLSGKSLTKFHIPAEEFLAPMKADMQFAFQVGITHFYHIFYEGCLTNFDIGDNGAEATILYPEVQYTRIDEFLKRYL

SEQ ID NO: 15978 - protein, 189 aa, Glycine max
MAEPMAVDSNPESGLDFESPFAWGKKRGMGGKKKDVQFYESFSFDGAEYAINDTVCLQSGIGGGEPHIGRLIKIWETRDKSRKVKVQWFFRPAEICKYLVGIEVKPNELFLACGGDGAKGFANVNPLEAIVGKCNVVCISKDVGNPQPSGEAKADYVYYRFFDVVQLKVVDQIDVKVAAGIEVKNVSNK

SEQ ID NO: 15979 - protein, 56 aa, Citrus x paradisi
WHRVERSSGKFLRRFRLPDNAKVEQVKASMENGVLTVTVPKQEEKKPEVKAIEISG

SEQ ID NO: 15980 - protein, 300 aa, Triticum aestivum
  misc_feature (170)..(170): Xaa can be any naturally occurring amino acid
  misc_feature (187)..(187): Xaa can be any naturally occurring amino acid
  misc_feature (223)..(223): Xaa can be any naturally occurring amino acid
  misc_feature (230)..(230): Xaa can be any naturally occurring amino acid
  misc_feature (253)..(253): Xaa can be any naturally occurring amino acid
  misc_feature (259)..(259): Xaa can be any naturally occurring amino acid
  misc_feature (266)..(266): Xaa can be any naturally occurring amino acid
  misc_feature (287)..(287): Xaa can be any naturally occurring amino acid
  unsure (1)..(300): unsure at all Xaa locations
MALYRRAASAIRRRGAGALPLPLLPARAMAMASSLFGHVEPAPKDPILGVTEAFLADPSPDKVNVGVGAYRDDDGKPVVLDCVREAERRIAGNLNMEYLPMGGSIHMIEESLKLAYGEDSEFIKDKRIAAVQALSGTGACRLFADFQKRFLPDSQIYIPTPTWSNHHNIXWRDAQVPQRTFSYYHPXESRGLDFAGLMDDIKNAPNGSFFLLHACAHNPTGSXPTEGPWXEGISYQFQLENHFPFFDMAYQGXANGDPXRDAKATXLSLEDGHKIGMCSVISKNMGXYGQRAGCLSISAR

SEQ ID NO: 15981 - protein, 540 aa, Streptomyces coelicolor
MAKILKFDEDARRALERGVNKLADTVKVTIGPKANVVIDKKFGAPTITNDGVTIAREVEVEDPYENLGAQLVKEVATKTNDIAGDGTTTATVLAQALVREGLKNVAAGASPALLKKGIDAAVAAVSEDLLATARPIDEKSDIAAVAALSAQDQQVGELIAEAMDKVGKDGVITVEESNTFGLELDFTEGMAFDKGYLSPYFVTDQERMEAVLDDPYILINQGKISSIADLLPLLEKVIQANASKPLLIIAEDLEGEALSTLVVNKIRGTFNAVAVKAPGFGDRRKAMLQDMAVLTGATVISEEVGLKLDQVGLEVLGTARRITVTKDDTTIVDGAGKRDEVQGRIAQIKAEIENTDSDWDREKLQERLAKLAGGVCVIKVGAATEVELKERKHRLEDAISATRAAVEEGIVSGGGSALVHAVKVLEGNLGKTGDEATGVAVVRRAAVEPLRWIAENAGLEGYVITSKVADLDKGQGFNAATGEYGDLVKAGVIDPVKVTRSALENAASIASLLLTTETLVVEKKEEEEPAAGGHSHGHSH

SEQ ID NO: 15982 - protein, 287 aa, Raphanus sativus
MAKDVEAVSGEGFQTRDYQDPPPAPLFDPEELTKWSFYRAVIAEFVATLLFLYITVLTVIGYKIETDSTAGGVDCGGVGILGIAWAFGGMIFILVYCTAGISGGHINPAVTFGLLLARKVSLVRAILYMVAQCLGAICGVGFVKAFQSAYYVRYGGGANSLADGYSTGTGLAAEIIGTFVLVYTVFSATDPKRSARDSHVPVLAPLPIGFAVFMVHLATIPITGTGINPARSFGAAVIFNESKPWDDHWIFWVGPFIGAAIAAFYHQFVLRASGSKSLGSFRSAANV

SEQ ID NO: 15983 - protein, 60 aa, Citrus x paradisi
PGVKRDELKIEVEENRVLRVSGERKREEEKKGDHWHRVERSHGKFWRQFKLPDNADLDSV

SEQ ID NO: 15984 - protein, 441 aa, Brassica napus
MVGAKPIENGSDGGASTGLLHGRYELGRLLGHGTFAKVYHARNVTTGKSVAMKVVGKEKVVKVGMVDQIKREISVMRMVKHPNIVELHEVMASKTKIYFAMELVRGGELFAKVAKGRLREDVARVYFQQLISAVDFCHSRGVYHRDLKPENLLLDEEGNLKVTDFGLSAFTEHLKQDGLLHTTCGTPAYVAPEVILKKGYDGAKADLWSCGVILFVLLAGYLPFQDDNLVNMYRKIYRGDFKCPGWLSSDARRLVTKLLDPNPNTRITIDKVMDSHWFKKSSTRSRNEPVAATPEAEEDVDVSVHKSKEETETLNAFHIIALSEGFDLSPLFEEKKKEEKMEMRFATSRPASSVISSLEEAAKVGNKFDVRKSECRVRIEGKQNGRKGKLAVEAEIFAVAPSFVVVEVKKDHGDTLEYNNFCSTALRPALKDIFWTSTTPA

SEQ ID NO: 15985 - protein, 456 aa, Vibrio cholerae O1 biovar eltor str. N16961
MMKKPLLVLTALSLSLSAILSPLPATAALPLSVNGEQIPSLAPMLEKVTPAVVSIAVEGTQVSRQRLPDQFRFFFGPDFPTEQLQERPFRGLGSGVIINADKGYVVTNYHVINGAEKIRVKLYDGREFDAELVGGDEMSDVALLKLNKAKNLTEIRIADSDKLRVGDFAVAIGNPFGLGQTVTSGIVSALGRSGLNIENFENFIQTDAAINSGNSGGALVNLNGELIGINTAILGPNGGNVGIGFAIPSNMMKNLTDQILEFGEVKRGMLGVQGGEITSELADALGYESSKGAFVSQVVPDSAADKAGIKAGDIITSLNGKKIDTFSELRAKVATLGAGKTITLGVLRDGKNQNIDVTLGEQQNAKTKAESLHQGLSGAELSNTTDSDPIQGVKVTEVQKGSAAESYQLQKDDIIIGVNRKRVKNIAELRAIMEKSPNILALNIQRGERTLYLVVR

SEQ ID NO: 15986 - protein, 658 aa, Thermosynechococcus elongatus BP-1
MMSAAYTYTPPGGLPQDASLPDHFLAYKRLQSLPEMWPLLAQRHGDVVALDAPYEDPPTRITYSELYQRIQRFAAGLQALGVAAGDRVALFPDNSPRWLIADQGSMMAGAINVVRSGTADAQELLYILRDSGATLLLIENLATLGKLQEPLVDTGVKTVVLLSGESPELAGFPLRLLNFGQVFTEGQYGTVRAVAITPDNLATLMYTSGTTGQPKGVMVTHGGLLSQIVNLWAIVQPQVGDRVLSILPIWHAYERVAEYFLFACGCSQTYTNLRHFKNDLKRCKPHYMIAVPRIWESFYEGVQKQLRDSPATKRRLAQFFLSVGQQYILQRRLLTGLSLTNPHPRGWQKWLARVQTLLLKPLYELGEKRLYSKIREATGGEIKQVISGGGALAPHLDTFYEVINLEVLVGYGLTETAVVLTARRSWANLRGSAGRPIPDTAIKIVDPETKAPLEFGQKGLVMAKGPQVMRGYYNQPEATAKVLDAEGWFDTGDLGYLTPNGDLVLTGRQKDTIVLSNGENIEPQPIEDACVRSPYIDQIMLVGQDQKALGALIVPNLEALEAWVVAKGYRLELPNRPAQAGSGEVVTLESKVIIDLYRQELLREVQNRPGYRPDDRIATFRFVLEPFTIENGLLTQTLKIRRHVVSDRYRDMINAMFE

SEQ ID NO: 15987 - protein, 397 aa, Streptococcus gordonii
MKNSSNFFKKTLQVFIVLLVGFIGGVAGTWGFSYFSTPHSATNNNQKTATTVTTSYKNSNSTTEAVDKVKDAVVSVITYSESNSDAIFDNNNSGNENDQVASEGSGVIYRKDKDYAYLVTNTHVINGAKKVDIRLADGNKVPGEIVGTDTYSDISVVRIPADKVKNVAEFGDSSKLTVGETAIAIGSPLGSDYANTVTQGIVSSLSRNVSSRSEDGQTIATQAIQTDAAINPGNSGGPLVNIQGQVIGINSSKIANTNNGSTSVEGMGFAIPSNDVVNIIEQLEKNGKVIRPALGIQMVNLSSLSSSSSDRLKLPDNVKNGVVVRSTQTGMPADGKLEKYDVITKIDDTEISSASDIQSALYKHSINEEIKVTYYRDGKEQTTTIKLTKSTDDLSSE

SEQ ID NO: 15988 - protein, 628 aa, Legionella pneumophila str. Paris
MKQFPGFYFDKNRAIDLICMGRVAVDLYAEQIGLDLKDVASFKKYLGGCAGNIAVGAARLGLKSQMFSCVGSDELGKFLKEELEREGVNIELLSETDNHLTGLVLLGIKPPSNFPLLFYRNDCADMQIKSDQISFTDLKNAKALLITGTGLSTESVKNTTLEVVHLARKAETTIVFDLDYRPVLWRLTVIGNGESRYCQNEYVTQVYQQVLPLCDLIVGTEEEICIAGGSNDIEVSLINIRQRTDAPIVVKLGEKGARVHFGTDKGLLQAKSFPVEVLNVLGAGDGFMSGLLSGLLQGKSWEQAVTYANACGALVVTRHGCAPAIPYKEELDYFIQEYEHDPEIWSSSQLTQLHEKLSKNQKTQLLIKNPCGFADGLNSIVTMQDSPTAMSFSSLKLNKGQSHQFNSSYEFAALLMTGKVVFQYGSYSQEVERTDYFSQSPYVLHCSKNEVSSVIALTDCEILLMETENENLFSPILFDASNMLELDNRGEGVLENTSYRLVRTVFDKRNRPESNLVVGEIITFQGRWSSYPSHYHQQPEIYHYRFSEPQGYAFGENGKEVMRIEHYDTYQIANNQEHAHCAAPGYALYTLWFIRHLNNNAYTLPTFIKDHEWTRTSRANLRAWQQKQ

SEQ ID NO: 15989 - protein, 320 aa, Hordeum vulgare subsp. vulgare
MASAKATMGQGEQDHFVLKSGHAMPAVGLGTWRAGSDTAHSVRTAITEAGYRHVDTAAEYGVEKEVGKGLKAAMEAGIDRKDLFVTSKIWCTNLAPERVRPALENTLKDLQLDYIDLYHIHWPFRLKDGAHMPPEAGEVLEFDMEGVWKEMENLVKDGLVKDIGVCNYTVTKLNRLLRSAKIPPAVCQMEMHPGWKNDKIFEACKKHGIHVTAYSPLGSSEKNLAHDPVVEKVANKLNKTPGQVLIKWALQRGTSVIPKSSKDERIKENIQVFGWEIPEEDFKVLCSIKDEKRVLTGEELFVNKTHGPYRSAADVWDHEN

SEQ ID NO: 15990 - protein, 346 aa, Buchnera aphidicola
KKNSILKKNQSWINATENNFKVDDYESLIPNADLVINLTPDKEHHNVVTTLQKLMKKNSYLGYSHGFNIVEFGEIIRKDITVIMVAPKCPGTEVREEYKRGFGVPTLIAVHNENDIHQKGLEIAKAWSFSIGSHRAGVLESSFIAEVKSDLMGEQTILCGMLQTASILCYEKLITNKHDPAYAAKLIQNGWETITESLKHGGITLMMDRLSNPSKIRAYKISEKIKKILTSLFQQHMNNIISGEFSSEMMKDWKNNDKKLLDWRKQTKDTSFEKAPIYIKKIPEQEYYDHGILMIAILKAGIELSFETMINSGIIAESAYYESLHELPLIANTIARKKLYEMNKVI

SEQ ID NO: 15991 - protein, 545 aa, Mycoplasma penetrans HF-2
MAKEIKFSDSARNKLFNGVQQLFDAVKVTMGPRGRNVLIQKSYGAPVITKDGVSVAKEVDLTNPIENMGAQLVKDVASKTADEAGDGTTTATVLAYGVFKEGLRNVISGANPIEIKRGMDKTVNAIVNELNKSSKKIARKDEIIQVATISANSDKKIGELIANAMEKVGSDGVITVEEAKGINDELTVVEGMQFDRGYISPYFVTDTNKMIAKLENPYILITDKKVSSIKDILPILEEIMKTGRPLLIIADDVDGEALTTLVVNKMRGVFNVVAVKAPEFGDKRKQVLEDIAILTGGSFVTDDLGISFDKVTLQDLGQAESVVIDKDNSTIVKGKGLESQIKERISKIKTAIEMTDSDYDKDSLRNRLAKLNKGVAVIKVGAVSEVELKEKKDRVDDALSATKAAIEEGIVIGGGAALVHVSKRINVNTLNLIGDEKIGYQIVMSAIMSPISQIVSNAGFDKGVVINEILKATNPHLGFNAATGKYVDMFQTGIIDPVKVTRIALQNAVSVSSMLLTTEAVIYDVKDDKEDSVPAMPNMGMGGMM

SEQ ID NO: 15992 - protein, 214 aa, Mesorhizobium sp. BNC1
MITLTTYEWVPDFAAPLMRAFRVRWALEEADLPYRVRTVTLGAEQRSPEHLARQPFGQAPAIEEDGLVLFESGAIALHIAEQSEMLLPTEPAGRARAIAWLFAALNSVEIAVQELAVIDLFHAEEAWTSERRPQVEAFVRDRLAMLEKALGGKDYLEGRFTVGDLMMADVLRILQHTDLLEAYPALKAYKERCEARPAFQRAMKAQMEGFGMAA

SEQ ID NO: 15993 - protein, 471 aa, Legionella pneumophila str. Paris
MNKGMNAFVFLIAVIAGFGGFLFGFDSSVIADVKDQVISQLALTDWQWAQVVSSSLLGCILGIPISGLVADKLSRRSLLKVVALGFILGSSLCALAPGFVSILLGRFIIGICIGIASYIAPLFIAEIAPPHQRGTLVLINGLTITFGQAIAYLIGYFLHDYSLMSWRYLFWIGSLPALVLFSGMYFVPHSPRWIMMKYGADATLKTLKQIRPVGYNIQQELTEISNNLVNPAPAYIQMFKKPIVFVLLLGVGLGIFQQFSGINALMYYGPVVFESFGFSPVKNAILATFFLGLVNFIFTVVTLFYVDKLGRRFLLISGTLIASISLYLVSLLSSNSLLVNKFWILGGLSFYVMGYCISLGSLFWVLISEIYPLSVRGLAMSIATVFQWGANFVVSLLFLPIYQFSGQTVTFAMFATFCLLACWFIYYFVPETTSVSLEKLEDNLSSGKKIRDIGQPVSKNIKIAKFNLIMD

SEQ ID NO: 15994 - protein, 313 aa, Cepedea sp. Rr5
DAANNYARGHYTIGKEIVDLCLDRIRKLADICTGLQGFMVFNSVGGGTGSGLGSLLLERLSVDYGKKSKLGFTIYPSPQVSTAVVEPYNSVLSTHSLLEHTDVAVMLDNEAIYDICRRNLDIERPTYTNLNRLIAQVISSLTASLRFDGALNVDLTEFQTNLVPYPRIHFMLSSYAPIISAEKAYHEQLSVAEITNSSFEPASMMAKCDPRHGKYMACCMMYRGDVVPKDVNAAVATIKTKRTIQFVDWCPTGFKCGINYQPPTVVPGGDLAKVMRAVCMISNSTAIAEVFSRIDHKFDLMYAKRAFVHWYVG

SEQ ID NO: 15995 - protein, 345 aa, Buchnera aphidicola
KKNSIAKKNQSWINAIENNFKVDDYESLIPNADLVINLTPDKEHHHVVQVLQKLMKKNSCLGYSHGFNIVEFGEIIRKDITVIMVAPKCPGTEVREEYKRGFGVPTLIAVHNENDIRQIGLDIAKAWSFSIGSHRAGVLESSFIAEVKSDLMGEQTILCGMLQTASLLCYEKLIANKNDPAYASKLIQNGWETITESLKHGGITLMMDRLSNASKIRAYNISEKIKKILSSLFQKHMNDIISGEFSHKMMQDWQNNNKQLLDWRNKNKNTSFEKAPVYHNKIPEQEYYDHGILMIAILKAGIELSFETMLNSGIIAESAYYESLHELPLIANTIARKKLYEMNKV

SEQ ID NO: 15996 - protein, 405 aa, Zea mays
LGTSRPAGASRNLRSRLYPLVSTKLASTRALRTRGACDSVRRRRVEMEFKNCGSSSQPRPAVVVGEAALARQGSVYSLTFDEFQSALGGAATGGGGGGSIPKDFGSMNMDELLRSIWTAEETQAMASASGAGAGAGMPPTPLQRQGSSLTLPRTLSTKTVDEVWRNLVRDEPLQGADGGGHQQHHRQSTLGEMTLEEFLVRAGVVRENPAPAPPAPPPMIPPRPVPVAPKSSAFFGNLPGADADTAAAAAALGFAPVGMGDLAQIPPRAAGMGGGAMAVQAAVNQLDSGGKGYSDLSSPTEPLPFSFEGMIRGRRHGGGVEKVVERRQRRMIKNRESAARSRARKQAYTMELEAEVQKLKEQNQELERKQAEIMEMQKNELPEMLKDPFGRKKRLCLRRTLTGPW

SEQ ID NO: 15997 - protein, 396 aa, Opalina sp. Rs1
QCGNQIGAKFWEVIADEHGIDPTGTYHGDSDLQLERINVYFNEATGGRYVPRAILMDLEPGTMDSVRAGPFGQLFRPDNFVFGQTGAGNNWAKGHYTEGAELIDSVLDVVRKEAEGCDCLQGFQITHSLGGGTGSGMGTLLISKVREEYPDRIMETFSVFPSPKVSDTVVEPYNATLSVHQLVENADEVQVIDNEALYDICFRTLKLTTPTYGDLNHLVSAAMSGVTCCLRFPGQLNADLRKLAVNLIPFPRLHFFMIGFAPLTSRGSQQYRALTVPELTQQMFDAKNMMCASDPRHGRYLTASALFRGRISTKEVDEQMLNVQNKNSSYFVEWIPNNIKSAICDIPPKGLKMSVTFIGNSTAIQEMFKRVAEQFTAMFRRKAFLHWYTGEGMDEM

SEQ ID NO: 15998 - protein, 346 aa, Buchnera aphidicola
  misc_feature (214)..(214): Xaa can be any naturally occurring amino acid
  unsure (1)..(346): unsure at all Xaa locations
KKNSILKKNQSWINATQNNFKVDDYESLIPNADLVINLTPDKQHHNVIKTLQKLMKKNSCLGYSHGFNIVEFGETIRKDITVIMVAPKCPGTEVREEYKRGFGVPTLIAVHDKNDIHQQGLDIAKAWSFSIGAHHAGVLESSFVAEVKSDLMGEQTILCGMLQTASLLCYDKLIQNKCDPAYASKLIQHGWETITESLKHGGITLMMDRLSNSXKIRAYKISEKIKKILSPLFQKHMDDIISGEFSSEMMKDWSNNDKKLLDCRRKIKNTSFEQSPIYKEKIPEQEYYDHGILMIAILKSGIELSFEKMITAGIIEESAYYESLHELPLIANTISRKKLYEMNKVI

SEQ ID NO: 15999 - protein, 963 aa, Thermus thermophilus
MDPLWYKDAVIYQLHVRSFFDANNDGYGDFEGLRRKLPYLEELGVNTLWLMPFFQSPLRDDGYDISDYYQILPVHGTLEDFTVDEAHGRGMKVIIELVLNHTSIDHPWFQEARKPNSPMRDWYVWSDTPEKYKGVRVIFKDFETSNWTFDPVAKAYYWHRFYWHQPDLNWDSPEVEKAIHQVMFFWADLGVDGFRLDAIPYLYEREGTSCENLPETIEAVKRLRKALEERYGPGKILLAEVNMWPEETLPYFGDGDGVHMAYNFPLMPRIFMALRREDRGPIETMLKEAEGIPETAQWALFLRNHDELTLEKVTEEEREFMYEAYAPDPKFRINLGIRRRLMPLLGGDRRRYELLTALLLTLKGTPIVYYGDEIGMGDNPFLGDRNGVRTPMQWSQDRIVAFSRAPYHALFLPPVSEGPYSYHFVNVEAQRENPHSLLSFNRRFLALRNQHAKIFGRGSLTLLPVENRRVLAYLREHEGERVLVVANLSRYTQAFDLPLEAYQGLVPVELFSQQPFPPVEGRYRLTLGPHGFALFALKPVEAVLHLPSPDWAEEPAPEEADLPRVHMPGGPEVLLVDTLVHERGREELLNALAQTLKEKSWLALKPQKVALLDALRFQKDPPLYLTLLQLENHRTLQVSLPLLWSPQRREGPGLFARTHGQPGYFYELSLDPGFYRLLLARLKEGFEGRSLRAYYRGRHPGPVPEAVDLLRPGLAAGEGVWVQLGLVQDGGLDRTERVLPRLDLPWVLRPEGGLFWERGASRRVLALTGSLPPGRPQDLFAALEVRLLESLPRLRGHAPGTPGLLPGALHETEALVRLLGVRLALLHRALGEVEGVVGGHPLLGRGLGAFLELEGEVYLVALGAEKRGTVEEDLARLAYDVERAVHLALEALEAELWAFAEEVADHLHAAFLQAYRSALPEEALEEAGWTRHMAEVAAEHLHREERPARKRIHERWQAKAGKA

SEQ ID NO: 16000 - protein, 320 aa, Bromus inermis
MASAKAMMGQERQDHFVLKSGHAIPAVGLGTWRAGSDTAHSVQTAITEAGYRHVDTAAEYGVEKEVGKGLKAAMEAGIDRKDLFVTSKLWCTDLVPDRVRPALEKTLKDLQLDYLDLYLIHWPFRLKDGAHKPPEAGEVLEFDMEGVWKEMENLVKDGLVKDIGVCNYTVTKLNRLLQSAKIAPAVCQMEMHPGWKNDKILEACKKHGIHATAYSPLCSSEKNLAHDPVVEKVANKLNKTPGQVLIKWALQRGTIVIPKSSKDERIKENIQVFGWEIPEEDFQVLCSIKDEKRVLTGEELFVNKTHGPYKSASEVWDNEN

SEQ ID NO: 16001 - protein, 346 aa, Buchnera aphidicola
KKNSILKKNHSWMNAIKNNFQVDDYESLIPNADLVINLTPDKEHHNVIKILQQLMKKNSCLGYSHGFNIVEFGEKIREDITVIMVAPKCPGTEVREEYNRGFGVPTLIAVHDANDIHKQGLEIAKAWSFSIGGHRAGVLESSFIAEVKSDLMGEQTILCGMLQTASLLCYEKLITDKHNPAYAAKLIQNGWETITESLKHGGITLMMDRLSNSSKIRAYNLSENIKKILAPLFQKHMDDIISGEFSAEMMKDWKNHDQKLLFWRQKIKNTSFETAPMYNKKIPEQEYYDHGILMVAILKSGIELSFEKMINAGIIAESAYYESLHELPLIANTIARKKLYEMNKVI

SEQ ID NO: 16002 - protein, 396 aa, Opalina sp. Hj6
QCGNQIGAKFWEVIADEHGIDPTGTYHGDSDLQLERINVYFNEATGGRYVPRAILMDLEPGTMDSVRAGPFGQLFRPDNFVFGQTGAGNNWAKGHYTEGAELIDSVLDVVRKEAEGCDCLQGFQITHSLGGGTGSGMGTLLISKVREEYPDRIMETFSVFPSPKVSDTVVEPYNATLSVHQLVENADEVQVIDNEALYDICFRTLKLTTPTYGDLNHLVSAAMSGVTCCLRFPGQLNADLRKLAVNLIPFPRLHFFMIGFAPLTSRGSQQYRAMTVPELTQQMFDAKNMMCASDPRHGRYLTASALFRGRISTKEVDEQMLNVQNKNSSYFVEWIPNNIKSAICDIPPKGLKMSVTFIGNSTAIQEMFKRVAEQFTAMFRRKAFLHWYTGEGMDEM

SEQ ID NO: 16003 - protein, 442 aa, Xylella fastidiosa 9a5c
MSTLTLPSDLRLPVTVFSGFLGAGKTTLLNRLLNNRDGLRVAVIVNDMSEVNIDAQLVRDGGAALSRTDETLVEFSNGCICCTLRDDLSKEVKRLALEQRYDYLLIESTGIGEPMPVAATFAVRDADGFCLSDVARLDTMVTVVDGSQFTALFSSMNTLADLGQQADSDDTRSLADLLGQQIEFADTIVISKCDLIDTTQLARVRAVVRGLNRDAQIIEAHLGEVPLPQLVGTGRFDFTRAQLAPGWMRELRGEHTPETEEYGITSFVYRARRPFHPLRFNHLLAHGLSGVIRSKGFFWLASRMDWVGELSSVGSATRTQAAGFWYAARHRVDVHEENMPPQIGIAPLPYTELGWQRQQNDCWTAPLPAPHEVSDPGEYVAMQRLWHPQWGDRRQELAVIGLDMDKDVARNELDACLLSNEELRMGPMYWSALPDPFPQWRR

SEQ ID NO: 16004 - protein, 425 aa, Arabidopsis thaliana
MLPSGLKETQLRESNNNQKVHPQPMEESINQNPEAMEALISNLFGNISSLKSAYIELQSAHTPYDPEKIQAADKVVISELKNLSEMKHFYRENNPKPVCVSPQDSRLAAEIQEQQSLLKTYEVMVKKFQSEIQNKDSEITQMLQKIEEANQKRLKLDKNLKLRGMSTNEGSNGDGNMQFPDLTTELYVSTYEAAAKAVHDFSKPLINMMKAAGWDLDSAANSIEPDVVYAKRPHKKYAFESYICQRMFSGFQQKNFSVNSESAAVMADDDTDTFFRQFLALKDMDPLDALGTNPDSNFGIFCRSKYLLLVHPKMEASFFGNLDQRDYVTGGGHPRTAFYQAFLKLAKSIWILHRLAYSFDPAAKIFQVKKGSEFSDSYMESVVKNIVVDEKEENPRVGLMVMPGFWIGGSVIQSRVYVSGVKVLE

SEQ ID NO: 16005 - protein, 266 aa, Methanosarcina barkeri str. fusaro
MKAACIQMNISLCSKKENLERALSLAEEAVSKEAEVLAFPEVFSTGFCYDHIVELAETASGPTIGALCDFSKENECILAGSMIEHREGSEFSSEMNIPPQFNLGFCIESGKLVGIHRKTQLYGLEKEYFALGEDIHPIRLKKYDLSMGLMVCNEIRYPEVSRKLALEGADLLVSASDMPDFYIYPWRIMSLSRAIENQLPHIACNRAGNDRFSTYPGRSFIADGWGRILAEAGKEECVLIGEIDLEKIKEIRKTGSIIEDRRPEIY

SEQ ID NO: 16006 - protein, 277 aa, Oryza sativa (japonica cultivar-group)
MASSAASPSSSKSDDERRQDGDRDTRDPAASSSAAAAAAQTHAEWAASMQAYYAAAAAAAGGHPYAWPPPQQQQQQQHLMAAYGAPVPFPLYHPGAYYAHASMAASVPPMAGCAVPSAAAEGKSKRKTSGGPSGEDSSGSGDGGSEDSSERRDDADEKGLSPAKWRKLGHPDIEGETSQAAAMSEQNPVKAAPNLNIGMDIWSNSTMAAMPSGQVEVNAGTHLRRDKALSQMDERELKRERRKQSNRESARRSRLRKQVGSLIDKTSFLPHENAASW

SEQ ID NO: 16007 - protein, 174 aa, Oryza sativa (japonica cultivar-group)
MEIRRAIENANIPHTYVSANCFAAYFSPNLCQMKTLLPPKERVGVYGDGNVKVFFVDEDDVGTYTIKSIDDPRTLNKTIYIRPQDNCLTQNELIAMWEKLSGKSLTKFHIHGDEFLASMKDTDFAHQVGVTHFYHIFYEGCLTNFDIGDNGAEATLLYPDVQYTRINEVIKRYL

SEQ ID NO: 16008 - protein, 168 aa, Brassica napus
MGTSSGSNLPHQMLPPRQQLQTVLSLASSDPPHLSRSISGIVRESPAESASSQETWPTSKSIMAKKTESGGKSGPDKVSLQDIARERVELVSERMLRLPEGYLEELKNGLKAILDGNGSQPVEEFMFLQKFVQTRSDLTSKTLVRAHRVQLEILVVIKTGIQAFLHPN

SEQ ID NO: 16009 - protein, 342 aa, Lactobacillus sakei subsp. sakei 23K
MKELVLVTGGSGFIASHIILQLLEQGYAVRTTVRSMAKSQRIVTSMQANGITNIEDLSFIKADLQHPEQWPAAMVGVSYVMHVASPTPKLNFKDESEMINPAVNGVLMVLKAARDANVKRVVLTSAYGAICAGHPNQQTPYTEADWSDLSAKNIHPYQKSKTLAEQAAWNFIKTEGQGLSLAAVNPVGVMGPVLSSVYSHSNVQVEQLLNGQVKAVPQVKSGYVDVRDVASLHLLAMTAPQADGERFLATTGETLSMLEVADVLRDAFPQYASRLPQKTIPNSVIKLAATFKPDLRMLATLVGKYADTSNEKAKKLLGWQQRSAADSIIATGQSMIDLGIIK

SEQ ID NO: 16010 - protein, 162 aa, Magnetospirillum magnetotacticum MS-1
MSFLDRTARAFLLTELVQGLALTLRYMFKSKVTINYPYEKGPLSVRFRGEHALRRYPNGEERCIACKLCEAICPAQAITIEPEPRPDGSRRARRYDLDMTKCIYCGLCQEACPVDAIVEGPNFEYATETRAELMYNKSKLLANGDRWEAELAFRIAADAPYR

SEQ ID NO: 16011 - protein, 352 aa, Porphyromonas gingivalis W83
MKYLSLILISMASFSFSLSAGSCSSSAKHNDSIPETKTIYFAGGCFWGTEHFFKQVRGVVATEVGYANGNVEDPSYEEVCSQTTGFAETVRVEYDPSELSLSLLLDLFFKTIDPTILNRQGNDVGSQYRTGIYYTDQEDLSLISSALSALATKYDRPIVVENEPLKNFYPAENYHQDYLDHNPRGYCHIDPSLFELARKANPARFYKKADDAELRARLTPEQYAVTRNNATEPAFDNEYWNEFREGIYVDVTTGEPLFLSTDKFDSGCGWPSFSKPIGKELISERIDRSFGMTRTEVRSTTGDAHLGHLFNDGPLEKGGLRYCINSASLRFIPKEDMKKEGYGSLLPLLNKR

SEQ ID NO: 16012 - protein, 253 aa, Glycine max
MASAQLTAIASSISTASFEGLRPSAVQFASTGRIRIGNLSQRSFRGLVVKAATVVAPKYTAIKPLGDRVLIKIKEAEEKTEGGILLPSTAQTKPQGGEVVAVGEGKTVGKNNVEISVKTGAQVVYSKYAGTEVDFNGTKHLIVKDDDIVGILETDDIKDLKPLNDRVLIKVAEAEEKTSGGLLLTEATKDKPSIGTVIAVGPGHLDEEGNRKPLSVTPGNTVLYSKYAGNDFKGKDGSDYITLRVSDVMAVLS

SEQ ID NO: 16013 - protein, 923 aa, Lotus corniculatus var. japonicus
MMELPATRILSQAVTCFLCLYIFIGSASATEGFESIACCADLNYTDPLTTLNYTTDYTWFSDKRSCRKIPETELRNRSNENVRLFDIDEGKRCYNLPTIKNGVYLIRGTFPFDSLNSSFNASIGVTQLGAVRSSRLQDLEIEGVFRATKDYIDFCLLKGEVYPFISQLELRPSPEEYLQDFPTSVLKLISRNNLGDTKDDIRFPVDQSDRIWKASSISSSAVPLSSNVSNVDLNANVTPPLTVLQTALTDPERLEFIHTDLETEDYGYRVFLYFLELDRTLQAGQRVFDIYVNSEIKKESFDVLAGGSNYRYDVLDISASGSLNVTLVKASKSEFGPLLNAYEILQVRPWIEETNQTDVGVIQKMREELLLQNSGNRALESWSGDPCILLPWKGIACDGSNGSSVITKLDLSSSNLKGLIPSSIAEMTNLETLNISHNSFDGSVPSFPLSSLLISVDLSYNDLMGKLPESIVKLPHLKSLYFGCNEHMSPEDPANMNSSLINTDYGRCKGKESRFGQVIVIGAITCGSLLITLAFGVLFVCRYRQKLIPWEGFAGKKYPMETNIIFSLPSKDDFFIKSVSIQAFTLEYIEVATERYKTLIGEGGFGSVYRGTLNDGQEVAVKVRSATSTQGTREFDNELNLLSAIQHENLVPLLGYCNESDQQILVYPFMSNGSLQDRLYGEPAKRKILDWPTRLSIALGAARGLAYLHTFPGRSVIHRDIKSSNILLDHSMCAKVADFGFSKYAPQEGDSYVSLEVRGTAGYLDPEYYKTQQLSEKSDVFSFGVVLLEIVSGREPLNIKRPRTEWSLVEWATPYIRGSKVDEIVDPGIKGGYHAEAMWRVVEVALQCLEPFSTYRPSMVAIVRELEDALIIENNASEYMKSIDSLGGSNRYSIVIEKRVLPSTTSTAESTITTQSLSHPQPR

SEQ ID NO: 16014 - protein, 253 aa, Erwinia chrysanthemi
MILNTFNLQGKVALITGCDTGLGQGMAVGLAEAGCDIVGVNIVEPKETIEKVTAVGRRFLSLTADMSDISGHAALVEKAVAEFGKVDILVNNAGIIRREDAIEFSEKNWDDVMNLNIKSVFFMSQTVARQFIKQGHGGKIINIASMLSFQGGIPVPSYTASKKRVMGITRIVANEWAKHNINVNAIAPGYMATNNTQHVRADQDRSKEILDRIPAGRWGLPQDLQGPAVFLASSASDYVNGYTIAVDGGWLAR

SEQ ID NO: 16015 - protein, 248 aa, Arabidopsis thaliana
MVRSTKGRQKIEMKKMENESNLQVTFSKRRFGLFKKASELCTLSGAEILLIVFSPGGKVFSFGHPSVQELIHRFSNPNHNSAIVHHQNNNLQLVETRPDRNIQYLNNILTEVLANQEKEKQKRMVLDLLKESREQVGNWYEKDVKDLDMNETNQLISALQDVKKKLVREMSQYSQVNVSQNYFGQSSGVIGGGNVGIDLFDQRRNAFNYNPNMVFPNHTPPMFGYNNDGVLVPISNMNYMSSYNFNQS

SEQ ID NO: 16016 - protein, 394 aa, Picrophilus torridus DSM 9790
MKYEFSDNLKYMKSSAIRNLLKYIQQPGMISFGGGMPNPETFPIDKIMEITNDVLKNYGKSALQYGTTDGLKLLRDELVKFILKDENIKCGPENIFITTGSQQALYALSKIFANPGDKVILEAPTYVGMISSLNANAVDSESIGMDENGMIVENLEEKIKSMIKDGKKPRFIYTIPTFQNPAGYTMPLDRRKHLIEISKKYEIPVIEDNPYGDLRYSGSKVPTLKSLDDDVIYLGTFSKVMAPGLRTGYVIASEDVASKLNLLKQALDLAGDSFSQYIAYEYLKNGIIYEQIPKTIELYKRKRNVMLEALDEHVDNAEWSKPDGGMFLWLRIKKNVDSEKLLEKAIEKKVAYVPGSAFYHKNPELNTMRLNFTYADDDDIKDGIKRLGQVIAEA

SEQ ID NO: 16017 - protein, 431 aa, Vibrio vulnificus YJ016
MTKSAELYQKAQQTIPGGVNSPVRAFNGVGGSPIFVERADGAFIFDADGKAYIDYVGSWGPMILGHNHAVIREAVIEAAQRGLSFGAPTEMEIKMAELVSELVPSMEQLRMVSSGTEATMSAIRLARGFTGRDKILKFEGCYHGHADSLLVKAGSGALTLGQPSSPGVPADFAKHTLTATFNDLDSVRELFAANKGEIACIIVEPVAGNMNCIPPVEGFHEGLREICDQEGALLIFDEVMTGFRVALGGAQAHYNIKPDLTTLGKVIGGGMPVGAFGGRKEVMQYIAPTGPVYQAGTLSGNPVAMAAGYACLTLLREEGNEKRLASKTKHLADGFKSLAAQHGIPLVVNQVGGMFGFFFTEQEQITCYEDVTKCDLERFKRFFHLMIDHGVYLAPSAFEASFTSLAHGSKEIEATLEAADRCFAILAAESK

SEQ ID NO: 16018 - protein, 99 aa, Triticum aestivum
MPRAEVAFAMHAGDGEVEAGFAKLQGEDFEYYMQTYSIMLGRSSKKSMVDVDLSSLGGGMNISRHHARIFYDFQRRRFALDVIGKNGCHVEGVLHLPGN

SEQ ID NO: 16019 - protein, 343 aa, Buchnera aphidicola
RKNSILKKNQSWINATKNNFLVGDYESLIPNADLVINLTPDKQHSNVVKELQKLMKKDACLGYSHGFNIVENGETIRKDITVIMVAPKCPGTEVREEYKRGFGVPTLIAVHNENDYSNMGLEVAKAWAFSTGGHRAGVLESSFVAEVKSDLMGEQTILCGMLQTASLVCYEKLITTQNHPGYAGKLIQFGWETITESLKHGGITLMMDRLSNSSKIRAFKLSQEIKRIFSKLFQKHMDDIISGDFSSKMIQDWKNKDQNLLNWRYKTKNTSFEQSPDYDKKILEQEYYDHGILMVAILKAGIELSFETMIQSGIMEESAYYESLHELPLIANTIARKKLYEMN

SEQ ID NO: 16020 - protein, 496 aa, Phaseolus vulgaris
MALFMAILGVLVLLLCFCSALLKWNEVRFRRKGLPPGAMGWPVFGETTEFLKQGPNFMKNKRARYGSFFKSHILGCPTIVSMDPELNRFILMNEAKGLVPGYPQSMLDILGTRNIAAVHGSTHKYMRGALLSIISPTLIRDQLLPKIDEFMRTHLMDWDNKVINIQEKTKEMAFLSSLKQIAGMESSSIAQPFMTEFFKLVLGTLSLPINLPRTNYRGGLQARKSIISILSQLLEERKASQDVHVDMLGCLMKKDENRYKLSDEEIIDLVITIMYSGYETVSTTSMMAVKYLHDHPKVLEEIRKEHFAIRERKKPEDPIDCNDLKSMRFTRAVIFETSRLATIVNGVLRKTTHDMELNGYLIPKGWRIYVYTREINYDPFLYHDPLTFNPWRWLVCNTTYTFFHFNMKPRKVESRIINEKLQMQGNSLESQSHFLIFGGGTRQCPGKELGIAEISTFLHYFVTRYRWEEVGGDKLMKFPRVVAPNGLHIRVSSFSN

SEQ ID NO: 16021 - protein, 346 aa, Buchnera aphidicola
KKNSIANKNQSWINAIENNFKVDDYDALIPDADLVINLTPDKQHHSVIKKLQKLMKKNAVLGYSHGFNIVEFGEKIRKDITVIMVAPKCPGTEVREEYKRGFGVPTLIAVHHENDINKIGLEVAKAWAFSTGGHRAGVLESSFIAEVKSDLMGEQTILCGMLQTASLLCYEKLITEKCNPAYSAKLIQNGWETITESLKHGGITLMMDRLSNSSKIRAYKLSKEIKKILSPLFQKHMDDIISGEFSNEMMKDWENQDLKLLNWRYKTKNTSFETAPVYNEKIPEQEYYDHGILMIAILKSGIELSFEKMIETGIKEESAYYESLHELPLIANTIARKKLYEMNKVI

SEQ ID NO: 16022 - protein, 552 aa, Xylella fastidiosa 9a5c
MKALFRACRIGKVMLRYRLDTLLDGTAAERWLRLAKPFVPRISAEIVEQSRGRRLRLALQELGPIFVKFGQILSTRRDLVPQDIGDELVMLQDRVEPFEGQTARIIIETALGKSVESAFAHFDTVPLASASISQVHAATLHDGREVVVKVLRPDIEHQISDDIALLKSLATLVEHTHPNADKIRPCEIVAEIETTLAAELDLQREGANASVLRRFWEASDDIYVPEVIWSHTAEQVLTLERMYGIPSDDIALLDASGIDRKALSSKGIRVFYTQVFRDNFFHADAHSGNIWVDSDPARKSNPRFIALDFGIMGQLSQKDQYYLAENFMAIFHKDYRRIAELHVEAGWIPPHVRIEELEAAARSVCEPYFTRPLSQISLAEVLMKLFHVARRYQLTLQPQLILLQKTLLNIEGVGRQLDPELDIWVVARPVLERILRARYSPRHALKELNKRLPEIMTHAPDTPRLIHTWLVQQVESRKQNDVYLQQIRALAMTLQGLQRRVVNAIVGSGLLVAAAVLYGLHPDGLYLGAIPVWSLISGCVGALALFSAWWRS

SEQ ID NO: 16023 - protein, 549 aa, Colwellia maris
MAAKDVLFGNDARVKMLRGVNILADAVKVTLGPKGRNVVIDKSFGGPIITKDGVTVAKEIELEDKFENMGAQMVKEVASKANDEAGDGTTTATVLAQAIVNEGLKSIAAGMNPMDLKRGIDKAVIAAVEALKESSTPVTDNKAIEQVGTISANSDETVGKIIATAMEKVGTEGVITVEEGQALTDELDVVEGMQFDRGYLSPYFINKQENGTVELENPFILLVDKKISNIRELLTTLEGVAKAGKPLLIIAEDVEGEALATLVVNNMRGIVKVAAVKAPGFGDRRKAMLQDVATLTAGTVISEEIGMELEKVTLEDLGQAKRVVISKDTTIIIDGIGVEADIQARVSQIRGQIEDSSSDYDKEKLQERLAKLAGGVAVIKIGAATEMEMKEKKSRVEDALHATRAAVEEGVVAGGGVALIRAADAIKDLEGANEDQTHGINVAIRAMEAPLRQIVANCGDEPSVVLNEVRNGKGNYGYNAGNSTYGDMIEMGILDPTKVTRSALQFAASVAGLMLTTEAMITDAPVKDAGGMPDMSGMGGGMGGMGGMM

SEQ ID NO: 16024 - protein, 342 aa, Oryza sativa (japonica cultivar-group)
MASSAASPSSSKSDDERRQDGDRDTRDPAASSSAAAAAAQTHAEWAASMQAYYAAAAAAAGGHPYAWPPPQQQQQQQHLMAAYGAPVPFPLYHPGAYYAHASMAASVPPMAGCAVPSAAAEGKSKRKTSGGPSGEDSSGSGDGGSEDSSERRDDADEKGLSPAKWRKLGHPDIEGETSQAAAMSEQNPVKAAPNLNIGMDIWSNSTMAAMPSGQVEVNAGTHLRRDKALSQMDERELKRERRKQSNRESARRSRLRKQQECEELSQKVTELTAVNSTLMTELDKLKKDCEDMEAENSQLMDEMVQSEGSSVIATLSVKIDTSKDRHGSSSQLNKHTNDDSKG

SEQ ID NO: 16025 - protein, 407 aa, Petroselinum crispum
MGSSEMEKSSKETKEPKTPTSQEQVSPVVAGPAGPVTPDWSGFQAYSPMPPHGYMASSPQAPHPYMWGVQHMMPPYGTPPHPYVMYPHGGIYAHPSMPPGSYPFSPFAMPSPNGVAAEASGNTPGSMEADGGKVSEGKEKLPIKRSKGSLGSLNMITGKTNEASKPSGAATNGGYSKSGESASEGSSEEGSDANSQNDSQIKSGSRQDSLEAGASHNGNAHGLQNGQYANNSMVNQPISVVPLSTAGPTAVLPGPATNLNIGMDYWGGATSSAIPAMRGQVSPPITGGTVSAGARDNVQSQLWLQDERELKRQKRKQSNRESARRSRLRKQAECDELAQRAEALKEENASLRAELSRFRTEYEKIVAQNEVLKEKIREVPGQEDQWPGRNDQHNGNGSRETGHTEPA

SEQ ID NO: 16026 - protein, 189 aa, Dunaliella tertiolecta
MAALLAKSASVAPMAKASRTATKVQASLKPAVRAAPKAQPAVRANQMMVWNPINNKQFETFSYLPPLTADQIAKQVDYIVNNGWTPCLEFAEQNQAYVSSDSAVRFGAVSANYYDNRYWTMWKLPMFGCTDPSQVLSEINKCSRAFPESYQRLVAFDNKKQVQVISFLVQRPRNATDYCPLEERSVSGM

SEQ ID NO: 16027 - protein, 188 aa, Dunaliella tertiolecta
MASLIAKSASVAPVASRTSTKVQASLKPAVRAVPKAQAPAVRANQMMVWQPINNKQFETFSYLPPLTADQIARQVDYIVENGWTPCLEFAEEGQAYVSSDSAVRFGAVSANYYDNRYWTMWKLPMFGCTDPSQVLSEINKCSRAFPNSYQRLVAFDNKKQVQVISFLVQRPRNATDYCTISERSVSGM

SEQ ID NO: 16028 - protein, 664 aa, Shewanella oneidensis MR-1
MSSRKVLANAIRALSMDAVQKANSGHPGAPMGMADIAEVLWNDFLKHNPNNPKWVDRDRFILSNGHGSMLIYSLLHLTGYDLPMDELKQFRQLHSKTPGHPEYGYTPGVETTTGPLGAGISNAVGMAIAEKTLAAQFNREGHEIVDHYTYCFLGDGCLMEGISHEACSLAGTLGLGKLIAFWDDNGISIDGHVEGWFTDDTPKRFESYGWHVIANVDGHDSDAIRAAIEAAKAVTDKPTMICCKTIIGFGSPNKSGSHDCHGAPLGDAEIAAAREFLGWPHAPFEIPADVYAGWDAKDAGAAREAAWNDKFAAYAAAYPELAAEYERRVLKGELPADFEAKAQAFIQECQAKGEGIASRKASQNAIAAFGAILPELLGGSADLAGSNLTLWAGSKGIQDDPAGNYVYYGVREFGMSGIMNGVSLHGGFINYGATFMMFMEYARNAVRMSALMGIQNIFVYTHDSIGQGEDGQLTNPFEQLANLRMTPNMAVWRPCDAAETAVAWKAAIERRHAPTSLIFSRQNLKAQARTAEQLANVAKGAYVLQDCAATPEYILIATGSEVQLAMEAAATLTEQGKQVRVVSMPSNTEFDKQDAAYKESVLPKAVTKRIAIEAAHTDFWYKYVGFEGTVVGMTTFGESAPGNVLLKHFGFTVENVLNAAKSLG

SEQ ID NO: 16029 - protein, 420 aa, Petroselinum crispum
MGSSGMDKSPKDIKEAKEPKIPTSQEQPSPAAAAAAAAAAAAAAGPVTPDWSGFQAYSPMPPHGYMASSPQAPHPYMWGVQHMMPPYGTPPHPYVMYPHGGIYAHPSMPPGSYPFSPFAIPSPNGVAEAFGNTPGSTEADGKVSEGKEKLPIKRSKGSLGSLNMITGKNNEASKTLGAAANGGYSKSGDSASDGSSEEGSDANSQNDSQIKSGSRQDSLEGESQNGNAHGLQNGQNANHSMVNQQISIVPITAAGTAGAIPGPMTNLNIGMDYWGGVTSSAVPAMRGKVTSPPITGGIVTAGARDNVQSQLWLQDERELKRQRRKQSNRESARRSRLRKQAECDELAQRAEVLQEENASLRAELGRARSEYEKALAQNAILKEKVGDVAGQEDQWPGRNDQHTGDEGQETGHIEPGQSGH

SEQ ID NO: 16030 - protein, 170 aa, Haemophilus somnus 129PT
MSNKAIYLAGGCFWGVEGYFHRIDGVLDAISGYANGKTENPSYQDVLYNNTGHAETVKVIYEQNKLSLEDILQYYFRVIDPTSLNQQGNDKGTQYRTGIYYTDPQDREIILTALTQEQKKYSKPIVVEVLPLQRFDPAEEYHQDYLLKNPNGYCHIDIKKADEPLVKTYK

SEQ ID NO: 16031 - protein, 271 aa, Triticum aestivum
MAPKNALPVAVAAAADGGMEPRFRGVRKRPWGRYAAEIRDPARKARVWLGTFDTAEAAARAYDAAALHYRGPKAKTNFPVGTVAAYTHIPLPPPKALTVSPSSSTVESSSRDTPAAAPAAPAAAAPAAPPALDLSLAMPAMVAAQPFLFLDPRVAVTVAVAAPAPAPAPCRSAAISGMNKVASREEEQSDTGSSSSVVDASPAVGVGFDLNLPAAAGDGIGDGPIFVRPMTTRPGSKASSPRGRIYGLEDWGGLLKGLSVRLTARDGPPNG

SEQ ID NO: 16032 - protein, 420 aa, Rhodopseudomonas palustris CGA009
MSQGVTAPFARHAMAYVLAGGRGSRLMELTDWRAKPAVYFGGKSRIIDFALSNALNSGIRRIAVATQYKAHSLIRHLQRGWNFFRPERNESFDILPASQRVSEEMWYRGTADAVFQNIDIIESYDPKFIVLLAGDHVYKMDYEKMLQQHVEQGADVTVGCLEVPRAEATAFGVMHTDTTDRIISFLEKPADPPAMPGKADKSLVSMGIYVFETKFLLDELRRDAADPNSSHDFGKDIIPYIVKHGKAVAHHFDKSCRRSSSEAVSYWRDVGTVDAYWAANIDLTDIVPELDLYDREWPIWTYGEITPPAKFVHDKEGRRGEAVSSLVSGGCIISGASLRHSLLFTGVRVHSFSHVENTVVLPYADIGRSCRLKNVVIDAEVKLPAGLVVGEDPEFDAKRFRRTENGICLITRAMIEKLDA

SEQ ID NO: 16033 - protein, 483 aa, Rhodopseudomonas palustris CGA009
MTTLAVLSVASELFPLIKTGGLADVAGALPAALRANDVAVTSLLPGYPAVLGGIEDPQQVHSFNELFGGTARLLAARCGDLDLFVLDAPHLYVRPGNPYVGPDGKDWPDNGLRFAALAQVGAALGQGLLPHYKPDVLHAHDWQTGLLPAYLKYSGRPGPKTVFTIHNLAFQGRFPYELLGRLGLPERAFGLDGIEYYGGIGYLKAGLQLADRITTVSPTYAAEIQGSEAGMGLDGLLRLRADRLSGILNGIDTDVWNPASDALISATYDVESIAARARNKKVLQARFGLKPEPGALLYGVISRLSWQKGLDLLLEALPQLIGGGAQLALLGSGDAELEQGYAAAARKYPGQVGAVIGYDEALAHQIQAGADALLVPSRFEPCGLTQLCALRYGAVPVVARVGGLADTVVDANEMATATGVATGVQFAPVTTDALIKAFGKTRALFADVVAWRNLQINGMTTDVSWKNPAQHYAKLYRDLVAER

SEQ ID NO: 16034 - protein, 201 aa, Cicer arietinum
AILITLAVNDRIIMPLWKKMKGKPGFTNLQRIAIGLLLSTFGMAAASLCEVKRLSVAKSVKGNQATIPISVFLLIPQFFLVGSGEAFIYTGQLDFFITQSPKGMKTMSTGLFLTTLSLGFFISSFLVSVVKKVTGTRDGQGWLADNINKGRLDLFFALLTILSFINFVAFLVCAFWYKPKKAKPSMQMGAINNGSSVEEKC

SEQ ID NO: 16035 - protein, 251 aa, Campylobacter coli RM2228
MQRIVVKVGSHVISDENLLNLKRFENLVAFLTKLMQKYEVILVTSAAISAGCTKLHIDRKNLINKQVLAAIGQPFLISVYNEFLAKFGKMGGQILLTGKDFDSRKATKHAKNAIDAMIDLGILPIINENDATAIEEIVFGDNDSLSAYATHFFEADLLVILSDIDGFYDKNPSEFSDAKRLERVEFIKEEWLNVSVKTGSEHGTGGIVTKLKAAKFLLENHKKMFLASGFDLSVAKAFLLENKQIGGTLFE

SEQ ID NO: 16036 - protein, 122 aa, Glycine max
  misc_feature (57)..(57): Xaa can be any naturally occurring amino acid
  misc_feature (69)..(69): Xaa can be any naturally occurring amino acid
  misc_feature (95)..(95): Xaa can be any naturally occurring amino acid
  misc_feature (101)..(101): Xaa can be any naturally occurring amino acid
  unsure (1)..(122): unsure at all Xaa locations
KNRIALSNLGQKQSRYKSYRIQTSMSTITDLYSELKELVPDYQERGKKLKKDHGRVXLEKITDDIELAXMRGMTDLVWLGSTVDPDEGNRFKGTXITECQXKLSGVFPGGEPLPEELTFVFF

SEQ ID NO: 16037 - protein, 142 aa, Cicer arietinum
AQLLGSIVASLLLVFATGLSVPAFSLSAGVGVGPALVLEIVLTFGLVYTVYATAVDPKKGNIGIIAPIAIGFIVGANILVGGAFTGASMNPAVSFGPAVVSWSWSNHWIYWAGPLIGGGLAGLIYEVVFISHTHEQLPTTDY

SEQ ID NO: 16038 - protein, 121 aa, Cicer arietinum
MAKSYFKQEHDLEKRRAEAARIREKYPDRIPVIVEKAERSDIPSIDKKKYLVPADLTVGQFVYVIRKRIKLSAEKAIFIFVDNVLPPTGAIMSAIYDEKKDEDGFLYVTYSGENTFGDLIS

SEQ ID NO: 16039 - protein, 420 aa, Glycine max
MAMATMEEIPQSPEAKLGMRVEDLWDVQEAQLSPTEKLNACFESIPVSAFPLDPSNTEIEIKSDATLADAVKILAGHNVFSAPVVDVEAPEDASWIDRYIGIVEFAGIVVWILHQSEPTSPRTPSTPSSARAIAAAANGAAFALELEALGLGSAATTAGNFFEDLTSSELYKNTKVRDISGTFRWAPFLALERSNSFLTMLLLLSKYKMKSVPVLDLGSGAIDNIITQSAVIHMLAECAGLQWFESWGTKKLSEVGLPLVTGNQIIKVYEDEPVLQAFKVMRKKRVGGVPVIERETKKAVGNISLRDVQFLLTAPEIYHDYRGITVKDFLTEVRSYLEKNKNASPMLNEYVTCKKDCTIKELIQLLDQEKIHRVYVVDDDGDLQGLITLRDIISRLVHEPRGYFGDFFDGVLPLPANSRV

SEQ ID NO: 16040 - protein, 322 aa, Glycine max
MATVSSLCAVFPILTPTLSKPRLAPLSCRIPKRRRISIITSVAEDREIVPVSEGRGTRLNEVEGFQPSEPHTESEVVVSSLTSSSSVNAIIVLGFGTFAVTKLLTIDHDYWHGWTLYEIVRYIPEHNWIAYEQALKANPVLAKMAISGIVYSIGDWIAQCYEGKPLFEFDRTRVLRSGLVGFTLHGSLSHYYYQLCEALFPFQEWWVVPAKVAFDQTVWSAIWNSIYFVVLGLLRFESLTNIYGELKSTFLPLLTAGWKLWPFAHLITYGVIPVEQRLLWVDCVELIWVTILSTYSNEKSEARISEAASETGSSTSSENSKE

SEQ ID NO: 16041 - protein, 410 aa, Triticum aestivum
  misc_feature (267)..(267): Xaa can be any naturally occurring amino acid
  misc_feature (372)..(372): Xaa can be any naturally occurring amino acid
  misc_feature (376)..(376): Xaa can be any naturally occurring amino acid
  misc_feature (382)..(382): Xaa can be any naturally occurring amino acid
  misc_feature (385)..(385): Xaa can be any naturally occurring amino acid
  misc_feature (389)..(389): Xaa can be any naturally occurring amino acid
  misc_feature (392)..(392): Xaa can be any naturally occurring amino acid
  unsure (1)..(410): unsure at all Xaa locations
AYLGDTTEQVCTKKQAGTGPEFPGYRRPTRPGGGCGRNCLGDCCLPASKLPLYAFKADPKKPAQDDELPTEFFLNSLLLAQWEDRVARGLFRYDVTACETKVIPGELGFVAQLNEGRHLKKRPTEFRVDRVLQPFDSAKFNFTKVGQEEVLFRFEKGGGDSSYFLENAPSTEGDHAPSVVAINVSPIEYGHVLLIPRVLDRLPQQIDPESFLLALHMAAEAASPYFRLGYNSLGAFATINHLHFQAYYLSVPFPVEKRLPRGSPLPXCALNSGVKVSKLTNFPVRGLVFERGNTLKDLADVVTNACIWLQENNVPFNVLISDSGRRIFVFPQCYAEKQALGEVSQDLLDTQVNPAVWEISGHIVLKRRTDFXGASXASTWRXLAXVSLXEDXFRSECSLRQRLTDLQEED

SEQ ID NO: 16042 - protein, 1119 aa, ASPERGILLUS NIDULANS FGSC A4
MYKTGNHSSDPARKNHRSAPPIPERLNTGNSRLMRQTRTAAKDSSFVLISRSGHFLANQCLASSCCSSVNLLEPDAAGSEDYMAGSHRSPVLKDQWRGSSGEVGDQRGREKHSRPRGSHRDRGRERFRDQDRHHHHPPNDDRLHRSSRSPPPRSFPGPDNKPQHRDFSTNIASTRASPAPSRSEIRPSQNINRPDSPERIGYRVTNSHMRSAERNHRREDSPSAPPFKRQRTHSPPPDGFQGRPPTHSRGAPPRHGRDFDREPSHSKGRGGRPPGRGRPSRRPSPRRERERRKHDSGLRDPSRNRQPWSHDWEDKPPIHPSRRYRSPPLDGIERDSYLRSPSRVSAGTLDSRTSALSRRGSKGDIAMHPPPSPSRLSLDRVPDTGYGAGLPERSRASRSPVNSYHESTRPSSPYSTARSGRSGQHSSHPSQHSFRASNFSEHDSPSRLSHGQPTSSHHVAPSHSYRDGQQRYQETHQDRRISGIVPTAPLSHARNRFSSPQRDASASRSRAGPPSPPQGPAADDPPPPPPPPTEPRSHREGYQNLTNHRPASRETRAPDEGSGHDSGSGFRAGQTGQPDTRPPEPPSGPSKGGKISFAFKAKTGPPSAPKPVPDLAQRMLAREPPQRVAEPPRSKMSSGPPPRFKPEPRFDRRDRDRDRHRDRDRNRGRNDRRDYREPRGSREARDYRDSRRDDRRVDPRDKRRNDKASGVRPERRHDPSPEPVKRSKIMLRLKPRPTISEEFANSDSVYFRKPGNESVIGAGTYGKVFKAIHVYTQRKVALKKIRMEGEKDGFPVTAVREIKLLQHLRNHNVVSLLEVMVEKNECFMVFEYLSHDLTGLINHPTFTLTAAHKKDLAKQMFEGLSYLHHRGVLHRDIKAANILISNQGRLKYADFGLARFFSKSRQLDYTNRVITIWYRPPELLLGETQYGPAVDVWSAACVYVEMFTKKAVFPGEGGEISQLDKLYNTLGTPTRAEWPNIVEMPWFELMRPTERRKRIFEDIYRDILSPAALDMVSQVFRYDPAKRPSAEDVLAHPYFHSEEPSPQQPIELENIQGDWHEFESKALRKERDREARRAEYQRDKEKRKILAAQDERETKRIKPDTSDGLTSSVPQPGQQ

SEQ ID NO: 16043 - protein, 362 aa, Glycine max
MWSSKTTLMFGVAAIALMMFLSSASADDVVALTEETFENEVGKDRAALVEFYAPWCGHCKRLAPEYEQLGTTFKKTKSVLIAKVDCDEQKSVCSKYGVSGYPTIQWFPKGSLEPKKYEGARTAEALAAFVNIEAGTNVKIASVPSSVVVLSPNNFDEVVLDETKDVLVEFYAPWCGHCKALAPIYEKVAAAFNLDKDVVIANVDADKYKDLAEKYGVSGYPTLKFFPKSNKAGENYDGGRDLDDFVAFINEKCGTYRDGKGQLTSKAGIIASLDDLVKEFVSADSNEKKAVYSRLEEEVKKLKGSSARHGDLYLKLAKKGMEKGADYAKNEIQRLERMLEKSVSPAKADEFTLKKNILSIFA

SEQ ID NO: 16044 - protein, 200 aa, Picrophilus torridus DSM 9790
MMEEELLIPEDEYQKSGIHIGTQIKSKDMDPYIFKIRNDGLYILDIRKTNHALIIAGKMLARYRPEQILAVAQRQYAFRPVSKFSEVVGSKSIIGRFIPGTLTNPALPNYSEAKIILVTDPLADTQAMKEAIKVGIPIIAMCDANNKTDFVDLIIPTNNKGRRSLAVIYWLLAREILKNRGDIKSYDEFKQTIDDFEVQI

SEQ ID NO: 16045 - protein, 585 aa, Enterococcus faecalis V583
MKKTKIVCTIGPASESVDMLVNLINAGMNVCRLNFSHGDYEEHGARIKNIREAVKITGKRVAILLDTKGPEIRTNDMENGAITMKIGDSVRISMTEVLGTNEKFSITYPELINDVNVGSHILLDDGLIDLEVTDIDRDANEIVTVVKNEGVLKNKKGVNVPGVSVNLPGITEKDANDIRFGIGQGIDFIAASFVRRASDVLEITKILEEENATHIQIIPKIENQEGIDNIDEILKVSDGLMVARGDMGVEIPTEDVPVVQKALIKKCNALGKPVITATQMLDSMQRNPRPTRAEANDVANAIYDGTDAVMLSGETAAGDYPLEAVQTMARIAVRTEETLVNQDSFALKLYSKTDMTEAIGQSVGHTARNLGIQTIVAATESGHTARMISKYRPKAHIVAITFSEQKARSLSLSWGVYATVADKPSSTDEMFNLASKVSQEEGYASEGDLIIITAGVPVGEKGTTNLMKIQMIGSKLVQGQGVGEEAIIAKAVVAATAEEAVAKATEGAILVTKTTDKEYMPAIEKASALVVEEGGLTSHAAVVAIAQNIPVIVGAADATSLINNDEVITVDPRRGIVYRGATTAI

SEQ ID NO: 16046 - protein, 240 aa, Zea mays
MGRGKIVIRRIDNSTSRQVTFSKRRNGIFKKAKELAILCDAEVGLVIFSSTGRLYEYSSTSMKSVIDRYGKAKEEQQVVANPNSELKFWQREAASLRQQLHNLQENYRQLTGDDLSGLNVKELQSLENQLETSLRGVRAKKDHLLIDEIHDLNRKASLFHQENTDLYNKINLIRQENDELHKKIYETEGPSGVNRESPTPFNFAVVETRDVPVQLELSTLPQQNNIEPSTAPKLGLQLIP

SEQ ID NO: 16047 - protein, 274 aa, Pseudomonas sp. MCI3434
MKIELVQLAGRDGDTAYNLSRTLNAIATCAGDTDLLVFPETYLSGFVGGAQLAQVAEPLHGTTLQTLLQAVRQRDVAVVLGFAEVHQGRFYNSSVLVTPEGIALQYRKTHLWPSERSDFSPGDRFTTVLWRGVRVGLLICYDIELPETSRALAQLGAEVVIVTNGNMDPYGPVHRTAIMARAQENQLFAVMVNRVGAGDDGLVFAGGSMAVDPFGRVLFEAGRDEVRHVVELDLDQLKAARRDYDYLKDRRLMLSGEQTEHPDGRRELLIGASQ

SEQ ID NO: 16048 - protein, 467 aa, Magnaporthe grisea 70-15
MKNTALLVATAAASVAAVGIAEIPREQVSTSSQPSTSDPGFVSFPIYHRSVSKPILKRNTDVTIYNISSVSYLIQLSIGTPGQQVKVAIDTGSDELWVNPNCTAVKSQDQRAECIADGQYNPGQSSTSQVSTTSNNIPYGKGDVNITYYKDSISMSNSSISLTNVIFGVATSSKDLNEGIMGLGYGDGVNLRYNNMVDSLFLQNVTKSRAFSVALGSAEASNSGVISFGGVDTKKFSGKLGQMPILGPQGKEEIRRYWVPMDSIAMSKNGGNKTYSGGNIPIVIDSGSTLSYLPSSVVTAMAMDANALWNSEGGVYFVKCDKMPADASFDFSFNNGSFRISVPWRNFFWNTGGNTCVLGAVPIKSGSVTALLGDSFMRSVYTVFDQTSNMVFMAPYANCGSNEQMIPASPSGAAANFTGECSPGQGLPDPTPQKNAAGKASGEPSKFEFWACAAVLVVGHLVFGMLL

SEQ ID NO: 16049 - protein, 313 aa, Arabidopsis thaliana
MNSNIFPPSKQQNELNNIQQSFSNLQSQCSNLLLNVSQTLNPLFNANTNNNKPNIFSALNSFRDQAKQALDSRISRFNSGKAPVWARISDDGGGARAQVTVPIRGSGKGLSADAIEERLAGVPVYALSNSNEEFVLVSGTSSGKSLGLLFCKEEDAETLLKEMKSMDPRMRKEGSKVVALALSKVFQLKVNGVAFRLIPESTQVKNALKERKTAGIDDDDFHGVPVFQSKSLILRSENMSYRPVFFRKEDLEKSLIRASSQQNRLNPALKPGDIQVAVFEDIVKGMRESTTSNWDDIVFIPPGFEVSTEQTQE

SEQ ID NO: 16050 - protein, 207 aa, Eucalyptus grandis
MARGKTKMRRIENATSRQVTFSKRRKGLLKKAYELSVLCEAEVAVIIFSQNGKLYEFSSNSEIRKTIDRYRRSTNVDTYQLCGRYILHLKQETMDMERKIELLEVSQQKLSGQCLGSCSINEIQEIGDQLEQSLSSIRKRKAQLFNDQIQQLQAKERHLKEENAKLLAKFLANPWQSTAHPRAAAINSRSSRGTDVETGLFIGLPES

SEQ ID NO: 16051 - protein, 296 aa, Saccharomyces cerevisiae
MITTPLVHVASVEKGRSYEDFQKVYNAIALKLREDDEYDNYIGYGPVLVRLAWHISGTWDKHDNTGGSYGGTYRFKKEFNDPSNAGLQNGFKFLEPIHKEFPWISSGDLFSLGGVTAVQEMQGPKIPWRCGRVDTPEDTTPDNGRLPDADKDAGYVRTFFQRLNMNDREVVALMGAHALGKTHLKNSGYEGPWGAANNVFTNEFYLNLLNEDWKLEKNDANNEQWDSKSGYMMLPTDYSLIQDPKYLSIVKEYANDQDKFFKDFSKAFEKLLENGITFPKDAPSPFIFKTLEEQGL

SEQ ID NO: 16052 - protein, 670 aa, Arabidopsis thaliana
MADSPVDSSPAPETSNGTPPSNGTSPSNESSPPTPPSSPPPSSISAPPPDISASFSPPPAPPTQETSPPTSPSSSPPVVANPSPQTPENPSPPAPEGSTPVTPPAPPQTPSNQSPERPTPPSPGANDDRNRTNGGNNNRDGSTPSPPSSGNRTSGDGGSPSPPRSISPPQNSGDSDSSSGNHPQANIGLIIGVLVGAGLLLLLAVCICICCNRKKKKKSPQVNHMHYYNNNPYGGAPSGNGGYYKGTPQDHVVNMAGQGGGNWGPQQPVSGPHSDASNLTGRTAIPSPQAATLGHNQSTFTYDELSIATEGFAQSNLLGQGGFGYVHKGVLPSGKEVAVKSLKLGSGQGEREFQAEVDIISRVHHRHLVSLVGYCISGGQRLLVYEFIPNNTLEFHLHGKGRPVLDWPTRVKIALGSARGLAYLHEDCHPRIIHRDIKAANILLDFSFETKVADFGLAKLSQDNYTHVSTRVMGTFGYLAPEYASSGKLSDKSDVFSFGVMLLELITGRPPLDLTGEMEDSLVDWARPLCLKAAQDGDYNQLADPRLELNYSHQEMVQMASCAAAAIRHSARRRPKMSQIVRALEGDMSMDDLSEGTRPGQSTYLSPGSVSSEYDASSYTADMKKFKKLALENKEYQSSEYGGTSEYGLNPSASSSEEMNRGSMKRNPQL

SEQ ID NO: 16053 - protein, 509 aa, Arabidopsis thaliana
MDVEQKKPLIESSDRNLPDFKKSVKLKYVKLGYHYLITHGMYLFLSPLVLVIAAQISTFSVTDLRSLWEHLQYNLISVVVCSMLLVFLMTIYFMTRPRPVYLMNLRCENAQKRSLWTRSKLTGSFTEENLESQRNLEFQRKILQRSGLGESTYLPEAVLNVPPNPCMKEARKEAETVMFGAIDELLAKTNVNPKDIGILIVNCSLFNPTPSLSAMVVNHYKLRGNILSYNLGGMGCSAGLISIDLAKHLLHSIPNTYAMVISMENITLNWYFGNDRSKLVSNCLFRMGGAAILLSNKRWDRRRSKYELVDTVRTHKGADDKCFGCITQEEDSASKIGVTLSKELMAVAGDALKTNITTLGPLVLPTSEQLLFFATFKMKIKPYIPDFKLAFEHFCIHAHFCIHAGGRAVLDELEKNLKLTEWHMEPSRMTLYRFGNTSSSSFHASVAYSEAKGRIKKGDRIWQIAFGSGFKCNSSVWRAVRSVNPKKEKNPWMDEIHEFPVEVPKVSTI

SEQ ID NO: 16054 - protein, 387 aa, Mesorhizobium sp. BNC1
MPIVNRAAELQGEVTEWRRQLHRNPELLFDVNETAAFVSDKLREFGCDEVVTGLGRTGVVGIIRGSRGAGPCIGLRADMDALPLQEAVDRPYASAVPGRMHACGHDGHTAMLLGAAKYLAETRNFVGTAAVIFQPAEEGGGGGNEMVKDGMMERFGITRVFGMHNLPGMPVGHFGIRPGPIMASTAEFNIVVEGKGGHAAMPHKTIDPVVTAAQIVMGLQTIAARSADPLESVVVSVTKFHGGDAHNIIPDRVEMAGTIRTLKGEVSLLAEGRLRTIAEGIAHAHGAKVAIDYDPNYPVTVNNQAEAEFAAQVAVAVAGAANVATDVPPLMGGEDFSYMLLARPGCLIFIGNGDSAGLHNPSYDFNDEAIPYGISYWVRLVESALPA

SEQ ID NO: 16055 - protein, 288 aa, Phytophthora ramorum
  misc_feature (11)..(11): Xaa can be any naturally occurring amino acid
  unsure (1)..(288): unsure at all Xaa locations
YVPRAILMDLXPGTMDSVRAGPYGQLFRPDNFVFGQTGAGNNWAKGHYTEGAELIDSVLDVVRKEAESCDCLQGFQITHSLGGGTGSGMGTLLISKIREEYPDRIMCTYSVCPSPKVSDTVVEPYNATLSVHQLVENADEVMCLDNEALYDICFRTLKLTTPTYGDLNHLVCAAMSGITTCLRFPGQLNSDLRKLAVNLIPFPRLHFFMIGFAPLTSRGSQQYRALTVPELTQQQFDAKNMMCAADPRHGRYLTAACMFRGRMSTKEVDEQMLNVQNKNSSYFVEWIP

SEQ ID NO: 16056 - protein, 239 aa, Thermoanaerobacter yonseiensis
MYFLGIDLGTSAVKIILMDETGTVLGSVSKEYSIYYPQPGWSEQNPEDWWNATKEGIRELIIRTGVKNDEIKAVGLSGQMHGLVVLDEVNNVLMPAILWNDQRTQEECDYITQTLGKEKLTKYTGNKALTGFTAPKVLWVKKHRPEIYKKIKHILLPKDYIRFKLTGEYATDVSDASGTLLFDVENRRWSKEMLDALDIPYDWMPKCYESTGVTGYVTKEAADLTGLKEGTIVVGGGGD

SEQ ID NO: 16057 - protein, 149 aa, Mougeotia scalaris
MADQLTEEQIAEFKEAFSLFDKDGDGSITTKELGTVMRSLGQNPTEAELQDMINEVDADGNGTIDFPEFLNLMARKMKDTDSEEELKEAFKVFDKDQNGYISAADWRHVMTNLGEKLTDEEVDEMIREADVDGDGQVNYEEFVKMMMAK

SEQ ID NO: 16058 - protein, 153 aa, Methanosarcina barkeri str. fusaro
MRWPMRRSFSGPARWDPFDEIRRTQERLNQLFEDFMPMEEWGGGKVYTPAIDIKEEDDKLLVTTDLPGINKEDVQINLKEDILEISAKTGKEKETEEEGYLRRERAYTQFYRAVRLPASVKEEGSTAKMENGVLTITLPKMQLEELTKKIAIE

SEQ ID NO: 16059 - protein, 485 aa, Photobacterium profundum SS9
MEFQMSEQLRRTKIVTTLGPATDRDNNLEKIIAAGANVVRMNFSHGSPEDHIQRTKMVREIAAKLGKHIAILGDLQGPKIRVSTFKDGKIQLAIGDKFTLDSDLPKGEGHQDAVGLDYKELPNDVVTGDLLLLDDGRVQLKVTAVSGNKVHTEVTVGGPLSNNKGINKKGGGLSAEALTEKDKADIITAAQMGVDYLAVSFPRNGEDMKYARSLALDAGLEAKLVAKVERAEAVATTEAMDDIIMASDVVMVARGDLGVEIGDPELVGVQKKLIRRARSLNRTVITATQMMESMITSPMPTRAEVMDVANAVLDGTDAVMLSAETAAGDFPVETVQAMSSVCVGAEKEPSINVSNHRLTRTFASPEETIAMSTMYAANHMEGVKAMVAMTESGRTALMMSRISSGLPIFAMSRNESTLNRSSLYRGVTPVYFDRDSDAGLEAAKHALVVLKEHGYLATGDLVIITQGDVMDTIGSTNNMRILTVE

SEQ ID NO: 16060 - protein, 274 aa, Mesorhizobium sp. BNC1
MQTVTAHGATIPALGFGVFRMSDAEVERIIPAALEAGFRHFDTAQIYQNEAALGRALERAGARREDLFLTTKVWVDNYSADKFAASVDESLEKLKVDQVDLLLLHWPAHEVPVAAQIERLNAVKDAGKTRFIGVSNQNIAQMRESIARSAAPIVTNQVELHPYLPQHSLVAAARDSAVAVTAYYGMADGAVPKDPVLQQIGARYGKSAAQVGLRWLVQQGYVALSKTANPARVAENIAIFDFALDETDMAAIAKLARPDGRLVSPPGLAPDWDA

SEQ ID NO: 16061 - protein, 280 aa, Zea mays
MEFEDRCHKVQEPKFDCLLFDLDDTLYPLSAGIAGHVKKNIEDYMVEKLGIDETKIENLGNLLYKNYGTTMAGLRAIGYSFDYDEYHAFVHGRLPYDNIKPDPILKHILKNLRIRKLIFTNGDMVHAVRALKRLGLEDCFEGIICFETLNPPCPPQGDQEPEIFDIAGHFARSGTADELPKTPVLCKPNVDAMEEALRIANVNPHKAIFFDDSVRNIQAGKQIGLHTVLVGKSQRVKGADHALESIHNIREALPELWEEAEKAEDVLYPERVAMETSVTA

SEQ ID NO: 16062 - protein, 456 aa, Campylobacter coli RM2228
MSQCPFFPKPYKNKASTLLTFLLKRRSWLDGLYERSYKMQTGYVKMPNFDLYVINDTKEVKRMMVDEVKEFPKSAFLHELLSPLLGESIFTTNGEVWKKQRELLRPSFEMTRISKVFNLMSEAVSDMMKRFEKYPNASIIEVDEAMTFITADVIFRTIMSSKLDEEQGKKILDAFVTFQEQSVHTAMRRMFRFPKWLSYVLGDRKRAKAGDVIRQALSDIIKPRYDAVSSGKAENFEDILGSLLLVVDAQTNQRFSFEEILDQVAMLFLAGHETTASSLTWTLYLLSLYPDEQEKAYKEIIQVLQGENIQISHLKQFRYLTHIFKESLRLYPPVGFFAREAKKDTKVRDKMIKKGSGVVIAPWLIHRHEGFWTNPHEFKPSRFEGEYKKDAYLPFGVGERICIGQGFAMQEAILILANILKKYKLELEEGFVPDVVGRLTIRSANGMRIKFSKREP

SEQ ID NO: 16063 - protein, 492 aa, Raphanus sativus
MDPYKYRPSSAYNAPFYTTNGGAPVSNNISSLTIGERGPVLLEDYHLIEKVANFTRERIPERVVHARGISAKGFFEVTHDISNLTCADFLRAPGVQTPVIVRFSTVVHERASPETMRDIRGFAVKFYTREGNFDLVGNNTPVFFIRDGIQFPDVVHALKPNPKTNIQEYWRILDYMSHLPESLLTWCWMFDDVGIPQDYRHMEGFGVHTYTLVSKSGKVLFVKFHWKPTCGIKNLTDEEAKVVGGANHSHATKDLHDAISSGNYPEWKLFIQTMDPADEDKFDFDPLDVTKIWPEDILPLQPVGRLVLNRTIDNFFNETEQLAFNPGLVVPGIYYSDDKLLQCRIFAYGDTQRHRLGPNYLQLPVNAPKCAHHNNHHEGFMNFMHRDEEINYYPSKFDPVRCAEKVPIPSKSYTGIRTKCVIKKENNFKQAGDRYRSWAPDRQDRFVKRWVEILSELRLTHEIRSIWISYWSQADRSLGQKLASRLNVRPSI

SEQ ID NO: 16064 - protein, 144 aa, Brassica napus
MTIRSLIQEMRSRPHRVVHEAASPTPGSEPFRWSELPDELLREILIRVESADDGDWPSRRSVVACAGVCRVWRMIVKEIVGVPELSSKLTFPISLKQPGPPPPLVPCSLKRFPPTQPFPPPLPSHLLPYTLLHPLVLHYSILPP

SEQ ID NO: 16065 - protein, 588 aa, Alkaliphilus metalliredigenes QYMF
MQKKIFGTFVILLLIGILLTGFLSLSLIRTSHMNELERRLISNAKLIESFIMEKEVDLKPAELQRIAEEYGSKAEVRVTIIDQSGEVLADSLAAEGVIENHRNRPEVQMAYEDGLGRAIRHSETVNIDMMYIAIPVQFSEENIGIVRLAINLLEIQRINERLYYYIGISIIIGLIAASILGYRFIRKIMEPIKEMTEMSNEIAKGRFDKRVRVVSNDEMGQLGDHFNDMADHLKHTISQLSQSNTKFKALLTSIINPIVAVDNKSQVILLNPAAEKLFNTTMEEAMGKHILEVIRNNLLDEQIKEIFEKNEAKQIEVTLKEPKERILKVYTNPIQLEHDPTRIIGLVALMEDVSEIRKLEKMRSEFVANVSHELKTPLTSISGFIETLKSGAIEDEETKMRFLDIIDIETERLARLINDILTLSEIENNHSHLAGQGIKTNEALKDVIEMMTPIAQNKSIRLGSQVELNLPILIGNQDWFKQMFINLIDNALKYTSEGGRVQISAYKKYNHVVFSVKDCGVGIPKKDIPRLFERFYRVDKARTRKVGGTGLGLAIVKHIVLSLNGRIKVNSEVGKGTEFILIVPIDET

SEQ ID NO: 16066 - protein, 691 aa, Daucus carota
MGGYNDGPLAGEWMPPSPSPRSFFSSMLGDDVSFRSITDLSSDNRGGTLFSPPADNNVGANSDEKNDGRRSADEVQAINQNSPSEQKLSLRKGLSERMAARAGFSAPRVDTRKLNLLICHRASGMQSPYLTIPPGLSPTTLLDSPVFLSNSLVQPSPTTGKFPFASGGNGRSSIFMMEGTDKRKDDFFDNINTSSFAFKPAAESSPSLFLGGGASSNVPHQSLPGMEISGQPDNSYLPQSVEPEKELSPPLNEQHDVDADQRGDTNVGNAPSEDGYNWRKYGQKQVKGSEYPRSYYKCTHQNCPVKKKVERSHRGHITEIIYKGAHNHPKPPPNRRSGIGSSNALSEMQLDMAEQNGSAVDVDPALTVMKKSGASYWRHDNFEVTSSAAMGPEYGNNPSTLQAAGGAQLESGDQVDRSTTFSNDEDDERGTHGSVSIDYDGEEDESESKRRKVEAYATEVSGATRAIREPRVVVQTTSEVDILDDGYRWRKYGQKVVKGNPNPRSYYKCTNAGCTVRKHVERASHDLKSVITTYEGKHNHDVPAARNSSHANSGVTNPVPSSAGASQSHAHRSEVAQLQNNMARFERPQSLGSFGLPGRQQMGPSHGFGFGMNQPSLANLGMAGLVPNESKMPAMPNHPFFGQPRPMNDMDFMLPKGEPKQEPMSEPSLNNSNGTSVYQQYMSRYSLGPQM

SEQ ID NO: 16067 - protein, 566 aa, Cladosporium fulvum
MAPSATAHSADGRTTGDIHRDYNDDRNASAEDTVYCTSNGVPIAHPYEAQRVGDNGPLLLQDFHLVDLLSHFDRERIPERVVHAKGGGAHGYYQTTDPLDDLCLADIFQAGKKCPISVRFSTVGGESGSHDCARDPRGFSVKFRTEEGNWDMVANNTPVFFLRDPAKFPHFIHTQKRDPQSHLTHADDSTMFWDYLSQNPESVHQVMILMGDRGIPDGWRKMHGYAGHTLKLVNKKGDWVYAQMHMKSKQGTDFITQEDSANYSPDYAQKDLYQAIEKGDYPGWDVEFQTMTPKEAEDLWETQKINVFDLTHVWPQKQFPRRKVGEFFLNENVKNYFAEIEQIAFNPAHMPPGIEPSADPVLQSRLFSYPDTHRHRIGVNYQQLPVNAPRVPYRIANFQRDGAMAYLNQGSRPAYLSSIQPNQFRKRTVNLDKTHGHFVGDAVTFLSEIRPEDFNAPRALWERVWDDGARERFINNVSGHMSNCTKEEIIKRQIAIFREVSNDLATRLEKATGVEGYDGIAGLSFNGEHNGMAKDASLRAANNMVDKQSMAANNGAPAAGTHVKVN

SEQ ID NO: 16068 - protein, 436 aa, Zea mays
MGQWDALVDAALARLEARSLLRATRPIALAAPTAAPRTFDGPGPWDHAAVEIRLDRDTLHQWLAEGDEAGGQEEQLDGNLILFSGNDYMGLSSHPAVREAAVKAAQDYGMGPRGSALICGYTTYHKLVEESLARLKKKEDCLLCPTGFSANMAAITALGSITSLLSPGRKPAEHERIAIFSDALNHASIIDGIRLLERQQEALVFVYKHCDMFHLDFLLLFSMDGDFAPFPELIKLRRKYGYLLVIDDAHGTLVCGENGGGAAELFECEKDIDIGVGTLSKAAGCQGGFITCSTQWKRLIQSRGRSFIFSTALPVPVVASVHAALYVSSKETWRRSVIWRHVQYFASLTKLEITSPIISIVVGSEAGALRASRYLLRSGFHVTPIRPPTVPPNSCRLRITLSASHSSDDIKRLVDALTPWLPVKYGNGSYATASKL

SEQ ID NO: 16069 - protein, 460 aa, Lupinus albus
MGYSSFVAIALLMSVVVVCNGGKTSTYVRNLIEKPVDMPLDSDAFAIPPGYNAPQQVHITQGDLVGQAMIISWVTVDEPGSNQVIYWSDSSLQNFTAEGEVFTYTYYNYTSGFIHHTTITNLEFDTTYYYEVGIGNTTRQFWFITPPEVGLDVPYTFGIIGDLGQTFDSNTTLTHYQNSNGTALLYVGDLSYADDYPYHDNVRWDTWGRFTERSAAYQPWIWTAGNHEIDFDLQIGETQPFKPFSTRYHTPYEASQSTEPFYYSIKRGPAHVIVLATYSAFGYSTLQYKWLTAELPKVNRSETSWLIVLMHAPWYNSSNNHYMEGEPMRVIYESLFLKYKVDVVFAGHVHAYERSERVSNNKYNITNGICTPVEDITAPIYITNGDGGNLEGLATMKQPQPSYSAYRKASFGHGIFAIKNRTHAHYSWNRNQDGYAVEADKLWLFNRYWNPLNDSTIHIP

SEQ ID NO: 16070 - protein, 474 aa, Ralstonia metallidurans CH34
MSKQFDVLVIGAGPGGYIAAIRAAQLGLNVACLEGNAYDDPKGEARLGGTCLNVGCIPSKALLASSEEFENASHHLADHGITVGDVKVDVAKMLKRKDDIVSKMTKGIEFLFRKNKVTLFKGYGKFTGKAAEGFQVEVNGETLTAKQVIIATGSKARHLPGVAVDNNLISDNEGALKFGTVPKKLGVIGAGVIGLELGSVWRRLGAEVTVLEALPAFLGAADEGVAKEAQKLLTKQGLQFHLSVKVDEVKTGKDNVTVNYTDKDGKAQTLEVDRLIVSVGRVPNTDNLGLDAVGLGVDQRGFIEVDDHCQTKVPGIWAIGDVVRGPMLAHKAEDEGVAVAERIVGQKPHIDFNTVPWVIYTFPEIAWVGKTEQQLKAEGREYKSGQFPFMANGRALGMGASDGFVKMLADARTDEILGVHIVAANASDLIAEAVVAMEFKAASEDIGRVCHPHPSMSEVMREAALAVDKRQLNM

SEQ ID NO: 16071 - protein, 256 aa, Triticum aestivum
  misc_feature (216)..(216): Xaa can be any naturally occurring amino acid
  unsure (1)..(256): unsure at all Xaa locations
HYRTSLYKKAGWYRSGIPGISSTHASGLFSIDWYRERINGKQEVMIGYSDSGKDAGRLSAAWQMYKAQEDLVKVAKQFGVKLTMFHGRGGTVGRGGGPTHLAILSQPPDTINGSLRVTVQGEVIEQSFGEEHLCFRTLQRFTAATLEHGMRPPISPKPEWRALLDEMAVVATEEYRSIVFQKHASSRISPCNPETEFGRIILGSRPSKKKPIGGLXKPPLAIQWNFRWNTNLFHLPSGVGFSGPLHTFFAKHFLDF

SEQ ID NO: 16072 - protein, 422 aa, Campylobacter coli RM2228
MSNSVTVTDNRNGKSYEFPIYDGTTGPSVVDMGSFYKQTGMFAYDEGLTSTATCKSKITYIDGEEGVLMHRGYPIEWLAENKLFLDVVHLLLYKELPSNERLEAFRYELKKRSYIHEGMHRLFDSFPDNAHPMAVLQGAVSSLSAFYPDHLNMNVREEYMEMAARVVAKIPTIVAAAYRYKNGFPMAYPNLDRGFTENFLYMLRTYPYDHVELKPIEVKALDTVFMLHADHEQNASTSTVRAVGSTHAHPYACISAGIGALWGHAHGGANEGVIRMLEEIATVDRVDEFIKRAKDKNDPFRLMGFGHRVYKNFDPRAKVLKKLRDQLIDELGIDTNLIKVATRIEEIALQDDYFVQRNLYPNVDFHSGLILKALGIPNEMFATLFVIGRTPGWIAQWIEQKEQETLKIVRPRQLYLGETSKI

SEQ ID NO: 16073 - protein, 242 aa, Bradyrhizobium japonicum USDA 110
MSRIDASCIWESTEMIEAKDNATGRALLFDIDGTLANTDPLHLKAFNEVLGPRGHVFDHARFSRELQGFANVSIGERFLPDEAPERRASILDEKEEVFRALVAGQIEPLPGLMALLDRADAAGVPMVAVTNAPRLNAELLLSGLGITDRFKALVIGDELPHGKPHPLPYQEGLRFVGARPETSVAFEDSRTGVQSATAAGIPTIGIRTSLSHADLVAAGAVASAGAFDDPALLAPLAAAMAW

SEQ ID NO: 16074 - protein, 369 aa, Streptococcus pyogenes MGAS8232
MTKQKEITTFNVQVAEFIRYHKKEGTAIDDDVTEKLVIPFALDADQIDDLLERLTDGGISITDKEGNPSSKYIVEEPKPEELTDEELIGSNSAKVNDPVRMYLKEIGVVPLLTSEEEKELAVAVAKGDLMAKQRLAEANLRLVVSIAKRYVGRGMQFLDLIQEGNMGLMKAVDKFDYSKGFKFSTYATWWIRQAITRAIADQARTIRIPVHMVETINKLVREQRNLLQELGQDPTPEQIAERMEMTPDKVREILKIAQEPVSLETPIGEEDDSHLGDFIEDEVIENPVDYTTRVVLREQLDEVLDTLTDREENVLRLRFGLDDGKMRTLEDVGKVFNVTRERIRQIEAKALRKLRHPSRSKQLRDFIED

SEQ ID NO: 16075 - protein, 534 aa, Sodalis glossinidius
MAAKDVKFGNDARVKMLRGVNVLADAVKVTLGPKGRNVVLDKSFGAPVITKDGVSVAREIELEDKFENMGAQMVKEVASKANDAAGDGTTTATVLAQSIVNEGLKAVAAGMNPMDLKRGIDKAVIAAVEELKKLSVPCSDSKAIAQVGTISANADETVGTLIAEAMAKVGKEGVITVEEGSGLQDELDVVEGMQFDRGYLSPYFVNKPETGAVELESPFILLADKKISNIREMLPVLEAVAKAGKPLLIIAEDVEGDALATLVVNTMRGIVKIAAVKAPGFGDRRKAMLQDIAILTAGTVISEEIGLELEKATLEDMGQAKRVVITKDTTTIIDGEGDKALIDSRVTQINQQRDEATSDYDREKLQERVAKLAGGVAVIKVGAATEVEMKEKKARVEDALHATRAAVEEGVVAGGGVALIRVANRIAELRGDNEDQNVGIKVARRAMEAPLRQIVANAGEEPSVIANKVKAGEGNTGYNAATEEYGNMIDMGILDPTKVTRSALQYAASIAGLMITTECMVTDLPKEDKPDLGG

SEQ ID NO: 16076 - protein, 318 aa, Picrophilus torridus DSM 9790
MKILVVGINGFGMRHLSAIKNMDIYVMERKENVIAEAKSRYDIKRVFNDYNEALNSDADIVDLVVPHNLHRDLAIKAMEHKKHVLVEKPIATTLDDGKAMIDASRKNRVKFMVAEQYFFDPYATEARRLIQNNAIGDIKTVIVRDQRFFDHGGWRLNRESMGGGALIDGGIHFIDTLLNFAGDYSDVRSIINHGGTDLEGEDNINALFKFKNGAAGLFFYSWAYRFSPRLPAFEIIGENGSMYEDSSSKISWDSGIRTAYGGLIMNGKKVDVRPYDIFEKEISSFAESIENDNDVPFSPELELRDLKAVLDIYKNANF

SEQ ID NO: 16077 - protein, 397 aa, Synechocystis sp. PCC 6803
MNYMMTDNEVFKEGLAGVPAAKSRVSHVDGTDGILEYRGIRIEELAKSSSFIEVAYLLIWGKLPTQAEIEEFEYEIRTHRRIKYHIRDMMKCFPETGHPMDALQTSAAALGLFYARRALDDPKYIRAAVVRLLAKIPTMVAAFHMIREGNDPIQPNDKLDYASNFLYMLTEKEPDPFAAKVFDVCLTLHAEHTMNASTFSARVTASTLTDPYAVVASAVGTLAGPLHGGANEEVLNMLEEIGSVENVRPYVEKCLANKQRIMGFGHRVYKVKDPRAIILQDLAEQLFAKMGHDEYYEIAVELEKVVEEYVGQKGIYPNVDFYSGLVYRKLDIPADLFTPLFAIARVAGWLAHWKEQLSVNKIYRPTQIYIGDHNLSYVPMTERVVSVARNEDPNAII

SEQ ID NO: 16078 - protein, 293 aa, Campylobacter upsaliensis RM3195
MNSLYETLGVSKNASNDEIKKAYRRLARQYHPDINKEKGAEEKFKEINAAYEILSDEKKRAQYDKYGDSMFGGQSFSDFSRNSGDMDLDEILKNLFGGGFSGAKGFGGSSFGGGNFGGFGGGFGGFSGEDLDLSASISIPFEVGILGGEHSINFNGETIKLKIPHGIKNNDKIRIRGKGKKLGSQVGDLIVKVSLEKSELYERDEDDLIRKLDISLKTALFGGKINLKTLKKEVSIKIPPNSKNGQKIRLKGYGVQNRKSGIFGDLYLVLNVLLPNAEDLDPKVRQILEEKLS

SEQ ID NO: 16079 - protein, 140 aa, Brassica napus
PTRSWFVWVLTIFFCIGGMQGMHNIITAVLLRKWRHLGRRSVKLPLLGTMSWMSLLVNIFCLAFAVFWFVKRHTSYAWAGQDTLGICLMITALQVVRLPNIKVATVLLCCAFVYDIFRVFISPLIFHESVMIVVAQGDSS

SEQ ID NO: 16080 - protein, 470 aa, Campylobacter upsaliensis RM3195
MKKIILSLSLASILCAANVEFNEVDSKIERINPANGVLLSYYDSIKEVKRSVVNISTSKTITRANSPFDDFFDDPYFKQFFGFDPFQRRGQNEKEVIASVGSGVIISKDGYIVTNNHVVENVDSISVTLPQSDMEYKAKLIGKDPKTDLAVIKIEANNLSAVSFSNSDELLEGDVVFALGNPFGVGFSVTSGIISALNKDNIGLNQYENFIQTDASINPGNSGGALVDTRGALVGINSAILSRGGGNNGIGFAIPSNMVKDVAKKLIEKGKIERGFLGVSITALKGDSKKVYKNSEGALITDVQKGSSADEAGLKRGDLVLKVNDKNIKSPNDLKNYIGTLEPNQKISLLYERDGKENQINFILKGDEISDVKGVQDSLIEGLNLKNLDTNLKTRLGVPSEINGVLIDSVKPKSKAKDAGFKEGDIIIAVGQSEVKDLKDLQNTLKNQVKNAWIKIWVYRGGVITLLVLK

SEQ ID NO: 16081 - protein, 194 aa, Arabidopsis thaliana
MTGTGQKLNIRRRVGEVNSLSFCCLSPTPTSLDNRCVNMIANLFHAPVGQDEAVISCGIVASSESAGLAFKMKWQHRRKAQGLPIDKPNIVTGVNVQVCWEKFARYFEVELKEVKLSEDYYVMDPAKAVEMVDENSICVAAILGSTFTGEFEYVKLLNDLLAEKNAKTAWETPIHVDAASGGFIASMGEEYQCQ

SEQ ID NO: 16082 - protein, 288 aa, Phytophthora ramorum
  misc_feature (157)..(157): Xaa can be any naturally occurring amino acid
  unsure (1)..(288): unsure at all Xaa locations
YVPRAILMDLEPGTMDSVRAGPYGQLFRPDNFVFGQTGAGNNWAKGHYTEGAELIDSVLDVVRKEAESCDCLQGFQITHSLGGGTGSGMGTLLISKIREEYPDRIMCTYSVCPSPKVSDTVVEPYNATLSVHQLVENADEVMCLDNEALYDICFRTXKLTTPTYGDLNHLVCAAMSGITTCLRFPGQLNSDLRKLAVNLIPFPRLHFFMIGFAPLTSRGSQQYRALTVPELTQQQFDAKNMMCAADPRHGRYLTAACMFRGRMSTKEVDEQMLNVQNKNSSYFVEWIP

SEQ ID NO: 16083 - protein, 445 aa, Zea mays
PSQKRVQARRGGGEGTGSELEEMESPRSPEAEIGHRVEDLWEVAEPQLSPSEKLNSCFEDIPVASFPRTHPSQVIEIPSDASLAETVEILSKNKILSAPIRNVEAPEDASWMDKYIGIVEFAGIAMWLLSQSDAAVNGTVGSGPGSPVSSLVSRLGSFTFRRTSSGRLETATDSESDEAASVGGSFFETLTSSEFYKNTKVGDISGSFRWAPFLALQTSDTFLTMLLLLSKYRMKSLPVVEVGGDKIENIITQSSVVHMLAECVGLSWFENWGTKKLSELGLPVMKPSKLVKVSEDQPVLKAFQLMREKGVGGLPVMDTSGANAIGNISIRDVQYLLTAPKIYKEHRSITTKDFLSAVRHHLQEQREASPLLHDVITCKKDDTIKDIILKLDSEKIHRIYVVDDKGNTEGVITLRDIISKLVHEPRHYFGDFFDGVVPLPANSTV

SEQ ID NO: 16084 - protein, 427 aa, Cordyceps bassiana
DKTHINVVVIGHVDSGKSTTTGHLIYQCGGIDKRTIEKFEKEAAELGKGSFKYAWVLDKLKAERERGITIDIALWKFETPKYQVTVIDAPGHRDFIKNMITGTSQADCAILIIAAGTGEFEAGISKDGQTREHALLAFTLGVKQLIVAINKMDTTKWSEARYQEIIKETSSFIKKVGYNPKAVAFVPISGFNGDNMLEASTNCPWYKGWEKETKAGKSTGKTLLEAIDAIEPPKRPTDKPLRLPLQDVYKIGGIGTVPVGRVETGIIKPGMVVTFAPANVTTEVKSVEMHHEQLSEGVPGDNVGFNVKNVSVKEIRRGNVAGDSKNDPPMGAASFNAQVIVINHPGQIGAGYAPVLDCHTAHIACKFSELLEKIDRRTGKSVENNPKFIKSGDSAIVKMVPSKPMCVEAFTDYPPLGRFAVRDMRQT

SEQ ID NO: 16085 - protein, 535 aa, Bacillus cereus E33L
MTKYIFVTGGVVSSLGKGITAASLGRLLKNRGLNVTIQKFDPYINVDPGTMSPYQHGEVFVTDDGAETDLDLGHYERFIDINLNKYSNVTTGKIYSSVLQKERRGEYLGGTVQVIPHITNEIKERVYRSGRETNADVVITEIGGTVGDIESLPFLEAIRQIKSDIGRDNVMYIHCTLIPYLKAAGEMKTKPTQHSVKELRSLGIQPNIIVVRTEMPVSQDMKDKLALFCDIDTKAVIEARDADTLYAVPLSLQEQNMDQIVCDHLKLDNPAADMTEWTALVEKVRNLSKKTKIALVGKYVELQDAYISVVEALRHAGYSFDTDVEVKWVNAEHVTAENVQELVGDTDGILVPGGFGDRGVEGKIVAIQYARENKVPFLGICLGMQLASIEFARNVLGLEGANSSEINPDTPYAIIDLLPEQKDVEDLGGTLRLGLYPCKLSEETNAYNAYNEPVVYERHRHRYEFNNQFRPDMEKAGFVFSGTSPDGRLVEIIELKDHPWFVAAQFHPELVSRPNRPQPLFHDFVRASITNKESK

SEQ ID NO: 16086 - protein, 184 aa, Actinidia deliciosa
MQTAKLARIPSMRERVEDTLSAHRNELVSLLSRYVEQGKGILQPHHLIDELDKIVGDDEANLTLIDGPFGDVLKSAQEAIVLPPFVAMAIRPRPGVWEYVRVNVYELSVEQLSVAEYLRFKEELVDGQSNDQYVLELDFEPFNATFPRPTRTSSIGNGVQFLNRHLSSIMFRNRDCFEPLLDFL

SEQ ID NO: 16087 - protein, 391 aa, Thermosynechococcus elongatus BP-1
MRDPFDWLDPALDALHRAHWYRQPLLSGTPAAVVSVGEPPRPLINFCSNDYLGLANHPQVKAAAIAAIQQWGTGATGSRLLSGQRHLHAQLERAIAQWKGTEAALVFSSGTAANLGTIAALVDQRDLVLGDAYNHACLKKGARLSHATFYEYPHNNVAALAQLLETHRSQYRRCLILTDGVFSMDGDVAPLAKILALAEAYTAMVLVDDAHGTGVLGTNGAGTLAALGQSSPTIIQMGTLSKALGSLGGYIAGCQALITYLQHRASTWIYSTGLSPADAAAALAALEQLQTDPSLRQALGDRIQQLEKGLQALGCPVLPRPLPTPIFCLPAPDPATVLQWGQELQEAGCWVAAVRPPTVPFSRLRITLRADHTPGHIEQLLAALAALLKCC

SEQ ID NO: 16088 - protein, 385 aa, Escherichia coli
  misc_feature (13)..(14): Xaa can be any naturally occurring amino acid
  misc_feature (23)..(23): Xaa can be any naturally occurring amino acid
  misc_feature (44)..(44): Xaa can be any naturally occurring amino acid
  misc_feature (82)..(82): Xaa can be any naturally occurring amino acid
  misc_feature (92)..(92): Xaa can be any naturally occurring amino acid
  misc_feature (146)..(146): Xaa can be any naturally occurring amino acid
  misc_feature (200)..(200): Xaa can be any naturally occurring amino acid
  misc_feature (301)..(301): Xaa can be any naturally occurring amino acid
  misc_feature (328)..(328): Xaa can be any naturally occurring amino acid
  misc_feature (348)..(348): Xaa can be any naturally occurring amino acid
  unsure (1)..(385): unsure at all Xaa locations
APAVADKADNAFXXICTALVLFXTIPGIALFYGGLIRGKNVLSXLTQVTVTFALVCILWVVYGYSLASGEGNNFFGNINWLXLKNIELTAVXGSIYQYIHVAFQGSFACITVGLIVGALAERIRFPAVLIFVVVWLTLSYIPIAHXVWGGGLLASHGALDFAGGTVVHINAAIAGLVGAYLIGKRVGFGKEAFKPHNLPXVFTGTAILYIGWFGFNAGSAGTANEIAALAFVNTVVATAAAILGWIFGEWALRGLPSLLGACSGAIAGLVGVTPACGYIGVGGALIIGVVAGLAGLWGVTXLKRLLRVDDPCDVFGVHGVCGIVGCIXTGIFAASSLGGVGFAEGVTXGHQLLVQLESIAITIVWSGVVAFIGYKLADLTVGLRV

SEQ ID NO: 16089 - protein, 199 aa, Actinidia deliciosa
VWPYMERFTEDVAHDIVTELQAKPDLVIGNYSEGNLVASLLAHKLGVTQCTIAHALEKTKYPDSDIYLKKFDEKYHFSCQFTADLIAMNHTDFIITSTFQEIAGSKNTVGQYESHMAFTMPGLYRVVHGIDVFDPKFNIVSPGADMNIYFPHTEKDKRLTKFHPEIEDLLFSDVENKEHIGVLKDRTKPIIFSMARLDR

SEQ ID NO: 16090 - protein, 119 aa, Lewia infectoria
STGGKAPRKQLASKAARKSAPSTGGVKKPHRYKPGTVALREIRRYQKSTELLIRKLPFQRLVREIAQDFKSDLRFQSSAIGALQESVEAYLVSLFEDTNLCAIHAKRVTIQSKDIQLAR

SEQ ID NO: 16091 - protein, 230 aa, Neurospora crassa
MSADNTFHYALSSNNAWAGYKAHQNPQFFPKLAGGQSPEILWIGCSDSRCPETTILGMQPGDVFVHRNIANIISPTDINTTAVIEYAVANLKVKHVVLCGHSACGGAAAALSDARVGGVLDTWLLPLKTVRFNHAEELEAITDEKERIMRIAQLNVEAGIKVLMNNATIREAIAERGLEVHGVFFDISCGRIKELGCGTAHAGKGDHVVRGKHGQLVFGQDGEAAIAAAQ

SEQ ID NO: 16092 - protein, 494 aa, Arabidopsis thaliana
MVLATNSDSDEHLHSTFASRYVRAVVPRFKMPDHCMPKDAAYQVINDELMLDGNPRLNLASFVTTWMEPECDKLIMDSVNKNYVDMDEYPVTTELQNRCVNMIANLFHAPVGEDEAAIGCGTVGSSEAIMLAGLAFKRKWQHRRKAQGLPIDKPNIVTGANVQVCWEKFARYFEVELKEVKLSEDYYVMDPAKAVEMVDENTICVAAILGSTLTGEFEDVKQLNDLLAEKNAETGWETPIHVDAASGGFIAPFLYPDLEWDFRLPWVKSINVSGHKYGLVYAGVGWVVWRTKDDLPEELVFHINYLGADQPTFTLNFSKGSSQIIAQYYQFIRLGFEGYKNIMENCMDNARRLREGIEMTGKFNIVSKDIGVPLVAFSLKDSSKHTVFEIAESLRKFGWIIPAYTMPADAQHIAVLRVVIREDFSRGLADRLITHIIQVLKEIEGLPSRIAHLAAAAAVSGDDEEVKVKTAKMSLEDITKYWKRLVEHKRNIVC

SEQ ID NO: 16093 - protein, 243 aa, Lycopersicon esculentum
KRLMTDVPFGVLLSGGLDSSLVASVTARYLAGTKAAKQWGAQLHSFCVGLEGSPDLKAAKEVADFLGTVHHEFHFTVQDGIDAIEDVIYHIETYDVTTIRASTPMFLMSRKIKSLGVKMVISGEGADEIFGGYLYFHKAPNKEEFHRETCRKIKALHQYDCLRANKATSAWGLEARVPFLDKEFINVAMSIDPEWKMIKHDQGRIEKWVLRKAFDDEEQPYLPKHILYRQKEQFSDGVGYSWI

SEQ ID NO: 16094 - protein, 395 aa, Wigglesworthia glossinidia endosymbiont of Glossina brevipalpis
MLNMKNILQNKVQKDLLNIKSKNIYRKRTPVKDGNSRYIFINNKKYLNFSSNNYLGLSCDTDIKKSWCNFINIEGMGSGGSGHVIGYSELHKKLEVWLAKWMGFPRALLFSSGFLANQAIVNVLGKLCNNIIVDKFIHASIIESAINSKMKLQRFKHNDMTSLEKCLMKKKHNESCLIFTEGIFSMDGDQCNLQKILNISNKFNGYLVLDDAHGFGILGSEGRGTIKIENVYPDLLVITFSKSVGINGAAILCQKEIAEYFLQYSRNLIYSTSMPPSQAGAILTAIKKIKKSNFLRKRLFNNIKKFKKKAKELKFYKKSNTAIQPIITNDNRLTIKFFKKLVNFGIWACPILPPSVPVKKSRIRIIITAMHNENDIDILLQSLFKIEKINEHGRL

SEQ ID NO: 16095 - protein, 468 aa, Burkholderia vietnamiensis G4
MSRLVVVSNRIADPRKAAAGGLAVAVKDSLQESGGVWFGWSGRLRSEGERPAQGDDVQIQNVGGIQLATIDLDPQDYDAYYLGYSNNVLWPVFHYRLDLAQFDRRFADGYRRVNQLFARKLSTLLRPDDTIWVHDYQLIPLAAELRAMGCTNPIGFFLHIPMPPPPIMAAIPEHEWLMRALFAYDLIGFQTESDLLHFEHYVEAEAGAARLPDGRLRAFGRTLSAGAFPIGINVDEFAALAENRDGIDMFERMRDEYSRRQLLVGVDRLDYTKGLPQRVHAFRQLLEQYPENRDRATLIQIAAPSREDLGAYDDLRREMDSLCGAINGDYGELEWMPMRYIHRTVARKRLPGLYRASRVALVTPLRDGMNLVAKEFLAAQDEADPGVLVLSRFAGAAEQLKPALLVNPYDTQGTAQAIQRALTMPLDERRQRHNALMAIVRKTDVHWWRTRFLDALTEAAEVAAAAAS

SEQ ID NO: 16096 - protein, 141 aa, Glycine max
  misc_feature (56)..(56): Xaa can be any naturally occurring amino acid
  unsure (1)..(141): unsure at all Xaa locations
MSSVCLSKCVNDARDPRVPVRATYVNLYKWPESDAEFVRRRGGGSHMCGGHPRVVXSISCRQMYLRSYKFSRKESVPEKTQKCFGRVKERVKKQGRSHHGIRRRKCLVWRKMREISCAALFRIFHRFLSCGASVDVVHAKS

SEQ ID NO: 16097 - protein, 745 aa, Cladosporium fulvum
MATEKISSGLGKLQDQLNGAAEGQKVAHVKNDPLYKDYHEPSNRITTDYGVKQHNTDDWLKIASEDKTGPMLLEDHAAREKINRFDHERIPERVVHARGSAAFGTFKLHKSLEQYTTAGVLTDTSRTTPTFLRFSTVLGSRGSADTVRDVRGFAIKHYTPEGNWDVVGNNIPVFFIQDAIKFPDVIHAGKPEPDNEVPQAQTAHNNFWDFQFMHTEATHMFMWTQSDRAIPRSYRMMQGFGVNTFTLTNAKGERFFVKFHWTPHLGVHSFVWDEALKLAGQDPDFHRKDLWEAIEAKAYPKWDFGVQVISEGEEDNFEFDILDATKVWPEELVPIQYVGELELNRNPDEFFPQTEQVAFCTGHVVPGIGFSDDPLLQGRNFSYQDTQISRLGVNFQELPINRPVCPVMNNNRDGALRHTVTKGKVNYWPNRFEATPPAAAEEKPYLDYPQKVAGMKTRLRSKKFSEHFNQAQLFYNSMSEPEKEHIKFALAFELDHCEDPVVYDRVSQRLADIDLSLAQSVADLVGGQIPQQQGRPNHGKKSKGLSQTEFPGKTPTIETRRIAIIIADGYDLVAYNGIVAAAKACQALPFTIAPRRSPIYAAGESKENSKGVKPDHHLEGMRSTMFDSVFVPGGADSVATLRKNGRALHWVREAFAHLKAIGAVGEAVDFVRNACQLPGMTFSASEEVTDSYGVVTAAKVKPESLSEAVKIGKDAADFVSKYFYEISQHKNFERELKGFPLMVAY

SEQ ID NO: 16098 - protein, 547 aa, Magnaporthe grisea 70-15
MASKNMVNPAVEPSMEDDLFAREVAEVKQWWSDPRWRYTKRPFTAEQIVSKRGNLKIEYPSNAQSKKLWKILEGRFQKRDASYTYGCLEPTMVTQMAKYLDTVYVSGWQSSSTASSSDEPGPDLADYPYTTVPNKVSHLFMAQLFHDRKQRHERLSAPKSERSKLQNIDYLRPIIADADTGHGGLTAVMKLTKLFIEKGAAGIHIEDQAPGTKKCGHMAGKVLVPISEHINRLVAIRAQADIMGVDLLAIARTDAEAATLITTSIDPRDHAFILGCTNPSLQPLADLMNTAEQSGKTGDQLQAIEDEWMAKANLKRFDDAVVDVINSSSSIRNPKDVAAKYLQAAKGKSNREARAIASSLGVPEIFFDWDSPRTREGYFRIKGGCDCAINRAIAYAPYADAIWMESKLPDYEQAKEFAEGVHAVYPEQKLAYNLSPSFNWKTAMPRDEQETYIRRLAGLGYCWQFITLAGLHTTALISDRFARAYSEVGMRAYGELVQEPEMELGVDVVKHQKWSGATYVDELQKMVTGGVSSTAAMGKGVTEDQFH

SEQ ID NO: 16099 - protein, 191 aa, Lycopersicon esculentum
GDSMSTWTRDDDKLFEHGLVLYPENSADRWQLIADHVPGKTADDIMAHYDDLVHDVYEIDSGRIDLPSYTDDPVELEGDCQITSGSNKKSNEIERKKGTPWTEDEHRLFLIGLDKYGKGDWRSISRNVVVSRTPTQVASHAQKYFIRQQAMKKERKRSSIHDITTAVDTNPVPPQSSFQNQSGSQNFNFAM

SEQ ID NO: 16100 - protein, 609 aa, Solibacter usitatus Ellin6076
MTQILRLLSYGRKFWPQILLSVFLMALAGAAQGTMPLLIQPIFDRVLIANAPGGPIALLPRPFLGHQLYLHDILPIHGRSDWFMIATCLLIAFLLKGACDYIGNYLVSYAGFASVTRLRNAVFDKVLKQGAQFFEAHSTGQLMSSIMNDVDKVQVATSQILADLLRQFFSAAFLLFVLLNNDWRLALICLVVLPAVMLPTMRMGRRIRRTSRGTQERQADLNQILQETLSGHMVVKAFTAEPYESRRFHAASARLLKNNARYVLQQGLSSPLIDFFAALTIVSLLTYARTQIKGHAFTAGTFTSFIFALLMLLEPLKRLVGIYNIFQQALGASQKVFEYLDHQETVVDTAGAPALPAFQNSIAFENVAFHYPGAPDGFRIPNLSLTVKAGEVVALVGPSGGGKTTLANFLPRFYDPTSGSVKIDGHDVREFSLSSLRSQIGLVAQDTFLFNDTVANNIAYGRDGVPPEAIRAAAETALAHEFITRLPEGYETVIGDRGVKLSGGQRQRLSIARALLKNAPILILDEATSHLDTESEMLVQKALANLMEHRTVIVIAHRLSTIRRADKIVVLEKGQIRETGTHEELVSRGGIYQRLHELQFEDAGTVVDL

SEQ ID NO: 16101 - protein, 317 aa, Campylobacter coli RM2228
MKVFISTHPFGETSKIPLELLDKNGFEVRINNRGRKITSKELSKDIGEAEVLIAGTEKITEDVLRNAPNLKLISRVGIGLDGIDFELCRKYNIKVVYTPDAPTMAVAELCVGLILDLSRKISFTDANLKQGIWNRHMGMLLYGKTIGIIGMGRIGKSLIKLLSSFNVSFKVCDPNPDFAFLKIYNVELTNKTKLLKESDVVSLNLPLKKDTMNFLMLDDLKNMKKSSILINTARGGIINEDDLYIALKENLIAGAAVDVFEEEPYKGKLRELNNVVLTCHMGASTIESRTDMETQAVEEVVRYKNHIPLKNEVFKNE

SEQ ID NO: 16102 - protein, 791 aa, Arabidopsis thaliana
MYVVESKAGAIGCMILSLCCLGSWPAILTLLERRGRLPQHTFLDFATANLLAAIVIAFSLGEIGKSTFLKPDFTTQLPQDNWPSVLLAVAGGVLLSIGNLATQYAFAFVGLSVTEVITASITVVIGTTLNYFLDNKINKAEILFPGVGCFLIAVFLGAAVHASNAADVKEKLKSLPKKTDVESQEKLAEKAKAGTAGFYVELENKRAIKVFGKSIMIGLFITLFAGISLSLFSPAFNLATNDQWSTLPKGVPKLVVYTAFFYFSIAGFLISLILNLIFLYRPMVGLARSSLKKYIYDSKGRGWAVFAGFLCGFGNGLQFMGGQAAGYAAADSVQALPLVSTFWGIVLFGEYRKSSKRTYALLVSMLAMFVAAVAILMASSEPSKGLIHLEPENMYLVESKGGAIACMLLALLSLGTWPAVLTLLERRGRLPQHTYLDYSITNLLAAIIIAFTFGQIGSTKPDSPNFITQLAQDNWPSVMFAMAGGIVLSLGNLSTQYAWALVGLSVTEVITSSITVVIGSTLNYFLDDKINKAEILFPGVACFLIAVCLGSAVHRSNADDNKAKLRDFETAKQEASGPSTEIGTNSSKDLETNVTTKPKEGTARFLIELENTRAIKVFGKRKIIGLAITFFAGLCFSLFSPAFNLATNDQWNRLKQGVPKLVVYTAFFYFSVSCFIIALILNVVFLYYPVLGLPKSSFKAYLNDWNGRYWAFLAGFLCGFGNGLQFMGGQAAGYAAADSVQALPLVSTFWGVVLFGEYRRSSRKTYLLLFCMLFMFISAVAVLMASSGHRK

SEQ ID NO: 16103 - protein, 138 aa, Nicotiana tomentosiformis
MAKAIPKISSRRNGRIGSRKGARRIPKGVIHVQASFNNTIVTVTDVRGRVVSWSSAGTSGFKGTRRGTPFAAQTAVANAIRTVVDQGMQRAEVMIKGPGLGRDAALRAIRRSGILLTFVRDVTPMPHNGCRPPKKRRV

SEQ ID NO: 16104 - protein, 170 aa, Glycine max
MGASQSISEKSFHEFTVKDARGKDVNLNAYRGKVLLVINVASKCGFADANYTQLTQLYSTYKSRGLEILAFPCNQFLKKEPGTSQEAQDFACTRYKAEYPIFGKIRVNGSDTAPVFKFLKTQKSGVMGSRIKWNFTKFLVDEEGRVIQRYSPTTKPLAIENDIKKALRVA

SEQ ID NO: 16105 - protein, 205 aa, Yarrowia lipolytica CLIB122
MPPKKRTMLKVVILGDSGVGKSSLMQQYVNNKFSTQYKATIGADFLNKELTLEGRKVNMQIWDTAGQERFQSLGLAFYRGADCCVLVYDVNNSKSFDALTLWRDEFLLLANPRDPENFPFVVIGNKVDVEESKRAVSAKRAQAFCKATGNIPYFETSAKEDTGVDQAFETVARNAMAQVDSEDYTDDFADTINIHLDNEQSNCAC

SEQ ID NO: 16106 - protein, 468 aa, Lactobacillus sakei subsp. sakei 23K
MVVGDFAIELETVVIGSGPGGYVAAIRAAEMGQKVTVIERENIGGICLNVGCIPSKALISAGHRLQEAKNSEVFGVSTTGATLDFAKTQDWKQHQVVEKLTGGISMLFKKHKIDVLDGSAFLVDEHSLRVIKEESAQTYSFKNLIIATGSRPIEIKGFKFNKRVIDSTGGLNLTEVPKELVVIGGGYIGSELAGAYANLGAHVTILEGTDSILPNFEKDMVQLVTKNFKTKGVDVITGAMAKESIETDQNVTVKYEVGGKEEQLVADYVMVTVGRRPNTDDMGLEQAGIKMADRGLIEVDQQGQTNIKGIYAIGDIVSGAALAHKASYEAKIAAEAIAGKKVIVDYKAMPAVCYTDPELATTGLTVAEAKEKGYNAKGFKFPFAANGRALSLAETDGFVRLVTNTDDNTLLGAQVAGVGASDLISELTLAIESGMNAEDLALTIHPHPTLSEAIMDDAELALGLPIHI

SEQ ID NO: 16107 - protein, 230 aa, Haemophilus somnus 2336
MKKIEQLFANNFSWANRMKEENAEYFKALAENQTPSYLWIGCSDSRVPAENLTNLKPGELFVHRNVANQVIHTDLNCLSVVQYAVDVLNIEHIIICGHTNCGGIKAAMVDQDLGLINNWLLHIRDIWFKHGHLLGKLSPEKRADMLTRINVAEQVYNLGSSSIVKSAWKSGKKLSLHGWIYDVNDGFLIDQGVTATSRETLEISYRDTIAKLFKLNEDELLLKPHQVKSE

SEQ ID NO: 16108 - protein, 369 aa, Lactobacillus sakei subsp. sakei 23K
MANNKAAVNFDKLLGDESQDFKTVQILDETGQVVNPDIMPDLSDEQLVELMKQMVWSRVLDQRATALNRQGRLGFYAPTAGQEASQLASNFAMNKDDFLFPGYRDVPQLVQHGLPLSQAFLWSRGHIEGNKYPESLKAMPPQIIIGAQYIQAMGVAVGMKKRQSKNAVYVYTGDGGTSQGDFYEGINFAGAFKAPAIFVVQNNGFAISVPREKQTAAVTLAQKGVAAGIPAIQVDGMDSLAVYEVMKEARDFTTAGNGPVLIETLTYRYGPHTLSGDDPTRYRTKETDDIWLKRDPLVRMRRFLTNKGLWSEDQENELIDQVKAAIKEAINEADAIPKQKVTDFLKVTFEEQPQNIQEQITEYSAKESN

SEQ ID NO: 16109 - protein, 1115 aa, Arabidopsis thaliana
MAEPSFARLFLLFFSFLLIFATYSWVFGPDSGFLFGTRVRKTLGSNRQVHVDHSLEKPHHPLDPLTVREINRVRTILSNHDPGFGSGSATIHSMALDEPEKSRVVQWKKGNKLLSRRAAVVAYWGGQTHEITVDLDSGRVVSDVINRTSGYPILTLNDVFAASQVPLKSLEFNRSIEARGVKFSDLACITPFAGWFGSEEEGRRVIRVQCFTLQGTTNYFMRPLEGLYVTVDLDKLEVIKIIDKGPIPIPKASGTEYRFGVQNKPVHMDRINPISMEQPDGPSFRVEDGHLVKWANWVFHVKADQRAGMIISQATVRDSETGEPRSVMYKGFPSELFVPYMDPEEGWYYKGYMDAGELGLGPTAMPLVPLNDCPRNSYYIDGVFASPDGKPIVQPNMICLFERYAGDISWRHSEILFANADIRESRPKVTLVARMATSVGNYDYIFDWEFQTDGLIRVTVAASGMLMVKGTPYDNVDDLGDREDDAGPLISENVIGVVHDHFITFHLDMDIDGPMNNSLVKVHLEKQRVPTGKSPRKSYLKVKKYIAKTEKDAQIKLSLYDPYEFHIVNPNRKSRVGNPAGYRIVPGGNAASLLDHDDPPQIRGAFTNNQIWVTPYNRSEQYAGGVLIYQSQGDDTLQVWSDRDRSIENKDIVLWYTLGFHHVPCQEDYPVMPTVAASFELKPANFFESNPILGSAPFFEKDLPSQHTGCCFVEFASLNEAEKALETKKGETFYSRKIILDVAEMAPDPFRLKYNLVIFACRDDPSPVKLNLSAGTYRTEEGKPLVLDVVRRAEQQLANDLPALKENRVVTTQCLSGTGSLRVGAEFLATHNKESVIFVPNPTWGNHPRIFTLAGLSVQYFRYYDPKSRGLDFKGMLEDLGAAPPGAIVVLQACAHNPTGVDPTFEQWEKIRRLVRSKSLLPFFDSAYQGFASGSLDADAQAVRMFVADGGECLIAQSYAKNMGLYGERIGSLTIVCTSEDVAKKVENQVLLVVRPMYLTPPIHGASIVATILKNSDMYNDWTIELKGMADRIISMRQQLYAALEARGTPGDWSHIIKHIGMFTFTGLSEEQVRLMAKEYHIYMTYDGRISMASLSSKTVPQLADAIHAVVTRIA

SEQ ID NO: 16110 - protein, 325 aa, Campylobacter upsaliensis RM3195
MIKSIAEWSEQECLMLALPHKNTDWKPYLSEIIEAYKEFVKTASHFQKLLLIAPNDEDFTPFKEFGNVEFFKCETNDTWIRDFGAIDVLENGRLKALDFTFNAWGGKFQSDLDNALNTKLFKEKFQTRLEKCDFILEGGSIDFNGAGTMLTSSFCLLNSNRNVNLNQAKIEEKLKNYFGLERIIWLENGFIKGDDTDRHIDTLARFIDENTIAYCICEDEKDEHYTSLKAMEKELLKTNFNLIPLPIPKPLFYEDRRLGATYANFVFVNNALIVPFYKDENDEVVQKRLQAHLKDREVIGVDARVFLRQNGSLHCSCQNRFKGPR

SEQ ID NO: 16111 - protein, 671 aa, Alkaliphilus metalliredigenes QYMF
MDYLILAPIVGVIALIFAYILAGKINAVEAGTDRMKEIASYIQEGSMAFLTREYKSLVIFVVVLFVVLGLAIGWWTAICFLIGALFSALAGFFGMQVATKANVRTANGARVGGMNKALSVAFSGGAVMGMSVVGLGLLGIGTLYLVISNVTGDAVEAAEIITGFALGASSIALFARVGGGIFTKAADVGADLVGKVEAGIPEDDPRNPAVIADNVGDNVGDVAGMGADLFESYVGSIISAIALGLLAYGSNGALFPLLLAAIGIIASIIGTFFVKGDENSDPHKSLKMGTYVSGGITVIAAYFLSQMLLGSITGFLAVVTGLIVGLAIGQVTEIYTSAEFKHVQKIADQSETGAATTIISGLAVGMASTAWPILILAVGILVAHGVAGLYGIALAAVGMLATAGMTIAVDAYGPIADNAGGIAEMCDLPKEVRQITDKLDAVGNTTAAIGKGFAIGSAALTALALFATYTAAVNLEIINLTSPSVIAGMLIGGMLPFLFSALTMEAVGKAAFEMIEEVRRQFRDIPGIMEGTATPEYAKCVDISTAAALREMIIPGVLAVVAPIATGVLLGTEAVGGLLAGALVAGVLMAIMMANAGGAWDNAKKYIEEGHHGGKGSEPHKAAVVGDTVGDPFKDTSGPSINILIKLMTIVSVVFAPLFLRYGGLLGKFFE

SEQ ID NO: 16112 - protein, 150 aa, Brassica napus
METDESGVSLPSGPDGRKRRVSYFYEPTIGDYYYGQGHPMKPHRIRMAHSLIVHYNLHRRLEISRPNLADASDIGQFHSPDYVDFLRSVSPESMGDHSAARNLRRFNVGEDCPVFDGLFDFCRASAGGSIGAAVKLNRQDADIAINWGGG

SEQ ID NO: 16113 - protein, 248 aa, Helianthus annuus
MSFQNEDSGDISPQRRIGKGKIEIKRIENTTNRQVTFCKRRNGLLKKAYELSVLCDAEVALIVFSSRGRLYEYANNSVTGTIDRYKKSCLDPPSTGSVAEANAQFYQQEATKLRQQIANLQNQNRQFYRNIMGESLADMPGKELKNLESKLEKAINRIRAKKNELLFAEIEYMQKRELELHNSNQFLRARIAENERAQQQHMSLMPGSSGYNDLGPHQSFDGLNDLQTNELQLNNNYSCQDQTPLQLV

SEQ ID NO: 16114 - protein, 290 aa, Campylobacter upsaliensis RM3195
MKIALIQQKFHDTKEKTIQKTCELIIKAKKEGAKLVCLGELHQSEYFCQSEDVANFDLAKNYEKDVEFWAGVAKENEVVLITSLFEKRSAGLYHNTAIVFEKDGSIAGKYRKMHIPDDPCFYEKFYFTPGDLGFEPINTSVGRLGVLICWDQWYPEAARIMALKGAEILIYPTAIGWFDKDTNEEKERQLHAWLGIQKAHAIANGLYVVAINRVGFEKDKSGVQDGIRFWGNSFVYGPQGEEIFKADSQSELCACVELDLKRSENVRRWWPFLRDRRIEFFGDLQKRYID

SEQ ID NO: 16115 - protein, 182 aa, Frankia sp. EAN1pec
MTFNPGKRIEGGWCYLGTSAARGPANALAAEIAAAEARRLAVADQLVDPRVRERLAALGEGWPTRGDLEHRVEAQATALGLPPLPTTTIGSFPQTAAIRAARASRRAGTLDAAGYVRAMKTEIDQVVALQEDLGLDVLVHGEPFRERHGPVLRRAAGRLRGHRARLGAVLRHPLRPPADPVR

SEQ ID NO: 16116 - protein, 269 aa, Frankia sp. EAN1pec
MVQYFAELLAGYAATEHGWVQSYGTRYVRPPILFGDVSRPEPMTLRWAAYAQSRTSRPVKGMLTGPVTMLAWSFVRDDQPLEVTARQVALALRDEIHGLEAAGIRIIQVDEPALRELLPPRRALWGAYLDWAVGAFRLATSSVAASTQIHTHMCYSEFGDIIGSIDDLDADVASVEAARSRMELVTDLRKAGYRRAIGPGVYDIHSPRVPTVDEIEKSLRLALAAVEPARLWANPDCGLKTRSFTEVEPALRNMVTATRRVRESLPDGG

SEQ ID NO: 16117 - protein, 184 aa, Synechocystis sp. PCC 6803
MIKLYGAPQSRASIIQWYLEELSLPYEFVNVNLKEGEHRQAPYLAINPFGKVPAIADGNFHLWESGAILLYLAEKASTIPADAQARALVNQWILFANSTLANGLFIEAVREKEMPRLLQSLEKILGRSPFILGEKFSVVDVAVGSILAYVPIMLKLNFDDYPAVAAYVQGLVQRPAFQASIGAR

SEQ ID NO: 16118 - protein, 865 aa, Nostoc sp. PCC 7120
MSNVDQVNYELADELTALRQRIAELEQLEKQYQHKQVELERHIEDLQAKLRTLHITNVDIESHLEPVTLQRLQQEISQRQQVDAALTESEERWRLALDAANLGFWDWNVLTAKVVWSENHERLFGLVSGSFDGTYETFLSCVHPEDRESVIQVIGVCLENKTDYYDEFRIVWPDKSIHWIAAKGRFFYNDQGQPVRMIGVCMDITKSKRTEENNRQLATQVQEQANVLNAILATSVDHIYIFNRTGHYQYVSHGGAAVLGLYPQQMIGKTVQELNLPQELIDKVNGQFLAVMKAGKPVKDECEYVAADGKHYYEYILTPLRNIDHNIEGVITVSRDMTEHKRAEQSIRNSEARFRRLFESNLIGVAFWNVDGFITDANDAYLQLVGYTREQFNTLGKINWRELTPPDYKHLDDRAIAEVKTNGISRIYEKQYIQRNGRRVSIVLGIALLDDSDEQGVAFVLDISERKLAEQQRDRLLCAERIARKDAEIANRIKDEFLAVLSHELRTPLNPILGWSKLLRSRQFDAATTDRALETIERNATLQTQLIEDLLDVSRILQGKLSLNICPVSLPIVIGAAIDTVRLAAEAKEIKIQNVFDPNLGQVMGDANRLQQVVWNLLSNAVKFTSPGGTVEIHLKAVNDQAQIQVIDTGKGITPEFLPYVFDYFRQADGTTTRNFGGLGLGLAIVRQVVELHGGTVQAKSPGDGLGATFTVNLPLSPKNEAMNHEDKNPVSANFQPATLSGVRVLIVDDEPDIRDLVTFILEDYDVKVIAVSSAQEALEALSQSLPDIIVSDIGMPDVDGYMLMRQLRQRSPQEGGNLPAIALTAYAGEINQKQALAAGFQLHISKPVDPDALIEAIGNLVNNQ

SEQ ID NO: 16119 - protein, 329 aa, Enterococcus faecalis V583
MSILVLGGAGYIGSHAVDQLISKGYAVVVVDNLLTGHRSAVHEQATFYEGDIRDKAFLRSVFEKESIEGVLHFAANSLVGESVEKPLMYFNNNVHGTQIALEVMQEFGVKHIVFSSTAATYGEPKAMPITEETPTNPKNPYGESKLMMEKIMKWCDNAYEMKYVALRYFNVAGAKKDASIGEDHTPETHIVPIILQVALGQRAELSIFGDDYDTPDGTCIRDYVYIEDLIAAHILALEYLKNGGESDVFNLGSNNGYSVKEMLDAAREVTGQEIPATIAPRRAGDPSTLIASSEKAKRVLGWQPEVTEVKDIIATAWQWHVKHPQGYNE

SEQ ID NO: 16120 - protein, 211 aa, Thermosynechococcus elongatus BP-1
MSANFLIQTVSNTPENILWHQSTVTRARREQLNGHKSYVLWFTGLSGAGKSRLAHTVEERLHRLGCRTFVLDGDNVRHGLCSDLDFSEVGRKENIRRIGEVAKLMMEVGLIVMTAFISPFRADREAVRNRMPYGDFLEIYCQVSLEACEARDVKGLYKKARAGQIKNYTGIDSAYEAPLKPELVVNTECLTLEESVSAVLRMLHERGMVVQ

SEQ ID NO: 16121 - protein, 964 aa, Lycopersicon esculentum var. cerasiforme
MTTRNLDKLASIDAQLRQLVPAKVSEDDKLVEYDALLLDRFLDILQDLHGEDLKGTVQDCYELSAEYEAKHDPKKLEELGNVLTSLVPGDSIVIAKAFSHMLNLANLAEEVQIAYRRRQKLKKKGDFGDESNATTESDIEETFKKLVGDLKKSPQEVFDAIKNQTVDLVLTAHPTQSVRRSLLQKHGRIRDCLAQLYAKDITPDDKQELDEALQREIQAAFRTDEIRRTPPTPQDEMRAGMSYFHETIWKGVPKFLRRVDTALKNIGIDERVPYNAPLIQFSSWMGGDRDGNPRVTPEVTRDVCLLARMMAANLYYSQIEDLMFELSMWRCSEELRVRAHKLQRSWRDEKHYIEFWKQVPPNEPYRVILGDVRDKLYQTRELARQLLGHGYSEIPEEATYTNIEQFLEPLELCYSSLCACGDLSIADGSLLDFLRQVSTFGLSLVRLDIRQESDRHTDVLDAITQHLEIGSYREWSEERRQEWLLSELSGKRPLFGRDLPKTEEIADVLDTFHVIAELPADCFGAYIISMATAPSDVLAVELLQRECRVRQPLRVVPLFEKLADLDAAPAAVARLFSIEWYRNRINGKQEVMIGYSDSGKDAGRLSASWQLYKAQEELIQVAKEFDVKLTMFHGRGGTVGRGGGPAHLAILSQPPETIHGSLRVTVQGEVIEQSFGEEHLCFRTLQRFTAATLEHGMHPPVSPKPEWRALMDEIAVVATEKYRSIVFKEPRFVEYFRLATPELEYGRMNIGSRPSKRKPSGGIESLRAIPWIFAWTQTRFHLPVWLGFGAAFKYAIEKDIKNLRMLQEMYNAWPFFRVTIDLVEMVFAKGDPGIAALFDKLLVSEDLLSFGELLRSNYEETKSLLLQIAGHKDLLEGDPYLKQRLRLRDSYITTLNVCQAYTLKRIRDPDYSVTPRPHISKEYMESKPATELVNLNPTSEYAPGLEDTLILTMKGIAAGMQNTG

SEQ ID NO: 16122 - protein, 964 aa, Lycopersicon esculentum var. cerasiforme
MATRNLEKFASIDAQMRLLVPTKVSEDDMLVEYDALLLDRFLDILEDLHGEGIKTTVQECYELSAEYENTHDKKKLEELGSVLTTLDPGDSIVVAKSISHMLNMANLAEEVQIANSGRAKSKKGELSDESNLMTESDIEETLKRLVVNLNKSPREVFNALKNQTVDLVFTAHPTQAIRRSLLQKHARIRNCLSQLYAKDITPDDKEELDEALEREIQAAFRTDEIRRTPPTPQDEMRAGMSYFHETIWNGVPKFLRRVDTALKNIGIDERVPYNAPLIQFSSWMGGDRDGNPRVTPEVTRDVCLLARMMAANLYYSQIDDLMFELSMWRCNDELRDRADELHRSLKRDEKHYIEFWKQVPPSEPYRVIIGDVRDKLYHTRERTRQLLSHGFSEIPEEATYTNIKQFLEPLELCYRSLCACGDRPIADGSLLDFLRQVSTFGLSLVRLDIRQESDRHTDVLDAITQHLEIGSYREWSEERKQEWLLSELSGKRPLFGPDLPKTEEIDDVLNTFHVISELPSDCFGAYIISMATAPSDVLAVELLQRECHVKQPLRVVPLFEKLDDLDAAPAAIARLFSIEWYKNRINGKQEVMIGYSDSGKDAGRLSAAWQLYKAQEELIKVAKQYDVKLIMFHGRGGTVGRGGGPSHLAILSQPPDTIQGSLRVTVQGEVIEQSFGEEHLCFRTLQRFTSATLEHGMYPPFPPKPEWRALLDEISVVATEKYRSIVFKEPRFVEYFRLATPELEYGRMNIGSRPSKRKRNGGIETLRAIPWIFAWTQTRFHLPVWLGFGAAFKYALNKDKKNLNMLRDMHKKWPFFRVTADLIEMVFAKGDPGIAALYDKLLVSEDLWSFGELLRSDYEETKSLLLKVAGHKELLENDPSLKQRLRLRDSYITTLNVCQAYTLKRIRDPTYKVTPRPHITKEYIESKPAAELVSLNPQSEYAPGLEDTLILTMKGIAAGMQNTG

SEQ ID NO: 16123 - protein, 238 aa, Glycine max
  misc_feature (28)..(28): Xaa can be any naturally occurring amino acid
  misc_feature (185)..(185): Xaa can be any naturally occurring amino acid
  misc_feature (197)..(197): Xaa can be any naturally occurring amino acid
  unsure (1)..(238): unsure at all Xaa locations
MERYEILKDIGSGNFAVAKLVRDNYTNXFFAVKFIERGQKIDEHVQREIMNHRSLKHPNIIRFKEVLLTPTHLAIVMEYASGGELFERICNAGRFSEDEARFFFQQLISGVSYCHSMQICHRDLKLENTLLDGSTAPRVKICDFGYSKSSVLHSQPKSTGGTPAYIAPEVLTRKEYDGKVADVWXCGVTLYVMVVGXFFEDPEIQKLQKTIVRSLGPVLVPDMSSSWMETFLPKFGQA

SEQ ID NO: 16124 - protein, 544 aa, Streptococcus pyogenes MGAS10394
MINRRRIMKKHWWHKATIYQIYPRSFKDTNGNGIGDLKGITSQLDYLQKLGITAIWLSPVYQSPMDDNGYDISDYEAIADVFGDMADMDELLAAANERGIKIIMDLVVNHTSDEHAWFVEARENPNSPERDFYIWRDEPNDLTSIFSGSAWEYDNASGQYYLHLFSKRQPDLNWENEALRHKIYDMMNFWIAKGIGGFRMDVIDLIGKVPDLEITGNGPRLHDYLKEMNQATFGNHDVMTVGETWGATPEIARQYSRPENKELSMVFQFEHVGLQHKPDAPKWDYAEELDVPALKAIFSKWQTELKLGEGWNSLFWNNHDLPRVLSIWGNDSTYREKSAKALAILLHLMRGTPYIYQGEEIGMTNYPFKDLTEVNDIESLNYAKEAMGNGVSAARVMDSIRKVGRDNARTPMQWSKDTHAGFSKAQETWLPVNPNYQDINVADALADPDSIFYTYQKLIALRKEQDWLVEADYHLLPTADKVFAYQRQLGEETYVIVVNVSDEEQVFAKDLAGAQVIIANTDVDTVLETKHLQPWDAFCLKLKA

SEQ ID NO: 16125 - protein, 200 aa, Arabidopsis thaliana
MESHNTLNLDMEKDQEKAFDYSKRAQWLRAAVLGANDGLVSTASLMMGVGAVKQNVKIMILTGFAGLVAGACSMAIGEFVSVYSQYDIEVAQMKRETGGEIEKEKLPSPTQAAAASALAFSLGAMVPLLAAAFVKEYKVRIGAIVAAVTLALVMFGWLGAVLGKAPVVKSSLRVLVGGWLAMAITYGFTKLIGSHSHMYV

SEQ ID NO: 16126 - protein, 601 aa, Wigglesworthia glossinidia endosymbiont of Glossina brevipalpis
MEKNQQSQLKLLVTRGKEQGYLTFSEVNDFLPENIIDSHQIEDIIQMINDMGIQVMDEAPNSENLLLPDSNNNSDEDVAEAAAQVLSNVESEFGKTTDPVRMYMREMGSVQLLTREGEIDLAKRIEYGINQIQCAIVEYPKAIIYLLDQYKKTTTGESKLSELITGFVDPNIVVDSSNIDLNTEDISSEEENNTSEEIDIDKELANKRFIELQEQYKISFNTIKEYGRMHEFSIKEIIYLADIFKQFRLVPKQFDYLVFIIRSEIEKIRFYERRIMRICVNICKMPKKFFISLFSGNETNDVWLKKALSLDKPWSRKLYKLNKPICLILNKLKIIEINSGITIEQAKDINKRMSIGEAKAKRAKKEMVEANLRLVISIAKKYTNRGLQFLDLIQEGNIGLMKAVDKFEYRRGYKFSTYATWWIRQAITRSIADQARTIRIPVHMIETINKLNRISRQMLQEIGREPTPEELSEKMLIPEDKIRKVLKIAKEPISMETPIGDDEDSHLGDFLEDTSLDLPLDSATSESLRSATHDVLSGLTAREAKVLKMRFGIDMSTDHTLEEVGKQFDVTRERIRQIEAKALRKLRHPSRSEILRSFLDD

SEQ ID NO: 16127 - protein, 218 aa, Lycopersicon esculentum
MAGYRGDDEYDYLFKLVLIGDSGVGKSNLLSRFTKNEFNLESKSTIGVEFATKSLNIDGKVIKAQIWDTAGQERYRAITIAYYRGAVGALLVYDVTRHVTFENVNRWLKELRDHTDPNIVVMLLGNKSDLRHLVAVSTEEAKSLAEREALYFMETSALEATNVENAFTEALTQIYRIVSKKAVEAGDEGATSTAPPKGQTINIKDEGSAWKKFGCCSS

SEQ ID NO: 16128 - protein, 533 aa, Corynebacterium efficiens YS-314
MTENSAADQIIDRGMRPKVAGNTTRHNGAPVASENISVTAGPQGPNILNDIHLIEKLAHFNRENVPERIPHAKGHGAFGELHITEDVSQYTKADLFQPGKVTPMGVRFSTVAGEQGSPDTWRDVHGFALRFYTQEGNYDIVGNNTPTFFVRDGMKFPDFIHSQKRLNKNGLRDADMQWDFWTRAPESAHQVTYLMGDRGTPKTTRHMNGYGSHTFQWVNKDGEAFWVKYHFISRQGVENFTDAEAAEMAGINADYHREDLYNAIERGDYPIWDVKVQIMPFAEAENYRWNPFDLTKVWSKKDYPRIDVGYFILNRNPRNFFAQIEQIALDPGNIVPGVGLSPDRMLQARAFAYADQQRYRIGPNYRDLPINRPINEVNTYSREGHMQYVFDAEGEPSYSPNRYTKGAGYLDDGETSSSNHTSYGQASDIYVNPDPHGTDLVRAAYVKHQDDDDFMQAGILYREVYNDEEKARLADNISNAMQGISEETEPRVYEYWTNVDENLGARVKELYLQKKAAGAAEHTSSTGDDIDKK

SEQ ID NO: 16129 - protein, 193 aa, Campylobacter coli RM2228
MDNNLTWHASSITKTQRAKLKNQKPCVLWFTGLSGSGKSTLANAVEKKLFEQGFHTYLLDGDNVRHGLNSDLGFDEASRVENIRRIGELCKLFMDAGMIVLCAFISPFEKDRKLVKDLLEEDEYIEIFVDTSLEVCEKRDPKGLYKKARQGEIKNFTGIDSPYERPKNPHIHITKEDLNENVDMILGFLYGKA

SEQ ID NO: 16130 - protein, 354 aa, Zea mays
AWSRPRYADELIKNAAYIGTPGKGILAADESTGTIGKRLSSINVENVEENRRALRELLFCCPGALQYISGVILFEETLYQKTKDGKPFVDVLKEGGVLPGIKVDKGTIEVVGTDKETTTQGHDDLGKRCAKYYEAGARFAKWRAVLKIGPNEPSQLAIDLNAQGLARYAIICQENGLVPIVEPEILVDGPHDIDRCAYVTETVLAACYKALNEHHVLLEGTLLKPNMVTPGSDSKKVTPEVIAEYTVRTLQRTVPAAVPAVVFLSGGQSEEEATRNLNAMNKLSTKKPWSLSFSFGRALQASTLKAWAGKVENLEKARAAFLARCKANSEATLGTYKGDAAADTESLHVKDYKY

SEQ ID NO: 16131 - protein, 645 aa, Arabidopsis thaliana
MDTNTSGEELLAKARKPYTITKQRERWTEDEHERFLEALRLYGRAWQRIEEHIGTKTAVQIRSHAQKFFTKLEKEAEVKGIPVCQALDIEIPPPRPKRKPNTPYPRKPGNNGTSSSQVSSAKDAKLVSSASSSQLNQAFLDLEKMPFSEKTSTGKENQDENCSGVSTVNKYPLPTKQVSGDIETSKTSTVDNAVQDVPKKNKDKDGNDGTTVHSMQNYPWHFHADIVNGNIAKCPQNHPSGMVSQDFMFHPMREETHGHANLQATTASATTTASHQAFPACHSQDDYRSFLQISSTFSNLIMSTLLQNPAAHAAATFAASVWPYASVGNSGDSSTPMSSSPPSITAIAAATVAAATAWWASHGLLPVCAPAPITCVPFSTVAVPTPAMTEMDTVENTQPFEKQNTALQDQNLASKSPASSSDDSDETGVTKLNADSKTNDDKIEEVVVTAAVHDSNTAQKKNLVDRSSCGSNTPSGSDAETDALDKMEKDKEDVKETDENQPDVIELNNRKIKMRDNNSNNNATTDSWKEVSEEGRIAFQALFARERLPQSFSPPQVAENVNRKQSDTSMPLAPNFKSQDSCAADQEGVVMIGVGTCKSLKTRQTGFKPYKRCSMEVKESQVGNINNQSDEKVCKRLRLEGEAST

SEQ ID NO: 16132 - protein, 335 aa, Methanosarcina mazei Go1
MATIIYDDETTFDALKDRTIAVMGYGSQGHAHARNLHESGLNVIVGLRQGSSSWAKAESDGLKVMTVDDASRAADVIMILLPDEKQAAVYYSQIEPNLKAGDALVFAHGFNIHYNQIVPPKDVDVFMVAPKGPGHIVRRTYTEGIGVPGLIAVYQDATGKARDLALSYAKGIGATRAGVYETTFREETETDLFGEQVDLCGGLSALIKTAFEVLVEAGYQPEMAYFETCHEVKLIVDLIYEGGLERMWHSVSNTAEYGGMTVGPRVINEYSREAMYEALERIQNGEFAKEFVLEGMVNHPVLKAMERQEKEHQLEVVGKQIRANIPWLNKKIDDD

SEQ ID NO: 16133 - protein, 135 aa, Arabidopsis thaliana
  misc_feature (20)..(20): Xaa can be any naturally occurring amino acid
  misc_feature (31)..(31): Xaa can be any naturally occurring amino acid
  misc_feature (55)..(55): Xaa can be any naturally occurring amino acid
  unsure (1)..(135): unsure at all Xaa locations
RAGHSRPLKLLIKILVFLPXTEKNFLFVEKXPMAVNQNPKLKLNPWSVLAMCWEXPVHLRKPGKVPVGETPLKRLGPSLFKSGFVAKHFEVANFPLLETIKERIPEMCAPLLNVSCVQVYDHLVAVFKAELISST

SEQ ID NO: 16134 - protein, 280 aa, Prunus armeniaca
EKSAKRKRKNQYRGIRQRPWGKWAAEIRDPRKGVRVWLGTFNTAEEAARAYDSEARRIRGKKAKVNFPDETPRSSAKRSVKANPQKMQPKTNMNAIQPNLNQNINFVNDPNQDYYNAMGFLDEKPPTNNFGFMSTFPANDVALKSSTPSDAVPLYFGSDQGSNSFDCSDFGWGEQGSKTPEISSVLSSVMEESDDSLFLEDASPTKKLRSNPEDLVPVQDNAGKTLTDELSAFEMKYFQTPYLDGSWDASVDAFLSGDATQDGGNSVDLWCFDDLVGGGF

SEQ ID NO: 16135 - protein, 524 aa, Trifolium pratense
MLLEIAVALLVIALFIYLRPTPTAKSKALRHLPNPPSPKPRLPFIGHLHLLDHPLLHISLIRLGERYGPLYSLYFGSMPTVVASTPDLFKLFLQTHEATSFNTRFQTSAIRRLTYDNSVAMVPFGPYWKFVRKLIMNDLLNATTVNKLRPLRSKEIRKVLNVMANSAETQQPLNITVELLKWTNSTISTMMLGEAEEVRDIARDVLKIFGEYSVTDFIGPLKIFKKFGNYEQRIDAIFNKYDPIIERVIKKRQGIVNKRKNGEVLVGEEENVVFLDTLLEFAQDETMEIKITKEQIKGLVDFFSAGTDSTAVATEWTLAELINNPRVLKKAREEVESVVGKDRLVDESDIQNLPYIRAMVKEVFRLHPPLPVVKRKCTEECEINGYVIPEGALILFNVWQVGRDPKYWEKPLEFRPERFLENAGVGEGEASSIDLRGQHFTLLPFGSGRRMCPGVNLATAGMATLLSSIIQCFDLQVPGPNGQILKGSDAKVTMDERPGLSVPRAQNLVCVPLARAGAAKLLSS

SEQ ID NO: 16136 - protein, 339 aa, Campylobacter upsaliensis RM3195
MALKVYYDKDCDLNLIQSKKVAIIGFGSQGHAHALNLRDSGVEVFIGLRKGKSYEKAQNEGFEVLSVAQACKKADLIMILTPDESQAEIYEEDIKPHLKQGQILAFAHGFNIHYGQIIPPEFVDVIMIAPKGPGHTLRNEFMQGGGLACLIAIYQEASDDAKNLALSYASAIGAGKVGIMQTSFKHETETDLFGEQAVLCGGLVNLIEAGFETLVEAGYEPEMAYFECLHEVKLIVDLLYQGGIGDMRYSISNTAEYGGYVSGAKIITPHTKKAMKNILKDIQNGVFARDFILEKKANFAKMHAMRQNTKQSLIEKTGQNLRKIMPWISKNKLIDKDKN

SEQ ID NO: 16137 - protein, 592 aa, Bradyrhizobium japonicum USDA 110
MLHDITNKKQAIYTKFPFSRLRRDTHFAMHCQECRWPAIAIVSERIRHMNYQPRGISTFQAPASYQSEIDAAKALLETQPTWNGVSAEAVARMRLQNRFRTGLDVARYTAALMRADMAAYDNDPTKYTQSLGCWHGFIAQQKLISVKKHFGGRTDRTYLYLSGWMIAALRSEFGPLPDQSMHEKTSVPALIEELYTFLRQADSRELNDIFRSLDKARKEGDKTREKELIEKIDGFQTHVVPVIADIDAGFGNAEATYLLAKKMIEAGACALQIENQVSDEKQCGHQDGKVTVPHDVFLAKIRACRHAFLELGVEDGVVVTRTDSLGAGLTQQIAVSHKPGDIGDQYNSFLDCEEITAENARNGDVIINRNGKMMRPKRLPSNLYQFRPGTGEDRCVLDCITSLQNGADLLWIETEKPHIEQIAKMVDRIREVVPNAKLAYNNSPSFNWTLNFRWQVYDAMKEAGKDVSKYNRAELMKAEYDDTPLAKEADERIRTFQADSAKRAGIFHHLITLPTYHTAALSTDNLAREYFGEQGMLGYVKNVQRAEIRQGIACVKHQNMAGSDIGDDHKEYFAGEAALKAGGAHNTMNQFG

SEQ ID NO: 16138 - protein, 519 aa, Trametes versicolor
MGLQRFSFFVTLALVARSLAAIGPVASLVVANAPVSPDGFLRDAIVVNGVVPSPLITGKKGDRFQLNVVDTLTNHSMLKSTSIHWHGFFQAGTNWADGPAFVNQCPIASGHSFLYDFHVPDQAGTFWYHSHLSTQYCDGLRGPFVVYDPKDPHASRYDVDNESTVITLTDWYHTAARLGPRFPLGADATLINGLGRSASTPTAALAVINVQHGKRYRFRLVSISCDPNYTFSIDGHNLTVIEVDGINSQPLLVDSIQIFAAQRYSFVLNANQTVGNYWVRANPNFGTVGFAGGINSAILRYQGAPVAEPTTTQTPSVIPLIETNLHPLARMPVPGSPTPGGVDKALNLAFNFNGTNFFIDNASFTPPTVPVLLQILSGAQTAQELLPAGSVYPLPAHSTIEITLPATALAPGAPHPFHLHGHAFAVVRSAGSTTYNYNDPIFRDVVSTGTPAAGDNVTIRFQTDNPGPWFLHCHIDFHLEAGFAIVFAEDVADVKAANPVPKAWSDLCPIYDGLSEANQ

SEQ ID NO: 16139 - protein, 176 aa, Thermus thermophilus HB8
MPEEIATLAGGCFWCTEAAFKLLRGVLEVVPGYAGGHVPHPTYEEVCTGTTGHREAVQVRFDPGVLPYADLLRYFFAVHDPTSEDRQGPDVGPQYSPAIFYHSEEQKRVAEAVMRELAPLYPKPIATKLLPFTTFYPAEAYHRDYFARHPEAPYCRFVIAPKLEKARKAFKSLLRP

SEQ ID NO: 16140 - protein, 364 aa, Streptomyces coelicolor
VTDVNGAPADVLHTLFHSDQGGHEQVVLCQDRASGLKAVIALHSTALGPALGGTRFYPYASEAEAVADALNLARGMSYKNAMAGLDHGGGKAVIIGDPEQIKSEELLLAYGRFVASLGGRYVTACDVGTYVADMDVVARECRWTTGRSPENGGAGDSSVLTSFGVYQGMRAAAQHLWGDPTLRDRTVGIAGVGKVGHHLVEHLLAEGAHVVVTDVRKDVVRGITERHPSVVAVADTDALIRVENLDIYAPCALGGALNDDTVPVLTAKVVCGAANNQLAHPGVEKDLADRGILYAPDYVVNAGGVIQVADELHGFDFDRCKVKASKIYDTTLAIFARAKEDGIPPAAAADRIAEQRMAEARPRP

SEQ ID NO: 16141 - protein, 188 aa, Glycine max; identical to SEQ ID NO: 1324

SEQ ID NO: 16142 - protein, 318 aa, Nostoc sp. PCC 7120
MNQSSQDRPLRPKPLQSSFQWLYAFWKFSRPHTIIGTSLSVLGLYLISIAVSSTGFALTQINSVLGAWLACLCGNVYIVGLNQLEDIEIDKVNKPHLPLASGEFSRKQGRIIVILTGITAIVLAWLNGPYLFGMVAVSLAIGTAYSLPPIRLKQFPFWAALCIFSVRGTIVNLGLYLHFSWLLQNKQSIPLPVWILTVFILIFTFAIAIFKDIPDMEGDRLYNITTLTIQLGPQAVFNLAMWVLTVCYLGMVIIGVLRLGTINSVFLVVTHLVILCWMWMQSLAVDIHDKTAIAQFYQFIWKLFFLEYLMFPIACLLA

SEQ ID NO: 16143 - protein, 426 aa, Picrophilus torridus DSM 9790
MDYDVIILGAGAGGYKAAVHLLKNKKRVLMIEKEKFGGECLNYGCIPSKALIEMSESIYYLKNMPGISMEYKIDMKAWQDWKNSMVARITGNAERQCKSLGADILYGFGTLKDKNTVNVNGKDYTAENIIIDTGSSPARIPGIDNVYYNREILGIDHIPESIAIIGGGYIGVEIGTAMAKLGSDVYIIEAKERILPEVSSELSNAVDKKLRSIGVKIMTSSKVISVSKDKYYTVKTENDEIKSEMVLMSVGRIPNTKNIGLENLKIEMDGRFIKTDEHRRTNVKNIYAIGDVTTGPMLAHKAFYDAYIASENILGNDVIIDYKAMPYVIYTDPEISFTGSVSNNSKKIMTSAVPRALTMNEGDGFFRIYYNDDGTVTGAAIAAPRSSEIITEISLAVESYLNINDLLLTIHPHPTIAEGIHDDFEN

SEQ ID NO: 16144 - protein, 652 aa, Frankia sp. EAN1pec
MAQAHVTKHVFVTGGVASSLGKGLTASSLGRLLKARGLRVTMQKLDPYLNVDPGTMNPFQHGEVFVTNDGAETDLDIGHYERFLDVDLDGSANVTTGQVYSAVIARERRGGYLGETVQVVPHITDEIKGRIRRLATDSVDVVITEVGGTVGDIESLPYLEAIRQVRHEVGRDNALTVHVSLVPYLAPSGELKTKPTQHSVAALRSIGLQPDAVVCRSDRPLPDALKRKIAMMCDVDDEAVVGAPDAGSIYDIPKVLHKEGLDAYVVRRLGLSFRDVDWTEWDTLLRRVHHPSNTATVAIVGKYVDLPDAYLSVTEALRAGAFAVDARADIRWIGSDEFTSPAAAAHALEGVDGIIVPGGFGIRGIEGKIEALRHAREHGIPTLGICLGLQCMVIEAGRSLAGLAGSNSTEFDPETAHPVISTMADQHDVVAGKRDMGGTMRLGLYPCALGAGTVARREYGEPEVLERHRHRYEVNNSYRERLTAAGLVFSGTSPDGRLVEVVELPADVHPFYVGTQAHPEFRSRPTRAHPLFRGLAAAAVAHADRRRGRLPVDIPDGGVAGGGVAGGGPADGDMIGSGDGDAAGARAGNGARSAGGRARRGRAEQSAAAGAGTTAGVSGAAGTGGAVGAALPGGSTGPAAAAGVSDGELVSP

SEQ ID NO: 16145 - protein, 343 aa, Burkholderia fungorum LB400
MDGQWQDRWYDTKSTGGRFVRNDAAFRNWVTADGSPGPSGAGGFEAQAGRYHLYVSLACPWAHRTLIVRALKGLDAMIDVSVVHWLMLENGWTFADGPGVVPDTVNHAALLHQVYTAADPHYSGRVTVPILWDKQRATIVSNESSEIIRMLNSAFDGIGAKPGDFYPAPLRAQIDTINARVYDTLNNGVYQAGFATTQQAYEEAVTPLFETLDWLDAKLATQRYLTGAHLTEADIRLFTTLIRFDAVYVGHFKCNLRRIADYPNLSAYTRDIYQLPGIAQTVDFTHIKRHYYESHRSINPTGIVPLGPVQDFSAPHDRARPGVSGSTCALTAAAGSQPYPVKE

SEQ ID NO: 16146 - protein, 333 aa, Picrophilus torridus DSM 9790
MIEEDISKEDIISAYRNMVLERFLDKKLLGINRQGFLPFYIPNIGHEALHAAIGMAIRDDDFFYPYYRDLGSDIARVGLDFVLAQMFSTEMDNELGRDMPLHISNKAKRVGPVITTVGGHLMAATGVAYSYKYQKKPGIVITTFGDGATSTPDFHVSMNFAAVYSLPLLFICENNQWAISYPVEEQTKVEISKKAEAYGFTGIKIDGNNFIEAYHAIRNAIKDVEKNKMPLLIDAVTYRMGPHTTADDPNKYRKTIINEGDPLDPLSIIEDDIKKMKILNDEEISNIKNEINNMVSKEVERYEKMNKPGKETLFKNIYENEPWYITEERGEIE

SEQ ID NO: 16147 - protein, 351 aa, Arabidopsis thaliana
MMARNVLVSGGAGYIGSHTVLQLLLGGYSVVVVDNLDNSSAVSLQRVKKLAAEHGERLSFHQVDLRDRSALEKIFSETKFDAVIHFAGLKAVGESVEKPLLYYNNNLVGTITLLEVMAQHGCKNLVFSSSATVYGSPKEVPCTEEFPISALNPYGRTKLFIEEICRDVYGSDPEWKIILLRYFNPVGAHPSGDIGEDPRGIPNNLMPFVQQVAVGRRPHLTVFGNDYNTKDGTGVRDYIHVIDLADGHIAALRKLEDCKIGCEVYNLGTGNGTSVLEMVDAFEKASGKKIPLVIAGRRPGDAEVVYASTERAESELNWKAKYGIEEMCRDLWNWASNNPYGYDSSSEDNSH

SEQ ID NO: 16148 - protein, 288 aa, Phytophthora ramorum
  misc_feature (174)..(174): Xaa can be any naturally occurring amino acid
  unsure (1)..(288): unsure at all Xaa locations
YVPRAILMDLEPGTMDSVRAGPYGQLFRPDNFVFGQTGAGNNWAKGHYTEGAELIDSVLDVVRKEAESCDCLQGFQITHSLGGGTGSGMGTLLISKIREEYPDRIMCTYSVCPSPKVSDTVVEPYNATLSVHQLVENADEVMCLDNEALYDICFRTLKLTTPTYGDLNHLVCAXMSGITTCLRFPGQLNSDLRKLAVNLIPFPRLHFFMIGFAPLTSRGSQQYRALTVPELTQQQFDAKNMMCAADPRHGRYLTAACMFRGRMSTKEVDEQMLNVQNKNSSYFVEWIP

SEQ ID NO: 16149 - protein, 427 aa, Cordyceps bassiana
DKTHINVVVIGHVDSGKSTTTGHLIYQCGGIDKRTIEKFEKEAAELGKGSFKYAWVLDKLKAERERGITIDIALWKFETPKYQVTVIDAPGHRDFIKNMITGTSQADCAILIIAAGTGEFEAGISKDGQTREHALLAFTLGVKQLIVAINKMDTTKWSEARYQEIIKETSSFIKKVGYNPKAVAFVPISGFNGDNMLEASTNCPWYKGWEKETKAGKSTGKTLLEAIDAIEPPKRPTDKPLRLPLQDVYKIGGIGTVPVGRVETGIIKPGMVVTFAPANVTTEVKSVEMHHEQLAEGVPGDNVGFNVKNVSVKEIRRGNVAGDSKNDPPMGAASFNAQVIVINHPGQIGAGYAPVLDCHTAHIACKFAELLEKIDRRTGKSVENNPKFIKSGDSAIVKMVPSKPMCVEAFTDYPPLGRFAVRDMRQT

SEQ ID NO: 16150 - protein, 427 aa, Cordyceps bassiana
DKTHINVVVIGHVDSGKSTTTGHLIYQCGGIDKRTIEKFEKEAAELGKGSFKYAWVLDKLKAERERGITIDIALWKFETPKYQVTVIDAPGHRDFIKNMITGTSQADCAILIIAAGTGEFEAGISKDGQTREHALLAFTLGVKQLIVAINKMDTTKWSEARYQEIIKETSNFIKKVGYNPKAVAFVPISGFNGDNMLEPSTNCPWYKGWEKETKAGKSTGKTLLEAIDAIEAPKRPTDKPLRLPLQDVYKIGGIGTVPVGRVETGIIKPGMVVTFAPANVTTEVKSVEMHHEQLTEGVPGDNVGFNVKNVSVKEIRRGNVAGDSKNDPPMGAASFNAQVIVINHPGQIGAGYAPVLDCHTAHIACKFSELLEKIDRRTGKSVENNPKFIKSGDSAIVKMVPSKPMCVEAFTDYPPLGRFAVRDMRQT

SEQ ID NO: 16151 - protein, 288 aa, Phytophthora ramorum
  misc_feature (5)..(5): Xaa can be any naturally occurring amino acid
  unsure (1)..(288): unsure at all Xaa locations
YVPRXILMDLEPGTMDSVRAGPYGQLFRPDNFVFGQTGAGNNWAKGHYTEGAELIDSVLDVVRKEAESCDCLQGFQITHSLGGGTGSGMGTLLISKIREEYPDRIMCTYSVCPSPKVSDTVVEPYNATLSVHQLVENADEVMCLDNEALYDICFRTLKLTTPTYGDLNHLVCAAMSGITTCLRFPGQLNSDLRKLAVNLIPFPRLHFFMIGFAPLTSRGSQQYRALTVPELTQQQFDAKNMMCAADPRHGRYLTAACMFRGRMSTKEVDEQMLNVQNKNSSYFVEWIP

SEQ ID NO: 16152 - protein, 686 aa, Bacillus subtilis
MSDDQNKRVNEHSKDEQLEQYRTDNSGKKMTTNQGLRVSEDEHSLKAGVRGPTLMEDFHFREKMTHFDHERIPERVVHARGFGVHGFFQVYEPMTEYTRAKFLQDPSVKTPVFVRFSTVAGSKGSADTVRDARGFATKFYTEEGNYDLVGNNIPVFFIQDAIKFPDLVHAFKPEPHNEMPQAATAHDTFWDFVANNPESAHMVMWTMSDRGIPRSYRMMEGFGVHTFRFVNEQGKARFVKFHWKPVLGVHSLVWDEAQKIAGKDPDFHRRDLWETIENGGKVEYELGVQMIDEEDEFKFDFDILDPTKLWPEELVPVKIIGKMTLNRNQDNVFAETEQVAFHPGNVVPGIDFTNDPLLQGRLFSYTDTQLIRLGGPNFHEIPINRPVCPFHNNQYDGYHRMTINKGPVAYHKNSLQNNDPSPATAEEGGYVHYQEKVEGKKIRQRSDSFNDYYSQAKLFWNSMSPVEKQHIISAFCFEVGKVKSKDVQRQVVDVFSNVDADLAEEIAKGVGVAAPAKRKASKENLTSPALSQARTVKTASTRKVAVLAGNGFHEKELQTVLEALKQEGITVDIISQNLGYMTSGSGQQLEASGTFLTVDSVLYDAVYAAGGLELKDNKQAMAFIREAYNHYKAIGAANEGIDLLQSSVGTTEGLGIVTAKDEPDYTAFSKAFIDAVAAHRHWDRRI

SEQ ID NO: 16153 - protein, 427 aa, Cordyceps bassiana
DKTHINVVVIGHVDSGKSTTTGHLIYQCGGIDKRTIEKFEKEAAELGKGSFKYAWVLDKLKAERERGITIDIALWKFETPRYQVTVIDAPGHRDFIKNMITGTSQADCAVLIIAAGTGEFEAGISKDGQTREHALLAFTLGVKQLIVAINKMDTTKWSEARYQEIIKETSSFIKKVGYNPKAVAFVPISGFNGDNMLEPSANCPWYKGWEKETKAGKSTGKTLLEAIDAIEAPKRPTDKPLRLPLQDVYKIGGIGTVPVGRVETGIIKPGMVVTFAPANVTTEVKSVEMHHEQLTEGVPGDNVGFNVKNVSVKEIRRGNVAGDSKNDPPTGAASFNAQVIVINHPGQIGAGYAPVLDCHTAHIACKFSELLEKIDRRTGKSVENNPKFIKSGDSAIVKMVPSKPMCVEAFTDYPPLGRFAVRDMRQT

SEQ ID NO: 16154 - protein, 164 aa, Glycine max
SCIGYAMPFILCATICCCLPCIISILGVREDMAQTRGASSESINALPTYKFKMKRNKSKGESNSAVGEGGVVAAGTEKERMISGEDAACCICLAKYENNDELRELPCSHLFHKDCVDKWLKINALCPLCKSEVSENVRGSVSGVDANQHEGESRVENGLTNTSS

SEQ ID NO: 16155 - protein, 289 aa, Yersinia pestis KIM
MKNANVALLQLCSGENTRDNLAQIEQQIKQLNAGIKLVMTPENALLFANAASYRHHAEHHNDGPLQQEVREMARRYGVWIQVGSMPMVSRESPDLITSSSLLFDDQGELKARYDKIHMFDVDINDIHGHYRESDTYQPGQQLTVVDTPVGRLGMTICYDLRFPGLFQALRAQGAEIISVPAAFTKMTGEAHWETLLRARAIENQCVILAAAQVGRHGATRRTWGHTMAVDAWGKIIGHNPDAVAALKVRIETAGLKTIRNQMPVMQHNRFQATLEPTLNKPLLNKPPSN

SEQ ID NO: 16156 - protein, 481 aa, Burkholderia vietnamiensis G4
MANVTYTDTQLLIDGEWVDAASGKTIDVVNPATGKAIGKVAHAGIADLDRALAAAQRGFEAWRKVPAHERAATMRKAAALVRERADAIAQLMTQEQGKPLTEARIEVLSAADIIEWFADEGRRVYGRIVPPRNLGAQQMVVKEPVGPVAAFTPWNFPVNQVVRKLCAALATGCSFLVKAPEETPASPAALLRAFVDAGVPAGVVGLVYGDPAEISSYLIPHPVIRKVTFTGSTPVGKQLAALAGQHMKRATMELGGHAPVIVAEDADVALAVKAAGGAKFRNAGQVCISPTRFLVHNSIRDEFTRALVAHAQGLKIGNGLDEGTTLGALANPRRLTAMASVVENARKVGASIETGGERIGSEGNFFAPTVIANVPLEADVFNNEPFGPVAAIRGFDKLEDAISEANRLPFGLAGYAFTRSFANVHLLTQRLEVGMLWINQPATPWPEMPFGGVKDSGYGSEGGPEALEPYLVTKSVTVMAV

SEQ ID NO: 16157 - protein, 338 aa, Oryza sativa (japonica cultivar-group)
MSTTKVKRRVGKYELGRTIGEGTFAKVKFARDTETGDPVAIKILDKEKVLKHKMVEQIKREISTMKLIKHPNVVRIYEVMGSKTKIYIVLEYVTGGELFDTIVNHGRMREDEARRYFQQLINAVDYCHSRGVYHRDLKPENLLLDSYGNLKVSDFGLSALSQQIKDDGLLHTTCGTPNYVAPEVLEDQGYDGAMADLWSCGVILFVLLAGYLPFEDSNLMTLYKKISNAEFTFPPWTSFPAKRLLTRILDPNPMTRVTIPEILEDEWFKKGYKRPEFDEKYDTTLDDVYAVFNDSEEHHVTEKKEEPEALNAFELISMSAGLNLGNLFDSEQVRDLPI

SEQ ID NO: 16158 - protein, 419 aa, Oryza sativa (japonica cultivar-group)
MSTTKVKRRVGKYELGRTIGEGTFAKVKFARDTETGDPVAIKILDKEKVLKHKMVEQIKREISTMKLIKHPNVVRIYEVMGSKTKIYIVLEYVTGGELFDTIVNHGRMREDEARRYFQQLINAVDYCHSRGVYHRDLKPENLLLDSYGNLKVSDFGLSALSQQIKDDGLLHTTCGTPNYVAPEVLEDQGYDGAMADLWSCGVILFVLLAGYLPFEDSNLMTLYKKISNAEFTFPPWTSFPAKRLLTRILDPNPMTRVTIPEILEDEWFKKGYKRPEFDEKYDTTLDDVYAVFNDSEEHHVTEKKEEPEALNAFELISMSAGLNLGNLFDSEQEFKRETRFTSKCPPKEIVRKIEEAAKPLGFDVQKKNYKLRLEKVKAGRKGNLNVATEILQVAPSLHMVEVRKAKGDTLEFHKVDHAN

SEQ ID NO: 16159 - protein, 460 aa, Silicibacter pomeroyi DSS-3
MIRAILLCLPLVLAAPVQAETRVPTSRAEIGLGFAPVVKKAAPAVVNIYARIITAGRQSPIFDDPFFRDFFRGFGAPQPRVQNSLGSGVILSDDGYVVSNYHVVGMASEIRVVTTDRREFTAQVVLGDEESDIAILRLDAARDLPFLALRDSDHVEVGELALAIGNPFGVGQTVSSGIVSGLARSGAATGNGRGYFIQTDAPINPGNSGGALIDVNGDLIGINTSILSRSGGSNGIGFAIPANLVAEFLRQARQGNSSFAQPWAGIAGQPMTADIADSLGLVLPEGVVISDLHPESPLAQAGFAVGDVVTEVDGQTVNSPAEMKFRMSVAGIGGEARMTRLRQGQRETLSVALIEAPDAPPAQETTLGERTILPGLTVARLNPAVIARLGLPLSARGVVVLDPGPYGARAGLQPGDVLGAINGDQVDSPRDVERALSEAGRRVQIDLQRRGQRVSLRFRL

SEQ ID NO: 16160 - protein, 197 aa, Zea mays
  misc_feature (106)..(106): Xaa can be any naturally occurring amino acid
  unsure (1)..(197): unsure at all Xaa locations
MSASRFIKCVTVGDGAVGKTCMLISYTSNTFPTDYVPTVFDNFSANVVVDGNTVNLGLWASAGQEDYNRLRPLSYRGADVFLLAFSLISKARYENFSKKWIPELKXYARGVPIILVGTKLDLRDDKQFFVDHRGAVPISTAQGEELRKQIGAPYYIECSSKTQLNVKGVFDAAIKVVLQPPKAKKKKKVQRGACSIL

SEQ ID NO: 16161 - protein, 502 aa, Corynebacterium glutamicum ATCC 13032
MRPKLSGNTTRHNGAPVPSENISATAGPQGPNVLNDIHLIEKLAHFNRENVPERIPHAKGHGAFGELHITEDVSEYTKADLFQPGKVTPLAVRFSTVAGEQGSPDTWRDVHGFALRFYTEEGNYDIVGNNTPTFFLRDGMKFPDFIHSQKRLNKNGLRDADMQWDFWTRAPESAHQVTYLMGDRGTPKTSRHQDGFGSHTFQWINAEGKPVWVKYHFKTRQGWDCFTDAEAAKVAGENADYQREDLYNAIENGDFPIWDVKVQIMPFEDAENYRWNPFDLTKTWSQKDYPLIPVGYFILNRNPRNFFAQIEQLALDPGNIVPGVGLSPDRMLQARIFAYADQQRYRIGANYRDLPVNRPINEVNTYSREGSMQYIFDAEGEPSYSPNRYDKGAGYLDNGTDSSSNHTSYGQADDIYVNPDPHGTDLVRAAYVKHQDDDDFIQPGILYREVLDEGEKERLADNISNAMQGISEATEPRVYDYWNNVDENLGARVKELYLQKKA

SEQ ID NO: 16162 - protein, 414 aa, Glycine max
  misc_feature (239)..(239): Xaa can be any naturally occurring amino acid
  unsure (1)..(414): unsure at all Xaa locations
MENSEKVVAVIMVGGPTKGTRFRPLSFNIPKPLFPLAGQPMVHHPISACKKIPNLAQIFLLGFYEEREFALYVSSISNELKLPVRYLKEDKPHGSAGGLYYFRDIIMEDCPSHIFLLNCDVCCSFPLPSMLDAHKRYGGMGTMLVIKVSAESANQFGELVSDPTTNELLHYTEKPETFVSDLINCGVYVFTPDIFTAIHDVYINQQGTPNLRRVSNFETFQSATRTIPVDFVRLDQDIXSPLAGKKQLYTYETTDFWEQIKTPGMSLKCSELYLAQFRYTSLDLLASGDGKKKATIVGDVYIHPSAKVHPSAKLGPNVSISANVRVGAGVRLSSCIILDDVEIKENAFVTNSIIGWKSSLGRWSHVQADGNYDSKLGTTILGEAVTVEDEVVVFNCIVLPNKTLNVRVQEEIIL

SEQ ID NO: 16163 - protein, 461 aa, Rhodopseudomonas palustris CGA009
MSIAAIDDRPASRAPLIPPTPPRAPENLSALGRLAAIRHNAIASWGDRAYQDDVVRGRFFAHSSYILNTPDAIRHVLVDNTDNYRRTATGIRVLRPMLGEGLLLAEGRAWKHQRRTLAPAFTPRAVATLVPHMASATDEVVEGLRRKTGVPLDLRETMQHLALEIAGRTMFSFEMGTHGQALRGFVIDYGTRLASPRFLDLLLPLGWPTPQDVSRALFRRRWTRFIGELIAARRAAGKAEGAPPRDLFELMLAARDPETGEAFSDAQLGDQVATMILAGHETTATALFWALYLLALDPDAQERLANEVRRVGFGGTEIERLPFTRAVLDETLRLYPPAFLIVREAAGPDRVAGFAVRKHDVMLIAPWLLHRHDKLWSDPNAFVPERFLPGVPSPDRFAYLPFGVGPRVCIGAHFALVEATLALAKIVGTFRIELIDTEPVIPIGVVTTQPDRSPLFRLTPR

SEQ ID NO: 16164 - protein, 333 aa, Rhodopseudomonas palustris CGA009
MSVKKKPLVVVTRKLPDSIETRMRELFDARLNLDDVPMTAEQLAEAARTADVLVPTVTDEITAAMVNQPDCKLRLIAHFGNGIDNLDVAAAHARGITVTNTPKVLTEDTADMTMALILAVPRRMIEGAALLTDGGEWPGWSPTWMLGRRLGGKRLGIIGMGRIGQAVARRARAFGLQIHYHNRKPVAPRIADELGATYWDSLDQMLARMDIISVNCPHTPATFHLLSARRLKLVRKDAFIVNTARGEVIDEETLTKLIEAGDIAGAGLDVYEHEPAVNPKLVRLAKHGKVVLLPHMGSATIEGRVEMGEKVIINIRTFLDNHKPPDRVLPGML

SEQ ID NO: 16165 - protein, 468 aa, Vibrio vulnificus YJ016
MNRYRQLAQSFRQQIESKTWRAGEKLPSVRMACKHHGVSAGTVLQAYQLLEAQGWVIAKPQSGYFVTSDLQRLTEPREPSVSALPSFSDELYDFLKDQSESQAVKLGSAFPDVHLFPLEALNRNLASAGRKMSANDLLNNLPPGNEALRRLIAQRYIQQGMDLTHHDIVMTSGAMEALNLSLQVVTKPGDTIVVESPCFYGALQAAQRLGLNVIEVDVDERDGLNLEQFEHVLANNEVKACWLMSNFQNPTGVTLSEQKKQAVVELVHRYQLYLIEDDVYSELYYSQDKPSSFKTYDREDRVLHCGSLSKSLCPGYRLGWVVTRRFNHAIQKLQLTSTLSGSAPIQQGVAYYLQNDGYDKHLRKLRSTLKQRQQWMMNELRRQLPDTVQFSSPTGGYFLWLKLPEPIQARLVYTRLKQQGVLSAYGGLFSQTKRFDHYLRINCSLPESDELVQAIRCLAVTINRLATD

SEQ ID NO: 16166 - protein, 118 aa, Alkaliphilus metalliredigenes QYMF
MRKSVLLKQGHAEVCYIKFDETKISLEILLNGFWKIIDPTVENRQGPDIGSQYRTGIYYGHEEDLDTIIKSKEMQQKKYDANIVTEIEPLKAFYDAEEYHQKYLKKNPGGYCHINLEI

SEQ ID NO: 16167 - protein, 902 aa, Clostridium thermocellum ATCC 27405
MDCRVKNEVRDDLNVNLEVMVAGNDEEFAASLKNALLDVGCKHSVKSAATFNEFKNYLRKNNFHIVFFDCSSDISFADVMESFENLKKEMPVVAVLEEDGSRHGFEMIKLGACEYLEKKDSSRLRSIIFKRCRELERERERIRFEKRLKEENERLLTTLESIGDGVIVTDKAGCVIMMNKAAQELTGYLSCNSIGKPLSEVFVIINGVNREPEPDPYERVLSERKTVGLRKNTMLVSKDGTLRYVSASTAPIKSSDREIMGVVVVFRDITRIRKAEEKLQKLSQAVEQSPGIIVMADTRGNIEYVNPRFTEVTGYSFDEVKGKSLFFMELEENGEEKCKDMIQAVFSGKEWRSEIRHKSKNNVVFWEYAYYSPIINSEGVVTNYLKVSEDITERKLMSENLFKAKEAAEAANRAKSEFLANMSHEIRTPLNGIIGMTNLTLQTELTDEQRENLNIVNSCAELLLRVINDILDYSKIEAGKMTLENVKFDFFNLLEKTYKAHIVQANEKGLRLSYTVQKGIPRILVGDPGRLQQVLNNLISNAVKFTDIGEVRIDVDIIEKRDDSVKLKFTVSDTGIGIDGDKMNMLFKSFSQVDSSITRKYGGTGLGLAISKQLVEMMGGEIWVESQKGKGSTFYFTAGFKRKAKSSVKAECTSNADERVLGRKLNILLAEDDKVNQQVIAGMLKKEQCSLTIAENGFEAIKLFEENEFDLILMDVQMPEMDGIEATKRIRKMEEGTFRHIPIIAVTAFAFENDREKILEAGMDDYISKPFSFDDIYAAINRVLYKDEQSSDDMQKEKEDEKGSLDPDEKVNETLSESGTVNETGPDYSLKDIMERLDLSILNGNFTAIDKSALAVKEFAQNRGFDKVKNLAFKIQLSARKNQLEDVKKLYEVLKQEISKFN

SEQ ID NO: 16168 - protein, 450 aa, Streptococcus pyogenes MGAS8232
MVIPYDYIVIGGGSAGIASANRAAMHGAKVLLAEGKEIGGTCVNLGCVPKKVMWYGAQVADILGTYAKDYGFDFKEKAFDFKQLKANRQAYIDRIHASYERSFEQNGVDRIYDYAVFKDAHTVEIAGQLYTAPHILIATGGHPVFPDIEGAQYGISSDGFFALDEVPKRTAVVGAGYIAVELAGVLHALGSKTDLFIRHDRPLRSFDKAIVDVLVEEMTVGGPCLHPHSEVAKVVKNTDESLTLYLKDGQEVEVDQLIWAIGRKPNLEGFGLDKTGVTLNDKGYIETDAYENTSVKGIYAVGDVNGKLALTPVAVAAGRRLSERLFNNKTDEKLDYQNVATVIFSHPVIGSVGLSEEAAVKQYGQEAVKTYQSRFTSMFTAITNHRQPCLMKLVTVGDTEKIVGLHGIGYGVDEMIQGFAVAIKMGATKADFDNTVAIHPTGSEEFVTMR

SEQ ID NO: 16169 - protein, 207 aa, Brassica napus
  misc_feature (12)..(12): Xaa can be any naturally occurring amino acid
  misc_feature (184)..(184): Xaa can be any naturally occurring amino acid
  unsure (1)..(207): unsure at all Xaa locations
FLSIVPAPQDPXLTVYFASRDDLSPVKLNLSGGSYRSEEGKPLVLQAVRRAEQQLANDMSRDKEYLPLDGLADFNKLSAKLILGDDSSAMKENRVVTIQCLSGTGSLRIGAEFLAKHNQERVIFVSNPTWGNHPNIFSLAGFSVEYYRYYDPKTRGLDFKGMLEDLGAAPSGAIVVLQACAHNXTGVDPTLQQWEQIRQVVRSKSLL

SEQ ID NO: 16170 - protein, 197 aa, Zea mays
MSASRFIKCVTVGDGAVGKTCMLISYTSNTFPTDYVPTVFDNFSANVVVDGNTVNLGLWDTAGQEDYNRLRPLSYRGADVFLLAFSLISKASYENVSKKWIPELKHYAPGVPIFLVGTKLDLRDDKQFFVDHTGAVPITTAQGEELRKQIGAPSYIECSSKTQLNVKGVFDAAIKVVLQPPKAKKKKKVQRGACSIL

SEQ ID NO: 16171 - protein, 478 aa, Streptomyces coelicolor A3(2)
MDLGVRWKLHGDGKVPAPGAVVRPDERLSWPRTAGLGAQHVVAMFGASFVAPVLMGLDPNLAIMMSGVATVIFLLATRGRVPSYLGCSLSFVGVAAVIRAQGGTSATVTGAVLVVGVALFLVGLAVQRFGARIIHAAMPPVVTGAVVMLIGFNLAPVTASTYWPQDQWTALFVMLFTGLAVVCLRGFWSRIAIFLGLVFGYVLSWALDRIFGKIHSVDGSGKPTDHWRLDFSAVGQADWIGLPSFHGPSFEWSAILVALPVVIALIAENAGHVKAVGEMTGDNLDDKLGTAISADGIGSVLSTAVGGPPNTTYSENIGVMAATRVYSTAAYWAAAGFALLFGLCPKFGAVVAAIPGGVLGGITVILYGMIGLLGAQIWINAKVDMRNPLNLVPAAAGIIIGVGNVSMEFTDTFSLSGIALGTLVVITGYHALRAFAPAHLKTQQPLLDEGTSSYDAKTGSGGAGGDGGGDGGAQRARS

SEQ ID NO: 16172 - protein, 176 aa, Arabidopsis thaliana
  misc_feature (113)..(113): Xaa can be any naturally occurring amino acid
  misc_feature (125)..(125): Xaa can be any naturally occurring amino acid
  misc_feature (131)..(131): Xaa can be any naturally occurring amino acid
  misc_feature (139)..(140): Xaa can be any naturally occurring amino acid
  misc_feature (147)..(147): Xaa can be any naturally occurring amino acid
  misc_feature (150)..(151): Xaa can be any naturally occurring amino acid
  misc_feature (156)..(157): Xaa can be any naturally occurring amino acid
  unsure (1)..(176): unsure at all Xaa locations
MGIQETDPLTQLSLPPGFRFYPTDEELMVQYLCRKAAGYDFSLQLIAEIDLYKFDPWVLPNKALFGEKEWYFFSPRDRKYPNGSRPNRVAGSGYWKATGTDKIISTEGQRVGXLKKPLVFYIGKXAPKGTXTNWIMHEXXLIEPSRXTGXXKLDDXXMPISRQQNRFVWRSTGVSL

SEQ ID NO: 16173 - protein, 226 aa, Lotus corniculatus var. japonicus
MASGGGYGDANAKIDYVFKVVLIGDSAVGKSQILARFARNEFSLDSKSTIGVEFQTRTLVIDHKTVKAQIWDTAGQERYRAVTSAYYRGAVGAMLVYDITKRQTFDHIPRWLEELRNHADKNIVIILIGNKCDLVNQRDVPTEDAKEFAEKEGLFFLETSALEATNVESAFTTVLTEIYNIVNKKSLAADESQGNGNSASLSGQKIIIPGPAQEIPAKRNMCCQAS

SEQ ID NO: 16174 - protein, 251 aa, Candida glabrata CBS138
MSLPATFDLTPEDAQLLLAANTHLGARNVQVHQEPYVFNARPDGVHVINVGKTWEKLVLAARIIAAIPNPEDVVAISSRTYGQRAVLKFAAHTGATPIAGRFTPGSFTNYITRSFKEPRLVIVTDPRSDAQAIKEASYVNIPVIALTDLDSPSEYVDVAIPCNNRGKHSIGLIWYLLAREVLRLRGALTDRTQPWSIMPDLYFYRNPEEIEQQTAEEAAQEAGEEEAKEEVTEEQTEAAEWAQENADNVEW

SEQ ID NO: 16175 - protein, 242 aa, Lotus corniculatus var. japonicus
MNQEMNGVEAEKLHLQEKNVHDKIDYVFKVVVIGDSAVGKTQILSRFAKNEFCFDSKATIGVEFQTRTVTINAKVIKAQIWDTAGQERYRAVTSAYYRGALGAMLVYDITKRQSFDHVARWVEELRAHADSSIVIMLIGNKGDLVDQRVVLSEDAVEFAEEQGLFFSETSALTGENVESAFLKLLQEINTRVVSKRSLSDCNHGKKTNGGNSLKGSKIDVISGPELEITEVKKVPSCSCSSS

SEQ ID NO: 16176 - protein, 288 aa, Phytophthora lateralis
YVPRAILMDLEPGTMDSVRAGPYGQLFRPDNFVFGQTGAGNNWAKGHYTEGAELIDSVLDVVRKEAESCDCLQGFQITHSLGGGTGSGMGTLLISKIREEYPDRIMCTYSVCPSPKVSDTVVEPYNATLSVHQLVENADEVMCLDNEALYDICFRTLKLTTPTYGDLNHLVCAAMSGITTCLRFPGQLNSDLRKLAVNLIPFPRLHFFMIGFAPLTSRGSQQYRALTVPELTQQQFDAKNMMCAADPRHGRYLTAACMFRGRMSTKEVDEQMLNVQNKNSSYFVEWIP

SEQ ID NO: 16177 - protein, 335 aa, Phytophthora cactorum
RINVYYNEATGGRYVPRAILMDLEPGTMDSVRAGPYGQLFRPDNFVFGQTGAGNNWAKGHYTEGAELIDSVLDVVRKEAESCDCLQGFQITHSLGGGTGSGMGTLLISKIREEYPDRIMCTYSVCPSPKVSDTVVEPYNATLSVHQLVENADEVMCLDNEALYDICFRTLKLTTPTYGDLNHLVCAAMSGITTCLRFPGQLNSDLRKLAVNLIPFPRLHFFMIGFAPLTSRGSQQYRALTVPELTQQQFDAKNMMCAADPRHGRYLTAACMFRGRMSTKEVDEQMLNVQNKNSSYFVEWIPNNIKASVCDIPPKGLKMSTTFIGNSTAIQEMFKR

SEQ ID NO: 16178 - protein, 142 aa, Streptococcus mutans
MAEDKFLTAGQRESHFQIGTVGASHVICYDIRFPEWIRHLMSQDAALLFVSAQWPSSRIEQWRILLQARAIENQAFVIAVNRVGQGLKDQFNGHSLIIDPLGKILLEANDCEGVFSAQIDLNQVKKVRGQIPVFKDRRLELY

SEQ ID NO: 16179 - protein, 485 aa, Taxus cuspidata
MDALKQLEVSPSILFVTLAVMAGIILFFRSKRHSSVKLPPGNLGFPLVGETLQFVRSLGSSTPQQFIEERMSKFGDVFKTSIIGHPTVVLCGPAGNRLVLSNENKLVQMSWPSSMMKLIGEDCLGGKTGEQHRIVRAALTRFLGPQALQNHFAKMSSGIQRHINEKWKGKDEATVLPLVKDLVFSVASRLFFGITEEHLQEQLHNLLEVILVGSFSVPLNIPGFSYHKAIQARATLADIMTHLIEKRRNELRAGTASENQDLLSVLLTFTDERGNSLADKEILDNFSMLLHGSYDSTNSPLTMLIKVLASHPESYEKVAQEQFGILSTKMEGEEIAWKDLKEMKYSWQVVQETLRMYPPIFGTFRKAITDIHYNGYTIPKGWKLLWTTYSTQTKEEYFKDADQFKPSRFEEEGKHVTPYTYLPFGGGMRVCPGWEFAKMETLLFLHHFVKAFSGLKAIDPNEKLSGKPLPPLPVNGLPIKLYSRS

SEQ ID NO: 16180 - protein, 303 aa, Triticum aestivum
  misc_feature (45)..(45): Xaa can be any naturally occurring amino acid
  misc_feature (53)..(53): Xaa can be any naturally occurring amino acid
  misc_feature (99)..(99): Xaa can be any naturally occurring amino acid
  misc_feature (109)..(109): Xaa can be any naturally occurring amino acid
  unsure (1)..(303): unsure at all Xaa locations
SSGTFRGVLTKLGEEHLGFRTFQALHSVTLGHGWVHPFTKPEWRXLFDEMAVXATEEYRSFVSQEPRFVEYFRLATPETEYGRMNIGSSPSKRKPSGGXIESLRAIPWXIFAWTQTRFHLPVWLGFGGAFKHILKKDIRNFHMLQEMYNEWPFFRVTIDLVEMVFAKGNPGIAALYDRLLVSEGLQPLGEKLRANYEETQKLLLQVAGHKDLLEGDPYLKQRLRLRDAYITTMNVCQAYTLKRIRDPDYHVALRPHLSKEVMDTSKPAAELVTLNPASEYAPGLEDTLILTMKGIAAGLQNTG

SEQ ID NO: 16181 - protein, 493 aa, Cucumis melo
MGFHQTHETNQVLLSKIAISDGHGEDSPYFDGWKAYDNDPFHPENNPLGVIQMGLAENQLSPDLIVDWIRKHPKASIYTDEGLLNFKDIANFQDYHGLPEFRNAIASFMGKARGGRVKFDPSRIVMGGGATGASETVIFCLADPGDAFLIPSPYYAAFDRDLQWRTRAQIIPVHCNSSNNFQITREALEVAYKKAEESNIKVKGLIITNPSNPLGTIYDRDTLKSLVNFVNDNNIHLICDEIYSATVFKSPSFTSIAEIIEEMDHCKKELIHILSSLSKDMGLPGFRVGILYSYNDTVVSIARKMSSFGLVSSQTQHLLAAMLSDEEFVDNFLVENSKRLAKRHARFTEELEKMGITCLNSNAGLFVWMDLRKLLKDQSFESEMELWRVIINEVKLNVSPGSSFHVTEPGWFRVCFANMDDNTVGVALDRIHSFVGKIDKKENSTIPMPPKKKHRENKLRLSFSFSGRRYEEGNVLKSPHMMSPHSPLVRAKT

SEQ ID NO: 16182 - protein, 338 aa, Glycine max
MAKLPVEYNGDCATTASASASAAAESQRSIPTPFLTKTFQLVDDQSIDDVISWNDDGSTFIVWNPTVFARDLLPKYFKHNNFSSFVRQLNTYGFRKVVPDRWEFSNEYFRRGEKRLLCEIQRRKISSPASSPTAPATVSVTAPMPLTAIPIISPSNSGEEQVTSSNSSPAELLDENERLRKENVQLTKELAEMRSLCNNIYSLMSNYANANGKGNSNGSYKTKGGAGVAHGSLESGMTAVKLLDLMPVMRSSDEDAAEMAPEEMNPKLFGVAIGAKRAREGGGGGDCGGGGEEDTLLRLHHAGSADVKSEPLDFQNHRENQKTPWLSPCYRTNQRVCN

SEQ ID NO: 16183 - protein, 214 aa, Bacillus licheniformis
MQTGGSFFDPFNSYNSGLWQKANGYSNGDMFNCTWRANNVSMTSSGEMRLALTSPSYNKFDCGENRSVQTYGYGLYEVRMKPAKNTGIVSSFFTYTGPTDGTPWDEIDIEFLGKDTTKVQFNYYTNGAGNHEKVADLGFDAANAYHTYAFDWQPNSIKWYVDGQLKHTATSQIPTTPGKIMMNLWNGIGVDDWLGSYNGVNPLYAHYDWVRFQK

SEQ ID NO: 16184 - protein, 399 aa, Vibrio vulnificus YJ016
MKIMFEKVVAAPADPILGLTEEFKKDPRAEKINLGVGIYKTEQGETPVLATVKKAEAALVETEKTKSYLTIEGTAEYALAVQKLLFGADAELINAQRAKTAQAPGGTGALRVAGEFIKRQLGDVKIWISNPTWANHHGVFRAAGLETVEYAYYNPETKDKDFAAMLADLEKASAGDVVLLHGCCHNPTGIDPTAQEWEALAKLVADKGLLPLFDFAYQGFAKGVEEDAQGLRTFAKFNKEILVASSFSKNFGLYNERVGAFTLVAESQEIAETAFSQVKAIIRSIYSNPPAHGSAVVTHILNDAALRAEWEAEVAEMRDRIQEMRELFVATLKEEGVAADFSFIERQNGMFSFSGLNKDQVARLKEEFAIYIVGSGRISVAGMTKSNMGPLCKAIAAVL

SEQ ID NO: 16185 - protein, 190 aa, Xylella fastidiosa 9a5c
MHTHVSHAFASKLSLLSLDRFPMSSIYTFTFTRLDGRPQALADWRGQVLLLVNVASRCGFTPQYAGLEMLWQRYRDAGLIVIGFPCDQFAGQEPGDEAKIAEFCTLNYGVDFPMAAKIKVNGADAHPLWQWLKHRRRGLFGMAAIKWNFTKFLIGRNGQPIARYSPIKSPEQLEVHIVRALGEEGGGNTH

SEQ ID NO: 16186 - protein, 541 aa, Oryza sativa (japonica cultivar-group)
MGQCCTGGGKAVAGDEAEPGTSKAAPPSRGTSSKNGSAKQQPCSPAAKAAATEAAAAASSSKKPAGPIGEVLERPMEEVRTTYSIGKELGRGQFGVTHLCTHKATGEKLACKTIAKRKLANKEDVDDVRREVQIMHHLSGQPNIVDLRGAYEDKHNVHLVMELCAGGELFDRIIARGHYTERAAAALLRAIVGIVHTCHSMGVIHRDLKPENFLLLSKGDDAPLKATDFGLSVFFKEGEVFRDIVGSAYYIAPEVLKRKYGPEADIWSIGVMLYIFLAGVPPFWAESENAIFAAILRGQIDLASEPWPKISSGAKDLVRKMLNINPKERLTAFQVLNHPWIKEDGDAPDVPLDNVVLNRLKQFRAMNQFKKAALRIIAGCLSEEEIKGLKEMFKNIDKDNSGTITLEELKNGLAKQGTKFSDNEIEQLMEAADADGNGIIDYEEFVTATVHMNKMDREEHLYTAFQYFDKDNSGYITKEELEQALKEQGLYDANEIKDVITDADSNNDGRIDYSEFVAMMRKGSGCAEATNPKKKRRDLVL

SEQ ID NO: 16187 - protein, 575 aa, Clostridium thermocellum ATCC 27405
MKLEAIYHKPYSEFAFPVAPDTLVIRLRTAKNDVNTCILIYHEKYDTSQRGKVKMDKVASDGMFDYYEVELNVGIKRIKYMFYLEDNYSIKWYSSDGFFDYMPQWGHFTYSYICKDDIFHEVEWFRNSTIYQIFPDRFAKFPPDTENSGKRTIHGGNIKGIIDRFDHLVKLGVDVVYLNPIFKSESYHRYDVVDYYEIDPMFGSKEELRELMDLCHKNGIKVIFDGVFNHSGDKFFAFRDVVEKGEKSKYANWYFINSFPVQGYPRPNYECFSFYGGMPKLNTGNPETAKYFLDVVKYWTVEFGVDGWRLDAADEVDRKFWRKLRDMLKDLNKDVVLIGEIFDEASSWLWGDQFDSVINYPLKAMINDLFAYRSIDVETFRNRISGYIMKFNKKVLSSLVNIISTHDTPRFLTLCNGDEKRFEMAVVFQFTFPGVPLIYYGDEIGMEGEGDPDCRRPMIWDEAKWNKKTLELYKFLIGLRKRFDALRTGEYGELPVTGCNGILAYRRGRGENGIIVAMNTLDRKENVVVETGDSFDTVKAFESLKDEERLNVDKKRINICLNPFEWRIYKACGEL

SEQ ID NO: 16188 - protein, 293 aa, Brassica napus
MATNGSAQLSQKEADIKMMCAAEVHLGTKNCNYQMERYVFKRRNDGIYIFNLGKTWEKLMMAARVIVAIENPQDIIVQSARPYGQRAVLKFAQYTGANAIAGRHTPGTFTNQMQTSFSEPRLLILTDPRTDHQPIKEGALGNIPIIAFCDTDSPMRFVDIGIPANNKGKHSIGCLFWLLARMVLQMRGTIRPAQKWDVMVDLFFYREPEEAKPEDEDEVAPQAEFGLPAPEYGGGDQWTTAAIPDAAWPGEAQAPIAAAPAGASWNESGAAPAAEGGWDTAVPPTNAAVSGWE

SEQ ID NO: 16189 - protein, 167 aa, Nicotiana tomentosiformis
MLPMITEFINYGQQTIRAARYIGQGFMITLSHANRLPVTIQYPYEKLITSERFRGRIHFEFDKCIACEVCVRVCPIDLPVVDWKLETDIRKKRLLNYSIDFGICIFCGNCVEYCPTNCLSMTEEYELSTYDRHELNYNQIALGRLPMSVINDYTIRTISNLPQIKNE

SEQ ID NO: 16190 - protein, 356 aa, Oryza sativa (japonica cultivar-group)
MPHLVRERLFFGDINDAIAALTTTTAEAGGFTHLLSVVSSAFISFITDCRPGLSIPTEEVRRVVAGEEGAPPVSAVAPGRLMRVVERAGVGLRVTRMAVPLRDTEEENLLDHLEPCLDFIDEGRKEGNVLVHCFAGVSRSATIIVAYLMRTEQKSLEEALESLKEVNESACPNDGFLEQLKLFEEMGFKVDTSSPLYKRFRLKLLGQSYKIGEKIGSYVFEDDPGLSGQPNSSTQNLPNKQTQQPAYRCKKCRRIIAVQGNVVSHTPGEGESCFQWQNKRKGERSYSKEQDCSSLFVEPLKWMTPVEDGALEGKLSCIHCGARLGYFNWSGIQCNCGSWITPAFQISKSKVDISTT

SEQ ID NO: 16191 - protein, 226 aa, Methanosarcina mazei Go1
MLKALIFDMDGVLVDSMPFHAAAWKKAFLEMGMEIQDEDIYAIEGSNPRNGLPLLIRKARKEPEDFDFEAITSIYRQEFNRIFKLKAFDGMKECLEFLKSRFLLSVVSGSDRLIVNGIVDQLFPGIFDTVVTGDDVLNSKPDPDPFLKAVELLNVGKEECVVIENAVLGVEAAKKADIYCIGVPTYVKPSELDRADLVVGNHQKLMEHLLSLEPLFSPEFIPGRRR

SEQ ID NO: 16192 - protein, 534 aa, Picrophilus torridus DSM 9790
MHYIVITGGVISGLGKGTITSSLSYLLKNSGFKVTNIKIDPYINYDAGTMNPYQHGEVFVLDDGSEVDLDLGNYERFLDTDLTGNNNITTGKIYKSVIERERHGDYLGKTVQIIPHITNEIKERIKRASSGYDIALIEVGGTVGDIESMPFIEAVRQLRSTDDVIYSHVTLVPEINGEQKTKPTQHSVKELRSLGISPDILFCRSEKPLGKDVIEKISLFTDVPASGIISMYNVKNVYMIPEIMMRQGILEYIKKRTGTSNHNLDYTWSNFVENIKNPAESVDIAIVGKYIELQDAYISHKEAFSHVTGNTGISVNIHWVDADKLLNSTHDLKNVDGILVPGGFGYRGVEGKIIAARYARENRIPYLGICLGFQVSVIEISRSLLGLKGANSTEFDNNTDYPVIDILPEQSNVSDLGGTMRLGSKKVLIKDGTIAKNIYKSDIIYERHRHRYEVNPDYIERLEDSGVIFSGTDDEKIRMEILELSDRDNYIATQYHAEFKSRPLNPSKVHMHLVLKALEYRRNIYERNTSGISR

SEQ ID NO: 16193 - protein, 152 aa, Arabidopsis thaliana
  misc_feature (120)..(120): Xaa can be any naturally occurring amino acid
  misc_feature (142)..(142): Xaa can be any naturally occurring amino acid
  unsure (1)..(152): unsure at all Xaa locations
MANSSFKLEHPLERRQIESSRIREKYPDRIPVIVERAERSDVPNIDKKKYLVPADLTVGQFVYVVRKRIKLSAEKAIFVFVKNTLPPTAAMMSAIYDENKDEDGFLYMTYSGENTFGLVXNVCLSMLLCLCVYYMLFYNTMXMQKLFLLLLM

SEQ ID NO: 16194 - protein, 297 aa, Oryza sativa
MARFPTAAPIRVVLFDAFDTLVTPRAAPHLQYAAVAREHGLDVADSDVKAAFKQAFRITATEHPNYGLETDIASPDHWWALVIQRTFTPHLHPAVSEQQYAATIDSLSHRLVTRFGTSQAYRLFEDVVPTLERLAQMRARDDRPVTLMLATNSDSRILGVLKSFGLDRFLNLDVDGSASAAQSSAGPVLSYFEKCAKPDSRFFQAALQRAATHRDESVPPINALYVGDQLHEDFWGATTAGLQAAWLQRSTGAESNQPHQQVDRARDDPHDLEYAHQRTITSLADVVGIVESSLKAT

SEQ ID NO: 16195 - protein, 611 aa, Zea mays
MDMALASKASPPPWNATAAEQPIPKRDKAAANDSTYLNPQAHDSVLGINRAGGAEAKRQTGSSETPRAGRGTPLRSVSHCPPITPPALSRPLPRARFDPPPMATAMGAMAATCMASIPAAATFPGDLGVGRRRAVVPGWRAGGRRLRATPPARRPFLFSPKGVSDSRSSQTCLDPDASTSVLGIILGGGAGTRLYPLTKKRAKPAVPLGANYRLIDIPVSNCLNSNVSKIYVLTQFNSASLNRHLSRAYGNNIAGYKNEGFVEVLAAQQSPENPNWFQGTADAVRQYMWLFEEHNIMEFLILAGDHLYRMDYQKFIQAHRETDADITVAALPMDEQRATAFGLMKIDDEGRIVEFAEKPKGEKLRSMMVDTTILGLDPERAKELPYIASMGIYVFSKDVMLRLLRENFPAANDFGSEVIPGATEIGLRVQAYLYDGYWEDIGTIEAFYNANLGITKKPVPDFSFYDRSAPIYTQPRYLPPSKVLDADVTDSVIGEGCVIKHCTINHSVVGLRSCISEGAVIEDSLLMGADYYETENDKNVLSETGGIPIGIGKNSHIRKAIIDKNARIGENVKIINFDNVQEAVRETEGYFIKSGIVTVIKDALIPSGTII

SEQ ID NO: 16196 - protein, 207 aa, Kluyveromyces lactis NRRL Y-1140
MSFSDFSKVETLQKLNTFLADKSYIEGTSATQADVSAFKAFQSTYPEFSRWFNHIASKADQFESLPAATSTPAAAEEEDDDDEVDLFGSDDDVDEEAEQLKAKRIAEYNEKKAAKPKAAAKSIVTLDVKPWDDETDLEELVANVKNIEMDGLNWGAHQWIPIGFGIKKLQINMVIEDAKVSLDELQQLIEEDEDHVQSTDVAAMQKL

SEQ ID NO: 16197 - protein, 161 aa, ASPERGILLUS NIDULANS FGSC A4
MPLLEPTKLTSHRSFIAIKPDGVQRGLVGPIISRFENRGFKLAAMKLTSPSRSLLEQHYSDLKEKPFFPGLVTYMLSGPIVAMVWEGKDVVKTGRTILGATNPLASAPGTIRGDFAIDVGRNVCHGSDSVESAKKEIGLWFTPEEIQNYKLNAFGWIYEKE

SEQ ID NO: 16198 - protein, 1060 aa, Thermosynechococcus elongatus BP-1
MLSKLSFRHKLLLGTLFPIVVIYTGLFFYIRSQVIRRSTADYEAWQQDVASLYAQQFSNALQEITGLATTSANALEAFPTIREEELYSFLRRNLKISRLAYGAAITFTPYSFSPRKRLFAPYVYRDIHRNRLVPKDIGHIYDYTQVRWDWYSEAVRTGQPQWSDPYFEEGAGNVWMVTYAVPFYRQGQIRGVATVDVALPTLQQEIDIQGLQQAQFFVLDRKGRIIFHGDPQLIGQSIFYIAKEYNRSDLAALAEAMISGHSGHLWMTDWVSNERQWFFYTPIPEVGWSLAIRVREEALLDFIHQETWAGLLILVVSFGLISLVTLGVTSYMVRPIQRLAIAAHKIALGNLDIAGEVDTHSQDELGNLGRTFVDMAAQLQESFAELHHFNQRLEEKVKQRTAALEAANQQLSEKERVLHDHNVALVQLSQSPHVQQGHFRMALQEIIQVTAITLRVQRASAWELQGDRLKCVVQYDPAANNHTQPTYLTHSPYPEYLKLLRSGEPLVINDLLTDPRTHELREYARVQRVYSRIDTPIIFNGQLLGVICVESIGKQRVWLLEERRFVANVADIVTIALAAHQRHQAERELLKAKEAAEAANKAKSIFLANMSHELRTPLNAILGFSQILLSDRTLAPQHRQTLEKINRSGEHLLGLINDVLDMAKIEAGRMILQQTTFDLRRMLRDLEEMLKVRAEAKGLRLVFDLAANLPVAVTTDEMKLRQVLVNLLGNGIKFTKEGSVCLKVSYRAQEPPRLAFEVSDTGIGMTPQELKMLFQPFVQTDSSKKVSEGTGLGLAISRQFVQLMGGDIQVRSTKGKGSHFYFEVPIDLGDPRSLEEEKAQTIVGLRSPTSEVRILVVDDLPENRQLLTQLLEPVGFRCREASNGQEAVEIWRAWQPHAILMDIRMPVMDGKTATRQIKKEVGDRLQRGETICPPKILAVTASSFEQDKQELLGLGCDDYIAKPFRPQILFERLAAQLHLEYAYDSTPPAAPPPPTLDPTALTVMPPSWIAELQAAAKKLNAKRIRELIAEIPPEEAALIAGLQQLVKTFRFDKIVELTLV

SEQ ID NO: 16199 - protein, 450 aa, Enterococcus faecalis V583
MSETQQTTLKKQLSSRHITMLALGGAIGAGLFKGSGEAIGIAGPSVLIAFLIGGAVLFIVMSGLGKLVLDGGDTHHGLSGLVRPFLGAHSADFIDWVYYSMWTINIIAEAVAAASFLQLWFPNIPAWFFVFILAILTTLINLYSVRLFAETEYWLAFAKISVIILLIIFGVYLVGQQMLGSGVFPTLQSITDHGGFAPHGMKGIVNSLLVVIYSYGGSELIAITVSEADDPKKAIPKAIRGVMGRIISFYIIPLFLLLIIFPWNTLAGTTVSPFVMVFEKMNIPFAADIVNFVIILALFSSINSGVYASSRLLYFRLKDKKGPMSKLGVLNKHQVPQRSVFFCASVLYLGVILSYFVGDELFGYLAGSLSYTVLLIWILISAAAFVLSLKRGSLFEKSINLLALIILGLIFIGILFTNSLGVTLLTGLLYFVIFFSYRKKNDSFLLSDES

SEQ ID NO: 16200 - protein, 312 aa, Thermosynechococcus elongatus BP-1
MAQVLTERGYCVRALVRQPQRADHLKAWDVELVQGDLRTSDLVTLMRGCQVLFHAAAHYSLWRRDRSLLYAVNVAGTRRILAAAREAGIERTVYTSSVAAIGVDPRGQPTTEAYQSPPEKLISEYKRSKYWAEQVAHEAISQGQDIVIVNPSTPIGAWDAKPTPTGEIILRFLRRQMPFYVNTGLNLIHVRDVAIGHLLALEKGKTGERYILGHQNLTLADILGRLAAMTGLPRPLGEIPIVIPLGVAWLDEVVLGALGKPPAIPLDGVRMAQQKMFYDARKAVAELGLPQTPIDQALRDAVTWYRERGYCP

SEQ ID NO: 16201 - protein, 290 aa, Triticum aestivum
  misc_feature (193)..(193): Xaa can be any naturally occurring amino acid
  unsure (1)..(290): unsure at all Xaa locations
MAGMAVSVLAILLASCALAAATFDKEFDVTWGDGRGKILNNGQLLTLGLDKVSGSGFQSKHEYLYGKIDMQLKLVPGNSAGTVTAYYLSSQGPTHDEIDFEFLGNVTGEPYTLHTNVFTQGQGQREQQFRLWFDPTNDFHTYSILWNPKHIIFMVDDMPIRDFRNLEGKGIAFPKNQPMRLYSSLWNADDWAXGRGGRARADWSHAPFSASYRGFKADACVVTAGGRPRCSASIGTEVAPGTGAVGEWYNQELDLTRQQRMRWVQSNYMIYNYCTDPKRVAKGVPAECSM

SEQ ID NO: 16202 - protein, 232 aa, Triticum aestivum
MVISHASSSAGEAVYSTFSSRYVREELPRYRMPEGSIPKEAAYQIISDELMLDGNPRLNLASFVTTWMEPECGKLIMDSVNKNYVDMDEYPVTTELQNRCVNMIAHLFNAPIGEDETAIGVSTVGSSEAIMLAGLAFKRKWANKMKEQGKPCDKPNIVTGANVQVCWEKFARYFEVELKEVKLTEGYYVMDPKKAIEMVDENTICVAAILGSTLTGEYEDVKLLNDLLVEKN

SEQ ID NO: 16203 - protein, 249 aa, Xylella fastidiosa 9a5c
MTRKLVLLRHGQSQWNSMNRFTGWVDIGLTEQGHQEATMAGHLMKEEGLEFDVAHTSLLKRAIHTLQDALKALDQDWLPIYKSWRLNERHYGALQGLDKIDTAAKHGEEQVNIWRRSYDIQPPPIDLDDPSHPMRDRRYAALDRKVLPVTESLKNTLERVLPYWNDAIAPQLNDNKTVLISAHGNSLRALYKYLNQESDEKILNVNIPTGIPLLFELSDTLQVVSYRYLGDPDAAQRASEMVANQGKAK

SEQ ID NO: 16204 - protein, 573 aa, Pimelobacter sp.
MSIAESTVLGEEPEWFRTAVFYEVLVRSFRDPNAGGTGDFRGLAEKLDYLQWLGVDCLWVPPFFSSPLRDGGYDVADYTGILPEIGTVEDFHAFLDGAHERGIRVIIDFVMNHTSDAHPWFQASRSDPDGPYGDFYVWSDTDELYQDARVIFVDTEPSNWTWDQTRGQYYWHRFFHHQPDLNFDNPKVQDAMLEAMAFWLDMGLDGFRLDAVPYLYERPGTNGENLPETHEMLKRVRRFVDDNYPDRVLLYEANQWPTDVVEYFGPEEREDGTVVGPESHMAFHFPVMPRIFMAVRRESRFPISEIMEQTPAIPEGCQWGIFLRNHDELTLEMVTDEDRDYMWGEYAKDPRMKANIGIRRRLAPLLDNDTNQIELFTALLLSLPGSPVLYYGDEIGMGDNIWLGDRDGVRTPMQRTPDRNVGFSAATPGKLHLPTIQDPVYGYQSVNVEAQLENPSSLLHWTRRMIHIRRQRDAFGLGTFEDLGGSNPAVLSYVRELPGDGGDDVILCVNNLSRFPQPVELDLRKYEGRVPVELIGGVPFPAVGELPYLLTLSGHGFYWFRLTDPDTTGRPVL

SEQ ID NO: 16205 - protein, 478 aa, Burkholderia vietnamiensis G4
MDITYDALHLFIDGEWIGASERETAPVINPATQIQIGRVPLATAADLDRALQAAVPAFDVWRNTVPAERARILKRAAELMRERAEHIATVMTLEEGKPLAESRDEVLRAADYFEWFAEEARRIDGRVVPSNRPGVQQLVKKQAIGPVAAFTPWNFPAITPARKLSAALAAGCSVIIKPGEESPATALALARALDDAGLPKGVLQVVFGVPDQVSTQLIASPVIRKVTFTGSVPIGRLLSARAAEGVKPITLELGGHGPVLVFNDADVEKAAVEGAANRFRGTGQVCISSTRFLIQREVYDEFVGHFVRATSALKVGNGMDAGTQVGPLANPRQLAKMEELIADAVERGATILAGGKRIEGEGYFFEPTVLADVPKDARVMHEEPFGPIAVLMRFDALADGLAEANRLPYGLSAYAFTSSARTAIDVADGLEAGMIGINQYRIVSTELPFGGMKESGHGSEGGTEGIEYYLTHKFISQA

SEQ ID NO: 16206 - protein, 506 aa, Brassica napus
MDLAFPHVCLWTLLAFVLTWTVFYVNNRRKKVAKLPDAATEVRRDGDADVIIVGAGVGGSALAYALAKDGRRVHVIERDMREPVRMMGEFMQPGGRLLLSKLGLEDCLEGIDEQIATGLAVYKDGQKALVSFPEDNDFPYEPTGRAFYNGRFVQRLRQKASSLPTVQLEEGTVKSLIEEKGVIKGVTYKNSAGEETTAFAPLTVVCDGCYSNLRRSVNDNNAEVISYQVGYVSKNCQLEDPEKLKLIMSKPSFTMLYQISSTDVRCVMEIFPGNIPSISNGEMAVYLKNTMAPQVPPELRKIFLKGIDEGAQIKAMPTKRMEATLSEKQGVIVLGDAFNMRHPAIASGMMVVLSDILILRRLLQPLRNLSDANKVSEVIKSFYVIRKPMSATVNTLGNAFSQVLIASTDEAKEAMRQGCFDYLSSGGFRTSGMMALLGGMNPRPLSLIFHLCGITLSSIGQLLSPFPSPLGIWHSLRLFGAEGVSQMLSPAYAAAYRKSYMTATAL

SEQ ID NO: 16207 - protein, 168 aa, Triticum aestivum
MAPTVMASSATSVAPFQGLKSTAGLPVSRRSNGASLGSVSNGGRIRCMQVWPIEGIKKFETLSYLPPLSTEALLKQVDYLIRSKWVPCLEFSKVGFIFREHNASPGYYDGRYWTMWKLPMFGCTDATQVIKEVEEVKKEYPDAYVRIIGFDNMRQVHCVRFIAFKPPC

SEQ ID NO: 16208 - protein, 289 aa, Oryza sativa (japonica cultivar-group)
MQEFHPVPGLAGRLFGGAAAAAAVAAVEEVRCPRCDSSNTKFCYYNNYNLSQPRHFCKACRRYWTKGGLLRNVPVGGGCRKPKRPAPPPSSSFTGGGGGGGGCGHRDSKSARSAGGGGDGSGSTASATATPAAAPASSNTLSAAVSQPSSVDALSPPPAPMFADQATAFASLFAPPPPPPSQALPAFASFTAQPKAEEDVADAPALAATEQHRSSSAASFAAHSISPPFAAARSSDGPAAAAAAAAADWAPPTAVLDAGMFDLAGAIGGDTSYWNAASWTDHDGTIYLP

SEQ ID NO: 16209 - protein, 233 aa, Arabidopsis thaliana
  misc_feature (163)..(168): Xaa can be any naturally occurring amino acid
  misc_feature (172)..(173): Xaa can be any naturally occurring amino acid
  misc_feature (177)..(177): Xaa can be any naturally occurring amino acid
  misc_feature (180)..(181): Xaa can be any naturally occurring amino acid
  misc_feature (187)..(188): Xaa can be any naturally occurring amino acid
  misc_feature (190)..(191): Xaa can be any naturally occurring amino acid
  misc_feature (196)..(197): Xaa can be any naturally occurring amino acid
  misc_feature (204)..(204): Xaa can be any naturally occurring amino acid
  misc_feature (207)..(207): Xaa can be any naturally occurring amino acid
  misc_feature (210)..(211): Xaa can be any naturally occurring amino acid
  misc_feature (213)..(213): Xaa can be any naturally occurring amino acid
  unsure (1)..(233): unsure at all Xaa locations
MQIFVKTLTGKTITLEVESSDTIDNVKAKIQDKEGIPPDQQRLIFAGKQLEDGRTLADYNIQKESTLHLVLRLRGGMQIFVKTLTGKTITLEVESSDTIDNVKAKIQDKEGIPPDQQRLIFAGKQLEDGRTLADYNIQKESTLHLVLRLRGGMQIFVKTLTGXXXXXXGWRXXDTIXNVXXKIQDKXXGXXPDQQXXDLSLGKXLGXMGXXLXDYNIQKESTLHLVLRLRGGF

SEQ ID NO: 16210 - protein, 220 aa, Thermococcus litoralis
MVREMELPSHKTKIIATIGPASKQKESIKKMIKAGMSVARINFSHGTLEEHAKTIETVRDVAEKLERRVAILGDLPGLKMRVGKIKGDSVTLRKGDKVVLTTRDIEGDETTIPVEFKDLPKLVSKGDTIYLSDGYIMLRVEEVRENEVECVVVNGGILFSHKGINIPKANLPIEAITPRDFEIIEFAIEHGVDAIGLSFVGSVYDVLKVKSFLEKKSADL

SEQ ID NO: 16211 - protein, 419 aa, Streptococcus pyogenes MGAS8232
MKDVIYDVEEVPKAGMLVGLSFQHLFAMFGATVLVPILVGIDPSVALLSSGLGTLAHLSVTKFKIPAYMGSSFAYIAAMQLLMKTNGIGAVAQGAMTGGLVYLIAALIVKAIGNDWIDKILPPIVVGPIVMVIGLSLASTAVNDVMLKNGNYNLTYLVIGLVTLLSVIFFNIYGKGIVAIVPLLLGLLVGYVVALLVGVLTGQEIVDFTNVAQAKWFSIPSVEIPFLTYGVKFYPSAILTMAPIAFVTMTEHFGHIMVLNSLTKRDYFKDPGLEKTLTGDGFAQIIAGFLGAPPVTSYGENIGVMALNKIFSVYVIAGAAVIAALLSFIGKVSALIQSIPTPVIGGISVALFGVIASSGLKILIESKVDMDNKKNLLIASVILVSGIGGLMLQVNGLQISGVAFSTLLGIILYQVLPEK

SEQ ID NO: 16212 - protein, 195 aa, Brassica napus
MAEETKNVHEHEAPKVATEESSTATGEVTDRGLFDFLGKKKDETKPEETIDSEFEQKVHISEPVPEVKHEEEGEEKKHSLLEKLHRSDSSSSSSSEEEGEDGVKRKKKKDKKKVTTTEGEVKTEEEKKGFMDKLKEKLPGHGKKPEEPSPAPVVAPPVEEAHPAEKKGILEKIKEKLPGYHPKTVEEEKKDKDDH

SEQ ID NO: 16213 - protein, 513 aa, Solanum demissum
MDISFVRAEHRVSDPDQRKVAELVFILGFNLEDMLEDRTCLVQRDCRTESNWTGCMSYHIDRIDAQNGKRPLENDEEGENVQCKLQKQSDGSDLEGEVFSVGNSSASADEQAENQVRAGENFDSATADEQADNQGHAEDDSAAAPPDEQAGNQHQAGDNADVSTLIPAIGRDNSVSSLIRVSRSDYGNVASLNSEFRSLVRSGELYRLRRQMGVVEHWVYFSCQLLEWEVFDPSRRRWMHLPTMNPNECFVFSDKESLAVGTELLVFGKEVLAHVIYRYSLLTNTWTSGMQMNAPRCLFGSASRGEIAILAGGCDSRGKILNSTELYNSEQGTWRTLASMNQPRKMCSGVFMDGKFYVIGGIGGAESKLMTCAEEYDLTTGKWTEIPNMSPVRPNATRNDIPVTSEAPPLVAVVNNQLYAADYAAMEVRKYDKQNKAWVSIGRLPERAASMNGWGLAFRACGDRLIVVGGPRVMGEGYIEVNSWVPSEGPPEWTLLGRKRSGSFVYNCAVMGC

SEQ ID NO: 16214 - protein, 792 aa, Heterocapsa triquetra
MAVKMGINGFGRIGRLVFRAGMENQSVTVAAVNDPFMDLEYMKYLLKYDSVHKQFVGNVETKKEGDAEYLVVDGLPIRVFHEKDPGAIGWGAVGAAYVCESTGVFTTQEKAALHLKGGCKKVIISAPPKDDVKMFVMGVNHLDYSKDLTVVSNASCTTNCLAPLAKVINDKFGIVEGLMTTVHAMTATQLTVDGPSRGGKDWRGGRCASQNIIPSSTGAAKAVAKVVPALNGKLTGMAFRVPTPDVSVVDLTCRLEKGATMDEICTAIKDAAALDKAKGGMKDVLGFVDEEVVSTDFATCPLSSIFDKCAGIALTEKFVKLVSWYDNEWGYSNRLVDLACHMAVVDGVVPPPAKIVSIKAREIFDSRGNPTVEVDLVTDAHLFRAAVPSGASTGIYEALELRDGDKTRLLGKGVLKAVSNVNELIAPKLIGMDVTKQKEIDKLMVETLDGAQNDWGWSKANLGANAILAVSMAVCRAGAASMQMPLYEYIANLAGKPTDKYVLPVPSFNVINGGSHAGNRLACQEFMILPVGATSFKEALIMGCEVYHTLKDVIKKKYGQDACNVGDEGGFAPSVQDNNEALDVLMTALEKSGHAGKVKIGTDVAASFYKEGKYDLDFKNPDSDKSAWKTGAEMAKYYMEWFDKYPFVSIEDPFDQDDWEAYSGFQAMVGDKMQIVGDDLLVTNSKRINKALDVKACNALLLKVNQIGSITEAIDAACLSMRNGWGVMVSHRSGETEDSFIADLVVGLRTGEIKTGAPCRSERLSKYNQLLRIEEELGAKAVYAGENFRCPK

SEQ ID NO: 16215 - protein, 411 aa, Pseudomonas syringae pv. phaseolicola 1448A
MRALTYHGANSVKVDTVPDPEIQEADDIILKVTATAICGSDLHLYRGKIPTVEHGDIFGHEFMGIVEETGPAVTAVQKGDRVVIPFVIACGSCFFCNIDLFAACETTNTGRGAIINKKSIPPGAALFGFSHLYGGIPGGQAEYVRVPKANVGPFKVPGTLADEKVLFLSDILPTAWQAVTNAGIGQGSSVAIYGAGPVGLMSAACARMLGAEKIFMVDHHPYRLAYAQKTYGVIPINFDDDDDPADTIIRQTAGMRGVDGVVDAVGFEAKGSTTETILATLKLEGSSGKALRQCIAAVRRGGVVSVPGVYAGFIHGFMFGDAFDKGLTFKMGQTHVHRFMLELLEHIEAGRLEPEAIITHRMSLEDAAKGYKLFDKKEEDCRKVILTPGNNTIVVPDATTEELVAGGVPAM

SEQ ID NO: 16216 - protein, 309 aa, Gluconacetobacter diazotrophicus
MWEYSDKVKDYFFNPKNAGVMEDASGVGEVGAIACGDALKLMIKVDPQDERITEARFQTFGCGSAIASSSALTEIIIGKTLDQALEISNQDIADFLGGLPPEKMHCSVMGYEALRAAVANYRGEVWEDDHEDGALLCRCFGVDEGMVERAIRNNGLTSMEQVAQFTKATGSCGTCVEGVEGVLERTNAAMVAEGLLDPVQAFVPGGAAPVRGRAQKTSPVAPPARTGGKMTTVQKIRAIEEVLEELRPALRNDGGDCELVDVEDNRVMVRLTGACVNCQLAAVTVQGIQGRIAERLGTPVRVIPVQAGQ

SEQ ID NO: 16217 - protein, 346 aa, Arabidopsis thaliana
  misc_feature (328)..(328): Xaa can be any naturally occurring amino acid
  misc_feature (337)..(337): Xaa can be any naturally occurring amino acid
  unsure (1)..(346): unsure at all Xaa locations
MTSSNGDNKGLVVSFGEMLIDFVPTESGVSLSESSGFLKAPGGAPANVAIAVSRLGGRAAFVGKLGDDEFGHMLAGILRKNDVDDQGINFDKGARTALAFVTLRSDGEREFMFYRNPSADMLLRPDELNLELIRSAKVFHYGSISLITEPCRSAHMKAMEVAKEAGALLSYDPNLREPLWPSPEEARKQIMSIWDKADIIKVSDVELEFLTGNKTIDDETAMSLWHPNLKLLLVTLGENGCRYYTKDFHGSVETFHVDAVDTTGAGDSFVGALLNQIVDDQSVLEEEERLRKVLRFANACGAITTTKKGAIPALPTDCEALSFLKIQXNSKTSLRVXEWCCTASPC

SEQ ID NO: 16218 - protein, 149 aa, Magnaporthe grisea
MADSLTEEQVSEFKKAFSLFDKDGDGQITTKELGTVMRSLGQNPSESELQDMINEVDADNNGTIDFPEFLTMMARKMKDTDSEEEIREAFKVFDRDNNGFISAAELRHVMTSIGEKLTDDEVDEMIREADQDGDGRIDYNEFVQLMMQK

SEQ ID NO: 16219 - protein, 967 aa, Yarrowia lipolytica CLIB122
MSRQKKSREIRFGDYILGSTLGEGEFGKVKIGWRKDGKQPEQVAIKLIKRETVPPNSNREAKVHREINALKILTHPNIVRLEEVIQNDRYIGIVLEYASGGELFDHILTHKYLKEASACRLFAQLVSGVHYLHSKGIVHRDLKLENLLLDKHKNIIITDFGFANTFSRGSDGHVFDLMATSCGSPCYAAPELVVSDQKYTGRKVDVWSCGVILYAMLSGYLPYDDDPANPDSDNITQLYKYITTTALTFPEYVPPLPRDLLRRILVPDPRKRISLNDVRYHSWLAPHSRFLAITPKEWEDAVGKVAVPVKTHMPRSHSVQLSSGAPVFDSRLTKPSGVNIPNFSYNNRHSVGGTYSKPIQRQGESTIGATVSSNTPAGPRPISAGPCAATAAAASASKSHAAANPPTHASTPSVASLNIPEDTNNNSTSNSRQAPRSATYTGISQLTSPPGASPTSPKFDFDLPKPSIGTITEQPTPPSSPKVKEKGKEADDLGPRDLPAVPDTAPEATPPASAADTIPSAPATAPSAPVLEHQSFGASFGTSFSSSFAASDPSSPLVSSTRLPPGRKPRPTSYQPTPTQSSMQPPDSFPYMHMVNKNASVPGSANSVTPTSSQQSAQPVPLSLVTPSTAGSTFFRRPSSDDSQISFDERRKSGSFLVPQSSLPKVKYSDSMVQGELSSPQFRNSPSQVALSNWSNRNSVASMESGDEGVIGEVESVAEKKETDKEVVDTVAQSDTTLMPPPALPTSAQVPGKSTTPRAVSAESKTTSTSRTSMEKPLPVVPAASAAPAAVIPTAPSGAINPGAPNFSRPRPVSMQAPKAQTRSHRRGVASISYGADKLFGKIIGDNLDNDKDPRESKESVKDAKGGSSSAASGAGAPTAESTSKKRFSFFSNYSKESVESHEAHSTPSTSSRKILEPPALDRSHSMNQRQNRQVSASQVSTAESTHSSTARKVMDFFRRRSRVSAS

SEQ ID NO: 16220 - protein, 371 aa, Bacteroides fragilis NCTC 9343
MGIMVGLPTSGGTEKDLQLNFGLTVNDQVEMLAPFLPAEWFLQSGIQLTWPHAGTDWAYMLAEVQECFINIAREIAKRELLLIVTPYPEEVRKQIIGTVNMDNVRFLKCDTNDTWARDHGAITLMDTGGASLLDFTFNGWGEKFEARLDNQITRRAVEVGALKGQYKDCLNFVLEGGSIESDGAGTLLTTSECLLSPHRNSPMNRVDIEEYLCRVFHLQRVLWLDHGYLSGDDTDSHIDTLARFCSPDTIAYVKCTDSEDEHYEALCKMEEQLKTFRTTSGAPYRLLALPMADKIEVEGERLPATYANFLIMNDVVLYPTYNQPENDKLAKEVLCEAFPTYEVVGIDCRALIKQHGSLHCVTMQYPTGVIK

SEQ ID NO: 16221 - protein, 431 aa, Wolinella succinogenes
MERINSINDFNEAKQVIPGGVNSPVRAFRAVGGTPPFIKEAKGSYLVDEDGNRYIDFVQSWGPLLFGHADLDIQKAVEEAIKRGLSFGAPTTSETLLAKEIIALYEGIEKIRFTSSGTEATMSAIRLARGYTGRDDIIKFEGCYHGHSDALLVQAGSGLATFGNPSSPGVPQSFTKHTLLARYNDLESVRECFKKSSGVACVILEPIAGNMGLVPATQEFIQGLRKLCDEQGSVLIFDEVMSGFRASFGGAQALYGVIPDMATFGKVIGGGMPVGAFGGRSDIMACLSPEGAVYQAGTLSGNPVAMAAGIASIRKIKQGGEALFSRLESLALRLMEGFKKCAQKHQIPLQTTVRGSMFGFFFNHAPVSNFEEALQSDTALFAKFHQAMLERGVYLACSQFETGFICASMDESLVDEVIAKIDEALEEIGRG

SEQ ID NO: 16222 - protein, 774 aa, Kluyveromyces lactis NRRL Y-1140
MDGVMLDKVELNQHEVGAARERSRSMASLSKFIPKSIWKPQQQQQQQQPSETSEGNTKASNSHPVMLHASLHEAPAIVLQEAKPVSRESIEQEGAPAEKAASGNSSKLSMRLKKVFGKKEPSQPPVDSELSPPASSEAAANHDANDTTNTLNRNRTNSDTDPEPKRNLYSDGSQIQGTPLTSPSKSISSYNSGTHKPNNLVTGNQASKLSPNFDIPEASSNGNGFVPSYNSMTNISTASLNLIDENEETQNFEGSLHQSGEIIHPAITTPLKSGSESPFLSSQSMKPFPASDEAENSHRRSESNGVSVKPQLRRTASQPTDVHVQVNGKTASTKEEFSPRRGTVGADASFIQPPKRSERLRNKSFSNKFQDILVGPQSFEKIRLLGQGDVGRVYLVREKQTNRLYALKIFSKPEMIKRKKIKRILTEQEILATSNHPFIVTLYHSFQTEDYLYLCMEYCMGGEFFRALQTRKTKCISEDDARFYSSEVTAALEYLHLMGFIYRDLKPENILLHQSGHIMLSDFDLSVQAKDTKNPQVKGNASHSLVDTKICSDGFRTNSFVGTEEYIAPEVIRGNGHTAAVDWWTLGILIYEMLFGFTPFKGDNTNQTFSNILKNEVVIPNNNETSRACKDLIRKLLIKNENKRLGSKLGASDIKKHPFFKNDQWSLLRNQEPPLIPVLAKNGCDFAKLSSNPKGSKDKKDSAEQQEKLMFEEKVELDDQVSDNDPFHDFNSMSLMKQDNDSLIYGDSTSYGKISYTPNQNRSRSNSHRSFFKR

SEQ ID NO: 16223 - protein, 236 aa, Cucumis sativus
MGRGKIEIKRIENTTNRQVTFCKRRNGLLKKAYELSVLCDAEVALIVFSTRGRLYEYANNSVRGTIERYKKAFADSSNSGLSVAEANVQFYQQEATKLKRQIREIQNSNRHILGEALSSLPLKELKSLEGRLERGISKVRAKKNETLFAEMEFMQKREMELQSHNNYLRAQIAEHERIQQQQQQQQQTNMMQRATYESVGGQYDDENRSTYGAVGALMDSDSHYAPQDHLTALQLV

SEQ ID NO: 16224 - protein, 1647 aa, Ustilago maydis 521
MSQPGARRAYHHGSQRGGSTINQKAALASAYQELGKELSSSKLKIVGNYTLQRPIGEGTFGKVRLGLHRLTNTRVAIKQIPKAHSASLTREIHHHRRLHHPNVMQLYEVIATEQYIWMVSELCAGGELYDYLVENQVLAEPEARRIFGQLCLAVAYVHSKGIVHRDLKLENILLDERCNVKLGDFGFTREFERNRLMDTFCGTTGYASPEMLAGKKYTGEQVDIWSLGVILYALLCGALPFDDDDEAVMKQKILQGDFEIPDCLSEEAHDLVVSILQHDPAKRPSIQSILAHPWFTKMMVNSPMSTLEEDQIATDYFASKPSASTSQSKQHDRFPPTLHKALAELDTATELDTADATSAAPPTNPADAFDFEDHDSSNSCHRHHLSASSEQSYHSARSDSESSGRRSTNTDLTDPTTADSLSGTDEVEGLDQAIVQLNASSRPSALANATAAASHPDKNAIGLHRNERLGSNGSDASLSGVPRPSTKTNTASLPTHHELPPVPDGTGQDDHLSIYQSVPLTKRGSQSSSRGHHRTPSRTKRRSLSSGGLSDHHPPMLGRKPVDYVSQLADLQPATFSTSIEQNLLHQLSALGLDVGQMVHSVVTDACDASGATWWMLLRKSKDRHSEQPDITSPIVQVIPAPGDHPAPINASAFSKAGQTVTPSSPAQFSPPPVPVKDPARRSEDKFRTQERPTTLEASSSENAGLAEQSIRRLQTVVSHEELDVSAAPALHTSTSELMMATKPATDRQSSVPASGPMPLAGLPASTVSLPNDRSLTSTPDSVSSRPKSQHRHTTAVASPAKLQHVALTTLEGSPTSEGSKARGNSQNDRPRSNSLSVRQFAQSVLGTKDRGSATSSPVRPPPEQVVVAGEALPLERAKSPTLFGRRNTVSNVKDSMVGRLSGPSTPKKTPVDMLDKPRKSTGKKSCETDLDRVKALERSADSASSSPSRSTTGQAVGVVSNAKVDSSVPSASQDSFSTMSVTPQGSEKSGHRGKAGSFFMSTVRTWLGGNEKPTRKSKTGKQASASHRGLGIDDGPMAAKSPTNSLSTSGSVSTLTYGTPSRSASVRRRSAHYQQTSATRRGGPRSPHLGTSSRRSSNGSSYQAHLELPPNSFQQSMNRPANMRRMSAGSITPTATLHGDYLNDVGGVSGASRHSRPSSSHSLAHSGAASRPGLHGKAGSTGSTSSAYRPGQASSVYSTGSGRRHPRPSQDGGTTVRRHRTYASSSGSPSRRNSFRHDSRPSSIKSRASSPGRAMSGLGELWAADAEADGDGGGTGARRSTRSTPRHSLEMRKTGEAFDSAAPHHQHHQHVVAQSIFVAHKSRSPYRPPSANPNLHGSLVRGSSQLSGRSNVSANSEDAGYVAPNSTLGLPATGTGAWRHSWGRPPPCWAGPVDPPPTSSYSKRSGAAGVEDDGRPKLRDVFANRDDDDWTDEEEEQTYSGGLGQMGTLSSAMSSSVGRVGSGIGASSSPYATRNLAALGSSGYSTQRAVNLDTANAPEIGLREAPFSSRYAGVRNMFQTATAGTPAFGSRSHHSVSLSLGNEFAPRLLSTTIHSPTVSAASLGGGLGCIGESADAHSVTVSSKPKPESSGTQTQAQQQQSSASASASASASQQQQSGGGSSGSGSRITASFHKPVQIIEEEEEDE

SEQ ID NO: 16225 - protein, 114 aa, Arabidopsis thaliana
  misc_feature (19)..(19): Xaa can be any naturally occurring amino acid
  misc_feature (39)..(39): Xaa can be any naturally occurring amino acid
  unsure (1)..(114): unsure at all Xaa locations
LSPIVRDQNAPVIWKPGGXLFILIFFLNWILLVFPFFFXYYTYFDGAHGRAIKRTGKVQSEENPKDWPCPFQDLKFVSFCFVVKTFELNQYPILVLWFFFPGYYCDFFICFLIF

SEQ ID NO: 16226 - protein, 127 aa, Triticum aestivum
IFVMTQFNSASLNRHIHRTYLGGGINFTDGSVEVLAATQMPGETAGWFRGTADAVRKFIWVLEDYYKNKSIEHILILSGDQLYRMDYMELVQKHVDDNADITLSCAPVGESRASEYGLVKFDSSGRV

SEQ ID NO: 16227 - protein, 620 aa, Wolinella succinogenes
MSAKNLTQELENLFKKSEAKYVSYEKIVQTFPKPPTAAQAKKVHELSVKYDKMLLSASEVAKLLNREEEKKIEDEKKRLLDEELEDEFDFMKERELLEWSRSDSPVRMYLREMGQIPLLTKDEEIELSKNIELGENIILDAICSVPYLIDFILDYKEALINRERRVKELFKSFEDEEGGEEEEDEEVEEEADEEGEESKKPISKKDQKRVEKVLVSFKALEKAKKDWLKTLEGGAAQEEEGEFVELLHLLTLAYKKQTLKERLLDLGPTSKLINELVKAMENTLRNDEGFDRELKRLEYKLPLFNETLLENHQKILENITEMSKNDIASAVPEATMVSTYMEIKKLFQTKQASEESFDLEPEKLKEILEQIKRGKDIADKAKTKMAKSNLRLVVSIAKRYTNRGLPFLDLIQEGNIGLMKAVDKFEYKKGYKFSTYATWWIRQAISRAIADQARTIRIPIHMIETINRINKIIRKYLQEEGKEPDVETISEEVGLPVDKVKNVIKITKEPISLEAPIGSDEDGKFGDFVEDKSSVGPMDHILKEDLKTQIDEVLDQLNEREKAVIRMRFGLLEDESDRTLEEIGKELNVTRERVRQIESSAIKKLKHPKVGRKLKNYIED

SEQ ID NO: 16228 - protein, 127 aa, Triticum aestivum
IFVMTQFNSASLNRHIHRTYLGGGINFTDGSVEVLAATQMPGEAAGWFRGTADAVRKFIWVLEDYYKNKSIEHILILSGDQLYRMDYMELVQKHVDDNADITLSCAPVGESRASEYGLVKFDSSGRV

SEQ ID NO: 16229 - protein, 127 aa, Triticum aestivum
IFVMTQFNSASLNRHTHRTYLGGGINFTDGSVEVLAATQMPGEAAGWFRGTADAVRKFIWVLEDYYKNKSIEHILILSGDQLYRMDYMELVQKHVDDNADITLSCAPVGESRASEYGLVKFDSSGRV

SEQ ID NO: 16230 - protein, 127 aa, Triticum aestivum
IFVMTQFNSASLNRHIHRTYLGGGINFTDGSVEVLAATQMPGEAAGWFRGTADAVRKFIWVLEDYYKNKSIEHILILSGDQLYRMDYMELVQRHVDDNADITLSCAPVGESRASEYGLVKFDSSGRV

SEQ ID NO: 16231 - protein, 236 aa, Pisum sativum
MASMAFSTTFFTPLRDFNQPRTNSTPSTSLPFTKSSIASSKSPFFQLGFSQQASSNFPIVPSKTRSFSVNAKAIKDKTIYDFTVKDIDKKDVSLSKFKGKVLLIVNVASRCGLTSSNYTELSHLYENFKNKGLEVLAFPCNQFGMQEPGSNEEIKQFACTKFKAEFPIFDKVDVNGPFTAPVYQFLKSSSGGFFGDIVKWNFEKFLVDKNGKVVERYPPTTSPFQIEKDIQKLLAA

SEQ ID NO: 16232 - protein, 427 aa, Cordyceps bassiana
DKTHINVVVIGHVDSGKSTTTGHLIYQCGGIDKRTIEKFEKEAAELGKGSFKYAWVLDKLKAERERGITIDIALWKFETPKYQVTVIDAPGHRDFIKNMITGTSQADCAILIIAAGTGEFEAGISKDGQTREHALLAFTLGVKQLIVAINKMDTTKWSEARFQEIIKETSSFIKKVGYNPKAVAFVPISGFNGDNMLEPSTNCPWYKGWEKETKAGKSTGKTLLEAIDAIEPPKRPTDKPLRLPLQDVYKIGGIGTVPVGRVETGIIKPGMVVTFAPANVTTEVKSVEMHHEQLTEGVPGDNVGFNVKNVSVKEIRRGNVAGDSKNDPPNGAASFNAQVIVINHPGQIGAGYAPVLDCHTAHIACKFSELLEKIDRRTGKSVENNPKFIKSGDSAIVKMVPSKPMCVEAFTDYPPLGRFAVRDMRQT

SEQ ID NO: 16233 - protein, 399 aa, Arabidopsis thaliana
MANCFAPQLTFPSFSPRHFSPRMSHQSPKPSTSTTTSIFTSATKLLWGPSLPPGLLISTARTAWTTVWQLMMTQLAPSDSSGSYTRPTSKFRLDPTQFTSAASSELHLYVGLPCPWAHRTLIVRALKGLNDAVPVSIASPGQDGSWEFKDNNIPIKDKDKLIPSLDKANRCRNLKEVYKSRSGGYDGRCTVPMLWDLRKKDVICNESYDIIEFFNSGLNKLARNDNLDLSPPELKEMIQGWNQIVYPKVNNGVYRCGFAQSQEAYDGAVNELFSTLDEIEDHLGSNRYLCGERLTLADVCLFTTLIRFDSVYNILFKCTKKKLVEYPNLYGYLREIYQIPGVAATCDISAIMDGYYKTLFPLNASGIQPAISSSGDQDSLWRPHNRDLVGKAIEAQLSV

SEQ ID NO: 16234 - protein, 990 aa, Crocosphaera watsonii WH 8501
MVVQLDSTTYEQRTQEIAKELIAQTREKRSLWSKLGDQMRLDDKLLDFAMANPGLRVQLFHFIDTLPALQSNAEIAHHLQQYLGDESVELPSSLKGILNFTDYNSLPAKVAAETISKAVQTLAFKYISGETVPQVIKTVERLRKEKMGFTIDLLGEAVITESEAKAYLDSYLDLMEKLATESKKWSNVAQIDTAGDENLSKVQVSVKLTAFYSQFDPIDPQGSKEKVCTLIRILLRRAQELGVAIHFDMEQYVYKDLTLSILRELLLEEEFRNRSDIGVTLQAYLRDSKQDLHDLISWAKQRGTPITIRLVKGAYWDQETIKSEQNHWPQPVYNQKSATDVNYEEMTQLLLENHQYLYAAIGSHNVRSQARAIAIAETLKVPSRAFEMQVLYGMGDQLAKALVKTGHRVRVYAPYGNLLPGMAYLIRRLLENTANSSFLRQNLEERPIEDLIASPTLSGNTERIAQKESFVNVPDTDYSREVLRDKAEKALAKVKDSLGKTYLPLINGEYVQTDVIVESVNPSKSSEVVGQIGLISVSQAEQALNAAREAFKDWKKTPATERARIIRKAGDLMEERRHELSAWICVEVGKVLQQADAEVSEAIDFCRYYADEMERLDKGYNYDVAGETNRYHYQPRGIALVISPWNFPFAISTGMTVAALVTGNCTLLKPAETSTVIAAKIAEILVDAGIPKGVFQLVPGKGSKVGAYMVNHPDVHLIAFTGSREVGCRIYADAAILQPGQKHLKRVIAEMGGKNAIIVDESSDLDQAVAGAVFSAFGYSGQKCSAASRIIVLDPVYDAFLERFVEATKSLNVGATDQPSTQVGPVIDATAQKRILEYIEIAKQESTLALQMEAPDNGFYVGPTIFGDVLPNHTIAQEEIFGPVVAVMRVKSFAEALGVANGTDYALTGGLYSRSPEHIEQAQKEFEVGNLYINRTITGAIVSRQPFGGFKLSGVGSKAGGPDYLLQFLEPRHISENIQRQGFAPIEGNE

SEQ ID NO: 16235 - protein, 357 aa, Phanerochaete chrysosporium
AVCPDGTRVSHAACCAFIPLAQDLQETIFQNECGEDAHEVIRLTFHDAIAISRSQGPKAGGGADGSMLLFPTVEPNFSANNGIDDSVNNLIPFMQKHNTISAADLVQFAGAVALSNCPGAPRLEFLAGRPNKTIAAVDGLIPEPQDSVTKILQRFEDAGGFTPFEVVSLLASHSVARADKVDQTIDAAPFDSTPFTFDTQVFLEVLLKGVGFPGSANNTGEVASPLPLGSGSDTGEMRLQSDFALAHDPRTACIWQGFVNEQAFMAASFRAAMSKLAVLGHNRNSLIDCSDVVPVPKPATGQPAMFPASTGPQDLELSCPSERFPTLTTQPGASQSLIAHCPDGSMSCPGVQFNGPA

SEQ ID NO: 16236 - protein, 494 aa, Triticum aestivum
  misc_feature (284)..(284): Xaa can be any naturally occurring amino acid
  unsure (1)..(494): unsure at all Xaa locations
MLAAAASVKFSPASAGASTTTMLAFKPVHLPALPNAVPRPLSLSARPLYRQEPFLAAARNDRAASTAPPAATADGARPVETAAAPEAAKSAKIGVYFATWWALNVIFNIYNKKVLNAFPYPWLTSTLSLAAGSAIMLVSWATRIAEAPQTDLDFWKALSPVAIAHTIGHVAATVSMAKVAVSFTHIIKSAEPAFSVLVSRFFLGEHFPLPVYFSLLPIIGGCALAAVTELNFNMIGFLGAPIKDRSLGPTSIPRGPGIRTSDFWGAFFTGGDGAPHPATWRGPXAWQRGPCPSPTSSRARTRRSACSSRGSSSAEHFPLPVYFSLLPIIGGCALPAVPELNFNMIGFLGAMISNLAFVFRNIFSKKGMKGKSVSGMNYYACLSMLSLVILLPFAFAMEGPKVWAAGWQNAVAEIGPNFVWWVAAQSVFYHLYNQVSYMSLDEISPLTFSVGNTMKRISVIVASIIIFRTPVQPVNALGAAIAILGTFIYSQAKQ

SEQ ID NO: 16237 - protein, 351 aa, Pneumocystis carinii
MTASSRNVRFNVSDDYEILDVIGEGAYGIVCSAIHKPSGQKVAIKKISPFDHSMFCLRTLREMKLLRYFNHENIISILDIQQPQDFESFSEVYLIQELMETDMHRVIRTQDLSDDHCQYFIYQILRALKAMHSADILHRDLKPSNLLLNANCDLKVCDFGLARSAVSTEDSSSFMTEYVATRWYRAPEIMLTFKEYTKAIDIWSVGCILAEMLSGRPLFPGKDYHHQLMLILDVLGTPTMEDYYGIKSRRAREYIRSLPFKKRVSFASIFPRANPLALDLLEKLLAFNPAKRVTAEEALQHNYLEPYHDPDDEPTAPPISPSFFDFDRIKDSLTKNDLKILIYKEIMSMNN

SEQ ID NO: 16238 - protein, 345 aa, Pseudomonas fluorescens PfO-1
MSEIDILSFGETMAMFVAEQSGDLAFIDQFHKRIAGADSNVAIGLSRLGFKVAWLSRVGADSLGRFVVETLAREGLDCSHVEVDPAHPTGFQLKSRNDDGNDPTVEYFRRGSAASHLSPQSITPKLLGARHLHATGIPPALSASAREMSRELMTRMRNAGRSVSFDPNLRPSLWAGEREMIREINRLAALAHWVLPGLSEGRLLTGFEDPADIAAFYLDQGAEAVAIKLGPQGAYYRTHLDQGFVAGVPVETVVDTVGAGDGFAVGMISALLEHQSFPEAVRRANWIGSRAVQSRGDMEGLPTRSELAVEFEAAIAGKSNRLSAAPTVSVEYTKPVGAGLPAMRP

SEQ ID NO: 16239 - protein, 199 aa, Theobroma cacao
QVKGSENPRSHYKCTYPNCPTKKKVERSLDGQITEIVYKGSHNHPKPQSTRRSSSHAACTNSEISDQSGGTLGNEQTDSFLVQEDTSGSIGEDEFDQASSLSNPGGDDNENEPDAKRWKGENENEGIIGSGSRTVREPRIVVQTTSDIDILDDGYRWRKYGQKVVKGNPNPRSYYKCTTIGCPVRKHVERASHDLRAVI

SEQ ID NO: 16240 - protein, 322 aa, Pseudomonas fluorescens PfO-1
MKKQVVLYKKLSPALMARLEEQVDVTLIDSLDADGLMKLRDALPGAHGLLGASLKLDAALLDLAPNLEAISSVSVGVDNYDIDYLTQRKVMLTNTPDVLTETTADTGFALILATARRVVELANMVRGGHWHRSIGPAHFGTDVHGKTLGIIGMGRIGEALAQRGHFGFGMPVIYHSQSRKPAVEERFDAQYRSLEDLLQQADFICLTLPLTAQTEGLIGAEQFALMRPESIFINISRGKVVDEAALIDTLRHNRIRAAGLDVFEREPLNHDSPLLQLNNVVATPHMGSATHETREAMARCAVENLLAALAGQRPANLVNPPL

SEQ ID NO: 16241 - protein, 120 aa, Theobroma cacao
  misc_feature (112)..(112): Xaa can be any naturally occurring amino acid
  unsure (1)..(120): unsure at all Xaa locations
NPEFSSTLASHDDDNDDRATQGSISLCDDAANDDESESKRRKTESCLTEMNATSGALREPRVVVQIESDVDILDDGYRWRKYGQKVVKGNPNPRSYYKCTTPGCPVRKHVEXASHNLKCV

SEQ ID NO: 16242 - protein, 259 aa, Zea mays
  misc_feature (212)..(212): Xaa can be any naturally occurring amino acid
  unsure (1)..(259): unsure at all Xaa locations
MAEARHRKWHVFQTKDELSVAMAKYTAHLSAKFCKEKGLFTVVLSGGGLIDWLCKLLEPPYKDSIEWSKWHVFWVDERVCAYEDPDSNYKLAMDGFLSKVGIPNKNIYAIDKHYAADGNAEHCAALYEECLRNLVKQNILPLCPNGKYPQFDLQLLGMGPDGHMASLFPGHPQINVKDKWVTHITDSPKLPPRRITFTFRVINSASYNLMAXVCDDHTEQCPRSIADIFEHNNLALPASHLTAHVETMWYLDKAAASLL

SEQ ID NO: 16243 - protein, 262 aa, Namakwa exornata
VDHGDVKVVAVNDPFIEPHYAAYMLKYDSQHGQFKGTIEVKGSDLVVNGQTVKFYTEKDPANIPWKDTGAYYIVESTGVFTTTEKAKAHLKGGAKKVVISAPSADAAMFVMGVNEKEYKPDIEIISNASCTTNCLAPLAKVMHDNFTIIEGLMTTIHSYTATQKTVDGPSAKDWRGGRTAAQNIIPSSTGAAKAVGKVIPSLNGKLTGMSMRVPTSNVSVVDLTCRLEKSVTYDQIKETMKKASEGDMKGIMSYSEDALVST

SEQ ID NO: 16244 - protein, 713 aa, Glycine max
MADRSRSFMKDVKRVVIKVGTAVVTREEGRLAVGRLGALCEQIKQLNSLGYDIILVSSGAVGIGRQRLRYRKLINSSFADLQKPQLELDGKACAAVGQNSLMALYDILFTQLDVTSAQLLVTDNDFRDEDFRKQLTETVKSLLSLKVIPVFNENDAVSTRKAPYEDSSGIFWDNDSLSALLALELKADLLVLLSDVEGLYSGPPSDPHSKLIHTYIKEKHQNEITFGDKSRVGRGGMTAKVKAAVHAADAGIPVVITSGFAAENIINVLQGQRIGTLFHKDAHEWVQVKEVDAREMAVAARECSRRLQAISSEERNQILHKIADALEANEKIIRTENEADIAVAQEAGYEKSLVARLAIKPGKIASLANNMRIIANMEDPIGQVLKRTELSDGLILEKTSSPLGVLLIVFESRPDALVQIASLAIRSGNGLLLKGGKEARRSNAILHKVITEAIPDTVGGKLIGLVTSREEIPELLKLDDVIDLVIPRGSNKLVSQIKSSTKIPVLGHADGVCHVYVDKSANVEMARRIVLDAKIDYPAACNAMETLLVHKDLIEKGWLNDIVVDLRTEGVKLYGGPRASSLLNIPQAQTFHHEYSSLACTVEIVDDVYAAIDHINLYGSAHTDSIVAEDKEVANVFLRQVDSAAVFHNASTRFSDGARFGLGAEVGISTSRIHARGPVGVEGLLTTRWILKGSGQVVDGDKGIVYTHKDIAT

SEQ ID NO: 16245 - protein, 271 aa, Xanthomaculina hottentotta
VEHGDVKVVAVNDPFIEPHYAAYMLKYDSQHGQFKGTIEVKGSDLVVNGQTVKFYTEKDPANIPWKDTGAYYIVESTGVFTTTEKAKAHLKGGAKKVVISAPSADAAMFVMGVNEKEYKSDIEIISNASCTTNCLAPLAKVMHDNFTIVEGLMTTIHSYTATQKTVDGPSAKDWRGGRTAAQNIIPSSTGAAKAVGKVIPSLNGKLTGMSMRVPTSNVSVVDLTCRLEKSVTYDQIKETMKKASEGDLKGIMSYSEDALVSTDLNGDNHSC

SEQ ID NO: 16246 - protein, 229 aa, Bordetella parapertussis 12822
MPARSHHRIFRSGWLRAAVLGANDGIVSTASLIAGVAAAQASHAAILTSGLAGLVAGALSMAAGEYVSVKSQADIEAADLRLEQSSLKRNSREELEELTGIYVERGLSPDLAGQVARQLTRHNALDAHARDELGISVHNRAQPVQAALASAASFAVGAALPLAIAMAAPLAQLMPVVIAGSVAGLGILGAVAARAGGAPVGPAAVRVVLLGAAAMALTAGVGALFGVAV

SEQ ID NO: 16247 - protein, 316 aa, Glycine max
MSSHSHLSFAFGVLGNIASFVCFLAPLPTFYRVCKKKSTEGFQSIPYVAALFSAMLWIFYAYVKTGEMLLITINAFGCVIETIYLAVFITYCPKKARMSTLRMIVLLNFGGFCTIVLLTHLLAEGEGRVKLLGWICVVFATSVFAAPLSIIRVVIRTKSVEFLPFPLSLLLLISAIMWLLYGISLKDIYVTLPNVVGLTFGVIQIGLYAMYRNNKPVKDQKLPEHKGDIVDNNNESVIAPTVNGEKQEQEVKPQGGIIETGEKKEENNKQDQQQPEENKKFDQVVHEQTKLNNKNTNNINDDDNNKTGERVISCEV

SEQ ID NO: 16248 - protein, 213 aa, Xanthoparmelia conspersa
KDTGAYYIVESTGVFTTTEKAKAHLKGGAKKVVISAPSADAAMFVMGVNEKEYKSDIEIISNASCTTNCLAPLAKVMHDNFTIIEGLMTTIHSYTATQKTVDGPSAKDWRGGRTAAQNIIPSSTGAAKAVGKVIPSLNGKLTGMSMRVPTSNVSVVDLTCRLEKSVTYDQIKETMKKASEGDMKGIMAYSEDALVSTDLNGDNHSCIFDATAG

SEQ ID NO: 16249 - protein, 138 aa, Brassica napus
MSKLQSESVKDAISQIVGDAKEKNRKFTETVELQIGLKNYDPQKDKRFSGSVKLPHIPRPKMKVCMLGDAQHVEEAEKMGLDYMDVEALKKMNKNKKLVKRLAKKYHAFLASEAIIKQIPRLLGPGLNKAGKFPTLVT

SEQ ID NO: 16250 - protein, 449 aa, Bordetella parapertussis 12822
MGPQLVSWKNKRNLSPEILPMSQAPAHSLPSYLDAEHLGPWGIYLQQVDRVTPYLGPLARWVETLKRPKRALIVDVPIEMDNGSIAHFEGYRVQHNTSRGPGKGGVRFHQDVTLSEVMALAAWMSIKNAAVNLPYGGAKGGVRVDPRTLSHSELERMTRRYTSEIGVIIGPSKDIPAPDVNTNAQTMAWMMDTYSMNEGATATGVVTGKPIALGGSLGRVEATGRGVFVVGCEAARDLNLDVSKARIVVQGFGNVGGTAARLFHEAGAKVIAVQDHTGTIHNDGGLDVHKLLAHVGNQGGVAGFTGAQQLADDDFWGLETDFLIPAALEGQINENNAARVRAKVVVEGANGPTTPEADDILRENGVYVVPDVLANAGGVTVSYFEWVQDFSSFFWSEEEINQRLERLMREAYSAVSQVAKEHKVTLRTAAFIVACTRILQARQVRGLYP

SEQ ID NO: 16251 - protein, 222 aa, Zea mays
  misc_feature (194)..(194): Xaa can be any naturally occurring amino acid
  unsure (1)..(222): unsure at all Xaa locations
RLSYAIDDAQKYPYLASMGIYVFKKDALLDLLKSKYTQLHDFGSEILPRAVLDHSVQACIFTGYWEDVGTIKSFFDANLALTEQPSKFDFYDPKTPFFTAPRCLPPTQLDKCKMKYAFISDGCLLRECNIEHSVIGVCSRVSSGCELKDSVMMGADTYETEEEASKLLLAGKVPVGIGRNTKIRNCIIDMNARXKGIQEGYYIRSGIVVILKNATINDGSVI

SEQ ID NO: 16252 - protein, 316 aa, Zea mays
MASLTLPPAMANPRQDAIDLQKAFKGFGCDSTTVINILTHRDSVQRGLIQQEYRAMYHEELSHRISSELNGNHKKAMLLWILDPAGRDATVLREALSGDTMDLRAATDIICSRTPSQLQIMKQTYYARFGTYLEHDIGHHTSGDHQKLLLAYVGIPRYEGPEVDPTIVTHDAKDLYKAGEKRLGTDEKTFIRVFTERSWAHLASVSSAYHHMYDRKLEKVIKSETSGNFEFALLAILRCAENPAKYFAKLLRKAMKGLGTDDKTLIRVVVTRTEIDMQYIKAEYFKKYKKPLAEAIHSETSGNYRTFLLSLVGPGH

SEQ ID NO: 16253 - protein, 427 aa, Cordyceps bassiana
DKTHINVVVIGHVDSGKSTTTGHLIYQCGGIDKRTIEKFEKEAAELGKGSFKYAWVLDKLKAERERGITIDIALWKFETPKYHVTVIDAPGHRDFIKNMITGTSQADCAILIIAAGTGEFEAGISKDGQTREHALLAFTLGVKQLIVAINKMDTTKWSEARFQEIIKETSSFIKKVGYNPKAVAFVPISGFNGDNMLEPSSNCPWYKGWEKETKAGKSTGKTLLEAIDAIEPPKRPTDKPLRLPLQDVYKIGGIGTVPVGRVETGIIKPGMVVTFAPANVTTEVKSVEMHHEQLTEGVPGDNVGFNVKNVSVKEIRRGNVAGDSKNDPPNGAASFNAQVIVINHPGQIGAGYAPVLDCHTAHIACKFAELLEKIDRRTGKSVENNPKFIKSGDSAIVKMVPSKPMCVEAFTDYPPLGRFAVRDMRQT

SEQ ID NO: 16254 - protein, 428 aa, Glycine max
MSDQQEIYAAFPNVPQAPPDSIFQLTARYVADKHPNKINLGVGAYRTDEGKPWVLPTVKKASRQLEENPNIDHEYLPITGLPQFTKAAQGLIFGKQNKAVDEGRVISVQTLSGTGANHLAALFFAKFYEFPTDKEIYISNPTWANHNAIISNVGVTPVSYRYYNKETIALDFDGYLEDLQKAPERSVILVHGCAHNPTGVDPTAEQWDKILDVFLQKKHYAFFDSAYQGFATGDLDRDAGSMRKFAEKRVPMLVCQSFAKNAGLYNERVGALHVVAADTKEAERVKSQLSVLQRSEISNPPAYGAHIVSMILTNPELFDSWKNDITTMSGRIIEMRDALFDLLNDKFKTPPPPGRKDWGHIKEQIGMFSFTGLNPDQTKKLVEEHSVYLTGNGRISMAGLNTHNVETFAKAVDEVVRSTSGTVPGSAL

SEQ ID NO: 16255 - protein, 326 aa, Kineococcus radiotolerans SRS30216
MKIVITDCDHDSLAEERAVADAAGAELLLAPSAAAADVVAAATGADALVVQYARVDADLLDALPTVRAVGRYGVGVDTVDVDACTARGVAVCNVPDYGTESVSDHAIALALAAARRIAWMDRRVRAGAGELAPLRPVHQFGGRVFGVVGLGLIGAATARKAAGLGYRVVATDARRAPGTTVDGVEVVTLDDLLARAHVVSLHVPLTEGTRHLIGAAELARMRPDAVVVNTSRGGVLDTAALADALRAGRLHGAGLDVFEEEPLPPGHPLATLDTAVLTPHLAWYSEESYGELKRRTVQNVVDVCAGRPPADVLNPEALGTPAGGRR

SEQ ID NO: 16256 - protein, 120 aa, Theobroma cacao
NPEFSSTLASHDDDNDDRATQGSISLCDDAANDDESESKRRKTESCLTEMNATSGALREPRVVVQIESDVDILDDGYRWRKYGQKVVKGNPNPRSYYKCTTPGCPVRKHVERASHNLKCV

SEQ ID NO: 16257 - protein, 424 aa, Cordyceps bassiana
HINVVVIGHVDSGKSTTTGHLIYQCGGIDKRTIEKFEKEAAELGKGSFKYAWVLDKLKAERERGITIDIALWKFETPKYQVTVIDAPGHRDFIKNMITGTSQADCAILIIAAGTGEFEAGISKDGQTREHALLAFTLGVKQLIVAINKMDTTKWSEARYQEIIKETSSFIKKVGYNPKAVAFVPISGFNGDNMLEASTNCPWYKGWEKETKAGKSTGKTLLEAIDAIEPPKRPTDKPLRLPLQDVYKIGGIGTVPVGRVETGIIKPGMVVTFAPANVTTEVKSVEMHHEQLVEGVPGDNVGFNVKNVSVKEIRRGNVAGDSKNDPPSGAASFNAQVIVINHPGQIGAGYAPVLDCHTAHIACKFSELLEKIDRRTGKSVENNPKFIKSGDSAIVKMVPSKPMCVEAFTDYPPLGRFAVRDMRQT

SEQ ID NO: 16258 - protein, 200 aa, Theobroma cacao
QVKGSEFPRSYYKCTHPNCEVKKLFERSHDGQITEIIYKGTHDHPKPQPSRRYSSGNIMPGQEERSDKVSSFTGRDGKGSSIYGQMAYSIEPNSTADLSPVTANDDNIDEVDDDDPFSKRRKMDGGVDITPVVKPIREPRVVVQTLSEVDILDDGYRWRKYGQKVVRGNPNPRSYYKCTNAGCPVRKHVERASHDPKAVI

SEQ ID NO: 16259 - protein, 951 aa, Oryza sativa
  misc_feature (190)..(190): Xaa can be any naturally occurring amino acid
  unsure (1)..(951): unsure at all Xaa locations
KLGTGPPLEDLHARNVRQVVEDCLRLSGEYQSEGDPARLGELGGLLTSLDVGDAIMVASSFSHMLNLANLAEEIQMVYRKKAEASRRGDFVDEASAPTESDIDETFQRLVRGLGKSPREVFDALRSQTIDLVLTAHPTQSVRRSLLQKHASIRSCLTQLCGEGISDNEEQEIDEALQREMEMCSSGRIRXILAAFKTDEIRRTPPTPQDEMRAGMSYFHDTIWNGVPKFLRRVDTALKNIGIDERLPYNAPLIQFSSWMGGDRDGNPRVTPEVTRDVCLLARMMAAHMYFSKMADLMFELSMWRCNDELRARANELHRKSSRKYAKYYIASLCTPAATFWKKISPGEPYRIILGDVRDKLYNTCERARQILSKGISSIPEDQTYTNVEQFLEPLELCYRSLCDCGDKLIADGRLLDLMRQVSTFGLSLVKLDIRQESERHTDAMDAITTHLGIGSYREWPEERRQEWLVSELRGRRPLFGPDLPQSEEVADVLGAFRVIAELPADSFGAYIISMATAPSDVLAVELLQRECGVKKPLRVVPLFEKLADLQQARATMELLFSVDWYKERIDGKQEIMIGYSDSGKDAGRLSAAWQLYKAQEEIVGVAERHGVKLTIFHGRGGTVGRGGGPSHLAILSQPPNTVNGSLRVTVQGEVIEKSFGEENLCFRTLQRFTAATLEHGMNPPVSPKPEWRRLLDDMATVATDEYRSIVFQEPRFVEYFRAATPETEYGRMNIGSRPSKRKPGGGIESLRAIPWIFAWTQTRFHLPVWLGFGAAFRHAMQQSDAGGGLATLREMYDEWPFFRVTIDLLEMVFAKGDPGIAALYDELLVPDDLRPFGEQLRANYVETQRLLLQVAGHKDLLESDPYLRQRLMLRDSYITALNVCQAYTLKRIRDGGFRPETRPPLSKELLGSSAVAEKLVKLNPNSEYDPGLEDTLILTMKGIAAGMQNTG

SEQ ID NO: 16260 - protein, 234 aa, Theobroma cacao
QVKGSEYPRSYYKCTHPNCPVKKKVERSFDGQIAEIVYKGEHNHSKPQPPKRNSSGTQGLGFTSDGTGQDTNNSLWSNNPNERNEGSEGRVENQNEVGLSAPSSYQGKAVLSYEHVTTGAVNAGVTSENSIGLSGECEERSKEGEDDEPRSKRRKSENQSSEVGTSGEGIQEPRVVVQSCTDSEIMGDGFRWRKYGQKVVKGNPYPRSYYRCTSLKCNVRKHVERASDDPRAFI

SEQ ID NO: 16261 - protein, 329 aa, Thermoanaerobacter tengcongensis MB4
MNIPKETLMRMYLEMVTIRLYEETMAEAYQEGKYPVFNIASGPVPGEMHLAAGQEPVAVGVCMHLKKEDAVVGTHRPHHFAIAKGVDLKRMTAEIFGKVTGLGRGKGGHMHLFDPDVHFSCSGIVGASIPQAVGAALAFKMRKEKRVAVAFFGDGAANQGTFHEGLNLAAIWKLPVVFVCEDNSWAISVPKEKSTAISQNADRAVAYGIPGVYVGENDVLAVYEAAGEAIERARQGGGPTIIEVKTDRFFGHFQGDPEVYRPKDEVQRLKQNDPIKRFRKYLIENDIATEDELKQLDDEARKRVEEAFLFARESPYPAPEEALLHVFVE

SEQ ID NO: 16262 - protein, 371 aa, Malus x domestica
MGKGGMSDGDHADRCCGEAINGDVQQENMAAWLLGVKNLKIQPYKLPNLGPHDVRVRLRAVGICGSDVHHFKNMRCVDFIVKEPMVIGHECAGIIEEVGSEVEHLVPGDRVALEPGISCKRCNLCKQGRYNLCRKMKFFGSPPNNGCLANQVVHPGDLCFKLPDNVSLEEGAMCEPLSVGIHACRRANVCQETNVLVVGAGPIGLVTLLAARAFGAPRIVIADVNDERLLIAKSLGADAVVKVSTNIEDVAEEVAKIQKVLENGVDVTFDCAGFNKTITTALSATRPGGKVCLVGMGQREMTLPLATREIDVIGIFRYQNTWPLCLEFLRSGKIDVKPLITHRFGFSQKEVEEAFETSARGGNAIKVMFNL

SEQ ID NO: 16263 - protein, 287 aa, Pseudephebe minuscula
VDHGDVKVVAVNDPFIEPHYAAYMLKYDSQHGQFKGTIEVKGSDLVVNGQTVKFYTEKDPANIPWKDTGAYYIVESTGVFTTTEKAKAHLKGGAKKVVISAPSADAAMFVMGVNEKEYKSDIEIISNASCTTNCLAPLAKVMHDNFTIIEGLMTTIHSYTATQKTVDGPSSKDWRGGRTAAQNIIPSSTGAAKAVGKVIPSLNGKLTGMSMRVPTSNVSVVDLTCRLEKSVTYDQIKETMKKASEGELKGMTRKWNDIWIAANHSRHHGLLGGCACVHRFEWRQPLM

SEQ ID NO: 16264 - protein, 352 aa, Solanum demissum
MEVETHMSFRTAEKISILVVNDDATYLPVVAGLLKKCNYQVVTVKYPIDALSKLRIKGDSFDLVVTDVHKSDINGFELQQVITQAFEIPVLLMSADDKEGTILKGLKGVSVDDQRDQGPCTALQVKRGKKPVPGKSAMKLGKQGKDNSVNFVLPTKSQIIWTDSLHNTFLEAISNIGFDKAVPKKIHEHMKVPGLSRENVASHWQKYRIYLRRVTDASSSIQVPDINLASRANQSTIASGTLGKHRQFHQENFGVQSSVPSLLIHTTGYRTGSLQHLKNKGKEVDDVLDPVRNFSVFHNVSATQGSQGIGDLSASSMNQGNDQPHQQNNEDEALVNFDGGFNQDMEKEDYLQ

SEQ ID NO: 16265 - protein, 431 aa, Burkholderia pseudomallei K96243
MVSRRTFLGGSGAALLGAALVSKAGAASLPEAPTMAKAATQPPLAPPNGRPYTPVVTLNGWTLPWRMKNGWKEFHLIAEPVVRELAPGMNAHLWGYNGQTPGPTIEAVEGEKVRVFVTNRLPEHTTVHWHGMLLPCGMDGVGGLTQPHIPPGKTFVYEFQLEKAGTFMYHPHADEMVQMAMGMMGTFIVHPKDRGAMPADRDFVFLMSAYDIDPGSFTPRVNEMTDFNMWTWNARVFPGIDPLPVRAGDRVRIRFGNLTMTNHPIHLHGYAFEVAGTDGGWIAPAARWPEVTVDVAVGQMRAIEFTANRPGDWAFHCHKSHHTMNAMGHQVPNLIGVPQQDLAKRINKLVPDYMAMGSTGGAMGTMEMPLPENTLPMMTGTGPFGPLEMGGMFTVVKVRQGLGRNDYRDPGWFRHPKGTVAYEYAGALPDD

SEQ ID NO: 16266 - protein, 754 aa, Glycine max
RATYTTPLLQISSSFLTSHPSLSSSLSSLHSLFRFMAGLIDLNNATEDDETPSSGSSSSSSSSTVCLELWHACAGPMISLPKKGSVVVYFPQGHLEQHLHDFPLPASANIPSHVFCRVLDVKLHAEEGSDEVYCQVVLVPESEQVQQKLREGEFDADGEEEDAEAVMKSTTPHMFCKTLTASDTSTHGGFSVPRRAAEDCFPPLDYSQQRPSQELVAKDLHGQEWRFRHIYRGQPRRHLLTTGWSAFVNKKKLVSGDAVLFLRGEDGELRLGIRRAAQLKSGSTFSALSGQQGSPTSLMDVVNALSARCAFSIHYNPRVSSSEFIIPIHRFVKSLDYSYSAGMRFRMRFETEDAAERRFTGLIVGIADVDPVRWPGSRWRCLMVRWDDLEATRHNRVSPWEIEPSGSASTANNLMSAGLKRTKIGLPSAKLDFPVSNAIGTSDFGESLRFQKVLQGQEMLGVNTTYDSFNAQSHQLSDLRRCYPGSNYPRIAATGNSIGISQVSSNVSNNGIGFSESFRFQKVLQGQEILPSQPYGRALSVDEACGNGRFGLFDGFQAMRSRNGWSSHVSNNSSHLHPPVPSGQVSSPSSVFMFQQAVNPVLNSDYNNQIGQVMGDKVHQRVSYASEVKGGKFVSTPYEPLLRGLSQEGTNSFGLSNFHNQLDSSRSHDSVSVLRASQELVPSCKSRCRVFGFSLTEGAPVASKEATDSSAVACAGPSFTRHVEDDFHPGHSLRSKAVASYCTKVINLYPLRCI

SEQ ID NO: 16267 - protein, 196 aa, Arabidopsis arenosa
MGRKKLEIKRIENKSSRQITFSKRRNGLIEKARQLSVLCDASVALLVVSASGKLYSFSSGDNLVKILDRYGKQHADDLKALDIQSKALNYGPHHELLELVESKLVGSNVNNVSADTLVQLEEHLGTALSVTRAKKKELMLKLVENLKEKEKLLKEENQVLASQMKRNHHVGAEAEMETSPAGQISDNLPVTLPLLN

SEQ ID NO: 16268 - protein, 167 aa, Adiantum capillus-veneris
MFLAIIKFQNYGQQVLEAANYIGQGFAVTLDHLNRLPITVQYPYEKKLPSERFRGRIHFEFDKCIACEVCVRVCPINLPVVDWIFLKDVKKKKLKNYSIDFGVCIFCGNCVEYCPTNCLSMTEEYELSSYNRHELNFDQTALGRLPPPASEDVSIQLVLNSRNSFRR

SEQ ID NO: 16269 - protein, 497 aa, Zea mays
MVLSHASSGRDDDDAVASTFASRYVRERLPRYRMPERSIPREAAQQIISDELMLDGNPRLNLASFVTTWMEPECDKLIMDSINKNYVDMDEYPVTTELQNRCVNMIAHLFNAPIKEDETAIGVGTVGSSEAIMLAGLAFKRKWQNKRKEQGKPCDRPNIVTGANVQVCWEKFARYFEVELKEVKLSEGYYVMDPVKAVEMVDENTICVAAILGSTLTGEFEDVKQLNDLLTEKNKETGWDVPIHVDAASGGFIAPFLYPELEWDFRLPLVKSINVSGHKYGLVYPGVGWVIWRSKDDLPEELIFHINYLGTDQPTFTLNFSKGSCQIIAQYYQLIRLGFEGYRNIMENCQENAAILREGIAATGRFDVLSKDAGVPLVAFSLRDSSRFSVFDVSENLRRFGWIVPAYTMPADAEHVAVLRVVVREDFSRSLAERLVSDVRKILRELDARATHAVRVATATAEQSGDSVVAKKSVLEIEREVAARWRNAVNKKKTGVC

SEQ ID NO: 16270 - protein, 245 aa, Lolium temulentum
MGRGKVQLKRIENKINRQVTFSKRRSGLLKKAHEISVLCDAEVGLIIFSTKGKLYEFATDSCMDKILERYERYSYAEKVLISTESEIQGNWCHEYRKLKAKVETIQRCQKHLMGEDLESLNLKELQQLEQQLESSLKHIRSRKSQLMHESISELQKKERSLQEENKILQKELIEKQKAHTQQAQLEQTQPQTSSSSSSFMMGEATPATNRSNPPAAASDRAEDATGQPPARTVLPPWMVSHLNNG

SEQ ID NO: 16271 - protein, 395 aa, Bacteroides fragilis YCH46
MYGKMKEHLSNTIAEIKEAGLYKEERLIESAQQAAITVKGKEVLNFCANNYLGLSNHPRLIEGAKKMMDRRGYGMSSVRFICGTQDIHKELEAAISDYFKTEDTILYAACFDANGGVFEPLFTDEDAIISDSLNHASIIDGVRLCKAKRYRYANADMTDLERCLQEAQAQRFRIIVTDGVFSMDGNVAPMDKICDLAEKYDALVMVDESHSAGVVGATGHGVSEQYNTYGRVDIYTGTLGKAFGGALGGFTTGRKEIIDLLRQRSRPYLFSNSLAPGIIGASLEVFKMLKESNEIHDKLVDNVNYFRDKMTAAGFDIKPTQSAICAVMLYDAKLSQIYAARMQEEGIYVTGFYYPVVPKDQARIRVQISAGHEKEHLDKCIAAFIKVGKELGVLK

SEQ ID NO: 16272 - protein, 261 aa, Lolium temulentum
MGRGKVQLKRIENKINRQVTFSKRRNGLLKKAHEISVLCDAEVAVVVFSPKGKLYEYATDSSMDKILERYERYSYAEKALISAESESEGNWCHEYRKLKAKIETIQKCHKHLMGEDLECLNLKELQQLEQQLESSLKHIRSRKSHLMMESISELQKKERSLQEENKALQKELVERQKAARQQQQEQWDRQTQTQQAQNQPQAQTSSSSSSFMMRDQQAHAQQNICYPLVTMGGEAVAAAPGQQGQLRIGGLPPWMLSHLNA

SEQ ID NO: 16273 - protein, 196 aa, Arabidopsis suecica
MGSKKLEIKRIENKSSRQVTFSKRRNGLIEKARQLSVLCDASVALLVVSASGKLYSFSSGDNLVKILDRYGKQHADDLKALDIQSKALNYGPHHELLELVESKLVGSNVNNVSADTLVQLEEHLETALSVTRAKKKELMLKLVENLKEKEKLLKAENQVLASQMKKNHHVGAEAEMEISPAGQISDNLPVTLPLLN

SEQ ID NO: 16274 - protein, 483 aa, Pseudomonas syringae pv. syringae B728a
MTVRRTKIVATLGPASNSPEVIEQLILSGLDVARLNFSHGTPDEHKARARLIREIAARHGRFVALLGDLQGPKIRIAKFTDKRIELKVGDKFTFSTAHPLTSGNQQIVGIDYPDLVKDCGVGDELLLDDGRVVMRVDTQTADELHCTVLIGGPLSDHKGINRRGGGLTAPALTEKDKQDIKLAAEMDLDYLAVSFPRDAADMEYARQLRDESGGTAWLVAKIERAEAVANDEVLDELIRASDAVMVARGDLGVEIGDAELVGVQKRIILHARRHNKAVIVATQMMESMISSPMPTRAEVSDVANAVLDYTDAVMLSAESAAGSYPIEAVQAMARICIGAEKHPTGKTSSHRIGHSFTRCDESIALAAMYTANHFPGVKAIIALTESGYTPLIMSRIRSSVPIYAFSPHRGTQARAAMFRGVYTVPFDPAALPPGQVSQAAVDELLKRGLVEQGDWVILTKGDSYHTIGGTNGMKILHVGDPLV

SEQ ID NO: 16275 - protein, 666 aa, Zea mays
ETTDLLQKLSLDSQPKAADATQPAAAAAKEGAVTSQPLSVAIPPERSITPVLQDFMDPNLFYLPAYYYGGYDSSMSEWDDYPRYLNSDGVEIAPAVYGDIYGYGYAPYGAYSPATSPVPTVDGQMFGAQHYQYPTTYFQPPTPIPSTTQSNLQSSNNPEKPAAKADPAKATANGVPNGTGHTHSYSGTVPSQQSSALTPDGTYRAPLLGGVPSAGYLDTTYYGYDSTGAQFAWYDGSAYANGQQRTTTTNRFPSSSFSGNGSSAIYQNKSSTTQQMGMQNRRPTTTSAAPTYPNRMYPSPRPYTQYGNSVKTGLPYGSNGYDSRIYGRCGLGNGMDNRYRPRACSGYYGYGNESQDGTIELNRGPRSGRFKNQKLYGHTVTIAVKGQSLPSSESKNDSAVPDRAQFNRDDFPVQYDAAKFFVIKSYSEDDIHKSVKYNVWASTTNGNKKLDAAYQEAQSKGSACPIFLFFSVNTSGQFVGVAEMTGAVDFEKTLEYWQQDKWNGSFSVKWHIVKDVPNNILKHIILENNENKPVTNSRDTQEIRLEQGLQMLKIFKDHVSKTSILDDFAFYESRQKLMQDKRSKQQQLQKQVWDTRTPVSVTGERPQEPANGKPNPSVPDGVTAEVKAVKAPAENGITAPVVSYAAKVAQTAPEKPVLSNGVAKTG

SEQ ID NO: 16276 - protein, 473 aa, Schizosaccharomyces pombe
MTEAKNISDDTDVLSLTTNSLRTSKTLFGAEFGSVTSFDDTVAQNLKRTYKEHLEYGSVLGGTVGKRKNRHYEEDTIGSNALTVRADSENPSSQVITKFSDPNKKIAGQVSMQSLEKIKGVPEAAHRIAGESQASLVKRTLAEQIRPEWHAPWTLMRVISGHLGWVRCVDVEPGNQWFCTGAGDRTIKIWDLASGVLKLTLTGHIATVRGLAVSPRHPYLFSCGEDKMVKCWDLETNKVIRHYHGHLSGVYALKLHPTLDVLVTAGRDAVARVWDMRTRQNVHVLSGHKSTVASLAVQEFDPQVVTGSMDSTIRLWDLAAGKTLTTLTHHKKTVRALSLHPDEFTFASGSSDNIKHWKFPEGAFMGNFEGHNAIVNTLSINSDNVMFSGADNGSMCFWDWKSGHKYQELQSVVQPGSLDSEAGIFASSFDKTGLRLITCEADKSVKIYKQVDNATPETHPNLPWTPSNLRRRY

SEQ ID NO: 16277 - protein, 165 aa, Glycine max
  misc_feature (118)..(118): Xaa can be any naturally occurring amino acid
  unsure (1)..(165): unsure at all Xaa locations
LRGRGLRVRTAHASAHASADAWEKSQYAVRGELYLRASELQKEGKKIIFTNVGNPHALGQKPLSFPRQVVALCQAPFLLDDPNVGLLFPADAIARAKHYLSLTSGGLGAYSDSRGLPXVRKEVAEFILRRDGYPTDPELIYLTDGASKGVMQILNTIIRGQDDGI

SEQ ID NO: 16278 - protein, 458 aa, Bradyrhizobium sp. BTAi1
MLSNSLIELDRAHLVHPVASYRGHEASGARVLTSAKGAVVTDASGHQLVDGFAGLWCVNAGYGHESIVEAAAKQMRELPYATGYFSLASEPAIRLAAALAERAPGDLNHVYFTLGGSDAVDSTVRFIHNYWHVKGQPQRDQFITLQQGYHGSSTVGAGLTALPAFHANFGVPLNWQHKIPSHYPYRNPVGRNADAIIAASLAALDAKIAELGGPERVAAFYAEPIQGSGGVLVPPDGWMKAIRARCRQHGILFVADEVITGFGRTGPLFACTDDEVVPDLMTVAKGLTSGYVPMGAVLMSDHVYGVIADGAGAAAVGHGYTYSAHPVSAAVGLAVLDLYESGLLENGRRAGARLMAGLRAMQDHPLVGEVRGRGLLAAIELVVDKEKKTPLPASAEPSRRIFDRAWANGLVIRAFPTGVLGYAPPLCCSESDIDAIIARTARTLDQTLADPDVRQAMP

SEQ ID NO: 16279 - protein, 205 aa, Lotus corniculatus var. japonicus
MSLRRRTLLKVIVLGDSGVGKTSLMNQYVHKKFSQQYKATIGADFVTKELQIDDRLVTLQIWDTAGQERFQSLGVAFYRGADCCVLVYDVNVMKSFDTLDNWHEEFLKQANPSDPRTFPFILLGNKIDIDGGNSRVVSEKKAKDWCASKGNIPYFETSAKEDYNVDAAFLCIAKTALANEHDQDIYFQAIPEAAPENEQKGGCQC

SEQ ID NO: 16280 - protein, 447 aa, Kluyveromyces lactis NRRL Y-1140
MQSLNSQLGGLPNSEQFFGKGAVQQQGPVGMNGMLFSPSMNSTRMMPQQSQQPHVLHGLENNGGLQNSYLLKQKMDVVNSAFGQQNNLQQQQQPGKMPLPNNGQVPMMMQNSISGGNSNNNTIPQQMQFPMPVQQQAMGNVNGLDTTPLPNASHTPISSPAHLLIREVWQNNVNFEFAIIRKMIEQYKVISISTEFVGTIARPIGNFRSKTDYHYQTMRSNVDLLTPIQIGLSLSDLQGNKPDNFPSTWQFNFHFDVTKETVNSESLELLKKSGVILERHQQNGVDFDEFAQLMMDSGLLLNDEVTWISYHAAYDYGFLINRLMNTNMPNNKEDFEWWVQKYIPTSYDLNLINKLVHEVTQQHPHPPPLHLLQSQQQQQQNQQQQYTLELLADELGIPIFPLFSSAAGQSLLALLAYTQLGKLSLYKLRNGTDFSYYKNLIYGITQE

SEQ ID NO: 16281 - protein, 424 aa, Cordyceps bassiana
DKTHINVVVIGHVDSGKSTTTGHLIYQCGGIDKRTIEKFEKEAAELGKGSFKYAWVLDKLKAERERGITIDIALWKFETPKYHVTVIDAPGHRDFIKNMITGTSQADCAILIIAAGTGEFEAGISKDGQTREHALLAFTLGVKQLIVAINKMDTTKWSEARYQEIIKETSSFIKKVGYNPKAVAFVPISGFNGDNMLEPSTNCPWYKGWEKETKAGKSTGKTLLEAIDAIEPPKRPTDKPLRLPLQDVYKIGGIGTVPVGRVETGIIKPGMVVTFAPANVTTEVKSVEMHHEQLTEGVPGDNVGFNVKNVSVKEIRRGNVAGDSKNDPPNGAASFNAQVIVINHPGQIGAGYAPVLDCHTAHIACKFSELLEKIDRRTGKSVENNPKFIKSGDSAIVKMVPSKPMCVEAFTDYPPLGRFAVRDM

SEQ ID NO: 16282 - protein, 205 aa, Lotus corniculatus var. japonicus
MSTRRRTLLKVIVLGDSGVGKTSLMNQYVHKRFSQQYKATIGADFVTKELQIDDRLVTLQIWDTAGQERFQSLGVSFYRGADCCVLVYDVNVMRSFDTLDTWHEEFLKQANPPDTRTFPFILLGNKIDIDGGNSRVVSEKKANDWCVSKGNIPYFETSAKEDYIGDAAFLSIAKTALATDREQDIYFQNIPEAVAESEQRGGCAS

SEQ ID NO: 16283 - protein, 370 aa, Saccharum officinarum
MDGAPVAEFRPTVTHGGRFLQYNIFGNLFEITHKYQPPIMPIGRGAYGIVCSVMNFETREMVAIKKIANAFDNHMDAKRTLREIKLLRHLDHENIIGIRDVIPPPIPQAFNDVYIGTELMDTDLHHIIRSNQELSEEHCQYFLYQILRGLKYIHSANVIHRDLKPSNLLLNANCDLKICDFGLARPSSESDMMTEYVVTRWYRAPELLLNSTDYSAAIDVWSVGCIFMELINRQPLFPGRDHMHQMRLITEVIGTPTDDELGFIRNEDARKYMRHLPQFPRRPFASLFPKVQSVAALDLIERMLTFNPLQRITVEEALEHPYLERLHDIADEPICTEPFSFDFEQQALTEDQMKQLIFNEAIEMNPNFRY

SEQ ID NO: 16284 - protein, 639 aa, Pirellula sp. 1
MCGITGFWNPSRTNERELRFALDPMLDVLDHRGPDERGSRFFQERGLAMGHTRLSIIGLACGHQPIETDDGDYAVTVNGELYDYKRIRTALACENYECNGKSDSAITLPLYLKHDLAMVDHLRGEFAVVLYDDRKERLVLIRDRFGVKPLYYAVNDNGFIWGSEVKSILQHPDVEPRLCPKAAVHQMMQVMVPGSTAFEGVDALLPGHMLVVQRNGDSLEVQTKRWWDFEFPESHDENADPEPFIQGVQDRLIDAVAARLEADVPVGCYLSGGIDSCSILGLANTLQQSPVKAFTIAFDSDEYDESNIAKRMAERTGAEQELLRLTEKELYGPAFERATWHAERTFYNTLAVAKWHMSRRVRACNYKAVITGEGSDELFGGYPFFKRDWLGRDDEGGIFAGAILAEEDLKHSAWQDLCGFTPSWIQPWMLVLKRFEPILSSSLTDLLQEYDPVGEVAGAIDPAQVRGRHRLDVSQYTWSKTMLEGQILTWGGDRMDMANSMEARPAFLDHHVAEYATTIPPNIRIRNGVEKWVLREAMVNVLPRELYERKKFAFMAPPAHTDPVKRAAVQEMIDHWLTPSRVESVGFFQHDKLMQFIDDAWKESDGTIARRNDIVMNHVLQLHMLHGQYVEGLPLPAVD

SEQ ID NO: 16285 - protein, 578 aa, Solanum tuberosum
MGNTCVGPSISKNGIFQSVSAAMWRSRSPDDTASTTNGESARIETPISVKEPDSPLPVQEPPEQMTMPKSEKKEEEKEQPKKPKKPAEMKRVSSAGLRTDSVLQKKTGNLKEFFSIGKKLGQGQFGTTFKCVEKATGKEYACKSIAKRKLLTDDDVEDVRREVQIMHHLAGHPHVISIKGAYEDAVAVHVVMEFCAGGELFDRIIQRGHYTERKAAELTRTIVGVVEACHSLGVMHRDLKPENFLFVDQKEDSLLKAIDFGLSIFFKPGDRFTDVVGSPYYVAPEVLRKRYGPEADVWSAGVILYILLSGVPPFWAENEQGIFEQVLHGDLDFKSDPWPSISEDAKDLMRRMLVRDPRRRLTAHEVLCHPWVQVDGVAPDKPLDSAVLSRMKQFSAMNKLKKMALRVIAESLSEEEIAGLKEMFKMIDTDNSGQITFEELKEGLKRFGSNLKETEIYDLMQAADVDNSGTIDYGEFIAATLHMNKIERQDHLFAAFCYFDKDGSGYITADELQQACEEFGIGDVRMEEMIREADQDNDGRIDYNEFVAMMQKGNPVLGGGKKGLEHSFSIGFREAVKL

SEQ ID NO: 16286 - protein, 422 aa, Cordyceps bassiana
NVVVIGHVDSGKSTTTGHLIYQCGGIDKRTIEKFEKEAAELGKGSFKYAWVLDKLKAERERGITIDIALWKFETPKYHVTVIDAPGHRDFIKNMITGTSQADCAILIIAAGTGEFEAGISKDGQTREHALLAFTLGVKQLIVAINKMDTTKWSEARYQEIIKETSSFIKKVGYNPKAVAFVPISGFNGDNMLEPSSNCPWYKGWEKETKAGKSTGKTLLEAIDAIEPPKRPTDKPLRLPLQDVYKIGGIGTVPVGRVETGIIKPGMVVTFAPANVTTEVKSVEMHHEQLTEGVPGDNVGFNVKNVSVKEIRRGNVAGDSKNDPPNGAASFNAQVIVINHPGQIGAGYAPVLDCHTAHIACKFSELLEKIDRRTGKSVENNPKFIKSGDSAIVKMVPSKPMCVEAFTDYPPLGRFAVRDMRQT

SEQ ID NO: 16287 - protein, 335 aa, Hypocrea koningii
VPKVGINGFGRIGRVVLRNALETGAVEVVALNDPFIEPHYAEYMFKYDSTHGRFKGDIKVDGKDLVIDGKRIKFYQERDPANIPWKDSGAEYIVESTGVFTTTEKASAHFKGGAKKVIISAPSADAPMYVMGVNEDTYAGANVISNASCTTNCLAPLAKTLNDKFTIVEGLMTAIHAYTASQKTVDGPSSKDWRGGRAAAQNLIPSSTGAAKAVGKVIPELAGKVTGMSVRVPTVNVSLVDFTVRFAKDVTYDEVKAAIKEASEGPLKGILAYTEDDIVSTDILTDPHSSTFDAKAGIALNKNFVKVMSWYDNEYGYSRRVVDLIVYVSKKDAGQ

SEQ ID NO: 16288 - protein, 723 aa, ASPERGILLUS NIDULANS FGSC A4
MTSSSTQTATLAAGCFWGVEHLFRKQFGQGKGLLDAKVGYCGGNTASPNYRAVCTGDTGHAEALKITFDPSLVSYRSLLEFFYRMHDPTTKNQQGPDVGTQYRSAIFTHGDEQHKIAESVTEKVSKEWYKQPLSTEIIPAGQWWDAEEYHQLYLHKNPSGYECPAHFVRSFPPLSDHSSHLDRLQSSLVMHKWLPRGVGNWTLASQFFMRRYTGVDTVSGPANSIYQTVKAGQLSPRKLEQARMLYHYRVSYLICPLPRRYISTWTPAAHTHIQSTAISSTMASAVVVAMREALRHLKHVENHLRHHNQPNAANKVGKLSVEISQAVQEAMAYIPQCDVFDNMQDANGAVANRVAQQHANGGHQAMTNHPPPGGPIQQQAVVALLNEVQKEQNKPAHFESCPLQRLPPPPAAALQPHSWAQVAGSITSGSSHEIMQLMSPTLVTSCPGSKEGQNSDDGRSNDDLITFIPSSIPVLPEEKAGIIRILGRMNEASIAHITARIHEGPLQDIRIEAPDRARVVFQHLSHAEAFCEADKEMVVRLGFGRLGKGYRVEIAEIVDWTDDHRAMNQPIRERRRLSFARKGLFSYYKNIPGVLSPEAWKQDMRSIAGVGNIERLFVFNNGNGEWELVAMWWDQSLMLSKALATAIFTSTIIARRVLETVNRWKETKAVYRGVSVTYSSDPCEKELILTDDKCVLMRRHEKFRPNHPSYRPGKIRQGQPGRR

SEQ ID NO: 16289 - protein, 459 aa, Burkholderia sp. 383
MQDNSLRQSLKQRHITMIALGGVIGAGLFVGSGAIIATAGPAAILSYLIGGVIVTLVMFMLGEMASRNPDSGSFSTYASSYLGEWAGFAVGWLYWFKSMMTITVEAILLGAILHDFLPWLPVWGGALFMLVTLIASNAYSVRSFGEAEYWLSFAKVTTIIIFMALGASILLGFQPRIPAPGLINLTDHGGFMPNGISPVLAGVMVVIFSLGGSEIAAVAAGESENPSKNVIRAIKSVIVRVMVFYVGSVSILILCMPWTDKANLKSPYVSLFSMAGFTSAAVAMKLVLFVSFMSVMNSFLFSNSRMLFSLSQRGHAPAMFGRTNAKGVPMNALVLCLAICVSILGIHFVSGGDLFLMLAKSSGAFVMIVWIFIIVAHFAMRRQEKHAPRDPQAFRAWFYPVSNWIALLALVAVLGSQAFNPDSRFQFWFTVLTALAIVAAYFVRRKPVQLGDTAGAKVR

SEQ ID NO: 16290 - protein, 351 aa, Burkholderia sp. 383
MTHTQVVPLTRSRAPVPPRHCTFDVRDWEILSRYWHPVAFATEVGDRPLAVTLLDERIVLFRSGGAIVAARDVCPHRGAPLSRGWVVEDRLVCPYHGLEYAADGKCVRIPSQPDGPIPERLCLTTYAAQQAYGLVWVSLGGGELPLPDFPAWNAEGFQQILPPSIDIRASAGRQTEGFIDVAHFAWIHHESFADRRNPVVPQYSVERRENGLHAEYVSTVSNFPKSMQHRAPEGFLWRRVFEVDVPFFARLTVHFPEGGRLAILNAASPVSARLTRLFVPIARNFDHDLPLDDVYEFNRQVFEEDREIVEQQCPEDLPIDRSHEAPILADRSSGAYRRALGEIGLGQSYAR

SEQ ID NO: 16291 - protein, 337 aa, Hypocrea koningii
APIKVGINGFGRIGRIVFRNAVEHPDIEVVAVNDPFIETTYAAYMLKYDSSHGLFKGEVEVDGKDLVVNGKKVRFYTERNPADIKWSETGAEYVVESTGVFTTTEKAKAHLVGGAKKVIISAPSADAPMYVMGVNESDYDGSADVISNASCTTNCLAPLAKVINDNYGIVEGLMTTVHSYTATQKTVDGPSAKDWRGGRGAAQNIIPSSTGAAKAVGKVIPALNGKLTGMSIRVPTANVSVVDLTVRIEKGASYEEITETIKKAADGPLKGVLAYTGDDVVSSDMLGNTNSSIFDIKAGISLNKNFVKLVSWYDNEWGYSRRVLDLLAHVAKVDASK

SEQ ID NO: 16292 - protein, 95 aa, Xylella fastidiosa Ann-1
MSIKPLHDRIVVKPIEADEVSPGGIVIPDSAKEKSTKGEVIAVGTGKPLDNGNVRTPSIKVGDKVIYGQYAGSTYKAEGVEYKVLREDDILAIIG

SEQ ID NO: 16293 - protein, 547 aa, Xylella fastidiosa Ann-1
MAAKEIIFSEKARSRMVYGVNLLANAVKATLGPKGRHVVLDKSFGSPIITKDGVSVAKEIELADKFENMGAQMLKEVASKTNDHAGDGTTTATVLAQALIREGCKAVAAGMNPMDLKRGIDKAVIAAVTELKKISKPTSDDKAIAQVATISANSDESIGNIIAEAMKKVGKEGVITIEEGTTLENELDVVEGMQFDRGYSSPYFINNQQSQIVELDNPYILLHDKKISNVRDLLTVLDAVAKESKQLLIVAEEVEGEALATLVVNNIRGIIKVCAVKAPGFGDRRKAMLEDMAVLTGGTVISEEVGLSLEKATTSHLGKAKKVRVSKENTTIIDGMGDNDAINGRVKQIKTQIEETTSDYDREKLQERVAKLAGGVAVIKVGAATEVEMKEKKARVDDALLATRAAVEEGVIPGGGVALIRVITAISNLKGANEDQTHGIQIALRAMEAPLREIVANAGEEPSVILNKVKEGKGNFGYNAATGEFGDMVNFGILDPTKVTRSALQNAASIAGLMITTEAMIAEAPKKDEPTPPAAGGGMGGMGGMDF

SEQ ID NO: 16294 - protein, 402 aa, Uromyces appendiculatus
KSTTTGHLIYKCGGIDKRTIEKFEKEAAELGKGSFKYAWVLDKLKAERERGITIDIALWKFETPKYFVTVIDAPGHRDFIKNMITGTSQADCAILIIAAGTGEFEAGISKDGQTREHALLAFTLGVRQLIVAINKMDTTKWSESRYEEIVKETSIFVKKVGYNPASICFVPISGWHGDNMLEESSNMPWFKGWSKETKAGSSKGKTLLDAIDAIDPPVRPTDKALRLPLQDVYKIGGIGTVPVGRVETGTIKAGMVVTFAPANVVTEVKSVEMHHEQLEAGMPGDNVGFNVKNVSVKDLRRGFVCGDTKLDPPKEAASFVAQVIVLGHPGQIGNGYCPVLDCHTAHIACKFDTLQQKIDRRTGKALEECPKFVKSGDACLVKMVPSKAMCVEAFTDYPPLGR

SEQ ID NO: 16295 - protein, 403 aa, Fusobacterium nucleatum subsp. vincentii ATCC 49256
MNYLLGGYVMNVLEEVKKIEQKIIQWRRDLHKIPELNLYLPKTTKYIEEKLKEMGIEYKTLVNGNAIVGLIKGNSEGKTIGLRADMDALPIEEETGLEFSSTHKGCMHACGHDGHTAMLLGAAKILNENRDKFKGNVKLLFQPGEEYPGGALPMIEEGSMENPKVDAVIGLHEGLIDERVGKGKIAYKDGCMMASMDRFLIKVKGKGCHGAYPQMGVDPIVIASEIILSLQKISSREINTNEPIIVSVCRINGGFSQNIIPDMVELEGTIRATNNETRKFIANRIEEIVKGITSANRGSYEIEYDFKYPAVINDKEFNKFFLESAKKIIGEENIFELPTPVMGGEDMAYFLEKAPGTFFFLSNPKVYSDGKIYSHHNPKFDVDENYFYIGTALFVQTVLDYLK

SEQ ID NO: 16296 - protein, 182 aa, Asarum caudigerum
KAHEISVLCDAEVGLIVFSPRGKLYEFANSSMLKTIERYQRHSKEANVNNKATEQNIQHWKYEAEHMAKKIEFLESSKRKLLSEDLESCSTEELQQIESQLERSLSSIRGKKNQLFKEQIEQLKEKEKILIKENAILSQKCGTQPQQQSTSPSGTVPYEHIFPHSEVETDLFIGRPERGSTR

SEQ ID NO: 16297 - protein, 977 aa, Oryza sativa (japonica cultivar-group)
MMHGLWVQDQGMVDHLAQLVPLLHECASHVTEGSFEKADFSFKKIRMLTIADGPLQHLSKIIVDSLDHRLLSSIQGLYGALINPSDYFEKSTLPGCPAHNFFKLNPYLSTGFVTINRAIMEAMEDEKNFLEIKVKSNLCSILKLSHYNFKTLQGAIYVERSLMFNMVELQVVHIVDLSCSAAHPWQWLKLLDDFHGRPGGAPELYLTVLHDDNDFLAEMQSLLSKKAESLEVSFRFISVIGRLETLDFSNLRSTFQIKFGVAVAISCALQMHRLLLVDDNLSSTSIAQLQKMANFTQPKQMASSVCSPASTLNYLQTPSPRTPKLLARLLSAIRALKPNIMVIMEQDADHNALLFRDRFNEVLNYYAALFDCFHAVAAANPGRTDERLRVERMILREEIKNILVCEGVHRHERHERLDQWAMHMEESGFHNVQLSFSAIREGKENLLSFGLKNCQNKEDRGCLLLSWGSTNLYSISLRLCCTDRGMFQDDMLSSATSSPASSVYSPSPSPSNGSWVQELSHDQQSVRLIGLLYQCAAEVSAGSFDRANLCLEHITQLASLDAPHALQRLAAVFADALARKLLNLIPGLSRALLSSANSADAHLVPVARRHMFDVLPFLKLAYLTTNHAILEAMEGERFVHVVDFSGPAANPVQWIALFHAFRGRREGPPHLRITAVHDSKEFLANMAAVLSKEAEAFDIAFQFNAVEAKLDEMDFDALRHDLGVRSGEALAVSVVLQLHRLLAVDDGRRHAATGCLTPVQIIARSSPRSFGELLERELNTRLQLSPDASVVSSLSPHSPAAATAAHPTTSTPKLGSFLSAVRSLSPKIMVMTEQEANHNGGAFQERFDEALNYYASLFDCLQRSAAAAAERARVERVLLGEEIRGVVACEGAERTERHERARQWAARMEAAGMESVGLSYSGAMEARKLLQSCGWVGPYEVRHDAGGHGFFFCWHKRPLYAVTAWRPAASRRGHTRS

SEQ ID NO: 16298 - protein, 337 aa, Claviceps purpurea
MAVKVGINGFGRIGRIVFRNAVEHPEIEVVAVNDPFIDPEYAAYMLKYDSSHGVFKGEIKKDADGLIVNGKKVKFHTERDPSAIPWKASGAEYIVESTGVFTTTEKAKAHLTGGAKKVIISAPSADAPMYVMGVNEKTYDGKADVISNASCTTNCLAPLAKVIHDKYTIVEGLMTTVHSYTATQKTVDGPSGKDWRGGRGAAQNIIPSSTGAAKAVGKVIPDLNGKLTGMSMRVPTPNVSVVDLTVRIEKGATYDEIKATVKEAANGSLAGILGYTEDDIVSSDMNGNTNSSIFDAKAGISLNKNFVKLIAWYDNEWGYSRRVLDLLAYVAKADASK

SEQ ID NO: 16299 - protein, 211 aa, Asarum caudigerum
NRQVTYSKRRNGLLKKAYELSVLCEAEVALIVSSSRGRLYEYANNSVRTTIDRYKKASDSSNPASVSETNSQYYQQEATKLRQQIDILQNANRQLMGESISAMNVKQLKQLETRLEKGISRIRSKKNELLFAEIEYMQKREVELRNDNIYLRGKIVENERAQQNMNMLPGGGGYEVMSQHPSYDSRNYLPVNLLEHNQHFSHQEPTALQLG

SEQ ID NO: 16300 - protein, 464 aa, Oryza sativa (japonica cultivar-group)
MEKATRCLARATGLAAAAAAGDGPQKRLAEAMVDCLARRLLRPVQAITDALIDPSVYLDRRSVRAARRGFFELSPFPKVAFVVGNRAIVEAVENESLVHVVGMSGPFTQPCQWIQLLHELRRRPEGPPRVVRLTVVHDDGELLAKMAEVLSDEAEELDMEFQFHGVVGQLEDLDFSNLRDVLEIKSGEALVVSCTLQLHRLLAADDDAMYSSRSAHLNQMASIAQLQQMAVSSCPPSTGGGGSVQYKDDDDDPYRSPATPLTFVSPPASTPHLQMPAALANFLSAVRALSPKIVVVAEQDADHNGVSFRKRFCEALHHYAAVFDSLDDAAAATTSAASHLWSPDERAQVERVVVGEEIKGVLLRDGAHRRERHDRLRQWAARMEMAGFTGVPLSYAAIRKGNDMVRRCGLRRCENRECGGCLLLCWSSRPLYSISAWRPAASGGAGSGSERSEYIHVGAEADDR

SEQ ID NO: 16301 - protein, 322 aa, Glycine max
  misc_feature (307)..(307): Xaa can be any naturally occurring amino acid
  unsure (1)..(322): unsure at all Xaa locations
MATLTVPPVPPSPRDDAMQLYRAFKGFGCDTSAVINILAHRDATQRAYIQQEYKAMYSEELSKRLASELSGKLETAVLLWLHDPAGRDATIIRKSLTADNKTLEGATEVICSRTPSQLQYLKQIYHSMFGVYLEHDIQTNTSPGDHQKLLLAYISTPRHEGPEVNREIAQKDAKGLYKAGEKKLGTDEKTFIHIFSERSAAHLAAVSSYYHDMYGHSLKKAVKNETSGAFEHALLTIIQCAVNPGKYFAKVLHKAMKGLGTDDSTLIRVVVTRTEVDMQYIKAAYLKKHKKTLNDEVHSETSSHYRXFFSHFWALITSQDVQ

SEQ ID NO: 16302 - protein, 214 aa, Prototheca wickerhamii
VDSKLQKLVKGIQNDGLRSILEDVYARNAEQDEFLQAVRGMVVSIAPVFEKHPEYLTAFKLLTEPERAIIFRVPWVDDAGQWQMNRGMRVQFSSAIGPYKGGLRFHPSVTLSIIKFLGFEQIFKNALTTLPMGGGKGGSDFDPKGRSEAEIMRFCQSFMTELYRHIGSDVDVPAGDIGVGGREIGYMYGQYKRITRDRGGVLTGKGMGWGGSEI

SEQ ID NO: 16303 - protein, 296 aa, Triticum aestivum
LARPLTRISSLFPPFASFVCALPFSFRRGNCEPARSSRPPREAAIIHSIHSSAAAYISAAIGALVGCSSHRRIRRAQAEIRSAAAAATATATMFSGTQQKCKVCTKTVYPMDQLSTDGAVFHRACFKCHHCKSTLSFSSYSSFEGVPYCKPHFAQLFKETGSYNKSFQSQSPAKSATEKLTPELTRSPSKAAGMFSGTQDKCATCGKTAYPLEKVTVEEKSYHKSCFKCSHGGCALSPSNYAALEGILYCKHHFSQLFKEKGSYNHLIKCASVKRAAEAQTAQAAAQTAPAAAESS

SEQ ID NO: 16304 - protein, 451 aa, Zea mays
MVGGGGGGPLRRVGKYEVGRTIGEGTFAKVKFAQNTETGESVAMKVLDRSSILKNKMAEQIKREISIMKLVRHPNVVRLHEVLASRKKIFIILEFITGGELFDKIIRHGRLSEADARRYFQQLIDGVDFCHKKGVYHRDLKPENLLLDSQGNLKISDFGLSAWPAQGSFLLRTTCGTPNYVAPEVLSHKGYNGALADTWSCGVILYVLLAGYLPFDEVDLTTLYGKIESAEYSFPAWFSGGAKSLIRRILDPNPETRIRIEEIRSDEWFQKNYEPIKEIENEEVNLDDVNAAFDDPEDDNEDAFEDETGPLTLNAFDLIILSQGLNLAALFDRRQDCDKLQNRFLSRNPAKVILSSMEVVAQSMGFKTHIRNYKMRVEGLNADKTSHLSVMVEVFEVAPSIFMVELQRAAGDTSEYNTFVNNYCGKLDDIIWKFPTEKGKSRIPRLSKSHS

SEQ ID NO: 16305 - protein, 350 aa, Kluyveromyces lactis NRRL Y-1140
MSAPLNVGIVGTGIFARNKHLPTFQQHSDKFKPVACFNRTKSKADAFAVTAGIEESKVYADLDHLLQDDSVDVVDVMVPVQFNYETAKKSVEAGKPVILEKPIEANLEQAKKLVQLAESTELPVAIAENWLHLECVPIMKEKLAKIGPIAAFTYNSTGPFYPSSEYLATSWRKHPEHIGGFLSDGGVHQLALLTTLLGDIGSIAAFSNQLRKESGTNDIVFSSVKLRDSDVIGTFTYGSAFGATEKSVFLKVYGLNGSVTMNINARTCTTIKTMIGSTGEVEAEEETVEVKEQPFFGVEAEFENFYEAVSKKDKSIVKGSPRVAFHHLAIVAAFLESAAKEGTAIVVQQP

SEQ ID NO: 16306 - protein, 381 aa, Nocardia sp. C-14-1
MKVATVQAEPVILDADATIDKAIGYIEEASKNGAEFIAFPEVWIPGYPYWAWIGDVKWAVSEFIPKYHENSLTLGDDRMRRLQLAARQHNIAMVVGYSEKDGASRYLSQVFIDQNGDIVANRRKLKPTHVERTIYGEGNGTDFLTHDFGFGRVGGLNCWEHFQPLSKYMMYSLNEQIHVASWPAMFALTPDVHQLSVEANDTVTRSYAIEGQTFVLAATHVIGKATQDLFAGDDEAKRALLPLGQGWARIYGPDGKSLAEPLAENAEGLLYAELDLEQIIVAKAAADPAGHYSRPDVLSLKVDTRNHTPVQYVTEDGGSSLNSNSRVENYRLRQLADIEKYENADSATVPLDVTTPEKQSGDVNANGNAKVNTNPSAKAKA

SEQ ID NO: 16307 - protein, 459 aa, Bradyrhizobium sp. BTAi1
MRTNSLQSKDIAHQIHPATNLRRHERVGPIVIDRGSGIYVYDDEGREYIEGLAGLWSVGVGFGEKRLVEAATRQMAKLPYYHIFAHKTHEPSTLLAEKLVSMAPANLKHVFFTSSGGEANDSAIKFVWYYNNALGRTDKKKFIARQGAYHGITIAAGSLTGLQANQRGFDLPLPFAKHLTCPHYYRFGLPGESEEAFTERLAKELEDLILSEGPDTVGAFIGEPLMGAGGVIVPPVNYWQRIQEVCRKYDVLVIADEVINGFGRLGTLFGCDTFGIRPDILVCSKQITSSYQPLAAVLISDEMYQAMADQSDRLGTFGHGYTASAHPVATAVALENLAIIEERNLVANAAEVGAHLHAGLSRFADHPLVGEVRGRGLIAAVELVADKATKARFDPVGKVGLKFFDRAHQHGLIIRNVGDSIAICPPMIITAAQVDELLKRFKATLDDITDWVNAGMPEA

SEQ ID NO: 16308 - protein, 613 aa, Wolinella succinogenes
MSEQFTRREFLQSACITMGALAVSTSGVDRAFASSSLPINTSGIPSCDVLIIGSGAAGLRAAVAARKKDPSLNVIVVSKVMPTRSATTMAEGGINGVIDFSEGDSFALHAYDTVKGGDFLVDQDTAMKFAEHAGEAIHELDYIGMPFSRDKNGKVDKRYAGGASKIRCNFSADKTGHILTHTCLDDALKNGVKFLMDHQLLDIGVDNGRCEGVVLRDIRTGTIAPVRAKSVVLATGGYTRVFWNRTSTPYIATGDGAASAMRAGVAFKDPEMLQFHPTGVCHGGVLITEAARGEGGILLNNQGERFMKNYAKKMELAPRDIVSRSIETEIREGRAFGKGMEAYVLLDVTHLGKEKIMRNLPQIRHIGLLFENMDLVEKPIAIRPTAHYSMGGIDVMGLESMSTAIPGLFAAGEAACVSIHGANRLGGNSLCDTVVTGKIAGTNAASFASSAGFGSGTHLHDLTLKWMSRFKEVANGKGEVNEMYAIREELGAVNWDNMGVFRTESRLVALEDKHNELQARYDALRIPNTNPVFNTAFTEYVELGNILLASRAARMGAEARKESRGSHYREDYIKRDDANFLKHSMVTMDSNGKLHLGWKDVVVTQFKIEERKY

SEQ ID NO: 16309 - protein, 530 aa, Agrobacterium tumefaciens str. C58
MSPTCFRAPHHLKSLRSRRRQMRILAVTAEMFPFVKTGGLADATSALPQALERKGADVRTLLPLYRGLTPLVRGRKPVLVANILEQPVSVYYVVSDGHKLLLLEAASLFDRDGHPYGVKGEPFADNDLRFAVLSKVAAEIALGAIDGWQPDVVHVHDWHAALTCVYLADSTPSVASVLTLHNLAFQGQYPLERAGMLGLPSHLCTVDCLEYYDDMSFLKGGLTTASAVTTVSPTYAREILTPEMGMGMHGVLARRRGDLRGIVNGVDHDVWNPATDPYILANFTAATATRRSLNKYALLQALGLAPTQGPVFGVVSRLTWQKGIDLLPHVVPLIIERKGRLIVHGEGDTALEDSLQALAKRYPELVCAHIGYDERLAHMIQAGSDFIIQPSRFEPCGLTQLYALRYGALPIVSRTGGLAETIIDANDAAIEAGVATGFQFEPANEDDLRAALERAISAYNDRELFRRLQTQAMQANFSWDKSAAQYMALFESLVGNSTRETDAVADIRTETFAKIRADRRLAGTPGSPTG

SEQ ID NO: 16310 - protein, 496 aa, Solanum tuberosum
MEPKPATEPKKSSVWVLPYKTQSLQSLYTIGKKLGQGQFGTTHLCIEKSSGNLYACKTIPKKKLICKEDYEDVWKEIQIMHHLSEHPNVVRIKGTYEDALYVHIVMELCAGGELFDRIVEKGHYSEREAAKLIKTIVGVVEACHSLGVMHRDLKPENFLFLSSDEDAALKATDFGLSVFYKPGETFSDVVGSPYYVAPEVLCKHYGHESDVWSAGVILYILLSGVPPFWAETDMGIFRQILRGKLDLESEPWPGISDSAKDLIRKILDRNPKRRLTAHEVLCHPWIVDDTVAPDKPLDSAVLSRLKQFSAMNKLKKMALRVIAERLSEEEIGGLKELFKMLDTDNSGTITFEELKEGLRRVGSELMESEIKDLMDAADIDNNGTIDYGEFIAATVHLNKLEREENLLSAFSYFDKDGSGYITIEELQQACKEFGLSELNLDEIIKDIDQDNDGQIDYKEFSAMMRKGTGGAVGRRTIRNNLNLGEALGLVQSEEIL

SEQ ID NO: 16311 - protein, 500 aa, Glycine max
  misc_feature (151)..(151): Xaa can be any naturally occurring amino acid
  unsure (1)..(500): unsure at all Xaa locations
MSLPACPAEQLAQLLGPNTTDASAAASLICGQFAAVDSKFVDTAFAVDNTYLLFSAYLVFSMQLGFAMLCAGSVRAKNTMNIMLTNVLDAAAGGLFYYLFGFAFAFGSPSNGFIGKHFFGLKDIPSSSYDYSYFLYQWAFAIAAAGITSGXIAERTQFVAYLIYSSFLTGFVYPVVSHWFWSPDGWASAFKITDRLFSTGVIDFAGSGVVHMVGGIAGLWGALIEGPRMGRFDHAGRAVALRGHSASLVVLGTFLLWFGWYGFNPGSFNKILLTYGNSGNYYGQWSAVGRTAVTTTLAGSTAALTTLFGKRVISGHWNVTDVCNGLLGGFAAITAGCSVVEPWAAIVCGFVASIVLIACNKLAEKVKFDDPLEAAQLHGGCGTWGVIFTALFAKKEYVKEVYGLGRAHGLLMGGGGKLLAAHVIQILVIAGWVSATMGPLFWGLNKLKLLRISSEDELAGMDMTRHGGFAYAYEDDETHKHGMQLRRVGPNASSTPTTDE

SEQ ID NO: 16312 - protein, 220 aa, Xanthomonas campestris pv. vesicatoria str. 85-10
MNELNHLLENNRAWSERIRREDPEFFSKLSTQQTPEYLWIGCSDSRVPANQIIDMAPGEVFVHRNIANVVVHTDLNCLSVIQFAVDVLKVKHVLVVGHYGCGGVFASLTQKRMGLVDNWIRHVTDVADKHEACLHNAGELSVQHARLCELNVLEQVVNVCRTTIVHDAWERGQQLSVHGWVYSLRDGRAHDLGMSIDRPELLQERYDAALAQIQADRAER

SEQ ID NO: 16313 - protein, 449 aa, Wolinella succinogenes
MPYIQQTLEQLQKTFPAQKEFHQAVHEVLDSLRPLLAKESKYERYNILQRIVIPERQIGFRVTWMDDAGRIQVNQGYRIQYNSTLGPYKGGIRLHPSVNEGIIKFLGFEQIFKNALTGLAMGGAKGGSDFDPKGKSEAEVMRFAQAFMSELYRHIGPLTDVPAGDIGTGAREIGYLFGQYKKLVNRYEGVLTGKSLLWGGSLARKEATGFGSVYFAEEMLRERGESLEGKTCLVSGSGNVAIYTVQKLLELGAKPITVSDSTGMIHDASGIDLDLLKEIKENRRESLTSYAKEHPGSRFISVGEYPKDHNPLWAIPCFAAFPSATQNELNEKDAKHLLQNGCICVSEGANMPSTPSAVEKFLAAKICYGPGKAANAGGVATSGLEMSQNASMTSWSFEEVDMKLHGIMRGIYRAAKETAKEFGEPHNLVLGANIAGFRKVADAMIEQGI

SEQ ID NO: 16314 - protein, 435 aa, Clostridium acetobutylicum ATCC 824
MEEKIKKETQIELSYGVEDKPELLSRILLAFQHIFAAFGGIIVVPIIVASSLKLDAKTSTALLSAAILMAGVATLIQSKGVYSVGARVACIMGTDITFVAPAAVVGKKFGLAGIFGATILGAVIVVILSFFIKYIMKFFPPIVTGIVVCLIGLTLLPVSIDWAAGGSGTKNYGSLQNISIALIVMVITLLINHYGRGLVSSASILIGMVVGYIICIPLGMVNFSTISNLKIISIPSIFQYGVKFNISALLPFIPAYFVSVISTVGNLRAINEISGIKDDSKISKGVLSDGIGSILAGMFGAMPNTSFSQNVGLIPLTKVASRYVTLVAGIILMVLGLVPKFSGIINIMPQPVLGGVGIVMFGTVAAAGIQTLSHVNLNNRNILIIATSIGLGLGVTFRPEILSSLPESLKMIFSSGISTGTIAALVLNLILKEKK

SEQ ID NO: 16315 - protein, 427 aa, Cordyceps bassiana
GQDSHHVVVIGHVDSGKSTTTGHLIYQCGGIDKRTIEKFEKEAAELGKGSFKYAWVLDKLKAERERGITIDIALWKFETPKYHVTVIDAPGHRDFIKNMITGTSQADCAILIIAAGTGEFEAGISKDGQTREHALLAFTLGVKQLIVAINKMDTTKWSEARYQEIIKETSSFIKKVGYNPKAVAFVPISGFNGDNMLEPSSNCPWYKGWEKETKAGKSTGKTLLEAIDAIEPPKRPTDKPLRLPLQDVYKIGGIGTVPVGRVETGIIKPGMVVTFAPANVTTEVKSVEMHHEQLTEGVPGDNVGFNVKNVSVKEIRRGNVAGDSKNDPPNGAASFNAQVIVINHPGQIGAGYAPVLDCHTAHIACKFSELLEKIDRRTGKSVENNPKFIKSGDSAIVKMVPSKPMCVEAFTDYPPLGRFAVRDMRQT

SEQ ID NO: 16316 - protein, 349 aa, Solanum tuberosum
ELSKTLDLHNCAVWKPNENKTEMNLIHELRDNSFNSAYNLPIPRSDPDVIQIKEIDGVKILDADSPLAVASSGGSREPGAVAAIRMPMLKVSNFKGGTPELVPECYAILVLVLPGEQGRSWSSQEIEIVRVVADQVAVALSHAAILEESQHMRETLEEQNRALQQAKQDALRASQARNAFQMVMSHGLRRPMHSILGLLSLLQDEKLGNEQRLLVDSMVKTSNVVSTLIDDVMDTSTKDNGRFPLEMRHFQLHSMIKEAACLAKCLCAYRGYNISIEVDKSLPNHVLGDERRVFQVILHMVGNLLKDPNGGLLTFRVLPESISRESIGGAWRTRRSNSSRDNAYIKVEV

SEQ ID NO: 16317 - protein, 452 aa, Pseudomonas fluorescens PfO-1
MAYDFDLYVIGAGSGGVRAARFAAGFGAKVAVAESRYLGGTCVNVGCVPKKLLVYGAHFAEDFEQSSGFGWNLGEADFDWATLIANKDREINRLNGIYRNLLVNSGVTLHEAHAKIVGPHEVEVNGERYTAKNILIATGGWPQIPEIPGHEHAISSNQAFFLKELPKRVLVVGGGYIAVEFAGIFHGLGANTTLLYRGDLFLRGFDGSVRNHLKEELTKRGMDLQFNADIARIDKQSDGSLKATLKDGRVLEADCVFYATGRRPMLDNLGLENIDVQLDDKGFIKVDEQYQTTEPSILALGDVIGRVQLTPVALAEGMAVARRLFKPEQYRPVDYKMIPTAVFSLPNIGTVGLTEEEAREAGHDVVIYESRFRPMKLTLTDCQERTLMKLVVDGKSDKVLGCHMVGPDAGEIVQGLAIALKAGATKRDFDDTIGVHPTAAEEFVTMRTPVGA

SEQ ID NO: 16318 - protein, 427 aa, Cordyceps bassiana
DKTHINVVVIGHVDSGKSTTTGHLIYQCGGIDKRTIEKFEKEAAELGKGSFKYAWVLDKLKAERERGITIDIALWKFETPKYHVTVIDAPGHRDFIKNMITGTSQADCAILIIAAGTGEFEAGISKDGQTREHALLAFTLGVKQLIVAINKMDTTKWSEARYQEIIKETSSFIKKVGYNPKAVAFVPISGFNGDNMLEPSTNCPWYKGWEKETKAGKSTGKTLLEAIDAIEPPKRPTDKPLRLPLQDVYKIGGIGTVPVGRVETGIIKPGMVVTFAPANVTTEVKSVEMHHEQLTEGVPGDNVGFNVKNVSVKEIRRGNVAGDSKNDPPNGAASFNAQVIVINHPGQIGAGYAPVLDCHTAHIACKFSELLEKIDRRTGKSVENNPKFIKSGDSAIVKMVPSKPMCVEAFTDYPPLGRFAVRDMRQT

SEQ ID NO: 16319 - protein, 376 aa, Yersinia pestis KIM
MDTLISQLEHATQPVLPKRRDYRIGIIGAGFIVEHCHLVAYQKAGFVPYGITSKEHSQNHRLAETFAIKKVYETWQDMVCDPQIDIIDIAVPPHIQLEIVRFICESNSAAKHIKGILCQKPLAMSLKDGREIVRLSQQSGIPIAVNSNMRYDPSMRALKYILENQLIGDPVIASIDMRAIPDWQAFLQKYKKLELYAMAIHHIDAFRFLFGDPVKVTAVCRTDPRTTFEHIDGITQYTFQYANGLIATSLDDVWAWPGEPCAKNNYINWRVEGSDGLAEGDFGWHRREPEYCGSTLKLASRNHPGQWIAPKWERQWFPDAFIGTMANLMCAIEENRPPEISAEDNLGTLACIEACYLSIQQERTVYLNEILLENAK

SEQ ID NO: 16320 - protein, 513 aa, Apium graveolens var. dulce
MITGEVSVDSYDTNKPKPKRNKYAFACALLASMNSILLGYDTGVLSGASIYIKEDLHFSDVQIEIIIGIINIYSLLGSAIAGRTSDWIGRRYTMVLAGIIFFLGAIFMGLATNFAFLMFGRFVAGIGVGYAMMIAPVYTAEVAPSSSRGFLTSFPEVFINSGVLLGYVSNFAFAKCPLWLGWRIMLGIGAFPSVALAIIVLYMPESPRWLVMQGRLGEARTVLEKTSTSKEEAHQRLSDIKEAAGIDKDCNDDVVQVPKRTKDEAVWKELILHPTKPVRHAAITGIGIHFFQQACGIDAVVLYSPRIFEKAGIKSNSKKLLATIAVGVCKTVFILISTFQLDKIGRRPLMLTSMGGMVIALFVLAGSLTVINKSHHTGHWAGGLAIFTVYAFVSIFSSGMGPIAWVYSSEVFPLRLRAQGCSIGVAVNRGMSGIIGMTFISMYKAMTIGGAFLLFAVVASIGWVFMYTMFPETQGRNLEEIELLFGSYFGWRKTLKDLKAKEAAEAKSRESEV

SEQ ID NO: 16321 - protein, 403 aa, Pycnoporus sp. ZW02.30
VDSGKSTTTGHLIYKCGGIDKRTIEKFEKEAAELGKGSFKYAWVLDKLKAERERGITIDIALWKFETPKYMVTVIDAPGHRDFIKNMITGTSQADCAILIIAAGTGEFEAGISKDGQTREHALLAFTLGVRQLIVAVNKMDTTKWSEDRFNEIVKETSTFIKKVGYNPKAVPFVPISGWHGDNMLEESTNMPWYKGWTKETKAGVVKGKTLLDAIDAIEPPVRPSDKPLRLPLQDVYKIGGIGTVPVGRVETGIIKAGMVVTFAPSNVTTEVKSVEMHHEQLEQGVPGDNVGFNVKNVSVKDIRRGNVAGDSKNDPPKEAASFTAQVIILNHPGQIGAGYAPVLDCHTAHIACKFAELIEKIDRRTGKSIEANPKFVKSGDACIAKLVPSKPMCVESYNEYPP

SEQ ID NO: 16322 - protein, 490 aa, Aspergillus oryzae
MVGIGPKRPPSRKGSMHELPQNLLEQIKQFEDIFTVDGAKLKQIADHFVKELEKGLSVEGGNIPMNVTWVMGFPDGDEQGTFLALDMGGTNLRVCEITLTEEKGAFDITQSKYRMPEELKTGTAEELWEYIADCLQQFIESHHENEKLSKLPLGFTFSYPATQEYIDHGVLQRWTKGFDIDGVEGQDVVPPLEAILKKRGLPIKVAALINDTTGTLIASSYTDSDMKIGCIFGTGVNAAYMEHCGSVPKLAHKNLPPDMPVAINCEYGAFDNEHVVLPLTKYDIIIDRDSPRPGQQAFEKMTAGLYLGEIFRLALLDLLETRPGLIFQGQDTSQLRKPYLLDASFLAAIEDDPYENLQETQELMERKLNIKATQQELEMIRRLAELIGTRAARLSACGVAAICKKKNIESCHVGADGSVFTKYPHFKARGAQALREILDWAPNEKDKVVIMAAEDGSGVGAALIAALTLKRVKAGISCGIRDMADMQSLI

SEQ ID NO: 16323 - protein, 245 aa, Triticum aestivum
MAAWLARRAARRLASELRSRGPGPWPLSSSTVLVLGVPSGDQSRGFCSVRRFAGDSAAAAAVEEPENGLAAGDLQFVDFPGGKLSFVGEMNFLPESQRERINCYRVLDDDGGTIYSSRFQEVSKELALKMYSNMVTLQIMDTIFYEAQRQGRISFYLTSNGEEAINIASAAALSAQDIVLPQYREPGVLLWRGFTLQEFANQLFGNKLDYGKGRQMPIHYGSNRLNYSSLIAIALSPKLLRAIPR

SEQ ID NO: 16324 - protein, 402 aa, Bacillus clausii KSM-K16
MPTYTFAKQAIESAIDSQAEIFIRTSQQIHENPEIGNEEVFASSQLTELLTSAGFSVKLDVAGHKTGFFAEKGDPAGPTIAFLAEYDALPGIGHACGHNIIGTTSVAAAIALGEQLHESGGRVVVLGTPAEEGGDNGSAKGSFVREGLLAGIDAALMIHPSGETRVSGRSLAVDPVDYVFHGKPAHAAGAPEKGINALDGVIQLFNGINALRQHVTDDVRIHGIIPDGGDAANIVPDYARARFYIRANTRPKTDIIRQKIDAIAQGAALATGATLEIVEFQNKVDDLLPNDVLNEQFVSIFKELGEDVQTDERDGLGSTDTGNISQVVPTIHPYIKIGPDDLVGHTVAFREAAASPQGNQALITGAKGLALIGFQLLTEAELLAKAKQEHAERKHAAAQAVV

SEQ ID NO: 16325 - protein, 480 aa, Ashbya gossypii ATCC 10895
MSGRLLDLFKPFEAFLPEVIAPERKVPYNQKLIWTAVSLLIFLVLGQIPLYGIVSSEGSDPLQWLRAMLASNRGTLMELGVSPIITSSMIFQFLQGTQLLQVNLESKQDRELFQIAQKVCAIVLTLGQAIVVVLTGNYGSVSNLGIAISLLLILQLVFASFIVLLLDELLIKGYGLGSGISLFTATNIAEQIFWKAFAPTTVNNGRGTEFEGAVVALFHLLSVRKDKKRALVEAFYRDYLPNMFQVLSTVFVFLFVLYLQGFRYELPVRSTRTRGQVGSYPIKLFYTSNTPIMLQSALTSNIFLTSQLLYQKFPNNPIVKMLGVWGTRSDAPYSPNAAISGLSYYIQPPFSFTEALLDPIKTVVYVTFVLGACAMFSRTWIDVSGTSPRDVSKQFKEQGLVINGRRETSVYRELKKVIPTAAAFGGATIGALSVGSDLLGTLGSGTSILMATTTIYGYYETAAKEGGFAKNLVAGFSEML

SEQ ID NO: 16326 - protein, 572 aa, Streptomyces avermitilis MA-4680
MIVNEPVPDTFEDTPAKDRDPEWFKRAVFYEVLVRSFQDSNGDGVGDLKGLTAKLDYLQWLGVDCLWLPPFFKSPLRDGGYDVSDYTAVLPEFGDLADFVEFVDAAHQRGMRVIIDFVMNHTSDLHPWFQESRSNPDGPYGDYYVWADDDKQYQDARIIFVDTEASNWTFDPVRKQYYWHRFFSHQPDLNYENPAVQEEIVSALRFWLDLGIDGFRLDAVPYLYQQEGTNCENLPATHEFLKRVRKEIDTHYPDTVLLAEANQWPEDVVDYFGDFPSGGDECHMAFHFPVMPRIFMAVRRESRYPVSEILAKTPAIPSSCQWGIFLRNHDELTLEMVTDEERDYMWAEYAKDPRMRANIGIRRRLAPLLDNDRNQIELFTALLLSLPGSPILYYGDEIGMGDNIWLGDRDAVRTPMQWTPDRNAGFSSCDPGRLYLPTIMDPVYGYQVTNVEASMSSPSSLLHWTRRMIEIRKQNPAFGLGSYTELQSSNPAVLAFLREAPSTGGNGDDLVLCVHNFSRFAQPTELDLRAFSGRHPVELIGGVRFPAIGELPYLLTLAGHGFYWFRLRKDAV

SEQ ID NO: 16327 - protein, 274 aa, Listeria monocytogenes str. 1/2a F6854
MSELKLKSFEIRKDVLKMIYDAKTGHTGSDLSCADILVALYYGVLNVNPENPEALDRDRYVQSKGHAVEVLWAVLADKGFFAKEELADFSAFGSRIIGHPNNKVAGIEMNTGSLGHGLSVSVGMALAAKMDGKSYHTYTLMGDGELAEGSVWEGAMAAANYKLDNLTAIIDRNSLQISGRTEDVMSVEPLADKWRAFGWDVIEADGNNPDKLQAIFKTVNETGKPRLIIAKTIKGYGVKMAENVAKWHHYVPSSEEYEIAMKDLEERMEACRHE

SEQ ID NO: 16328 - protein, 154 aa, Triticum aestivum
  misc_feature (66)..(66): Xaa can be any naturally occurring amino acid
  misc_feature (85)..(86): Xaa can be any naturally occurring amino acid
  misc_feature (90)..(90): Xaa can be any naturally occurring amino acid
  misc_feature (92)..(93): Xaa can be any naturally occurring amino acid
  misc_feature (98)..(98): Xaa can be any naturally occurring amino acid
  unsure (1)..(154): unsure at all Xaa locations
KEWKRHLQHSLDKLRDHFCRQYVLSFIYLEGKSRLDARMYLEGNRDDLFWDSDPLPSLPFQALFGXVQQLASVAGDVPTRQRRKXXKVAXQXXTETVXSGSPNGQEFRGPFESHPTPTSLTYSPSLPNPAPPNNLLVPFQIGLPPKVPQNPPVL

SEQ ID NO: 16329 - protein, 869 aa, Leptospira interrogans serovar lai str. 56601
MNIFKIESQSSGFFAIIHLTIKKELLSKMIKSLRISCIFFILISFLTFLLNCSQFKQNNPIASNGVIDLSTWNPNIESINLKGNWEFCWDQWIPPNAEESQWKENCNGFYPAPAYWKFYNIPGKNLSPFGKATYRLKVILPTSFHDSYGIRWTEILSAFQIFINNKSVAQIGVLGTDFNTMTPKLKPDRTEIGPQNNQMTIVIWVSNFNHQNHGFWQPIYLGKWEIIRNTQVSHLMMDIASFASVALIGFYHLVLFLFRTRSKEYLFFGLFCISMGIRQLSVEDHAFIIFFPDIDFDFYIRFIYFTVLSIGIFMCMFIKSLFPEEVSSFFINSAIGVFGCSSFTLALPVRVFTEFFSIIFVLISFLPLGLTTYLFKAHKMKRKGATLILIAYLIFSTVVLNDILFTLGYISTGYISYIGITVFIFFQAGVLAQQLTQAFNHSEDLALELKSTLQENIETHNELLALKELQNTNLEFQVQSRTRELLKARDDAEFANKVKSQFLASMSHEIRTPLNGIIGLIEQFKSTPLDESQQHIRNLIQKSGENLLKIINDILDFSKLEEDKINLELHEFYWKETVEETIGIFLYQATQKGLVLSVDYSPDFIDKSVGDKRRITQVLSNLISNAVKFTDSGKIQIRAFSEKIETKIEYKIQVIDSGIGIPREKIDLLFQKFFQLDSSISRKYGGTGLGLAISKKLVELMNGKIHVSQNKSKGSTFEFTVLLSEFVSKDHSTYLPEITDLSSLSPDTFILIAEDDSTNIFLLSGILKKLKIKFELAKDGLEAITKVRVSRFDLIFMDINMPHLDGISASNFILTDPMISPKPVIIAVTADVLQEDKIKCRQAGMSDFLGKPYYKKDIEQMIYKWLVIH

SEQ ID NO: 16330 - protein, 229 aa, Triticum aestivum
MQIFVKTLTGKTITLEVESSDTIDNVKSKIQDKEGIPPDQQRLIFAGKQLEDGRTLSDYNIQKESTLHLVLRLRGGMQIFVKTLTGKTITLEVESSDTIDNVKSKIQDKEGIPPDQQRLIFAGKQLEDGRTLSDYNIQKESTLHLVLRLRGGMQIFVKTLTGKTITLEVESSDTIDNVKSKIQDKEGIPPDQQRLIFAGKQLEDGRTLSDYNIQKESTLHLVLRLRGGQ

SEQ ID NO: 16331 - protein, 361 aa, Ashbya gossypii ATCC 10895
MKGLILVGGYGTRLRPLTLTVPKPLVEFCNRPMILHQIEALAAAGVTDIVLAVNYRPEVMVETLKKYEKQYGVSITFSVETEPLGTAGPLKLAEKVLKKDNSPFFVLNSDVICEYPFKELAAFHRAHGGKGTIVATKVDEPSKYGVIVHDIATPNLIDRFVEKPVEFVGNRINAGLYILNPEVIDLIELRPTSIEKETFPILVEQKSLYSFDLEGYWMDVGQPKDFLAGTVLYLNSLSKRHPEQLAKGDNIVGNVIIDPSAKISGSAKLGPDVVIGPNVTIGEGVRITRSVVLSDSTINDHSLVKSTIVGWHSTVGKWCRLEGCSVLGDDVEVKDEVYVNGGKVLPHKSISANVPKEAIIM

SEQ ID NO: 16332 - protein, 41 aa, Gossypium herbaceum
AKSAEKLTPELTISPSKAASMFSGTQEKCATCGKTAYPLEK

SEQ ID NO: 16333 - protein, 857 aa, Thermus sp.
MSDPFEALKAEVDLLGRLLGEAIRKVSGERFFALVEEVRLLSKARRQGDGAAAEVLSQRVERMPVEEMEALVRAFTHYFHLVNLAEERHRVRVNRLRTEGETLENPRPEGFLALAKALKERGLSLEEAEAHLNRLALLLTFTAHPTETRRRTLRHHLERLQEELEGGDRERLLARVVLLYATEEVRKARPSVEDEIKGGLYYLPTTLWRAIPKVVEGLEAALERVYGKRPHLRSPVRFRSWMGGDRDGNPYVTPEVTAFAGRYAREVAKGRYLEELEALVRDLSLSEARIPVPKEVREGGEGVERFPGEPYRRYFAALYRALEGEALSTEGLARALKVAEKGLEGVGLAQVAQAFLRPLEARLSAFGLELAPLDLREESGKLLEAAAELLRLGGVHPDFLALSPEEKEALLTEELKTARPLLPVGEVPQGEALRVAIGAIRAWGDKGAHVVSMTHHPADLLAVFLLAREVGLYRPGKPLPFDVVPLFETLEDLERAPEVLRRLLANPVFRAHAQGRGGVEVMIGYSDSMKDAGFLMANLALYQAQEALHAVGEAQGIPVFFFHGRGTSTARGGGPAGRAIAGLPPKSVGHRLRLTEQGEALADRYAHPDLAVRHLEQLLYHFAQAALGDGVEPKAHWREALGEAGERSMARYRALLSQEGFFPFFEAFTPIREIGELPIASRPVYRHGRVRDIRDLRAIPWVMAWTQVRLLLPGWYGLSALEGLPMPLLREMYREWPFFATTLESAAMALAKADLGIAERYLKLVPEGLQGFYHHLAEEYRRTVALLEAIFEAPLLHNQKTLERQIALRNPYVDPINFVQVELLARYRAPGGREDEGVRRALLLSLLGVAAGLRNAG

SEQ ID NO: 16334 - protein, 308 aa, Neisseria meningitidis Z2491
MSEVKKTKVHLISGFLGTGKTTALKSLMAQKDPNEKWVIIVNEFGEIGIDGAVLSDNGIPVAEIAGGCLCCTAGPQMGVTVQKMLRDAKPDRLMIEASGLAHAASVIDELKAKPLDSLLEIGAVFTVVNPRQFINPDYAQQALYKDQIGICDVLVASKTDLCTTEQLAEFHDKAAKLFPPKAKVVEVQNAQLDIRWLDIPVIEKSRYRLKALPDNTMGFQSQGFTFPAGRDFDGEKLTNFFNDLPKMTEGLVRAKGVFQVLGTWVWLNWVDGQWGANQVSWRRDSRFELIAKSFDADLIEQKLKDALE

SEQ ID NO: 16335 - protein, 493 aa, Burkholderia vietnamiensis G4
MYLGIDLGTSEVKVLLLAPDGTVVGTAGTPFSVSRPHPRWAEQHPDDWWQGTLAALAALRAQHREAFAQVRGIGLSGQMHGAVLLGRDDRVLRPAILWNDMRSADECALLTERAPDLHTLAGNLAMPGFTAPKLLWVAKHEPDVFAATACVLMPKDYLRFRLTGAKVSDPSDAAGTLWLDVARRDWSDALLAACDMTRAQMPRIVEGNAPSGTLRADVARELGLSEAVVVAGGGGDNATSALGIGAIHAGDGFVSLGTSGVLSVVGDRFMPNPASAVHAFCHAIPDRWQLMSVVLSAASCLRWVCKLTGTDEPALLAEIEALDADALATAPLFLPYLSGERTPHNDPYAQGVFFGMTHATERAHLGYAVLEGVTLGLADGLDALHAAGVETDRLSLIGGGARSAFWAQLIADALNVRTRRHGGGETGAALGAARLGWLAVGGDPQTVLTKPPVRAEYTPDAARHALLRERLDAFRALYRHVRPLYEPSRARLA

SEQ ID NO: 16336 - protein, 231 aa, Arabidopsis thaliana
MEEEYIRVISITTIGVISWGLIFILVRRIFSSYSFDFSTRIVSTLHATIAVTLATLSIQDWSCPVCPIASTSSLRQMETLAFSLSYMIYDLICSHFDQVLSIDNAVHHSVCILGFVAGLFYQKCGSEMVAAIWITEISSPFLHLREILKEIGYRDTDLNLAADVCFATIFSLARMVGGPYLVYVTISADNPILIKAMALGLQLVSAFWFYKILKMMRYKFIKRSMSNKKST

SEQ ID NO: 16337 - protein, 218 aa, Triticum aestivum
MAAAVRVEKATSDLLLGPDWTLNIDICDGANSDHGQAKEVIKTVKKRLQHKNSSVQSLALTLLETLVKNCGDHVHFLVVERGILPEMVKLAKKKANVQVRDKILTLLDSWQEAFGGPGGKHPQFYWAYSELKQSGLEFPRRSPEAATIFAPHLQPGIGSPVNSSLRADGMISSSGSPLSLSDLQRILSAAELLSEMLREVDPNDHEAVNDEIIAGTLN

SEQ ID NO: 16338 - protein, 285 aa, Glycine max; identical to SEQ ID NO: 1057

SEQ ID NO: 16339 - protein, 541 aa, Glycine max
MRKSAADRFRHLFNRSLLLLRHRHHHNHHPFPYSSSVSSLSPFSRSRFLSSTPFSMASDSPFPVTAQNINPKVLKCEYAVRGEVVTLAQNLQKDLQANPGSHPFDEILYCNIGNPQSLGQQPITFFREVLALCDHPAILDKSETQGLFSTDAIQRAWQIVDQIPGRATGAYSHSQGVKGLRDTIAAGIEERDGFPANPDDIFMTDGASPAVHNMMQLLIRSENDGILCPIPQYPLYSASIALHGGCLVPYYLDEATGWGLEIPELKKQLEAAKSKGINVRALVVINPGNPTGQVLGEANQRDIVEFCKQEGLVLLADEVYQENVYVPEKKFHSFKKVSRSMGYGENDITLVSFQSVSKGYHGECGKRGGYMEVTGFSAEVREQIYKVASVNLCSNISGQILASLVMSPPKVGDESYDSFMAEKENILASLARRAKTLEDAFNKLEGVTCNKAEGAMYLFPQIRLSEKAIKAAEAANATPDNFYCKRLLNATGVVVVPGSGFGQVPGTWHFRCTILPPEEKIPAIVTRLTEFHEKFMDEFRD

SEQ ID NO: 16340 - protein, 155 aa, Lycopersicon esculentum
MDLRLMGIDNTPLFHTLQHMMEAAGEDSVNAPPKKYVRDAKAMAATPVDVKEYPDSYVFVVDMPGLKSGDIKVQVEEDNVLLISGERKREEEKEGVKFIRMERRVGKFMRKFSLPENANTDAISAVCQDGSLTVTVQKLPPPEPKKSKTIQVKVA

SEQ ID NO: 16341 - protein, 408 aa, Polyporus squamosus
VVVIGHVDSGKSTTTGHLIYKCGGIDKRTIEKFEKEAAELGKGSFKYAWVLDKLKAERERGITIDIALWKFETPKYTITVIDAPGHRDFIKNMITGTSQADCAILIIAAGPAQFEAGISKDGQTREHCLLAFTLGVRQLIVAVNKMDTTKWSEDRFNEICKEVSNFIKKVGYNPKAVIMVPISGWHGDNMLEPSSNMQWYNGWTKETKAGVTKGKTLIEAIDAIEPPVRPSDKPLRLPLQDVYKIGGIGTVPVGRVETGIIKAGMVVTFAPANVTTEVKSVEMHHETLEEGKPGDNVGFNVKNVSVKDIRRGNVASDSKNDPAKEAASFNAQVIILNHPGQISAGYAPVLDCHTAHIACKFAELLEKIDRRTGKKMEDNPKFVKQQDSCIAKLVPSKPMCVESYNEYP

SEQ ID NO: 16342 - protein, 377 aa, Oryza sativa
VGSRFAFVFVWSPAEAMERAAAGPLGMEMPIMHDGDRYELVKEIGSGNFGVARLMRNRASGDLVAVKYIDRGEKIDENVQREIINHRSLRHPNIIRFKEVILTPTHLAIVMEYASGGELFERICSAGRFSEDEARFFFQQLISGVSYCHSMQVCHRDLKLENTLLDGSTAPRLKICDFGYSKSSVLHSQPKSTVGTPAYIAPEVLLKKEYDGKIADVWSCGVTLYVMLVGAYPFEDPEDPKNFRKTIQKILGVQYSIPDYVHISPECRDLITRIFVGNPASRITMPEIKNHPWFMKNIPADLMDDGMVSNQYEEPDQPMQNMNEIMQILAEATIPAAGTSGINQFLTDSLDLDDDMEDMDSDLDLDIESSGEIVYAM

SEQ ID NO: 16343 - protein, 386 aa, Trametes versicolor
DSGKSTTTGHLIYKCGGIDKRTIEKFEKEAAELGKGSFKYAWVLDKLKAERERGITIDIALWKFETPKYMVTVIDAPGHRDFIKNMITGTSQADCAILIIAAGTGEFEAGISKDGQTREHALLAFTLGVRQLIVAVNKMDTTKWSEDRFNEIIKETSTFIKKVGYNPKAVAFVPISGWHGDNMLEESANMTWYKGWTKETKAGVVKGKTLLDAIDAIEPPVRPSDKPLRLPLQDVYKIGGIGTVPVGRVETGVIKAGMVVTFAPSNVTTEVKSVEMHHEQLESGNPGDNVGFNVKNVSVKDIRRGNVASDSKNDPAKEAASFNAQVIILNHPGQIGAGYAPVLDCHTAHIACKFAELIEKIDRRTGKSIEAAPKFVKSGDACIAKL

SEQ ID NO: 16344 - protein, 548 aa, Mycobacterium marinum
IRRNHFAMAKTIAYDEEARRGLERGLNALADAVKVTLGPKGRNVVLEKKWGAPTITNDGVSIAKEIELEDPYEKIGAELVKEVAKKTDDVAGDGTTTATVLAQALVKEGLRNVAAGANPLGLKRGIEKAVEKVTEILLKSAKEVETKEQIAATAAISAGDQSIGDLIAEAMDKVGNEGVITVEESNTFGLQLELTEGMRFDKGYISGYFVTDAERQEAVLEDPYILLVSSKVSTVKDLLPLLEKVIQGGKPLLIIAEDVEGEALSTLVVNKIRGTFKSVAVKAPGFGDRRKAMLQDMAILTGGQVISEEVGLSLETADISLLGKARKVVITKDETTLVEGAGDSDAIAGRVAQIRAEIENSDSDYDREKLQERLAKLAGGVAVIKAGAATEVELKERKHRIEDAVRNAKAAVEEGIVAGGGVALLHAVPSLDELKLSGDEATGANIVRVALEAPLKQIAFNGGLEPGVVAEKVRNSPAGTGLNAATGVYEDLLKAGVADPVKVTRSALQNAASIAGLFLTTEAVVADKPEKAAAPAGDPTGGMGGMDF

SEQ ID NO: 16345 - protein, 244 aa, Brassica napus
  misc_feature (217)..(217): Xaa can be any naturally occurring amino acid
  misc_feature (227)..(228): Xaa can be any naturally occurring amino acid
  misc_feature (236)..(236): Xaa can be any naturally occurring amino acid
  unsure (1)..(244): unsure at all Xaa locations
MAAAACGQLNLEEPTPIRGSRSVDCFEKLEQIGEGTYGQVYMAKDIKTGEIVALKKIRMDNEREGFPITAIREIKILKKLHHENVIHLKEIVTSPGRDRDDQGKPDNNKYKGGIYMVFEYMDHDLTGLADRPGLRFTVPQIKCYMKQLLTGLHYCHVNQVLHRDIKGSNLLIDNEGNLKLADFGLARSYSHDHSGNLTNRVITLWYRPPELLSGATXYGPAIDMWSXXCIFAELLXGKPICLAN

SEQ ID NO: 16346 - protein, 549 aa, Mycobacterium sp. 'graecum DL049'
IRRNHFAMAKTIAYDEEARRGLERGLNSLADAVKVTLGPKGRNVVLEKKWGAPTITNDGVSIAKEIELEDPYEKIGAELVKEVAKKTDDVAGDGTTTATVLAQALVREGLRNVAAGANPMALKRGIEKAVEKVTETLLKSAKEVETKDQISATAAISAGDSQIGELIAEAMDKVGNEGVITVEESNTFGLQLELTEGMRFDKGYISGYFVTDAERQEAVLEEPYILLVSSKVSTVKDLLPLLEKVIQSGKPLLIIAEDVEGEALSTLVVNKIRGTFKSVAVKAPGFGDRRKAMLQDMAILTGGQVVSEEVGLSLETADVSLLGKARKVVVTKDETTIVEGAGDSDAIAGRVSQIRAEIENSDSDYDREKLQERLAKLAGGVAVIKAGAATEVELKERKHRIEDAVRNAKAAVEEGIIPGGGVALLQASKAAEIEGLEGDELTGAQIVLAACTAPLKQIAINAGLEGGVVAEKVAGLPAGQGLNAANDEYVDMVEAGIIDPAKVTRSALQNAASIAALFLTTEAVIADKPEPVKAPAGGGDMDGMGGMDF

SEQ ID NO: 16347 - protein, 263 aa, Triticum aestivum
MDGAGAGGAYVARTAEEVFRDLRGRRAGMIKALTEDVDKFFKLCDPEKENLCLYGYPNETWEVTLPAEEVPPEIPEPALGINFARDGMNEKDWLALVAVHSDSWLLSVAFYFGARFGFDKENRRRLFNMINNLPTIYEVVTGIAKKQSKEKTPNSSSKSSKPSMKVLSRVEPRAKAKVPAPKDEEESGEDEGDDEEEEHDNTLCGTCGTNDGKDEFWICCDNCEKWYHGKCVKITPARAEHIKHYRCPECTNGGSNSNKRVKT

SEQ ID NO: 16348 - protein, 539 aa, Zea mays
MACLAPQFKWAPSAAAHMPSSSSSSSYSRCSALRVHCAVTSAAVVEDRTNGSAAQLRLAYAAPAIQRNFEATLASEALLNEEAVVAAAAAEAVALARAAAEAAQDVVQIVQRNNHQPVIRPKKCVDNYLANEILRTEMRSSSPDMYANNPLMEYLDSYGIMDAEDELDAYAQYTENIAVKSARQSERKARRTRAAIKASTTLHASQKVALSSKKKRSKGSSSSMNPLGSLWKMTGRRLLTAKEEVEFSEGIQDLLKLEAIQAELIEYNGGQPTFSQWATAAGVDEKTLRKRLNYGIYCKNRMVTSNVRLVISIAREFEGPGMDFYDLIQEGMQGLIRGAEKFDSSKGFRFSTYSHWWIKQAMRKSVSEQSQIFRLPAHMVEASYRVKECTKRLRRKLRRRPTNEEIAVDTGIPIKRVEAAVNLPKYSVSLDSKIGSTDMTYQEVTADPSAETAEEMLNRMSMKKDVHMALDTLTTREKQVVVLRFGLEDGRIRTLQEIGNIMGVSRERIRQIESGAFRKLRSKKKVKALKDYLVPVGNW

SEQ ID NO: 16349 - protein, 491 aa, Escherichia coli
MKKTTLALSRLALSLGLALSPLSATAAETSSATTAQQMPSLAPMLEKVMPSVVSINVEGSTTVNTPRMPRNFQQFFGDDSPFCQEGSPFQSSPFCQGGQGGNGGGQQQKFMALGSGVIIDADKGYVVTNNHVVDNATVIKVQLSDGRKFDAKMVGKDPRSDIALIQIQNPKNLTAIKMADSDALRVGDYTVGIGNPFGLGETVTSGIVSALGRSGLNAENYENFIQTDAAINRGNSGGALVNLNGELIGINTAILAPDGGNIGIGFAIPSNMVKNLTSQMVEYGQVKRGELGIMGTELNSELAKAMKVDAQRGAFVSQVLPNSSAAKAGIKAGDVITSLNGKPISSFAALRAQVGTMPVGSKLTLGLLRDGKQVNVNLELQQSSQNQVDSSSIFNGIEGAEMSNKGKDQGVVVNNVKTGTPAAQIGLKKGDVIIGANQQAVKNIAELRKVLDSKPSVLALNIQRGDRHLPVNAVISLNPFLKTGRGSPYNL

SEQ ID NO: 16350 - protein, 527 aa, Zea mays
MAFLAPPQFKWPLSTRAAAVFREPTGGAGSRPSRINCSFSSTAVVDAECLSVGPPPSPHRTLPGCFGEALLNKEAVVAAAAGKPSLWLAQAEVAGEVARMAQNDHPAALPPRDDTVDSFLSREVLRSEVGLDARRAGLVEMLEGEEHSSIFSDESEDDDDGGHSIAVTVKSARRSERRARRVRAAMKTAKCSSSMKPVGASSTRRKRLKGCLTPLGCLYKMTGPRLLTAEQEVEFSEGIQDLLKLEAIQKEVAQYNAGEPTFSQWAAAAGTDENTLRRRLNHGVYCKNRMVKSNVRLVISIAKEHEGPGMEFSDLIQDGMQGLIRGAEKFDASKGFRFSTYSHWWIKQAIRKSVLEQTQIIRLPAHMAEASSRVKECCRRLGRELKRLPSNEEIAVDTGMTIRRVEAAMSLPKYSVSFTSKVGCTDVTYQEIMPDTSAETAEETLHRWLMKKDVNTALDSLSPRKKQVMRYRFGIEGGRARTLHDIGQLMGVSRERIRQIELGAFRKLRSKNRLQSLQHYLRPAESW

SEQ ID NO: 16351 - protein, 94 aa, Clostridium thermocellum ATCC 27405
MNIRPLGDRVVVKMVETEETTKSGIVLPGSAKEKPQVAEVVAVGPGTVVDGKEVKMEVKVGDKVIISKYAGTEVKFDGQEYTILRQNDILAVVE

SEQ ID NO: 16352 - protein, 371 aa, Synechococcus elongatus PCC 7942
MRHFDASQPLRVAVLGTGFGSKVHIPALQHHSETTVQAVYHRQPDRAAAIAVQFGIPNAYSDLDQLLADPAIEAVTIASPPFLHYPMAWAALSAGKSVLLEKPTTLNVEEARALWKLASSQGLTVTLDFEYRFVPAWQYVAELLAEGVIGQPWLVKLDWLMSSRADASRPWNWYALRSQGGGALGALGSHSFDYLAWLFGPARRLQARLFTAIQERPDATTGELKPVDSDDTDLIQLELAEGVPCQISLSSVCRQGRGHWLEVYGDRGTLILGSSNQKDYVHGFQVWFASAGQALQELTVPQRLAFRQEFADGRLAPFLRVVDHWLADLRHGQMTAPSLKEGLYSQLLIDLCWQSQRSGEWQTVPELNRFL

SEQ ID NO: 16353 - protein, 541 aa, Clostridium thermocellum ATCC 27405
MAKQIKFGEEARRALERGVNQLADTVKVTLGPKGRNVVLDKKFGSPMITNDGVTIAKEIELEDPFENMGAQLVKEVATKTNDVAGDGTTTATLLAQAIIREGLKNVAAGANPMLLKKGIAKAVDAAVEGIKEISQKVKGKEDIARVASISANDEVIGELIADAMEKVTNDGVITVEEAKTMGTNLEIVEGMQFDRGYVSPYMVTDTEKMEAVLDEPYILITDKKISNIQDILPLLEQIVQQGKKLVIIAEDVEGEALATLLVNKLRGTFTCVAVKAPGFGDRRKAMLEDIAILTGGQVITSDLGLELKDTTVEQLGRARQVKVQKENTIIVDGAGDPKEIQKRIASIKSQIEETTSDFDREKLQERLAKLAGGVAVIQVGAATETEMKEKKLRIEDALAATKAAVEEGIVAGGGTALVNVIPKVAKVLDTVSGDEKTGVQIILRALEEPVRQIAENAGLEGSVIVEKVKASEPGIGFDAYNEKYVNMIEAGIVDPAKVTRSALQNAASVASMVLTTESVVADIPEKETSGGPGGAGMGGMY

SEQ ID NO: 16354 - protein, 465 aa, Medicago sativa
MASSSLLSSVPSHSASLSILDTNIKGKLKLGTNGLRFNNEGINNFSNLRSSGRICMAVATNVSRFEGIPMAPPDPILGVSEAFKADTSDVKLNLGVGAYRTEELQPYVLNVVKKAENLMLERGENKEYLPIEGLAAFNKATAELLLGADNPAIKQQRVATVQGLSGTGSLRLGAALIERYFPGAKVLISNPTWGNHRNIFNDARVPWSEYRYYDPKTVGLDFEGMIEDIKSAPEGTFVLLHGCAHNPTGIDPTPEQWEKIADVIQQKNHFPFFDVAYQGFASGSLDEDAASVRLFVSRGMEVLVAQSYSKNLGLYAERVGAINVISSSPESATRVKSQLKRLARPMYSNPPVHGARIVANIVGTPALFDEWKAEMEMMAGRIKTVRQALYDSISSKDKSGKDWSFILKQIGMFSFTGLNKSQSDNMTNKWHIYMTKDGRISLAGLSLAKCEYLADAIIDSYHNVS

SEQ ID NO: 16355 - protein, 341 aa, Thermosynechococcus elongatus BP-1
MSLFFRPAEWLPHRACWLAFPSHEDLWGELLPQVRFEFAALCRAIADPDPVTGQCRGEQLKILVLDETGKATAHSYLSDLNPQFYQLTFGDIWLRDTAPVGLINEAGERRLLCLPFNGWGKKYQLAGDSDLAIRLALLMGIPYGSVPLFLEGGAIEVDGEGTCLTTRQCLLNPNRNPYLSSAEVEARLKPALGVSKILWIESGLVNDHTDGHIDTLVRFVAPATVVCMLAESPEDPNCDVLRTIYEQLQTLTDAKGRSLEVIPVPSPGRVTSQKGEILPASYVNFYIANTTVVVPTYGVEADAKAVEAIAKLFPSRRTIGLPARTILEGGGAFHCITQQEL

SEQ ID NO: 16356 - protein, 534 aa, Brassica napus
MKSEAPPLDSRTTTMATMAAIGSLKVPSSSSNHTRRLSSSSQRKTLSFSSSSLTGEKLNPTQEIIISNLPRGNERRTPSIVSPKAVSDSQNSQTCLDPDASRSVLGIILGGGAGTRLYPLTKKRAKPAVPLGANYRLIDIPVSNCLNSNISKIYVLTQFNSASLNRHLSRAYASNMGGYKNEGFVEVLAAQQSPENPNWFQGTADAVRQYLWLFEEHNVLEFLVLAGDHLYRMDYEKFIQAHRETDADITVAALPMDEKRATAFGLMKIDDEGRIIEFAEKPKGEQLKAMKVDTTILGLDDERAKEMPFIASMGIYVVSKNVMLDLLRDQFPGANDFGSEVIPGATDLGLRVQAYLYDGYWEDIGTIEAFYNANLGITKKPVPDFSFYDRSAPIYTQPRYLPPSKMLDADVTDSVIGEGCVIKNCKIHHSVIGLRSCISEGAIIEDTLLMGADYYETDADRTLLAAKGSIPIGIGRDSHIKRAIIDKNARIGDNVKIINTDNVQEAARETDGYFIKSGIVTVIKDALIPSGTVI

SEQ ID NO: 16357 - protein, 41 aa, Gossypium barbadense
ARSAEKLTPELTRSPSKAASMFSGTQEKCATCGKTAYPLEK

SEQ ID NO: 16358 - protein, 41 aa, Gossypioides kirkii
AKSAEKLTPELTRSPSKAASMFSGTQEKCATCGKTAYPLEK

SEQ ID NO: 16359 - protein, 346 aa, Triticum aestivum
  misc_feature (265)..(265): Xaa can be any naturally occurring amino acid
  misc_feature (297)..(297): Xaa can be any naturally occurring amino acid
  unsure (1)..(346): unsure at all Xaa locations
MATLSVPAAVPAVAEDCEQLRKAFAGWGTNERLIVSILAHRDAAQRRAIRRAYAEAYGEELLRAIGDEIHGKFERAVAQWTLDPAERDAELAGEEAKKWQPGGRALVEIACARTPAQLFAARQAYHDRFKRSLEEDVAAHVTGEFRKLLVPLVSAYRYDGPEVNTSLAHSEAKILNGKINEKAYSDDEIIRILTTRSKAQLLATFNSYNDQFSHPITKDLKEDPKNEFLSTLRAIIRCFTCPDRYFEKIIRLALGGVGTDENTLXTRVITTRAEVDLKVIKEAYQKRNSVPLEQGCXLKETSRDYEGHDAWHFLGGSTEGWPDLPYALMMGGIRVHKTVKCVVFHG

SEQ ID NO: 16360 - protein, 342 aa, Agrobacterium tumefaciens str. C58
MLSHVDGQAGELVVRGHHLAELADWSFEQVLELLWSGQTATKITAEDIRSQLGKARLRAFELMQLLFPGLAALTSVEALRLLLSWLPDDETTPHHLVAVAAVPVFATAIIRNRQGFAPIAPDASLTHSADFLRMLSGTLPSTEKVRALDTYLTTVADHGLNASTFTARVIASTGAGLFSSVVGALCALKGPLHGGAPGPVLDMLDAIGAEAEIEPWLLDALGRGERLMGFGHRIYRVRDPRADVLKHAVSTLKEGSDRIAFAGKVEEAALALLKEKKPLRPLQTNVEFYTALVLEAVGFPRDSFTNVFAAGRMAGWTAHVLEQERTGRLIRPQSHYIGPHPR

SEQ ID NO: 16361 - protein, 371 aa, Oryza sativa
QKIGKTTSPPKDQPTPCPFPDWSAVQAYYGPGVLPPTYFAPAIASGHAPPPYMWGPQPIMPPPFGTPYAAMYPHGGAYPHPLMPMMANPLSMEPAKSASSKEKGSNKKLKEVDGAAVSTGSGDSKKTMTSSGDYSAEGSSDVNDLKVGKTGRKRRLDDGAGAETSAAAKMENALPPSHILGSTAILPNHSFPAQVIRPSATNVANSRALGTPISPPPGVIVPSHTGVSTELLIKDERELKREKRKQSNRESARRSRLRKQAETEDLATQVESLTAENTSLRSEISRLSESSEKLRLENSALMGKLKDPAASTQAETSLQKTTTASSPRVVENFLSMIDYTNKTSVRHTEHAEPKLRQLLGSGPATDVVAAS

SEQ ID NO: 16362 - protein, 198 aa, Gossypium raimondii
IAPEVLLKKGYGMECDWWSLGAIMYEMLVGYPPFYSDDPVTTCRKIVHWRNHLKFPEEARLTPEAKDLICKLLCDVDHRLGTQGADQIKAHPWFKDTRWDKLYEMEAAFKPHVEGEFDTQNFMKFDEVDCPRTGSGPLKKTFLAPKDLNFVGYTYKNFEAVKGLRHSFADVKEFGPVRQASTDSFHSDSGVDYSNSDK

SEQ ID NO: 16363 - protein, 169 aa, Lactuca sativa
DEIDFEFLGNSTGNPYTIHTNVYSQGKGNKEQQFHLWFDPTAAFHTYTIVWNSLRIIFLIDNIPVRVFNNNDAAGVPFPKSQPMRVYASLWNADDWATQGGRVKTDWTNAPFTALYRKFNANAKKVGPNSVSTSSINDNQSWSTQGLDAAGRNRIRWVQTKHMIYNYCT

SEQ ID NO: 16364 - protein, 287 aa, Wolbachia endosymbiont of Drosophila ananassae
MGAVRADQGQLEQVILNLAVNASAAMEKGGELTIRTFNQKIDSLNSTPQDMFSPDKEAIEHGNYVVIEVIDTGCGMTSDTTEKIFDPFFSTKDITSGTGLGLSTVYGIIKQTEGYIYVASKVNHGTKFSIFLPMVYISDENDREEDSEETERPVVSEIKGNGIILLIEDEDSVREFISKALKRKGFDVIEASIGSEALEIISKKSQHIDLIITDVIMPEVSGPEIVKEALIHRPNINVIFISGYAEDAFLKSDDINIEDFHFLPKPFTLNELGNKVQSVLHKAKKTV

SEQ ID NO: 16365 - protein, 198 aa, Gossypium barbadense
IAPEVLLKKGYGMECDWWSLGAIMYEMLVGYPPFYSDDPVTTCRKIVHWRNHLKFPEEARLTPEAKDLICKLLCDVDHRLGTQGADQIKAHPWFKGTRWDKLYEMEAAFKPHIEGEFDTQNFMKFDEVDCPRTGSGPLKKTFLAPKDLNFVGYTYKNFEAVKGLRHSFSDVKEFGPVRQASTDSFHSDSGVDYSNSDK

SEQ ID NO: 16366 - protein, 215 aa, Triticum aestivum
  misc_feature (95)..(95): Xaa can be any naturally occurring amino acid
  unsure (1)..(215): unsure at all Xaa locations
TFYNRKKKGGAPQDAGAPSSAAVANIESPEPEAHWHGHGTALAKPDDAEAGQMQLRRNRVVVQVLEMGIVVHSVVIGLGMGASQSVCTIRPLVAXAMCFHQMFEGMGLGGCILQAEYGTKMKAGLVFFFSTTTPFGIALGLALTKVYQDNSPTALIVVGLLNAASAGLLHYMALVELLAADFMGPKLQGSVRLQLICLTAVLLGAGGMSVMAKWA

SEQ ID NO: 16367 - protein, 99 aa, Triticum aestivum
VESHACHPDTLVTNKQSSMEAPRKLVSAALLLVLLLAATGEMGGPVAVAEARKCESLSHRFAGLCLRGHNCANVCRTEGFPGGKCRGASRRCFCTTHCR

SEQ ID NO: 16368 - protein, 375 aa, Kineococcus radiotolerans SRS30216
METPTAPARDGASPAGGLDPLAAAAARPGVALVAGSAGVIGAHAAAEYAAIPGWKVRGAARRDQPGVDWEALAVDLSQARGAREGLAAARDTTHLVFGAYVERGGEQQQIDDNLALLRNTLDALGDAPLQHVTLYQGGKAYGAHLKGFKTPARERDPRLLVPNFYYAQEDLLREEAARRGFRVTLLRPEGVVGFATGNPMNILTVVAVHAAISRELGLPLRFPGSRAAGEALYQVTDAELLARATVWAGSEPAAAGEVFNVTNGDQFRWVHAYAAIAEHLGMEHDEPQDFPLSSIMPMHEGTWQRAVQRHGLLPTPYADLVRWQFGDFLFHSEFDNVTSTVKVRRAGFGECHDSIDRFLELLDVLAERKVVPPRS

SEQ ID NO: 16369 - protein, 405 aa, Daucus carota
MSSVFANVVRAPEDPILGVTVAYHKDQSPNKLNLGVGAYRTEEGKPLVLNVVKKAEQMLVNDQSRVKEYLPIVGLADFNKLSAKLIFGADSPAIQENRVATVQCLSGTGSLRVGGEFLARHYHEHTVYIPQPTWGNHPKIFTLAGLSVKTYRYYNPETRGLDFEGMLEDLGSAPLGAIVLLHACAHNPTGVDPTIEQWEQIRQLMRSKSLLPFFDSAYQGFASGSLDADAQSVRIFVADGGECLAAQSYAKNMGLYGERVGALSIVCKTADVASKVESQLKLVIRPMYSSPPLHGASIVAAILKDGDLYNEWTLELKAMADRIISMRQELFNALQAKGTPGDWSHIVKQIGMFTFTGLNSEQVTFMTNEYHIYLTSDGRISMAGLSSRTVPHLADAIHAAVTGKA

SEQ ID NO: 16370 - protein, 352 aa, Oryza sativa
MAAAGWPLSSSVADLLPASLSLTLLLASLVVVVVLAAAAFFFEHIRKIGCTHSLERTEVSAAFFEDPNSLNKVRCPSIYDPAEKYISLIIPAYNEEHRLPEALTETLNYLKQRSAVEKSFTYEVLIVDDGSTDHTSKVAFEFVRKHKIDNVRVLLLGRNHGKGEAVRKGMLHSRGELLLMLDADGATKVTDLEKLEAQVRALAKKAESSLAPSSSPSQRLSDAEIAVFGSRAHLEKQALATRKWYRNFLMKGFHLVVLLTAGPGIRDTQCGFKMFTRAAARKLFTNIRLKRWCFDVELVYLCKHLRIPMAEVSVNWTEIPGSKVRMTSILHMVFELLLIKVGYGLSIWKIYS

SEQ ID NO: 16371 - protein, 347 aa, Glycine max
MLEFNAFHFHLTHIIFSLIFNLSKAQSSMEPVPAYITHHSWEPSVAITVAAIIFALLLMAIISVYLRRCAQSHIIITTTTLPCSCSQGINKDLLNTFPTLFYSNIKDLNKANQTLECAVCLTDFTHKDSLRLLPKCNHVFHPHCIDSWLTSHVTCPVCRANLSQESSCHVSITVPPHGEEGSLGNMTTTTTTTEATQVEQRPSNDINQDCVGDPTSTSDTTKIIYISEEQHSSSELACEVELGSKTNVRNSTITNIGDGVVASERNLSRSNSTGHSLVEEQGKGVERYTLRLPEDVRRYILVNHGRSVQRSASVKGGCWSDSEESYVGKRVEKRWVICTPPFVAQHD

SEQ ID NO: 16372 - protein, 95 aa, Amphicarpaea bracteata
AARKSAPTTGGVKKPHRYRPGTVALREIRKYQKSTELLIRKLPFQRLVREIAQDFKTDLRFQSHAVLALQEAAEAYLVGLFEDTNLCAIHAKRVT

SEQ ID NO: 16373 - protein, 343 aa, Glycine max
NKQREENPGTQPRTKTKQLKMEHDEDEEPPLAVQIQGNDESVSQQSSSVGVTLITGYLGSGKSTLVNHILNSQHGKRIAVILNEFGEEIGVERAMINEGDKGALVEEWVELANGCICCTVKHSLVQALEQLVQRKERLDHILLETTGLANPAPLASVLWLDEQLESEVKLDSIVTVVDAKNLRFQLDEHRGSSSFPEAYFQIAFADIIILNKVDLVSVESSGALEELEVEIHNINSLAEIIHSVRCQVDLSKILNRQAYDTARATQLEALLEESRSLSTKKLHDSDVRTICICETRMINLDKTRIWLEEILWEKKYDMDVYRCKGVLSVQNSDQLHTLQVNYT

SEQ ID NO: 16374 - protein, 548 aa, Mycobacterium sp. 185-409
IRRNHFAMAKTIAYDEEARRGLERGLNALADAVKVTLGPKGRNVVLEKKWGAPTITNDGVSIAKEIELEDPYEKIGAELVKEVAKKTDDVAGDGTTTATVLAQALVKEGLRNVAAGANPLGLKRGIEKAVEAVTSSLLDSAKEIDTKEQIAATAGISAGDQSIGDLIAEAMDKVGNEGVITVEESNTFGLQLELTEGMRFDKGYISGYFVTDAERQEAVLEDPYILLVSSKVSTVKDLLPLLEKVIQGGKPLLIIAEDFEGEALSTLVVNKIPGTFKSVAVKAPGFGDRRKAMLQDMAILTGGQVVSEEVGLSLETADISLLGQARKVVVTKDETTIVEGAGDSDAIAGRVAQIRSEIENSDSDYDREKLQERLAKLAGGVAVIKAGAATEVELKERKHRIEDAVRNAKAAVEEGIVAGGGVALLQAAPALDSLSLEGDEATGANIVRVALSAPLKQIAFNGGLEPGVVAEKVANLPAGHGLNAATNVYEDLLAAGVADPVKVTRSALQNAASIAALFLTTEAVVADKPEKAAAPAGDPTGGMGGMDF

SEQ ID NO: 16375 - protein, 476 aa, Enterobacter sakazakii
MDTFIHPTNLCFFTQPLSPGKLSKPPHWRRIPRLAAHPVYPWCSPDRLSHWNLSLFTDCQEVVMKALTYHGPHNVKVENVPDPIIEAQDDIILRVTATAICGSDLHLYRGKIPQVHHGDIFGHEFMGEVVETGSAVKDIRKGDRVVIPFVIACGDCFFCKLQQYSACENTNKGTGAALNKKQIPAPAALFGYSHLYGGIPGGQAEYVRVPKGNVGPFKVPPVLSDDKALFLSDILPTAWQAVKNGQVQKGSQVAIYGAGPVGLLSAACARLLGAEQIFMVDHNDYRLAFAKERYGVIPINFDENDDPAAFIIENTPGNRGVDAVIDAVGFEAKGSLTETVLSNLKIEGSSGKALRQCIAAVRRGGVVSVPGVYAGFIHGFLFGDAFDKGISFKMGQTHVHAFLPELLPLIEQGLLTPEEIVTHYLPLEDAARGYKIFEKREEECRKVILVPGAATPEAAREKVTALMNAPLQPLQP

SEQ ID NO: 16376 - protein, 548 aa, Mycobacterium marinum
IRRNHFAMAKTIAYDEEARRGLERGLNALADAVKVTLGPKGRNVVLEKKWGAPTITNDGVSIAKEIELEDPYEKIGAELVKEVAKKTDDVAGDGTTTATVLAQALVKEGLRNVAAGANPLGLKRGIEKAVEKVTETLLKSAKEVETKEQIAATAAISAGDQSIGDLIAEAMDKVGNEGVITVEESNTFGLQLELTEGMRFDKGYISGYFVTDAERQEAVLEDPYILLVSSKVSTVKDLLPLLEKVIQGGKPLLIIAEDVEGEALSTLVVNKIRGTFKSVAVKAPGFGDRRKAMLQDMAILTGGQVISEEVGLSLETADISLLGKARKVVITKDETTIVEGAGDSDAIAGRVAQIRAEIENSDSDYDREKLQERLAKLAGGVAVIKAGAATEVELKERKHRIEDAVRNAKAAVEEGIVAGGGVALLHAVPSLDELKLSGDEATGANIVRVALEAPLKQIAFNGGLEPGVVAEKVRNSPAGTGLNAATGVYEDLLKAGVADPVKVTRSALQNAASIAGLFLTTEAVVADKPEKAAAPAGDPTGGMGGMDF

SEQ ID NO: 16377 - protein, 526 aa, Aspergillus oryzae
MAASSSLDHLSNRMKLEWHSKLNTEMVPAKNFRRTSIIGTIGPKTNSVEKINALRRSGLNVVRMNFSHGSYEYHQSVIDNAREAARVQTGRPLAIALDTKGPEIRTGNTTDDKDIPIKEGHELNITTDEKYANASDDQNMYLDYKNITNVIAPGKLIYVDDGILSFQVLEVVDDKTLRVKCLNNGNISSRKGVNLPGTDVDLPALSEKDISDLKFGVKNGVDMIFASFIRRGSDIRHIRDVLGEEGKEIQIIAKIENQQGVNNFDEILEETDGVMVARGDLGIEIPAPKVFIAQKMMIAKCNIKGKPVICATQMLESMTYNPRPTRAEVSDVANAVLDGADCVMLSGETAKGSYPCEAVKMMSETCLLAEVAIPHFNVFDELRNLAPRPTDTVESIAMAAVSASLELNAGAIVVLTTSGNTARLLSKYRPVCPILMVTRNPRASRYSHLYRGVWPFLFPENKPDFNVKIWQEDVDRRLKWAISHGIKLGIINKGDNIVCVQGWRGGQGHTNTVRVVPAEENLGLIE

SEQ ID NO: 16378 - protein, 548 aa, Mycobacterium ulcerans
IRRNHFAMAKTIAYDEEARRGLERGLNALADAVKVTLGPKGRNVVLEKKWGAPTITNDGVSIAKEIELEDPYEKIGAELVKEVAKKTDDVAGDGTTTATVLAQALVKEGLRNVAAGANPLGLKRGIEKAVEKVTETLLKSAKEVETKEQIAATAAISAGDQSIGDLIAEAMDKVGNEGVITVEESNTFGLQLELTEGMRFDKGYISGYFVTDAERQEAVLEDPYILLVSSKVSTVKDLLPLLEKVIQGGKPLLIIAEDVEGEALSTLVVNKIRGTFKSVAVKAPGFGDRRKAMLQDMAILTGGQVISEEVGLSLETADISLLGKARKVVITKDETTLVEGAGDSDAIAGRVAQIRAEIENSDSDYDREKLQERLAKLAGGVAVIKAGAATEVELKERKHRIEDAVRNAKAAVEEGIVAGGGVALLHAVPSLDELKLSGDEATGANIVRVALEAPLKQIAFNGGLEPGVVAEKVRNSPVGTGLNAATGVYEDLLKAGVADPVKVTRSALQNAASIAGLFLTTEAVVADKPEKAAAPAGDPTGGMGGMDF

SEQ ID NO: 16379 - protein, 153 aa, Oryza sativa
MAPKAEKKPAAKKPAEEEPAAEKAEKALAGKKPKAEKRLPAGKAEKSSGEGKKAGRKKAKKSVETYKIYIFKVLKQVHPDIGISSKAMSIMNSFINDIFEKLAGESAKLARYNKKPTITSREIQTSVRLVLPGELAKHAVSEGTKAVTKFTSA

SEQ ID NO: 16380 - protein, 438 aa, Anabaena variabilis ATCC 29413
MTNNMTTLQVASSLNDIAQQTRQAASLLAMLSTEAKNQAIAAVAQALESAKEEILQANIADCEAATAEGIAKPLYKRLQLDEHKLRDAIAGVRDVGKLADPIGQVQIQRELDTGLVLKRITCPLGVLGIIFEARPEAAIQIISLAIKSGNGVILKCGKEAVRSCEAIVKAVKQGLSTTDVNPDVVQLLTTREETLELLRLDKYVDLIIPRGSNSFVRFVQENTRIPVLGHADGICHVYIDKSADIEKAIAVSVDAKVQYPAACNAIETLLVHHSIAAEFLPKVAQALAERQVELKGDERTLQILPEIAAATAIDWETEYSDFILSIKIVDSLTEAIAHINQYGSRHTDAIITEDVAAVETFFGLVNSAGVFHNCSTRFADGFRYGFGAEVGISTQQMPPRGPVGLEGLVTYKYQMTGTGHIVATYTGENAKPFTHQDF

SEQ ID NO: 16381 - protein, 145 aa, Ananas comosus
MSGLVKLGLWGGNEGTLQDIDGHPTRLTKIVIRSAHAIDALQFDYVEDGKTFAAGQWGGNGGKSDTIEFQPGEYLIAIKGTTGALGAVTNLVRSLTFISNMRTYGPFGLEHGTPFSVPVASGRIVAFYGRFGSLVDAFGIYLMPY

SEQ ID NO: 16382 - protein, 490 aa, Ashbya gossypii ATCC 10895
MAGFRLVDTIKPILAIIPEVELPYEKVTFDDKVVYTLIASLIYLFGQFPLAGVSAEAGAVKDPLFFLRGVFAAEPRTLMEFGLFPPIATALILQLLAGLRVIRVNFKQRQDRELFQSLIKVLSVVQYAILANVFIFSGYYGDNLPLSAIVFLNMQLIGAGLFTTLLVEVIDKGFGFGSGCMSIVTVATATNLVTDTLGLNQKVINGAEGITEPHGALVNLITGLWAQHKTFLGSIVNAFQRDYLPNLTTVVIVFALAILVCYLQNYRVELPVRSTKARGMNNMYPIRLMYTAGLSILFSYTLLFYIHVAAFAIIQLVGKNDPSSSITKLLGGYTISGSLHYTPNFPLSLLAPPRSLLEGFTRQPLTIVVFPLFLAMTGTWFAKRWQDISGSSARDLGNQFKEQGITLVGRREQSVSKELDKVIPVATATGATILAIVVSVGEFLGLKGAAASIVVGVLSAFSLLEIISMDFQQCGGQSTLAQVFAGSGSF

SEQ ID NO: 16383 - protein, 567 aa, Oryza sativa
MDDPSSTSKGKRKRGRKHKAAAENHAPASPVASTAADNPAPAAAGRRGRKSRRHEAPADADGSRPPSPPRRGEAKPVANGGGDAVVEAGGPVGWDEVARVVPSMDAVVKVFCVHTEPNFSLPWQRKRQYSSSSSGFIIGGRRVLTNAHSVEHYTQVKLKKRGSDTKYLATVLAIGTECDIALLTVDDDEFWEGVLPVEFGSLPALQDAVTVVGYPIGGDTISVTSGVVSRIEILSYVHGSTELLGLQIDAAINSGNSGGPAFNDRGKCVGIAFQSLKHEDAENIGYVIPTPVIMHFIQDYEKSGEYTGFPILGIEWQKMENPDLRKAMGMKPDQKGVRVRRVEPTAPESGCLQPSDIILSFDGIDIANDGTVPFRHGERIGFSYLVSQKYTGEKALVKVLRNSKVHEFHVELATHKRLVAAHVKGRPPSYYIVAGFVFAAVSVPYLRSEYGKDYEYDAPVKLLVKHLHAMAQSPDEQLVVVSQVLVADINIGYEEIVNTQVLAFNGQPVKNLKNLVSMVENCKDEFLKFDLEYDQIVVLETKTAKAATQDILTTHCIPSAMSDDLKT

SEQ ID NO: 16384 - protein, 135 aa, Ananas comosus
MADEQPKKPVPAAEEAPAAEAEAEEEEGLHLEDDQEPREHPIMGGIYDAPLNNENGFDKEDLARFAVREYNNKNNALLEFVRVVKAKEQVVSGMMHYLTVEVNDAGKKKLYEAKVWEQVWMNFRQLQEFTYLGDA

SEQ ID NO: 16385 - protein, 299 aa, Phaseolus vulgaris
MSNISMVEAKLPPGFRFHPRDEELVCDYLMKKLTHNDSLLMIDVDLNKCEPWDIPETACVGGKDWYFYTQRDRKYATGLRTNRATASGYWKATGKDRPILRKGTLVGMRKTLVFYQGRAPKGRKTEWVMHEFRIEGPHGPPKVSSSKEDWVLCRVFYKSREVSAKPSMGSCYEDTGSSSLPALMDSYISFDQTQAHADEFEQVPCFSIFSQNQANPIFNHMTTMEPKLPATTYGGAPNLGYCLDPLSCDRKVLKAVLSQITKMERNPLNQSLKGSTSFGEGSSESYLSEVGMPHMWNNY

SEQ ID NO: 16386 - protein, 194 aa, Gossypium barbadense
IAPEVLLKKGYGMECDWWSLGAIMYEMLVGYPPFYSDDPVTTCRKIVHWRNHLKFPEEARLTTEAKDLICKLLCDVDHRLGTQGADQIKAHPWFKDTRWDKLYEMEAAFKPHVEGEFDTQNFMTFDEVDCPRTGSGPLKKTFLAPKDLNFVGYTYKNFEAVKGLPDVKEFGPVRQASTDSFHSDSGVDYSNSDK

SEQ ID NO: 16387 - protein, 256 aa, Phaseolus vulgaris
MDATTPSELPPGFRFHPTDEELIVYYLCNQATSKPCPASIIPEVDLYKFDPWELPDKTEFGENEWYFFSPRDRKYPNGVRPNRATVSGYWKATGTDKAIYSGSKLVGVKKSLVFYKGRPPKGDKTDWIMHEYRLAESKQPVNRKIGSMRLDDWVLCRIYKKKNTGKTLEHKETHPKVQMTNLIAANNDEQKMMNLPRTWSLTYLLDMNYLGPILSDGSYCSTFDFQISNANIGIDPFVNSQPVEMANNYVSDSGKY

SEQ ID NO: 16388 - protein, 198 aa, Gossypioides kirkii
IAPEVLLKKGYGVECDWWSLGAIMYEMLVGYPPFYSDDPVTTCREIVHWRNHLRFPEEARLTPEAKDLICKLLCDVDHRLGTHGADQIKAHPWFKDTRWDKLYEMEAAFKPHVEGEFDTQNFMKFDEVDGPRTGSGPLKKTFLAPKDLNFVGYTYKNFEAVKGLRHSFADVKELGPVRQASTDSFHSDSGVDYSNSDK

SEQ ID NO: 16389 - protein, 259 aa, Phaseolus vulgaris
EGCVEEPGHHAEKKRRLSVDQVKALEKNFEVENKLEPDRKVKLAQELGLQPRQVAVWFQNRRARWKTKQLERDYGVLKANYDSLKLNYDTLQQDNEALLKEIKELKSRLLLQEESNTESDVSVKEEMITLQDSNPLCETAIPGSESKELSYECFNKSDEVLGFKDGSSDSDSSAILNEENANNNDNSPNNATISSSGAMQSQSFLSSSSPMNCFQFQKQFPTQYVKMEEHNFLSADEACNFFSDEQAPTLQWYCSEEWS

SEQ ID NO: 16390 - protein, 476 aa, Streptomyces avermitilis MA-4680
MRRSKIVCTLGPAVDSHEQLVTLIEAGMNVARFNFSHGTHAEHQGRYDRVRAAAAETGKAIGVLADLQGPKIRLETFAEGPVELVRGDEFIITTEDVPGDKHICGTTYKGLPGDVSKGDQILINDGNVELRVVEVDGPRVKTVVIEGGVISDHKGINLPGAAVNVPALSDKDIEDLRFALKMGCDLVALSFVRDASDVKDVHKVMDEEGRRVPVIAKVEKPQAVENMEAVVAAFDGVMVARGDLAVEYPLEKVPMVQKRLVELCRRNAKPVIVATQMMESMITNSRPTRAEASDVANAILDGADAVMLSAESSVGAYPIETVKTMSKIVTAAEEELLSKGLQPLVPGKKPRTQGGSVARAACEIADFLGGKGLVAFTKSGDTARRLSRYRAAQPILAFTTDEGTRNQLALSWGVESHVVPFVNSTDEMVDLVDSELQNLKRFNDGDVVVMTAGSPPGVPGTTNMVRVHHLGEGKRA

SEQ ID NO: 16391 - protein, 236 aa, Streptococcus pyogenes MGAS10394
MNFTGELLGTFILVLLGDGVVSACILNKTKAQNSGWIAIVLGWGIAVTVAVYISGFMSGAHLNPAVTLAMAAIGSLPWSQVVTYLVAQFLGAMLGALVLYLHYYPHWNETKDAGTILACFSTGPAIRHTWSNLFGEALGTAVLVITVMAIGPNKVAAGFGPIIVGFVVMAVGFSLGATTGYAINPARDLGPRIMHALLPIPNKGDSDWSYAWIPVLGPILGGVVSALIYQVILNMM

SEQ ID NO: 16392 - protein, 82 aa, Triticum aestivum
MAPSRHMAASALLLLVLLVATEIGATMTNVAEARDCLSQSHKFKGACLSSSNCAGVCRTENFRDGECHTHNFARKCFCKRAC

SEQ ID NO: 16393 - protein, 102 aa, Glycine max
MVQQLPSLFSWGPPLMTSKLEQLKQFTTVVCDTGDLEAISRLRPVDATTNPSLLLKAAAIPEYAELLRNAVSLSKGNVGLACDHFAVSVGAGILKVIPGRIS

SEQ ID NO: 16394 - protein, 327 aa, Phaseolus vulgaris
MAGGKLHPGSNMSLLLQNDRLPCSSEVLESLWAHTSNAASFQGSKSMVDFENVSGGRVTDRPFFQALEKEDNCDDDYEGCFHQPGKKRRLTSEQVQFLERNFEVENKLEPERKVQLAKELGLQPRQVAIWFQNRRARFKTKQLEKDYGTLKASYDRLKGDYESLLQENDKLKAEVNSLESKLILRDKEKENSDDKSSPDAVNSPHKEPMDLISNSTSENGTKVSLPIMVTCKQEDANSAKSDVLDSDSPHCTDGNHPSSFVEPADSSHAFEPDHSDFSQDEEDNLSESLLTLPCLPKVEEACYDDPPENPCNFGFHVEDQTFCFWPY

SEQ ID NO: 16395 - protein, 547 aa, Pseudomonas syringae pv. syringae B728a
MAAKEVKFGDSGRKKMLAGVNVLADAVKATLGPKGRNVIIEKSFGAPLITKDGVSVAKEIELKDRFENMGAQLVKDVASRANDDAGDGTTTATVLAQAIVNEGLKAVAAGMNPMDLKRGIDKATIAIVAELKKLSKPCTDTKAIAQVGTISANSDHSIGDIIAEAMEKVTKDGVITVEEGSGLENELSVVEGMQFDRGYLSPYFINKPDTMVAELDSPLLLLVDKKISNIREMLPVLEAVAKAGRPLLIVAEDVEGEALATLVVNNMRGIVKVAAVKAPGFGDRRKAMLQDIAVLTGGTVISEEIGLSLETTTLEHLGNAKRVILNKENTTIIDGAGVKTDIDSRISQIRQQIGDTSSDYDKEKLQERLAKLSGGVAVIKVGAGSEVEMKEKKARVEDALHATRAAVEEGVVPGGGVALVRSLQAIEGLKGDNADQDVGIALLRRAVEAPLRQIVANSGDEPSVVVDKVKQGSGNYGYNAASGEYGDMIEMGILDPAKVTRSALQAASSIASLMITTEAMIADVPEDKPAGGGMPDMGGMGGMGGMM

SEQ ID NO: 16396 - protein, 540 aa, Tsukamurella paurometabola
MAKTIAFDEEARRGLERGLNALADAVKVTLGPKGRNVVLEKKWGAPTITNDGVSIAKEIELEDPYEKIGAELVKEVAKKTDDVAGDGTTTATVLAQALVREGLRNMAAGANPLGLKRGIEKAVEAVTEHLLKEAKEVETKEQIAATAGISAGDPAIGELIAEAMDKVGKEGVITVEESNTFGLQLELTEGMRFDKGFISGYFATDAERQEAVLEDAYILLVSSKISTVKDLLPLLEKVIQSGKPLAIIAEDVEGEALSTLIVNKIRGTFKSVAIKAPGFGDRRKAMLQDMAILTGGQVISEEVGLSLETAGLELLGQARQVVVTKDETTIVDGAGSKEQIEGRVSQIRAEIESSDSDYDREKLQERLAKLAGGVAVIKAGAATEVELKERKHRIEDAVRNAKAAVEEGIVAGGGAALAQSGKVFETLNLEGDEATGANIVKVALDAPVKQIAINAGLEPGVVAEKVRNSPAGTGLNAATGVYEDLLAAGINDPVKVTRSALQNASSIAALFLTTEAVVADKPEKAGAPVDPTGGMGGMDF

SEQ ID NO: 16397 - protein, 352 aa, Zea mays
VRGRVGGRVGQQAEQSRAASCVREEDDSREQNEHRSMAVMAGAASMEVEQDLPGFRFHPTEEELLGFYLSRVVHGKQLHFDIIGSLNIYRYDPWDLPAMAKIGEREWYFFVPRDRKAGSGGRPNRTTERGFWKATGSDRAIRSSGDAKRVIGLKKTLVFYQGRAPRGTKTDWVMNEYRLPDHSAAGRAAPPPPPKEDMVICKIYRKATPLKELEQRASAMEEMQTRIGGARATSLVQAAGSTGDDYLSSDDTSFLQFPSSCSPALSGDSYGAPREAKTEAADATTVTVASTSSSLLHAASVAGPAVRHGDLPTLQVPTHLGVADWTQMQDPFQLRSPWQDHLFFSPLAHLLY

SEQ ID NO: 16398 - protein, 936 aa, Rhodothermus marinus
MLPPLQIEIEGTGISRPLSEHVNLLGGLLGQVIQEMAGPEMLELVETLRRLCKQAAQENRPEFREQAYTRIHSATYDELLWLLRAYTAFFHLVNQAEQQEIIRINRERAQQSTPERPRPESIDEAILALKQQGRTLDDVLTLLERLDIQPTVTAHPTEARRRSILYKQQHIAQMLSQQRRCQLTPEEQETLLLDLHNQITLLLGTAEVREERPTVRDEVEQGLYFIQSTIWEAVPRIYEDVRRALRRYYGADVDFRPFLRYRSWIGSDRDGNPYVTPEITRWTALTQRRLALQRYMEELRQLRRRLSLSDRYVAPPEELRRSLARDAREVSLPPHVLRQFRHESFRLKISYIMGRLHGLLQALDDPTQPAPDYDADAFVEDLRLLQRCLEACGLERIARHDQLTRLLVLAQTFGFHLVTLDVRQHSSVHEAAVAELLRLAGVENDYRALPESRRQELLAEELSNPRPLLPPGARVSEATRQVLETFAVIRELVQLDPRLVGSYIVSMTHTVSDLLEPMLLAKEVGLWHYERDPRTGKPGHVRCPIDFVPLFETIEDLEAAASRMEAILSHPVYRMQVAARGGFQEIMLGYSDSTKDGGYWMANWALHRAQEQLAEVCLRHGVDFRLFHGRGGTVGRGGGRANQAILAMPPVVHNGRIRFTEQGEVISFRYALPEIAHRHLEQIVNAMLRVVGLPAASGTDGTDPATRNRLMDELAARSMRAYRRLIDAPDFWSWYTRITPIDQISRLPIASRPVSRSSAREVDFESLRAIPWVFAWTQVRYLIPGWFGIGQALDELLQTSPEHLETLRTWYRSWPFFRTVLQNAQREMVRARLEIAAYYDRLLGDGPTAFHQMIEEDYHRARTAILRITDQESLLDHDPIIRKSVQLRNPYTDVLNLVQLELMRRIRSGAEADREPLRRALFLSINGIAAAMQSTG

SEQ ID NO: 16399 - protein, 623 aa, Kluyveromyces lactis NRRL Y-1140
MAVKEEVVGKQAVSSHTVAANEFDLDEKQQPEVLNEYGLPDKLRFTRSLVLRKTEILAQQYDTWYWKAVLLFSVFLCSYGYGLDGSVRSVYTTYATNSYSTHSLLSTISIINLVIGASAQVFFARLSDVFGRLTLLIVATVFYSVGTIIQSQAYDVQRYAAGAVFYNVGLVGVVLQVILILSDFSSLRWRLFYTFVPSWPFIINMWVSGNVVNAANPLENWSWSIGMWAFIFPLTCLPLVCCILHMRYRASKTEAWRHLQLEKTYYQSHGLLQTLIQLFWKLDVVGVLLLTVTLGCILVPLTLAGGVSQKWNNPHVIAPFVLGFVLLPIFVVWESKWALDPIAPFELLKDRGVWSALTIQFLIYFVYQMAVGYLYTILVIAVDESTTSATRITSVYSFTAAVASPFFALVVTRSKRLKPYIITGCSLWMVAMGILYHFRSGKDSDKGIIGGLVLWGLTSTLFTYPVTVSLQSITSHENMASVTALNYTIYRIGGAVASAASGAIWTQLLYKKLLKEMNGDATLATAAYGSPFDFILDYPWGTPMRDAMVESYRYVQKYEVLVALIFTVPMFILSMFLRDPPLTDDQAQENLKEGEYINTEHDDPILAWMDDKWTRITGGKKVE

SEQ ID NO: 16400 - protein, 97 aa, Pseudomonas putida KT2440
MKLRPLHDRVVIRRSEEESKTAGGIVLPGSAAEKPNRGEVVAVGTGRVLDNGEVRALAVKVGDKVVFGPYSGSNTVKVDGEDLLVMAENEILAVVEG

SEQ ID NO: 16401 - protein, 546 aa, Pseudomonas putida KT2440
MAAKDVKFGDSARKKMLVGVNVLADAVKATLGPKGRNVVLAKSFGAPTITKDGVSVAKEIELKDAFENMGAQLVKEVASKANDAAGDGTTTATVLAQAIVNEGLKAVAAGMNPMDLKRGIDKATAAVVAELKNLSKPCADSKAIAQVGTISANSDNSIGEIIAEAMEKVGKEGVITVEEGSGLENELSVVEGMQFDRGYLSPYFVNKPDTMVAELEGPLLLLVDKKISNIRELLPVLEAVAKAGRPLLIVAEDVEGEALATLVVNNMRGIVKVAAVKAPGFGDRRKAMLQDIAVLTGGQVISEEIGLSLETATLEHLGNAKRVILSKENTTIIDGAGADTEIEARVKQIRAQIEETSSDYDREKLQERLAKLAGGVAVIKVGAGTEVEMKEKKARVEDALHATRAAVEEGVVPGGGVALVRALAAIIDLKGDNEDQNVGIALLRRAVESPLRQITANAGDEPSVVADKVKQGSGNFGYNAATGEYGDMIEMGILDPAKVTRSALQAAASIGGLMITTEAMVADLPEDKPAAGMPDMGGMGGMGGMM

SEQ ID NO: 16402 - protein, 484 aa, Pseudomonas putida KT2440
MSIRRTKIVATLGPASNSPEVIEQLILAGLDVARLNFSHGTPDEHKARARLIRDIAAKNGRHVALLGDLQGPKIRIAKFANKRIELKIGDKFTFSTAHPLTEGNQDIVGIDYPDLVKDCGVGDELLLDDGRVVMRVETATADALHCVVIIGGPLSDHKGINRKGGGLTAPALTEKDKADIKLAAEMDLDYLAVSFPRDASDMEYARKLRDEAGGSAWLVAKIERAEAVADDETLDKLIAASDAVMVARGDLGVEIGDAELIAIQKKIIQHARRNNKAVIVATQMMESMIQNPMPTRAEVSDVANAVLDNTDAVMLSAESAAGSYPIEAVQAMARICLGAEKHPTSQKSSHRLHTTFQRCDESIALAAMYTANHFPGVKAIIALTESGYTPLIMSRLRSHVPIFALSPHRATQARASMFRGVYPIAFDPAALPADKVSQAAVDELLKRGLVEQGDWVILTKGDSYHTIGGTNGMKILHVGDPLVG

SEQ ID NO: 16403 - protein, 154 aa, Zea mays
  misc_feature (125)..(125): Xaa can be any naturally occurring amino acid
  unsure (1)..(154): unsure at all Xaa locations
MSLVRRSSVFDPFSVDLFDPFDSMFRSIVPPSLSSSAASETAAFASARIDWKETPEAHVFKADLPGVKKEEVKVEVEDGNVLLISGQRSREKEDKGDKWHRVERSSGQFVRRFRLPENAKTEEVXAALENGVLTVTVPKAEVKKPEVKSIQISG

SEQ ID NO: 16404 - protein, 551 aa, Enterobacter sakazakii
MKAIDKKWWHNAVVYQIYPRSFMDANGDGVGDLAGIISKLDYLQQLGINLIWLSPVYKSPMDDNGYDISDYDDIAAEFGTMAEMEQLIQEAKARDIYILMDLVVNHTSDEHPWFIEAKKGKDNPYRDFYIWRKPAPDGGPPNDYRSHFGGSGWAYDEASGEYYLHQFSVRQPDLNWENPRVQEEIHAMMNRWLDKGIGGFRMDVIDLIGKEVDRQIMANGKHLHVLLRQMNEATFGPRDSLTVGEAWSATPEDALLYSDPERRELSMVFQFEHIKQTWDEKAGKWRSRPFELPRFKAVIDKWQTALADRGWNSLFWSNHDLPRAVSKFGNDGEFREVSAKMLATALHCLRGTPYIYQGEEIGMTNVRYSTIEEYRDIESLNFYWELIAGGLTHDEMMTGIYANGRDNARTPMQWDDSPNGGFTTGMPWLGVNPNYREINVAQALAEPDSILWHYQKLVALRKQYPILVYGDYQMLFAEHPEVFAWVRRYEGDTLLVINNFFGNAITLPIPEAMQAWHGECLISNYAPRDQLAVSLELQPYESFALLIHQEG

SEQ ID NO: 16405 - protein, 394 aa, Arabidopsis thaliana
MASLDSHVLMKLGSLFLSTLFVSIVSSESQCRNFESIISFGDSIADTGNLLGLSDHNNLPMSAFPPYGETFFHHPTGRFSDGRLIIDFIAEFLGLPYVPPYFGSTNGNFERGVNFAVASATALESSFLEEKGYHCPHNFSLGVQLKIFKQSLPNLCGLPSDCRDMIGNALILMGEIGANDYNFPFFQLRPLDEVKELVPLVISTISSAITELIGMGGRTFLVPGGFPLGCSVAFLTLHQTSNMEEYDPLTGCLKWLNKFGEYHSEQLQEELNRLRKLNPHVNIIYADYYNASLRLGREPSKYGFINRHLSACCGVGGPYNFNLSRSCGSVGVEACSDPSKYVAWDGLHMTEAAHKSMADGLVKGPYAIPPFDWSCLSSMIKKKEVVGNTIFFDE

SEQ ID NO: 16406 - protein, 597 aa, Arabidopsis thaliana
MASTFSATSSMGSSLAPPSNRLSSFVSISSSSFGRTQSIAQRKARFPKIYAAKQLHFNKDGTAIKKLQAGVNKLADLVGVTLGPKGRNVVLESKYGSPRIVNDGVTVAREVELEDPVENIGAKLVRQAASKTNDLAGDGTTTSVVLAQGLIAEGVKVVAAGANPVLITRGIEKTTKALVAELKKMSKEVEDSELADVAAVSAGNNYEVGNMIAEAMAKVGRKGVVTLEEGKSAENSLYVVEGMQFDRGYISPYFVTDSEKMCAEYENCKLFLVDKKITNARDIISILEDAIKGGYPLLIIAEDIEQEPLATLVVNKLRGTIKVAALKAPGFGERKSQYLDDIAALTGATVIREEVGLQLEKVGPEVLGNAGKVVLTKDTTTIVGDGSTEEVVKKRVEQIKNLIEAAEQDYEKEKLNERIAKLSGGVAVIQVGAQTETELKEKKLRVEDALNATKAAVEEGIVVGGGCTLLRLASKVDAIKETLANDEEKVGADIVKKALSYPLKLIAKNAGVNGSVVSEKVLSSDNPKHGYNAATGKYEDLMAAGIIDPTKVVRCCLEHASSVAKTFLMSDCVVVEIKEPESAAPAGNPMDNSGYGF

SEQ ID NO: 16407 - protein, 558 aa, Enterobacter sakazakii
MSEAPTQVKGRWWKEATAYQIYPRSFKDSNGDGIGDLNGIIEKLDYLKDLGIDLIWICPMYPSPNDDNGYDISDYQGIMAEFGTMADFDRLLEGVHQRGMRLILDLVVNHTSDEHPWFLESRSSKDNPKRDWYIWRDGKNGAEPNNWESIFSGSAWKRDDVTGQYFMHLFSSRQPDLNWENHEMRAAVYDMMRWWLDKGIDGFRIDAIAHMKKEPTLSDVPNPEKLPYAPSMVSHLNYDGLLDYVDDICRNVFNHYDIVTVGEMNGLDAAHAEEWVGENRGRLNMVFQFEHVRLWEPQAGLRPTPAVLRNIFTAWQQALEGKGWNALYVENHDVTRVVSRWGDTEHHWRESATCIAAMYFLMQGTPFIYQGQEIGMTNTRFASLDDFDDVSAHNKARDLRDQGMREEEIVEFLTRTGRDNSRTPMQWDASPYAGFSTHEPWLKVNPNYEMINVESQQHDPHSVLNFYRRMIHLRKREPALIYGRYETVLHDHEQIYAYRRVLGDEQLVVLCNFSGKAAEWDARALSLNGAFCVLANLDETQEPHRLRAWETRVYKLTS

SEQ ID NO: 16408 - protein, 470 aa, Rhodobacter sphaeroides f. sp. denitrificans
MSRLVVVSNRVPLPDENGNPPPGGLAVAVHVALRKNGGIWMGWSGRSTGEEEPQGLTTLEQDKISYVLTDLSQADLDEYYNGFANRVLWPIFHCRLDLAEYARQEMAGYFRVNRLFADRLVPMLEPDDVIWVHDYHLIPLAQELRKRGVRNRIGFFLHIPWPPADIVTALPVYEIIMRGLAAYDLVGFQTDYDLDNFVGCLRREGWGDWSTPGWLRAFDKEVAAAAFPIGIETGDFARLAAKTDGLDLVTDMQQSLHGSALIIGVDRLDYSKGIAARIDAFERYLMRNPDQAGKVTLLQVAPHSRSDVPEYLEMQGQVESHCGRVNGAHGTIEWVPIRYVNQSLTRPVLAGLYRLAKVGLVTPLRDGMNLVAKEYVASQDPADPGVLILSRFAGAARELDGAIFINPYDTEQTAGAIGRALSMPLDERIARWRRMMDHLESHDVLWWCRTFLAALNEAPEDNGALTRESD

SEQ ID NO: 16409 - protein, 446 aa, Shewanella sp. MR-4
MSEAKLLLVEDDASLREALLDTLMLAQYDCIDVASGEEAIIALKQHQFDLVISDVQMQGIGGLGLLNYLQQHHPKLPVLLMTAYATIGSAVSAIKLGAVDYLAKPFAPEVLLNQVSRYLPLKQSSDQPVVADEKSLALLSLAQRVAASDASVMILGPSGSGKEVLARYIHQHSSRANQAFVAINCAAIPENMLEATLFGYEKGAFTGAYQACPGKFEQAQGGTLLLDEISEMDLGLQAKLLRVLQEREVERLGGRKTIKLDVRVLATSNRDLKAVVAAGQFREDLYYRINVFPLTWPALNQRPADILPLARHLLAKHAKALNVLDLPEFDEAACRRLLSHRWPGNVRELDNVVQRALILRAGAVITANDIIIDAQDVPLLSDDAEYVNEPEGLGEELKAQEHVIILETLAQCQGSRKLVAEKLGISARTLRYKMARMRDMGIQLPN

SEQ ID NO: 16410 - protein, 446 aa, Pseudomonas fluorescens PfO-1
MRVIDVNQFIDKARFSRFHWGVVTLCALLLIFDGYDLFIFGVVLPAIMREWQLTPIQAGALGSYALFGMMFGALAFGSLADRIGRKKSIAICFTLFSSATLINGFASNPTEFGICRFLAGLGCGGLMPNAVALMSEFAPRRLRSTLVAVMFSGYSLGGVLAASVGIYMLPLFGWQSMFFAAAVPLLLLPMILGFLPESIGFLIRAGKEGQARRILSKVDPASAPSDSDTLRQADSEGRGVILLALFRERRASRTLCLWVAFFCCLLMVYALSSWLPKLMANAGYSLGSSLTFLLALNFGGMAGAIFGGWLGDRYNLGKVTVMFFLTAALSISLLGFKSSTALLYLLISVAGATTIGTQILLYAATAQFYGMSIRSTGLGWASGIGRNGAILGPLLGGALLGIGLPLPLNFVAFAVPGAIAAIAMALFTLVGKRSVADSSVLMAAKP

SEQ ID NO: 16411 - protein, 535 aa, Lactococcus lactis subsp. cremoris
MSTKYIFVTGGGTSSMGKGIVAASLGRLLKNRGLKVTVQKFDPYLNIDPGTMSPYQHGEVFVTDDGAETDLDLGHYERFIDINLNKYSNVTSGKVYSEILRKERKGEYLGATVQMVPHVTNMLKEKIKRAATTTDADIIITEVGGTVGDMESLPFIEALRQMKAEVGADNVMYIHTVPILHLRAAGELKTKIAQNATKTLREYGIQANMLVLRSEVPITTEMRDKIAMFCDVAPEAVIQSLDVEHLYQIPLNLQAQNMDQIVCDHLKLDAPKADMAEWSAMVDHVMNLKKKVKIALVGKYVELPDAYISVTEALKHAGYASDAEVDINWVNANDVTDENVAELVGDAAGIIVPGGFGQRGTEGKIAAIKYARENDVPMLGICLGMQLTAVEFARNVLGLEGAHSFELDPETKYPVIDIMRDQVDVEDMGGTLRLGLYPAKLKNGSRAKAAYNDAEVVQRRHRHRYEFNNKYREDFEKAGFVFSGVSPDNRLVEIVELSGKKFFVACQYHPELQSRPNRPEELYTEFIRVAVENSK

SEQ ID NO: 16412 - protein, 430 aa, Lactococcus lactis
MHDNDIILKVDEKPAASQWFGLSFQHLFAMFGSTVLVPILVGINPAIALLSSGLGTLAHMSVTKFKVPAYMGSSFAYIGAMTLLMKNGGMPAIAQGAMTGGLVYLIVALIVKFAGKGWIDKVLPPIVVGPIVMVIGLSLAPTAINDAMYTDVANLKGYSLAYIIIALITVLSIVVYSIYGKGFLSVVPILLGIITGYVAAMIIGKITGMNIVSFTGISQAKWLTLPPMEIPFASYKWAFYPSAILTMAPIAFVTMTEHFGHIMVLNSLTKKDYFKEPGLEKTLTGDGLAQIIAGFIGAPPVTSYGENIGVMAITKIHSIYVIAGAAVLAIVVSFVGKITALLQSIPAPVIGGASIALFGVIAASGLKILVENKVDFDIKRNLLISSVVLVIGIGGMIINITQNLQISSVAIATILGIVLNLVLPKDASEI

SEQ ID NO: 16413 - protein, 643 aa, Oryza sativa
  misc_feature (143)..(143): Xaa can be any naturally occurring amino acid
  unsure (1)..(643): unsure at all Xaa locations
MRALRSRFLPLLARRWQWQWQWQWEFQGRRAARCGLCGEAREEEEEEGKMESTMKGIRGDNAPCVLDLDDAATVGGGVGDTYGEDCATEEQLVTPWTVSVASGYNLLRDPRYNKGLAFNERERETHYLRGLLPPAIVSQELQXERKIMHNIRQYQLPLQKYMAMMDLQEGNERLFYKLLIDNVEELLPVVYTPTVGEACQKYGSIFSRPQGLYISLKEKGKILEVLKNWPERSIQVIVVTDGERILGLGDLGCQGMGIPVGKLALYTALGGVRPSACLPITLDVGTNNEALPNDEFYIGLRQKRATAQEYADFLHEFMTAVKQNYGEKVLIQFEDFANHNAFELLAKYGTTHLVFNDDIQGTASVVLSGLVAALKLVGGSLSEHSYLFLGVGEAGTGIAELIALEISRQTKAPIEECRKKIWLVDSKGLIVSSRKETLQHFKKPWAHEHEPVGNLLDAVKTIKPTVLIGTSGKGQTFTQEVVEAISSFNERPVIFALSNPTSQSECTAEQAYTWSKGRAVFASGSPFDPVEYDGKIYVPGQANNAYIFPGFGLGVVMSGAIRVHDDMLLAASEALAQQVTQENFDKGLTYPPFSNIRKISAHIAANVAAKAYELGLASRRPRPKDLVKYAESCMYSPLYRNYR

SEQ ID NO: 16414 - protein, 326 aa, Candida albicans
MTGSSSQFQQLEKLGEGTYATVYKGRNRATGALVALKEISLDSEEGTPSTAIREISLMKELDHENIVTLYDVIHTENKLTLVFEYMDKDLKKYMEVHGQQSALDLKVVKSFMFQLLKGIMFCHDNRVLHRDLKPQNLLINNKGELKLGDFGLARAFGIPFNTFSNEVVTLWYRAPDVLLGSRAYTTSIDIWSAGCIFAEMCTGKPLFPGTANEDQLIKIFRLMGTPNERTWPGISQYTNYKNNWQIFVPQDLRLIVPNLDSMGLNLLQSLLQMRPESRITARQALQHPWFHEITMPNAVPQHLSDPYQQQQQQQQHPHQPIIDQQY

SEQ ID NO: 16415 - protein, 391 aa, Bacillus clausii KSM-K16
MEKKELRIGLIGYQFMGKAHSHAYRDIPFFFDVEAKPVLKVVCGRNEEAVQQAAEKMGFESYETDWRKVVERDDIDVIDIVTPNNTHAEIAIAAAKAGKHVITEKPLAMNLDEAQRMHAAVTENHVIHMVCHNYRYVPAVQLAKQLVASGKLGEIYHFRARYLQDFIMSPSFPLTWRLDQKVSGSGALGDIAAHSLDIARFLVGEINEVVATAKTFIKERPIGSMTGGLSAKVSEGKMAPVTVDDATAIIAKFENGALGTFEATRFAGGNRNRNEFEINGEHGSVRWNMENMNQLEVYFAHDEEGLQGFRTIDVTEASHPYVGSYWAAGHMIGYEHTFIHLLYEFLQGIARGEQPKPDFADGLRNQAVLTAIEQSIQQQRWVNVEELLVKS

SEQ ID NO: 16416 - protein, 151 aa, Triticum aestivum
MSIVRRTNVFDPFADLWADPFDTFRSIVPAISGGTSETAAFANARVDWKETPEAHVFKADLPGVKKEEVKVEVEDGNVLVVSGERTKEEEDKNDKWHRVERSSGKFVRRFRLPEDAKVGEVKAGLENGVLTVTVPKAEVKKPEVKAIEISV

SEQ ID NO: 16417 - protein, 305 aa, Bordetella parapertussis 12822
MGHGVIIRENVLQECRIFHPVRFVNTREGFMAQVPVLKLNDGNAMPQLGLGVWQVPNDQAAASVKAALAAGYRSIDTAAIYGNEAGVGEGLRAAGVARKDLFVTTKLWNDRHGYDEAQRAMDESLRKLGLAYVDLFLIHWPVAGSDKFVDAWRAMVAMKEDGRARSIGVSNFTIANLRRLVDETGVVPAVNQVELHPGFAQRELRAFHAEQGIATESWSPLGQGAVMHDATLAGIAARHGKSAAQVTLRWHLQNGLIVIPKSVTPARIQANIDVFDFELSADEMADIDALPEGPRLGPDPATFTG

SEQ ID NO: 16418 - protein, 224 aa, Phaseolus vulgaris
EQMPEKKHRLSSEQVHLLEKSFEEENKLEPERKTQLAKKLGLQPRQVAVWFQNRRARWKTKQLERDFDVLKSSYDTLLSSYDSLMKDNEKLKSEVVSLNEKLQDQAKEVPEEPFYDKKVDPLPVEDIATIFSTRVEDHQSSGSVGSAVVDEGSPQLVVDSVDSYLPADNPGGCVGPVERIQSEEEDGSDDGRSYMDVFVVSETENQNHEEGEALVWWTNMYYVE

SEQ ID NO: 16419 - protein, 490 aa, Neisseria meningitidis Z2491
MNQTSRDLTRISHNTKIVATLGPGSNNVELLEDMIRVGGLNVVRFNFSHGTPEFHQENARIVREAAKRTGQEIAIIADLQGPKIRVGKIAGGGIELNKGETLGLDAALEGEGTREAVGLDYRDLPDDVAAGDVLWLDDGLLTLTVESVEGSRIITRVENSHVLKSNKGINKRGGGLSAGALTEKDFRDLKTAIAIGCDYLAISFVKSAEDLHIARAKVEEEMKGSTAVRPGLVSKIERVEAIENLDEIILAGDGIMVARGDLAVEVGHAAVPALQKRMIRRARELRRFSITATQMMESMITNPVPTRAEVSDVANAVLDGTDAVMCSAETAVGAYPFETVSQMAIICAAAEKEQDSLNGVAEQVEYPEAVSTNLAVAGGAVSVARAVHAKAIVALTESGSTAFEISRHNITLPIFALTPSVSAQRRMAMYRGVRPLILATSTDHDTALNEVETMLVEHNILHSGDQYIITSGSQMRESGSTNTLEVLRVK

SEQ ID NO: 16420 - protein, 207 aa, Vicia faba
DYLFKVVLIGDSGVGKSNLLSRFTKNEFSLESKSTIGVEFATRSIRVDDKVVKAQIWDTAGQERYRAITSAYYRGAVGALLVYDVTRHVTFENVERWLKELRDHTDANIVVMLVGNKADLRHLRAVSTEDSTAFAERENTFFMETSALESLNVESAFTEVLTQIYRVVSKKALEIGDDPAALPKGQTINVGSRDDVSAVKKGGCCSA

SEQ ID NO: 16421 - protein, 335 aa, Ashbya gossypii ATCC 10895
MGVTVIGSLNYDLVTYTDKVPGAGETFAGEHFETHVGGKGLNQAIAVSKLQADAGDEKVRIVGNVGRDPFGDEILEVARQNRVQVEHVGVVAGTKTGTATILVERKTGQNRIVIVSGANAKTVLEESNMEQVFPKNTSPGQHYIILQHEISDPVAYMRWLKLNRPAYQIVFNPSPFQELPADAWKDVDVLVVNEVEAFQLYMCITGSGSSKFSESEPDNMVDKFRVILSELMERGVLGKSRSGTIIVTLGEYGVLYASAASSRVLYVPAEQVVKVVDTTAAGDTFLGGLVAQLDSGSTLDDAVRFAVQASAIAVTREGASSSIPTHAEVEGKYHL

SEQ ID NO: 16422 - protein, 467 aa, Phaseolus vulgaris
MGSRTTRGFGVEDDKGAERGMPSFNSELPISNSSYAEGSTIDSFRVSDFGAFDQPYRVEDAVCLSGNPIYNSLKVSSQTISPGSVHISSLGQLPTSLDKSPLTNQTELHRLRLQKVQSSNPDTILVGNTDNQEESAMADASPRTDISTDVDTDDKNQPFDRNQSLAAVSDSSDRSKDKSDQKTLRRLAQNREAARKSRLRKKAYVQQLESSRLKLTQLEQELQRARQQGIFISSSGDQAHTLSGNGAMQFDAEYARWLEEQNRQINELRAAVNSHASDTELRMIVDGILAHYDEIFRMKGVAAKADVFHLLSGMWKTPAERCFLWLGGFRSSELLKLLANQLEPLTEQQLMGITNLQQSSQQAEDALSQGMEALQQSLAETLSTGAPASSGSSGNVANYMGQMAMAMGKLGTLEGFIRQADNLRQQTLQQMHRILTTRQSARALLAIHDYFSRLRALSSLWLARPRD

SEQ ID NO: 16423 - protein, 470 aa, Shigella flexneri 2a str. 301
MKKTKIVCTIGPKTESEEMLAKMLDAGMNVMRLNFSHGDYAEHGQRIQNLRNVMSKTGKTAAILLDTKGPEIRTMKLEGGNDVSLKAGQTFTFTTDKSVIGNSEMVAVTYEGFTTDLSVGNTVLVDDGLIGMEVTAIEGNKVICKVLNNGDLGENKGVNLPGVSIALPALAEKDKQDLIFGCEKGVDFVAASFIRKRSDVIEIREHLKAHGGENIHIISKIENQEGLNNFDEILEASDGIMVARGDLGVEIPVEEVIFAQKMMIEKCIRARKVVITATQMLDSMIKNPRPTRAEAGDVANAILDGTDAVMLSGESAKGKYPLEAVSIMATICERTDRVMNSRLEFNNDNRKLRITEAVCRGAVETAEKLDAPLIVVATQGGKSARAVRKYFPDATILALTTNEKTAHQLVLSKGVVPQLVKEITSTDDFYRLGKELALQSGLAHKGDVVVMVSGALVPSGTTNTASVHVL

SEQ ID NO: 16424 - protein, 786 aa, Ustilago maydis 521
MATAVATRSNAQLVSSSARQLLALRLTLISQHETLDPAGPMDDELATVGAASTSPTIDKIVIGWLCCLAMSVNEPAFVVPFVKSVSLDNGRKVKTGEPAQQATSCLPTRLATLAALTTASHQSRRLSQPNLVRKKRKKKKKKRDSRMVSSIDAARAKTETLLAWRLHTVTLANLTNGSEFTSYSPTAVSQNHPKLISDTSMTWYTTSVELDERCLTLVFNKSMRSNQPPSHEAVKAEGPSWWCIRDSRFATDILGAVSGGQARCRRSALDPGESFYPTLTGSGSLTRRSRRADCLRRHHHPEPIRQLTMTSSAAFSMSRLRLAPNVRVSRCTVVAQASMTSTRSLASSSLLRKDGNEPQGHLPGHPSSVFLTSLNDSFFDSVKPKTLSGNKNSQGGIPTYRLMDGVGRLLPGVTQEMINITQQEAVKMYRTMLLLPQIDVILYNAQRQGRISFMMTSYGEEGAVIGSAAGLDAKDEVFAQYRESGVLLWRDFSIDHFMSQVFGAEDDLCGGRQMPIHFGSTQHHFHTISSPLATQIPQAAGAGYALKRTKGREGNVVICYFGEGAASEGDFHAGMNLASTTSSPVIFFVRNNGFAISTPAAEQFRGDGIASRGPGYGMLTIRVDGNDALAVRSAVQAAKSKALSEQRPVLIEAMTYRVGHHSTSDDSSAYRSKQAVESWKQMDNPLHRMRNYLTDRGWWNDELEEETKAGHRKKVIEAMARAEKKKRPKLSSLFEGTYRGELPSNLKQQRAELAELLEKYGSLPSWSKEIAKHAHAGKDMEQYREK

SEQ ID NO: 16425 - protein, 74 aa, Salmonella typhi
MFENITAAPADPILGLADLFRADDRPGKINLGIGVYKDETGKTPVLTSVKKAEQYLLENETTKNYLGIDGIPEF

SEQ ID NO: 16426 - protein, 460 aa, Phaseolus vulgaris
MGSRSRTVNVTSKDTNKVVNGMPSYAPPLPSSSSMGIEATNVHPSRISEFGTLEQSLGFRVEDTINLSRNPVFSQMKSNSQALGADIQFGALNKSIVTSDINLSAAIAGSQTLALQKDAQPTLASTSGHRENWGETNMADASPRTDTSTDDTEDKNQLPERGESSDRSKDKSDQKTLRRLAQNREAARKSRLRKKAYVQQLESSRLKLTQLEQELQRARQQGIFISSTGDQAQSMSGNGAMAFDVEYARWLEEHNRQTNELRAAINSHAGDIELRTIVDNFMAQFDDIFRLKGIAAKADVFHILSGMWKTPAERCFMWIGGFRSSELLKLLVSHLEPLTEQQLMGIYNLQQSSQQAEDALSQGMDALQQSLSETLANGSPSSSGSSGNVANYMGQMAMAMGKLGTLEGFLRQADNLRQQTLQQMLRILTTRQSARALLAISDYFSRLRALSSLWLARPRE

SEQ ID NO: 16427 - protein, 468 aa, Archaeoglobus fulgidus DSM 4304
MVGRMCVAVLIVLLLVATAGADPNGAETLKENPELPVDFVWALICGFLVMFMQAGFAMLEAGFSRAKNVANVMMKNLMDFAVGSLAFFAVGFALMMGADWQGIAGTTGWFLAGESYDVSTIELWFFMLVFAATAATIVSGSIAERPKFSVYLVYSAVVSAVIYPIYGHWLWGGGWLSSSEFMVKLGGGYGALDFAGSGVVHALGGYIALAAVMLLGPRLGKYDSDGNPRAIPGHNLAFAVIGTFILWFGWFGFNAGSTLSAHELRVSIIASNTNLAAAAGAVTAMAITWLRNGKPDVGMTCNGAVAGLVAITAPCAWVQPWSSVVIGTIAGFIATYGYWWLEKRGLDDVVGAIPVHGFSGTWGLIALGIFADGSYGLYATESPLVTGLLYGNWGFFIVQLISAIVNFAWAFGTGFALFWILKKVIGIRVSPEEEMLGLDIAEHAAVAYPNFVCTETELPLAMKQGGGR

SEQ ID NO: 16428 - protein, 466 aa, Shigella flexneri 2a str. 301
MDKKQVTDLRSELLDSRFGAKSISTIAESKRFPLHEMRDDVAFQIINDELYLDGNARQNLATFCQTWDDENVHKLMDLSINKNWIDKEEYPQSAAIDLRCVNMVADLWHAPAPKNGQAVGTNTIGSSEACMLGGMAMKWRWRKRMEAAGKPTDKPNLVCGPVQICWHKFARYWDVELREIPMRPGQLFMDPKRMIEACDENTIGVVPTFGVTYTGNYEFPQPLHDALDKFQADTGIDIDMHIDAASGGFLAPFVAPDIVWDFRLPRVKSISASGHKFGLAPLGCGWVIWRDEEALPQELVFNVDYLGGQIGTFAINFSRPAGQVIAQYYEFLRLGREGYTKVQNASYQVAAYLADEIAKLGPYEFICTGRPDEGIPAVCFKLKDGEDPGYTLYDLSERLRLRGWQVPAFTLGGEATDIVVMRIMCRRGFEMDFAELLLEDYKASLKYLSDHPKLQGIAQQNSFKHT

SEQ ID NO: 16429 - protein, 565 aa, Shigella flexneri 2a str. 301
MEPKTKKQRSLYIPYAGPVLLEFPLLNKGSAFSMEERRNFNLLGLLPEVVETIEEQAERAWIQYQGFKTEIDKHIYLRNIQDTNETLFYRLVNNHLDEMMPVIYTPTVGAACERFSEIYRRSRGVFISYQNRHNMDDILQNVPNHNIKVIVVTDGERILGLGDQGIGGMGIPIGKLSLYTACGGISPAYTLPVVLDVGTNNQQLLNDPLYMGWRNPRITDDEYYEFVDEFIQAVKQRWPDVLLQFEDFAQKNAMPLLNRYRNEICSFNDDIQGTAAVTVGTLIAASRAAGGQLSEKKIVFLGAGSAGCGIAEMIIAQTQREGLSEEAARQKVFMVDRFGLLTDKMPNLLPFQTKLVQKRENLSDWDTDSDVLSLLDVVRNVKPDILIGVSGQTGLFTEEIIREMHKHCPRPIVMPLSNPTSRVEATPQDIIAWTEGNALVATGSPFNPVVWKDKIYPIAQCNNAFIFPGIGLGVIASGASRITDEMLMSASETLAQYSPLVLNGEGLVLPELKDIQKVSRAIAFAVGKMAQQQGVAVKTSAEALQQAIDDNFWQAEYRDYRRTSI

SEQ ID NO: 16430 - protein, 496 aa, Nicotiana tabacum
MVLSKTASESDVSIHSTFASRYVRTSLPRFKMPENSIPKEAAYQIINDELMLDGNPRLNLASFVTTWMEPECNKLMMDSINKNYVDMGEYPVTTELQNRCVNMIAHLFNAPLGDGETAVGVGTVGSSEAIMLAGLAFKRKWQNKMKAQGKPCDKPNIVTGANVQVCWEKFARYFEVELKEVKLSDGYYVMDPEKAVEMVDENTICVAAILGSTLNGEFEDVKRLNDLLIEKNKETGWDTPIHVDAASGGFIAPFLYPELEWDFRLPLVKSINVSGHKYGLVYAGIGWAIWRNKEDLPDELIFHINYLGADQPTFTLNFSKGSSQVIAQYYQLIRLGFEGYKNVMENCQENARVLREGLEKSGRFNIISKEIGVPLVAFSLKDNSQHNEFEISETLRRFGWIIPAYTMPPNAQHVTVLRVVIREDFSRTLAERLVIDIEKVLHELDTLPARVNAKLAVAEANGSGVHKKTDREVQLEITAAWKKFVADKKKKTNGVC

SEQ ID NO: 16431 - protein, 1102 aa, Rhodobacter sphaeroides f. sp. denitrificans
MNQNVSPSTVAVRRTDGIDRSQTDWYKDAIIYQLHIKAFQDANGDGIGDFAGLMQRLDYVQALGVTAIWLLPFYPSPLRDDGYDISDYRSINPSYGAMRDFKLFVQEAHKRGLRVITELVINHTSDQHPWFQRARRAKKGSAARDWYVWSDTDQKFPETRIIFLDTEKSNWTWDPVAGAYYWHRFYSHQPDLNFDNPRVLEEVLKIMRMWLEMGVDGLRLDAIPYLVEREGTNNENLPETHDVLKKIRANLDQHFPDRMLLAEANQWPEDTRPYFGEGDECHMGFHFPLMPRMYMALAQADRHPITDIIRQTPEIPEGCQWGIFLRNHDELTLEMVTAEERDYMWRFYAEDSRARINLGIRRRLAPLMKNDRRKIELLNQMLMSMPGTPIVYYGDEIGMGDNYYLGDRDGVRTPMQWSADRNGGFSRCNPQQLYLPTILDPVYGHQAINVEAQAADPSSLLNWTRRLIAVRKQHPAFGRGSMSLLYPRNRKVLAYVRSHEGTDILCVANLSDTAQAVELDLARFRGAVPVELTGRSEFPPVGDLPYMLTLPPYGFYWFILSDQQALPSWHQPMPETLPDFITLTTRDGRAETALTGRETRQFEADVLPNWLPLQRWFGAKEEKISAVKLAVLGSLSADHALVRLDADVGGEAQQYFLPASALWGEEQLRAGAPKLSFTLAKVRRGPQVGALIDGAYDEQMAQAMLEALREGRRLSGAGGEVVFEPGSGLAEIADPGEPRYLGAEQSNISIAFGDRLILKLYRRLRAGEQPDVEVARFLTEVAGYTHTPRYLGVVSLRPAEGEATVLAAAFAFVANMGDAWRGLFDALVRDLGEFGGWSTAEAPEVEKEGFSFPLTIPGLLGQRTAELHQAFATETDEAAFRMEPLRAEHLTGWAEGARREAETMLSVLERQRTHLPEEVLPLAEALLARRDDLLARLDRVTGFEPSGALTRIHGDYHLGQVLLAQDDVAIIDFEGEPRRTLEERREKSSPLRDVAGMLRSFDYAAAAALARHEESFGPASERAVERAEAWRQQAVADFLSAYEGASAGTASLPSDPALKEALLDLFLVQKAVYETSYELGSRPAWVGIPLRGLLELLDRTPA

SEQ ID NO: 16432 - protein, 181 aa, Coxiella burnetii RSA 493
MTKKQKPSQNEDLNLTTAQGTPISDDQNSLKIGDRGPLLLEDFPFREKLFHFDHERIPERVVHARGFGVHGYFETDVSLSEITMAHLFQKKGEKTPVFVRFSTVVGSQGSPDLARDVRGFAVKFYTKEGNWDLVGNNIPVFFIQDPIKFPDLIHAAKAEPDRGFPQAQTANDNFWENFRYQ

SEQ ID NO: 16433 - protein, 648 aa, Nostoc punctiforme PCC 73102
MLTLLKTIRHAIASWWSEFTLQTKLLAVATLVVSLVMSGLTFWAVNTIQQDARMNDTRFGRDLGLLLAANVAPLVADNNLTEVAQFSQRFYSSTSSVRYMLYADETGEIFFGIPFWEAEVENSLTIKRRIQLPEDYPGDGEKPMVRQHMTPDGVVTDVFIPLIVNKKYLGVLAIGINPNQTAVISTNFTRDVTIAVFITIWVMVILAGVINALTITKPIKELLVGVKEIATGNFKQRIDLPLGGELGELILSFNEMAERLERYEEQNIEELTAEKAKLETLVSTIADGAVLIDNNMQVILVNPTARRIFGWETADVVGCNVLHHLPPAVQMEITGPLYEMAAGECESAEFRIFINQPTPRTIRILLTTVLNVQRESIKGIAITVQDITREVELNDAKSQFISNVSHELRTPLFNIKTYIETLHDYGEDLGLEERQEFLQTVNHETDRLTRLVNDVLDLSKLESGRQYNFDGVDLAQAIEQTLRTYQLNAKDKGVELLQEVDTNLPLVMGNYDLLVQVFGNLIGNALKFTKAGGKVAIRAYQLDFKPNHSQSSPVRIEISDTGIGIATEDQHSIFERFFRVENRVHTLEGTGLGLSIVRNIIDRHRSKVHLVSEVGIGTTFWFDLAAFEEKAPPIQVEAITEASKITTV

SEQ ID NO: 16434 - protein, 262 aa, Enterobacter sakazakii
MKVAVGQFAVTPDAQQNAQTCVELMANAASQNAALLVLPEALLARSDSDPDMSVKSAQPLNGDYVQRLREESARNRLTTLLTIHTPTREGRAANTLIALRGGEIIAQYQKIHLYDAFAMQESRLVDAGSALPPLIEVEGMKVGLMTCYDLRFPEMALSLALAGAEILALPAAWVRGPLKEHHWATLLAARALDTTCYMVASGECGNRNIGQSRVVDPLGVTIAAAGECPDLIFVEISAHRVAQVREQLPVLKNRRFAAPQLF

SEQ ID NO: 16435 - protein, 314 aa, Zea mays
MLAVFSGEVVEVPAELVAAGSRTPSPKTKASELVARFLGTSCPAAVSVRLADLGHLAYSHANQALLRPRREPAPWMDAVLCSPLHASAMDGLSAMDGQAWSFAAKDEVFCLFEGVLDNLGRLSQQYGLSKGANEVLLVIEAYKALRDRAPYPASLMLAQLAGAYAFVLFDASTNSLLVASGGDVPLFWGVTADGCVAFSDDIDVLKGSCGKSLAPFPQGCFYSNALGGLKCYENPKNKVTAVPANEEEICGATFQKGRIQRPEVNLKWMLHNSDVASGRGYGAHSAALGDEVSSSVSRPGLGATVHGAWWCNVT

SEQ ID NO: 16436 - protein, 188 aa, Synechococcus sp. PCC 7002
  misc_feature (166)..(166): Xaa can be any naturally occurring amino acid
  unsure (1)..(188): unsure at all Xaa locations
TALAEPEITTQLKYKDHLVNLDAFPVGTNPTQIRAQVEKASTQERIRKIREELGSNKLILSAGRVDYVKGTKEMLVCYERLIERRPELQTKVNLVVAAAKAASGMRVYKNAQSEIERLVGRINGRFAKLNWTPILLFTSALSYEELLGFFGAADIAWITPLRDGLXLVAKEYVVAHGCDAGVLILSEF

SEQ ID NO: 16437 - protein, 404 aa, Thermoplasma volcanium GSS1
MKPFANRCMDHAAFEKEIDEFNERMIEIRRDLHEHPELSYKEVRTAKLVADTLRSFGIEVRENVGGTGVVGLLRGKKGNVTIGLRADMDALPVQEQTGLPFASKNSGVMHACGHDSHVAMLIGAAYVLSKHGDELDGNVKFLFQPAEEDGGRGGALPMIEDGALENPHVDHVFGLHVLGDFPAGYFAIRGGPIMAAPDSFKIEVHGRGGHGSAPWDTVDPIFVSSQIIQALYGMRSRNVDQRDPLVISVCSVHSGTKDNIIPDNALLEGTLRTLDEDVRADMKKKISNTAEAVAGAFGAKADVSFIENAYPVTYNDPAITEEVKSILSSIKGMKTMETKPLLGGEDVSRFLQRAPGTYYFLGTRNEKKGIIYPNHSSKFTVDEDYLKYGALSHVLVAMHFAGKK

SEQ ID NO: 16438 - protein, 324 aa, Pseudomonas aeruginosa PAO1
MGQLIDGRWHDQWYDTQKDGRFQRENAQRRHWLGEPAFPAEGGRYHLYVSLACPWAHRTLIVRKLKGLESLVDVSVVSWLMRENGWTFDPAHGSTGDRLDGLAFLHQRYTRDDPHYSGRVTVPLLWDKQAQKIVNNESADIVRIFNSAFDAIGANALDFYPEPLREEIERLNGRIYPAVNNGVYRAGFATRQDAYEEAFVQLFEELDYLEGLLGERRYLAGEYLTEADIRLFTTLVRFDAVYHGHFKCNLRRIEDYPNLSGWLRELYQRPGIGETVDFEHIKGHYYASHRTINPTGIVPLGPRLDLARAPGRERLPGKGIWGEG

SEQ ID NO: 16439 - protein, 424 aa, Dehalococcoides ethenogenes 195
MEKALLEIEEKARLAKAASRPLSYASSAQKDAALKNIAACLLNNAPAILEANLKDQTEAKAAGMTAAMLDRLIITQSRLEGIAKDTLAIAALPDPVGEIFDMNTMPNGLVIGKKRVPLGVIAAIYESRPNVTVDIAALCLKAGNAVILRGGKETIHSNTILARLIRQAVEEAGLPQEAVQFIENTEHSLVNHLLKLSDQIDLVIPRGGAGLISYVKQNSFIPVVAGGIGVVHIYVDADANIADAVNIAYNSKVQRPTVCNAMDTLLVHKDIAAAFLPVVAAEWSKAGVEIRADKTAMEILENASSCKLIPAAADDWGKEFLALVAAVKVVDSLDEALSHIARYGSGHTESIVTQNYTSSQRFLNEVDAAAVMVNASTRFTDGSQFGLGAELGISTQKMHARGPMGLKEITSYKWIVYGNGQIRG

SEQ ID NO: 16440 - protein, 272 aa, Dehalococcoides ethenogenes 195
MSVIALLVVVTGFNTLMLFQKSDQLSQAETQINSLTQSLASLNSLGGDISSLQQDFSDLQSQLQQINTDLTCHVCAVADVVSLIEPSIVRVDVSGRNFSASGSGTIIDKRGFILTNYHVIEGATTIRVTLMEGAIYSASVVGSDVGRDIALLRMSATGGQEFPAVTLATMADIKVGMDVVAAGFPLGTDLAGPATFTKGIVSAMRTYEGYLYVQTDAAINPGNSGGCMVNMAGLMIGIPSAGIVPYGEDIEDINLVIPVDDILSFLALYLPG

SEQ ID NO: 16441 - protein, 185 aa, uncultured bacterium
GCTSGMDAVADGAELIEDGRADVVIAGATDAPISPITVACFEAIKATSPNNDDPAHASRPFDISRDGYVLGEGAAVFVLEPADQARRRRAHIYCEIAGYAQRSNAYHMTGLTADGLEMAEAIRVAMGRARLVPGDIDYINAHGSGTRQNDRHETAAFKASLGARAYEIPVSSIKSMVGHSLGAIG

SEQ ID NO: 16442 - protein, 394 aa, Dehalococcoides ethenogenes 195
MTTAQKWIGVLLSLVLVGVSAFNTVLLLDQKDQLETAQGQISSLQSQLSQAGTDISSLKSQLTAVDGHLATLDGQIDELLKLSTAQVDAIASVMASVVYIEVDYYDPSTGERGTVSGSGTIMDSRGYILTNRHVVENATHVTVVLPNKQIYDADDFWTDDFMDVAVVKIDAEGLQAASFGDPANLKVGDAVVALGYPLSISPLDGGMTVTAGIVSNLENWFFIDETPYFDVIQTDAAINPGNSGGPMINLQGQIIGINSAGILDAQNMGFAISVATARHIYESLVADGSYSQPYLGIDIDDYYDDISGFPGAEASTGVEVLDVESGSVAALAGLRDGDVIYQFNGQAVTSFSDLLRFLWRMNAGDTVVLETKRNGIERTITITLDERPLSSYYI

SEQ ID NO: 16443 - protein, 185 aa, uncultured bacterium
GCTSGMDAVADGAELIEDGRADVVIAGATDAPISPITVACFDAIKATSPNNDDPAHASRPFDISRDRFVLGEGAAVFVLEPADQARRRRAHIYCEIAGYAQRSNAYHMTGLTADGLEMAKAIRVAMGRARLVPEDIDYINAHGSGTRQNDRHETAAFKASLGARAYEIPVSSIKSMVGHSLGAIG

SEQ ID NO: 16444 - protein, 421 aa, Streptomyces avermitilis MA-4680
MTRRVAVTGVGIVAPGGVGVPAFWDLLANGRTATRGITLFNPEGLRSRIAAECDFDPAAHGIDAAAAERADRYVQFAMVAAREAVGDAGLGPEKEDPWRIGVSLGTAVGGTTRLEHDYVAVSETGRRWDVDHRLADPHLHRAFSPSTLASEVAEQFGAHGPVQTVSTGCTSGLDAIGYAFHAVQEGRVDVCIAGASDSPISPITMACFDAIKATSPNNDDPEHASKPFDKHRNGFVMGEGGAVLILEELEHARARGARVYCEIGGYATFGNAYHMTGLTREGLEMARAIDGALAHARLDGSDIDYVNAHGSGTQQNDRHETAAVKRSLGDHAYRTPMSSIKSMVGHSLGAIGAIEVLACVLALVHQVVPPTANYTTPDPECDLDYVPRTARQVKLRNVLSVGSGFGGFQSAVVLTRPDGRT

SEQ ID NO: 16445 - protein, 533 aa, Propionibacterium granulosum
MAKLIEFNIEARRALEQGMNTLADAVKVTLGPKGRNVVLEKSWGAPTITNDGVSIAKEIELEDPYEKIGAELVKEVAKKTDDVAGDGTTTATVLAQAMVREGLRNVTAGANPMGLKKGIEAAVEVISARLSEMAIDIETKEHIAATATISAGDPSVGETIAEAMDKVGKEGVITVEESNTFGIDLELTEGMRFDKGYISPYFVTDTESMEAVLEDPYILIVNSKISSLKDILPVLEQVMKSSKPLLVIAEDVEGEALAGLIVNKIRGTFKSVAVKAPGFGDRRKAMLADIAILTGGQVISEEVGLSLDAVTLDLLGKARSVRVTKDECTIVDGAGDAEQIAGRVTQIRKEIENSDSDYDREKLQERLAKLAGGVAVIKVGAATEVELKERKHRIEDAVRNAKAAVEEGIIPGGGVALMQASKAATIEGLEGDEATGAQIVLSACSAPLKQIATNAGLEGGVIAEKVANLPAGEGLNAATGEYVDMVKAGIIDPAKVTRSALQNASSIAALFLTTEAVIADKPEPAPAPAGDPG

SEQ ID NO: 16446 - protein, 456 aa, Saccharopolyspora erythraea
MTDTSADLVILGGGSGGYACAFRAAELGLSVVLIEKDKLGGTCLHRGCIPTKALLHAAEVADSARDGDQFGVKTSLEGIDIAGVNSYKDGVVSKLYKGVQGLFKAHKITVVEGAGTLVDAKTVRVDGTRYTGRNVVLATGSYSKSLPGLELGGRVIASEQALNLDFVPEKVVVLGGGVIGVEFASVWRSFGAEVTIVEALPHLVPNEDEFISKRLEREFRKRGIKFKTEVKFTGAQQSAEGVSVRLENGDQYDADLLLVAVGRGPNTAALGFEEAGVTMERGFVRTDDRLRTSVDGVYAVGDIVPGLQLAHRGFQQGIFVAEEIAGLNPQAIDESGIPRVTYSHPEVASVGLTEAAAKEQYGSVETFNYDLAGNGKSQILKTSGAVKLVRPTDGPVVGLHMVGDRVGELIGEAQLIYNWEALPEDVAPLVHAHPTQTEALGEAHLAQAGKPLHVHG

SEQ ID NO: 16447 - protein, 569 aa, Arabidopsis thaliana
MDSARSWFHKFQPRDKPRKKDMFSGSTYGGGVTETTVPDGGNDTETATKLPPLGGDGEALSNSTKQKVAAAKQYIENHYKEQMKNLNERKERRTTLEKKLADADVCEEDQTNLMKFLEKKETEYMRLQRHKMGADDFELLTMIGKGAFGEVRVVREINTGHVFAMKKLKKSEMLRRGQVEHVRAERNLLAEVDSNCIVKLYCSFQDNEYLYLIMEYLPGGDMMTLLMRKDTLSEDEAKFYIAESVLAIESIHNRNYIHRDIKPDNLLLDRYGHLRLSDFGLCKPLDCSVIDGEDFTVGNAGSGGGSESVSTTPKRSQQEQLEHWQKNRRMLAYSTVGTPDYIAPEVLLKKGYGMECDWWSLGAIMYEMLVGYPPFYADDPMSTCRKIVNWKTHLKFPEESRLSRGARDLIGKLLCSVNQRLGSTGASQIKAHPWFEGVQWEKIYQMEAAFIPEVNDDLDTQNFEKFDEEDNQTQAPSRTGPWRKMLSSKDINFVGYTYKNFEIVNDYQVPGIAELKKKESKSKRPSVKSLFGTESDSSSSGSEQQTINRSYSNPTPRGMEPNLRRLDSE

SEQ ID NO: 16448 - protein, 185 aa, uncultured bacterium
GCTSGLDAVADGAELIEDGRADVVIAGATDAPISPITVACFDAIKATSPNNDDPAHASRPFDISRDGFVLGEGAAVFVLEPADQARRRRAHIYCEIAGYAQRSNAYHMTGLTADGLEMAEAIRVAMGRARLVPEDIDYINAHGSGTRQNDRHETAAFKASLGARAYEIPVSSIKSMVGHSLGAIG

SEQ ID NO: 16449 - protein, 184 aa, uncultured bacterium
GCTSGLDAVTDGAELIEDGRADVVIAGATDAPISPITVACFDAIKATSPNNDDPAHASRPFDISRDGFVLGEGAAVFVLEPADQARRRRAHIYCEIAGYAQRSNAYHMTGLTADGLEMAEAIRVAMGRARLVPEDIDYINAHGSGTRQNDRHETAAFKAGLGARAYEIPVSSIKSMVGHSLGAI

SEQ ID NO: 16450 - protein, 296 aa, Staphylococcus aureus subsp. aureus MSSA476
MKIVIIGGFLGGGKTTVLNHLLAESLKESLKPAVIMNEFGKMSVDGALVSEDIPLSELTEGCICCAMKADVSEQLHQLYLKEQPDIVFIECSGIAEPVSVLDACLTPILAPFTTITHMIGVIDASMYKHIKSFPKDIQGLFYEQLAYCSVLFVNKIDSADVETTSKLLKDLEVINPEADIQVGMHGSVTLPISVRQMTATSDNKHKSLHQMINHQFVQSPAKCTKAEFIKRLACLPSHIYRLKGFMTFEDTAHTYLIQFTQGQYELTPVAFSKKVPEYLVLIGKGISKEDYQCLEQ

SEQ ID NO: 16451 - protein, 553 aa, Pisum sativum
MALALASANSFLLPTKTHFALHVSPPPSKKTLLCTNPSSNFSFNKALSSRRRKQAWCVAAAADVKDATLLDGEEDQKVLVGPSSEQERKGEREVADYDWTEEWYPLYLTKNVPHDAPLGLKVYDKNIVLFRDGNDQFQCYEDRCPHRLAKLSEGQLIDGRLECLYHGWQFEGEGKCVKIPQLPADAKIPKSACVKTYEVRDSQGVLWVWMSRKTPPNVSKIPWFENFARPGFQDISTTHELPYDHSILLENLMDPAHVPISHDRTDWSAKREDAQALGFEVTERTDRGFAGWWGREKDGSKPNFLRFEAPCVLQNNREIVDKNGEINHFSGLFLCRPTGQGKSMLIVRFGATKRSPLIKLFPEWYFHQNASKVFEQDMGFLSSQNEILLKEKVPTKELYLNLKSSDTWVAEYRKWMDKVGHGMPYHFGHSTISLPEEPAVVEHAPAGLVAGLSASSPAKGGIGTMHAPNLANRYFRHVIHCKGCSSAIKAFQIWKNVLSGVVVALAALAILVSGRQWKVLLLASASLCSVGVYACSTAIAMNTTNFIRVHRRL

SEQ ID NO: 16452 - protein, 337 aa, Mucor racemosus
MVVQVGINGFGRIGRIVLRATESNKDVQVVAINDPFIPLDYMVYMLKYDTVHGRFDGSVEAKDGKLVVNGHAIAVSAERDPTSIPWGSAGADYVVESTGVFTTTEAASAHLKGGAKKVIISAPSADAPMFVCGVNLEAYKSEYKVISNASCTTNCLAPLAKVINDNFGIADGLMTTVHATTATQKTVDGPSHKDWRGGRAAAANIIPSSTGAAKAVGKVIPALNGKLTGMAFRVPTPDVSVVDLTVNLSKGASYDEIKQAIKKASETTMKGVLGYTSDAVVSSDFVGEVCSSVFDAAAGIQLTPTFVKLIAWYDNEYGYSNRVVDLLVHAAKVDGAL

SEQ ID NO: 16453 - protein, 524 aa, Streptomyces avermitilis
MCLRRETRCFRSRGTGCPEALWSQRCFRSQQARSREPRKRESPMSAAEGPLVVGVDTSTQSTKALVVDASTGRVVASGQAPHTVSAGAGRESDPRQWWDALCEALHQCGDAAHEAAAISVGGQQHGLVTLDAHGDPVRPALLWNDVRSAPQARRLIEELGGPKAWAERTGSVPGPSFTVTKWAWLTEHEPEAVRATAAVRLPHDYLTERLTGQGTTDRGDVSGTGWWASATESYDEEVLTHVGLDPALLPRVVRPGEVVGTVRDSHDLPFSKGTLVAPGTGDNAAAALGLGLRPGTPVLSLGTSGTVYAVSTRRPADPTGTVAGFADARGDWLPLACTLNCTLAVDRVAALLGLDREAVEPGTGVTLLPYLDGERTPDLPHASGLLHGLRHDTTGGQLLQAAYDGAVHALLGALDLVLDADADRSAPLLLIGGGARGTAWQQTVRRLSGRPVQVPEARELVALGAAAQAAGVLTGEDPAAVARRWDTAHGPVLDAVERDEATLARISGVLSDAAPLLEREPDRR

SEQ ID NO: 16454 - protein, 225 aa, Oryza sativa (japonica cultivar-group)
MAPMKVYGWVVSPWMARVLVALEEAGAEYEVVPMSRSGGDHRRPEHLARNPFGEIPVLEDGDLTLYQSRAIARYIFRKYKPEFLGLGEGGSLEESAMVDVWLDVEAHQHEAAVRPILWHCIINKFEGRDRDQGVVDESVRKLEKVLGVYEARLSGSRYLAGDRISLADLSHFSNMRYFMATEYAGVVDAYPHVKAWWEALLARPTVQKVMAGMPPDFGFGSGNIP

SEQ ID NO: 16455 - protein, 99 aa, Amphicarpaea bracteata
  misc_feature (62)..(62): Xaa can be any naturally occurring amino acid
  misc_feature (91)..(91): Xaa can be any naturally occurring amino acid
  misc_feature (96)..(96): Xaa can be any naturally occurring amino acid
  unsure (1)..(99): unsure at all Xaa locations
AARKSAPTTGGVKKPHRYRPGTVALREIRKYQKSTELLIRKLPFQRLVREIAQDFKTDLRFXSHAVLALQEAAEAYLVGLFEDTNLCAIHXKRVTXMPK

SEQ ID NO: 16456 - protein, 185 aa, Shigella dysenteriae
RPGKINLGIGVYKDETGKTPVLTSVKKAEQYLLENETTKNYLGIDGIPEFGRCTQELLFGKGSALINDKRARTAQTPGGTGALRVAADFLAKNTSVKRVWVSNPSWPNHKSVFNSAGLEVREYAYYDAENHTLDFDALINSLNEAQAGDVVLFHGCCHNPTGIDPTLEQWQTLAQLSVEKGWLPL

SEQ ID NO: 16457 - protein, 418 aa, Cryptococcus neoformans var. neoformans JEC21
MLAYLHAAGMHNAYAALQHDAALADVDPRDRAVGLLEKKWTSVIRLQKKVIDLENRNAALLAELAAAARPAAPGPFLPRPPPRHTLASHRAPVTRLAFHPTWTLLASASEDATVKLWDWEAGDMERTLKGHTKAVMDVDFDPRGGLMATCSSDLTLKLWDTANQYTNVKTLHGHDHSVSSVRFMPDGETLVSASRDKTIRVWQVSSGYCIKTFSGHAEWVREAVPSEDGRWLVSASNDQTSRIWDFSTGETKMELRGHEHVVECAVFAPVNAYPAIRELAGLKPPAPRDTRAKSPGVYAATGSRDKTIKLWDALSGQCLRTLVGHDNWIRALVFHPSGKYLLSASDDKTIKVWDLANGRCTKTIEAHSHFVTSMTWGRAVGASGGIEKVNGDASSKEPRRINVLATGSVDQTIKVWTP

SEQ ID NO: 16458 - protein, 205 aa, Neisseria meningitidis Z2491
MPYTEDMRPGDTANPYGASKAMVERMLTDIQKADPRWSVILLRYFNPIGAHESGLIGEQPNGIPNNLLPYICQVASGRLPQLSVFGGDYPTPDGTGMRDYIHVMDLAEGHVAAMQAKSNVAGTHLLNLGSGRASSVLEIIRAFEAASGLTIPYEVKPRRAGDLACFYADPSYTKAQIGWQTQRDLAQMMEDSWRWVSNNPNGYDD

SEQ ID NO: 16459 - protein, 375 aa, Brachyspira pilosicoli
MSERRVVITGLGIVSCLGNDVKTFWDNLLNGVSGIKPLSKYFDPEKEQLVTRIGGEVAALEGDYYSDKKMLRRLDPFITYGVYAAYHALKQAGIEPKTGFDPLRAGCVLGSGIGGITTLLNNHNVILADGPSRVSPFFVPMQIINMTPGLIAMEYGMNGPNYSTVTACASSNHSIGLGYKHIKDNEADIMIVGGSEATINPLTIAGFNNARALSTKNDEPTKASRPFDKGRDGFVIAEGAGILVLEEYEHAKKRNANILAEVSGYGFTCDANHITAPLEDGAMGARAMSLAIESAKISPDKIDYVNTHGTSTPVGDIAEIKAIKKALGEDHAKKIKVNSTKSMTGHALGAAGGIEAIATVMSIIDSKVHPTINVE

SEQ ID NO: 16460 - protein, 194 aa, Shigella dysenteriae
ADERPGKINLGIGVYKDETGKTPVLTSVKKAEQYLLENETTKNYLGIDGIPEFGRCTQELLFGKGSALINDKRARTAQTPGGTGALRVAADFLAKNTSVKRMWVSNPSWPNHKSVFNSAGLEVREYAYYDAENHTLDFDALINSLNEAQAGDVVLFHGCCHNPTGIDPTLEQWQTLAQLSVEKGWLPLFDFAYQ

SEQ ID NO: 16461 - protein, 185 aa, uncultured bacterium
GCTSGLDAVAEGAEMIEDGRADVVIAGATDAPISPITVACFDAIKATSPNNDDPAHASRPFDASRDGFVLGEGATVFVLEPADEARRRGAHIYCEIAGYAQRSNAYHMTGLKADGLEMAEAIRVAMGRARLAPEDIDYINAHGSGTRQNDRHETAAFKASLGARAYRVPVSSIKSMVGHSLGAIG

SEQ ID NO: 16462 - protein, 526 aa, Oryza sativa
MMSGSESQQEREHRQQQEMNISFGMMMNHGHHHYGQHQQQHHHHPPPSSSSSSSMHAAAASFMSSKEASAGAYDHLGELDQALFMYLDHGSHAASHQEQRQTLNIFPSQPMHVEPSPKGEISLVLSPAAVGTKMARSPDHHHHHQQQAAAAMEELATGSRRQDHHHLQHQPFAAEPAGINRDVKPVTAKKDHRRGVSTGERDPKTLRRLAQNREAARKSRLRKKAYIQQLESSRIRLAQLEQELHTARAQGVFFPGSGGLIGEGGSGKGVLLGGIDGVGGGGGGGLSSEAAMFDVEYGRWQEEHHRLMYELRAALQQQLPEGELQVYVESCLAHHDEVAAIKDGAIRGDVFHLISGVWMSPAERCFLWLGGFRPSEVIKGMQMLVAHVEPLTEQQIVGVYGLQQSALETEEALTQGLDALYQSLSDTVVSDALSCPSNVANYMGQMAVAINKLSTLEGFVRQAENLRQQTLHRLQQVLTTRQMARSLLAVSDYFHRLRTLSSLWVTRPRHPPHDHQPPPHSAAPHT

SEQ ID NO: 16463 - protein, 406 aa, Escherichia coli
MKRAVITGLGIVSSIGNNQQEVLASLREGRSGITFSQELKDSGMRSHVWGNVKLDTTGLIDRKVVRFMSDASIYAFLSMEQAIADAGLSPEAYQNNPRVGLIAGSGGGSPRFQVFGADAMRGPRGLKAVGPYVVTKAMASGVSACLATPFKIHGVNYSISSACATSAHCIGNAVEQIQLGKQDIVFAGGGEELCWEMACEFDAMGALSTKYNDTPEKASRTYDAHRDGFVIAGGGGMVVVEELEHALARGAHIYAEIVGYGATSDGADMVAPSGEGAVRCMKMAMHGVDTPIDYLNSHGTSTPVGDVKELAAIREVFGDKSPAISATRAMTGHSLGAAGVQEAIYSLLMLEHGFIAPSINIEELDEQAAGLNIVTETTDRELTTVMSNSFGFGGTNATLVMRKLKD

SEQ ID NO: 16464 - protein, 373 aa, Dehalococcoides ethenogenes 195
MNGNCYKRIVIKLGTSLLTGGTGKLDHERMADLCRQIADLTRLGTEVIIVSSGAIAAGRAKMGLRHIPKDVPFKQVLAAIGQSQLMNYYDQLFSPHGLTVAQGLLTKSDLSDRSGYLNARNTLLALMELGVITIVNENDVVAVDEIQQAKFGDNDNLSAMVANLIEADLLLILTNIRGLYTADPTLHPDARLITEVKEITEELEKLAAGSSNKLGTGGMVTKLEAARLATSSGVNVIIADGHIPDIILKLASGETEGTRFMPSLHKPDSRQRWMMSGLCTRGNICIDDGAVKAIRENQKSLLAAGVQQSEGKFGRGDIVKLSDSRGKRLGYGITNYSSDDVSKIKGLHTDEINTVLAGNQGPEIIHRNNLVVI

SEQ ID NO: 16465 - protein, 185 aa, uncultured bacterium
GCTSGMDAVADGAELIEDGRADVVIAGATDAPISPITVACFDAIKATSPNNDDPAHASRPFDISRDGFVLGEGAAVFVLEPADQARRRRAHIYCEIAGYAQRSNAYHMTGLTADGLEMAEAIRVAMGRARLVPEDIDYINAHGSGTRQNDRHETAAFKASLGARAYEIPVSSIKSMVGHSLGAIG

SEQ ID NO: 16466 - protein, 290 aa, Arabidopsis thaliana
MTLEALSSNGLLNFLLSETLSPTPFKSLVDLEPLPENDVIISKNTISEISNQEPPPQRQPPATNRGKKRRRRKPRVCKNEEEAENQRMTHIAVERNRRRQMNQHLSVLRSLMPQPFAHKGDQASIVGGAIDFIKELEHKLLSLEAQKHHNAKLNQSVTSSTSQDSNGEQENPHQPSSLSLSQFFLHSYDPSQENRNGSTSSVKTPMEDLEVTLIETHANIRILSRRRGFRWSTLATTKPPQLSKLVASLQSLSLSILHLSVTTLDNYAIYSISAKVIKLKPYHLNRTKPD

SEQ ID NO: 16467 - protein, 185 aa, uncultured bacterium
GCTSGMDAVAEGAEMIEDGRADVVIAGATDAPISPITVACFDAIKATSPNNDDPAHASRPFDASRDGFVLGEGATVFVLEPADEARRRGAHIYCEIAGYAQRSNAYHMTGLKADGLEMAEAIRVAMGRAQLAPEDIDYINAHGSGTRQNDRHETAAFKASLGARAYEVPVSSIKSMVGHSLGAIG

SEQ ID NO: 16468 - protein, 175 aa, Triticum aestivum
MAPTVMASSATSVAPFQGLKSTAGLPVSRRSSSAGLGSVSNGGRIRCMQVWPVEGIKKFETLSYLPPLSTEALLKQVDYLIRSKWVPCLEFSKVGFVFREHNSSPGYYDGRYWTMWKLPMFGCTDATQVLNEVEEVKKEYPDAYVRVIGFDNLRQVQCVSFIAFRPPGCEESGKA

SEQ ID NO: 16469 - protein, 397 aa, Arabidopsis thaliana
MMSLSGSSGRTIGRPPFTPTQWEELEHQALIYKYMVSGVPVPPELIFSIRRSLDTSLVSRLLPHQSLGWGCYQMGFGRKPDPEPGRCRRTDGKKWRCSREAYPDSKYCEKHMHRGRNRARKSLDQNQTTTTPLTSPSLSFTNNNNPSPTLSSSSSSNSSSTTYSASSSSMDAYSNSNRFGLGGSSSNTRGYFNSHSLDYPYPSTSPKQQQQTLHHASALSLHQNTNSTSQFNVLASATDHKDFRYFQGIGERVGGVGERTFFPEASRSFQDSPYHHHQQPLATVMNDPYHHCSTDHNKIDHHHTYSSSSSSQHLHHDHDHRQQQCFVLGADMFNKPTRSVLANSSRQDQNQEEDEKDSSESSKKSLHHFFGEDWAQNKNSSDSWLDLSSHSRLDTGS

SEQ ID NO: 16470 - protein, 187 aa, uncultured bacterium
GCTSGLDAVAEGAEMIEDGRADVVIAGATDAPISPITVACFDAIKATSPNNDDPAHASRPFDASRDGFVLGEGATVFVLEPADEARRRGAHIYCEIAGYAQRSNAYHMTGLKADGLEMAEAIRVAMGRARLAPEDIDYINAHGSGTRQNDRHETAAFKASLGARAYQVPVSSIKSMVGHSLGAIGRA

SEQ ID NO: 16471 - protein, 187 aa, uncultured bacterium
GCTSGLDSVGYAQQLIAEGGADVMIAGASDAPISPIAVSCFDAIKATSPNNDDPAHASRPFDASRDGFVLGEGATVFVLEPADEARRRGAHIYCEIAGYAQRSNAYHMTGLKADGLEMAEAIRVAMGRARLAPEDIDYINAHGSGTRQNDRHETAAFKASLGARAYEVPVSSIKSMVGHSLGAIGRA

SEQ ID NO: 16472 - protein, 85 aa, Glycine max
  misc_feature (17)..(17): Xaa can be any naturally occurring amino acid
  unsure (1)..(85): unsure at all Xaa locations
QCGIGKMAATKAYELGXGKVNHKLEFAQLYGMSEALSFGLSNAGFQVSKYMPFGPVDMVMPYLLRRAEENRGLLAASGFDRQLMR

SEQ ID NO: 16473 - protein, 228 aa, Arabidopsis thaliana
MATNEPEHEHRDEEEAGANEDEDTGAQVAPIVRLEEVAVTTGEEDEDAVLDLKSKLYRFDKDANQWKERGAGTVKFLKHKNTGKIRLVMRQSKTLKICANHFVKSGMSVQEHVGNEKSCVWHARDFADGELKDELFCIRFASIENCKTFMQKFKEVAESEEEKEESKDAADTAGLLEKLTVEETKTEEKTEAKAVETAKTEVKAEEKKESEAEKSGEAKKTEESGPST

SEQ ID NO: 16474 - protein, 337 aa, Escherichia coli
MKVLLTGGLGYIGCHIAVELLQQGHDVVIFDNLSNSHLTVLERIKAITQKKVVFIRGDLRSLSDIRKTFESSQIEAVIHLAALKSVSESVRHPLEYYINNVVGSLNLIQAMSHANIKRLIFSSSATVYGQPEHLPITEQASVGKVTNPYGQTKLIIEKILADICLADPEWQITSLRYFNPIGAHPSGMIGEDPRGMPNNILPYITQVAIRRRPYFTILGDDYPTKDGTGVRDYIHVQDLALGHIAALMNAKNKSYQVYNLGTGKGYSVLDIINSFKEINNIDIPFIIEKRRPGDIAECWSSPELAKRELGWQAKFELKDMLRDSWNWQQKNPFGYGN

SEQ ID NO: 16475 - protein, 137 aa, Wolinella succinogenes
MEQTLSIIKPDAVAKNVVGKIIDRFESNGLKVAAAKRLQLSRADAEQFYAVHKERPFFKDLVDFMVSGPVVAMVLEGENAVLKNRDLMGATDPKKAAPGTIRADFADSIDANAVHGSDSLENAKIEIAFFFSGREIN

SEQ ID NO: 16476 - protein, 135 aa, Nocardioides sp. JS614
MSLRTLVLLKPDAVRRGLVGAILSRYEAKGLTIVAMEQRTIDAAVADQHYAEHVAKEFYPPLRDFVTGGPLVALVLEGDNSVDVVRLLNGATDGSKAAPGTIRGDFSLSNRENLVHGSDSPESAEREIGIWFPGL

SEQ ID NO: 16477 - protein, 350 aa, Mesembryanthemum crystallinum
EDEACSYAMTITSGSVPPMVLKAVIELDVLEIIKRAGPGAQLSPAEIANQLPTKNPDAATMLDRMLRLLASYSILSYSLRTLSDGRVERLYGLAPVCQFLTKNQDGVTLGALSLMNQDKILMESWYHLKDAVLDGGIPFNKAYGMSAFEYHGTDPRFNKVFNSGMSNHSTITMKKILDDYQGFEGLSTLVDVGGRHWGYPNMIISKHTTIKGINFDLPHVIEDAPAYPGVEHVEGDMFVSVPKGDAIFMKWICHDWSDEHCLSFLKNCYAALPNHGKVIVCEYILPVAPETSHAARTVFHVDAIMLAHNPGGKERTEQEFQALAKGSGFEGFKVACSAYDTKVMEFLKQN

SEQ ID NO: 16478 - protein, 188 aa, Mougeotia scalaris
VYEDDGQPFTTFSQFWTRWQDMPFQPDNPLSTPNRLVLPPAVELQSMRVDELGLEERQEKSSNALLARAWTPGWANADRSLLVFIQGPLQRYSSSKNKADKHTTSLLSPHLHFGEILRTLKCTIKVRRMKAQWKSQGAEGASQGVDAFVRSLGLREYSRYLSFNFPFTHERSLLSNLKSFPWRLDEAG

SEQ ID NO: 16479 - protein, 160 aa, Ralstonia eutropha JMP134
MRVAQPLENHRVNAGASAQPDQGPACAPASSRRVLVIDDSSTIRRTAEIFLSQAGYQVVLAEDGFEALAKVGDMHPDLIFCDILMPRLDGYQTCSLIKKSPRFHAIPVIMLSSRDGVFDRSRGRLVGAQDHLAKPFTRDALLQAVQACLPGHASGNALPA

SEQ ID NO: 16480 - protein, 250 aa, Arabidopsis thaliana
MVYGKRSSVEVIGFLNIYRHDPWDLPGLSRIGEREWYFFVPRERKHGNGGRPSRTTEKGYWKATGSDRKIISLSEPKRVIGLKKTLVFYRGRAPGGSKTDWVMNEFRMPDNCSLPKDVVLCKIYRKATSLKVLEQRAEMEAKMNQTCPNSPLSSSETISFVGKEENMMTSFRAPQVIAMEEANKIQMHQENAKTEEKQREAETKEPSSSLKLPFGSLPELQLPKPGVEWDQLLSISPWLQNLTPIVNIYW

SEQ ID NO: 16481 - protein, 191 aa, Brassica rapa subsp. pekinensis
  misc_feature (41)..(41): Xaa can be any naturally occurring amino acid
  unsure (1)..(191): unsure at all Xaa locations
VEAISKFMGLNVQMVILGTGKKKMEAQILELEEKFPGKAVXVAKFNVPLAHMITAGADFIIVASRFEPCGLIQLHAMRYGTVPIVASTGGLVDTVKDGFTGFHIGRFNVKCEVVDPDDVIATAKAVARAVAVYGTPAMKEMVKNCMDQDFSWKGPARLWEKVLLSLDVAGSEAGVEGEEIAPLAKENVATP

SEQ ID NO: 16482 - protein, 354 aa, Zea mays
MIDAMQAVSLISCNIANAVPHLTRPSPHACAHTHTHTHTIYLSTYTLPACLQLQLQPITIYTQLASFTYRKHPDRQDQRQRQRCRQEAGRALHSPTPAETKVMAQLPPRAPGGAAPQDHWSAAGEFLGFAAARRGAHRRSASDSAAFLEALPMEDVIGGDGFDRLDDDQLMSMFSDVDAPAVSAGDAAQLMDVADADADADDDGSAASSRAAADGVAADPKRVKRILANRQSAQRSRVRKLQYISELERSVTGLQMEVSALSPRVAFLDHQRSLLTVGNSHLKQRIAALAQDKIFKDAHQEALKKEIERLRHVYQQQQQQQQIKVATTGGADIAAAASMQARQELLACEGAAIR

SEQ ID NO: 16483 - protein, 664 aa, Cryptococcus neoformans var. neoformans JEC21
MIDNEDPSRDVAGAGELGQDWRPIGHTPNQLVLYHPASHALRVRIQPPSPPRSAFPSDIVRANDALRRRSPDSATRSLCLLCRQPVPRNGLGEVAAISGMESYFQTLEHVHSESESFSQGVGIDDLLDAPQPRTSNEENSSAAGYYARFFKEVRKLGMGAEGSVYLAVHHIEGDTLGTYAVKKIAVGESKEYLHKILREVKLLEVLRHTNIIPYYHAWIDTTRFSDLAPPVLALHVLMMYASGGNLDSLLLSRSHSTGFAAGLSADDIADAEPIDQLPKEERIKAFKRRRQSAKTEWANNQRPFTGGRRASRAENRGVLLLSFEEIAQLFGDIIDGLAFLHSNSILHLDLKCSNVLLHWEEGKLVLSGLNVFFFLRPKAMLSDFGTSEEMLRGQRERTGHTGTMEYAPETLVQDAKGRFRPSDSHADMWSLGMILYKMMFLKLPYEECDSYDVLRAQILSYMGFLPDGSLLQNLQRRHIPKRFAFLLKELLDIHPEKRPSAEKTRSVLADIKHHSNQNEDYSSAIVGQTLASLENLSYPSSRSICRRDSVVVNDVHLDADATTPNNGLLPFFPLPKNNLLPSLTDVPERAMTCLAGPAVRLALLFGKLVSIQPSISGVRLPPVVAVILILLALTDLAHQGSFLWSLTCLIAHCAAVLNFSSHEI

SEQ ID NO: 16484 - protein, 338 aa, Pseudomonas syringae pv. tomato str. DC3000
MKVFYDKDCDLSIIQGKKVAIIGYGSQGHAQACNLKDSGVDVTVGLRKGSATVAKAEAHGLKVTDVASAVAAADLVMILTPDEFQSQLYKNEVEPNLKKGATLAFSHGFAIHYNQVVPRADLDVIMIAPKAPGHTVRTEFVKGGGIPDLIAVYQDASGNAKNVALSYASGVGGGRTGIIETTFKDETETDLFGEQAVLCGGTVELVKAGFETLVEAGYAPEMAYFECLHELKLIVDLMYEGGIANMNYSISNNAEYGEYVTGPEVINAESRQAMRNALKRIQDGEYAKMFITEGATGYPSMTAKRRNNAEHGIEVIGEKLRSMMPWIAANKIVDKDKN

SEQ ID NO: 16485 - protein, 724 aa, Zea mays
MVTPASTAPASTASAAAATGSGREVLRLLRYPARCLLPLAAAPRTGTRLTTVLRARTQPAEPELVEQSVNTIRFLAVDAVEKAHSGHPGLPMGCAPLGHVLFDEFLRFNPKNPAWFDRDRFVLSAGHGCMLQYALLHLAGYNGVKMDDLKTFRQWRSRTPGHPENFETPGVEVTTGPLGQGFANAVGLALAEKHLASRFNKTDMKVVDHYTYVILGDGCQMEGVSNEAASLAGHWGLGKLIAFYDDNHISIDGNTDIAFTEDVLARYEALGWHTIWVKNGNTGYDDIRTAINEAKGVKDKPTLIKVTTTIGFGSPNKANTYSVHGNALGSKEVEATRSNLGWFHEPFHVPDEVKRHWSRHIDEGASLEAEWNARFVEYEKKYNQEAAELKSIISGELASGWENALRNYTPEMSPDATRNLSQQCLNALAKVIPGFLGGSSDLATSNMTLLKKFGDFQRDTPEERNIRFGVREHAMGAISNGIAVHSPGLIPYCATFFVFTDYMRASIRLSALSESGVIFVMTHDSVGLGEDGPTHQPVEHLFSLRAMPNILMLRPADGNETSGAYKIAVLNRKRPSVIALSRQKLPQLRGTSVDAVSKGGYIVSDDSSGNKPDFILIGTGSELEIAENAAGELRKKGRTVRVVSLVCWELFEEQPEEYKESVLPSEVTSRISIEAGVTFGWEKYIGQKGKAIGIDRFGASAPAGKIYKELGLTVEHVIAAAEAL

SEQ ID NO: 16486 - protein, 763 aa, Glycine max
MASHIVGYPRMGPKRELKFALESFWDGKSSAEDLQKVAADLRSSIWKQMAGAGIKYIPSNTFSFYDQLLDATATLGAVPPRYGWTGGEIGFDTYFSMARGNATVPAMEMTKWFDTNYHFIVPELGPDVNFTYASHKAVDEYKEAKALGVDTIPVLVGPVTYLLLSKPAKGVEKSFSLLSLLPKVLAVYKEVIADLKAAGASWIQFDEPTLVLDLESHKLQAFTDAYAELAPALSDLNVLVETYFADIPAEAYKTLTSLNGVTAYGFDLVRGTHTLDLIKGGFPSGKYLFAGVVDGRNIWANDLAASLTTLQGLEGIVGKDKLVVSTSSSLLHTAVDLVNETKLDDEIKSWLAFAAQKIVEVNALAKALSGNKDVAFFSANAAAQASRKSSPRVTNEAVQKAAAALKGSDHRRATNVSARLDAQQKKLNLPILPTTTIGSFPQTVELRRVRREFKANKISEEEYVKSIKEEIRKVVELQEELDIDVLVHGEPERNDMVEYFGEQLSGFAFTVNGWVQSYGSRCVKPPIIYGDVSRPKPMTVFWSSLAQSFTKRPMKGMLTGPVTILNWSFVRNDQPRSETTYQIALAIKDEVEDLEKAGITVIQIDEAALREGLPLRKSEQAHYLDWAVHAFRITNVGVQDTTQIHTHMCYSNFNDIIHSIIDMDADVITIENSRSDEKLLSVFREGVKYGAGIGPGVYDIHSPRIPPTEEIADRINKMLAVLEKNILWVNPDCGLKTRKYTEVKPALTNMVAAAKLIRNELAK

SEQ ID NO: 16487 - protein, 753 aa, Zea mays
HQLQTSEKRRVGGKLLLYDSCAHSSTVLGNLGGEEEESSGSQRTTHYSWLHGFLTSLCGGDPAMRIVVWFRRDLRVEDNPALAAAARAGGEVVPAYVWSPEEEGPYYPGRVSRWWISQSLNHLDASLRRLGAGKLVTRRSADAAVALLQLVRDTGATHVYFNHLYDPISLVRDRRLKEMLAAEGIVVQSFNSDLLYEPWEVVDDEGQPFTMFDPFWNRCLSMPYDPPAPLLPPKRINSGDLSMCPSEDLIFEDESERGSNALLARAWTPGWQNADKALTAFLNGPLADYSVNRKKADSASTSLLSPHLHFGELSVRKVFHLVRMKQLVWSNEGNHAAEESCTLFLRSIGLREYSRYLSFNHPSSHERPLLAHLRFFPWVVDESYFKIWRQGRTGYPLVDAGMRELWATGWLHDRIRVVVASFFVKVLQLPWRWGMKYFWDTLLDADLESDALGWQYITGSLPDGRELDRIDNPQFEGYKFDPHGEYVRRWIPELARLPTEWIHHPWDAPVSVLQAAGIELGSNYPLPIVELDAAKGRLQAALSEMWQLEAASRATMNNGTEEGLGDSSEVLFPQELQMEVDRQPAPAEAAANVHVHVHVPMPARRRGDQMVPTMTTSSLNRAGTEVSADLVVANSEEEDTRAQVPFHAHLHLHPRAEAPPAARRTNNGARQHDVFQQPRNHRRDALLAPSASEASSSWTGREGAVVPVWSPPAASGHSDAFAADEADVSSRSYLGRHPQSHRLMNWSQLSQSS

SEQ ID NO: 16488 - protein, 99 aa, Carica papaya
MEPGIVIGGLQDVEGDANNLEYQELARFAVDEHNKKTNAMLQFKRVVNVKQAVVEGLKYCITLEAVDGHKTKVYEAEIWLKLWENFRSLEGFKLLGDAH

SEQ ID NO: 16489 - protein, 339 aa, Neisseria meningitidis Z2491
MKNILVTGGTGFIGSHTVVSLLKSGHQVVILDNLCNSSINILPRLKTITGQEIPFYQGDIRDREILRRIFAENRIDSVIHFAGLKAVGESVAEPMKYYDNNVSGSLVLAEEMARAGVFSIVFSSSATVYGDPGKVPYTEDMPLGDTTSPYGTSKSMVERILTDIQKADPRWSMILLRYFNPIGAHESGLIGEQPNGIPNNLLPYICQVASGRLPQLSVFGGDYPTPDGTGMRDYIHVMDLAEGHVAAMQAKSNVAGTHLLNLGSGRASSVLEIIRAFEAASGLTIPYEVKPRRAGDLACFYADPSYTKAQIGWQTQRDLAQMMEDSWRWVSNNPNGYDD

SEQ ID NO: 16490 - protein, 193 aa, Shigella flexneri
ADERPGKINLGIGVYKDETGKTPVLTSVKKAEQYLLENETTKNYLSIDGILEFGRCTQELLFGKGSALINDKRARTAQTPGGTGALRVAADFLAKNTSVKRVWVSNPSWPNHKSVFNSAGLEVREYAYYDAENHTLDFDALINSLNEAQAGDVVLFHGCCHNPTGIDPTLEQWQTLAQLSVEKGWLPLFDFAY

SEQ ID NO: 16491 - protein, 387 aa, Allomyces moniliformis
IGAKFWEVISDEHGIDQSGTYVGDNPLQLERANVYYNEASAGKYVPRSILVDLEPGTMDSVRAGPYGALYRPDNFIFGQSGAGNNWAKGYYTEGAELVESVLDVVRKEVETCDCLQGFQTTHSLGGGTGSRLGTLLISKVREEFPDRMMCTFSVAPSPKVSDTVVEPYNATLSVHQLVENADMTYCIDNEALYDICFRTLKLANPSYGDLNHLVSAVMSGVTTSLRFPGQLNADTRKLAVNMIPFPRLHFFMCGFAPLTSRGSQQYRSLTVPELTTQMFDAKNMMTACDPRHGRYLTVATIFRGRVSMKEVDHQMCAMQAKNSSHFVEWIPYNVKTAVCDIPPKGLKMSSVFIGNSTSIQELFKRINVQFVSMFRRKAFLHWYTGEG

SEQ ID NO: 16492 - protein, 185 aa, Shigella flexneri
RPGKINLGIGVYKDETGKTPVLTSVKKAEQYLLENETTKNYLGIDGILEFGRCTQELLFGKGSALINDKRARTAQTPGGTGALRVAADFLAKNTSVKRVWVSNPSWPNHKSVFNSAGLEVREYAYYDAENHTLDFDALINSLNEAQAGDVVLFHGCCHNPTGIDPTLEQWQTLAQLSVEKGWLPL

SEQ ID NO: 16493 - protein, 351 aa, Mycobacterium avium subsp. paratuberculosis K-10
MRIRGSTASRRDSFPHRRVGDDGGVAVTKLSGVFRVGELEPAFAEELAARYDVPRLPDGAARDRFLAEHAAEVRALLTWGRPGVDAALIAALPNLEVIVNNGAGVDLIDTAAADRRGIGVSNTPDVLSDTVADTALGLILMTLRRLGAADRYVRAGRWAREGPFPYGRDVSGLQVGILGLGRIGSAIATRLRGFDCAIAYHNRRRIDGSPYRYAASAVELAESVDVLVVATTGDHQAHKLVDRAVLRALGPEGYLINIARGSVVDQEALVEMLAGGELAGAGLDVFADEPHVPAELVGLDNVVLLPHVGSATARTRRAMASLALRNLDSYLATGQLVTPVLRPRRRIPDRN

SEQ ID NO: 16494 - protein, 384 aa, Bacillus clausii KSM-K16
MMNVAIIGTGAICPSHIKGYLEFQDRCKITALCDIYPEKAEAQAKEFDLNVAIYSDYKELLRQENIDLVSVCTPPYTHAAITIEALNQGKNVIVEKPMASSLKECDAMNEAAKRSGKILSVVAQNRFTSPMMKLKHVLDTKLMGPIVHTQVDSFWWRGHCYYDLWWRGTWEKEGGGCTLNHAVHHIDIFRWMNGMPSEITAVMSNVAHDNAEVEDISIAIGRYENGSLAQITSSVVHHGEEQQLIFQGKNARVSVPWKLKASKSLDNGFPVEDKELQEKLQKEYESINDLEYEGHAGQIEDVLHAIEGKKEVLVDGNEGRETLELITAIFESASLGKTVKLPLDETSPFYSREGIIENATYFYEKKTSIENFKVNEITTGGKYE

SEQ ID NO: 16495 - protein, 185 aa, uncultured bacterium
GCTSGLDAVAEGAEMIEDGRADVVIAGATDAPISPITVACFDAIKATSPNNDDPAHASRPFDASRDGFVLGEGATVFVLEPADEARRRGAHIYCEIAGYAQRSNAYHVTGLKADGLEMAEAIRVAMGRARLAPEDIDYINAHGSGTRQNDRHETAAFKASLGARAYQVPVSSIMSMVGHSLGAIG

SEQ ID NO: 16496 - protein, 387 aa, Allomyces moniliformis
IGAKFWEVISDEHGIDPTGTYHGDSDLQLERINVYYNEATGGKYVPRAVLVDLEPGTMDSVRAGPFGQLFRPDNFVFGQSGAGNNWAKGHYTEGAELVDSVLDVVRKEAESCDCLQGFQITHSLGGGTGAGMGTLLISKIREEYPDRMMCTFSVVPSPKVSDTVVEPYNATLSVHQLVENSDETFCIDNEALYDICFRTLKLTTPTYGDLNHLVSAVMSGITTCLRFPGQLNADLRKLAVNLVPFPRLHFFMVGFAPLTSRGSQQYRALTVPELTQQMFDAKNMMAASDPRHGRYLTVAVMFRGRMSMKEVDEQMLNVQNKNSSYFVEWIPNNVKTAVCDIPPKGLKMSVTFIGNSTAIQELFKRISDQFTSMFRRKAFLHWYTGEG

SEQ ID NO: 16497 - protein, 194 aa, Shigella flexneri
ADERPGKINLGIGVYKDETGKTPVLTSVKKAEQYLLENETTKNYLGIDGILEFGRCTQELLFGKGSALINDKRARTAQTPGGTGALRVAADFLAKNTSVKRVWVSNPSWPNHKSVFNSAGLEVREYAYYDAENHTLDFDALINSLNEAQAGDVVLFHGCCHNPTGIDPTLEQWQTLAQLSVEKGWLPLFDFAYQ

SEQ ID NO: 16498 - protein, 185 aa, uncultured bacterium
GCTSGLDAVAEGAEMIEDGRADVVIAGATDAPISPITVACFDAIKATSPNNDDPAHASRPFDASRDGFVLGEGATVFVLEPAGEARRRGAHIYCEIAGYAQRSNAYHMTGLKADGLEMAEAIRVAMGRARLAPEDIDYINAHGSGTRQNDRHETAAFKASLGARAYEVPVSSIKSMVGHSLGAIG

SEQ ID NO: 16499 - protein, 400 aa, Comamonas testosteroni
MKDAVIVSTARTPIGKAYRGAFNDTEAPVLGGHVIRAALNKANVAGADVDDVILGIAAQQGTQGYNLGRLCGYTAGLPESVGGMVIDRMCASGLMSIATAAKGIMTGEMNIAVAGGLESISLVQNKYKNSYRAQSKAVPAAEPTAYIQMIETAELVSQRYGISREAQDEYSLRSQQRVAAAQARDLFDDEIVPLTTVKQLFDKEGNVTGSEEVTLTRDEGNRADTTLESLAKLKPVWKNGQWVEQGQFITAGNASQLSDGASACVVMSADEARSRGLAPLGIYRGVAVAGCRADEMGIGPVHAIPKLLKQHGLTVGDIGLWEINEAFACQVIYSRDKLGIPDERLNVNGGAISIGHPFGTSGARLVGHALLEGRRRGVRFVVVSMCIGGGMGAAGLFELN

SEQ ID NO: 16500 - protein, 333 aa, Enterobacter cloacae
NGVAGSYAEYVPLLHIVGAPCSGVQQRGELLHHTLGDGDFHHFYRMSEPVTAARAILTAQNACYEIDRVLEVMLMQSRPGYLMLPADVAKKPATPPVNALTTPPFPVNEACLNAFRQHAQAMLSVGSSVALLADFLAAFGFIQMLQCWMTDQLPTHTTVILGKGIVKRKHGGFSYPYHGAGGQRGPVPAIEGADTVICIGTRFTDTVTAGFTQQFARERTIEIQPFAARVGDVWFSGIPMREAINALIPLVRARAHAAANHRPPQAARAPVHQGTLNQETLWQTVQQFIRPDDILLADQGTAAFGAASLRLPAGAELLVQPLWGSIGYTLAAA

SEQ ID NO: 16501 - protein, 324 aa, Bacillus halodurans C-125
MRLLFTRALDPEWIEPLKDEHDIRMWTEENIPMPRELFLKELEEADGVFTNLTDRFDVEAFERAKRLKVVSTMAVGYDNIDIKEATKRGVSVGHTPGVLTEATADLTFALLMATGRRLRESIDYVRNDQWKSWGPFMLTGQAIYGTTLGIIGMGRIGQAVAKRAKGFNMTLLYHNRSRNEQAEKELGATYCSLDHLLARSDYVVLLAPSTDETRKMMGPAQFQKMKSTAHFINTSRGTNVDEQALYRALTEGWIAGAGLDVYEKEPISADHPLVQLPNVVALPHIGSAEVGTRREMVRLAIENLLLGIKGKSLTHIANPEVLEK

SEQ ID NO: 16502 - protein, 553 aa, Listeria monocytogenes str. 1/2a F6854
MKEKDWWKKSVVYQIYPKSFNDSNGDGVGDIQGIIEKLDYLKELGVDVIWLSPVYDSPQDDNGYDIRDYQKIYEEYGDMATFDQLLQGLHDRDMKLVMDLVVNHTSDEHKWFEESRKSKDNPYRDYYFWREENEINNWGSIFSGPAWELDEKTGEYYLHLFSKKQPDLNWENPKLRQDVYNMMKFWLDKGIDGFRMDVINFISKNTDFPDGPVPDGQIYGDAGNDFCNGPRIHEFLQEMNQEVTSKYDVMTVGEMPGASTTDAQIYTNPANNEVDMIFTFEHMNLDSDGDNKWDLKPIYLPDLKENMSEWQVALQENGWNSLYWNNHDQPRIVSRFGNDNRFRVRSAKMLATCLHMMKGTPYIYQGEEIGMTNVHFETLDDYRDIETLNMYKERKEQGHSHESIMQSIYTKGRDNARTPYQWDNSENAGFTTGTPWLKVNPRYTEINNEEALKNPDSIFYYYQNLIKLRKTTEIITTGNYRLLLPKDEAIFAYERYTENEKLVVLCNFTEEEQVIFDENILNELQKGSVLVNNVPNIIEGTLRPYEAIVYQIK

SEQ ID NO: 16503 - protein, 185 aa, uncultured bacterium
GCTSGMDAVAEGAEMIEDGRANVVIAGATDAPISPITVACFDAIKATSPNNDDPAHASRPFDASRDGFVLGEGATVFVLEPADEARRRGAHIYCEIAGYAQRSNAYHMTGLKADGLEMAEAIRVAMGRARLAPEDIDYINAHGSGTRQNDRHETAAFKASLGARAYEVPVSSIKSMVGHSLGAIG

SEQ ID NO: 16504 - protein, 475 aa, Bacillus halodurans C-125
MFRGKLYIDGTWTGDLLDTFDVKNPATGEVVGVMPNGGKAEAAAAIEAAQRAFLKWRKYTAAERANFLMTWHDLLLQQKEEIAEMLTMEMGKPLAEARGEIEYSASFIRWFAEEGKRVYGRTVPASAENKRIHVQKQPVGVVAAITPWNFPAAMIVRKMAPALAAGCTFVGKPAELTPLTAVKIVELCEEAGFPKGVVNLVCGDAKEIGEEMTSHEHVRKLTFTGSTAVGKLLMKQSAGRMLNLSLELGGQAPMIICDDADLDKAVAGVVASKYRNAGQTCVCGNRIYVQETIVDEFVKRLTGKVVQLKVGNGLEEGVHIGPLIEKKGYEKVKAHVDDAVAKGARVVIGGKGQEGNDSYFYDPTILTDVHDEMLVMQEETFGPVAPIQTFATDEDVIEKANGTRYGLAAYFFTENYARGIRLSEALDFGIVGWNDGAPSIAQAPFGGMKESGLGREGGQEGIEAFLETKFVSIGL

SEQ ID NO: 16505 - protein, 202 aa, Bacillus clausii KSM-K16
MTKTNSNLVWHEASVSKQERHARHNHKGCVLWFTGLSGSGKSTLANALDRSLFDAGLSTYVLDGDNIRHGLNKDLGFSDRDRQENIRRIGEVAKLFVDAGTIVSTAFISPFQSDRDQARALLADGEFVEVYVKCPLEECERRDVKGLYKKARNGEIPQFTGISSPYEEPETPEITVDTSVQTVEESVEQIIGWLEKHHILTR

SEQ ID NO: 16506 - protein, 184 aa, uncultured bacterium
CTSGLDAVAEGAEMIEDGRADVVIAGATDAPISPITVACFDAIKATSPNNDDPVHASRPFGASRDGFVLGEGATVFVLEPADEARRRGAHIYCEIAGYAQRSNAYHMTGLKADGLEMAEAIRVAMGRARLAPEDIDYINAHGSGTRQNDRHETAAFKASLGARAYQVPVSSIKSMVGHSLGAIG

SEQ ID NO: 16507 - protein, 573 aa, Candida albicans SC5314
MCGIFAAYRQPEVEDFKSKALQYSKLIRHRGPDWSGNVVQNSTILCHERLAIVGLDSGAQPIVSPDGNFTLAVNGEIYNHIQLREQFPDYKFKSLSDCEPIIPLFTKYDIDAPKHLDGMFAWVLYDKKNDRIVAARDPIGITTLYMGKSSKSPKTRYFASELKCLIEECDEIFAFPPGHVYDSNTDEITRYFQPSWWDASKVPEQHVDFKKVRETLELAVRKRLMAEVPYGVLLSGGLDSSLIASIASRETKKAAQASFNPEGIDANKELSGVDDKGSLHSTGVFNQLHSFAIGLPGAPDLLAAEKVAHFIGTIHHSHTFTLEEGLDALDDVIYHLETYDVTTIRASTPMYLLSRKIKAQGVKMVLSGEGSDEIFGGYLYFANAPSAKEFHEECVKRVKNLHYADCLRANKSTMAWGLEARVPFLDKQFLEVCMNINPEDKLIQPGKIEKYILRKAFDTSDEPDVKPYLPEEILWRQKEQFSDGVGYSWIDGLKDTAEKMVSDEEFAHPKPEWGDDIPTTKEAYWYRCKFDKMFNGSKAAASTVMRWIPKAEWGCHADPSGRYAATHDHKVAQ

SEQ ID NO: 16508 - protein, 298 aa, Arabidopsis thaliana
MATNGSASSAHVSQKEADVRMMCAAEVHLGTKNCNYQMERYVFKRRNDGIYIFNLGKTWEKLQMAARVIVAIENPQDIIVQSARPYGQRAVLKFAQYTGANAIAGRHTPGTFTNQMQTSFSEPRLLILTDPRTDHQPIKEGALGNIPIIAFCDTDSPMRFVDIGIPANNKGKHSIGCLFWLLARMVLQMRGTIAAGQKWDVMVDLFFYREPDYTKPEDEDEAGPQAEYGALPAPEYGMVGGDQWTTAQIPDAAWPGEGQAPISAAPAAASWSDSAAAPADGGWEAAAPPSGAPAAGWE

SEQ ID NO: 16509 - protein, 582 aa, Oligotropha carboxidovorans
MTIDEIKSFRQWGSKTPGHPEYGHTQGVETTTGPLGQGIATAVGMALSERMTNARLGNDLFEHYTYVICGDGCLMEGVSQEAISLAGHLKLGRLIVLFDDNGISIDGSTSLSCSDDPLARAAASGWSVRRVDGHDPKAVEKAIAEERETDRPSLIACKTRIGYGSPGREGSEKAHGAPLGAEEIVSTRAALDWPHAPFEIPRDVLAAWRTVGEHGQTEHSKWVDRLAQLDREEREHINSVLSGKLSSQYDAAMRKLCAGFATEQPKIATRQASQQVIEMLASVLPNLAGGSADLTHSNLTHAKSQKPIKPGDYAGNYIHYGIREHGMAAAMNGIALHGGFIPYGGTFLTFADYSRPAIRMAALMGLRVIHVMTHDSIGLGEDGPTHQPVEHLASLRAIPNLLVFRPADAVETAEAWDCALRAESRPSILCLSRQALPTFRSGSSAINKVAQGAYLVLDPQDRCDVTLIATGSEVAIALDAARLLEKDDIRAAVVSAPCLELFAEQPEEYRRAVLGQRPRVAIEAAIEGAWARLIGDDGEFVGMTGFGASAPANVLYREFGITPEGVVLAAKRSIARSSSKGV

SEQ ID NO: 16510 - protein, 325 aa, Pseudomonas putida KT2440
MAKRIQFSQHGGPEVLQFVEFEPTPPGPQQVRVRNHAIGLNFIDTYFRSGLYAPPSLPSGLGTEAAGVVEAVGEGVSRLKVGDRVAHAGGPLGAYSEVHTLPEANLVKLPDTISFEQAAAVMLKGLTVQYLLKQTYEVKAGDVILFHAAAGGVGSLACQWAKALGAKLIGTVSSAEKAERAKALGAWATIDYSREDVAKRVLELTDGKKCPVVYDGVGADTWLTSLDCLRPRGLMVSFGNASGAVSGVNLGILAQKGSLYVTRPTLATYANNAENTQAMADDLFAMIGSGKLAVDIQQRYPLSEAAKAQAELSARRTVGSTVLIP

SEQ ID NO: 16511 - protein, 429 aa, Ralstonia eutropha JMP134
MSRNQQLFDRAQQTIPGGVNSPVRAFRSVGGTPRFITCAEGAYMWDADGQRYIDYIGSWGPMIVGHAHPDVVRAVQETAAHSFSFGAPTEAEIDMAEEICKLVPSIEQVRLVSSGTEATMSALRLARGFTGRDLIIKFEGCYHGHADSLLVKAGSGLLTFADTTQNAPSSAGVPADVTRHTMVLEYNNVAQLEEAFAQHRGEIAAVIVEVVAGNMNLVRASDAFLKAMRELCTRDGAVLIFDEVMTGFRVALGGAQSHYGITPDMTCLGKVIGGGMPAAAFGGRRDIMAKLAPLGGVYQAGTLSGNPLAVAAGLTTLRLIQAPGFYDKLTAQTRKLADGLSEAARAAGVPFAADAIGGMFGIYFRDGVPGSFAEVTKSDTARFNRFFHAMLDNGVYLAPSAFEAGFVSACHDDAILQATLDAARKAFAA

SEQ ID NO: 16512 - protein, 447 aa, Staphylococcus aureus subsp. aureus MSSA476
MYMSKAHQLIQEDEHYFAKSGRIKYYPLVIDHGYGATLVDIEGKTYIDLLSSASSQNVGHAPREVTEAIKAQVDKFIHYTPAYMYHEPLVRLAKKLCEITPGDFEKRVTFDLTGSDANDGIIKFARAYTGRPYIISFTNAYHGSTFGSLSMSAISLNMRKHYGPLLNGFYHIPFPDKYRGMYEQPQANSVEEYLAPLKEMFAKYVPADEVACIVIETIQGDGGLLEPVPGYFEALEKICREHGILIAVDDIQQGFGRTGTWSSVSHFNFTPDLITFGKSLAGGMPMSAIVGRKEIMNCLEAPAHLFTTGANPVSCEAALATIQMIEDQSLLQASAEKGEYVRKRMDQWVSKYNSVGDVRGKGLSIGIDIVSDKKLKTRDGSAALKICNYCFEHGVVIIAVAGNVLRFQPPLVITYEQLDTALNTIEDALTALEAGNLDQYDISGQGW

SEQ ID NO: 16513 - protein, 568 aa, Arabidopsis thaliana
MAAGRRKLSESAPLEEEGNDGNGAVVGKKPSKSVKRTTKKKVVVKDEPLEEISEFLVDNDDVLDKESIVSALKPKKTRTRKKASSDVEEVKTEKKVRRKRTVKKDKDVEDDLATIMDAEVSDVEEALAVESTDTESEEEEIDLSKHEGEDISHTYGWPPLVCCFGSAQHAFVPSGRPANRLLDYELHERMRDAKWAPEKYIRAPGGCAGGVAIALASLGGKVAFMGKLGADDYGQAMLYYLNVCKVQTRSVKIDGKRVTACSTMKISKRGRLKSTCIKPCAEDSLSKSEINVDVLKEAKMFYFSTHSLLDKKMMSTTIQAIKISKQLGNVIFYDLNLPLPLWHSSEETKSFIQEVWNLADVIEITKQELEFLCGIEPTEEFDTENNDISKFVHYPPETVEQLWHENLKVLFVTNGTSKIHYYTKEHNGAVSGMEDVPITPFTRDMSASGDGIVAGLIRMLTVQPDLMNNKGYLERTARYAIECGIIDQWLLAQTRGYPPKDDMEEEEDDEEEDEVESDPNGIRSITEKEYRTSKPYDEPDGPYVMKPVEEREYKKLELVGSMFEDGSL

SEQ ID NO: 16514 - protein, 240 aa, Lactobacillus plantarum WCFS1
MMKDPLALQLLGEFLGTFILILLGDGVVAGVTLNKSKAQNAGWVAITLGWGFAVTMGVYASSFMSPAHLNPAVSLGMAVAGKFPWAYVIPYSAAQIAGGVIGGLVVWLHYYPHWQATKDAGAILGIFATGPGIRRYFWNFISEVIGTFVLVFGLLAFTKGQFTAGLNPIVVGILIIAIGLSLGGTTGYAINPARDLGPRIAHAVLPIANKGTSDWAYSWVPIAGPLVGGALGALLFNVLP

SEQ ID NO: 16515 - protein, 242 aa, Zea mays
MNPNFNSVWSAPEINMMNSLITSHIANNTYTNNNQHVVASRSAIVNHNNFGMPTEVVPPVDNMDMMQGYLMADTDAMRLVQGQQHMPNVVPNQRRHAVKFWTTDEHRNFLRGLEVFGRGKWKNISKYFVPTRTPVQISSHAQKYFRRQECTTEKQRFSINDVGLYDTQPWVRQNNSSSSWEALTFTAGRAYNNTNYCAFNSLPYASSQASNNQVATWITDQQATASSSIAPPATEESQIYNR

SEQ ID NO: 16516 - protein, 254 aa, Glycine max
GEIETLKMEKKQSEVMEQLVKQASASPNANALTSILVQATSHPNVFSFSQFLALPNLLQLEATENSTYLDMLRLFAHGTWSDYKSNADCFPQLIPDQILKLKQLTVLTLAETYKVLPYNQLMQELDMTNVRELEDFLISECMYSVQFAACRDLRHAQLGSMIQTLSNWLSTSENLLVSIQEKIKWADAMSEIEKKHRKDVEEKVQEVKSLIKEAENTILNIVIDEDAMGNLVALAYLIFTWHATDNTAFGSHRY

SEQ ID NO: 16517 - protein, 488 aa, Vibrio cholerae O1 biovar eltor str. N16961
MRSLAMLPTDFPFFHQSAFINGQWILGEPQARQTVTNPFDGSLIGSVPLLSAAQVQEAIAGAQAAQILWCQQPAENKAKILRRWYELIEQHHESLAKLLTIEQGKPLAEARGEIHYAASFVEWYAEEAKRAYGELIPSHKPDARIMVSRQPVGVVAAITPWNFPAAMITRKCAPAFAAGCAVVLKPAPDTPFTALALADLAQQAGIPDGLLQVVTGDAIEIGRVLTESKTVRKLSFTGSTGVGKLLMAQSANNVKKLSLELGGNAPFIVFEDADINAAIDGVMVAKFRNAGQTCVCANRIYVHDAVYDQFAAKLVDRVSRLNVGYGLDAGVNIGPLINDAAVAKVTSHIVDAQSKGAKVMFGALPEAGSRLFQPHVLTEVTDEMRVADEETFGPLAALFRFSSEQEVIERANATDSGLAAYCYTQSLRRAWHMSEALEAGIVGINEGLISTTLAPFGGIKESGLGREGAKHGLEEYLEVKYTLMGGLA

SEQ ID NO: 16518 - protein, 212 aa, Pseudomonas syringae pv. tomato str. DC3000
MNELQDLIDNNARWADAINQEDPEFFAKLARQQTPEFLWIGCSDARVPANEIVGMLPGDLFVHRNVANVVLHTDLNCLSVIQYAVDVLKVKHILVTGHYGCGGVRASMQDRQFGLIDGWLRTIRDLYYENRDVLAKLPTEEERVDRLCELNVIQQVANVGHTSIVQNAWHRGQSLSVHGCIYGIKDGRWKSLDVTISGFEQLPPQYRLRPQD

SEQ ID NO: 16519 - protein, 430 aa, Pediococcus pentosaceus ATCC 25745
MAKKEEYHNPEAILDIHDKVKFPQLVGLSIQHMFAMFGSTVLVPILVGLNPGIALFSSGVGTLLYILITRAKIPAYMGSSFTFIVPMLALMKTTGYQGIAQGTISVGVVYLIVALLISWMGSDWLDKILPPIVVGPIIMVIGLSLAGTAATDATMRSVGSQSVYDIKYFIIALATLLITIVFNMYLKGFISLIPILLGLIAGYLIALVMGVVDLSTVQQAKWLVAPNFEIPFVNYQMHFNIGAVLSMMPLAFVTMTEHTGHIMVLNTLTHRNFFKDPGLHYTLSGDGVASIVAGFIGGPPVTSYGENIGVLAVTKVHSVYVLMGAAVSAIIFSFVGKLSALIQSIPNPVIGGISFLLFGTIAANGLRILIDNKIDFNQKRNLMIAASILVIGIGNASFNIGNLSFSGLAVATVLGVILNLVLPKQALSEK

SEQ ID NO: 16520 - protein, 387 aa, Allomyces neomoniliformis
IGAKFWEVISDEHGIDPTGTYHGDSDLQLERINVYYNEATGGKYVPRAVLVDLEPGTMDSVRAGPFGQLFRPDNFVFGQSGAGNNWAKGHYTEGAELADSVLDVVRKEAESCDCLQGFQITHSLGGGTGAGMGTLLISKIREEYPDRMMCTFSVVPSPKVSDTVVEPYNATLSVHQLVENSDETFCIDNEALYDICFRTLKLTTPTYGDLNHLVSAVMSGITTCLRFPGQLNADLRKLAVNLVPFPRLHFFMVGFAPLTSRGSQQYRALTVPKLTQQMFDAKNMMAASDPRHGRYLTVAVMFRGRMSMKEVDEQMLNVQNKNSSYFVEWIPNNVKTAVCDIPPKGLKMSVTFIGNSTAIQELFKRISDQFTAMFRRKAFLHWYTGEG

SEQ ID NO: 16521 - protein, 387 aa, Blastocladiella britannica
IGAKFWEVISDEHGIDPTGTYHGDSDLQLERINVYYNEATGGKYVPRAVLVDLEPGTMDSVRAGPFGQLFRPDNFVFGQSGAGNNWAKGHYTEGAELVDSVLDVVRKEAESCDCLQGFQITHSLGGGTGAGMGTLLISKIREEYPDRMMCTFSVVPSPKVSDTVVEPYNATLSVHQLVENSDETFCIDNEALYDICFRTLKLTTPTYGDLNHLVSAVMSGITTCLRFPGQLNADLRKLAVNMVPFPRLHFFMVGFAPLTSRGSQQYRALTVPELTQQMFDAKNMMAASDPRHGRYLTVAAMFRGRMSMKEVDEQMLNAQNKNSSYFVEWIPNNVKTAVCDIPPKGLKMSVTFLGNSTAIQELSKRISDQFTAMFRRKAFLHWYTGEG

SEQ ID NO: 16522 - protein, 366 aa, Prochlorothrix hollandica
MNNSLNVSATLDLANGLRNFWYPVEFSKNLGMADPLGFELFDQCWVLFRDDQGTAACILDECAHRACPLSLGKVIQGRIQCPYHGWEYDRQGECVHMPSCQAISNPILTLPVMEQGGMIWVWPGTDEPGALPSLAPTLPDNFTLQAELVMDLEVEHGLMLENLLDLAHAPFTHTGTFAKGWPVPPFVRFANAATTPWTGHWDPYPIHMTFEPPCFVISTIGLRGKDCGRHLHQVHACLPRGQGRTRLLYRLALDFGHWLRWVPGTHCLWQHLANRVIQEDLRLVQGQQERLKGGANVWNQPVGYDKLGVAYRHWRNQVERHGSDWPESPADEGREPALNAIVTGSDAPITGSVVSLPPSQAPPTGH

SEQ ID NO: 16523 - protein, 387 aa, Chytriomyces confervae
IGAKFWEVISDEHGIDPTGTYHGDSDLQLERINVYYNEATGGKYVPRAVLVDLEPGTMDSVRAGPFGQLFRPDNFVFGQSGAGNNWAKGHYTEGAELVDSVLDVVRKEAESCDCLQGFQITHSLGGGTGAGMGTLLISKIREEYPDRMMCTFSVVPSPKVSDTVVEPYNATLSVHQLVENSDETFCIDNEALYDICFRTLKLTTPTYGDLNHLVSAVMSGITTCLRFPGQLNADLRKLAVNMVPFPRLHFFMVGFAPLTSRGSQQYRALTVPELTQQMFDAKNVMAASDPRHGRYLTVAAMFRGRMSMKEVDEQMLNVQNKNSSYFVEWIPNNVKTAVCDIPPKGLKMSVTFIGNSTAIQELFKRISDQFTAMFRRKAFLHWYTGEG

SEQ ID NO: 16524 - protein, 266 aa, Aegiceras corniculatum
KEKYEGLITFGDKSRVGRGGMTAKVKAAVYSAQAGIPVVITSGCAPDNIIKVLNGERIGTLFHRDANTWGPSGAVGARDMAVAARESSRQLQAMSPGARSKILLDIASALEANEQNITVENEADVAAAQQAGYEKSLISRLALKPGKISSLANSIRVLANMEEPIGHVLNRTEIASGFVLEKKSSSLGVLLVIFESRPDALVQIASLAIRSGNGLLLKGGKEARRSNAALHKVITSAIPENVGQKLIGLVTSRDEIPDLLKLDDVI

SEQ ID NO: 16525 - protein, 387 aa, Trametes versicolor
IGAKFWEVVSDEHGIESDGVYRGNNDLQLERINVYYNEVGANKYVPRAVLVDLEPGTMDSVRSGPLGNLFRPDNFVFGQSGAGNNWAKGHYTEGAELVDSVLDVVRKEAEGTDCLQGFQITHSLGGGTGAGMGTLLISKIREEYPDRMMATFSVVPSPKVSDTVVEPYNATLSVHQLVENSDQTYCIDNEALYDICFRTLKLTTPTYGDLNHLVSIVMSGITTCLRFPGQLNSDLRKLAVNMVPFPRLHFFMTGFAPLTARGSQQYRAVTVPELTQQMFDAKNMMAASDPRHGRYLTVAAVFRGKVSMKEVEEQMQNVQNKNSAYFVEWIPNNVLTAQCDIAPRGLKMAVTFLGNSTAIQELFKRVSDQFTAMFKRKAFLHWYTQEG

SEQ ID NO: 16526 - protein, 262 aa, Pyrococcus horikoshii
  misc_feature (1)..(1): Xaa can be any naturally occurring amino acid
  misc_feature (9)..(9): Xaa can be any naturally occurring amino acid
  misc_feature (73)..(73): Xaa can be any naturally occurring amino acid
  misc_feature (144)..(144): Xaa can be any naturally occurring amino acid
  misc_feature (174)..(174): Xaa can be any naturally occurring amino acid
  misc_feature (181)..(181): Xaa can be any naturally occurring amino acid
  misc_feature (248)..(248): Xaa can be any naturally occurring amino acid
  unsure (1)..(262): unsure at all Xaa locations
XVKVGYIQXEPKILELDKNYSKAEKLIKEASKEGAKLVVLPELFDTGYNFESREEVFDVAQQIPEGETTTFLXELARELGLYIVAGTAEKSGNYLYNSAVVVGPRGYIGKYRKIHLFYREKVFFEPGDLGFKVFDIGFAKVGVXICFDWFFPESARTLALKGAEIIAHPANLVXPYAPRAXPIRALENRVYTITADRVGEERGLKFIGKSLIASPKAEVLSIASETEEEIGVVEIDLNLARNKRLNDXNDIFKDRREEYYFR

SEQ ID NO: 16527 - protein, 320 aa, Populus tremula x Populus tremuloides
MSTASINSWCLTSVSASKKSLPALRPSVFASLNSSVSPPTLIRNQPVFAAPAPILYPRRGEEMGNDYNEAIESLKKLLSDKEELKTVAAAKVEQITAELQTVSSSDPKAFDPVEKIKSGFIHFKKEKYDKNPGLYSELAKGQSPKFMVFACSDSRVCPSHVLDFQPGEAFVVRNVANMVPPYDKTKYAGVGAAIEYAVLHLKVEYIVVIGHSACGGIKGLMSFPYDGTTSTDFIEDWVKVCYNAKTKILAEHANSPFPDMCTQCEKEAVNVSIGHLLTYPFVRDGLVNKTLGLKGGYYDFVKGSFELWGLEYSLSPSLSV

SEQ ID NO: 16528 - protein, 185 aa, uncultured bacterium
GCTSGMDAVAEGAEMIEDGRADVVIAGATDAPISPITVACFDAIKATSPNNDDPAHASRPFDASRDGFVLGEGATVFVLEPADEARRRGAHIYCEIAGYAQRSNAYHMTGLKADGLEMAEAIRVAMGRARLAPEDIDYTNAHGSGTRQNDRHETAAFKASLGARAYEVPVSLIKSMVGHSLGAIG

SEQ ID NO: 16529 - protein, 320 aa, Populus tremula x Populus tremuloides
MSTASINSWCLTSVSPSKKSLPALRPSVFASLNSSVSPPTLIRNQPVFAAPAPILYPRRGEEMGNDYNEAIESLKKLLSDKEELKTVAAAKVEQITAELQTVSSSDPKAFDPVEKIKSGFIHFKKEKYDKNPGLYSELAKGQSPKFMVFACSDSRVCPSHVLDFQPGEAFVVRNVANMVPPYDKTKYAGVGAAIEYAVLHLKVEYIVVIGHSACGGIKGLMSFPYDGTTSTDFIEDWVKVCYNAKTKILAEHANSPFPDMCTQCEKEAVNVSLGHLLTYPFVRDGLVNKTLGLKGGYYDFVKGSFELWGLEYSLSPSLSV

SEQ ID NO: 16530 - protein, 185 aa, uncultured bacterium
  misc_feature (123)..(123): Xaa can be any naturally occurring amino acid
  unsure (1)..(185): unsure at all Xaa locations
GCTSGMDAVAEGAEMIEDGRADVVIAGATDAPISPITVACFDAIKATSPNNDDPAHASRPFDASRDGFVLGEGATVFVLEPADEARRRGAHIYCEIAGYAQRSNAYHMTGLKADGLEMAEAIXGAMGRARLAPEDIDYINAHGSGTRQNDRHETAAFKASLGARAYQVPVSSIKSMVGHSLGAIG

SEQ ID NO: 16531 - protein, 492 aa, Glycine max
MDPYKLRPSSAFNSPFWTTNSGAPVWNNNSSLTVGARGPILLEDYHLVEKLANFDRERIPERVVHARGASAKGFFEVTHDISHLTCADFLRAPGVQTPVIVRFSTVIHERGSPETLRDPRGFAVKFYTREGNFDLVGNNLPVFFVRDGMKFPDMVHALKPNPKNHIQENWRILDFFSHFPESLHMFTFLFDDLGVPQDYRHMDGFGVNTYTLINKAGKAVYVKFHWKTTSGIKCLLEEEAIKVGGANHSHATQDLHDSIAAGNYPEWKLFVQTIDPEHEDKFDFDPLDVTKTWPEDIIPLQPVGRLVLNKNIDNFFAENEQLAFCPAIVVPGVYYSDDKMLQTRIFSYADSQRHRLGPNYLQLPANAPKCAHHNNHHEGFMNFIHRDEEVNYFPSRYDPVRHAETFPIPPAICSGRREKCGIEKENNFKQPGERYRSWAPDRQDRFNRRWVDALSDPRVTHEIRSVWISYWSQADRSLGQKIASRLSMRPNI

SEQ ID NO: 16532 - protein, 185 aa, uncultured bacterium
GCTSGMDAVAEGAEMIEDGRADVVIAGATDAPISPITVACFDAIKATSPNNDDPAHASRPFDASRDGFVLGEGATVFVLEPADEARRRGAHIYCEIAGYAQRSNAYHMTGLKADGLEMAEAIRVAMGRARLAPEDIDYINAHGSGTRQNDRHETAAFKASLGARAYEVPVSSIKSMVGHSLGAIG

SEQ ID NO: 16533 - protein, 218 aa, Candida glabrata CBS138
MSNEDYGYDYDYLFKIVLIGDSGVGKSNLLSRFTTNEFNIDSKSTIGVEFATRTIDVDGKKIKAQIWDTAGQERYRAITSAYYRGAVGALIVYDISKSSSYENCHHWLSELRENADDNVAVGLIGNKSDLAHLRAVPTEEAKQFASENQLLFTETSALNSDNVDLAFKELITAIHQKVSKHQVELSNANKPGAGPNGPTISLTPAPNEKKKSSSNNCC

SEQ ID NO: 16534 - protein, 269 aa, Oryza sativa (japonica cultivar-group)
MAQLPPRAPSAAAAAGQEWSAMAAAGEFLGFAAARRGAHRRSASDSAAFLMEAAVPMDDVIVGVGGGGEFDRLDDEQLMSMFSDVEAPAVSDGGGERGPAGEAHLMDMGDGDDGMGATSPAGAGAMAAAAAAAAADGIADPKRVKRILANRQSAQRSRVRKLQYISELERSVTTLQMEVSALSPRVAFLDHQRSLLTVGNSHLKQRIAALAQDKIFKDAHQEALKKEIERLRQVYHQQQIKATGGADIATAASMQAKHELLACEGAAMR

SEQ ID NO: 16535 - protein, 338 aa, Escherichia coli
MRVLVTGGSGYIGSHTCVQLLQNGHDVIILDNLCNSKRSVLPVIERLGGKHPTFVEGDIRNEALMTEILHDHAIDTVIHFAGLKAVGESVQKPLEYYDNNVNGTLRLISAMRAANVKNFIFSSSATVYGDNPKIPYVESFPTGTPQSPYGKSKLMVEQILTDLQKAQPDWSIALLRYFNPVGAHPSGDMGEDPQGIPNNLMPYIAQVAVGRRDSLAIFGNDYPTEDGTGVRDYIHVMDLADGHVVAMEKLANKPGVHIYNLGAGVGNSVLDVVNAFSKACGKPVNYHFAPRREGDLPAYWADASKADRELNWRVTRTLDEMAQDTWHWQSRHPQGYPD

SEQ ID NO: 16536 - protein, 269 aa, Pseudomonas putida KT2440
MSRLEQRFAELKAEGRSALVTFVTAGDPGYDASLQILKGLPAAGADVIELGMPFTDPMADGVAIQLATLRALEAGQTLVKTLQMVREFRVDNQTTPIVLMGYYNPIHRFGVDTFVTQAKEAGVDGLIIVDLPPEHDAELATPAQAAGIDFIRLTTPTTDDARLPRVLERSSGFVYYVSVAGVTGAGSATTEHVTEAIARLRRHTDLPISVGFGIRTPEQAANIARLADGVVVGSALVDKIAQAKSADQAVTDVLSLCSALAEGVRGARR

SEQ ID NO: 16537 - protein, 1120 aa, Arabidopsis thaliana
MDHNSPKSRRSRKPEPKPDIYSTFVVHSDSDSDQGRDRDKRKAKPEEDENVDLYATMVYKGDSDGEGEEDDDDDSMLPPLLKRLPKDFGGGASLDYDDDDGDESGDFGTMIVKTDRSSHSKKNSPYSSKPRMGVSPRRRARGGDEESSDEEDEEEDDDDDDGDYGTFVVKSKDKKGKKKDKEIDMTTMGRAVASMQKSNFGGKTRKLDPSSSSSKLHGEDNRKMQQQNSKMSTTSLPDSITREDPTTKYEFLNELGKGSYGSVYKARDLKTSEIVAVKVISLTEGEEGYEEIRGEIEMLQQCNHPNVVRYLGSYQGEDYLWIVMEYCGGGSVADLMNVTEEALEEYQIAYICREALKGLAYLHSIYKVHRDIKGGNILLTEQGEVKLGDFGVAAQLTRTMSKRNTFIGTPHWMAPEVIQENRYDGKVDVWALGVSAIEMAEGLPPRSSVHPMRVLFMISIEPAPMLEDKEKWSLVFHDFVAKCLTKEPRLRPTAAEMLKHKFVERCKTGASAMSPKIEKSRQIRATMALQAQSVVAPSLEDTSTLGPKSSEELGITVPSKPPQNSTEAPLTSTLNRQHITGNTVLAGEGKYYMHDYLCGDFGTMIVHGEDETEESDSRSQLVREKESSSSQFEGVPREFPGEELPDSWIHDKKKPPAIDLPVEASISQSMQASSSHEHRTKLHNIAGTQMEGGSDASGSTLKNETVGRKAFALQDKLWSIYAAGNTVPIPFLRATDISPIALLSENMIGGMQQDGNGTVAVEALQELFTSSDPQSKKGRRGQNEMPLPPSVYQRLTTSSSLMNLAQVLAYHRACYEEMPLQELQATQEQQTIQNLTFSSSLLLPKTTTRLTLPRYFPFSSSISTFSSSSSSPSPSARPPKTAGSNGDEEDTFEYKATDDVEVIEDWEEDEDEDVESQLGDGGDGGGIVLKGVAWGERVLSIAAQVLKQSEKDLELFAFKTSPRGYIYVRLDKLSTEYGCPTMDELEEFSREFKKRLDDAGAEKVIPEDLALEVKKSLSPVNQLSLGAERLLRVPEDLPRFKDMPMTVSYVEETNSRKAVKSGVFLLESIDAESDNCVWKLADVRENRDPESKGRPLSRKQKDLRITLPFADHKKINLYLD

SEQ ID NO: 16538 - protein, 167 aa, Glycine max
ETTLVDTHLLTIWRQQFLDALRLLRPESKKIKNACLRLACIFWQLLILPWRFLFAFVPPCQIAHGWISFICSLLFISGIAYVVTKITDVISCVTGINAYVIAFTALASGTSWPDLVASKIAAERQKTADSAIANITCSNSVNIYVGIGVPWLIDTLYNFIAYREPLR

SEQ ID NO: 16539 - protein, 331 aa, Bartonella koehlerae
STASCESKITYIDGNEGILLYRGYPIDQLAEKGDFLESCYLLLYGELPTKQEKIDFDRCIMQHTVVHEQFARFFHGFRRDSHPMAVMIACLGAMSAFYHDSIDITDPQQRMIASIRLISKVPTLAAMAYKYSIGQAFVYPRNDLSYAANFLHMCFSIPCEEYKINPVLTRAMDRIFTLHADHEQNASTSTVRLAGSSGANPFACIAAGVACLWGPAHGGANEACLKMLQEIGSVERIPQFIARAKDKNDSFRLMGFGHRVYKNYDPRAKIMQQTCHEVLKELNIQDDPLLDIAIALENIALNDEYFVGKKLYPNVDFYSGITLKALGFPTE

SEQ ID NO: 16540 - protein, 322 aa, Glycine max
MKRLSSSDSSSALMTICPSTEEHSPRNSQHMYGREFQSMLDGLDEEGCVEEPGYQSEKKRRLSVDQVKALEKNFEVENKLEPERKVKLAQELGLQPRQVAVWFQNRRARWKTKQLERDYGVLKANYDALKLNFDTLDQDNEALRKQVKELKSRLLQEENTGGSGVSVKEEIITRPADSEDKTMEQSKSDPSSETSNINPSSESEEDHLNYECFNNNDDCVGGTAASLLQVDFKDGSSDSDGSSAILNEDNMYSPLKFNNCSISTSPSSSSMMNCFQFQKPYHHHAQYVKMEEHNFLSADEACNFFSDEQAPTLQWYCPEQWS

SEQ ID NO: 16541 - protein, 469 aa, Lycopersicon esculentum
MKLLSEKATCNSHGQDSSYFLGWQEYEKNPYDEIQNPKGIIQMGLAENQLSFDLLESWLAQNPDAAGFKRNGESIFRELALFQDYHGLPAFKNAMTKFMSEIRGNRVSFDSNNLVLTAGATSANETLMFCLANQGDAFLLPTPYYPGFDRDLKWRTGAEIVPIHCSSSNGFRITESALEEAYLDAKKRNLKVKGVLVTNPSNPLGTTLNRNELELLLTFIDEKGIHLISDEIYSGTVFNSPGFVSVMEVLIEKNYMKTRVWERVHIVYSLSKDLGLPGFRIGAIYSNDEMVVSAATKMSSFGLVSSQTQYLLSCMLSDKKFTKKYISENQKRLKKRHAMLVKGLKSAGINCLESNAGLFCWVDMRHLLSSNNFDAEMDLWKKIVYDVGLNISPGSSCHCTEPGWFRVCFANMSEDTLDLAMRRIKDFVESTAPNATNHQNQQQSNANSKKKSFSKWVFRLSFNDRQRER

SEQ ID NO: 16542 - protein, 372 aa, Chromobacterium violaceum ATCC 12472
MHSVIHASDRIVVKVGSSLVTNDGRGLDLNALARWAEEVAELKRRGKQVVLVSSGAIAEGCQRLGWTVRPKGVHELQAAAAVGQMGLCQAYESAFRSFGLRTAQILLTHEDLADRTRYLNARSTLTSLLNLNVVPIINENDTVATSEIRFGDNDTLGALVTNLIEADALVILTDQRGLYSADPRKHPDAEFIHQAEAGDERLEDMAGGAGSSVGTGGMITKILAAKRAARSGAATVIASGREPHVLSRLADGEAIGTQLVAATNRMAARKQWLADHLKLAGRLLLDDGAALAIRERGTSLLPVGVSAVEGDFLRGEAVACVDAAGHEVARGLVNYSSDEARQIMRKSTREIEAALGYIVEPELIHRDNMVAL

SEQ ID NO: 16543 - protein, 193 aa, Shigella flexneri
ADERPGKINLGIGVYKDETGKTPVLTSVKKAEQYLLENETTKNYLGIDGIPEFGRCTQELLFGKGSALINDKRARTAQTPGGTGALRVAADFLAKNTSVKRMWVSNPSWPNHKSVFNSAGLEVREYAYYDAENHTLDFDALINSLNEAQAGDVVLFHGCCHNPTGIDPTLEQWQTLAQLSVEKGWLPLFDFAY

SEQ ID NO: 16544 - protein, 281 aa, uncultured bacterium
MSQTSTLKGQCIAEFLGTGLLIFFGVGCVAALKVAGATFGQWEISIIWGLGVAMAIYLTAGVSGAHLNPAVTIALWLFACFDKRKVVPFIISQIAGAFCAAALVYGLYYNLFIDFEQTNHIVRGSTESLGLAGTFSTYPNPHINFVQAFAVEMVITAILMGLILALTDDGNGVPRGPLAPLLIGLLIAVIGASMGPLTGFAMNPARDFGPKLFAWMAGWGEIAFTGGRDIPYFLVPVFGPITGAILGAWAYRKLIGRHLPCDVCAIEEKDAAANTQQKASL

SEQ ID NO: 16545 - protein, 338 aa, Escherichia coli
MRVLVTGGSGYIGSHTCVQLLQNGHDVIILDNLCNSKRSVLPVIERLGGKHPTFVEGDIRNEALMTEILHDHAIDTVIHFAGLKAVGESVQKPLEYYDNNVNGTLRLISAMRAANVKNFIFSSSATVYGDNPKIPYVESFPTGTPQSPYGKSKLMVEQILTDLQKAQPDWSIALLRYFNPVGAHPSGDMGEDPQGIPNNLMPYIAQVAVGRRDSLAIFGNDYPTEDGTGVRDYIHVMDLADGHVVAMEKLANKPGVHIYNLGAGVGNSVLDVVNAFSKACGKPVNYHFAPRREGDLPACWADASKADRELNWRVTRTLDEMAQDTWHWQSRHPQGYPD

SEQ ID NO: 16546 - protein, 367 aa, Ehrlichia ruminantium str. Gardel
MLDQVLDKELIELRYSNIYRELPKVTRYDAGYMVYHDGQKLISFSCNNYLGLIGHPLLKKSAIDAINLYGVGAGASRMVTGDNLLYYSLESKLAKLYNKEKALVFSSGYLTNIGIISALVNRHDMIISDKLVHSSIIDGIKLSQAKNYRFKHNDYLDCEYILKKYRNLHRRCLIIVEQVYSMDGDIAPTKQLKMLAEKYDAWLVIDCAHSFGLMMHCDADIYIGTLSKAVGVLGGYVCASEIVIKYIQNKARTFIYTTALPPMIIAAANSALDIIGESVVDIPIKLARFFCNNLDFPEPNSHIVPIIMKDVTAVLHAQKILKEEGFLVIAIRPPTSPTPRLRFVFNASHKLSDVKRLCKVLKQKEIV

SEQ ID NO: 16547 - protein, 185 aa, uncultured bacterium
  misc_feature (100)..(100): Xaa can be any naturally occurring amino acid
  unsure (1)..(185): unsure at all Xaa locations
GCTSGMDAVAEGAEMIEDGRADVVIAGATDAPISPITVACFDAIKATSPNSDDPAHASRPFDASRDGFVLGEGATVFVLEPADEARRRGAHIYCEIAGYXQRSNAYHMTGLKADGLEMAEAIRVAMGRARLAPEDIDYINAHGSGTRQNDRHETAAFKASLGARAYEVPVSSIKSMVGHSLGAIG

SEQ ID NO: 16548 - protein, 185 aa, uncultured bacterium
GCTSGLDAVAEGAEMTEDGRADVVIAGATDAPISPITVACFDAIKATSPNNDDPAHASRPFDASRDGFVLGEGATVFVLEPADEARRRGAHIYCGVAGYAQRSNAYHMTGLKADGLEMAEAIRVAMGRARLAPEDIDYINAHGSGTRQNDRHETAAFKASLGARAYEVPVSSIKSMVGHSLGAIG

SEQ ID NO: 16549 - protein, 185 aa, uncultured bacterium
GARRGLDAVAEGAEMIEDGRADVVIAGATDAPISPITVACFDAIKATSPNNDDPAHASRPFDASRDGFVLGEGATVFVLEPADEARRRGAHIYCEIAGYAQRSNAYHMTGLKADGLEMAEAIRVAMGRARLAPEDVDYINAHGSGTRQNDRHETAAFKASLGARAYQVPVSSIKLMVGHSLGAIG

SEQ ID NO: 16550 - protein, 263 aa, Wolbachia endosymbiont of Drosophila simulans
MSRRVVVTGVGLITPLAADVDNTWSRLIKSESGIKAINTDRFDSSDLACKIAGQVPLQSDNIEHHFNPLDYISEKDSKRTDRFIHYGIAAAIQAVDDSLILESQNINRERVGVTIGSGIGGLPSIQENVITMQEKGPRRVSPFFVPASLINLISGHVSIKYEFTGPNDSAVTACATGAHAIINSARTIKLGEADVMIAGGAESALCRVGIAGFASMKALSTKFNDKPEEASRPWDAERDGFVMGEGAGILVLEEYEHAKKRGA

SEQ ID NO: 16551 - protein, 432 aa, Saccharomyces cerevisiae
MCEHQLTQEDLEFDKKHIWHPYTSITTPLKVYPVTKAEGSYLYLDNGTKVVDGMASWWCVQQGYNNHRLNAAAISQINKMSHVMFGGITHKAGIDFCKKLLALLPDTLECALLADSGSISVDIAMKMALRYHHSLGNTTKKRFLTIKKGYHGDAFGAVSVCDPVNSRHNTYNGFLAENIFCKAPEVRFDCREKDVEKLVEELDVKPFAEIIDKHHSEISGVVMESIVQGAGGLRMYHPYFLKRVRALCNDFNILLILDEVAVGLGRTGMLFGFEHAGIVPDIVCLGKTLTAGYLTLSATVTTREIGDQISSGPEGCFMHGQTYMANPLACAVASENLSILMEGKWKSQVRQIEVQLKKELVPLLEHPIVADVRILGAIGVVEVTKRVNVEVLQEQFIKAGAWIRPFGNIIYILPPYIITSEELTVLTEAIRS

SEQ ID NO: 16552 - protein, 185 aa, uncultured bacterium
GCTSGLDAVAEGAEMIEDGRADVVIAGATDAPISPITVACFDAIKATSPNNDDPAHASRPFDASRDGFVLGEGATVFVLEPADEARRRGAHIYCEIAGYAQRSNAYHMTGLKADGLEMAEAIRVAMGRARLAPEDVDYINAHGSGTRQNDRHETAAFKASLGARAYQVPVSSIKLMVGHSLGAIG

SEQ ID NO: 16553 - protein, 174 aa, Streptococcus pyogenes MGAS10394
MIPLTKLLITPRRCHMPNLYDFTVKAQNGNDLSLAAYKEKVVLIVNTATKCGLTPQYQALQALYDTYHDKGFEVLDFPCNQFLNQAPGDAEEINHFCSLTYHTTFPRFAKIKVNGKDADPLFTWLKEEKSGPLGKRIEWNFTKFLIDQNGQVIKRYSSKTDPKLIEEDLKALLG

SEQ ID NO: 16554 - protein, 165 aa, Staphylococcus aureus subsp. aureus MSSA476
MNNRNVYDIEVSDYKGLTYKLEAFRGKVILVVNTATECIYSEQLKKLETLFQKYKDRGFVVLSFPNNNFDNRQPGSNEEILKISREKFGVTFPVLAKISVNGNDEHPLFTHLKNEQPGIFGSPIKWNFTKFIIDRQGNVVNRFLPMEDPLDISTNIEILLQESSS

SEQ ID NO: 16555 - protein, 937 aa, Streptococcus pyogenes MGAS10394
MVKSGMIEETSKEGDGHLPLKKLESSNNQAIIAEEVALLKEMLENITRRMIGDDAFTVIESIMVLSEKQDYIELEKVVANISNQEMEVISRYFSILPLLINISEDVDLAYEINYQNNTDTDYLGKLALTIKDLAGKDNGKDILEQVNVVPVLTAHPTQVQRKTILELTTHIHKLLRKYRDAKAGVISLEKWRQELYRYIEMIMQTDIIREKKLQVKNEIKNVMQYYDGSLIQAVTKLTTEYKNLAQKHGLELDNPKPITMGMWIGGDRDGNPFVTAETLCLSATVQSEVILNYYIDKLAALYRTFSLSSTLVQPNSEVERLASLSQDQSIYRGNEPYRRAFHYIQSRLKQTQIQLTNQPAARMSSSVGLSTSAWSSPASLENPILAYDSPVDFKADLKAIEQSLLDNGNSALIEGDLREVMQAVDIFGFFLASIDMRQDSSVQEACVAELLKGANIVDDYSSLSETEKCDVLVQQLMEEPRTLSSAAVAKSDLLEKELAIYTTARELKDKLGEEVIKQHIISHTESVSDMFELAIMLKEVGLVDQQRARVQIVPLFETIEDLDNARDIMAAYLSHDIVKSWIATNRNYQEIMLGYSDSNKDGGYLASGWTLYKAQNELTAIGEEHGVKITFFHGRGGTVGRGGGPSYDAITSQPFGSIKDRIRLTEQGEIIENKYGNKDVAYYHLEMLISASINRMVTQMITDPNEIDSFREIMDSIVADSNIIYRKLVFDNPHFYDYFFEASPIKEVSSLNIGSRPAARKTITEITGLRAIPWVFSWSQNRIMFPGWYGVGSAFKRYIDRAQGNLERLQHMYQTWPFFHSLLSNVDMVLSKSNMNIAFQYAQLAESQDVRDVFYEILDEWQLTKNVILAIQDHDDLLEDNPSLKHSLKSRLPYFNVLNYIQIELIKRWRNNQLDENDEKLIHTTINGIATGLRNSG

SEQ ID NO: 16556 - protein, 474 aa, Xanthomonas axonopodis pv. citri str. 306
MSASASARPEQPSSSAQIAARIDRLPASATLWRLVGLLALGGFFELYDLFQTAYISPGLIGDGIFANGADGAFGMSDQAAFAAATFLGLFVGAALLSPFADRFGRRPVFTFALIWYTAATVAMGLQSTASGVIVLRFVVGIGLGIELVTIDTYLSELVPRHMRSAAFAFAFFVQFLAVPTVALTAWMLVPSAPLGVSGWRWVVLLSGAFALAIWWLRSRLPESARWLAAHGRHAEADAVLTELEARCTRDVGAPLPAPQAATATQASVMLSAPLWRAPYRGRIGMLVVFHVFQAIGFFGFGNWLPALISAQGTGAGVTKSLAYSFAISLAYPLAPLLLLRFAQRWENKWQITASALGAVLFGGLFAVQHHAVGMVLCGAMVAFCNAWMSFAYHGYQAELFPTGLRARAVGFCYSFSRLSTAVSSVLIGWLLTQVGSHGVLAFIALSMSIVASVIAVFGPRTRNRALEDIAGEYG

SEQ ID NO: 16557 - protein, 594 aa, Neisseria meningitidis Z2491
MSLVELKVPDIGGHENVDIIAVEVNVGDTIAVDDTLITLETDKATMDVPAEVAGVVKEVKVKVGDKISEGGLIVVIEAEGAAAAPKAEAPVAPAQEAPKAAAPAPQAAQFGGSADVEYDVVVLGGGPGGYSAAFAAADEGLKVAIVERYKTLGGVCLNVGCIPSKALLHNAAVIDEVRHLAANGIKYPEPELDIDMLRGYKDGVVSRLTTGLAGMAKGRKVDIIQGDGQFLDPHHLEVSLTTSEVYEQATPTGEKKIVAFKNCIIAAGSRVTKLPFIPEDPRIFDSSGALALKEVPGKLLIIGGGIIGLEMGTVYSTLGSRLDVVEMMDGLMQGADRDLVKVWQKQNEYRFDNIMINTKTVAVEPKEDGVYVTFEGANAPKEPQRYDAVLVAAGRAPNGKLISAEKAGVAVTDRGFIEVDKQMRTNVPHIYAIGDIVGQPMLAHKAVHEGHVAAENCAGHKAYFDARVIPGVAYTSPEVAWVGETELSAKASGRKITKANFPWAASGRAIANGCDNGFTKLIFDAETGRIIGGGIVGPNGGDMIGEVCLAIEMGCDAADIGKTIHPHPTLGESIGMAAEVALGTCTDLPPQKKK

SEQ ID NO: 16558 - protein, 411 aa, Nostoc punctiforme PCC 73102
MIVKTLPPSSRPIQEDSRNGTSSRSELDVIDIVPEENGTPSLVVRSPRLLAAQKIGATAEPETLYDPVSIAAHYQNRPLQVLRRIFAVLGPTLSFAFGLWSDSKRGIVVKNDRRRATQLRVLLTQLGPAYIKIGQALSTRPDLVPTVYLEELTKLQDQLPPFPNELAYQFIQEELGAPPEEVYAELSAQPIAAASLGQVYKGKLKSGEEVAVKVQRPDLRERITIDLYILRNIAAWVQKTVKRVRSDLVGILDELGDRIFEEMDYIHEGENAERFFELYGHIKDIYVPKIYWEYTNRRVLTMEWINGIKLTQTEEISAQGIDARYLIEVGVQCSLRQLLEHGFFHADPHPGNLLATPDGKLAYLDFGMMSEIKPPQRYGLIASDRISLRSDWGLHPSTSDVCRKSHREYFL

SEQ ID NO: 16559 - protein, 280 aa, Xanthomonas campestris pv. vesicatoria str. 85-10
MSPSVLAPPEQPSPSAQIAARIDRLPASATLWRLVGLLALGGFFELYDLFQTAYISPGLIGDGIFASGADGAFGMSDQAAFAAATFLGLFVGAALLSPFADGFGRRPVFTFALIWYTAATVAMGLQSTASSVIVLRCVVGIGLGIELVTIDTYLSELVPRHMRSAAFAFAFFVQFLAVPTVALTAWMLVPFAPLGMSGWRWVVLLSGAFALAIWWLRSRLPESARWLAAHGRHAEADAVVTELEARCCGVRRIAGASGCWWSSMCFRRSASSVSATGCLR

SEQ ID NO: 16560 - protein, 452 aa, Pseudomonas fluorescens PfO-1
MSELSKARIPDAPAIQRLPLLQLILVGLQHVLLMYGGAIAVPLIIGQAAGLSREEIAFLINADLLVAGIATIVQSLGIGPMGIRMPVMMGASFAAVGSMVAMAGMPGIGLQGIFGATIAAGFFGMIIAPFMSKVVRFFPPLVTGTVITSIGLSLFPVAVNWAGGGAGAAQFGSPIYLAIAALVLATILLIHRFMRGFWVNISVLIGMCLGYVLCGAIGMVDLSGMANAPWVQFVTPLHFGMPKFELAPILSMCLVVVIIFVESTGMFLALGKITGQEVCPRMLRRGLLCDAGASFFAGFFNTFTHSSFAQNIGLVQMTGVRCRSVTIVAGGLLIVLSLLPKAAFLVASIPPAVLGGAAIAMFGMVAATGIKILQEADIGDRRNQLLVAVSIGMGLIPVVRPEFFAHLPLWMSPITHSGIAMATLSALTLNLLFNILGGAERAAINDCHAHPH

SEQ ID NO: 16561 - protein, 66 aa, Magnetospirillum magnetotacticum MS-1
MLLRRVESDEKTKGGIIIPDTAKEKPQEGEVVAVGPGARDEQGRVNALDVKAGDRVLFGKWSGTEV

SEQ ID NO: 16562 - protein, 169 aa, Hordeum vulgare
MAAAASSASSVHDFTVKDASGKDVDLSTYKGKVLLIVNVASQCGLTNSNYTELAQLYEKYKDQGFEILAFPCNQFGGQEPGTNEEIVQFACTRFKAEYPIFDKVDVNGDNVAPVYKFLKSSKGSLFGDNIKWNFSKFLVDKDGNVVDRYAPTTSPLSIEKDIKKLLASS

SEQ ID NO: 16563 - protein, 267 aa, Shigella flexneri 2a str. 2457T
MAIPAFGLGTFRLKDDVVISSVKTALELGYRAIDTAQIYDNEAAVGQAIAESGVPRHELYITTKIWIENLSKDKLIPSLKESLQKLRTDYVDLTLIHWPSPNDEVSVEEFMQALLEAKKQGLTREIGISNFTIPLMEKVIAAVGAENIATNQIELSPYLQNRKVVAWAKQHGIHITSYMTLAYGKALKDEVIARIAAKHNAIPAQVILAWAMGEGYSVIPSSTKRKNLESNLKAQNLQLDAEDKKAIAALDCNDRLVSPEGLAPEWD

SEQ ID NO: 16564 - protein, 253 aa, Chlamydia trachomatis
MSKLTQVFKQTKPCIGYLTAGDGGTSYTIEAAKALIQGGVDILELGFPFSDPVADNPEIQVSHDRALAENLTSETLLEIVEGIRAFNQEVPLILYSYYNPLLQRDLDYLRRLKDAGINGVCVIDLPAPLSHGEKSPFFEDLLAVGLDPILLISAGTTPERMSLIQEYARGFLYYIPCQATRDSEVGIKEEFRKVREHFDLPIVDRRDICDKKEAAHVLNYSDGFIVKTAFVHQTTMDSSVETLTALAQTVIPG

SEQ ID NO: 16565 - protein, 321 aa, Glycine max
MEFETPHQTCFMSNSSWFSQESHYTEWTREENKKFESALAIYDKDTPDRWLRVAAMLPGKTVYDVIKQYRELEEDVCEIEAGRIPVPGYPTSSFTLKMVDNQCYDACRKKPATLRSSDQERKKGVPWTEEEHRRFLMGLLKYGKGDWRNISRNFVVTKTPTQVASHAQKYYIRQKLSGGKDNKRRPSIHDITIVNLTSDQEKPLLLNDESHMTFEQQKLTSMPKVQLEWINHHDNGSRMVVNPNYDMFMSPSSGISSKTLKLQGQDFYECAFHETYAKLKNSGFRTTSRDFNKEDSICITGCAIQVANSLADVADSHEHLN

SEQ ID NO: 16566 - protein, 258 aa, Arabidopsis thaliana
MTEGGEYSPAMMSAEPFLTMKKMKKSNHNKNNQRRFSDEQIKSLEMMFESETRLEPRKKVQLARELGLQPRQVAIWFQNKRARWKSKQLETEYNILRQNYDNLASQFESLKKEKQALVSELQRLKEATQKKTQEEERQCSGDQAVVALSSTHHESENEENRRRKPEEVRPEMEMKDDKGHHGVMCDHHDYEDDDNGYSNNIKREYFGGFEEEPDHLMNIVEPADSCLTSSDDWRGFKSDTTTLLDQSSNNYPWRDFWS

SEQ ID NO: 16567 - protein, 153 aa, Triticum aestivum
  misc_feature (60)..(60): Xaa can be any naturally occurring amino acid
  unsure (1)..(153): unsure at all Xaa locations
TSEFDRARMFRSGLIGFTLQGSLSHYYYNLCESVFPCKDWWAVPVKAAFDQTAWSGLWNXIYFVALGFLRWESPSTIFSELKSTFFPMLTAGWKLWPFAHLITYGVVPVEHRLLWVDCVEIIWATILSTYSNEKSEARILDDSSTTDTRDNSR

SEQ ID NO: 16568 - protein, 194 aa, Shigella boydii
ADERPGKINLGIGVYKDETGKTPVLTSVKKAEQYLLENETTKNYLGIDGIPEFGRCTQELLFGKGSALINDKRARMAQTPGGTGALRVAADFLAKNTSVKRVWVSNPSWPNHKSVFNSAGLEVREYAYYDAENHTLDFDALINSLNEAQAGDVVLFHGCCHNPTGIDPTLEQWQTLAQLSVEKGWLPLFDFAYQ

SEQ ID NO: 16569 - protein, 1092 aa, Arabidopsis thaliana
MAEENRKDRGVSSTVAIPSGLNRIKTRLASSGPRPEDSSDTVLKPPFNRNQKTIVPRGHGRTTGSSKQERKGTKLSRWLASYKPKYSCHPPKYACSSTTSSEEIKLRGKNSGKDEEKMIKISETNPPCSKSMGIKSFSHELGPRGGVQTPYPRPHSYNDLKELLGSLHSRFDVAKETVDKKLDVFVRDVKEAMEKMDPSCPEDREMAEQLLDVARACMEMTSAQLRATCESIVQDLTRKRKQCQAGLVKWLFSQLLFILTHCTRVVMFQKETEPIDESSFRKFKECLERIPALETDWGSTPRVDDSGSGYPEYQRNEAGQKFKRRDKESLESETALDYVVPNDHGNNAAREGYAAAKQEFPSHEPQFDSKVVEQRFYLSDEYEDKMSNEPGKELGGSDYVICRICEEEVPLFHLEPHSYICAYADKCEINCVDVDERLLKLEEILEQIIDSRSLNSFTQAGGLENSVLRKSGVASEGCSPKINEWRNKGLEGMFEDLHEMDTAFIDESYTYPIHLKSHVGAKFCHHATSSSTGSITSVSSTNTPRTSHFDSYWLERHCPEQEDLRLMMDLSDIARCGASTDFSKEGSCDYIMACMQDIQAVLKQGKLKALVIDTFGGRIEKLLCEKYLHARELTADKSSVGNIKESEDVLEHASATPQLLLKDRISIDDFEIIKPISRGAFGKVFLARKRTTGDFFAIKVLKKLDMIRKNDIERILQERNILITVRYPFLAEHLMLLMQVRFFYSFTCRDNLYLVMEYLNGGDLYSLLQKVGCLDEEIARIYIAELVLALEYLHSLKIVHRDLKPDNLLIAYNGHIKLTDFGLSKIGLINNTIDLSGHESDVSPRTNSHHFQKNQEEERIRHSAVGTPDYLAPEILLGTEHGLDTTFKSGFHEAPVNCYAADWWSAGIVLFELLTGIPPFTASRPEKIFDNILNGKMPWPDVPGEMSYEAQDLINRLLVHEPEKRLGANGAAEVKSHPFFQGVDWENLALQKAAFVPQPESINDTSYFVSRFSESSCSDTETGNNSGSNPDSGDELDECTNLEKFDSPPYYLSLINFSFKNLSQLASINHDVLLQKDPAKGGGDSPFKSHGT

SEQ ID NO: 16570 - protein, 209 aa, Saccharophagus degradans 2-40
MNDLDNLFQSNKDWAEAIKAEDPHFFEKLSAQQFPEYLWIGCSDSRVPANQIVGLMPGEMFVHRNIANCVVHTDLNCLSVIHYAVSVLKVKHIIVTGHYGCGGVAAALTNQQFGLVDHWIRNIRDVYQKQKAELENITDEKERLNRLCELNVKQQALNVTALPAVQNAWKEGRELTVHGWIYSLEDGLLKKLTDSIGSIEQVAEQFRVI

SEQ ID NO: 16571 - protein, 379 aa, Pediococcus pentosaceus ATCC 25745
MANKKTETKKKKSESIISSPEFKKAVNQIIKARKSEKKVKYTQLTKDLITKFKLTDEDVDDLIQRIEDAGISVVDENGDPSEKALKAQEISKEELDDTKAPAGVKINDPVRMYLKEIGRVSLLTADQEVELALRIEKGDPRARQELAEANLRLVVSIAKRYVGRGMQFLDLIQEGNMGLMKAVEKFDYQKGFKFSTYATWWIRQAITRAIADQARTIRIPVHMVETINKLIRIQRQLLQDLGREPMPEEIGAEMDMPSDKVREILKIAQEPVSLETPIGEEDDSHLGDFIEDQEATSPADHAAYELLKEQLEGVLDTLTDREENVLRLRFGLDDGRTRTLEEVGKVFGVTRERIRQIEAKALRKLRHPSRSKQLKDFLD

SEQ ID NO: 16572 - protein, 579 aa, Hordeum vulgare subsp. vulgare
MGEVAAEMYTQDGTVDIKGNPALKKDTGNWRACPYILANECCERLAYYGMSTNLVNFMKDRMGMANAAAANNVTNWGGTCYITPLIGAFLADAYLGRFWTIASFMIIYIFGLGLLTMATSVHGLVPACASKGVCDPTPGQSAAVFIALYLIALGTGGIKPCVSSFGADQFDEHDDVERKSKSSFFNWFYFSINIGALVASSVLVYVQTHVGWSWGFGIPAVVMAIAVGSFFVGTSLYRHQRPGGSPLTRIAQVLVAATRKLGVAVDGSALYETADKESGIEGSRKLEHTRQFRFLDKAAVETHADRTAAAPSPWRLCTVTQVEELKSVVRLLPIWASGIVFATVYGQMSTMFVLQGNTLDASMGPKFKIPSASLSIFDTLSVIAWVPVYDRILVPAVRSVTGRPRGFTQLQRMGIGLVVSMFAMLAAGVLELVRLRTIAQHGLYGEKDVVPISIFWQVPQYFIIGCAEVFTFVGQLEFFYDQAPDAMRSMCSALSLTTVALGNYLSTLLVTVVAKVTTRGGKQGWIPDNLNVGHLDYFFWLLAALSLVNFAVYLLIASWYTYKKTAGDSPDAKGGAHDQ

SEQ ID NO: 16573 - protein, 192 aa, Shigella boydii
ADERPGKINLGIGVYKDETGKTPVLTSVKKAEQYLLENETTKNYLGIDGIPEFGRCTQELLFGKGSALINDKRARMAQTPGGTGALRVAADFLAKNTSVKRVWVSNPSWPNHKSVFNSAGLEVREYAYYDAENHTLDFDALINSLNEAQAGDVVLFHGCCHNPTGIDPTLEQWQTLAQLSVEKGWLPLFDFA

SEQ ID NO: 16574 - protein, 194 aa, Shigella boydii
ADERPGKINLGIGVYKDETGKTPVLTSVKKAEQYLLENETTKNYLGIDGIPEFGRCTQELLFGKGSTLINDKRARTAQTPGGTGALRVAADFLAKNTSVKRVWVSNPSWPNHKSVFNSAGLEVREYAYYDAENHTLDFDALINSLNEAQAGDVVLFHGCCHNPTGIDPTLEQWQTLAQLSVEKGWLPLFDFAYQ

SEQ ID NO: 16575 - protein, 127 aa, Arabidopsis thaliana
MEEEQVRAIKIIVFGVISWGVAFILTRRIFSSYSFSFSNRLLSTAHATIAVTLATLSVQDLSCPVCPLASKPSHKQSGSEIVATLWVAEISSPFFHLREILKEIGYKDTKLNLAADVSIHISSFCVI

SEQ ID NO: 16576 - protein, 184 aa, uncultured bacterium
CTSGLDAVAEGAEMIEDGRADVVIAGATDAPISPITVACFDAIKATSPNNDDPAHASRPFDASRDGFVLGEGATVFVLEPADEARRRGAHIYCEIAGYAQRSNAYHMTGLKADGLEMAEAIRVAMGRARLAPEDIDYINAHGSGTRQNDRHETAAFKASLGARAYEVPVSSIKSMVGHSLGAIG

SEQ ID NO: 16577 - protein, 185 aa, uncultured bacterium
GCTSGMDAVAEGAEMIEDGRADVVIAGATDAPISPIMVACFDAIKATSPNNDDPAHASRPFDASRDGFVLGEGATVFVLEPADEARRRGAHIYCEIAGYAQRSNAYHMTGLKADGLEMAEAIRVAMGRARLAPEDIDYINAHGSGTRQNDRHETAAFKASLGARAYEVPVSSIKSMVGHSLGAIG

SEQ ID NO: 16578 - protein, 194 aa, Suillus bovinus
MHNIKCVVVGDGAVGKTCLLISYTTNAFPGEYVPTVFDNYSANVMVDGKTISLGLWDTAGQEDYDRLRPLSYPQTDVFLICFSLVSPPSYENVRTKWWPEISHHAPSTSVVLVGTKLDLREDPATIEKLRDRRMQPIQYTQGVSMARDIGAVKYLECSALSQKGLKTVFDEVIRAVLNPPPKEKKRSGRGCVIV

SEQ ID NO: 16579 - protein, 519 aa, Zea mays
DWVPRGRPGLFVLIHPQATVHSQLPRNGGGGDGGVSRPRRKMARKPLDYEELNENVKRVQYAVRGELYLRASELQKEGKKIIFTNVGNPHALGQKPLTFPRQVVAPCQAPFLLDDPHVGLMFPADAIARAKHYLAMAPGGLGAYSDSRGIPGIRKEVADFIHKRDGYPSDPELIYLTDGASKGVMQILNTIIRNEMDGILVPVPQYPLYSATISLYGGSLVPYYLEEEANWSLDFANIRQAVAEARSKGISVRAMVMINPGNPTGQCLSEANIRELLRYCYHENLVLLADEVYQQNVYQDERPFISARKVMFDMGPPISREVQLVSFHTVSKGYWGECGQRGGYFEMTNLPPKTVDEIYKVASIVLSPNVPGQIFMGVMVNPPKPGDISYPKFTAESKSILESLRRRARMMTDGFNSCRNVVCNFTEGAMYSFPQIQLPARAIEAAKRAGKAADVFYCLKLLEATGISTVPGSGFGQKEGVFHLRTTILPAEEDFPTIMSSFKKFNDSFMEQYEGYSRM

SEQ ID NO: 16580 - protein, 250 aa, Pimpinella brachycarpa
MGKCYPTVSEEYKVAVEKCRRKLRGFIAEKNCAPLMLRLAWHSAGTYDVKTKTGGPFGTMRQKLEQSHAANNGLDVAVRLLEPFKEQFPIISYGDLYQLAGVVAVEITGGPDVPFHPGRPDKDEPPQEGRLPNATLGNDHLRNVFVKTMGLSDKDIVTLSGGHTLGRAHKERSGFEGPWTSNPLIFDNSYFKELLTGEKEGLLQLPTDKSLLEDPVFRPLVDKYACDEDAFFADYAESHMKLSELGFAEA

SEQ ID NO: 16581 - protein, 258 aa, Gossypium hirsutum
  misc_feature (138)..(138): Xaa can be any naturally occurring amino acid
  misc_feature (140)..(140): Xaa can be any naturally occurring amino acid
  misc_feature (151)..(151): Xaa can be any naturally occurring amino acid
  misc_feature (165)..(165): Xaa can be any naturally occurring amino acid
  unsure (1)..(258): unsure at all Xaa locations
MASDQTLFHYCLLTLYIIALPTWISLYFLQAPYGKHNRPGWGPTISPPLAWFLMESPTLWLTFFLFPSGQHFYNPKSFLLISPFLFHYFNRTVLYPLRLARNTTQTRGFPVSVAFMAFGFNLLNGYLQARWVSHYKDXYXNEELFWWRFLXGLLIFVVGMWVNVXADKVLVGLKKQGDGGYKIPRGGLFELVSCPNYFGEIMEWFGWAVMTWSWVGFGFFLYTCANLMPRARATRLWYLEKFKDDYPKDRKAVIPFIY

SEQ ID NO: 16582 - protein, 117 aa, Flaveria trinervia
DESWCQGLDGLASRSAAYYQQGARFAKWRTVVSIPNGPSALAVKEAAWGLARYAAISQDNGLVPIVEPEILLDGEHGIDRTFEVAKKVWAEVFFYLAENNVMFEGILLKPSMVTPGA

SEQ ID NO: 16583 - protein, 175 aa, Triticum aestivum
MAPAVMASSATTVAPFQGLKSTAGLPVSCRSGSTGLSSVSNGGRIRCMQVWPIEGIKKFETLSYLPPLSTEALLKQVDYLIRSKWVPCLEFSKVGFIFREHNASPGYYDGRYWTMWKLPMFGCTDATQVINEVEEVKKEYPDAYVRIIGFDNMRQVQCVSFIAFKPPGCEESGKA

SEQ ID NO: 16584 - protein, 239 aa, Pseudomonas putida KT2440
MPVKDPSKVVPQVPAESADAALKHIVDGFLRFHHDVFPDQQELFKKLATAQTPRAMFITCADSRIVPELITQSSPGDLFVTRNVGNVVPPYGQMNGGVSSAIEYAVMALKVHHIIICGHSDCGAMRAVLNPQSLTKMPTVGAWLRHAEVARTVVENNCSCGSEHETMQVLTKENVIAQLHHLRTHPSVASRLAAGELFIHGWVYDIETSKIEAYDAASDSFLPLAAGEPVPCATPRGRY

SEQ ID NO: 16585 - protein, 263 aa, Flaveria trinervia
MDLKHPTTHTPPHSHSTNLLTSTNGKHHHHHHHPPPHTAVAYKQCLKNHAVGIGCHAVDGCGEFMPAPTYNPSQPSSFKCAACGCHRNFHRREPTIATRTHFIDFHHHHPSTSASLSPPSPAPELTNFAVGPHLLLSLGTAAEQNHMVATPETPAAIKISGRKRFRTKFSQDQKEKMLTFAEKVGWKLQRCDDKMVADFCSEIGIRRRVLKVWMHNNKNTSAKKEQETTATATVVTTAITVATGVDSAGVRSDDQENGSSFSS

SEQ ID NO: 16586 - protein, 185 aa, uncultured bacterium
GCTSGLDAVAEGAEMIEDGRADVVIAGATDAPISPITVACFDAIKATSPNNDDPAHASRPFDASRDGFVLGEGATVFVLEPADEARRRGAHIYCEIAGYAQRSNAYHMTGLKADGLEMAEAIRVAMGRARLAPEDIDYINAHGSGTRQNDRHETAAFKASLGARAYEVPVSSIKSMVGHSLGAIG

SEQ ID NO: 16587 - protein, 241 aa, Flaveria bidentis
NGKHHHHHPPPHTGVAYKQCLKNHAVGIGGHAVDGCGEFMPAPTYNPSQPSSFKCAACGCHRNFHRREPTTTTIATRTHFIDFHHHHPSTSASLSPPSPPPEPTNFAVGPHLLLSLGTAAEQNHTVATPETPAAIKISGRKRFRTKFSQDQKEKMLTFAEKVGWKLQRCDDKMVADFCSEIGIRRRVLKVWMHNNKNTLAKKEQDTTATATVVTTATTVATGVDSAGVRSDDQENGSSFSS

SEQ ID NO: 16588 - protein, 547 aa, Ralstonia eutropha JMP134
MAAKDVVFGDAARAKMVEGVNILANAVKVTLGPKGRNVVLERSFGGPTVTKDGVSVAKEIELKDKLQNMGAQMVKEVASKTSDNAGDGTTTATVLAQSIVREGMKFVAAGMNPMDLKRGIDKAVAAAVEELKKVSKPTTTSKEIAQVGAISANSDTSIGERIAEAMDKVGKEGVITVEDGKSLADELEVVEGMQFDRGYLSPYFINNPEKQVVQLDSPFVLLFDKKVSNIRDLLPVLEQVAKAGRPLLIIAEDVEGEALATLVVNNIRGILKTAAVKAPGFGDRRKAMLEDIAILTGGTVIAEEIGLTLEKATLNDLGQAKRIEIGKENTIIIDGAGDAAAIEGRVKQIRAQIEEATSDYDREKLQERVAKLAGGVAVIKVGAATEVEMKEKKARVEDALHATRAAVEEGIVPGGGVALLRARAAISALTGENPDQNAGIKIVLRAMEEPLRQIVLNAGEEASVVVAKVIEGKGNYGYNAASGEYGDLVEMGVLDPTKVTRTALQNAASVASLMLTTDCAVAETPKEESAPAMPGGMGGMGGMEGMM

SEQ ID NO: 16589 - protein, 554 aa, Xanthomonas axonopodis pv. citri str. 306
MTPLIFVTGGVVSSLGKGIAAASLASILEARGLKVTMMKLDPYINVDPGTMSPFQHGEVYVTDDGAETDLDLGHYERYVRTRLSRKNSVTTGRIYENVIRKERRGDYLGATVQVIPHITDEIRRCIDEATAGFDVALIEIGGTVGDIESLPFLEAIRQVRTERGAEKAMFMHLTLVPYIAAAGELKTKPTQHSVKELRSIGIQPDVLLCRSEQAVPDSERRKIALFTNVSERAVISCPDIDVLYGMPLELLRQGLDELVIDQFKLRDKVAAADLSEWAAVVDAVKHPLDEVNIAVVGKYVDHQDAYKSVAEALRHGGLRQRTKVNLKWLEAQDLEGSDMSALQDIDGILVPGGFGDRGFEGKVQTSKFAREQKVPYFGICYGMQAAVVDYARHVADLDAANSTENDRQSPHPVIGLITEWRTATGEVEKRDEKSDLGGTMRLGLQEQRLKPGTLAREVYGKDVVAERHRHRYEFNNRYRTQLEDAGLVISGKSMDDTLVEVVELPRDTHPWFLACQAHPEFLSTPRDGHPLFIGFVRAAREKKAGGKLLKEARA

SEQ ID NO: 16590 - protein, 384 aa, Rickettsia sp. Chad
DSEFAELKIRGKIFKLPILKASIGEDVIDISRVSAEADCFTYDPGFMSTASCQSTITYIDGDKGILRHRGYDIKDLAEKSDFLEVAYLLIYGELPSGEQYNNFTKQVAHHSLVNERLHYLFQTFCSSSHPMAIMLAAVGSLSAFYPDLLNFKEADYELTAIRMIAKIPTIAAMSYKYSIGQPFIYPDNSLDFTENFLHMMFATPCTKYTVNPIIKNALNKIFILHADHEQNASTSTVRIAGSSGANPFACISTGIASLWGPAHGGANEAVINMLKEIGSSEYIPKYIAKAKDKNDPFRLMGFGHRVYKNYDPRAAVLKETCKEVLKALGQLDNNPLLQIAIELEAIALKDEYFVERKLYPNVDFYSGIIYKAMGIPSQMFTVLL

SEQ ID NO: 16591 - protein, 545 aa, ASPERGILLUS NIDULANS FGSC A4
MSVLLVFSLVTFALQGLCSLSLHESDSPHVLQLGLRRNQHNDPVGRDRRRFKRQTGTVAVDLHGDSMGGDIYSTNLTIGDPPQAVEVSVDTGSADLWVVYSENPVCNVRGARCDDSGTYDPTASTSFDGLSDEFAIEYGDSSWAEGYYGIDTLTVADAEVSEVQFAVAVESSIDKGILGIGYSTNVVSTYRYPNLPERLVASNITSSNAYSLWLNRLGSDEGTILFGGVNTAHYTGPLRTLPVVRYNGHYIHLWLTLTGMGVESASDDITKSYSETRSTTGEQEFPFVALLDSGATLTYLPSNIVAQIFSDLDVHLYEPEQFGYVPCDTYLVGREDYNLTFTFSGVTIRVPLRELVLRDAISGPGRDALQLPNNADEESCLFGILPNTDLFPILGDTFLRSAYVVFDLDNNEISLAQANTAPGDDRILEIGSGDDAVPEAEDVDDPVTTATVSLGGSSLILPTGWTNEPIFPSRTVTTSTTATSTGTNTGSGEDTEATDSDQGTSGGTGTQAEGPVATDGAVGVGNSPLLAIAMAALVLNMVLAL

SEQ ID NO: 16592 - protein, 494 aa, Coxiella burnetii RSA 493
MYLGIDLGTSGVKVILMDDQQTIITSSTARLTISRPQSLWSEQNPNDWWGATQNAIRKIKYTHANELKKVRALAFSGQMHGATLLDKNDNPLRPAILWNDGRAMAQCHTLLQRAPRALEITGNLIMPGFTAPKVLWVQENEPALFQKIKKILLPKDYLRLLISGDYATDFSDASGTSWLDVGKRQWSNALLTATGLTPEFMPALYEGSAITGAILPAVADVFGIPKNAAVVAGGGDNAASAISVNVTEPGKAFLSLGTSGVYFVASECFKPNPLSAVHTYCHCLPNLWHQMTVHLSAASCLGWLRRLLNLDIDRLNALIRQAKRDETNPNIPIFLPYLSGERTPHNDPYARGVFFGMTHETKIHHLVQAVLEGVAFAFAEGHAAMHATNVKIEDISVIGGGARNIYWGEILSAALNKPLIYRESANVGGAYGAARLAWLAINGGDPRTALRPLAIKKTIEPDQNRVERYVEKQTLFTELYQQLKKTFANAYKQK

SEQ ID NO: 16593 - protein, 281 aa, Burkholderia fungorum LB400
MNQDFFLQSKVAAITGAAGGLGTGIAKRLAGLGASVALLEPGIERLVSLASELTDSGATVLNVACNVTDAASTRYAAAQVLSSFGRIDVLVNNAGVLARPSALESISLEDWDRSLAVNLTGALLCTASFGAAMLEAGAGSIVNIASIAAYSPNTSVAYSVSKAGLLALTRHTAVEWAPRGIRANSVSPGFIRTPLSEVHYANPDLLQLRTQATPVRRLGTVDDVAAIVGFLASPASAFINGEDIVADGGFLNTALMHVHDPAQQYGGTHQADLSAFARLGR

SEQ ID NO: 16594 - protein, 293 aa, Staphylococcus epidermidis RP62A
MEIIIIGGFLGSGKTSAINHLIADALENNLNPAVIMNEFGKRSVDGQLIERPEVPMSEITEGCICCVMKSDVSQQLHELYLKYQPDIIFIECSGVAEPLAVVDACFTPVLAPFITLRSMVGIIDASMYSRIKSYPQDIAALFYEQLRHCSTLFVNKIDKIEVEETARLLRQLERLNSDANIQVGQFGELNLKSLLEPTHINSNACGTLHSNINHQFIENPRLQTKEEMISALDNLPQDVYRVKGFVRFSDQQHVYLVQYAQGNIELSPIQLKADVPLYLIVIGKHLKQIQLDL

SEQ ID NO: 16595 - protein, 378 aa, Zea mays
SESEAASGRQGEMGKGAQGSDAAAAGGEVEENMAAWLVAKNTLKIMPFKLPPVGPYDVRVRMKAVGICGSDVHYLREMRIAHFVVKEPMVIGHECAGVVEEVGAGVTHLSVGDRVALEPGVSCWRCRHCKGGRYNLCEDMKFFATPPVHGSLANQVVHPADLCFKLPDGVSLEEGAMCEPLSVGVHACRRAGVGPETGVLVVGAGPIGLVSLLAARAFGAPRVVVVDVDDHRLAVARSLGADAAVRVSPRAEDLADEVERIRAAMGSDIDVSLDCAGFSKTMSTALEATRPGGKVCLVGMGHNEMTLPLTAAAAREVDVVGVFRYKDTWPLCIDFLRSGKVDVKPLITHRFGFSQRDVEEAFEVSARGRDAIKVMFNL

SEQ ID NO: 16596 - protein, 599 aa, uncultured bacterium 582
MARASTGSRANEERETSKRIGALAALWPFVRPYRVMMGFAIVALVATATVSLVLPLAVRKVVDNFNADESNLLDQYFAMAIVVVALLAFGTGMRYALVTRLGERVVTDIRKAVFGRVINMSPAFYDNILTGEVLSRITTDTTLILSVIGASVSIALRNMLIFAGGLTMLLLTSVKLTGLLLLIVPIVALPVLTLGRRLRVLSRENQDFIAASSGNASEVLSALQTVQAFTHETASRQTFDRVTEKSFEVAAQRINTRVLMTMIVIYMIFSGVVGVLWIGVHDIRSNAISAGELAQFVIYAILVAGSASALSEIWGELQRAAGATERLVELLQAQDTVTEPKNPLDLSQPLRGEIIFDDVHFRYPARPDRLSLSQINLTINPGETVALVGPSGAGKTTIIQLILRFYDPTSGQVRLDGVNLCDLRRDVFRNVVALVPQDPVVFAASALENIRFGNPEASDEQVYAAARAAVAHEFITQLPDGYDSYLGERGVMLSGGQKQRIAIARAILRDAPVLLLDEATSALDAESEQAVKLAVETLSSDRTTIIIAHRLATVKKADRIVVMDKGQIVDTGTHDELVAKGGLYAHLARLQFTDGAAEV

SEQ ID NO: 16597 - protein, 227 aa, Coxiella burnetii RSA 493
MSNPTHRVTAVFFDLDGTLLDTAPDLADALNQLLNKHGRDPLPLKVIRPTVAQGTRGILANGFSINQTDPRFNPLRDEFLSIYQSCLTNKTTYFDGMAEVLEYLDVHAIPWGVVTNKPGWLARPLLNHFKLTRRYRCLISGDQLANRKPHPEPLLFACKTVDVQPHTALYVGDTEGDIQAAKAAGMLAVAATYGYLSANSTPQDWKADALIKSPLELIDWLKGNENT

SEQ ID NO: 16598 - protein, 213 aa, Brassica napus
  misc_feature (22)..(22): Xaa can be any naturally occurring amino acid
  unsure (1)..(213): unsure at all Xaa locations
RRVGSFKKVARSMGYGEKDISXVSFQSISKGYYGECGKRGGYMEVTGFTSDVREQIYKVASVNLCSNISGQILASLVMSPPKPGDESYESYIAEKEGILSSMARRAKTLEEALNKLEGITCNRAEGAMYLFPCINLPQKAIAAAEAAKTAPDTFYCKRLLNATGIVLVPGSGFRQVPGTWHFRCTILPQEDKIPAIVNRLTEFHKSFMDEFRD

SEQ ID NO: 16599 - protein, 357 aa, Streptococcus mutans UA159
MPNYKDLPQELTRTRTNEAVSELVDLKVHTATDIEAQEVSKEQAKDMYKTMWDIRNFEENARRFFAAGQIPGFVHLYAGEEAVAAGVCANLTDKDYITSTHRGHGHCVAKGGDLKGMMAEIFGKETGLGKGKGGSMHIADLDKGILGANGMVGGGFGLATGAAMRNKYLKTDDVAVCFFGDGAANEGLFHECLNMASIWKLPVIFVNENNLFAESTPQWYSSASATIAERALAYDMPGVRVNGKDLFAVYQVAKEAVERARSGQGPTLIEAVTYRDHGHFEGDEQKYKAPDGEEKDWADVDPLEVFRNYTIEHELLTEEELDEILEESKKDVDDAIKYAQDSPIPKAESLLEDVFAE

SEQ ID NO: 16600 - protein, 445 aa, Streptococcus mutans UA159
MAKYDLLIIGAGPGGYIAAEEAARLGKKVAVVEKKDIGGTCLNVGCIPSKAYLQHSHWLLSMQEANKYGISTNLESVDFAKLVNRKDQVVSTLQGGIHTTFKSLKIDYYEGQAQFLKDKSFMVNGEKISGKDVILATGSHPFIPQIHGINSVNYLTTDSFFNLKVLPEKLVIIGGGVIAIELAFAMQPLGVNVTVIEIAPQILLTEDKAARAIIRKKLKTMGAHIFEAAKIEEVHAQSVILEGDGAQEFDQLLVATGRKPNTELAQEMGLKLTERGFVKVDDYYETSTPHVYAIGDLTESYMLAHVASMEGIKAVRAICRQAQDPVDAQGVPRSLYTNPEVASFGLSEEEAKEQGYDVLVEQLPFSFNGRAIASTETQGFVKLISERRYHQILGAVIVGEHGTDLLQQLILLRQAEGTFDQVVDAVYAHPTISELIQEVAKRIVQ

SEQ ID NO: 16601 - protein, 587 aa, Pediococcus pentosaceus ATCC 25745
MKKTKIVSTLGPASTSVDTIVKLIEAGANVFRFNFSHGDHEEHLGRYNMVKEAEKITGKSVGILLDTKGAEIRTTPQKDGNQEYHTNDKVRISMDDTLETTKEKIAVTYDGLFDDVHVGGHVLFDDGLLDFKIDEKDEENRELVAHATNNGVLGSRKGTNAPGVSINLPGITEKDADDIRFGLESMNINFIAASFVRKPQDVLEIRELLEEKNMEDVQIFPKIESQEGIDNTDEILKVSDGIMIARGDMGVEIPAENVPLVQKTLIKKCNAVGLPVITATQMLDSMIENPRPTRAEASDVANAVWDGTDATMLSGESANGDYPVEAVATMAKIDEKAENAMAEDGNLQINTFDQSDVTETISAAVARAAKNLGVKTIVAATQSGYTARMISKYRPDADILAITFDERVRRGLMVNWGVHPIIADRPSTTDEMFELAANKAVDLGLAKEGDLILVVAGVPVGESGTTNIMKLQLIGSKLASGQGVGDETVIGKAVVATSADEANKKAVEGGVLVTKTTDKDYLPAIEKSSALVVENGGLTSHAAVVGISMGIPVIVGVQNATSILSDDELITVDSRRGIIYHGASNSL

SEQ ID NO: 16602 - protein, 186 aa, Shigella boydii
INLGIGVYKDETGKTPVLTSVKKAEQYLLENETTKNYLGIDGIPEFGRCTQELLFGKGSALINDKRARTAQTPGGTGALRVAADFLVKNTSVKRVWVSNPSWPNHKSVFNSAGLEVREYAYYDAENHTLDFDALINSLNEAQAGDVVLFHGCCHNPTGIDPTLEQWQTLAQLSVEKGWLPLFDFAY

SEQ ID NO: 16603 - protein, 328 aa, Rhizobium sp. NGR234
MMDTPRILVTGGAGYIGSHTAKLLRLEGLEPVTYDNLTTGNRSSVRWGPFIEGDILDSAHLIEVIEHYAPDAVIHFAASAYVGESVADPAKYYHNNVCGTLSLLDACRRTGLGKVIFSSSCATYGVPAALPIDEATRQEPINPYGRTKLIAERMLSDYAAAFGLSYVALRYFNACGADPEGDLGEWHDPETHLIPRALMAAAGRIGKLEVFGDDYDTADGTCVRDYIHVADLAQAHVLAYRLLAEGGANLALNLGSGRGFSVREVLSAVGAVTGRDVPVAIRPRRAGDPPVLYADARLAREVLGFSPLYSDLETIVRTAAPFFGLEAR

SEQ ID NO: 16604 - protein, 744 aa, Hevea brasiliensis
  misc_feature (642)..(642): Xaa can be any naturally occurring amino acid
  misc_feature (645)..(645): Xaa can be any naturally occurring amino acid
  misc_feature (659)..(659): Xaa can be any naturally occurring amino acid
  unsure (1)..(744): unsure at all Xaa locations
MEACNCIEPQWPADELLMKYQYISDFFIALAYFSIPLELIYFVKKSAVFPYRWVLVQFGAFIVLCGATHLINLWTFTMHSRTVAIVMTTAKVLTAAVSCATALMLVHIIPDLLSVKTRELILKNKAAELDREMGLIRTQEETGRHVRMLTHEIRSTLDRHTILKTTLVELGRTLALEECALWMPTRSGLELQLSYTLRQQNPVGYTVPIQLPVINKVFSCNRAVKISPNCPVARIRPFAGKYMPGEVVAVRVPLLHLSNFQINDWPELSTKRYALMVLMLPSDSARQWHAYELELVEVVADQVAVALSHAAILEESMRARDLLMEQNVALDLARREAETAIRARNDFLAVMNHEMRTPMHAIIALSSLLQETGLTPEQRLMVETILKSSNLLATLINDVLDLSRLEDGSLQLDLGTFNLRAVFREVLNLIKPIASVKKLPVTLNLAPDLPEYAIGDEKRLMQTILNVVGNAVKFSKEGNISITAFVARPESLRDLRFPDFFPVPSDDHFYLRVQVKDEGLGINLQDIPKLFTKFAQNQSLATRNSGGSGLGLAICKRFVNLMEGHIWIESEGLGKGCTAIFVVKLAILECSNESKHPFMQNGPKPNQGAKQTSFMGPESSLLMDDTGGYQDGNKRTFWGTLXCDXTTVSSSDECLRVVXLDHKVVFMDVCMPDGLELLSAYMKDFTKRHERPLIVALYWNANKVTKENCMKVGMDGVILKPVSVDKMRGVLSDLLEHRVLFEAM

SEQ ID NO: 16605 - protein, 260 aa, Triticum aestivum
MAMASALPLLLVPRPIVSPRPAAAGRFLSLSAPLSTAAPAPAPVEPLKGGGRLARLQTLHAASCCNSAPAAASGGVEAARAKGLQLVAWYLLSLDKHPVATKAVTSAVLTLAGDLICQLVIDKVPELDLKRTFVFTLLGLVLVGPTLHFWYLYLSKLVTISGTSGVISRLLLDQFIFSPVFIGVFMSLLVTLEGKPSLVVPKLKQEWFSSLIANWQLWIPFQFFNFYFVPQKLQVLAANFVALAWNVILSYKAHKKVIAE

SEQ ID NO: 16606 - protein, 819 aa, Cryptococcus neoformans var. neoformans JEC21
MPPKQPPKKSSTPSMSGAEPNINSNGNTVKPRSISISRNSPSTNSGGTPPVPNIPSRASMSSTGPPRSFAGSFRPASSVVGMENSKSRRQSISKEKIISKDSSDSLIGNKTIPQTQTTSSALTAALESPQPQGLSHQGSGSLSRPPISRDDSGTSALRNGAASTSAPKDGDKAGESSFSNLADVPDEEKARVLRRHLVSADERGASSPTPGGQSPAGSGINMGGTPTRAEFDDILGESGVSGYGSIDAHPKDDSDQFPIPYDAPGGDVTHDLYKWQHDHRTRPVRSASFSHVPVDRSTILDPHLAHIKEPGGFRRNFVVNRAQEQGLEAPDMVRNVVDFLFLYGHFAGEDLNEDEDVLEEDEESYPEDASSSSAYARRPFPAGGEEAGQIARGERAPLLGSTKRSLSRHRRTKSGHNQGTASVTQAVLMLLKGFVGTGILFMGKAFFNGGILFSSIVMLAIAGISLWSFLLLVQAYMKVPGSFGDIGGELYGNNMRLIILTSITVSQIGFVAAYSIFIAENLQAFIMAVSNCRTFIPVKYLIFAQLIVFMPLSMIRNLAKLSGTALIADAFILIGIIYIGGNEISVLSKNGVADVALFNKQSFPLLIGTAVFAFEGIGLVIPITESMREPQKFPRVLSGVMFCVAILFAGSGVMSYAAYGSDIQTVVIVNLPQDDKFVQAVQFLYSVAILLSSPLQLFPAVRIMENGLFSKSGKHNPSVKWQKNVFRSCTVIFCSLLSWAGSNELDKFVALIGSFACIPLCFIYPPMLHLKACARTPKARIMDWTLIVFGTIVGAFTTVQTLRSLFIPSAEGPKFGGCE

SEQ ID NO: 16607 - protein, 193 aa, Shigella boydii
ADERPGKINLGIGVYKDETGKTPVLTSVKKAEQYLLENETTKNYLGIDGILEFGRCTQELLFGKGSALINDKRARTAQTPGGTGALRVAADFLAKNTSVKRVWVSNPSWPNHKSVFNSAGLEVREYAYYDAENHTLDFDALINSLNEAQAGDVVLFHGCCHNPTGIDPTLEQWQTLAQLSVEKGWLPLFDFAY

SEQ ID NO: 16608 - protein, 398 aa, Dehalococcoides ethenogenes 195
MDNWQELEHKYYMQTFYRAPITIVKGQGAKVWDDKGKEYLDFVAGWAVNSLGHCHPAVVKAVSEQAGTLIQTSNNFYTIPQLKLAKLLVDNSVLDRIFFCNSGTEATEGAVKLARRYGKLKLKGAYEVITATGSFHGRTLAMVSASGQSKYQEPYTPLPTGFINVEYNNPQAIKTAITDKTCAVMLEPIQGESGVNVPDKGYLKAVRQICDEAGILLILDEIQTGIGRTGKLFAYEHSGIEPDIITLAKGLAGGIPIGAFMAKESASVFAKGEHGSTFGGNPLACAAGYAAMKFILDNHISENAGSMGSYLAEGLEKLKIKHSLIQGCRGCGLLMALDFKTNIAKEIVESCLEEGLLLNAVKPNALRFMPPLNITQADIDAAIAKLDSVLTRHESCGV

SEQ ID NO: 16609 - protein, 445 aa, Arabidopsis thaliana
MKGASGAVKKKPQVLNEAGEAETAVETVGESRKISGDGGFGSDDGGGGGGGGSGESILREIGDDRPTEDGDEEEEEDEDEDDGGDEEDEEGEGEGGQEERPKLDEGFYEIEAIRRKRVRKGKVQYLIKWRGWPETANTWEPLENLQSIADVIDAFEGSLKPGKPGRKRKRKYAGPHSQMKKKQRLTSTSHDATEKSDSSTSLNNSSLPDIPDPLDLSGSSLLNRDVEAKNAYVSNQVEANSGSVGMARQVRLIDNEKEYDPTLNELRGPVNNSNGAGCSQGGGIGSEGDNVRPNGLLKVYPKELDKNSRFIGAKRRKSGSVKRFKQDGSTSNNHTAPTDQNLTPDLTTLDSFGRIARMGNEYPGVMENCNLSQKTKIEELDITKILKPMSFTASVSDNVQEVLVTFLALRSDGKEALVDNRFLKAHNPHLLIEFYEQHLKYNRTP

SEQ ID NO: 16610 - protein, 185 aa, uncultured bacterium
GCTSGLDAVAEGAEMIEDGRADVVIAGATDAPISPITVACFDAIKATSPNNDDPAHASRPFDASRDGFVLGEGATVFVLEPADGARRRGAHIYCEIAGYAQRSNAYHMTGLKADGLEMAEAIRVAMGRARLAPEDIDYINAHGSGTRQNDRHETAAFKASLGARAYEVPVSSIKSMVGHSLGAIG

SEQ ID NO: 16611 - protein, 358 aa, Trichodesmium erythraeum IMS101
MVNSLKKQTFTEMRPGVKVPAKETILTPRFYTTDFDEMAKMDISVNEDELMAILEEFRADYNRHHFVRNEEFAQSWDHIDGETRRLFVEFLERSCTAEFSGFLLYKELGRRLKNKSPILAECFTLMSRDEARHAGFLNKAMSDFNLSLDLGFLTKSRKYTFFKPKFIFYATYLSEKIGYWRYITIYRHLEAHPEDRIYPIFRFFENWCQDENRHGDFFDAIMRARPEFLNDWQAKLWCRFFLLSVFATMYLNDIQRADFYASIGLNACDYDKYVIEKTNETSGRVFPVILDVENPEFYARLEFCIKNNEKLTKIANSNNPGFVKFFQKFPLYLSNGWQFLKLYLMKPIETATMQSSVR

SEQ ID NO: 16612 - protein, 193 aa, Shigella boydii
ADERPGKINLGIGVYKDETGKTPVLTSVKKAEQYLLENETTKNYLGIDGIPEFGRCTQELLFGKGSALINDKRARMAQTPGGTGALRVAADFLAKNTSVKRVWVSNPSWPNHKSVFNSAGLEVREYAYYDAENHTLDFDALINSLNEAQAGDVVLFHGCCHNPTGIDPTLEQWQTLAQLSVEKGWLPLFDFAY

SEQ ID NO: 16613 - protein, 113 aa, Triticum aestivum
MASGQQERSELDRMAREGETVVPGGTGGKSLEAQEHLADGRSRGGETRKEQLGEEGYREMGHKGGETRKEQLGEEGYREMGRKGGLSTMEESGGERAAREGIEIDESKFKTKS

SEQ ID NO: 16614 - protein, 339 aa, Flaveria bidentis
MDIPSPPPTTTTTTITTATATSPVKDLDPDARIQPNQHLPPPFTNGVLKRLKPRHHQQQQQQQPVVVSYRECLKNHAAAMGGHAVDGCGEFMPSPSSSPTDPTSLKCAACGCHRNFHRRDPDGPFPANPPVQHVIEYKPHHRHHPPPPPPLPIPLAGVRENSVSPADSPSPPPISSSYYPSAPHMLLALSSGLPAPPSENAQFSPIPISGGVIGSNSAGKKRFRTKFTQDQKEKMHELAERVGWKMQKKDEDLIIGFCNEIGVDKGVFKVWMHNNKMTFGGKKDSDNHLAGNGSSGGGLDFFNRNNHQQQQQQQPQNNDSVTSGGGGNAIGTNGSSSSS

SEQ ID NO: 16615 - protein, 185 aa, uncultured bacterium
GCTSGLDAVAEGAEMIEDGRADVVIAGATDAPISPITVACFDAIKATSPNNDDPAHASRPFDASRDGFVLGEGATVFVLEPADEARRRGAHIYCEIASYAQRSNAYHMTGLKADGLEMAEAIRVAMGRARLAPEDIDYINAHGSGTRQNDRHETAAFKASLGARAYEVPVSSIKSMVGHSLGAIG

SEQ ID NO: 16616 - protein, 347 aa, Lycopersicon esculentum
MAGESISGNLKDLSLNRNGAVSKKSHLVVCFGEMLIDFIPTVAGVSLAEAPAFEKAPGGAPANVAVCISKLGGSSAFIGKVGDDEFGRMLADILKQNNVDNSGMRFDHDARTALAFITLTAEGEREFVFFRNPSADMLLRESELDVDLIKKATIFHYGSISLIDEPCRSTHLAAMDIAKRSGSILSYDPNLRLPLWPSEDAARSGIMSVWNLADIIKISEDEISFLTGADDPNDDEVVLKRLFHPNLKLLLVTEGSAGCRYYTKEFKGRVNSIKVKAVDTTGAGDAFTGGVLKCLASDASLYQDEKRLREAIFFANVCAALTVTGRGGIPSLPTQDAVRQTLAEVTA

SEQ ID NO: 16617 - protein, 349 aa, Neurospora crassa
MTKVLLTGGSGFIAAHILEQLLAKGHTVVTTVRSEDKAQNIREAYPDKASSGELKVVIVPDIAKLDAFDEVVKEPGLEVVLHTASPFHFKFTPKEDPKTELIDPAVNGTTGILKAIARSAPTVRRVVITSSFAAILDENKITDPNHTFSEASWNPVTIDDIHRNPATAYRASKTLAEKAAWDFVRDPANNVKFDLATINPPMVFGPVVHHLASLSSINTSNERIVDLLQGKWKEGVPSTGAATIWIDVRDVARAHIRAGLEVPEAGGKRLFTTAGTFSNSEIAEKVRKNFPEYGDKLPEGEALKSGELPPDDQRFKVDNKATNELLKIDFISVEQMVVDTVKSLKEHGA

SEQ ID NO: 16618 - protein, 259 aa, Flaveria bidentis
FMPSPAATPADPTSIKCAACGCHRNFHRREPDASFPINPSPPVQHVIDYQPHHRHHPPPPQPPPPPRPISVAGVLETSVSPPDSPSPPPISSSYMLLALSSGLSAPPPEITHNPQISTGIGAIGANSTGKKRFRTKFTQDQKQKMHELAERVGWKMQKKDEDLIINFCNEIGVDKGVFKVWMHNNKMTSAGKKDSAHQLVDSGSSGAGGGGGGGDFLMSRNYHHLQQQQNNDSGSSGGGGGGGDGGGDVIGTNGSSSSS

SEQ ID NO: 16619 - protein, 562 aa, Ralstonia metallidurans CH34
MHDPSKNHRHDLRLVRGARQGSAGKSARRAVGAGVVSEGPAQLAIVPGTSPDALTAAVAGLGYKATLADAPLADNRVGLLDKVRGWMAAAEKHSGNEPPVQVAVIGSGGAAMAAALKAVEQGAQVTLIERGTIGGTCVNVGCVPSKIMIRAAHIAHLRRESPFDGGIAATVPTIDRSKLLAQQQARVDELRHAKYEGILGGNPAITVVHGEARFKDDQSLTVRLNEGGERVVMFDRCLVATGASPAVPPIPGLKESPYWTSTEALASDTIPERLAVIGSSVVALELAQAFARLGSKVTVLARNTLFFREDPAIGEAVTAAFRAEGIEVLEHTQASQVAHMDGEFVLTTTHGELRADKLLVATGRTPNTRSLALDAAGVTVNAQGAIAIDQGMRTSNPNIYAAGDCTDQPQFVYVAAAAGTRAAINMTGGDAALDLTAMPAVVFTDPQVATVGYSEAEAHHDGIETDSRTLTLDNVPRALANFDTRGFIKLVIEEGSHRLIGVQAVAPEAGELIQTAALAIRNRMTVQELADQLFPYLTMVEGLKLAAQTFNKDVKQLSCCAG

SEQ ID NO: 16620 - protein, 563 aa, Oryza sativa
MGNCCVSRPSGADKRRRCGSSTAPHTRGGRRVIGAANMRCLSTVSSVSDAARAVMSNEPATVLGNSGSSGNGGVMAAEEMLRRYEIGEELGRGEFGVTRRCRDAVTGERLACKSISKRKLRSSVDVEDVRREVAIMRSLPAHANVVRLREAFEDADAVHLVMEVCEGGELFDRIVARGHYTERAAAAVMRTIMDVVQHCHKNGVMHRDLKPENFLYANASENSPLKVIDFGLSVCFKPGARFNEIVGSPYYMAPEVLKRNYGQEIDIWSAGVILYILLCGVPPFWAETDEGIAQAIIRSHIDFQREPWPKVSDNAKDLVRRMLDPNPYTRLTAQQVLEHPWIQNASAAPNIPLGEAVRSRLKQFTVMNKFKKKALLVVAEYLPTEELDAIRELFNMLDTKKKGHLTLEELRKGLQVIGHNIHDTDVDMLMEAADIDGNGILDCKEFVTVSIHLKKIRSDEHLPKVFSFFDKNGSGYIEIEELKEALSPRGDQKSIDDIFLDVDIDKDGKISYEEFELMMSAGMDWRNASRQYSRAVYNTLSRKIFKEVSLKLDHSGPLVAAGK

SEQ ID NO: 16621 - protein, 395 aa, Glycine max
  misc_feature (46)..(46): Xaa can be any naturally occurring amino acid
  misc_feature (50)..(50): Xaa can be any naturally occurring amino acid
  unsure (1)..(395): unsure at all Xaa locations
FQSSGIKLGTFKSVNESLTRVAVYISLIALYCLGGSKVKAGELSVXTMAXFIGLYFTLTFAVQGLGNTFGDLRGTFAACEKINSCLSGAQVDDALAYGLKRKLRQKTLDDENYKLILSNISTENNQKHYLHYMSALKTSSNLFSLAWSGDICLEDVYFSYPLRPDVEILRGLNLRLKFGTVTALVGPSGAGKSTVVQLLSRFYEPPPGCITVAGEDVRTFDKSEWARVVSIVNQEPVLFSVSVGENIAYGLPDEDVSKEDVIKAAKAANAHDFIISLPQGYDTLVGERGGLLSGGQRQRIAIARALLKNAPILILDEATSALDAVSERLVQDALNHLMKGRTTLVIAHRLSTVQNAYQIALCSEGRIAELGTHFELLAKKGQYASLVGTQRLAFE

SEQ ID NO: 16622 - protein, 614 aa, Glycine max
MSYDKNPSPVPTSTTGDEEKKVTGGGYDVGVYSAHGRVDHNARAVDGHDLNDSYDPSKESLLTRLGLNIESFKRAPGTTRGLVAHGDIPPEYLQHDNPLLQQKMKPRHLQMIAVGGSIGTGLFVGSGASLGNGGPAAVLMAWIIMGVMLIMVTQALGEMAIIYPVSGGFYTLASRMLDPSFAFAMGWNYVLQWAVVLPLEITVAGTTVQYWTDKVPLGVWITIFFLLIIFFATLGTLGYAEEEFWSSCLKLAVVIMFIFIGIVCICGGGPASGDYGSYVGGRYWQNPGAFANGFKGVCAMFVTAAFSFAGTELVGLAATETPNPRKTLPSAVKNTFWRITIIYITSLTIIGLLIPYDDPDLFGGSGANVSPFVIVLDRANIGGLNHLVNATICISVLSIGLSCVYAGSRTLTALAETGYAPKMFTYVDKSGRPLYSVLAILAFGPIAYVNLANVGTDVFNWLLALSGLSTLFTWLAICVTHIRFRQAWKIQGHSVEELPFTAIAGVWGSWLGAILIVIVLIAQFYIGLFPLGGVESGNARAESFFLSYLAFPILLAFWVVGYAWKRTLPRKTTEIDLDTGRKSWLTVEEMRQYKAERRLAPWWKRIYRMLFTSS

SEQ ID NO: 16623 - protein, 377 aa, Arabidopsis thaliana
MSHQSPKPSTSTTTSIFTSATKLLWGPSLPPGLLISTARTAWTTVWQLMMTQLAPSDSSGSYTRPTSKFRLDPTQFTSAASSELHLYVGLPCPWAHRTLIVRALKGLNDAVPVSIASPGQDGSWEFKNNNIPIKDKDKLIPSLDKANRCRNLKEVYKSRSGGYDGRCTVPMLWDLRKKDVVCNESYDIIEFFNSGLNKLARNDNLDLSPPELKEMIQGWNQIVYPKVNNGVYRCGFAQSQEAYDGAVNELFSTLDEIEDHLGSNRYLCGERLTLADVCLFTTLIRFDSVYNILFKCTKKKLVEYPNLYGYLREIYQIPGVAATCDISAIMDGYYKTLFPLNASGIQPAISSSGDQDSLWRPHNRDLVGKAIEAQLSV

SEQ ID NO: 16624 - protein, 371 aa, Glycine max
MMEELNKPMDGSATSWLSDLEMDDYNLFPDECPLNLNMFDDREFLSQDIASAFQEQTQTLQQQSLSSECPSKTVSNSSTDETTFDFERPSKLLKTTTSTSSNFDSSTITKTLSPKLSPSSSFQSQILSFDNTNTQFYEFHCTLNPTQNEMVSVSVPQKGKPRFPTQTPKGSPKYQNFETKTSHAKRSPAHAQDHIMAERKRREKLSQSFIALAALVPGLKKMDKASVLGDAIEYVKELKERLTVLEEQSKKTRAESIVVLNKPDLSGDNDSSSCDESIDADSVSDSLFEVESRVSGKEMLLKIHCQKQRGLLVKLLAEIQSNHLFVANSSVLPFGNSILDITIVAQMGESYNLTTKELAKNLRVAALKILS

SEQ ID NO: 16625 - protein, 532 aa, Clostridium thermocellum ATCC 27405
MFHDSVLLKPVFLLVKLINTSYENSILKRVVTSVINFFKTLNRFYENSVTARIAKLITEMLYNSAIIGFFTRKGKMSRWWEHSLAYRIINGCFEVPSKILKGFYQKHEEIFLESIAVKAAKALLQRIEYIVGLFLIVILVVPHERWNNVYNVAIALFLVFLIFINTIIQRHWMFNFKALDCTLILFMTAVVVSFATSMNISSSIKYMLFYAACFLFVLIIVSTAKNENSLQTIIEMMLFGVTAIGIFGLWQSISGAVVFDPSLTDVEMNQGMPGRIYATMSNPNNFGEILVMSLPFYVSVILNSKTFFKKMIYFIMALPPLLALFNTGSRSSWIGFAVSVIVITFLLNKRLLPFIILGGVMMIPFLPQYVYNRILTIFRAAQDTSTQTRVKILQTVEPMFKHYMLSGVGLGSDIFRQLIQNYKLYTKAVPPHTHILYLQIWIEMGLAGFVTFMWYIYRTIKNSVIGIYNSSLTLKTILAAGTAALCGILVTSLVEYSWYYPRVMVMFWVLLGIIAAATYLAELKNRRLSEMD

SEQ ID NO: 16626 - protein, 515 aa, Clostridium thermocellum ATCC 27405
MKVVTPVQMREIDSYTINKVGIPGIVLMENAAVRVTDEILKDYGSLVNKNIVLLAGKGNNGGDAFAIARHLCNKGANTVVFILAAKKDISGDARINLDILENMGVETVEVLEGNDLTDMEKRLERADLVVDGIFGTGLKGGVKGFRGNVIKLVNQKNKPVIAVDIPSGVDGETGEIEGECIKAYKTVTFGYPKFGHFLHPGCEFVGELVVADISIPDSVAQNFDIKSYVTDKETVSRLIPGRKADSNKGDYGRVLVITGSTGMTGAGCLAGTASLRSGTGLLYLGVPKTLSFIYECNLTEAVTLPLEDENKGFLTKECIPMLLEYMEKMDAVAIGPGLSTKEDVEDVVFSVVENCKVPMVIDADGLNLISRNLPVLKKARAPVVLTPHPGEMARLTGLSIGEIQKRRVGTAREFSEKWGVTTVLKGAKTVVASPDGRVFINPTGNSGMSTGGTGDVLTGIIASFIGQGLDPVDAAVAGVYLHGLCGDRVANVKGEHGLVAGDLAEEIPYAIKSLI

SEQ ID NO: 16627 - protein, 163 aa, Zea mays
NFQKLKEMYNEWPFFRVTLDLLEMVFAKGDPGIAGLYDELLVSEELKPFGKQLRDKYVETQQLLLQIAGHKDILEGDPYLKQGLRLRNPYITTLNVFQAYTLKRIRDPSFKVTPQPPLSKEFADENKPAGLVKLNPASEYPPGLEDTLILTMKGIAAGMQNTG

SEQ ID NO: 16628 - protein, 471 aa, Vibrio sp. Ex25
MILVWFRRDLRTLDHTALKAALDSGQPVVACFIATPEQWREHHMAPMQADLIARRLEYLNDELESLNVPFLYKEVPSFSDCTEVISEWAKTLEATSVMANIHYEVNERELDAQVSEALASHDIDFELFHDKCVHPPTTVLNKQGEYFKVFTPFKRAWLTQFQMPAVTKPQEQAPLSSKLLEQLEPIRFSSDFTFSYPRESSEDWFASTNDVLKQLREFARERSDAYKEERDFPAIDGTSQLSPYLAIGALSPRQCIARLYAENQQNDLTEGKATWLSEIIWREFYQHLLVFEPKLVKGKGFIDWEDKIQWSYDEQAFERWKAGATGYPIVDAAMRQLNQTGWMHNRLRMVVASFLTKDLHIDWRWGEAYFMSKLVDGDFAANNGGWQWSASTGCDGQPYFRIFNPISQGEKFDSDGQFVRHWVPEIKSVPNKYIHKPWTWEGFSLLEYHKPMVDHKTEREITLRLFKSAKE

SEQ ID NO: 16629 - protein, 218 aa, Streptococcus pyogenes MGAS10394
MLMIKGIIFDMDGVLFDTEPFYLRRREDFFKTKGIPIDHLNSKDFIGGNLQELWKELLGKNRDDAIVKAITTDYDAYKQAHKPPYQKLLITEVNSCLEQLKKQGIKLAVASNSKRQDVLLALETTQIKDYFEIILAREDVSRGKPYPDIYNKAVQKLGLQKKQLLVVEDSQKGIAAAKAANLTVFAITDYRYGIDQSQADHKIDHLGQLCVKIGCFGS

SEQ ID NO: 16630 - protein, 707 aa, Thermobifida fusca YX
MNTGTPKTLDWSDLDRRTVDVVRALAMDAVEEAGSGHPGTAMSLAPVAYLLFQKVMRHDPTDPKWIGRDRFVLSCGHSSLTLYIQLYLAGYGLSLNDIKRLRQWGSLTPGHPEYGHTAGVETTTGPLGQGIGNAVGMAMAARRERGLFDPDTPIGESPFDHYIYVLCSDGDVQEGISHEVSALAGTQKLGNLIVIWDDNRISIEDDTQIAFTEDVVARYAAYGWHVQEVEWVGEDGSYHEDVAALYDAIRAAQAETERPSFIRLRTIIGWPSPNKQNTGAIHGAALGAEEVAATKRVLGLNPEAQFDVPNELLEHARGVVARGRAARQEWEALFAKWRANAGERAELFDRLMAGSLPDGWEKAIPTFEPSAKGMATRKASGEVLSAIAPVLPELWGGSADLAGSNNTTPKGEPSFIPEERSTKAFSGHRYGRVLHFGIREHGMGAILNGIALHGPTRPYGGTFLVFSDYMRPSVRLAALMKLPVTYVWTHDSIGLGEDGPTHQPVEHLWSLRAIPGLAVVRPADANETAVAWRTILERNDGPVALALTRQSVPVLDRSELASAELVSRGGYILAEASNGRPEAIIIATGSEVQIALEARSRLEESGTPTRVVSMPCLEWFNEQDDAYRQQVLPPSVRVRVSVEAGVALGWRELVGEYGESVSLEHFGASAPYATLYEQFGLTADRVVAAVHSSAAKLGGDRGSTTGN

SEQ ID NO: 16631 - protein, 368 aa, Thermobifida fusca YX
MGSPLQQLSDAGVAVWLDDISRQRLRSGNLAELIAQRNVVGVTSNPTIFAKALAEGDAYDGQLRDLAVRGVSVEEAVRLITAYDIRWAADVLRPVYEATDGVDGRVSLEVDPRLARDTERTVAEARALWWLVDRPNLMIKIPATVEGLPAITAALAEGISVNVTLIFSLERYRAVMDAFLAGLEQAQQAGRDLSTIHSVASFFVSRVDTEVDKRLSKIATEEAVALRGKTALANARLAYAAYEEVFSSARWTALAQAGARPQRPLWASTGVKDPELPDTLYVTELVAPGTVNTMPQATLDAVADHGTITGDTVRGHYDAARAHLDAVESVGVSMSDVVETLEDEGVDKFVKSWEELLDRVAQQLAAHT

SEQ ID NO: 16632 - protein, 447 aa, Capsella rubella
MLTSFKSSSSSSEDATTETPPPPFCQLASSSSSSAATSASHHLRRLLFTAADFVSQSNFTAARNLLSILSLNSSPYGDSTQRLAHLFTKALSLRINRLQQEQDPTVATCTTNEMTMSTNSTVFTSSVCKEQFLFRTKNNNSDFESCYYLWLNQLTPFIRFGHLTANQAILDATETNDNGALHILDLDISQGLQWPPLMQALAERSSSPNSPPPSLRITGCGRDVTGLNRTGDRLTRFANSLGLQFQFHKLVIVDEDLPGLLLQIRLLALSAVQGETIAVNCVHFLYKFFNDDADLIGHFLTVIKSLNPRIVTMAEREANHGDHSFLIRFSEALDHYVAIFDSLEATLPPNSRERLTLEQRWFGKEIMDVVAAEATERKQRHRRFEIWGEMMKRFGFVNVPIGSFALSQAKLLLRLHYPSEGYNLQFLNDSLFLGWQNRLLFSVSSWK

SEQ ID NO: 16633 - protein, 764 aa, Dechloromonas aromatica RCB
MSAKPLNSASTELALPGHWTAAIEPRLTSGETTQAWLEIDLDNRLKFSSGLVLVTNRRLLALPAGETDWQEWPLRGGLTLNHHDHAGVGALELIDEQGQLATWRYTLAKNLAALRVISEFDLNRDSIVSGQPVQRTTEDCCPKCKAPLPPGEDECPICNREATVAPSTWTLFRLWRFARPYRWQLLTGFLLTLASTAAQLVPPYLTMPLMDNVLIPFQNGKPIDWPLVSMYLGGLFGAAMLAWVLGWIRTYILSLVSERMGRDLRTTTYEHLMGLSLEYFGGKRTGDLMARIGNETDRINIFLSLDLLNFATDVLMITMTAVILFSINPWLALVTLLPLPIIGWMIHFVREKLRTGFEKIDRVWAEVTNVLADTIPGIRVVKAFAQEKRESERFRAANEHNLQMNDKLNKTWSLFTPTVTLLTEVGLLVVWVFGIWQISKGNSSVGVLTAFLAYIGRFYTRLDSMSRIVSATQRAASSTKRIFDILDHVSSVPEPTSPVHLTGVTGQIELKKAGFRYGTRAVTRDVDLIIQPGEMIGLVGHSGSGKSTLVNLICRFYDVSEGQVLIDGVDVRSVPVAEFRSHIGLVLQEPFLFFGTIADNIAYGKPNATRQEIIAAARAAHAHEFILRLQHGYDSLVGERGQGLSGGERQRISIARALLIDPRILILDEATSAVDTETEKEIQKALDNLVKGRTTIAIAHRLSTLRKADRLVVMDRGKIVEVGNHDELMAKEGHYFKLYMAQARNVDTEPMLPRTTSLPKTHAE

SEQ ID NO: 16634 - protein, 253 aa, Chlamydia trachomatis
MSKLTQVFKQTKPCIGYLTAGDGGTSYTIEAAKALIQGGVDILELGFPFSDPVADNPEIQVSHDRALAENLTSETLLEIVEGIRAFNQEVPLILYSYYNPLLQRDLDYLRRLKDAGINGVCVIDLPAPLSHGEKSPFFEDLLAVGLDPILLISAGTTPERMSLIQEYARGFLYYIPYQATRDSEVGIKEEFRKVREHFDLPIVDRRDICDKKEAAHVLNYSDGFIVKTAFVHQTTMDSSVETLTALAQTVIPG

SEQ ID NO: 16635 - protein, 513 aa, Capsella rubella
MSDFDGNFNESTSCWAPPFSPSPRAILAMIDQAEDDGLDLISEMFPHTNLPRDHSAQSSEQRSGLGQRLAARVGFSPPPLDTENISPSAASLRSSTTVPPPVSAIPPGFIPSTLLQSPNMVTDSSQMIPAPSSDTNYGPQGMVETSGEGNAPTLIFNNDHPYQPVNADLPLLDVFDDVPTEESVYLPTYETDHVEPIGDSLVPNSFEHEFVGDANVNFISNEGTESVKDSESDDELDFDFEFEDEDEAEAEAEDNDEDKAEDEDEDNDEDGNEDEDEDDEEDENDEEEADHDDEADFDDAEPSSPKRRKFEASSNMIGATRTNKAQRVILQMESDEDNPEDGFRWRKYGQKVVKGNPNPRSYFKCTNNDCNVKKHVERGADNFKILVTSYDGIHNHPPPPARCRINSGPRNRSGTTTTTQNQSYRTDRLGRFPAPSSVITPMEMMPLSSFTPPLDMSKVYMTGLNKLPNFSVFQNPGYMYRNDEPMMNVVPNGSGIYGGIRHRLFAEFGVNLM

SEQ ID NO: 16636 - protein, 291 aa, Burkholderia fungorum LB400
MNTSNGNSRDTQTDSLQGKVVVLTGAGGGIASAIVDRFARSGSRIVLLELRTSSLADAEQRLAAAGIESVSIECDVADESSVKNAAGRTVEHFGRCDVLINNAATLAPATSIEKLLVADWDRTLAINLRGVFLTTKYLGALMLNQGSGSIVNIASIAATAPNASPQYGASKAAVLAFTRHTAVEWGPRGIRANAVSPGFIRTPLSESNYAEPEMLARRSNMVPSRRLGLPGDIAEAVAFLAGDGASFINGQELAVDGGFMQTTLMHAQPKAEQYGGWQPAHIDFSAAVPHG

SEQ ID NO: 16637 - protein, 261 aa, Thermobifida fusca YX
MSRIVNPPTVVVQSDAELLAKATAARLVTRLVDAQAMRGTASLVLTGGGIGIAVLEQLALAPARDAIDWSRVDIWWGDERFLPSGDPDRNETQARRALLDHVPVPAERVHPMGASDRVDDSPEAAARRYADELREAAEYGDAVPAFDVCLLGVGEDAHVASLFPGRPAMYETERTVVSVHGSPKPPPVRISLTLPAIRAAREVWLIASGEAKANAIRLALDKAGPIQVPAAGARGRSRTLFLLDRAAASALPPGFYVPGVV

SEQ ID NO: 16638 - protein, 259 aa, Poa annua
MGRGRVELKRIENKINRQVTFSKRRNGLLKKAYELSVLCDAEVALIIFSSRGKLYEFGSAGTTKTLERYQHCCYNAQDSNSALSETQSWYQEMSKLKAKFEALQRTQRHLLGEDLGPLSVKELQQLEKQLECSLSQARQRKTQLMVEQVEELRRKERQLGEINRQLKHKLDAEGSSSNNYRAMQQLTWAAGTVVDEGAAAYHMQHQQQQQPNHSAAMDCEPTLQIGYPHQFAAPEQAANNIPRSSGQGGENNFMLGWVL

SEQ ID NO: 16639 - protein, 357 aa, Burkholderia fungorum LB400
MSDITHTGEHQALVVGATGIIGSAILHRLGAAEGWTAIGLSRSRRVAEGRARMLEVDLLDPQDCARKLGALNRITHIFYAAYQARPSRAEEVAPNVQMLRNVVDAVSGRARGLKKIVLITGAKFYGIQWGRVKTPMKETDARQLPPNFYYDQEDFLRDAQRQADWHWCNLIPPFVSGYSVGNPMNLVMAIGVFASLSRELNLPLRFPGLPGAWSALQQIADAEQIAAAAHWAATSPAANNEAFNVTNGDPIRWENFWPAVAGHFGMRLEAPKTLPLGRLMADNEAAWARMVERYRLQAASIAKLVDWNWADYMFRMEYDVLMETGKIRRAGFQDCVDTTERFLARFRQLQQQQIIPR

SEQ ID NO: 16640 - protein, 429 aa, Nostoc punctiforme PCC 73102; identical to SEQ ID NO: 1370

SEQ ID NO: 16641 - protein, 641 aa, Vibrio vulnificus
MRLDVEQTSKLDRVRADYNVHYWSQGFYGIDDQGEMYVSPRSDNAHQIQLSKIVKQLEERQLNVPVLVRFPQILHQRVHSICDAFNQAIEEYQYPNKYLLVYPIKVNQQREVVDEILAASQAQLETKQLGLEAGSKPELLAVLAMAQHASSVIVCNGYKDREYIRLALIGEKLGHKVFIVLEKMSELDLVLREAKSLGVTPRLGIRIRLASQGAGKWQASGGEKSKFGLSASQVLNVISRLKKENQLDTLQLVHFHLGSQMANIRDVRNGVNESARFYCELRTLGANITYFDVGGGLAIDYDGTRSQSSNSMNYGLVEYARNIVNTVGDVCKDYKQPMPVIISESGRSLTAHHAVLISNVIGTETYKPETVTEPEEDFPLLLNNMWRSWLNLHNGTDARALIEIYNDTQSDLAEVHSQFATGVLTLEHRAWAEQTSLRIYYELNRLMSTKNRFHRPILDELSERLADKFFVNFSLFQSLPDSWGIDQVFPVLPLSGLQNAADRRAVMLDITCDSDGAIDAYVDGQGIESTLPVPAWNEDEPYLMGFFLVGAYQEILGDMHNLFGDTHSVVVNVGDQGEINIDFINEGDTVEDMMRYVHIDVDQIRKNYHSLVSQRVDQEEQQQILAELEQGLSGYTYLEDF

SEQ ID NO: 16642 - protein, 253 aa, Chlamydia trachomatis
MSKLTQVFKQTKPCIGYLTAGDGGTSYTIEAAKALIRGGVDILELGFPFSDPVADNPEIQVSHDRALAENLTSETLLEIVEGIRAFNQEVPLILYSYYNPLLQRDLDYLRRLKDVGINGVCVIDLPAPLSHGEKSPFFEDLLAVGLDPILLISAGTTPERMSLIQEYARGFLYYIPYQATRDSEVGIKEEFRKVREHFDLPIVDRRDICDKKEAAHVLNYSDGFIVKTAFVHQTTMDSSVETLTALAQTVIPG

SEQ ID NO: 16643 - protein, 382 aa, Nostoc punctiforme PCC 73102
MKVLVTGIGLVSALGGSLEDSWKNLIAGKSGIRLHQPFPEIKPLPLGLIAQQPSELAMLTQMVVTSALQDAGLVPPLADCAVVIGSSRSYQASWEMLARQMYKDTKNLPVSNFGNWLDILPHINAIATARQIGATGMVLAPMAACATGIWSIAQAALLIQTGQCQQAIAGAVEAPITPLTLAGFQQMGALAKTGAYPFDLQREGLVLGEGAAVFVLESAELAKQRQAKVYGEILGFGLTNDAYHSNSPEPEGKSAIAAIKQCLERSCLSPADIDYIHAHGTATQLNDQMESMVIQRLFPQGVAVSSTKGSTGHTLGASGALGVAFSLMALKHQILPPCVGLQQPEFDLEIVTAARLSKIRQVLCLSFGFGGQNVAIALAKSP

SEQ ID NO: 16644 - protein, 506 aa, Glycine max
DRTSFRIEGVEGEFDRICRSLGLSGPEDFAIPAAAWEAMKFRSSSDILPRLKLDNLDIPEEDVEEESKVNEVRMFKSAEEGELSENHGVSDSVRVREIDESSNGIKGIRPPMLKPPPGTRVQVVDDSACSSWDLLRDLAPQGGEGLPLNHSNEEREVAEKEEGEVGTKESPKREEEQNVDNAARIAEIVAGLSESCSFSTSNEDDSSSSTTDPRSNNISPQGRIKRIITAGSWQKGEFLGGGSFGSVYEGISDDGFFFAVKEVSLLDQGTQGKQSVYQLEQEIALLSQFEHDNIVQYYGTEMDQSKLYIFLELVTKGSLRSLYQKYTLRDSQVSAYTRQILHGLKYLHDRNVVHRDIKCANILVDASGSVKLADFGLAKATKLNDVKSMKGTAFWMAPEVVKGKNKGYGLPADMWSLGCTVLEMLTGQLPYRDLECMQALFRIGKGERPPIPDSLSRDAQDFILQCLQVNPNDRPTAAQLLNHSFVQRPLSQSSGSSFPHIHGRKG

SEQ ID NO: 16645 - protein, 404 aa, Salmonella enterica subsp. enterica serovar Typhi Ty2
MKRAVITGLGIVSSIGNNQQEVLASLREGRSGITFSQELKDAGMRSQVWGNVKLDTTGLIDRKVVRFMSDASIYAYLSMEQAVADAGLAPEVYQNNPRVGLIAGSGGGSPKFQVFGADAMRSPRGLKAVGPYVVTKAMASGVSACLATPFKIYGVNYSISSACATSAHCIGNAVEQIQLGKQDIVFAGGGEELCWEMACEFDAMGALSTKYNDTPEKASRTYDAHRDGFVIAGGGGMVVVEELEHALARGAHIYAEIVGYGATSDGADMVAPSGEGAVRCMQMAMHGVDTPIDYLNSHGTSTPVGDVKELGAIREVFGDNSPAISATKAMTGHSLGAAGVQEAIYSLLMLEHGFIAPSINIEELDEQAAGLNIVTETTERELTTVMSNSFGFGGTNATLVMRKL

SEQ ID NO: 16646 - protein, 441 aa, Streptomyces netropsis
MSHSVTLPSTKDIIELERRHRLPGGQSMTDLAGIVVDRAVNAEVWDRDGKRYIDFFTGVGVSNIGHSHPAFLEELTTQLSRCAVGTFYTDVRSRYFALLAAQLPEQLGEIHMFSTGSEAVEAAVKLARAATGKHEIVSFWGGFHGKTQGALSLHGGPRKHRSGPFPPGSHQVPYADCHHCPLQLEHPECGQRCVDLAEQSIENGSVGDLAAVIVEPVQGTNGNIIPPEGYLRTLRQLADRHGALLILDEVITGFGRTGALFAFEHDPGIAPDVVVLGKAMASGVPASAIVSRSGLVEGTSFAVPSAAASTFGGNPLASAASLATLRVLLDERLPERSHELGKSVSDRLSAWREEFPFVGNADNIGLMIGVELVDPATRLPLPKGITRRLFQELMARGVLAMAYDSRIRLYPPLSIPTHHLEEGLAAFEGAFRAMAPAISRL

SEQ ID NO: 16647 - protein, 448 aa, Streptococcus pneumoniae R6
MREYDIIAIGGGSGGIATMNRAGEHGAQAAVIEEKKLGGTCVNVGCVPKKIMWYGAQIAETFHQFGEDYGFKTTDLNFDFATLRRNRESYIDRARSSYDGSFKRNGVDLIEGHAEFVDSHTVSVNGELIRAKHIVIATGAHPSIPNIPGAELGGSSDDVFAWEELPESVAILGAGYIAVELAGVLHTFGVKTDLFVRRDRPLRGFDSYIVEGLVKEMERTNLPLHTHKVPVKLEKTTDGITIHFEDGTSHTASQVIWATGRRPNVKGLQLEKAGVTLNERGFIQVDEYQNTVVEGIYALGDVTGEKELTPVAIKAGRTLSERLFNGKTTAKMDYSTIPTVVFSHPAIGTVGLTEEQAIKEYGQDQIKVYKSSFASMYSACTRNRQESRFKLITAGSEEKVVGLHGIGYGVDEMIQGFAVAIKMGATKADFDATVAIHPTSSEEFVTMR

SEQ ID NO: 16648 - protein, 711 aa, Pseudomonas putida KT2440
MPSKKTDAPKHSEAAGTQTPDRANTNAKLQSLEADRSDATGQALRTNQGVRIADNQNSLKAGDRGPSLLEDFIMREKITHFDHERIPERIVHARGTGAHGFFQSYGNHAELTKAGFLQDPEKITPVFVRFSTVQGPRGSGDTVRDVRGFAVKFYTDEGNFDLVGNNMPVFFIQDAIKFPDFVHAVKPEPHNEIPTGGSAHDTFWDFVSLVPESAHMVMWAMSDRAIPRSLRMMEGFGVHTFRLINAEGVASFVKFHWKPRQGVHSLLWDEAQKLAGKDTDFQRRDLWEAIETGDYPEWELGVQIVPEADEHKFDFDLLDPTKIIPEELVPVTPLGKMVLNRNPDNFFAEVEQVAFCPGHIVQGIDFTNDPLLQGRLFSYTDTQISRLGGPNFHQIPINRPVAPNHNNQRDALHQHVVHKGRASYEPNSIDGGWPKETPPAAQDGGFESYQERIDAHKIRQRSESFGDHFSQARLFFHSMSPTEQQHIIKAYSFELGKVEREHIRAREVNEILANIDLKLAAAVAANLGLPAPKAGTVKVKGSQLAQSPALSQMNHPGSVGIKGRKIAVLVADGVDAASVDKLVKALEAHSARPMLLGPTSAPVKAADGKQLPVAASMEGMPSIMFDGIVVPAGKASTDALAASGLAKHFVLEGYKHLKALVLTKELAKALGLKEDKGLLLGDEQKAVDAFVKAVEGHRVWEREAAAEAVPA

SEQ ID NO: 16649 - protein, 96 aa, Betula pendula
CDHLRVVFGQQMGLSDQDIVALSGAHTLGRCHKERSGFEGPWTSNPLIFGNTYFTELLSGEKEGLLQLPSDKAPLSDAAFRPLVDKYAADEDAFFV

SEQ ID NO: 16650 - protein, 269 aa, Pimpinella brachycarpa
MGRQPCCDKLGVKKGPWTADEDNKLINFILTNGQCCWRAVPKLAGLRRCGKSCRLRWTNYLRPDLKRGLLTDAEEQLVIDLHARLGNRWSKIAGRLPGRTDNEIKNHWNTHIKKKLIKMGIDPVTHEPLHKEETNSQKEILLQPFQSPAETENHVPPIPHTNDMASSENSCTPTDQNSSGDESNSLSAICDQIDDSLISYLFEDDTPGLVDAPWENFNKVDMVLPSWDESFPWLLDCQDFGIQDFGFDCFNDIEMNMLTQLDVKNDQTG

SEQ ID NO: 16651 - protein, 794 aa, Candida albicans SC5314
MVQLALFTNNNHNNNSNNNTTNTLNDDTQYDSTTMNTEDTPIIPDKTDKLNGSDSRSSSRNRTRSISFTRFLFNSNNNNNNNKDHTEQSRCPSNETSDNSVGSPEQQNSGFNKLKKMFKTNSSLTQEDGKNSGRTRSASTPLTPPKVKKETSVPVITTTKAPNKEETTTTKIHSPPESPVVQSNPYFQYQGVPAHTNTSQNPQIETAPGRSDMSVALRHNDSVFSLNENGVLKPPKIHYSELSSSSEDNSEPSSPALPKTPMRDLVEKDELHLKPIEDERDLAIPASPFQRALRRVASAPLVHRLLNEKSPEDANNNNNNNTGNNLGGPFSTSTQTSPKKDEPFDINKHIGEVKITGRPRTYTQDRTYSNAATRIVDVQVGPNSFEKVRLLGKGDVGKVFLVREKSSNKLYAMKILNKKEMIERNKIKRALAEQEILATSNHPFIVTLYHSFQSKDHLYLCMEYCMGGEFFRALQTRDTKTICEADAKFYAAEVTAALEYLHLMGFIYRDLKPENILLHQSGHIMLSDFDLSKQSERAKNPEISFHKSGMHLSSAGSSNHHNGPAIDTKACIDGFRTNSFVGTEEYIAPEVIRGKGHTSAVDWWTLGIFLYEMLFGTTPFKGQDRKKTFANVLKKDVKFSDTQQSISSNCRNLIKKLLIKDEEKRLGSKTGASEIKNHAFFKDTQWALLRHQKPPMIPVLTKSTSTSNSNKKYEKPMEDTEEIDDVTSISKSINEQIDDPFSQFNSVTLRYGGEFEDLNQSPMYNPDSSAYTSVAYTMTSNNENSFRQKSFLKR

SEQ ID NO: 16652 - protein, 281 aa, Clostridium thermocellum ATCC 27405
MDEKRLNELRKYSTIIRRHIIEAVYNAKSGHPGGSLSSADIITVLYFNEMRVDPKNPAWEDRDRFVLSKGHCSPALYGALAERGFFPVEELLKFRHIDSFLEGHPSMRYVPGVDMSTGSLGQGISAAVGMAIAGKLDKKDYYVYVILGDGEMQEGQVWEALMSASHYKLNNLIAFLDHNHLQIDGNITEVMSPEPIVDKVRAFGWNVITIDGHDHRQISEAVREAKKSGDKPTMIIAETVKGKGVSFMENVAEWHGSPPNKEERDRAIAELDKILAGLEGR

SEQ ID NO: 16653 - protein, 311 aa, Clostridium thermocellum ATCC 27405
MQEKIATREAYGKTLAEIGSDPRIVVMDADLSKSTKTEYFKNKYPERFFNMGIAEANMMAAAAGIASCGKVVFASTFAMFASGRAFEQIRNSICYSNLDVKIGASHSGLTVGEDGASHQTIEDIAIMRVIPNMTVVCPADAVEARHATIAAYKTPGPFYLRLTRLAVPVIFDDNYKFELGKGVTIRDGNDVAIIATGLMVSKAIEAADILKREGINARLINIHTIKPIDRDIIIKAATETGTIVTCEEHSVIGGLGSAVAEVLVETCPVPMRMVGVMDRFGKSGKPDELLKMYGLTAENIVEKVKEVLKNK

SEQ ID NO: 16654 - protein, 361 aa, Candida albicans SC5314
MSSIFKLSTRTIMTSTTTNSIKPKVLRLGITHYAQHKWDQLSKIAEIIDCESTNREEFIHDLQTKYNDITNISRTFASIKQTGRFDNELAKHMPTTLKAISHCGAGYDQIDVTPFTEIGVQISNVTVPVEGPTADTAIYLVLACMRNFQIGHNILVNGEWPQSKNKKKKKISHALSIGNSPEDKVVGILGMGGIGRAIRDRLKPFGFGKIVYHNRNRLSEELEAGAEYLSMDELLNQSDIIIVSVPLNAHTKHLVNKSLIEKMKDGVILINTARGAVIDEKVLPELIKSGKIGSFGADVFENEPEVSPELYELPQVVSLPHMGTYTVEAVRNMESWVVDNIESYIKTGKVKTIVPEQYNAF

SEQ ID NO: 16655 - protein, 125 aa, Betula pendula
LKQEPGTSEETEQFACTRYKAEYPIFQKIRCNGPDTAPLYKFLKASKTGFLGSRIKWNFSKVAFPCNQFLKQEPGTSEETEQFACTRYKAEYPIFQKIRCNGPDTAPLYKFLKASKTGFLGSRIK

SEQ ID NO: 16656 - protein, 544 aa, Arabidopsis thaliana
MDSFSYSSMKSMLIQARGSLNSRLSEFEPLVLLLVPLVSLFLAQIIGSVFGVVHEKGLKACLIGFIMGLLKMIPGVQNYIDAEKQKVVDQLQSGSSSKKKNKTEVLPVKGLGVEVLEKMENEKRNDAIWQGKCSGTVYIGGAESEGHFSLINQACSMFAHTNPLHIDVFQSVVRFESEVVAMTAALLGSKETASGGQICGNMTSGGTESIVLAVKSSRDYMKYKKGITRPEMIIPESGHSAYDKAAQYFKIKLWRVPVDKDFRADVKATRRHINRNTIMIVGSAPGFPHGIIDPIEELGQLALSYGICFHVDLCLGGFVLPFARKLGYQIPPFDFSVQGVTSISVDVHKYGLAPKGTSTVLYRNHEIRKHQFVAVTEWSGGLYVSPTIAGSRPGSLVAGAWAAMMSLGEEGYLQNTSKIMEASKRLEEGVREIHELFVIGKPDMTIVAFGSKALDIFEVNDIMSSKGWHLNALQRPNSIHICITLQHVPVVDDFLRDLREAVETVKANPGPITGGLAPIYGAAGKMPDRGMVNELLVSFMDSQY

SEQ ID NO: 16657 - protein, 440 aa, Oryza sativa
MAASSSSTTRLIPLLLVLTFCLALASASAWAAAAGDDDLLAAAREPGMAEWLRGVRRRIHRHPELAFEEVRTSELVRAELDAIGVPYQWPVARTGVVATIAGGGGGDGPVVALRADMDALPVQELVDWEHKSQENGKMHACGHDAHTAMLLGAAKLLQKRKNELKGTVKLVFQPAEEGSAGAYYVLQEGVLDDVSAMFGMHVDPALPVGVVAARPGPFAATSGRFLATITGKGGHAAFPHDAIDPVVAASNAILSLQQIVAREIDPLQGAVVSITFVKGGEAYNVIPQSVEFGGTMRSMTDEGLAYLMKRIKEIVEGQAAVNRCGGGVDFMEESMRPYPAVVNDEGMYAHARASAERLLGAGGVRVAPQLMGAEDFGFYAARMPSAFFTIGVGNATTSSARAAHTTHSPHFVIDEAALPVGAAVHAAVAIDYLSKHASSM

SEQ ID NO: 16658 - protein, 358 aa, Betula pendula
IGSEVIGGVGGTCVIRGCVPKKILVYGATFRGELEDARNYGWELNEKIDFNWKKLLHKKTEEIVRLNGIYKRLLTNSGVKMHEGEGKIVGPNEVEVTQLDGTKLSYTAKHILIATGSRAQRPPIPGQELGITSDEALSLEELPKRVVIVGGGYIAVEFASIWNGMGVTVDLCFRKELPLRGFDDEMRAVVARNLEARGVNLHPRTSLSEIIKTGDGIKVNTDHGEELIVDVVMFATGRAPNTKRLNLEAVGVELDKTGAVKVDEYSRTNIPSIWAVGDVTNRLNLTPVALMEGTCFAKTVFGGEPSKPDHRDVPCAVFSIPALSVVGLSEEQAIEQANGDILVFTSTFNPMKNTISGR

SEQ ID NO: 16659 - protein, 450 aa, Escherichia coli O157:H7
MTKHYDYIAIGGGSGGIASINRAAMYGQKCALIEAKELGGTCVNVGCVPKKVMWHAAQIREAIHMYGPDYGFDTTINKFNWETLIASRTAYIDRIHTSYENVLGKNNVDVIKGFARFVDAKTLEVNGETITADHILIATGGRPSHPDIPGVEYGIDSDGFFALPALPERVAVVGAGYIAVELAGVINGLGAKTHLFVRKHAPLRSFDPMISETLVEVMNAEGPQLHTNAIPKAVVKNADGSLTLELEDGRSETVDCLIWAIGREPANDNINLEAAGVKTNEKGYIVVDKYQNTNVEGIYAVGDNTGAVELTPVAVAAGRRLSERLFNNKPDEHLDYSNIPTVVFSHPPIGTVGLTEPQAREQYGDDQVKVYKSSFTAMYTAVTTHRQPCRMKLVCVGPEEKIVGIHGIGFGMDEMLQGFAVALKMGATKKDFDNTVAIHPTAAEEFVTMR

SEQ ID NO: 16660 - protein, 162 aa, Brassica napus
GHWNVTDVCNGLLGGFAAITGGCSVVEPWAAIICGFVAALVLLGCNKLAEKLKYDDPLEAAQLHGGCGAWGLIFTALFAREKYLNQIYGEKPGRPHGLFMGGGGKLLGAQLIQILVITGWVSATMGTLFFILKKMKLLRISAEDEMAGMDTTRHGGSAYMYY

SEQ ID NO: 16661 - protein, 558 aa, Xanthomonas axonopodis pv. citri str. 306
MWEALGTVRDLGRLQEIASVLIRYGFGDVVRRIGLADVLERAGRLLHWQNAEGRLRMSAAMRVRRALEELGPTFVKLGQVLATRVDLLPPEWIEELSELQNAVPALPFDQIRPQLVAALGMEPESVFARLDEQPLAAASLAQTHRAWLVDGTPVVLKIRRPDIGDTIDADLRLLARLAEIVETRAPDLKRYRPSEVVQQFTVSLRRELDFAAEGRNAERIAANFAHDAQVVVPAVYWEWTSESLNVQEFIDGIPGRDLLAVDAAGLDRRALARAGAGIVLKMVLQDGCFHADPHPGNIFYLRDGRIAVIDFGMVGRVSEQRRFQVAQLLHGMVSYDAEAVIDVLLEWAGTSLEIDEARLQQDIGAFVDEYRGVPLKELRIGAMLGDVTSILRDHGLTLPSDLALMIKAFLTLEGMGRQLDPDFDMATEARPYLERVVLQRYAPRAIVRRGRRTVTGAIDLIGDLPRDLKRLLQAARRGKLQLQVETRALREFGEQVDRAANRLTMGIVTAALVIGSSIVMNSVGGSASRWLLALGVGGFIGAALCGIWILFSIWRSRR

SEQ ID NO: 16662 - protein, 102 aa, Anabaena sp. L-31
MAAVSLSVSTVKPLGDRVFVKVSASEKRPRRLYFPDTAKEKPQVGEVVALGAGKRNDDGSRQELEVKVGDLLLYSKYAGTDVKLGTEEYVLLSEKDILAMVG

SEQ ID NO: 16663 - protein, 275 aa, Zea mays
MKRPRGAGATPSLSAMPNHQEDDGYGVVGMEADVDVDVDEEMMAFGGGGGGEKKRRLSAEQVRALERSFEVENKLEPERKARLARDLGLQPRQVAVWFQNRRARWKTKQLERDYAALRRSYDALRLDHDALRRDKDALLAEIRELKAKLGDDEDAAASFTSVKAEPAASDGPAPAGVGSSEISDSSAVLNDADPPVAEAPAPAPEVQGTLLVAPAGPVAGAAAANHGGVFFHGSFLKVEEDETGLLDDDGPCGGFFAVEQPPAMAWWNEPAEHWN

SEQ ID NO: 16664 - protein, 502 aa, ASPERGILLUS NIDULANS FGSC A4
MKPPYYMETGCKRNPGSDSTLKVRWTLYTRLLQSANQGLGIDPGSGQVFASCPTNTVADVDAYVSSAHRSFLSYRETNPRARAKMLLNWHNLIAQSKNDIAKLVVYETGKPMAEAVGEVDYALGFAWWFAGEAERVRGSIAQPSISERRTFVIKQPIGVCIALVPWNFPVAMIIRKAAAALAAGCTVVIKPSPETPLSVLALADLALQAGFGPGVINVLTTDNLNTPDVSEALCKHPLVRKVTFTGSTAVGQLIARHCSEGLKKVTLELGGNCPFIIFDDGDLEQALAALMILKWRTAGQACTHANRVYVQSGVYDTFLRMIVNATKQLKVGHGASPGTTMGPLTTSRGIEKLERHVADALAKGARLELGGHRLQLEGNYFQPTIISGMSAYMLTTQEEIFGPLLGLYRFETEEEAVRMANDTSMGLASYFFTRDVSRTWRLLENLEAGMIGMNTGNSSAAESPFGGIKASGYGKEAGKDVAIEEYLIAKTGTLTVGAVSKL

SEQ ID NO: 16665 - protein, 608 aa, Streptomyces hygroscopicus
MCGITGWVSFHQDPRTQAPVIEAMTATLAPRGPDAAGVWLGPRAAIGHRRLAVIDLAGGVQPMTDRPDAPTTVLTYSGEIYNHHELRSQLSGLGHEFRTRSDTEVVLRGYAEWGEKVADHLDGMFAFAVWDERAQRLLLVRDRLGVKPLFWAEVDGGLAFASEPKALFAHPEIRPRVDADGLREAYSLLFNTGPTVWSGVREVEPGGLLLLDRDGIRERRYWQLEADAHPDDRDATIARVHDLVSTAARAQLEADVPLCSLLSGGIDSTVLTALLADELRLREGPGARIRSYAVDYSDQAESFTGDVLRTGHDTPYATEAGAFLGTDHSTVVLDPRALLDPEHRRAVVVARDSPIGVGDMDTSLHLLFGEIRKHSTVALSGEAADEVFGGYPWFHNPKALATATFPWLLVTGDEAAMPLNPELDLRIGEFRDDTYRTALAAVPHLDGETPTEHRQREMQHLSLTRWLRQLLHRKDRLSMAQGLEVRVPYCDHRLVEYAFTTPWALKNFDGREKSLLRAAGTGLAPDSVLHRPKNHYPATHHPDYNRGLQNMARDALADDTVRSLADETRLKPCLDTPPGQLEWGHRLRLERVVDLALWLDHYQPELAL

SEQ ID NO: 16666 - protein, 317 aa, Staphylococcus epidermidis RP62A
MKMEKEQAHWIYKTMNEIRFFEEKVHKIFSDGRIPGFVHLYVGEEAVATGVMSQLNDDDYITSTHRGHGHAIAKGCDLNGMMAEIMGKRDGLGHGKGGSMHVAEIDKGMLGANGIVSGGFGLAIGASISIINQGKDNVAVCFFGDGAANEGNFHEGLNFASILDLPVLFICENNQFAEGTTHDYASASETIAERAAAYNMPGVRVDGMDVMEVYKATQEAVERAKKGEGPTLIECDTYRKYGHFEGDEQKVKSPDDRNADKNATVEFRKRAIEENWLTEKEADEIEKAAEQAVEDAVKFAEESELPDEDSLYKDVFA

SEQ ID NO: 16667 - protein, 450 aa, Staphylococcus epidermidis RP62A
MSKSYDLIVIGAGPGGYVAAIRGAQLGKNVAVIEKNNAGGTCLNVGCIPSKTLLEHGEKAHSIRVANDWGITTKDLKIDFTQFVQRKKKVVQTLTGGVKQLLKKNKVTYIEGEARISKNLKVDVNNETYQAKDIILATGSQPFIPPIDGLDQVNYETTDTFFDLEKLPKQLAVIGGGVIATELASSMADLGVRVTIIEVADDILLTEINETREMLKAHLDNQGIKILTKAKIKQVKESKIILDGQDDVSFDTLLVATGRQPNTQVAKDLNLEMDGKFFKVNEHYETSQKHVYAIGDLIKGYQLAHAASAHGIHVVETIMNKQPSLVRQEDITRCIYTRLEAASVGLSEEQAKEAGYDVKVTQSAFQGNAKALIKGENEGFIKLVVDKKYGEVLGAFIVGPHATDIIGELLSVKASEGTIHELSQIIQPHPALLEAIGESADAFFDSAIHM

SEQ ID NO: 16668 - protein, 465 aa, Streptococcus mutans UA159
MSHQNAKNTTQNPKELENGMVRGLQNRHVQLIAIAGTIGTGLFLGAGRSISLTGPSIIIVYLLTGLFMFWMMRAMGEMLYHDPDQHTFINFITKYIGKEWGYFAGWSYWVSVIFLGMAEITAIAKYVQYWFPSWPAWIIQIVFLLILGSVNLIAVRVFGEAEFWFAMIKIIAILALIATAIFMLLTGFKTSQGPVSFANISKGFEMFPNGWMKFLMSFQMVFFAYQAIEFVGITVSETQNPRKVLPKAIQEIPMRIVIFYVGALIAIMTIFPWRALPSDTSPFVMVFKLAGIKWAAALINFVVLTSAASALNSTLYSTGRHLYQLANEAPNQFMKRFKIGTLSKTGVPSKAIIFSAIVIAISAFINVLPGIKDAFALITASSSGVYIAIYVLTMLAHLKYRKSNDFMADGYLMPHYKILNPITIIFMVFVFITLFLQDSTYIGAIGATIWIAAFGFYSKFKFKKQ

SEQ ID NO: 16669 - protein, 190 aa, Shigella sonnei
RPGKINLGIGVYKDETGKTPVLTSVKKAEQYLLENETTKNYLGIDGIPEFGRCTQELLFGKGSSLINDKRARTAQTPGGTGALRVAADFLAKNTSVKRVWVSNPSWPNHKSVFNSAGLEVREYAYYDAENHTLDFDALINSLNEAQAGDVVLFHGCCHNPTGIDPTLEQWQTLAQLSVEKGWLPLFDFAY

SEQ ID NO: 16670 - protein, 449 aa, Listeria monocytogenes str. 1/2a F6854
MEKHYDYIAIGGGSGGIASINRAAMHGAKCALIEPKFLGGTCVNVGCVPKKVMWYGAQIKEAMDLYADAYGYQVDASFNFQKLVENREAYIERIRGSYKNGLDNNKVEWIKGYAEFVDEKTLRINGELVTADHILIATGGEPALPSIPGAEFGITSDGFFALKELPKKVAVVGAGYIAVELAGVLQQLGSETHLFVRKHAPLRNFDPLLTDTLTEIIEQSDMTLHKHAIPQKVEKNPDGSLTLSLEDGRTETVDTLIWAIGRKPVIKDLQIENAGVELLESGHIAVDKFQNTNVAGIYAVGDVTGHYELTPVAIAAGRRLSERLFNNKKDAHLNYENIPTVVFSHPAIGTVGLTEPEAIEKYGKENIKVYTSSFTSMYTAITDHREPCRMKLICEGKTERVIGLHGIGYGVDEMIQGFAVAINMGATKADFDNTVAIHPTGSEEFVTMK

SEQ ID NO: 16671 - protein, 1076 aa, Oryza sativa
MGGETKPAATAPKSYPVRAPKPVGQWISGIYRDRLNQFLSGGQYEGQNLLAMMREAVAAGPHIELSVWSAPNLSRPTFKEAVSHEYKPTEVGAWFGPSWSTHWFRVKLRVPDYMVKLEHLELHWDANNEGMVWSSDGHPLQGLTGGGERVEWILPDSFRDSKWHTIYVEMACNGMFGNAPGGDSIQPPDPNRCFQLARCEMVAINTQARALRIDAWLINDAAREFPEESWERHKALKVSNDIIDTFELGNKDSIIKCRKIAQEYIGTLVDSHRVYESDKTPLVYGIGHCHIDSCWLWPWAETKRKVARSWSNQCDLMDRYPELNFACSQAQQYKWLKQDYPYVFDRVKQKVKGGRFHPIGGSWVEHDTNMPSGESLVRQFLYGQRFFESNFGQRCQTFWLPDTFGYSSQLPQICRLAGMTRFLTQKLSWNNINKFPHTTFNWVSLDGSQVICHMPPSETYTADANFGDVKRSISQHKSMDQDETSLLVFGKGDGGGGPTWEHIEKLRRCRGISDQVGLLPRLHMGNSVDDFFDKLQDKADKFVTWYGELYFELHRGTYTTQANNKLNNRKAEVTLRDVELLATIASLKDSSYKYPKKEIDDMWEGTLLCQFHDCLPGSSIEMCYDDSDELYAKIFKTADKLRKDIYRVLGLSETNATSVQDVVALNTLPWHRKEVVDLGEKECGVACGAGNVLSVRAFKTSATKKAVSVAEESSGVFVLENEQLRIKVKDGVITSLYDHKVGREVIPEGGKANQFVIFDDKPLYWQAWDVEVYHLDSRKELSSGTTQISEEKSHRVSVVTKTKISDESSVKTTISLSAALEGQQSFVEVHSEVDWHETMKFLKVEFPVDVRNTEASYETQYGIVKRPTHYNTTWDMAKFEVCCHKFADLSESDYGVSILNDSKYGFATVGNPMRLSLLRSPKAPDAHADMGTHHIRWAILPHEGALGHTTVRRAYEFNNRLKVMSKPEEAMQSLLSQWPVRLTGSPSLVLDTVKRGEDDEDVSRGELPTRKGRSVILRVYDSLGGRSRGTIETSWDVKKVYKTNLLEDDLEEVAFSDGKFDIDLRAFEVVTYRLQL

SEQ ID NO: 16672 - protein, 177 aa, Arabidopsis thaliana
  misc_feature (84)..(84): Xaa can be any naturally occurring amino acid
  unsure (1)..(177): unsure at all Xaa locations
MCDLVARTGRLQQRYEDGSRLVAGCIPFRYVNSDKDGNSESGKVIQVLMISSSSGPGLLFPKGGWENDETVREAAAREAVEEAXFFFFFLGNYEFKSKSHQDEFSPEGLCKAAMYALYVKEELATWPEHETRTRKWLTIEEAVESCRHPWMKDALVEGFCKWHKEKMVKGEEITGEH

SEQ ID NO: 16673 - protein, 561 aa, Pantoea agglomerans
MTTLKITGMTCDSCAAHVKEALEKVPGVQSALVSYPKGTAQLAIEAGTSSDALTTAVAGLGYEATLADAPPTDNRAGLLDKMRGWIGAADKPSGNERPLQVVVIGSGGAAMAAALKAVEQGAQVTLIERGTIGGTCVNVGCVPSKIMIRVAHIAHLRRESPFDGGMPPTSPTILRERLLAQQQARVEELRHAKYEGILDGNSAITVLHGEARFKDDQSLIVSLNEGGERVVMFDRCLVATGASPAVPPIPGLKESPYWTSTEALASDTIPERLAVIGSSVVALELAQAFARLGSKVTALARNTLFFREDPAIGEAVTAAFRAEGIEVLEHTQASQVAHMDGEFVLTTTHGELRADKLLVATGRTPNTRSLALEAAGVAVNAQGAIVIDKGMRTSSPNIYAAGDCTDQPQFVYVAAAAGTRAAINMTGGDAALDLTAMPAVVFTDPQVATVGYSEAEAHHDGIETDSRLLTLDNVPRALANFDTRGFIKLVIEEGSGRLIGVQAVAPEAGELIQTAVLAIRNRMTVQELADQLFPYLTMVEGLKLAAQTFSKDVKQLSCCAG

SEQ ID NO: 16674 - protein, 338 aa, Pyrococcus horikoshii OT3
MELPILPTSVIGSYPKPRWLLRMYRLRDLGKIPEEDFKEAVKDASVSVLREHERAGVDIPWDGEMWRTEMTEHFTAKIGGFKFYGPVRVWGNAYFNKAAAVDKLEYKEPLVLEEFLWVKKNTTREVVKIPITGPYTIAEWSFNEYYPDKESFIMDLAKIINKELKMLENHGALYIQLDEPAMLNHPDEVPLAVEAINKAVKGIKIKVGLHVCYSNYYLLADYFDEIRVTQFALEFANRQFRDMDFLKKLSNKELGFGVVDVHNPRIESVEEIVKAIKKVFEYVEPELLYINPDCGMKLLDRNIAYNKLVNMVKATELVRKELEREGKKTTEFRTLKDI

SEQ ID NO: 16675 - protein, 255 aa, Triticum aestivum
NKFVQKSRLVPVRNSRDYNPSIFSLLSTAAAATTLVQQASAAPSPTPAMADPAEHREEEEEAAAAGEEEDTGAQIAPIVKLEEVAITTGEEDEDVLLDMKAKLYRFDKDGGQWKERGTGAVKLLKHKETAKVRLVMRQAKTLKICANHLVVATTKMQEHAGSDKSCVWHALDFADCELKEEMFAIRFGSVENCKKFKDLVDEIAEQQGKNEEKESEEVSSAAELVEKLTVAEVKKEEQTEKVETPAVDDKKDAEE

SEQ ID NO: 16676 - protein, 190 aa, Shigella sp. K-380
RPGKINLGIGVYKDETGKTPVLTSVKKAEQYLLENETTKNYLGIDGILEFGRCTQELLFGKGSALINDKRARTAQTPGGTGALRVAADFLAKNTSVKRVWVSNPSWPNHKSVFNSAGLEVREYAYYDAENHTLDFDALINSLNEAQAGDVVLFHGCCHNPTGIDPTLEQWQTLAQLSVEKGWLPLFDFAY

SEQ ID NO: 16677 - protein, 664 aa, Listeria monocytogenes str. 4b F2365
MFDNTDSLAVNTIRTLSMDAIQKANSGHPGLPMGAAPMAYALWSRVLNTNPKNSHWFNRDRFVLSAGHGSMLLYSLLHLSGFKLELEDLKNFRQWESKTPGHPEYRYTDGVDATTGPLGQGIAMAVGMAMAERHLEAKYNKDGFPVVDHYTYALCGDGDLMEGVASEAASYAGHQQLGRLVVLYDSNDISLDGDLDKSFSENVKQRFEAYGWEHLLVKDGNDTAEILAAIEKAKQNTSQPTMIEVKTVIGFGAPNAGTSKVHGAPLGDEGILEAKKAYGWNYEEKFFVPEEVTARFKETIGERGEKAETAWNELFASYKAEYPELAKQLEDSLNNKLPADWDEDLPVYDDSKALASRASSGEVINALAGKIPTIFGGSADLAGSNNTTIKTDGEFTKATPAERNIWFGVREFAMGAALNGMALHGGLQVYGGTFFVFSDYVRAAIRLSAIQHLPVTYVMTHDSIAVGEDGPTHEPIEQLASLRAMPGLSVIRPADGNEVVEAWKLAITSTSTPHVLVLTRQGLPTLPNSAKLTAEGVKKGAYVISPAKGDVPEAIILASGSEVNLAIEAQKELQAQGTDVSVVSVPSFDLFEQQSAEYKESVLPNAVRKRVAVEMGASFGWERYVGLDGKVIGIDKFGASAPGETVIKNYGFTVENVVNTVKSL

SEQ ID NO: 16678 - protein, 694 aa, Ustilago maydis 521
MDRSLCPLRQIRQACPYMGRVSMPQLRQMSTTVLHPGGPTRLISQAQQCPVMSQSLAIQAEQTSGAAANTSAPTFGASGSSFFANAARPTFAAVAAAASGCPFSNHMSGGAPQQVRSYVSRSEAARASVAQPDEIERLHAKEGISLADQANVDKCPHARKLAEVAAAAAAADSLPQHQRRKSIKNKQVRTPGSGLGVHPEPEAYNRPGFHYEKFYHNQLQAKHADKSYRYFNNINRLAGKAPKGHLSAETDEITVWCANDYQNMSRHPAVLEAMKDTLDKYGAGAGGTRNIAGHNRHVEIIEQTLAQLHRKDAALVFGSCYAANDATLTILGSKLPNCVILSDASNHASMIQGIKHSGAKKVIYKHNDMSDLEAKLKAIPVDVPKIIAFESVYSMCGTVGPVERTIELAEKYGAITFLDEVHAVGMYGPRGAGVAEHLDWDMQVAQGHKPGLLKNTLMDRIDIITGTLGKAYGNVGGYIAGSNRFVDLIRCFAPQFIFSTTLPPAVLTGADTAIKVLMESNDSRILQQVRTRETKDKLIAAGIPLQHNPSHIVPVLVGDASKAKAASDMLLEEYGCYVQPINFPTVARGLERLRVTPTPGHTSADVDHLVYALTQIWKELGLRTVDDLRAAPQGQDALADLFKASEEAARENPLWTDKLLGLDELKANVRAHGFATGESSVAAAPAPLAEGVAA

SEQ ID NO: 16679 - protein, 246 aa, Triticum aestivum
MARGREGEVRNLVLGKYELGRMLGQGSFAKVYYGRDLRDGQSVAIKVIDKARLRQTDGMVEQLRREISIMRMVRHPNVVGIREVLASRQRVFVVMEYARGGELFAKVARGRLTEDAARKYFQQLVAAVAFCHSRGVAHRDLKPENLLLDEEGRLKVTDFGLAALPEQLRHDGLLHTQCGTPAYVAPEVLRKRGYDGARADMWSCGVVLYVLLCGFLPFQHDNYVKMYQKIFKGEYQMPPWVSGEAR

SEQ ID NO: 16680 - protein, 180 aa, Shigella sp. K-319
RPGKINLGIGVYKDETGKTPVLTSVKKAEQYLLENETTKNYLGIDGILEFGRCTQELLFGKGSALINDKRARTAQTPGGTGALRVAADFLAKNTSVKRVWVSNPSWPNHKSVFNSAGLEVREYAYYDAENHALDFDALINSLNEAQAGDVVLFHGCCHNPTGIDPTLEQWQTLAQLSVEK

SEQ ID NO: 16681 - protein, 110 aa, Betula pendula
AFEDGDLKLFESRAITKYIAHQYADKGAELVCGDTKQKAMIGVAIEVEAHQFDPPASKLCWELALKPMFGMVTDKAVVEEHEAKLAIVLDIYEKRLAQSKYLTCDCFTLA

SEQ ID NO: 16682 - protein, 166 aa, Oryza sativa
  misc_feature (32)..(32): Xaa can be any naturally occurring amino acid
  misc_feature (100)..(100): Xaa can be any naturally occurring amino acid
  misc_feature (148)..(148): Xaa can be any naturally occurring amino acid
  unsure (1)..(166): unsure at all Xaa locations
TKSSPTHPVELNEVKLIDGYYIMDPAKASGYXVDENTICIVAIPRSTLNGEYEDVKLLNDLLTKKNAETGWDTPIHVNAGSGWFIAPMLYPELKWDFRLXLANSMIISGHKYGLVYAGIGWCIWTSKEDLSEELMFHMNYLGADQPTXTLNLWKGCSHVIAHDYQL

SEQ ID NO: 16683 - protein, 710 aa, Methanosarcina mazei Go1
MDKKMINEKSKEEQLEKFHEDPEREFLTTNQGVRVNNTDISLKAGERGPTLLEDFHFREKLTHFDHERIPERVVHARGSGAHGFFQVYEPMTEYTSAKFLQDPNKKTPVFVRFSTVVGFRGSADTVRDVRGFAVKFYTEDGNYDLVGNNMPVFFIQDAIKFPDLVHAIKPEQDNQIPQASAAHDTFWDFVSCHHENAHMIMWVLSDRALPRSYRMMEGFGVNTFRFVNAEGKGRFIKFHWKPMLGIHSLVWDETQKIAGKDPDFNRRDLWDAIEMGAYPEFELGVQILEEEDEFKFDFDILDPTKLWPEEDVPIKWIGKMTLDRNPDNFFAETEQVAFCPANVVPGIDFSNDPLLQGRLFSYLDTQLIRLGGPNFQEIPVNRALAPVANNQREGYNRMTINKGKTSYFPNTVGDGKPRPASAEEGGYVHYMEKVEGKIIRSRSEKFKDFFSQAKLFWNSMSQPEKEHIIEAFHFEIGKVKDKKIRQAVVDMFNNVDGDLAVEIAKGVGVSAPAQKGGSPVAKESPNLSQERSERNVKNTIKTRKIAIIVADGYDHKDLSQVMQALEAGGARADIISKFQGMLKSSDGQEIEVDKNYRTTESVLYDAVYIPGGKENVETLKKHGDAIHFVNEAFRHCKPLGATGEGVELFKAAHLPDIKLAGKSSADKVVSDKGVVTARNEGDRSSFNESFTIAIAQHRHWNREKKEQVPA

SEQ ID NO: 16684 - protein, 252 aa, Pseudomonas syringae
MALSKEAPGFDIDDEVLLMDSGIDSDLMSEDDESTPTARTKSKKATATKQHKYIDYTRALDATQLYLNEIGFSPLLSPAEEVHFARLSQSGDPAGRKRMIESNLRLVVKIARRYVNRGLSLLDLIEEGNLGLIRAVEKFDPERGFRFSTYATWWIRQTIERAIMNQTRTIRLPIHVVKELNVYLRAARELTQKLDHEPSPEEIANLLEKPVAEVKRMLGLNERVSSVDVSLGPDSDKTLLDTLTDDRPTDPC

SEQ ID NO: 16685 - protein, 158 aa, Staphylococcus aureus subsp. aureus MSSA476
MAVVYVAGGCLWGVEAFFATIPGIIHTEAGRANGRSSKLDGPYDGYAECVKLHFDDRMLTITDIMNYLFEIIDPYSVNQQGNDIGQKYRTGLYSCVDDHLIEARQFIERRKDRDQIAVEVLPLSNYIKSAEEHQQHLEKYPEDMHMCHISKDLLNKYK

SEQ ID NO: 16686 - protein, 219 aa, Methanosarcina mazei Go1
MKIEKKSEMKFPYSEKVLEHFRNPHNVGKIENPDGKGLEGSPACGDMVAVYIKVDPRTKVIEDIKFESYGCASNIATGSVITDLARGKTLDEAKKITWKQASEELDGLPPIKAHCSVLAVEGLRAAIRDYEEKHGLVTEKEPTTEEVVQQRLKHVMNPLTGLDVVRTNLILKTSVEAGVIRVVVDLPADHQFAPAIKEDIIEKLGALWDVERVDVVFTA

SEQ ID NO: 16687 - protein, 593 aa, Pseudomonas putida KT2440
MKWPPMKLRTRLFLSISTLVTVALLGLLLGLVSMLQMATVQQRLVRDTTHALEVGLKLRQNLGEQLMLILDEDTAPESLRLLQDNFQDLLNQGLEQGGERTGFSKASSNYQAFLQTYRDSATPARSMGVDQPLGAAFNQVRTDLIDSHKQALDLITRSEERTRDRALLVSGVLGLMGLVVLVLGFITAHNIARRFGQPIEALAKAADQLGKGNFDVTLPVTQAAELNQLTRRFGLMADALRKHQATNVDELLAGQQRLQAVLDSIDDGLLIIDRQGRLEHLNPVAQRQLGWNDSRLGSSLVEALQRPELEQQLRQVLRGGSLDRPPDDLNMEVDEESRLLTYSLTPVSHPQGPILGAVMVLHDVTEQRAFERVRSEFVLRASHELRTPVTGMHMAFGLLRERVKFPPEARENDLLETIGEEMQRLTQLINDLLNFSRYQSGLQKLELAPCAIDDLLDHAQSRFAEQAAHKQIELIKELDPPLPRIQADVAQLDRVLDNLLHNAIRHTANGGRIRLHARRHAERVIISVEDNGEGISYGQQARIFEPFVQVGRKKGGAGLGLALCKEIVQLHGGRMGVFSRPGQGTQFYMALPV

SEQ ID NO: 16688 - protein, 412 aa, Bordetella bronchiseptica RB50
MDKADISWLLVSTLLVLMMAVPGLALFYGGLVRSKNVLSVLLQVLCTFALGLLLWFAYGYSLAFTEGNAFFGGLSRTFFSGMFTPADGTYTLSGTLTELLFASFQATFAGITCALIVGSFAERARFSAVLVFTVIWFTFAYIPIAHMVWFASETAPGLLNARGALDFAGGTVVHINAGVAGLVGAYVVGRRIGYGREAMQPHNLPMTFIGAALLWVGWFGFNAGSSLAASDGATLAFFNTMIATAGAVLGWLFTEWAVKGKPSMLGAASGAVAGLVGITPAAGLVGPVGALVIGVTAGVVCVWGVNGLKRLLRADDALDVFGVHGVGGIVGALLTGVFNAKVLGGPGLDSAGAIAGQVWVQLEGVLLTIVWSAVVAWIAYKIADKLCGLRVPEDQEREGLDVTSHGESAYHS

SEQ ID NO: 16689 - protein, 264 aa, Streptomyces coelicolor A3(2)
MSSSDIFIGETIGTALLILLGGGVCAAVTLKASKARNAGWLAIAFGWGFAVMTAAYISGPLSGAHLNPAVTVGIAIKDGDWSNTPTYFAGQLLGAMIGAVLVWVAYYGQFQAHLTDREIVGGPGAQDTTAKSVEAQEKGAGPVLGVFSTGPEIRHTVQNLATEIIGTFVLLLAILTQGLNDEGNGLGILGALITGFVVVSIGLSLGGPTGYAINPVRDLGPRIVHALLPLPNKGGSDWSYAWIPVVGPLIGGAIAGGVYNVAFA

SEQ ID NO: 16690 - protein, 242 aa, Arabidopsis thaliana
MDLSSKPQQQLLNSLPIAGELTVTGEMGVCYKECLKNHAANLGGHALDGCGEFMPSPTATSTDPSSLRCAACGCHRNFHRRDPSENLNFLTAPPISSPSGTESPPSRHVSSPVPCSYYTSAPPHHVILSLSSGFPGPSDQDPTVVRSENSSRGAMRKRTRTKFTPEQKIKMRAFAEKAGWKINGCDEKSVREFCNEVGIERGVLKVWMHNNKYSLLNGKIREIEHGLCLNTHSNDGDGSSSS

SEQ ID NO: 16691 - protein, 133 aa, Betula pendula
DHECDPEEQGSCDSGCSGGLMNSAFEYTLKAGGLMREEDYPYTGTDRSTCKFDKSKIAASVSNFSVISLDEDQIAANLVKNGPLAVAINAVFMQTHVGGVSCPYICSRRLDHGVLLVGFGSAGYSPVRMKEKP

SEQ ID NO: 16692 - protein, 223 aa, Cryptococcus neoformans var. neoformans B-3501A
MFANSLRQGLRTASRSSARAFSTIPARAPRTNVVGALALGTAVAGYALYETTRSPVMLEGARTIAGEKGTVTERSFVMIKPDGVSRQLVGKIVSRFEERGYKLVAIKSLTPSDALAKEHYADLSARPFYPSLVKYITSGTPVVAMVWEGKDVIRQGRRIVGATNPLDADAGSVRGQYAVSVGRNLIHASDAFESATKEIGLWFAPEELSEYEPIAWPWVMADN

SEQ ID NO: 16693 - protein, 133 aa, Betula pendula
DHECDPEEYGACDSGCSGGLMTTAFEYTLKAGGLEREKDYPYTGTDRGSCKFDKSKIAASVSNFSVVSIDEDQIAANLVKNGPLAIGINAAFMQTYMKGVSCPYICGRRLDHGVLLVGYGSAGFSPIRFKEKP

SEQ ID NO: 16694 - protein, 250 aa, Saccharomyces cerevisiae
MPLTTKPLSLKINAALFDVDGTIIISQPAIAAFWRDFGKDKPYFDAEHVIHISHGWRTYDAIAKFAPDFADEEYVNKLEGEIPEKYGEHSIEVPGAVKLCNALNALPKEKWAVATSGTRDMAKKWFDILKIKRPEYFITANDVKQGKPHPEPYLKGRNGLGFPINEQDPSKSKVVVFEDAPAGIAAGKAAGCKIVGIATTFDLDFLKEKGCDIIVKNHESIRVGEYNAETDEVELIFDDYLYAKDDLLKW

SEQ ID NO: 16695 - protein, 489 aa, Glycine max
FGLGLISLLTGHMASDLEWYSHRRSLYSTMDGSYRAPIDVWKSQYSKYYYGCAERGRGYAPAVPERMSNGYLLIGTSGGLNQQRTGITDAVVVARILNATLVVPELDHHSYWKDDSDFIHIFDVDWFISYLAKDVTIVKRVPDKFMRSMEKPPYTMRVPRKSEPDYYLDQVLPILLRRQVVQLTKFDYRLANNLDDELQKLRCRVNFHALRFTKPIQELGQRIVMRMQKMAPRFIAVHLRFEPDMLAFSGCYFGGGEKERRELGEIRKRWTTLPDLSPDGERKRGKCPLSPHEVGLMLRALGFSNDTYLYVASGEVYGGEETMQPLRDLFPNIYTKEMLAEEELKPFLPFSSRLAAIDYIVCDESDVFVTNNNGNMAKILAGRRRYMGHKRTIRPNAKKLSTLLAGRHQMDWDTFAKKVKSCQRGFMGEPDEMRPGRGEFHEFPSSCVCRRPYVDEELSKEVYRSPKLVAINLTAKAYSSSNGIRRGRT

SEQ ID NO: 16696 - protein, 339 aa, Cytophaga hutchinsonii
MAKVKSKLEYIWLDGYKPTQSLRSKTKIEENFSGKLEDLSNWSFDGSSTEQAKGGSSDCLLKPVFVCPDPQRKNGYLVMCEVLNADGTPHPTNGRAQIEDDDNDFWFGFEQEYFLYDLSTNMPLGFPAGGYPKPQGPYYCSVGAQNAYGREIIEEHLDVCLDAGLNVEGINAEVAAGQWEFQIFAKGAKRAGDEIWVARYLLERIGEKYGVYVNYHCKPLGDLDWNGSGMHANFSNTLLRTAGSKEVFDKVCEAFRPVVKEHIEVYGAHNELRLTGKHETASIHDFSYGVSDRGASIRIPVLVPAKGWSGYLEDRRPNSAADPYKVAARIIKTVKPVQR

SEQ ID NO: 16697 - protein, 383 aa, Lactobacillus acidophilus NCFM
MTVLSEKELIQIRRHLHEIPELALQEKETHDYLLKVIKNLKQDHLTIVVPKTLPTAILGLVKGINPKKTIGYRTDIDALPVQEKTGLPFTSKHSGIMHACGHDIHMTVALGLLSYFSENQPKDNLLFFFQPAEESESGGKQAYEKGLFQGKFKPDEFYGLHDNPELPAGSIGCRMGTLFAGTTEINIDVIGKSGHAAFPQNANDTVVAAANLIMQIQTIISRSIDPIQSGVITLGKVNAGVIRNVIAGHTRIEGTIRGLTQKMILQIDRRLQDVCDGIAHSYNVEVNLELNQGGYWPVENDPKITKNFISYMKKNPKVNFIETEPKMTGEDFGFLLAKFPGTMFWLGVGDPSSQLHSSTLNPDEKSIQSGIDAIKGFLIDRMG

SEQ ID NO: 16698 - protein, 491 aa, Listeria monocytogenes str. 1/2a F6854
MVFLSIKETALPKVQTKLFINGKWTDGDNKETKDIVNPANGDVIAKIAQAGPSETKKAIKAAKDAFPDWAKMELADRVKLLHKIADLMEEKADTLAKIMTLEQGKPLKESKGEVLTGVENFRFAAEEARRLYGETIPAPNNHAFIVKKQPIGVVAAITPWNFPGGMVTRKLAPALATGNTIVLKPSGDTPLSALAIFEIFEEAGLPKGVANIVMGSSKEIGETLTDSDDVRKLTFTGSTKVGQTLFKQSADTLKKISLELGGHAPFIVFDDANLDAAVNDLVAAKFRNNGQVCVSPNRIFVAKEIKEKFTKALVAKVEQLKVGNGLDNVNVGPLIREDAIDKIDKQLKNATDKGAKVLTGGGRLTGSDYDNGNFYKPTVLDNVTREMDIFYEETFGPVIPLITFETEDEAIEMANDSEFGLASYFYTKDLARVEKVGAALEYGMVGANEIAISNPETPFGGVKHSGFGRENGHYGMEEYIQVKFINLKYRD

SEQ ID NO: 16699 - protein, 190 aa, Shigella sp. AR-21793
RPGKINLGIGVYKDETGKTPVLTSVKKAEQYLLENETTKNYLGIDGIPEFGRCTQELLFGKGSALINDKRARTAQTPGGTGALRVAADFLAKNTSVKRVWVSNPSWPNHKSVFNSAGLEVREYAYYDAENHTLDFDALINSLNEAQAGDVVLFHGCCHNPTGIDPTLEQWQTLAQLSVEKGWLPLFDFAY

SEQ ID NO: 16700 - protein, 423 aa, Ehrlichia ruminantium str. Gardel
MAGKRVVITGLGLVTPLGNDIKTVWDLLCKGTSGIKKINRFDASDLDCKIGGQIIMKSDSEIHTFDPANWIEEKELKKMDIFIHFGIAAAIQAVNDSNLLAYSNLDYNRVGVIVGSGIGGLAFIEKTSICLQDRGPKRISPFFIPASLINLLPGHISIKYGFAGVNDGGVTACATSAQTIGNAARIIKSGEADVIIAGGAESAICRMGVAGFAALKALSTKFNDTPELASRPWDKQRDGFVMGEGSGIIVLEDYEHAKKRNAKIYAELIGYGMTADAYHITAPHPEGKGGKKSMELALSSAQLSPDSINYINAHGTSTPIGDSTEIHAIKEVFKDSTYKIPISSTKSSIGHLLGAAGSVEAIFCILAINTGIVPPTLNLYDSSEDPKLNLVPLTAQEHTINYALSNSFGFGGTNVSLVFSKLY

SEQ ID NO: 16701 - protein, 364 aa, Prochlorococcus marinus str. NATL2A
MNMNEVMSHNQDKTGQNPIQHREHADRLSNLGNTKPAQINREIGLNLFKDMTLGRRFEDKCAEMYYRGKMFGFVHLYNGQEAISTGVIGAMKRKHDWFCSTYRDHVHALSAGVPAKEVMSELFGKETGCSKGRGGSMHLFSKEHHLLGGYAFIGEGIPVALGAAFSSKYKREALKENSDSVTAAFFGDGTCNIGQFYECLNMAQLWKLPIIFVVENNKWAIGMAHDRATSETEIWRKASAFGMPGEEIDGMDVLAVRGAAERALERARAGEGPTLIECLTYRFRGHSLADPDELRSEREKEFWAKRDPIKKLKNDLTSSGLVFDEELKNIEKEIDLEVNDAVEFALNAPEPDPSELTKYIWAEN

SEQ ID NO: 16702 - protein, 885 aa, Debaryomyces hansenii CBS767
MSGPIGSHQPNGNGPVLKKKTVKDYQFGTRIGEGSYSTVFSALDVHSNKTYAIKVLSKRHVVKEDKIKYVNIEKTTLHRLGQQHPGIVQLYYTFQDESSLFFVLDFAEYGELLSIIRKFGSLSESVLKFYMSQILDAVSFIHLKGVIHRDLKPENILVGHDFNLKITDFGAAKLLGNTSDESGEKIDYKGINQESNNGHHDHDRRGSFVGTAEYVSPELLKHNLCGIESDVWALGCILYQFFHGNPPFKGSTEYLTFEKIINVEYKYRPNAVPPDVVTIIDQLLVAEPLQRLTIPQIMASRWFSDIHWADQTYIWGRKVPRIEPYNSENGTSSSLPTPSASPYIPAMKTGSNRNMNKSSSHQQLHSQIQQLDLNLIPSVGSKTYQPATKIKKNFMPPTSASAEVPLTPPLTNNYKSPASGQFSQRPMQKQRQNSAPVVPQMNNGMNNIARLNMANTPRTPEAEHGFPKPNPSPDANKGQRANLRSNTAFAGIASSQQARNFHNRQYSTGSTQFYNKSNSQPGPSAQQGQQFAQAPNQQQQQQQQQTTPQVIQPSYAAAAAAANVSQRNNTSPTIPQMNRNSPVERNSFQRPSPPVSRPRSPQQDSTKFVKKTSSTREPPSKMNGNSSTTNEKPSETYTDQSIKFREIHGLLEPTEKILKMDVILRLTLSNKEVNRDTSQLLDDSMIDDLITRFNNTLERTSVPVITVITNQARVFFIDGSLNVMMVDLKANQGGDYLMYDYEFESISVEDEDGSIEEGQEVYGYLILELIREKGDLIFLKRVSDMNSPLIKESVKVLDKDGHEIKLGKNYGWIDCLLMAKEMVDTNKTSNRNGKTKNAPKQTQKVPGKKPKQKVPSSSSTRSETSSSVPKNASKLAYAAAAAAHK

SEQ ID NO: 16703 - protein, 313 aa, Prochlorococcus marinus str. NATL2A
MVSTAPKPAESQKRRSSDPISWYLSSIGRVPLLTPAEEIELGNQVQTLMSLTEDGQIKEQSKEFTSHQRRLIRIGRRAKERMMKANLRLVVSVAKKYQGKGLELLDLVQEGSLGLERAVEKFDPTRGYKFSTYAFWWIRQSMTRAIACQSRTIRLPVHLSERLATIRKVSLDLAHKLGAMPSRIEIAEAMEIELEELDSILRQALTTSSLDAPVNGDEGRSFLGDLIADGSGEEPLDKVEQKIHQEQLGRWLSHLSEQEQHVIRLRFGLEGNERHTLAEIGRLLQVSRERVRQVELKALRKLRNLTRKLPSGI

SEQ ID NO: 16704 - protein, 487 aa, Ustilago maydis
MRPLFYAPALTLTPLFVAAVFYRPSVPAQQPLMLVEFYAPWCGHCKALAPEYEKASTELLADKIKLAKVDCTEENELCAEHGVEGFPTLKVFRTGSSSEYNGNRKADGIVSYMKKQALPALSELTADSYADFKSKDRVVAIAYLDSSDKAHLDAVNAVANNLRDNYLFGVVHDAAVAEKAGVTAPAFVVYRQFDEPEVKFDGKSFNEEAITNFIKAESIPLIDELNAENFMSYAESGLPLAYLFADPESKDLKSTVESLKSLARANKGKLNFVWIDGVKYSAHAKSLNIQGEDWPAFAVQDIEQNLKFPLEDLSGDLVAKVTDFVSQYTSGSLKPSVKSEPIPKDQDGPVHVLVADEFDAVIGDDSKDKLVEFYAPWCGHCKKLAPTYDTLGEKYKAHKDKVLIAKMDATANDIPPSAGFQVQSFPTIKFQAAGSKDWIEFTGERSLEGFVDFIALNGKHKVSVDLDPINVTEQAAPAKEAPHHEEL

SEQ ID NO: 16705 - protein, 429 aa, Salmonella enterica subsp. enterica serovar Typhi Ty2
MDTLQQSPPAEPEGGLRRNLKKRHLLMMSLGGTIGTGLFIGIAEPLSSVGPAGTLLAYLFAGTIMLATMMCLGELSCAFPHSGSFQHYALMFMPSPCWSYTIGWLYWFSWVFSLAADLTAAGFIAHQFFPAVPVYMFCLAILLILTAINLTSAKSFGECEYWLSAIKVFAIVLFICAGGVMIYSLMGHSDWHPTLKTDGMWFPHGWEQIVVCMTIVIYSFQGVELVGNAAGETESPHIILPKVILGIGLRIILFYGLAIAVLALVYPHELTPNGQSPFVWVFSHAGIPGADTLMTLVIFSAAVSAANSAIYASSRMLWSMAGDRFAPACFGKTNGGGVPVYAILITALLALVSLLTRYIPAQQFYLYLIASTGQVGCLAWITIGWCQYRFRQSVRNGTYASDLLRYRSPLFPWTARFVIITNFAIMVGT

SEQ ID NO: 16706 - protein, 480 aa, Pyrococcus horikoshii OT3
MCLIAGGFKLYTDEIIRIIELGKHRGPDSFGVWSEREVIKSSDFSALEEVKGGDKVLIQCRLAMTGSKEYTQPFYNEIALVHNGEIYNHEKLRAYLVERGISFESDVDSEVILRLLEYLLFDRNLSPWNAIKKLMWMLRGDYAVAFHYNGKFYLFRDPLGIRPLYYSSQGHFGSEKKVLWGLGEEATPVMPGEAVEISKFGINRVRLYDVTAIKSFGSEYFDGLRNLLIDSVKIRSSKKIGILFSGGLDSTLIAFIASRYSNVTLYVSGTEDSKDVEWARKVSQELGLKLKEYIFSKEEVEKELKRIMFAIEEPNPMNLSIAIPLYFSTKLAREDGVKILLSGQGADELFGGYAKYLENPNLMISDVANLGERNLARDDKVSMINGVEVRYPYLDLPFAVLALNTPLQHKIKDGKRKIILREIAKSLGLPEWIAEREKKAAQYGSNAQKILEKIAKSRGIRLKELASLLFSEVFRGIHNR

SEQ ID NO: 16707 - protein, 495 aa, Zea mays; identical to SEQ ID NO: 1043

SEQ ID NO: 16708 - protein, 220 aa, Arabidopsis thaliana
MASSAPPVLPISNPQTVPSAAPSSVESQPPIATPAFRNFINQITETVKNGLSKRRPWAELADRSALSKPESISDAAVRIRKNYSYFKVNYLTVATAIVGFSLVTHPFSLVFLLCLLASWLFLYLFRPTDQPIVLFGRTFSDRETLGCLILFSIFVIFLTDVGSVLVSAMMIGVALICAHGAFRAPEDLFLDEQEPAATGFLSFLGGAASSAAPAVIAARV

SEQ ID NO: 16709 - protein, 505 aa, Helicobacter pylori
MVNKDVKQTTAFGAPVWDDNNVITAGPRGPVLLQSTWFLEKLAAFDRERIPERVVHAKGSGAYGTFTVTKDITKYTKAKIFSKVGKKTECFFRFSTVAGERGSADAVRDPRGFAMKYYTEEGNWDLVGNNTPVFFIRDAIKFPDFIHTQKRDPQTNLPNHDMVWDFWSNVPESLYQVTWVMSDRGIPKSFRHMDGFGSHTFSLINAKGERFWVKFHFHTMQGVKHLTNEEAAEIRKHDPDSNQRDLFDAIARGDYPKWKLSIQVMPEEDAKKYRFHPFDVTKIWYTQDYPLMEVGIVELNKNPENYFAEVEQAAFTPANVVPGIGYSPDRMLQGRLFSYGDTHRYRLGVNYPQIPVNKPRCPFHSSSRDGYMQNGYYGSLQNYTPSSLPGYKEDKSARDPKFNLAHIEKEFEVWNWDYRADDSDYYTQPGDYYRSLPADEKERLHDTIGESLAHVTHKEIVDKQLEHFKKADPKYAEGVKKALEKHQKMMKDMHGKDMHHTKKKK

SEQ ID NO: 16710 - protein, 170 aa, Glycine max
MGASQSISENSIHEFTVKDARGKDVNLNAYRGKVLLVINVASKCGFADANYSQLTQIYSTYKSRGLEILAFPCNQFLKKEPGTSQEAQEFACTRYKAEYPIFGKIRVNGSDTAPVFKFLKTQKSGVMGSRIKWNFTKFLVDEEGRVIQRYSPTTKPLAIESDIKKALQVA

SEQ ID NO: 16711 - protein, 811 aa, Neurospora crassa
MPSATTRRLYEDQIPSFMSVYDLGPESMDQQSAITVVDPQSVMHLESEKLPGDTQPAQLRSNAMHADAAHNHHNSTSSRATESAESSPTTTVSCTDSSDLSDPSPSSSPDSPVNLIPLSTLAPMQPFTSDLSRMASLSVSDPNLAQRPMTSPAPRRPKNMKGLSIQPPFNSLASSLVSEPSSPSFIKPTIPGMKRKPSLLSLKTNTSELMNRTTLEVPPSPSVPPILQRRALKHSASTPHMLSGLKSATFGPAGGMTIPTVLERNESGLSEFFRPSRPLAPSGLSSTILEEEAPIKAQVANKAIYEVDPYHEVENNEDQKSPGYPDGPVCIYNDNVYLYLEPTAEEAARFDVVINVAREVSNPFKVGMGSKRDSNSQGRPDIDSPVPDTAATTCSFATAFEFIPESDTPTTPKAQSLKEPEYIHIPWDHNTDIGNDLMTLCEMIDKRTKEGKKVLVHCQQGASRSASLIIAYGMYQNPDLTVNDAYHAAQAKSRWISPNMRLMYCLQDFQKEVSKRKLMTSSFKPRLGRSPSRHRMTLSVDNIDLPVKQEPLTAPLPREDVASKHATPNLSPTRGRGHSTPKRGEPISPGPSSAPSSFSWAIKEDERDPGRFGRFNVNLGIKSPEPDRGRPSTPSPPLKSKPSRGLFAPTLAEPPKSPGFGPPLEAAFSKPPPSPGFGAHRFGSQAGFGFVPLTLGAAPTLAAPPKRKVSKDATSPERHMAVVRDFEDAALMSPRAETMTANPLHEPFAGIPGMQFVEVPPTPGEGLFSPREALFPRDTCYPFGRPKQVADPRSPPTKGETPIVRSIDELL

SEQ ID NO: 16712 - protein, 1447 aa, Candida glabrata CBS138
MTFLKKIAGSNGHSKSGSVSSIRYSANSQASPSASVSSSRSFKTHVRNSSNSTDYSGSTYVFGTGNTASSGSNHGTPTSSKTFSKMGSSYNRRSIDSPRSTSNRNSEYTLDNSSLNSHPQANKGGDNVSRPTSLEKNADTDSSTYSRKSSGSTSSLSFDNLILSWDPTNPDEWTLSRVIAWFKFHDFPDSWIAVFKRHQLCGQRFLRLLAYDNFAIYEKHLPISKNASFDKFQALLKDTMKKNVSSSHSRQRSGNSVAAMHIEPNKGVNLRHKSSRSQDDIVGSRSASESGINNEQLNLGKPPEKGVVKSHKKTKSTGSLYRRSFISLMGSSSHSSAENTQMEKNNPNIKIHIPSRPQSVVESEPSTAKTLSPLSPPYSALFNKLDQKNRSDPTLFEISDEKYSRLKNDDYNDDIAAQSSSTNFNGKQQHSSSATYSKSKKNEKGGFNVRNSAVMPEDKSTFWEKLKRKSQTISPSTQNHTQLNSANLSKNRVSLQQIQGGFDMTDQVKPDNIVTPKIHQAHKSSSIDTKSQNFENVFDKFLLDKKYYPAKIKSSTNEEDFVLITKDNVSFIPLLISELPNECSKLKEYFMRKLRIVSGECSVHMTDFGCDIGASLNDTLLDTIRNSLFMNTSRKLFIRDTGTHKYSPGKPIINSSQREMLRKKESIKSINSSILASNDEISTITSSSDIASFDDRSSAPGRQYPQTPSYFYDASNVNDDVNYWNFKENQSSLVPGKVPDVKPEAQFTLKIPDKIKHKGLEDDLQRNSFHVLRKDEGKEIDFNNRRRSPYTNPELAPKREAPKAPITGSPMRLQKSRSLSKSVSIVTNNDRSRRDELSPSRKSYKNSETNSPSSEKIVSSYTPGSSHVLVPQPYKGVGDISRKGKLEDDHMFSMTEVLRSRVNRSTSSVSNNSVIYSTSPILKRGSSKRIVSSASAADVFEENTINFNDVPELSDSDEDSASSEDIIWGSETKISETEVVPENNNFNKTDSEDDDKIYSMNNKLTPVRKMTLRPTAEIVYQNLERFFPRAHLDKPVVEELHNSKSPVSKTSDKARINSILEQHSNISEKGVKSQNNDNVIKEKKSNTSLPRRTRTIRAIAHEAGEARRNSMKVKRSNTKMWGTKIVEITDKNTIEINKSKNARGEYKEFAWMKGEMIGKGSFGAVYLSLNITTGEMMAVKQVEVPKYGTQNELVKDMVEALKSEVATLKDLDHLNIVQYLGSEIRGNIYSLFLEYVAGGSVGSLIRLYGRFDEKLIRHLNTQVLSGLKYLHSKGILHRDMKADNLLLDEDGICKISDFGISKKSKNIYSNSDMTMRGTVFWMAPEMVDTKQGYSAKVDIWSLGCVVLEMFAGKRPWSNLEVVAAMFQIGKSKSAPPIPDDTIQLISSKGKDFLSKCFEIDPEKRPTADDLLEHSFSKVDPAFNFSRTRLYEFIKTNDKLNSSVLRNT

SEQ ID NO: 16713 - protein, 425 aa, Oryza sativa
MAAASSFTAAAKFLAPVSARSAGDYKPPLPLPASASLRPGRKPAPRLRTALAVSSDVLPGNKAAPAAAAHSAVTREEALELYEDMVLGRIFEDMCAQMYYRGKMFGFVHLYNGQEAVSTGFIKLLNQADCVVSTYRDHVHALSKGVPARSVMAELFGKATGCCRGQGGSMHMFSEPHNLLGGFAFIGEGIPVATGAAFAAKYRHEVLKQSSPDGLDVTLAFFGDGTCNNGQFFECLNMAQLWKLPIVFVVENNLWAIGMSHLRATSDPEIYKKGPAFGMPGVHVDGMDVLKVREVAKEAIERARRGEGPTLVECETYRFRGHSLADPDELRRPDEKSHYAARDPITALKKYIIEQNLATESELKSIEKKIDDVVEEAVEFADASPLPPRSQLLENVFSDPKGFGIGPDGKYRCEDPLFTQGTAQV

SEQ ID NO: 16714 - protein, 425 aa, Magnetospirillum magnetotacticum MS-1
MTDIPEKRPHGSHPSVEAGAAGHEFDSGSDIFFAAVAMTRMPMVVVDPHRDDCPIVFVNQAFLEMTGYTREEVIGRNCRLLQGPDTDPAARMAVREAIAQRRDIAIEILNYRKDGASFWNALFVSPVYNAAGDLVYLFGSQLDITRHRVAEDSLHQAQKMEALGQLTGGIAHDFNNLLQVILGYADSLATNLERPDADKGRMSRAVGNIREAAERAATLTQQLLSFARKQRLDGRTVNLNELVSEMKELAGRTLGETVTIETDLAADLRLCRIDPTQAEVALLNVLINARDAMPEGGRVTITTRNEESGRSDGSNRLVSVSVTDTGAGIPSDVLARVMDPFFTTKEEGKGTGLGLSMVYGFVKQSGGSVQIESVVGEGTTVRLSFPATDGAEGLASHEAAPAEERPGTETILIVDDRADVAELAR

SEQ ID NO: 16715 - protein, 162 aa, Zea mays
  misc_feature (66)..(66): Xaa can be any naturally occurring amino acid
  misc_feature (97)..(97): Xaa can be any naturally occurring amino acid
  unsure (1)..(162): unsure at all Xaa locations
MDSSLASAAAIADQRQKIEQYRHILASVLSSSPPDISQAKRFLDHMVSDEVPLVVSRQLLQTFAGXLQLESDAQKEVAHYALTQIQPRVVSYEEHVXVIKEELAELYESEQQWCKGSPNALRGIDFGIQKPEWLGTPPNIPGGLKWNGSLLTVIYPWRAEVF

SEQ ID NO: 16716 - protein, 386 aa, Zea mays
  misc_feature (241)..(241): Xaa can be any naturally occurring amino acid
  unsure (1)..(386): unsure at all Xaa locations
MAMPFASLSPAADHRPSSLLPYCRAAPLSAVGEDAAAQAQQQQQQHAMSGRWAARPPALFTAAQYEELEHQALIYKYLVAGVPVPPDLLLPLRRGFVYHQPALGYGPYFGKKVDPEPGRCRRTDGKKWRCSKEAAPDSKYCERHMHRGRNRSRKPVEAQLVPPPHAQQQQQHHQQAPAPTAGFQSHPMYPSILAGNGGGGGGVGGGAGGGGTFGLGPTSQLHMDSAAAYATACVVEGANTXRYSAYGVKSLSDEHSQLLPGGGGGMDASMDNSWRLLPSQTAATFQATSYPLFGALSGLDESTIASLPKTQREPLSFFGSDFVTPKQENQTLRPFFDEWPKSRDSWPELNEDNSLGSSATQLSISIPMAPSDFNTSSRSPNGIPSR

SEQ ID NO: 16717 - protein, 145 aa, Ehrlichia canis str. Jake
MEIILLERTLSILKPDVVKRNITGQVNSYIENSGLKIVTQKMCLLTRFQAEEFYAIHKSQHFFIPLVDFMVSGPIIVQVLEGENAISLYRELMGATDPKKANPGTIRGDFAENIDANCVHGSDSLDNAVREIRFFFSDYELLSLK

SEQ ID NO: 16718 - protein, 390 aa, Pseudomonas aeruginosa UCBPP-PA14
MAPRDPILGLNEAFNADTRPGKINLGVGVYYNEEGRIPLLRAVQAAEKARIEAHAPRGYLPIEGIAAYDQGVQKLLFGNESELLAAGRVVTTQAVGGTGALKLGADFLKRLLPDATVAISDPSWENHRALFEAAGFPVQNYRYYDAASNGVNRAGLLEDLNALPARSIVVLHACCHNPTGVDLELDDWKQVLDVLKAKGHVPFLDIAYQGFGNGIEEDAAAVRLFAQSGLSFFVSSSFSKSFSLYGERVGALSIVTESRDESARVLSQVKRVIRTNYSNPPTHGASVVSSVLNSSELRALWEQELGEMRDRIRDMRLAMVEQLAAHGAKRDFSFVGRQRGMFSYSGLTADQVERLKTEFGIYAVSTGRICVAALNKSNLETITKAIVQVL

SEQ ID NO: 16719 - protein, 260 aa, uncultured bacterium 582
MTVKTDKPSQLRVLVTAGASGIGRVIAESFAQTGARLHICDIADAALGEAKKTHPTWGVSRCDVSQSDQVARLFEEVGNNLGGLDVLINNAGIAGPTGGVEEITADDWRRTVDINLNGQFYCANRAVPLLKQSPNASIICISSVAGRLGYAYRTPYAATKWAIIGLTKSLAIELGPSGIRVNALLPGIVAGPRIEKVISDRAQTMGVSYGDMEQEYIDKVSLRRMVTAQDVANQAVFLCSPGGVNISGQSISICGNVEVL

SEQ ID NO: 16720 - protein, 347 aa, Symbiodinium sp. JCUCS-1
MATKIGINGFGRIGRMVFQAICDQNLLGTKLDVVGVVDMSTDAEYFAYQMKYDTVHGRFKHDVKIGEKDELIVNGNKIKCIQASREGPKALPWKEMGVEYVIESTGLFVEAEKAAGHIEAGAKKVIISAPGKGDLKTLVCGVNHTEYDKANHNVVSNASCTTNCLAPIVHVLLKEGVGIEKGLMTTIHSYTATQKTVDGVSAKDWRGGRAASCNIIPSATGAAKAVGEVLPTTKGKLTGMAFRVPTPDVSVVDLTFTAEKDTSIEEIDALFKKASETYMKGVLSFTDEELVSADFIHNVNSSIYDSKATLQNNLKGEKRFFKIVSWYDNEWGYSNRVVDLLMHMISA

SEQ ID NO: 16721 - protein, 218 aa, Streptomyces hygroscopicus
MAQQVDVTEKILGYVRELSLRDDEILAGLRAETAGLPAAQAMQVMPEEGQLLGLLVRLVGARSVLEIGTFTGYSTLCMARALPTDGTLVTCDITAKWPGLGRPFWERAEVADRIDVRIGDAKETLAGLRREGREFDLVFIDADKTGYAHYYEESLAMLRRGGLIVLDNTLFFGRVTDPAAQDADTAALREVNKLLREDGRVEISMLTVGDGITLAVKR

SEQ ID NO: 16722 - protein, 460 aa, Pediococcus pentosaceus ATCC 25745
MNANKKRISPYVILISCAAALGGLLFGYDTAVISGAVGFLQIKFTLSSAQVGWVTSCILIGCALGVSIAGILSDLFGRKKILALSAVIFALSSLGAAFAGSYMILVIWRMLAGIGIGLTSLITPLYIAEMAPSNVRGKLVSVNQLAITIGIFIVYFVNAAIASNATQLWNVSTGWRWMMGVGVIPSLLFLIALIPAGESPRWLSQHGKSEAAYKVLQKVEISDEAAEKSLEEIQMSEEVVDDTKFRDLFNKTWLPVLIIGVLLALFQQFSGSNAIMYYAPEIFKGAGFGQSGAFMATVSIGVINMVITIVALGLVDKIGRKKLLGWGSFAMSCCLLVVSICFFVHAATSITLTFVLLAIAAYAVSLAPVTWILISEIFPLKIRGRAMSICTAVLWLSDFTLSYTFPILTQNIGEGWTFMLYVVVTALSAIFVWKLVPETRGKSLEEIEVYWHAKSKTHVK

SEQ ID NO: 16723 - protein, 618 aa, Debaryomyces hansenii CBS767
MKLCELLFISFIVSLVNAKTHTWYFKTSWVDANPDGVKERKVIGFNDTWPLPTLRVNKGDRVNLYLTNGFDTANTSLHFHGLFQNGSSQMDGPEMVTQCPIPAGETMLYNFTVADQVGTFWYHSHTKGQLGDGMRAPFIIEDDDYPFDFDEEVVLSLSDWYHEKSDDLIEDFMSRYNPTGAEPIPANLLFNETRNNSWVVEPNKTYFVRIVNIGGFVTQYLWMEDHEFEVVEIDGIYVEKNKTDMLYITVAQRYGVLIKTKNSTDKNYAMMTRFDDTMLDIIPDELELNSTNYMVYNEDKDMPKEYKVDSIDDFLDDFYLKPLSKEKLYDDADQTITIDVTMDNLGDGVNYAFFNNLTYIKPKLPPLMTVLSSGEHATNELVYGSNTHTYVLQDNDVIDIVLNNGDTGRHPFHLHGHVFQLIARGSAVDDDDDPVTYGDEEDDVEFPEYPMMRDTVYVEPQSYMVLRFKADNPGVWFFHCHIDWHLIQGLAIVLVEAPLAIQADPRQKLQDDVKKHCEMLDMPYEGNAAGNSKDYLDLTGQNVQVAYLPSGFTARGIVALVFSCIAGFLGVVMIAVYGMADIPDVEERVARDLDVDIDEYEVNTSSTEQASIVEERTH

SEQ ID NO: 16724 - protein, 141 aa, Pediococcus pentosaceus ATCC 25745
MEQERILILIKPDGVSLGHIGEVITRLELKGYSIDALKVTQATEAQLQQHYEKLVNKPFFKEIETYMLEGKIVAMIASGTHVIDVFHRMAGATDPSEAAFGTIRGDLGREWPDGLLRNVVHSSDSIENAEKEIKIWFPELN

SEQ ID NO: 16725 - protein, 347 aa, Triticum aestivum
  misc_feature (217)..(217): Xaa can be any naturally occurring amino acid
  misc_feature (232)..(232): Xaa can be any naturally occurring amino acid
  misc_feature (255)..(255): Xaa can be any naturally occurring amino acid
  unsure (1)..(347): unsure at all Xaa locations
LNKFVQKSRLVPLRNSRDIVDPRVRYVQGKEVNGAGINASFAVHQDVDGRATDVALGWSVALGSPFTFATTLEQEYKSDIFGERGILLGAVHGIVEALFRRYTEQGMDEELAYKSTVEGITGIISKTISKKGMLEVYNSLSEEGKKEFNKAYSASFYPCMDILYECYEDVASGSEIRSVVLAGRRFYDKEGLPAFPMGKIDQTRMWKVGEKVRSTRXPDGDLGPLHPFTAGXFIVALMMAQIEVLRKKGHSYSEXIINQSLIQSVDSLNPFMHARGVAFMVDNCSTTAQQAFVTVDKDEPINQDLISNFMSDPVHGAIEVCAELRPTVDISVTADADFVRPELRQSS

SEQ ID NO: 16726 - protein, 314 aa, Oryza sativa (japonica cultivar-group)
MAMEKSRVLVVGGTGFVGRRVVAASLAAGHPTYVLLRPEIGLDIDKLQMLLAFKARGARLLEASLDDHDGLVAAVRQADVVVSAMSGVHFRSHNLMLQLKLVEAIKDAGNVKRFLPSEFGMDPSRMGDALEPGRVSFDEKMVIRRAIEDANIPHTYVSANCFAAYFCPNLCQMKTLLPPKERVGVYGDGNVKVFFVDENDVGTYAIKSIDDPRTLNKTIYIRPQDNCLTQNELISKWETLTGKSLEKFHIPGDEFLASMKDLDFASQVGIGHYYHIFYEGCLANFEIGDNGAEATQLYPEVQYTRMDEYLKRYI

SEQ ID NO: 16727 - protein, 211 aa, Burkholderia pseudomallei K96243
MNRPKSMLVANIAWARETSERSPDFFDALSRGQNPRVLWIGCADSRVPAEAITQSAPGELFVHRNIANIFQPDDDNCASVLEYAVKVLKVDHVIVCGHYGCGGVRASLLPPSPELPHVNRRIAPLCALAGRHRAELDGVPPDAAADRLAELNVLEQVRLLRSSPIIRDAAPAPLVHGWIFSLADGRLKELASGYPAAQRPPQAERAQAAAA

SEQ ID NO: 16728 - protein, 276 aa, Salmonella enterica subsp. enterica serovar Typhi Ty2
MNVTEITQLARDIRVATLKSLNHLGFGHYGGSMSVVETLAVLYGAVMKIDPADPDWPERDYFVLSKGHAGPALYSTLAIKGYFPREELNTLNQNGTRLPSHPDRLKTHGVDATTGSLGQGISIAGGMALSHKLARRPNRVFCIVGDGELNEGQCWEAFQFIAHHRLNNLTVFIDWNKQQLDGELEEIINPFDLEGKFRAFGFDVVTVKGDDIAGLLAVVQPVPPADARPRVVILDSIKGQGVPCLEQLTNSHHLRLTDGMKQTLNEAIHQLEVMHD

SEQ ID NO: 16729 - protein, 336 aa, Trichodesmium erythraeum IMS101
MSKLNQENKNQKKTQTKFGPTTYSSMDTVRTYLHEIGRVPLLTREEEIVYGKQVQQMMQFLELKEKLEEKLNRTATLLEWAEHLLVSEKVLKQAIKQGQRAKQKMIEANLRLVVAIAKKYQKRNMEFLDLIQEGTLGLERGVEKFDPTRGYKFSTYAYWWIRQAITRAIAQQARTIRLPIHITEKLNKIKRVQRELIQSLGRSPTPSEIAQALELEPSQIREYLLMARHPISLDLRVGDNQDTELQELLEDETSSPDDYITGELLRQDINTLLAELSEQQRRVLVLRFGLEDGKEMSLAKVGDKLQLSRERVRQLEHQALAFLRRRQAKVREYVAS

SEQ ID NO: 16730 - protein, 485 aa, Agrobacterium tumefaciens str. C58; identical to SEQ ID NO: 785

SEQ ID NO: 16731 - protein, 380 aa, Zea mays
MRDDVAFQIINDELYLDGNARQNLATFCQTWDDENVHKLMDLSINKNWIDKEEYPQFAAIDLRCVNMVADLWHAPAPKNGQAVGTNTIGSSEACMLGGMAMKWRWRKRMEAAGKPTDKPNLVCGPVQICWHKFARYWDVELREIPMRPGQLFMDPKRMIEACDENTIGVVPTFGVTYTGNYEFPQPLHDALDKFQADTGIDIDMHIDAASGGFLAPFVAPDIVWDFRLPRVKSISASGHKFGLAPLGCGWVIWRDEEALPQELVFNVDYLGGQIGTFAINFSRPAGQVIAQYYEFLRLGREGYTKVQNASYQVAAYLADEIAKLGPYEFICTGRPDEGIPAVCFKLKDGEDPGYTLYDLSERLRLRGWQVPAFTLGGARY

SEQ ID NO: 16732 - protein, 210 aa, Eucalyptus grandis
MVRGKIQLRRIENTTSRQVTFSKRRNGLLKKAYELSVLCDAEVAVIIFSQKGRLYEFSSNSEIQKTIDRYRRSTYDMDTYKTNLDQCILHLKQETTDMERKIELLEVSLRKLSGECLGSCSIDEIQMIGDQLERSLSSIRARKAQLFDDQIQHLQAKERSLKEENAKLLAKCLANPGQSTAHPRAAALHSRSSRSTDVETGLFIGLPELN

SEQ ID NO: 16733 - protein, 227 aa, Eucalyptus grandis
MAREKIQIKKITNATARQVTFSKRRRGLFKKAEELSVLCDADVALIVFSSSGKLFEYCSSSMKEILERHHSHSENLGKLDQPSLKLQLVENGDYSRLSKEVAEKGHQLRQMRGEELQGLNIDELQQLEKSLEAGLNRVIEKKGEKIMKEITDLQQKGAKLMEETKRLKQQVTEISGRKTTATDSETIINEEGLSSESITNVCSSSSGPPQEDDSSDISLKLGLPYNG

SEQ ID NO: 16734 - protein, 410 aa, Pseudomonas putida
MNEYAPLRLHVPEPTGRPGCQTDFSYLRLNDAGQARKPPVDVDAADTADLSYSLVRVLDEQGDAQGPWAEDIDPQILRQGMRAMLKTRIFDSRMVVAQRQKKMSFYMQSLGEEAIGSGQALALNRTDMCFPTYRQQSILMARDVSLVEMICQLLSNERDPLKGRQLPIMYSVREAGFFTISGNLATQFVQAVGWAMASAIKGDTKIASAWIGDGATAESDFHTALTFAHVYRAPVILNVVNNQWAISTFQAIAGGESTTFAGRGVGCGIASLRVDGNDFVAVYAASRWAAERARRGLGPSLIEWVTYRAGPHSTSDDPSKYRPADDWSHFPLGDPIARLKQHLIKIGHWSEEEHQATTAEFEAAVIAAQKEAEQYGTLANGHIPSAASMFEDVYKEMPDHLRRQRQELGV

SEQ ID NO: 16735 - protein, 392 aa, Thlaspi goesingense
MESSSHIIEVNGGRSDEERRAVASKVCGEAPCGFSDAKNASGDAQERNASMRKLCIAVVLCLVFMSVEVVGGVKANSLAIMTDAAHLLSDVAAFAISLFSLWAAGWEATPRQTYGFFRIEILGALVSIQLIWLLTGILVYEAIIRLPTETSEVNGFLMFAVATFGLLVNIIMAVMLGHDHGHSHGHGHGHDHGNHSHDVTVTTHDHDHDHDHDDGHGHSHGEDKHDEAHGDVTEQLLEEPKQQKEKKKRNINVQGAYLHALGDSIQSVGVMIGGAAIWYNPKWKIIDLICTLVFSVIVLGTTINMIRSILEVLMESTPREIDATKLEKGLLEMEEVVAVHELHIWAITVGKVLLACHVNARPDADADMVLSKVVDYIRREYNISHVTIQIER

SEQ ID NO: 16736 - protein, 459 aa, Pseudomonas putida
MQQTIQTTLLIIGGGPGGYVAAIRAGQLGIPTVLVEGQALGGTCLNIGCIPSKALIHVAEQFHQASRFTEPSPLGISVASPRLDIGQSVAWKDGIVDRLTTGVAALLKKHGVKVVHGWAKVLDGKQVEVDGQRIQCEHLLLATGSSSVELPMLPLGGPVISSTEALAPKALPQHLVVVGGGYIGLELGIAYRKLGAQVSVVEARERILPTYDSELTAPVAESLKKLGIALHLGHSVEGYENGCLLANDGKGGQLRLEADRVLVAVGRRPRTKGFNLECLDLKMNGAAIAIDERCQTSMHNVWAIGDVAGEPMLAHRAMAQGEMVAEIIAGKARRFEPAAIAAVCFTDPEVVVVGKTPEQASQQGLDCIVAQFPFAANGRAMSLESKSGFVRVVARRDNHLILGWQAVGVAVSELSTAFAQSLEMGACLEDVAGTIHAHPTLGEAVQEAALRALGHALHI

SEQ ID NO: 16737 - protein, 251 aa, Glycine max
MATSQITSSLRNLPAFERFQPSTLRFPSAGHVRIGTLTQTSFPSFVVKAATVVAPKHTTVKPLGDRVLVKIKDAEEKTAGGILLPATAQGKPQGGEVVAVGDGKSVGKSKVDVSVKTGLQVVYSKYAGTEVEFNGSKHLILKDDDIVGILETDEVKDLKPLNDRVLIKVAEADEKTAGGLLLTEATKEKPSIGTVIAVGPGPLDEEGNRKPLSVVPGNTVLYSKYAGNDFKGKDGSDYIALRASDVMAILS

SEQ ID NO: 16738 - protein, 354 aa, Oryza sativa
MEKYEPVREIGAGNFGVAKLMRNKETRELVAMKFIERGNRIDENVFREIVNHRSLRHPNIIRFKEVVVTGRHLAIVMEYAAGGELFERICEAGRFHEDEARYFFQQLVCGVSYCHAMQICHRDLKLENTLLDGSPAPRLKICDFGYSKSSLLHSRPKSPLGAPAYIAPEVLSRREYDGKLADVWSCGVTLYVMLVGAYPFEDPKDPKNFRKTISVRSLRLISFFAYICFICNRPQRIMSVQYKIPEYVHVSQPCRHLLSRIFVANPYKRISMGEIKSHPWFLKNLPRELKEEAQAVYYNRRGADHAAASASSAAAFSPQSVEDIMRIVQEAQTVPKPDKPVSGYGWGTDDDDDD

SEQ ID NO: 16739 - protein, 116 aa, Brassica napus
STHASVHGVYDLAYLLKVLIIQDLPEKPKGFDELIRLYFPRFCDIKHLMKFCIGLSGGLNKLAELLGVERLGISHQAGSDSLLTSRIFMILQDSFFNGSVEKYSGVLFGFSVENDH

SEQ ID NO: 16740 - protein, 221 aa, Helicobacter pylori J99
MEAFLGALEFQENEYEEFKELYESLKTKQKPHTLFISCVDSRVVPNLITGTQPGELYVIRNMGNVIPPKTSYKESLSTIASVEYAIAHVGVQNLIICGHSDCGACGSIHLIHDETTKAKTPYIANWIQFLEPIKEELKNHPQFSNHFAKRSWLTERLNARLQLNNLLSYDFIQERVINNELKIFGWHYIIETGRIYNYNFESHFFEPIEETIKQRISHENF

SEQ ID NO: 16741 - protein, 546 aa, Helicobacter pylori J99
MAKEIKFSDSARNLLFEGVRQLHDAVKVTMGPRGRNVLIQKSYGAPSITKDGVSVAKEIELSCPVANMGAQLVKEVASKTADAAGDGTTTATVLAYSIFKEGLRNITAGANPIEVKRGMDKAAEAIINELKKASKKVGGKEEITQVATISANSDHNIGKLIADAMEKVGKDGVITVEEAKGIEDELDVVEGMQFDRGYLSPYFVTNAEKMTAQLDNAYILLTDKKISSMKDILPLLEKTMKEGKPLLIIAEDIEGEALTTLVVNKLRGVLNIAAVKAPGFGDRRKEMLKDIAILTGGQVISEELGLSLENAEVEFLGKAGRIVIDKDNTTIVDGKGHSDDVKDRVAQIKTQIASTTSDYDKEKLQERLAKLSGGVAVIKVGAASEVEMKEKKDRVDDALSATKAAVEEGIVIGGGAALIRAAQKVHLNLHDDEKVGYEIIMRAIKAPLAQIAINAGYDGGVVVNEVQKHEGHFGFNASNGKYVDMFKEGIIDPLKVERIALQNAVSVSSLLLTTEATVHEIKEEKAAPAMPDMGGMGGMGGMGGMM

SEQ ID NO: 16742 - protein, 193 aa, Zea mays
MSKYGTIPTSSSAGGGPVPLGGASPLDFISRAKARGASALATRRPWRELVDVHAVGLPPSLGDAYLRVRANLAHFAMNYAIVVLVVVFLSLLWHPVSLIVFLVCMLAWLVLYFLRDEPLVLFGRVVADGYVLAVLAVVTLVLLLLTDATANILSSLLIGLVLVLVHAALHKAEDNAADEADRWYAPVSQQPSH

SEQ ID NO: 16743 - protein, 360 aa, Thlaspi goesingense
MESSSHIIEVNGGRSDEERRAVASKVCGEAPCGFSDAKNASGDAQERNASMRKLCIAVVLCLVFMSVEVVGGVKANSLAIMTDAAHLLSDVAAFAISLFSLWAAGWEATPRHTYGFFRIEILGALVSIQLIWLLTGILVYEAIIRLLTETSEVNGFLMFAVATFGLLVNIIMAVMLGHDHDNGHGHSHGEDKHDEAHGDVTEQLLEKPKQQKEKKKRNINAQGAYLHVLGDSIQSVGVMIGGAAIWYNPKWKIIDLICTLVFSVIVLGTTINMIRSILEVLMESTPREIDATKLEKGLLEMEEVVAVHELHIWASTVGKVLLACHVNARPDADADMVLNKVVDYIRREYNISHVTIQIER

SEQ ID NO: 16744 - protein, 404 aa, Salmonella enterica subsp. enterica serovar Typhi Ty2
MSPIEKSSKLENVCYDIRGPVLKEAKRLEEEGNKVLKLNIGNPAPFGFEAPDEILVDVIRNLPTAQGYCDSKGLYSARKAIMQHYQARGMRDVTVEDIYIGNGVSELIVQAMQALLNSGDEMLVPAPDYPLWTAAVSLSSGKAVHYLCDESSDWFPDLDDIRAKITPRTRGIVIINPNNPTGAVYSKELLMEIVNIAREHNLIIFADEIYDKILYDDAEHHSIAALAPDLLTITFNGLSKTYRVAGFRQGWMVLNGPKKHAKGYIEGLEMLASMRLCANVPAQHAIQTALGGYQSISEFILPGGRLYEQRNRAWELINDIPGVSCVKPRGALYMFPRIDAKRFNIHDDQKMVLDFLLQEKVLLVQGTAFNWPWPDHFRIVTLPREDDLEMAINRFGRFLSGYHQ

SEQ ID NO: 16745 - protein, 335 aa, Schizosaccharomyces pombe
QHFPVQKMRPIILQGHERPLTQIKYNHDGDLLFSCAKDKVINVWFSHNGERLGTYEGHTGAIWTCDINKSSTLMVSGAADNTMRLWDVKTGKQLYKWEFPTAVKRVEFNEDDTRILAVTEERMGYAGTVTVFRVPISESDAAAETPLYVITTRESKATVAGWSYLSKFLFTGHEDGSVSRYDAITGEFVESKQVHNSGSTITDLQFYPDRTYFITSCKDTTAKAIDVDSFEVIKTYLTDTPLNTSSFTPVQDFVILGGGQEARDVTTTAARQGKFEARFYHAILEEELGRVKGHFGPINTIAVHPKGTGYASGGEDGYVRVHFFDKNYFDFKYTL

SEQ ID NO: 16746 - protein, 154 aa, Brassica napus
  misc_feature (115)..(115): Xaa can be any naturally occurring amino acid
  unsure (1)..(154): unsure at all Xaa locations
MDLLNNPPTTTVGLSETFARLKSQRKVALIPYITAGDPDLSTTAKALKVLDSCGSDIIELGVPYSDPLADGPAIQAAARRSLLKGTNFNSIITMLKEVIPQLSCPIALFTYYNPXILRGGIENYMTIIKDAGVHGLLVPGGPSWAVLFLMFHLK

SEQ ID NO: 16747 - protein, 336 aa, Porphyromonas gingivalis W83
MTKVGINGFGRIGRLVFRAAQTQNRSDIEIVAINDLIDVEYMAYMLKYDSVHGRFNGTVEVKDGQLIVNGKAIRVTAEKNPADLKWDQVGVEYVVESTGLFLTKEKSEAHLAAGAKYVVMSAPSKDDTPMFVCGVNTDKYVKGTKIVSNASCTTNCLAPIAKVLNDNWGMVGGLMTTVHATTATQKTVDGPSAKDWRGGRAAGGNIIPSSTGAAKAVGKVIPELNGKLTGMSFRVPTLDVSVVDLTCQLAKPAKYEDICAAMKKASEGELKGILGYTDEEVVSSDFIGETRTSVFDAKAGIALTDTFVKIVSWYDNEIGYSNKVLDLIAYMAKVNA

SEQ ID NO: 16748 - protein, 382 aa, Escherichia coli O157:H7
MFKSDAARTRQRLSARKGRTLPPGRGKFPHSTTESFRNTFWLKKIMEHCFNMVDQQTTTAQTNANFLQIRFTTMSKKIAVIGECMIELSEKGADVKRGFGGDTLNTSVYIARQVDPAALTVHYVTALGTDSFSQQMLDAWHGENVDTSLTQRMENRLPGLYYIETDSTGERTFYYWRNEAAAKFWLESDQSAAICEELANFDYLYLSGISLAILSPTSREKLLSLLRECRANGGKVIFDNNYRPRLWASKEETQQVYQQMLECTDIAFLTLDDEDALWGQQPVEDVIARTHNAGVKEVVVKRGADSCLVSIAGEGLVDVPAVKLPKEKVIDTTAAGDSFSAGYLAVRLTGGSAENAAKRGHLTASTVIQYRGAIIPREAMPA

SEQ ID NO: 16749 - protein, 327 aa, Polaromonas sp. JS666
MTLAVQIDQNGGPEQLKLVDVTVGEPGPGEIRIRHKAVGLNFIDVYQRTGLYKLPMPLQLGMEASGVVEAVGEGVTHLKAGDRAAYASQPPGSYCELRVMPAKCVCRLPDAISFETGAAMMLKGLTVQYLLRRTQPQGGLNAGDFVLFHAAAGGVGLIACQWAKAMGLQLIGTAGSDEKCALAKANGAAFVINYAKEDFVARVKEITGGKGVKAVYDSVGKDTFLKSLDCLRPFGLLANFGNASGKVEPLDIGVLAAKGSLYVSRPTLFTHIATRETTQEMADDLFAMVTGGKIRIAIDQRFPLADVAEAHRSLEARKTTGCTILTL

SEQ ID NO: 16750 - protein, 375 aa, Pseudomonas fluorescens PfO-1
MAEAKVLSGAGLRGQVAGQTALSTVGQAGAGLTYRGYDVRELAADAQFEEVAYLLLYGELPTKAQLADYQGKLSKLRDLPQALKEVLERIPADAHPMDVMRTGCSFLGNIEPEKDFSEQRDKTDRLLAAFPAIMCYWYRFSHDGKRINCVSDEPSIGGHFLHLLHDKKPSELHVKVMNVSLILYAEHEFNASTFTARVCASTLSDLYSCVTAAIGSLRGPLHGGANEAAMEMIERFSSPEEAVKGTLGMLERKDKIMGFGHAIYKDSDPRNEVIKGWSKKLADEVGDKVLFAVSEAIDKTMWEQKKLFPNADFYHASAYHFMGIPTKLFTPIFVCSRLTGWAAHVFEQRANNRIIRPSAEYTGVEQRKFVPIEQR

SEQ ID NO: 16751 - protein, 170 aa, Triticum aestivum
  misc_feature (140)..(140): Xaa can be any naturally occurring amino acid
  unsure (1)..(170): unsure at all Xaa locations
AARDPIGITSFYQGRSSTLPGAIFFASELKCLSSVCDEIIAFPPGHVYDSKTNETTRYFKPSWWDPHRQPAAPVDYRLLRTTLEKSVKKRLMAEVPFGVLLSGGLDSSLIASIAQRETLRLKAASLEQSSKLFDSKGTVXKQCRGKGKQLVGIDEDNNLSTLANYSAKPF

SEQ ID NO: 16752 - protein, 262 aa, Oryza sativa
MLGSDQLEHRPAPSAPRAEPDDVADDVEVEAFRDIHPEPSPPHLPPPPLRQPSWDAASHRSLSSSGAGGGGDVELFATMSREFTAMVAAGSSSAPSPDVPGDAPAAADLNLLQLARIGENEPAAEANALAIVPAAAGSGPPAPVEQVKKEEVEAKVAAWQAEEVAKINNKFKREEVVINGWESQQVDKATAWLAKIERKLEEERAKATEKARNEAAAARRKSEERRASAEARRGRKTAEVLDRANFCKAAGRVPSKRSFFSF

SEQ ID NO: 16753 - protein, 396 aa, Symbiobacterium thermophilum IAM 14863
MERRFGELNPPQRLLMGPGPSNVDPRILRAMATPVIGHLDPAFLSIMDETMGWLREVYETRNHHTVPISATGSAGVEAMMVNLLEPGDDVVVGIIGYFGQRMADVASRTGANVRVIEAPLGEAIPPERFEEELRRKPAKLVALVHAETSTGAEQEIAPVAEIAHRYGALIAIDCVTSLGGMPVRVDEWGVDAAASCSQKCLGAPPGLSPVTFSPRAMEVITGRKSKCQSWYLDVNLLFAYWGDGKANNRVFHHTGPITMIYAMREALRIALEEGLEARYARHRKAHEAFAAGLEAMGLTLFTKGKRLPMLNVINIPEGIDDLAVRRRLLEQNIEISGGFGPLAGRVWRVGLMGVNANPAPVITLLGALEQALVEQGYRCERGAAVAAARAVYKQST

SEQ ID NO: 16754 - protein, 513 aa, Hordeum vulgare subsp. vulgare
MDGNNRGGGHSEVLKNYNLGKTLGLGTFGDVKVAEHKLTGQRVAIKILNRRKMETMEMEEKANREIKIMRLFIDFIHPHIIRVYQVIETPKDIFIVMEYCNNGELLDYIIENGRLQEDEARRIFQQILAGVEYCHRIMVVHRDLKPENLLLDSKYNVKLADFGLSNVMRDGHFLKTSCGSLNYAAPEIISSKLYAGPEVDVWSCGVILYALLCGSVPFDDDNIPSLFRKIKGGTYILPSYLSDSARDLIPKLLNIDPMKRITIHEIRVHPWFKNHLPCYLAVPPPYKAPKAKMIDEDILRDVVNLGYDKDHVCESLWNRLQNEETVAYYLLLDNRFRSTSGYLGADHQHLMDRSFNEFTLSESASPSTRNYLPGINDSQGGGLRPYYPVQRKWAIGLQSGAHPRDIMIEVLKALKELNVCWKKNGLYNMKCRWCPGFPQVSAMLLDSNHNFVDDSTIMDNGNADGRLPAVVKFEIQLYKTKDNKYLLDIQRVTGPQLLFLEFCGAFFTNLRVL

SEQ ID NO: 16755 - protein, 442 aa, Saccharophagus degradans 2-40
MDIRNTVNRRVVITGIGPISPVGIGKHDFWESIKHGVTNFREVTRYPVDKFKTKIAAEMDVFVPELVDGKLTKAPEGFKGLDVSKFVNPKTFRKIENFGVERGGWSIYYAIASAKLAMEDSGLDLSKENMERVGVTYAAASGDAQLIRGSKPVFELTQYGALGGLSGTIAYEYGIEGTGIPSAGACASASISMRSAYLEIMSGAQDVVITGACSAGLAWSGFFECCDEPAQGPMSQQNDLERPMKPFDKDRGGFILGEGAGALILEDLEHAKARGANIYAEVVGFGHSTDTATHLADVSKPGYIRAMRLAKENAGLTDEVLASSTVYMNTHGTSTRKNDVLESHAIAEVFGDSSKKFLVNSIKGTTGHAQEAASAHELISACISLQEGVVPPTVGLKEVDPECADLDYVRDEYRNADIDYVIKNASGFCGPYITTVLKRYTA

SEQ ID NO: 16756 - protein, 485 aa, Agrobacterium tumefaciens
MNVLSVSSEIYPLIKTGGLADVVGALPIALEAHGVRTRTLIPGYPAVKAAVTDPVKCFEFTDLLGEKADLLEVQHERLDLLILDAPAYYERSGGPYLGQTGKDYPDNWKRFAALSLAAARIGAGVLPGWRPDMVHAHDWQAAMTPVYMRYAETPEIPSLLTIHNIAFQGQFGANIFSKLALPAHAFGMEGIEYYNDVSFLKGGLQTATALSTVSPSYAEEILTAEFGMGLEGVIGSRAHVLHGIVNGIDADVWNPATDHLIHDNYSAANLKNRALNKKAVAEHFRIDDDGSPLFCVISRLTWQKGIDLMAEAVDEIVSLGGRLVVLGAGDVALEGALLAAASRHHGRVGVAIGYNEPLSHLMQAGCDAIIIPSRFEPCGLTQLYALRYGCIPVVARTGGLADTVIDANHAALASKAATGVQFSPVTLDGLKQAIRRTVRYYHDPKLWTQMQKLGMKSDVSWEKSAGLYAALYSQLISKGHHHHHH

SEQ ID NO: 16757 - protein, 501 aa, ASPERGILLUS NIDULANS FGSC A4
MSYPPPNYGHGHPQYTQPPPPQGYPAPGPYPPSSYPAPTGAHPAHPIPAPYGVPGGGNPGPPGSAGAYPSPSPQPPYQASPGPYPQYPAHGHPAQPPAPYQQPPSGPGSYGQANPPYGSAPPPNPYGTPPPPHAAPYPPGQYPPAAGYPPQGYPPGPPPPGVGPYGAPGGYPPAAPVPAPPSLGYDPDQRASGDASKEADALRKAMKGWGTDEAALINVLAKPDPLHMALIRHTYMDRHGRNLEKDLKSELSGDFETIMLSLAAGPLGQDIRYLRDAMSGIGTDETAINDVLIGRSNADLRAIKYGYVQRYNKALVDDIKSDLSGKTEKFFLMLLNAVRPESGTYFDQASVDKDVHELHLATNAKTGTDELGVSAVFLGASDQKLVAISQAFEAKYHISLEKTIKDEFSGHLEKALLAILARAKDPLKFDVETMLAIVPPGGVKADIKRLIYWVVRLHWNPPYLAQIKEALQKRTGSNFGKRIRGALPGGDLTEAVLRVWS

SEQ ID NO: 16758 - protein, 471 aa, Arabidopsis thaliana
  misc_feature (418)..(418): Xaa can be any naturally occurring amino acid
  unsure (1)..(471): unsure at all Xaa locations
MEADESGISLPSGPDGRKRRVSYFYEPTIGDYYYGQGHPMKPHRIRMAHSLIIHYHLHRRLEISRPSLADASDIGRFHSPEYVDFLASVSPESMGDPSAARNLRRFNVGEDCPVFDGLFDFCRASAGGSIGAAVKLNRQDADIAINWGGGLHHAKKSEASGFCYVNDIVLGILELLKMFKRVLYIDIDVHHGDGVEEAFYTTDRVMTVSFHKFGDFFPGTGHIRDVGAEKGKYYALNVPLNDGMDDESFRSLFRPLIQKVMEVYQPEAVVLQCGADSLSGDRLGCFNLSVKGHADCLRFLRSYNVPLMVLGGEGYTIRNVARCWCYETAVAVGVEPDNKLPYNEYFEYFGPDYTLHVDPSPMENLNTPKDMERIRNTLLEQLSGLIHAPSVQFQHTPPVNRVLDEPEDDMETRPKPRXWSGTATYESDSDDDDKPLHGYSCRGGATTDRDSTGEDEMDDDNPEPDVNPPSS

SEQ ID NO: 16759 - protein, 513 aa, Hordeum vulgare subsp. vulgare
MDGNNRGGGHSEVLKNYNLGKTLGLGTFGDVKVAERNVTGQRVAIKILNRRKMETMEMEEKANREIKIMRLFIDFIHPHIIRVYEVIETPKDIFVVMEYCNNGELLDYIIENGRLQEDEARRIFQQILAGVEYCHRIMVVHRDLKPENLLLDSRYNVKLADFGLSNVMRDGHFLKTSCGSLNYAAPEIISSKLYAGPEVDVWSCGVVLYALLCGSVPFDDDNIPSLFRKIKGGTYILPSYLSDSARDLIPKLLNIDPMKRITFHEIRVHPWFKNHLPCYLAVPPPYKEQQAKMIDEDILREVVNLGYDKDHVCESLWNRLQNEETVAYYLLLDDRFRSTSGYLGADHQHLMDRSFNEFTLSESASPSTRNYLPGINDSQGGGLRPYYPVQRKWAIGLQSGAHPRDIMIEVLKALKELNVCWKKNGLYNMKCRWCPGFPQVSDMLLDSNHNFVDDSTIMDNGNADGRLPAVVKFEIQLYKTKDNKYLLDIQRVTGPQLLFLEFCGAFLTNLRVL

SEQ ID NO: 16760 - protein, 485 aa, Agrobacterium tumefaciens
  misc_feature (1)..(1): Xaa can be any naturally occurring amino acid
  misc_feature (133)..(133): Xaa can be any naturally occurring amino acid
  misc_feature (143)..(143): Xaa can be any naturally occurring amino acid
  misc_feature (148)..(148): Xaa can be any naturally occurring amino acid
  misc_feature (188)..(188): Xaa can be any naturally occurring amino acid
  misc_feature (228)..(228): Xaa can be any naturally occurring amino acid
  misc_feature (309)..(309): Xaa can be any naturally occurring amino acid
  misc_feature (362)..(362): Xaa can be any naturally occurring amino acid
  misc_feature (450)..(450): Xaa can be any naturally occurring amino acid
  misc_feature (455)..(455): Xaa can be any naturally occurring amino acid
  unsure (1)..(485): unsure at all Xaa locations
XNVLSVSSEIYPLIKTGGLADVVGALPIALEAHGVRTRTLIPGYPAVKAAVTDPVKCFEFTDLLGEKADLLEVQHERLDLLILDAPAYYERSGGPYLGQTGKDYPDNWKRFAALSLAAARIGAGVLPGWRPDXVHAHDWQAAXTPVYXRYAETPEIPSLLTIHNIAFQGQFGANIFSKLALPAHAFGXEGIEYYNDVSFLKGGLQTATALSTVSPSYAEEILTAEFGXGLEGVIGSRAHVLHGIVNGIDADVWNPATDHLIHDNYSAANLKNRALNKKAVAEHFRIDDDGSPLFCVISRLTWQKGIDLXAEAVDEIVSLGGRLVVLGAGDVALEGALLAAASRHHGRVGVAIGYNEPLSHLXQAGCDAIIIPSRFEPCGLTQLYALRYGCIPVVARTGGLADTVIDANHAALASKAATGVQFSPVTLDGLKQAIRRTVRYYHDPKLWTQXQKLGXKSDVSWEKSAGLYAALYSQLISKGHHHHHH

SEQ ID NO: 16761 - protein, 478 aa, Candida glabrata CBS138
MQSMNVQHQVMPGHEQMMPQRDPQNMNMMQNYSPHMGRARMNVQQPNFPMQSMMQDVGNPYLNAQEQDMNKRQMQQNMPMNIQPQLQMQHQNQNFNISTPVNASMPPGLNLYQQQQQQQQQQQQQQQQQQQQQQQQQRQGQGQGQQNQQNQQQQQQQQLGQQQIPQQSQNQGSIGVNPALTNVPKQMGAAANALPGAASALPPMILPPPNHLFVRDVWKGNLYREFASIRRLVQQYNHISISTEFVGTTARPIGNFRSKADYHYQTMRANVDFLNPIQLGLSLSDENGNKPDNGPSTWQFNFEFNPEKEMVSKDSLELLTKSGINFEQHQTMGIDQLEFGQLLMDSGLVLDPEVTWVTYHAAYDLGFLINILMNNSMPNNKDDFEWWVHKYLPNFYDLNLVYKAIQDFKQPNQQQQYTLTSLADDLGIPRFSIFTTTGGQSLLMLLSFCQLAKVSLNKLPNGADLISYRNIIYGIDGE

SEQ ID NO: 16762 - protein, 505 aa, Methanosarcina barkeri str. fusaro
MGEKNSSKVLTTGFGIPVGDDQNSLTAGNRGPVLMQDVHLLDKLSHFDHERIPERVVHAKGAGAGGYFEVTADVTKYTKAKFLSEIGKRTEVFVRFSTVGGEKGSADSARDPRGFAVKFYTEDGNYDLVGNNTPVFFIRDPLKFPDFIHTQKRNPATNCKDPDMFWDFLSLTPESIHQVTILFSDRGTPATYRNMNGYSSHTYKWYNEKGEYFWVQYHFKTDQGIKNLTLEEAEKIGGSDPDHATRDLYEAIKKGDYPSWTLEMQIMTPEQAEDYRFDIRDITKVWPHGDFPTMKIGKLVLNRNPTNYFAEVEQAAFSPANLVPGIGISPDKMLQGRVFSYHDTHIHRLGPNYNLIPVNAPKYSPENSYQRDGFMRVDANGGSGPNYWPNSFGGPSPDSVYLEPPFGVSGLAARTLYTHPNDDFVQAGNLYRDVMTDYDRENLVGNIVSHLSAAQKRIQLRQTALFFKADRDYGSRVAKGLELDIKEVERLANMTNEERARATER

SEQ ID NO: 16763 - protein, 306 aa, Bacillus halodurans
MKALNLYGIQDLRFEETPAPSIEHDDDIIIKVKAVGICGSDLSRYKKLGPYVPGMTFGHEFAGEVVKIGRSVTGFSIGDRVAACPTYTCGQCRYCQLGEPTRCERLSVIGARHPGAYAEYVKLPAKHVIPLPNVVNYDEAALIEPASVVAHGFYRTNIKPGASVAIMGVGSIGLLAVQWAKIFGATTVFAIDIDEQKLNVANQLGADVLISSLQRPAHKQILEYTNGIGVDVAVESAGTPSTSAQVFALPKKGGEVVFLGIPYADVQIERFYFEKIVRNELHVYGSWNALSSPFPGKEWATTIQDM

SEQ ID NO: 16764 - protein, 123 aa, Glycine max
  misc_feature (23)..(23): Xaa can be any naturally occurring amino acid
  misc_feature (45)..(45): Xaa can be any naturally occurring amino acid
  misc_feature (48)..(48): Xaa can be any naturally occurring amino acid
  misc_feature (67)..(67): Xaa can be any naturally occurring amino acid
  misc_feature (81)..(81): Xaa can be any naturally occurring amino acid
  misc_feature (87)..(87): Xaa can be any naturally occurring amino acid
  misc_feature (100)..(100): Xaa can be any naturally occurring amino acid
  unsure (1)..(123): unsure at all Xaa locations
EARVSLLGTEFIKVATNIDPDCXMIINEKGRNAKCAMRKAFVDEXKSXLPKHILYKEHQQITDRDGXVETDSLKAHAEKPXPDRMIXNAANIFPFNTPTXRETYHYTMIIDRFFPQKSPRLTV

SEQ ID NO: 16765 - protein, 231 aa, Chlamydomonas reinhardtii
MPLLRRAAQSLLTSWAPVATNCGAMSELVRCMGTERRPGESGAWKQIERQRYASDWENDPTFKRTPKNLAEVLDDSASMLLLTDVWRGMAYTLGAFFDKKVTIMYPFEKGQLSPRFRGEHALRRYPTGEERCIACKLCEAICPAQAITIEAEEREDGSRRTTRYDIDMTKCIYCGFCQEACPVDAIVEGPNFEFSTETREELLYDKQKLLENGDKWETEIATNLRTESLYR

SEQ ID NO: 16766 - protein, 166 aa, Oryza sativa
MAGVHTHRAFLLCNYLLLGAASGCIFLTLSLRLLPSPCGLLLVFLHALTAVLAAAACSGSFTAPGGGGGTHTAHTASAVLTAIFQGAAALLAFTRTGDFLAELRSYVREEDGEVILELVGGLGAAIFVLEWAALALAFALRLGDDGADGDEHDGGYAKSWQSGYHV

SEQ ID NO: 16767 - protein, 180 aa, Salmonella enterica subsp. enterica serovar Typhi Ty2
MTLKELLVGFGTQVRSIWMIGLHAFAKRETRMYPEEPVYLPPRYRGRIVLTRDPDGEERCVACNLCAVACPVGCISLQKAETKDGRWYPEFFRINFSRCIFCGLCEEACPTTAIQLTPDFELGEYKRQDLVYEKEDLLISGPGKYPEYNFYRMAGMAIDGKDKGEAENEAKPIDVKSLLP

SEQ ID NO: 16768 - protein, 479 aa, Oryza sativa
  misc_feature (146)..(146): Xaa can be any naturally occurring amino acid
  misc_feature (460)..(460): Xaa can be any naturally occurring amino acid
  unsure (1)..(479): unsure at all Xaa locations
ADGSIDSAAKRKGSLCQQVANSEGNKKTTYSGLDLPEEIWCHIHSLMAFKDAARATCVSRAFHRSWQCHPNLIFCIGILGSDFINKFDRIVKNHSGIGIKSVNFEYDSSYNTRRSTSISHHFDSWLHIAITPWIEKLSLRLSHYSXNVEYNLPCTILSDGRASSMRHLYLGSCSFHPTINLDLRSLMKLHLFNVHITGDELGCLLFSCYALEWLELEHCDEIVCMKVPCQLQRLNHLKVFECRMLQVIENKAPNICSFDFGGKHVQLLLGESLQMKTLSLQYYCNAVYYARVESIPNVPNLETLTICSYHEMVNTPMLPSKFLHLKCLTIDLAEVSHAYDYFSLVSFLDASPFLETLLLGIPKDSMEDDSIFGDSSNMRQMQEYRHDNLQSVVITCFCSAKSLIELTCCILDCTTSLEYLTLDTTRGVYSCSTGKHSQCFPMDKAMIPKANRAMLAVETXIERKVPSTVKLNVVKPCPL

SEQ ID NO: 16769 - protein, 460 aa, Glycine max
MGSRSRTVNVNTKDTDKVLNGMPSYAPPLPSSSNSMAMEATNAHPSRISEFGTLEQSLGFRVEDTINLSRNPMFNQMKSNSQALGADIQFGALNKSIATSDINLSAAIAASQALVFQKDSQPTLASTSAGRENWGETNMADASPRTDTSTDDTEDKNQRPERDESSGSKDKSDQKTLRRLAQNREAARKSRLRKKAYVQQLESSRLKLTQLEQELQRSRQQGIFISSTGDQAQSMSGNGAMAFDVEYARWLEEHNRQTNELRAAINSHAGDIELRTIVDNFMTQFDDIFRLKGIAAKADVFHILSGMWKTPAERCFMWIGGFRSSELLKLLLSQLEPLAEQQLMGIYNLQQSSQQTEDALSQGMDALQQSLSETLANGSPSSSGSSGNVANYMGQMAMAMGKLGTLEGFLHQADNLRQQILQQMLRILTTRQSARALLAISDYFSRLRALSSLWLARPRE

SEQ ID NO: 16770 - protein, 294 aa, Oryza sativa
MLHEQHAPPPQPEPEVSLQLSAPATAADDVAAGDDEEVTVVTTYRDIHPLTPPSPTTTTTPPTRLGSAAYSWDTASSHRSVSSEEQFMTMSREFTAMVAAGTTMQTGPNDGNNGGDQLTSIGEDELEETNPLAIVPDSHPIATPARSRASQLEVVPAAGPSPAPPVEARQVKKEEVETKVSAWQTAEVAKINNRFKREEVVINGWETEQVEKASAWLKKIEVFLMTEQLTQRKLDEQRAKALERTQNDIAKARRKAEEKRASAEAKRGLKLAKVLELANFMKAVGRVPTKRSFF

SEQ ID NO: 16771 - protein, 307 aa, Akashiwo sanguinea
RIGRLVFRAASANSDVTIKAVNDPFMDLKYMVYQLKYDSVHKQFPGTIATKEEDGKEFLVINDVPIRIFHEKDPASIPWGEAGAEYVCESTGVFTQREKAELHIKGGAKKVIISAPPKDDVPIYVVGVNHKEYKTTDTVVSNASCTTNCLAPLTKVVHEKFGIVQGLMTTVHAMTATQLTVDGPSRGGKDWRGGRCASQNIIPSSTGAAKAVGKVLPSVNGKLTGMAFRVPTPDVSVVDLTCQLAKEASYDDIVAAIKEAAAGDMKGVLDWTEDEVVSTDFVSCKASSVFDVGAGIALNKTFVKLVS

SEQ ID NO: 16772 - protein, 427 aa, Glycine max
MAIRNSLTGQFLRRSSVAGARLMSSSSSWFRSIEPAPKDPILGVTEAFLADQSPNKVNVGVGAYRDDQRKPVVLECVREAERRVAGSQFMEYLPMGGSIKMIEESLKLAFGDNSEFIKDKRIAAVQALSGTGACRLFAAFQQRFHPNTQIYIPVPTWANHHNIWRDAGVPMKTFRYYHPESRGLDFSGLMDDIKNAPDGSFFLLVLTAHNPTGVDPSEEQWREISSQIKAKGHFPFFDMAYQGFASGDPERDAKAIKIFLEDGHLIGLAQSYAKNMGLYGQRAGSLSVLCEDEKQAVAVKSQLQLIARPMYSNPPLHGALIVSTVLGDPDLKKLWLKEVKVMADRIIGMRTTLRENLEKKGSTLPWQHITNQIGMFCYSGLTPEQVDRMTNEFHIYMTRNGRISMAGLNTGNVGYVADAIHEVTKSF

SEQ ID NO: 16773 - protein, 450 aa, Zea mays
LPLRLLMASPTAGDAPLASPSPSPAADATDAALAAAATVPDPDISFGFRPELGKEKLVGTVGFHERHVFLCYKGPEVWPSHVEAVYSDRLPRLLAAAIKARKPNLKKTIKFTICEGEDGTESSNGDVLIFPDMIRYKGLTHFDVDNFVEEVFVKDIDWLPGSPEPISGSYVFVCSHQRRDIRCGIRGPALIKRFKEEINGLGLDGQVAVSACSHVGGHKYAGNVIIFSSDAKGEVMGHWYGYVVPDDVPVLLHKHIGQGEVVDRLWRGQMGLSEEQQKQALELRSMTNGGKESLEETETDGASCNPAATGGCCQGNGGFTRASEQQKQALELRSMTNGGKESLEETETDGGACNPAATGGCCQGNGGFTCCHPDLPKEKRDKSIAIEQNPKSCEENGKEGGAGSKKGNSKTCPMPTWFETWERADTYAALAVVAAAAAVFISFRIYKNLN

SEQ ID NO: 16774 - protein, 597 aa, Triticum aestivum
MAEGTDTVRAPGDAEEMEKGEIAGAAAGADGDSAAPQPVEPTWAFWIGNGNPQEDSAGRGNTVHTFSTVDDFLSLYNNILHPSKLGVGADLHCFKNKIEPKCEGPICANGGAWTISCGEGKSQPLWLDTLLALIGGQFEYGNEICGAVLSVCGKQETIAIWIKDATNEAAQLSIGKQWKEFLEYKDSVEFIVHDSDATAVQCWSSTFPDDPLDVIYNKVPSHCSRVRFAAVCRSWCTAASRHPALPELPWLLLSPRDRDTTKRLYCPEDSKILCISLPSDFIGNWFVGCHGGGWVASFEPPPFRILNIFSSVEVALSEKQKGIVCPGRLGQIIIWKIIFSKPPTSSDCIIAAITDNHGIALCRVGCPNGGWTTKGHVSYTMELADIAFCNGKLYGLTRDRWELVKFEIGADEDGAPVVTAVDRLVVTVEHQQPPSVWANRVDASYIFELHGKLATAVRSPWSPNLRPFFKVFELVDIDTSEGMAHGTHKWTEVMSLGDFALFLGPNSSKAVHVSADRRGGVKRNHIYYSYHRRLAQKEVLLSTDLVFLTSSNADGDSVYYREDESLSAAVGGVHRIGAVGYYVRGSPNPPVWLLPLA

SEQ ID NO: 16775 - protein, 307 aa, Amphidinium operculatum
RIGRLVFRAASANPDVTVKGVNDPFMDLTYMVYQLKYDSVHGRFKGTIETKTADGKEFLIVNGNEVAVFHEKDPTAIPWGASGCDYVCESTGVFTAKEKAELHLQGGCKKVIISAPPKDAVPIYVMGVNHTDYKTSDTVVSNASCTTNCLAPLAKVVNDKFGLLEGLMTTVHATTATQLTVDGPSRGGKDWRGGRCASQNIIPSATGAAKAVGKCLPALNGKLTGMAFRIPTPDVSVVDLTCRLEKPAKYDDIVAAIKEAAAGPMKGVLDWTDEEVVSTDFVSCPSSSIFDVQAGIASNDTFVKLVS

SEQ ID NO: 16776 - protein, 535 aa, Arabidopsis thaliana
MALAFDEFGRPFIILREQDQKTRLRGIDAQKANIAAGKAVARILRSSLGPKGMDKMLQGPDGDITITNDGATILEQMDVDNQIAKLMVELSRSQDYEIGDGTTGVVVMAGALLEQAERQLDRGIHPIRIAEGYEMASRVAVEHLERIAQKFEFDVNNYEPLVQTCMTTLSSKIVNRCKRSLAEIAVKAVLAVADLERRDVNLDLIKVEGKVGGKLEDTELIYGILIDKDMSHPQMPKQIEDAHIAILTCPFEPPKPKTKHKVDIDTVEKFETLRKQEQQYFDEMVQKCKDVGATLVICQWGFDDEANHLLMHRNLPAVRWVGGVELELIAIATGGRIVPRFQELTPEKLGKAGVVREKSFGTTKERMLYIEHCANSKAVTVFIRGGNKMMIEETKRSIHDALCVARNLIRNKSIVYGGGAAEIACSLAVDAAADKYPGVEQYAIRAFAEALDSVPMALAENSGLQPIETLSAVKSQQIKENIPFYGIDCNDVGTNDMREQNVFETLIGKQQQILLATQVVKMILKIDDVISNSEY

SEQ ID NO: 16777 - protein, 300 aa, Heterocapsa triquetra
RIGRQVARIAMKDPEVELKLINASYDAEYLAYQMKYDSIHGRYNGTIEVDGDSLVIDGQKVALSHTRDPAEIPFKKHGAEYVCESTGVFLTTEKVQPHLKAGAKKVVFSAPAKDDSHTVVMGVNQETYKSSMECVSCASCTTNGLAPLVKCINDAFGIRRGLMTTIHAMTASQPTVDGASKKDWRGGRAASGNIIPSSTGAAKAVAKVIPEVAGKLTGMAFRVPTIDVSVVDLTCELEKATTYEEICAEVKKRAEGDMKGFLGYCDEDLVSTDFETCTISSTFDSKAGIMLDPTFVKLVA

SEQ ID NO: 16778 - protein, 315 aa, Zea mays
  misc_feature (226)..(226): Xaa can be any naturally occurring amino acid
  unsure (1)..(315): unsure at all Xaa locations
TQNPARRNPSRRRHHTTAIVTSMAAASEDALRRSLAERQAAVDAQAEAVRALKAGGGASKADVDAAVEALKALKVEAGAAARRLQQAVGAGAGGAAREELRQAVVNTLERKLFYIPSFKIYRGVAGLYDYGPPGCRVKANVLSFWRQHFVLEENMLEVDCPCVTPEVVLKASGHVEKFTDLMVKDEKTGTCYRADHLLKDFCKEKLDKDLALPQEKADEFKRILAXLDDLSAEELGAKIKEYGHCLPLIQKNCFSDPYPFNLMFQTSIGPTGLSVGYMRPETAQGIFVNFKDLYYYNGQKLPFAAAQIGQAFRNE

SEQ ID NO: 16779 - protein, 426 aa, Helicobacter pylori J99
MSVTLINNENNARYEFETIECTRGPKAVDFSKLFETTGFFSYDPGYSSTAGCQSKISYINGKKGELYYRGHRIEDLVAKYKYVDVCRLLLTGELPKNQDESLEFELELRHRSFVHESLLNMFSAFPSNAHPMAKLSSGVSILSTLYSTHQNMHTEEDYQTMARRIVAKIPTLAAICYRNEVGAPIIYPDIARSYVENILFMLRGYPYSRLKHTTQGEVGITPLEVEAFDKILTLHADHGQNASSTTVRNVASTGVHPYAAISAGISALWGHLHGGANEKVLLQLEEIGDVKNVDKYIARVKDKNDNFKLMGFGHRVYKSYDPRAKILKGLKDELHQKGVKMDERLSEIAAKVEEIALKDEYFIERNLYPNVDFYSGTILRALKIPVRFFTPVFVIGRTVGWCAQLLEHVKSPQARITRPRQVYVGD

SEQ ID NO: 16780 - protein, 307 aa, Heterocapsa triquetra
RIGRLVFRAAVSNPSISLKAVNDPFMDLKYMVYQLKYDSVHGRFAGTVEAKEADGKEFLVVNGTEIQIFHEKDPAAIPWGAAGADYICESTGVFTAQEKAELHIKGGAKKVIISAPPKDAVPIYVVGVNHLDYKASDTVVSNASCTTNCLAPLTKVVHEKFGIIEGLMTTVHAMTATQLTVDGPSRGGKDWRGGRCSSQNIIPSSTGAAKAVGKVIPSVNGKLTGMAFRVPTPDVSVVDLTVRLEKGAKYEEIVAAVKEAAAGPMAGVLDWTDEEVVSTDFTTCKASSIFDVGAGISLNDTFVKLVS

SEQ ID NO: 16781 - protein, 522 aa, Neisseria gonorrhoeae
MKHRTFFSLCAKFGCLLALGACSPKIVDAGTATVPHTLSTLKTADNRPASVYLKKDKPTLIKFWASWCPLCLSELGQAEKWAQDAKFSSANLITVASPGFLHEKKDGEFQKWYAGLNYPKLPVVTDNGGTIAQNLNISVYPSWALIGKDGDVQRIVKGSINEAQALALIRNPNADLGSLKHSFYKPDTQKKDSAIMNTRTIYLAGGCFWGLEAYFQRIDGVVDAVSGYANGNTENPSYEDVSYRHTGHAETVKVTYDADKLSLDDILQYYFRVVDPTSLNKQGNDTGTQYRSGVYYTDPAEKAVIAAALKREQQKYQLPLVVENEPLKNFYDAEEYHQDYLIKNPNGYCHIDIRKADEPLPGKTKAAPQGKGFDAATYKKPSDAELKRTLTEEQYQVTQNSATEYAFSHEYDHLFKPGIYVDVVSGEPLFSSADKYDSGCGWPSFTRPIDAKSVTEHDDFSFNMRRTEVRSRAADSHLGHVFPDGPRDKGGLRYCINGASLKFIPLEQMDAAGYGALKGEVK

SEQ ID NO: 16782 - protein, 112 aa, Glycine max
  misc_feature (42)..(42): Xaa can be any naturally occurring amino acid
  misc_feature (90)..(90): Xaa can be any naturally occurring amino acid
  unsure (1)..(112): unsure at all Xaa locations
RTTRAGEWFTARVSACGLFHMASPSAPETSKTEWRSIYSRVXQDDMPMARGAGASNTGKLGATAEYADLKADVMSMFDDLTQDDHDAAQXMAEEGCAGLGKLEEPQDCVAHI

SEQ ID NO: 16783 - protein, 638 aa, Oryza sativa
MDLKDGGGSERRGAAAGAGAGAAPLARQGSIYSLTFDEFQSTLGGMGGGLGKDFGSMNMDELLRSIWTAEESQAMASASAAAAAAEGGLQRQGSLTLPRTLSVKTVDEVWRDLEREASPGAAAADGGGGGGEQQQPRRQPTLGEMTLEEFLVRAGVVRENTAAAAAMVAAAAAPPVAPRSIPAVNNSSIFFGNYGGVNDAAAAAAGAMGFSPVGIGDPTMGNRLMSGVAGIGGGAITVAPVDTSVGQMDSAGKGDGDLSSPMAPVPYPFEGVIRGRRSGGNVEKVVERRQRRMIKNRESAARSRARKQAYTMELEAEVQKLKEQNMELQKKQEEIMEMQKNFFPEMQKNQKLFSVGRDGVHYSATKCTKYTISTEKVMITLIHGKQVLEAVNNPYGQKKRCLRRTLTVLQVFYRALMSPSVPRFLFSYPEIRRMYHEGELELPVDNEEEFMPKMINMGSHLTRKNKPDQSDTTVEFHPRPDVLLQGAGEGLVFLLGGQVNCIGLQDSTESRPENDTVLVQIQGPATVSSGSVTVQAGPNCRAKEEPIRDTNHWRQHPGVPYAPGHGEPTPSLLGLRDTQHCPFHGQFQKQFFPPRSSSGNQRRPMADLSPDWGRFGLDWDCGVTSARTFGNDRDGTAF

SEQ ID NO: 16784 - protein, 430 aa, Glycine max
MGAVSSACEGCFNDKSDQKPHGNQKGQDDKRKNDVKYDKLDDSSEGKNISDRAKNPSNAKDKGQDGGSHKNSAKQSKNEEAGLDKNKKLTIKDFDLIRVLGRGSFGKVFLVQKKANKKYYALKTLKKEEILNRGHIDNAMTEKNVLQNALHPFVVRLRYSFQNQTTLYLVMDFCPGGELFMQLKKKGRFDEETTRFYTAEVVLALQYLHEKLDIIYRDLKPENILLDANGHIKLTDFGLSKATKRSFSFCGTPEYLAPEILLGQGHDQSVDWWSLGCLIYEMLAGYPPFSSKNKTQLYQDILKTKPVMPSHFSENAKDLLSRLLVRNPSKRLGFNGTEEIKKHSFFENVQWEELVNLKKKPPIVPTLTKPDDLRNFDRIYLNEPVIETPNNNPKILTDPKNNFQDFTYVPKDIGNQSYIEDPKSILDSTK

SEQ ID NO: 16785 - protein, 411 aa, Schizosaccharomyces pombe
MALYSISKPVGSKINKHSYQDENTLVGKQALSKGTEKTKLSTNFEINLPRRTVLSDVSNVGKNNADEKDTKKAKRSFDESNLSTNEEADKPVESKFVKKLKVYSKNADPSVETLQKDRVSNVDDHLSSNPLMAEEYAPEIFEYIRKLDLKCLPNPKYMDQQKELTWKMREILNEWLVEIHSNFLLMPETLYLAVNIIDRFLSRRSCSLSKFQLTGITALLIASKYEEVMVPSIQNFVYMTDGAFTVEDVCVAERYMLNVLNFDLSYPSPLNFLRKISQAEGYDAQTRTLGKYLTEIYLFDHDLLRYPMSKIAAAAMYLSRRLLRRGPWTPKLVESSGGYEEHELKEIAYIMLHYHNKPLEHKAFFQKYSLKRFLKASIFVHQLVRNDTSVNRTDDDDLQSEPSSSLTNDGH

SEQ ID NO: 16786 - protein, 200 aa, Bdellovibrio bacteriovorus HD100
MKHLFMFFAVLGMFVGLNSEAKTTKAAKKGNTVSTSEVAYLAGGCFWGMEDLLRKLPGVTQTEVGYMGGDTKNANYNIVKTGTTNHAETVKITFNPEKITYQDLLLYFYKIHDPTTTNRQGNDIGTQYRSAIFYTSDKQRDEAEIVRARVDKSGAWKSPVVTQIVKAADFWSAEEYHQDYLQKNPGGYTCHFERKIEFKD

SEQ ID NO: 16787 - protein, 583 aa, Ustilago maydis 521
MAISTSSRLVIHQDVLSWLQHRPFASAFTLLVVYITYKLAIKPILFPSPYRHLPRPERASYILGQRIVEANGLTYIDASTNQRVKVSGPGEVCKHYARTLDTSVFVFPEPFGGETLFISDPFALNAILADVDKFQSDLLRTTIIEFIVGKGIVARFGDAHRKQRKLMAPAFTPAHIKGLTPIFAKYAQLMCHKIALADDESVDFAEYLDCTMLDIIGEAGFGYRCSALERGRGGSELSSAFNSVNQAAIDFGPARAIHLGLSAMLYPRASIWPLSEANRRIAKVNRVMDRITMQIVREAKSRVEKEGEDLGDKKDLLSLLIKSNLDARIGERMTDKEISGQIQTFMFAGYETSSVTTSWTLYFLARHPEVQNKLRNILTATLSERKGIPLEELDVSTLEYDDVWCQDLEYFDWILAETLRLCPPLSGNDRQAMQDSVLPLMTPVKMTNGENVSQLMVKKGSRLTIGIKTVNCDRKLFGDDADEFRPERFAELPQRHAEAKLPPYATYSFFGGPKSCIGSKFALTEMKVIIIAVLSRFQLSPEPGVTIKQHQALIVRPRVETSTGGPAAGMPLRIKRLPHQVSV

SEQ ID NO: 16788 - protein, 606 aa, Bifidobacterium longum DJO10A
MTKPTRTTPESGSTPLSSRVDPILTPAKAEREAAANRSVDTSDTLKQTVTKATPSVSDETLALFGRRNDFATRYHLTRRGKIKRLGQITRIVEQFDVLHGLTPVKMRLMFEALGPTFVKVGQILSMRSEILPQSFCDELAKLRADADPMPYSTVLDVLAAEYGRPADEVFAHIDSKPLGSASLAQVHRATLKTGEDVAIKVQRPGVRETMAQDVSIMRSIAKAATKVIRTSQIVDLKGVVEELWDTFESETDFLIEASNLAEFKRFAARFKYMDCPTVYAELCTEHVVVMEYIDGISVSHPGQLVDAGYDLKEIGTKLVDNYATQILDDGFFHADPHPGNIIIRGGQIVLIDLGMTGRLDQRTRAVLKEMIFAVAKQDSPALAEGLLRFAGTEADPEDYPALLADLDVIVKEFGTVDLAELDIAAFLTALTQMAGRHNIEVPSTVTTVGRALVTLEGLLDEFIPDVNMIEIISDHIATSKSLKNATKDEIKSLGVEGHQALHATLGTMTELKTVARMLTRGQLRVNMELVGSEEPFQLLSDMVNRLTMALIVVGLFVGSSIVYYAGMKPIIFGIPVIGFMGYVVAFALGVWIVIDIYLKGRKTKKR

SEQ ID NO: 16789 - protein, 228 aa, Triticum aestivum
VTLSNKFVQKSRLVPVRNSRDIVDPRVRVMHEFRLEGKLPHPLPRSAKDEWAVSKVFNKELTATNGAMAAAEAGIERVSSFGFIGDFLDSGELPPLMDPPLGGDVDEVIDFKSTSAYATGAHSGLQVKMEQHMPQQPPHMMYSSPYFSLPAANSGDMSPAIRRYCKAEQVSGQTSALSPSRETGLSTDPNAAGCAEISSAATPSSQNQDFLDPFDEYPALKLADIWKY

SEQ ID NO: 16790 - protein, 480 aa, Ehrlichia ruminantium str. Gardel
MLNVFSHIFSILGIFSVLVRYNVLPYTYLLAKRSVRKRPKGEKITMALQKLGPIFIKFGQSISSRGDIIGEEIANHLLFLCDKLPAFSYSDVVRTIEEDFKCAISEIFCEFDEVPVAAASISQVHKAKDIDGNIRAVKILRPKIDQIFEKNIKLMFWIAKIAQHFQSLRRFQLLELVQTFHEICKMEIDLRFEAANADELRGNMQDDSACYIPQVDWNRTTRRVLTLEWVDAIPIYNFYNLENNEALVKNLIFCFCNQVYRDRLFHADMHPGNLMVDTNGKIVIIDFGIVGRLDKATCMYVTEILVGFIKRDYQYVADVHYRAGYVDAKYSSFITACRAIGEPIVGKNTDNISIAALLSQLFKVTADFDMKLQPQLFLLQKTTVLVEGVCRQLSPSINMWKVAELWMEKYAVDKNKYLKKLRKSCLYQTMYDVTSFMKKVDRSLDIINNYDEINHSKYSISRDLMWAIIVIILVIKIIIG

SEQ ID NO: 16791 - protein, 442 aa, Pneumocystis carinii
MSLLNDRQKEELYKALLFYFSKSDFPKTFSAFESELRNKGIIININEENEHKYDKLLEKKWTSVIRLQKKIMDLEARLCAAQTELSTIPSDKNHSIDMASWIPCAPAKHTLTGHRQPITSLAFHSVFTILASASEDSTIKIWDWETGDFERTLKGHTKAVLDIEFNTFSDSSCLVSCSSDLTIKLWDSKNEYKNIKTLYGHDHSISSIKFLPPNGDRIVSVSRDKNIKIWEISTGFCIKTISNAHIDWIRTICPSNDGKLLLSAGNDRIAKIFNTHNGECKLEFQGHEHVIECAIFAPNSAYKFLMQLSGVHLSKNSMGYVATGSRDKTIKLWGCQNGQIIKTLLGHDNWLRALVFHPSGRYLISASDDKTIRCWDLSQSGKCTRIIEEAHSHFINCLCWASESTESTTNGSNETSNNKSLNSKRLAIASGGVDLVIRIWMP

SEQ ID NO: 16792 - protein, 331 aa, Pseudomonas putida
MTTSEIAKYKVAAVQAAPEFLNLDKGVEKAVRLIEEAAKNGAKLIAFPEVWLPGYPWWIWLDSPAWGMQFVQRHFENALLVGSPQWERLCAAAAEHRIFVVLGFCERQDGTLYIAQAIIDDEGRVVSTRRKLKPTHAERTVYGEGDGSHLSVHQTSIGRIGALSCAEHIQPLSKYAMYSQNEQIHVAAWPSFSVYRGAAFQLSPEANLAASQVYALEGGCYVLAPCALVSKEMLEMLADTPQKRQLLLEGGGFAQIFGPDAKPLCEPFPETQEGLLYADVDLGFIGVAKAAYDPTGHYSRPDVVRLLWNSKPATRVHSFQADPTEYNTQGE

SEQ ID NO: 16793 - protein, 548 aa, Buchnera aphidicola (Schizaphis graminum)
MAAKDVKFGNEARIKMLRGVNVLADAVKVTLGPKGRNVVLDKSFGAPSITKDGVSVAREIELEDKFENMGAQMVKEVASKANDAAGDGTTTATLLAQSIVNEGLKAVAAGMNPMDLKRGIDKAVISAVEELKNLSVPCSDSKAITQVGTISANADEKVGALIAEAMEKVGNDGVITVEEGQVFKNEREVVKGMQFDRGYLSPYFINKPETGIVELENPYILMADKKISNVREMLPILESVAKSGKPLLIISEDLEGEALATLVVNSMRGIVKVAAVKAPGFGDRRKAMLQDISILTGGSVISEELAMDLEKSTLEDLGQAKRVVINKDTTTIIGGSGEKQAIQSRIGQIRQEIQEATSDYDKEKLNERLAKLSGGVAVLKVGAATEVEMKEKKARVEDALHATRAAVEEGVVAGGGVALVRVAGKISNLRGHNEDQNVGIRVALRAMEAPLRQIVSNSGEEPSVVTNNVKDGKGNYGYNAATDEYGDMIDFGILDPTKVTRSALQYAASVAGLMITTECMVTDLPREDKSSDVASSPAGGMGGMGGMM

SEQ ID NO: 16794 - protein, 646 aa, Polaromonas sp. JS666
MCASFTSALAARAAPGASRISSITSAASAGCHKPPAPHQTTGPSFMTEMTYTLTLPQMLREQAQRRTASVAIRQKEHGIWKPLTWGHYFQRAQQVGLGLRAAGLSEGGHVGVLSENRVEWVLTQLGAGLVGGVTVGVYPTSPTNEIAYVLAHADAEVVICEDQEQSDKVLDARDLLPQLRKIVMIERKGLAETKARAPALVMGFEELEALGVASLDASHIESVLAHQQLQDTALIIYTSGSTGKPKGAMISYGNIAAMAPGVIERLGLTAQTSHLSYLPLCHVAEQMLTAFVPLYLGSRVDFGESIRTVQEDLREVAPTMFLGVPRIWEKLHSAISIKMHESGGLRQRLFDAGLRACAPFAHKAAHQRSLGEKLCFAFYYGLIFRALQNFIGLRQARVALTGAAPVSPAIVQFFRTLGVPLVEVYGMTESSGMVLGQRNDQVVFGTVGVPTLGVEHRLSSQGELQIRGGVVFKGYYKNAEATASSIVDGWLHTGDVVEERGGSLRIVDRLKDIMITAGGKNLTPSEIENTMKGSLFIKECVIVADARKFVGALIQIDYDAVAQWAESRNVTFTHFRSLVETAEVRELVQAEVDKGNALLAEVSRIRRFHLLTKELDHDDGEVTATMKVRRASIYKTYAAEIEALYR

SEQ ID NO: 16795 - protein, 764 aa, Bordetella bronchiseptica RB50
MTIIHNLGFPRIGAQRELKRAVEAYWAGRQTAEALHETGRALRAAHWQRQADAGVAFVPVGDFAWYDHILEWTTLLGAVPARFGHPEGKPVDLDTLFRMGRGRAPSGKPAAACEMTKWFDTNYHYIVPELTPGQTFRVAREDLFEQVKEAQALGHRVKPVIPGPLTWLWLGKGDAFAQGAGDIGKLQLLDALLPVYGEVLERLAGLGVEWVQIDEPALVLDLPQAWRDAYQAVYAKLAASPVKLLLATYFDGLKDNLATALALPVAGLHVDLVRAPDQLSDVASGLRPGQVLSAGVINGRNIWRTDLDAALAMLAPVREQLQERLWLAPSCSLLHVPVDLAGETELDAELLGWLSFAVQKLDELCLLGKALGGDADPAVQQGLAAQRAALQARRQSPRIHNPAVAQRMAGQAGVSRERAPFGQRIARQQSELRLPAFPTTTIGSFPQTAEIRALRRDWKSGALTDSAYENAIRKEIEEVIRFQEKVGLDVLVHGEPERNDMVEYFGELLAGFAFTKNGWVQSYGSRCVKPPIIFGDVARPAPMTVGWSAYAQSLTDKPVKGMLTGPVTILQWSFVRDDQPREATCRQLALALRDEVVDLEAAGIRVIQIDEPAIREGLPLRRADWRAYLDWAVDCFRLSTAGVGEATQIHTHMCYSEFNDIIESIAAMDADVITIETSRSNMELLKAFEDFHYPNDIGPGVYDIHSPNVPEVDWMVELMRKAAARLPKERLWVNPDCGLKTRAWPETEAALIGMVQAARTLRAA

SEQ ID NO: 16796 - protein, 445 aa, Porphyromonas gingivalis W83
MAIAPNEATPQVDLIYKIEDKPSFKDAVFAAFQHLLAIFVAIITPPLIIAGALDLDLETTSFLVSMALFASGVSTFIQCRRVGPLGAGLLCVQGTSFSFIGPIISAGLAGGLPLIFGCTIAAAPVEMIVSRTFRYLKQIITPLVSGIVVLLIGLSLIKVGIISCGGGNAAMSDGTFGNWQNLSIAALVLVSVLFFNKSKNKYIRMSSIVLGLLVGYVLAYILGRVDLSGMETTKIALLNIPVPFKYGLSLNLSSFIAIGLIYLITAIEATGDITANSMISGEPVEGDKYIKRVSGGVLADGFNSLLAGVFNSFPNSIFAQNNGLIQLTGVASRRVGYYIAAMLIVLGLFPGIGLIFSLMPDPVLGGATLLMFGTVAAAGIRIIAAQDIDRRATMILAISLSLGLGVELMPDILRNISLDLRGIFSSGITTGGLAAIISNMLIRGK

SEQ ID NO: 16797 - protein, 300 aa, Scrippsiella trochoidea
RIGRQVARIAMKDPEVELKLINASYDAEYLAYQMKYDSIHGRYDGTIEADGDSLVIDGHKVALSHTRDPAEIPFTEHGAEYVCESTGVFLTTEKIQPHLKAGAKKVIFSAPAKDDSHTVVMGVNQDTYESSMTAVSCASCTTNGLAPMVKAINDAFGIKRGLMTTIHAMTASQPTVDGSSKKDWRGGRAASGNIIPSSTGAAKAVAKVIPEVKGKLTGMAFRVPTIDVSVVDVTCELEKETSYEEICAEIKRRSEGDMKGFLGYCDEPLVSTDFETSPISSTFDAKAGIMLDPTFVKLVA

SEQ ID NO: 16798 - protein, 243 aa, Triticum aestivum
HYRTSLYKKAGWYRSGIPGISSTHASARRTKLVPRNLVASPMQMNLAFAKSTKWWEKGLQPNMREIESAQDLVDSLANAGDRLVVVDFFSPGCGGCRALHPKICQFAEQNPDVLFLQVNYEEHKSMCYSLHVHVLPFFRFYRGVQGRLCSFSCTNATIKKFRDALAKHNPDRCSIGPTRGLEESELLALAANKDLEFTYTKQPEPVPSGDTEVIAPGSPRLPPPAKPLVRQGSGERTLVSSGR

SEQ ID NO: 16799 - protein, 300 aa, Glycine max
MTVMELKALPLGFRFHPTDEELVRHYLKGKITGQIKNEVEVIPEIDVCKCEPWDLPDKALIRSEDPEWFFFAPKDRKYPNGSRSNRATEAGYWKATGKDRVIKSKGEKKKQHMIGMKKTLVFHRGRAPKGERTGWIMHEYRTTEPEFESGEQGGYVLYRLFQKQLEKTERSIPEEMDRSGYSPTPSRSTPDNMEANEEAITLINKEFPESGLHGCPIELPGTIDTPGTPVTRWLADRNGNSGIDEANVLGMPFHGNVDESPKADMPVGSLAHLIDSQTKNLGSHEFATVSAPMLSLDDVD

SEQ ID NO: 16800 - protein, 307 aa, Scrippsiella trochoidea
RIGRLVFRAAMGNPDVAVKAVNDPFMDLKYMVYQLKYDSVHKQFAGTIAAKEDGGKEFLVVNGVEIQIFHEKDPAAIPWGDAGAEYVCESTGVFTAKEKAELHLKGGAKKVIISAPPKDSVPIYVVGVNHKEYKATDTVVSNASCTTNCLAPLTKVVHEKFGIVEGLMTTVHAMTATQLTVDGPSRGGKDWRGGRCASQNIIPSSTGAAKAVGKVLPAVNGKLTGMAFRVPTPDVSVVDLTCRLEKPAKYDEIVAAVKEYAAGDMKGVLDWTDEEVVSTDFVSCKSSSIFDVGAGISLNDTFVKLVT

SEQ ID NO: 16801 - protein, 496 aa, Zea mays
MFSHGADSAHDAGAVGVSSGGATVPTRFVWPYGGKRVFVSGSFTRWSEHLPMSPIEGCPTVFQAICSLSPGIHEYKFFVDGEWRHDERQPTISGEFGIVNTLYLTREYNQINTLSSPSTPGSRMNMDVDNENFQRTVTLSDGTVSEGTLRVSEAAIQISRCRVSEYLSLHTCYDLLPDSGKVIALDINLPVKQSFHILHEQGIPVAPLWDSFRGQFVGLLSPLDFILILRELETHGSNLTEEQLETHTISAWKEAKRQTNGRNDGQWRPQQHLVHATPYESLRDIAVKLLQNGISTVPVIYSSSSDGSFPQLLHLASLSGILKCICRYFKNSTGNLPILNQPVCSIPLGSWVPKIGDLNSRPLAMLRPNASLSSALNMLVQAGVSSIPIVDDNDSLLDTYSRSDITALAKDKVYTHVRLDEMTIHQALQLGQDANTPFGFFNGQRCQMCLRSDPLLKVMERLANPGVRRVFIVEAGSKRVEGIISLSDIFKFLLSL

SEQ ID NO: 16802 - protein, 136 aa, Methanosarcina acetivorans C2A
MVLKNIKYAVKNIPKKRVTRLCPEVESPLSDRFRGLQILDKSKCIGCGICANTCPNNAIKIVKAPIAPGSSKQRWFPEIDIGHCLFCGLCIDQCPKGALSSGKEYTKGMVKWAHKDLLMTPEKLAREVDIKEGDEK

SEQ ID NO: 16803 - protein, 170 aa, Zea mays
  misc_feature (113)..(113): Xaa can be any naturally occurring amino acid
  misc_feature (137)..(137): Xaa can be any naturally occurring amino acid
  unsure (1)..(170): unsure at all Xaa locations
MEGGASDEVAESSKKIGRGKIEIKRIENTTNRQVTFCKRRNGLLKKAYELSVLCDAEVALVIFSTRGRLYEYANNSVRGTIERYKKACSDAVNPPSVTEANTQYYQQESSKLXRRQIRDIQNLNRHILGESLGSLEXSRELKNLEGRLEKGIGRVRSKKHEMLVAEIEYM

SEQ ID NO: 16804 - protein, 346 aa, Debaryomyces hansenii CBS767
MVVHNPNNWHWVDKNCIDWTRQYFNENLINISAAEGEKDVFVNTISSVEGDVEVCQRKGKVISLFDLKVVLEIKGHSISQSKKEGDFSGSITVPELAYDSTEDDLQFDISIYNEDADSEKMRPLIKKELLPKLRDSLIKFGRDLITTHSSDIQLSSDKVNSAYTKANQENAQNTPAAAKKASAPTPAAQKSTSSGAAAAKSASNSSVPRYNTSTLHLEPTFNTTAEQLYITLLDQQRVAAWSRSNPSMGSFPPEEGSEFSLFGGSISGKFLKLVPNEKIVQLWRLEDWKSGHYAQLDLQLIQGSGETKMIVKWSGIPVGEEDRVRGNFEDYYIRSIKITFGFGAVL

SEQ ID NO: 16805 - protein, 325 aa, Vitis vinifera
GGGNFGVARLVSDKRTRELFAVKFIERGQKIDEHVQREIMNHRSLMHPNIVRFKEVLLTPTHLAIVMEYAAGGELFGRICNAGRFSEDEARFFFQQLISGVSYCHSMRICHRDLKLENTLLDGSTAPRVKICDFGYSKSSVLHSQPKSTVGTPAYIAPEVLSRKEYDGKLSDVWSCGVTLYVMLVGAYPFEDPDDPRNFRKTIGRILSVHYSIPDYVRVSIECRHLLSRVFVANPDKRITIPEIKTHPWFLKNLPIEMMDGGSWQKNDVNNPSQSVEEILSIIQEARKTTGVRKAGGPFMEGSMDLDDIDADEDIETSGDFVCPL

SEQ ID NO: 16806 - protein, 311 aa, Treponema pallidum subsp. pallidum str. Nichols
MLSIWYVPFEQKEYSVRQMQFRHDENTLTAYLNDLKRIPLMNEKEEYACACAAYAGDAQAKNALVRANVRFVISVARHYRTCGLPLADLISEGNIGLLTAAERFNPARGCRFISYAACWIRQSILKALNEKARIIRLPVSRIRAAKSTYEYIPPVTSVNVGISKTQGGNRYGKRRATMCRAVPTVEEVHIWHTPLSLDAPLGASGSRGESGDVDGLRIGDCVPDDLYAQPEEHMLACALQADIAKILRLLPARDAQVIRYRFGLGGYERRSLQEIGEIFQITKERVRQIEKKALLRIRSCARQHRLDSYIA

SEQ ID NO: 16807 - protein, 287 aa, Cytophaga hutchinsonii
MRQLKISKQITNRESQSLDKYLQEIGKVDLLTPDEEVDLAKRIREGDQLALEKLTKANLRFVVSVAKQYQNQGLSLGDLINEGNLGLIKAAQRFDETRGFKFISYAVWWIRQSILQALAEQSRIVRLPLNRVGSLNKISKTFSELEQKYEREPSPDELAEVLEVSTAEVVDTLKISGRHVSMDAPFVQGEENSLLDVLENSSESAPDSSLMNDSLRREVQRALSTLTQREADVISLYFGLNGEHSMTLEEIGEKFNLTRERVRQIKEKAIRRLRHTSRSKALKPYLG

SEQ ID NO: 16808 - protein, 88 aa, Treponema pallidum subsp. pallidum str. Nichols
MKIIPLADRVLVKTDKSETKTASGIIIPDTAQEKMQSGTVIAVGSDSEKIKVSVGQRVMHDKYAGNPVKIDGEEHLLLKGADILAVIE

SEQ ID NO: 16809 - protein, 698 aa, Debaryomyces hansenii CBS767
MVALTVPVGEAKAGETAPRRKSSQKAQALERPTDSKATTLVDFFEECVKRQGKRNAMGWREFIDTHVETKKVTKKVDGKDTQVNKDWVYYEYAKYSYIHYPDLLELVKDYSRGLVKLGLKPEQVDKLHIYAQTSQKWMQTFLAAQFQGIPTVTAYDTLGESGLVHSLLQTELRAIFTDNTLLPLLIRPLKEAKDVKFIIHFDDIDPNDKRMGGKYYSDAIDAKEKILKNRPDIEFISFNECVKLGKANKDIELKSPAPEDLSCIMYTSGSTGPPKGVVLSQGNILAGIAGVSTNADRSLVSNNDRIIAFLPLAHIFELTFELAAFWWGGCLGYANVKTLTDTSCRNCQSDLVEFKPHIMVGVAAVWESVRKGVLAKIRKESIFVQKIFWSAYHAKAAFKAYHIPGAGIFDVIFKKVKAATGGELRYVLNGGSPISKDAQVFVSNLIAPMLLGYGLTETCANTTIVEHKRFEYGSVGTLTGAITAKLIDVPDAGYFAKNNQGEILVTGPCVTKEYYKNEKETVDSFTPDGWFKTGDIGEWAPNGALRIIDRKKNLVKTLNGEYIALEKLESVYRSNPVVLNLCAYADQSKVKPIAIVLPNEANLKSFLADEKIYSQLDLDSKELAHLCDEKKVINAVTKHLVQTGKSQGLKGIELIQTVVLLDDEWTPQNGFVTSAQKLQRKKILASCQDKVDEAYKNS

SEQ ID NO: 16810 - protein, 175 aa, Synechococcus elongatus PCC 7942
MTAAAPTLSRRRLLLGLVSAGAGAGGFLFWRQSRSPLSSTDAVYPMQLSEAEWQQRLSPEAYAVLREAATERPFTSDLLAEKRVGQYCCAGCEQPLFESAAKYESGTGWPSFREAIAGSLGFQTDYKLVVPRTEYHCSRCGGHQGHVFNDGPAPTGKRFCNNGVAIAFVPAADQG

SEQ ID NO: 16811 - protein, 408 aa, Rhodopseudomonas palustris CGA009
MRRVVVTGMGIVSSIGNNTQEVLASLHDAKSGISRAEKHAELGFRSQVQGAPTLNPADVVDRRAMRFLGEGAAWNHVAMEQAIADSGLEESEISNIRTGIVMGSGGPSARTIVEAADITRTKGPKRVGPFAVPKAMSSTASATLATWFKIKGVNYSISSACATSNHCIGNAYELIQWGKQDVMFAGGCEELDWSLSVLFDAMGAMSSKYNDTPATASRPYDVNRDGFVIAGGAGVLVLEELEHAKARGAKIYGEIIGYGATSDGYDMVAPSGEGAERCMKMALSTTGGIKIDYINPHATSTPAGDPPEMNAIRAVFGIGDKCPPISATKALTGHSLGATGVQEAIYSLLMMQNGFICESAHITELDPAFADMPIVRKRVDNAKLGAVLSNSFGFGGTNATLVFKRLEA

SEQ ID NO: 16812 - protein, 281 aa, Oryza sativa
  misc_feature (12)..(12): Xaa can be any naturally occurring amino acid
  unsure (1)..(281): unsure at all Xaa locations
IRERYYQKRLIXPGKTMKKINAKKKKKVVPKLEDDSKTDKYSDQQSPSKQTDIPDELETGEKTIRKSTRTSVIVRQAEREAIRAEKEATMKPVIKKKKEGEEKRMTQEEMLLEAAETEIINLRNLERVLAREEEVKKKAVVQKAVYEGPTIRFCSRDGESRLEFINGASFGSELCTTSAPYPEKSICAVTGLPAKYRDPKTGLPYATKEAFKIIRESFLKEEADRKRPNLANMGELFESITGEYSTPKKRRIEARSPSISSDQRHGGRFRRIPALDLLDED

SEQ ID NO: 16813 - protein, 393 aa, Photobacterium profundum SS9
MTLGKFKLNANVLELRDFSINTRRHLHMIPELSGEEVETSTYCKSLMVDYGYQVTSYDGYTGFIADLVIDSSLKTVAFRADMDALEMDDLTCNEHSSTNKGRAHNCGHDTHMTIALTAANYLANNQEELRHNVRFIFQMAEEDMRVDGANKMVELGCMDGVNEVYALHNDAAQECGTVLVNNGIMSSYGCAWTLDIQGVSAHGSTPHKGLDAIREGARIVEDMDYIVAKKTNPFSPAVFVCGMFNGGTIPNAVAANVQARGTIRSMDPETDQVLKNSFSSLVAQSELRGYTTSMTHCGYPAIINHQFAYNRVVQAASQTVPSELLNANCTPMTGSEDFSLMIEAIDDKRGAMFFLGSGNKEKGICNYLHSNPYFVDEDFLLVGAQIFINLATE

SEQ ID NO: 16814 - protein, 491 aa, Mesorhizobium sp. BNC1
MGQLPADLFDGGYHQWRPPAFQTMGDSSVKRLVVVSNRVADLTRTSQAGGLAVGLADSLRQRGGVWMGWDGQTLKYEEEPEPRIRKIGEVTQATIPLTEQDYAEYYLGFANSVLWPLFHYRLDLVEYKTAFLEGYRRVNAKFANALVSILRDDDLIWIHDYHLIPLAAELRERGCKQRIGFFLHIPFPPPEILAAVPRHRWLVECLLKHDVIGFQTHTDLNNLLRYVEDHLGCEILADGRIRTREREVIAGFYPIGIDVDAFVGMAEKPNDEVQIETKRREILGRRQIIGVDRLDYTKGLPDRLRAFARLLELYPEMRKSVALMQIATPTREEVEAYVDIRKELEALSGAINGRFADFNWTPVRYIHGTVPRDALAALYRASQVGFVTPLRDGMNLVAKEYVAAQSMDDPGVLVLSKFAGAAEDLHEALIVNPYDVDDMARNLCRALTMPLDERQERQRALMERIRKHDSAHWLNSFMDALEKGETKEDEE

SEQ ID NO: 16815 - protein, 827 aa, Mycobacterium leprae
MSTITKQEKQLARRVDDLTANDPQFAAAKPDPAVAAALAQPGLRLPQIIQTALDGYAERPALGQRVAEFTKDPKTGRTSMELLPSFETITYRQLGDRVGALARAWRHDLLHAGYRVCVLGFNSVDYAIIDMALGVIGAVAVPLQTSAAITQLQSIVTETEPSMIATSVNQLPDTVELILSGQAPAKLVVFDYHPEVDEQHDAVATARARLADSSVVVESLTEVLGRGKTLPATPIPVADDSADPLALLIYTSGSTGAPKGAMYLQSNVGKMWRRSDGNWFGPTVASITLNFMPMSHVMGRGILYGTLGNGGTAYFAARSDLSTLLEDLKLVRPTELNFVPRIWETLYDESKRAVDRRLANSGSADRAAIKAEVMDEQRQSLLGGRYIAAMTGSAPTSPELKHGVESLLEMHLLEGYGSTEAGMVLFDGEVQRPPVIDYKLVDVPDLGYFSTDQPYPRGELLLKTQNMFPGYYKRPEVTATVFDSDGYYQTGDIVAEVGPDRLVYVDRRNNVLKLAQGQFVTVAKLEAAFSNSPLVRQIYIYGNSAHPYLLAVVVPTEDALATNDIEVLKPLIIDSLQKVAKEADLQSYEVPRDLIVETTPFSLENGLLTGIRKLAWPKLKQHYGARLEQLYADLVEGQANALHVLKQSVANAPVLQTVSRAVGTILGVATTDLPSNAHFTDLGGDSLSALTFGSLLRELFDIDVPVGVIVSPVNNLVAIADYIERERQGTKRPTFIAIHGRDAGKVHASDLTLDKFIDVSTLTAAPVLAATRHRGAHRPVDRRYRLPGALLGPEMARTDGPGRREGNRSGKSQVQRGRSGPARQDLR

SEQ ID NO: 16816 - protein, 232 aa, Oryza sativa
  misc_feature (198)..(198): Xaa can be any naturally occurring amino acid
  unsure (1)..(232): unsure at all Xaa locations
MAAALVRRSGAGLARGRGMCSATAAERAALTSEELMRMERERSAHNYHPIPVVFSKGEGSHILDPEGNKYIDFLSAYSAVNQGHCHPKVLRALKDQAERLTLSSRAFYNDKFPIFAEYLTSMFGYEMMLPMNTGAEGVETAIKLVRKWGYEKKKIPKNEALIVSCCGCFHGRTLGVISMSCDNDATRGFGPLVPGHLXVDFGDIDGLEKIFKEHGERICGFLFEPIPGEAGV

SEQ ID NO: 16817 - protein, 1328 aa, Trichodesmium erythraeum IMS101
MLFNPFLRKLRFLLLLLLVLLVVNLGHVRASEESPPADWQLQGILAALDDPDPDVWVKALKKMSEYDLKPVEISSERVEQIGKLLSHENWHVRSAAARAVGEMGAEAKVLIPQLLQLFRDENSGVRSAAARAVGEMGAEAKVLIPQLLQLFRDENSYVREAAVRAVGEMGAEAKVLIPQLLQLFRDESSGVRSAAARAVGEMGAEAKVLIPQLLQLFRDEDSYVRSAAARAVGEMGAEAKVLIPQLLQLFRDESSGVRSAAARAVGEMGAEAKVLIPQLLQLFRDESSYVRSAAARAVGEMGAEAKVLIPQLLQLFRDENSYVREAAVRAVGEMGAEAKDLIPQLLQLFRDENWYVRSAAVRAVGEMGAEAKDLIPQLQQLFRDENPYVREAAARAVGEMGAEAKVLIPQLQQLFRDENSGVRSAAARAVGEMGAEAKVLIPQLQQLFRDENSGVRSAAARAVGEMGAEAKVLIPQLLQLFRDESSYVREAAATAVGEMGAEAKDLIPQLQQLLMDENSDVREKAARAVGKIGKLNTQQILPILNAAHRNRDKEATLRFLAYFVSGGEYDALTLTKWLGSPEQYPYQIDKFKNERPISHEEGKKVLELFAEIWKPSQSLEYLPFELERQINIVVEKVDWQPEDLPLLKKHYNNLKDEDINAKIVALQGIQWFSYLWKFLLLHALTWLILLCLYAKSPEIQTLFWHPQIRKIAGLGYIGLLLTWIPSLRRLLFSPFQPILIADADLDSFNPQDYFSDSNVCLQNTHNLQPIKTTIAKIQSPIVLQGESGLGKSMFLRHWAKTRKNLVVYLPASKCAQGAIAAIQSKIPISQTDPKFLKRLIYNNALEICIDGLNEVTPDTRTKISYFVESHFRGHILLATQPLYWIPPSTTKTYVLQPLKREQIRQFLQTRQFNPSAEPSISRSEYEEACEEYLGKTFNSQKQSEEEQKTVRRLLSNPMDLTIVAQILAQGKTPDLLNLQQQQYKVMAAEYKEVNFDSFPLTEFAETTYQMRLNDEINIPSEWKKELQTMEKYKMVLRRQKYVENDVGSQWYFRHDKIQEYFIVQTFIGEENQKLEEHIDDPRFRGVYLLLATLLPYLEAWSLREKLLQNAAETKDHVVSDQFIQRLNSRSELSKNGENVYLKELIEVMKLLIAEKNNNINKELTELTKLFITEKNNNINIEVNPNIEANPNTRNNSMTDNSESKYNFSQARVGNVVETNNGSMGNVVEKAESGSQVVGTQNNYGSQEKQTLAEAAAEIQKLLKQLELNNPAATDAEKEAFVTASIPPNNRQRFVGALQALGKEALKELLDNPYINVGVATVEGWQNPK

SEQ ID NO: 16818 - protein, 586 aa, Bacillus thuringiensis serovar konkukian str. 97-27
MQGIKRYLQFVKPYRWLIAITIMIGLVKFGIPLIMPWLLKYIIDDVIQGAGSLQDKTSQLVTAIGIAFFIFAVLRPPIEYYRQYFAQRIANTILYDLRKHIFGHLQKLSLRYYSNTKTGEIISRVIHDVEQTKDFVITGLMNVWLDTATIAIAIIVMFSMNIKLTFVALLILPIYVVAVKYFFGRLRKLTKERSQALATMQGYLHERIQGMQVTRSFALEEYEGKQFEKRNNEFLTKALTHTSWTARTFSAVNTLTDLGPLLVIGFAAYEVIQGQLTLGTMVAFVGYMDSLYSPLRRLVNSSTTLTQSFASMDRVFELLDEKYDIVNVPSAVQTKKLNGEVIFDNVSFRYNADEKEILHNLSLTMLPGEKVALVGASGGGKSSLASLIPRFYDVSSGAVYVDGIDVRKYDMRNLRSHIGIVLQDNLLFSDTIGANILYGNPKATEEEVIAAAKAAQIHDFIIELPDGYDTVVGERGVKLSGGQRQRVAIARVFLKNPSLLILDEATSALDLENERYIQEALQTLAADRTTIIIAHRLATITHVDTIIYIEDGEIKETGSHEELMKKRGYYYNLYQLQHITETAPLA

SEQ ID NO: 16819 - protein, 475 aa, Listeria monocytogenes str. 4b F2365
MATEYDVVILGGGTGGYVAAIQAAKNGQKVAVVEKGKVGGTCLHRGCIPTKALLRSAEVLQTVKKASEFGISVEGTAGINFLQAQERKQAIVDQLEKGIHQLFKQGKIDLFVGTGTILGPSIFSPTAGTVSVEFEDGSENEMLIPKNLIIATGSKPRTLNGLSIDEENVLSSDGALNLETLPKSIIIVGGGVIGMEWASMMHDFGVEVTVLEYADRILPTEDKEVAKELARLYKKKKLIMHTSAEVQAASYKKTDTGVEIKAIIKGEEQTFAADKILVSVGRSANTENIGLQNTDIATENGFIQVNDFYQTKESHIYAIGDCIPTIQLAHVAMEEGTIAANHIAGKVAEKLDYDLVPRCIYTSTEIASVGITEEQAKERGYEVKKGKFFFRGIGKALVYGESDGFIKIIADKKTDDILGVSMIGPHVTDMISEAALAQVLNATPWEVGNTIHPHPTLSESFREAALAVDGNAIHG

SEQ ID NO: 16820 - protein, 331 aa, Listeria monocytogenes str. 4b F2365
MTLKEAGLTEDKLIKMYKTMLMARRLDERMWLLNRSGKIPFTISGQGQETAQIGAAFAFDLDKDYALPYYRDLAVVLAFGMTAKDIMLSAFAKAEDPNSGGRQMPAHFGQKSNRIVTQSSPVTTQFPHAAGIGLAAKMAGDEIAIYASTGEGSSNQGDFHEGINFASVHKLPVVFVIHNNQYAISVPASKQYAAEKLSDRAIGYGIPGERVDGTNMGEVYAAFKRAADRARNGEGPTLIETVSYRFTPHSSDDDDSSYRSREEVDEAKGKDPLKIFQAELLEEGYLTEEKIAEIEKSIAKEVNEATDYAESAAYAEPESSLLYVYDEEANS

SEQ ID NO: 16821 - protein, 211 aa, Brucella melitensis 16M
MPMKNDHSPDQRTLSELFEHNRQWAAEKQEKDPEYFSRLSSSQRPEFLWIGCSDSRVPANVVTGLQPGEVFVHRADLNLLSVLEFAVGVLEIKHIIVCGHYGCGGVRAAMDGYGHGIIDNWLQPIRDIAQANQAELDTIENTQDRLDRLCELSVSSQVESLSRTPVLQSAWKDGKDIIVHGWMYNLKDGLLRDIGCDCTRNALQFACQPAE

SEQ ID NO: 16822 - protein, 198 aa, Oryza sativa
MLAVSPAMCPDIEDRAAVAGDAGMEVVGMSSDDMDQFDFSVDDIDFGDFFLRLEDGDVLPDLEVDPAEIFTDFEAIATSGGEGVQDQEVPTVELLAPADDVGVQEAESRHKSSSKSSHGKNKAKVDWTPELHRRFVQAVEQLGIDKAVPSRILEIMGIDSLTRHNIASHLQKYRSHRKHMIAREAEAASWTQRRQIYA

SEQ ID NO: 16823 - protein, 258 aa, Oryza sativa
  misc_feature (181)..(181): Xaa can be any naturally occurring amino acid
  unsure (1)..(258): unsure at all Xaa locations
MDGGSGGPYTSRTAEEVFRDFRGRRAGMIKALTTDVEKFYQLCDPEKENLCLYGYPNETWEVTLPAEEVPPEIPEPALGINFARDGMNEKDWLALVAVHSDSWLLAVAFYFAARFGFDKEARRRLFNMINNLPTIFEVVTGAAKKQTKEKAPNSTNKRRQAQLKPATRTRVSFGCSTTTCXTKDDDESGDEYADEEEEERDNTLCGSCGTNDGKDEFWICCDSCERWYHGKCVKITPARAEHIKHYKCPDCGNKRARA

SEQ ID NO: 16824 - protein, 515 aa, Porphyromonas gingivalis W83
MAQQEDLFKKIVSHCKEYGFVFPSSEIYDGLAAVYDYAQYGSELKNNIKRYWWESMTLLHDNVVGIDSAIFMHPSIWKASGHVDAFNDPLIDNKDSKKRYRADVLVEDHLAKIDEKIAKEVAKAAKRFGEAFDEAQFRATNARVIEYQQKRDQIHERFATALNDNNLEEIRQIILDCEIVCPISGTRNWTEVRQFNLMFATEMGSTADGAMKVYLRPETAQGIFVNFLNVQKTGRMKIPFGICQIGKAFRNEIVARQFIFRMREFEQMEMQFFVRPGEELQWFEKWKNLRMQWHRALGFGDDKYRFHDHDKLAHYANAATDIEFEMPFGFKEVEGIHSRTDFDLSRHEEFSGKKLQYFDPEQNKSYVPYVVETSIGLDRMFLTILFGSYCEEETSNGEMRVVLKLPAALAPVKLAVLPLVRKDGLDAKAREIVHDLRFDFACQYDEKDSIGKRYRRQDAIGTPFCITVDHQSLEDNTVTIRYRDTMEQERVEISRLNAIISEYVSLKSLLKKIDL

SEQ ID NO: 16825 - protein, 384 aa, Trifolium repens
EHGIQPDGQMPSDKTVGGGDDAFNTFFSETGAGKHVPRAVFVDLEPTVIDEVRTGTYRQLFHPEQLISGKEDAANNFARGHYTIGKEIVDLCLDRIRKLADNCTGLQGFLVFNAVGGGTGSGLGSLLLERLSVDYGKKSKLGFTVYPSPQVSTSVVEPYNSVLSTHSLLEHTDVAVLLDNEAIYDICRRSLDIERPTYTNLNRLVSQVISSLTASLRFDGALNVDVTEFQTNLVPYPRIHFMLSSYAPVISAEKAYHEQLSVAEITNSAFEPSSMMAKCDPRHGKYMACCLMYRGDVVPKDVNAAVATIKTKRTIQFVDWCPTGFKCGINYQPPTVVPGGDLAKVQRAVCMISNSTSVAEVFSRIDHKFDLMYAKRAFVHWYVG

SEQ ID NO: 16826 - protein, 420 aa, Synechocystis sp. PCC 6803 [sequence omitted]

SEQ ID NO: 16827 - protein, 370 aa, Oryza sativa
MGRRPVRCYRQIKNKPYPKSRYCRGVPDPKIRIFDVGQKKRSADDFPLCVHLVSWEKENVSSEALEAARIACNKYMAKHAGKDAFHLRVCAHPYHVLRINKMLSCAGADRLQTGMRGAFGKPTGTCARVRIGQVLLSVRCRDANAAHAQEALRRAKFKFPGRQRVIFSAKWGFTRFKRDEYLKLKSEGRIVPDGVNAKMKIIPVACLEDNYAYLIVDESTKSAAAVDPVEPEKVLAAAAEVGVRIDCVLTTHHHWDHAGGNEKMAQSVPGIKVYGGSLDNVKGCTDQYTVKNLKFILTVEPDNEKVKQKLEWAQKQREANQPTIPSTIGEEFETNTFMRVDLPEIQAKFGAKSPVEALREVRKTKDNWKS

SEQ ID NO: 16828 - protein, 612 aa, Nocardia farcinica IFM 10152
MAATTLLRLATAGSVDDGKSTLIGRLLYDSKSLFSDQLAAVERTSRDRGDAYPDLALLTDGLRAEREQGITIDVAHRYFATPRRKFIIADTPGHIQYTRNMVTGASTADVALILVDARKGVVEQTRRHAFLASLLGIGHLVLCVNKMDLVDWSGQRFGEIRDEFAGFATKLDVTDLSFIPVSALQGDNIVHRGANMPWYEGTPLLHHLEEVHIASDRNLIDARFPVQYVTRSHAKDFRGYAGTVAGGVFKPGDEVTVLPSGLSTTVAAIWGPGGKPVTEAFPPQAVTVQLSDQLDVSRGDLICRPANRPQVGRDIDAMVCWFAEDTQLTPGARYTLQHTTRSVTAEIRRLDYRLDINTLHRDDSAQSLSLNEIGRIQLHTRQPLLFDPYRRNRTTGSFILVDDATGNTVAAGMISGPTLPTTQVVWHSTAVGRQERPTRGATVWLTGLSGSGKSTVAVELERRLVAEGRPAFLLDGDNLRHGLNADLSFSAADRAENVRRVGEVARLFADAGVIAVVSLISPYRADRERARAVHEAAGLPFVEVFVDTPLEICESRDPKGMYAKARAGEISGFTGIDDPYEAPESPALVLRPEDGDPAAMARAILTLLEDLA

SEQ ID NO: 16829 - protein, 401 aa, Azoarcus sp. EbN1
MKNAYICDAIRTPFGRYGGTLSSVRADDLAALPIRALVERNPDVDWAAVDDVIYGCANQAGEDNRNVARMAALLAGLPQDVPGTTVNRLCGSSLDAVGMAARAIKSGEADLMIAGGVESMSRAPFVMGKADTAFSRSAKIEDTTIGWRFVNPLMKAQYGIDSMPETAENVATDFNISRADQDALALRSQQRWAAANEAGLFANEIVPVAIPQKKGEPKLFTTDEHPRPETTLETLAKLKGVVRPDGTVTAGNASGVNDGACAVLLASEAAVERYRLKARARVVAMAAAGLAPRIMGFGPSPASKKVLAKAGLTLADMDVIELNEAFAAQALAVTRDLGLADDAAHVNPNGGAIAMGHPLGASGARLVTAALNQLERTGGRYALCTMCIGVGQGIALVIERV

SEQ ID NO: 16830 - protein, 595 aa, Magnaporthe grisea 70-15
MGIMQGMASRAAGDVKMLAAALSQDATNGKSKLGTFMAPMLPFFLANNAAMQHGKPWGDRTVEGTNPYRQAPTTGSIRSYDWTISRGTIAPDGYEVPALLINGQYPGPMIEANWGDTVQVTVHNNITGPEEGTAMHWHGLLQRGTPYQDGVPGVTQCAIAPGQSYTYSFLADQFGSSWYHSHYSAQYSSGVVGPMVFYGPGRQFYDVDIGPVMLSDWNHQNYQDIIEKMLQPAAKGGNLKVTSDNNLINGKGVFDCSTMAKGDKTRCTPNAGYSKFKFQSGKVHRLRLMNTGSDGIQRFSIDEHMMTVIANDYVPIRPYQTKVVTLGVGQRADVLVKADQAPGSGFWMRSTLAACSEARQPNALAVVYYDEDGDTTPASKPWDVADPKTCANDDISESVPIFRMPVAQPTTTQEFVAEIFTNSSGVSLFKFGGVSARVDMNAPPLLLANVGNTSFPAEWNVHNFGGSKVVRLVVTNKTPGAHPMHLHGANVQVLAEGSGAWDGSTITNSDNPIRRDTQLVRPNGHVVLQFDADNAGVWPFHCHIAWHASAGYFSSVLTQPDLVKGMSMPMTIAQTCRDWAAYTQTNIPDQIDSGV

SEQ ID NO: 16831 - protein, 258 aa, Mesorhizobium sp. BNC1
MAGEAEPLSSLDCSALKPNSIAIFLDFDGTLADIAERPDEVSVPPTTREALARLLKSTDGAIAIITGRPIEVIDHFLAPLLLPVAGVHGMERRTAGGQHVGSVIDEEELSAVRAKLQAFADSHEGLLLELKHGSLALHYRQRPDLEAASIAAVHAAANDSKGLHLLHGKMVLEVKGGKATKADALTAFMQEDPFRGRTPLFAGDDVTDEDAFNQIAHINGFSIKIGGGKTSARFRADEASSFREWLERLAARFESRDY

SEQ ID NO: 16832 - protein, 412 aa, Zea mays
  misc_feature (184)..(184): Xaa can be any naturally occurring amino acid
  unsure (1)..(412): unsure at all Xaa locations
MGNCGTREENAVVAAHAQVQQLHLLQHSAKNALADRKHNRTFSDISDPSTPGKIEDTKDISIYNNVIAFTLFELETITKSFRAAYVLGEGGFGTVYKGYIDENVRVGLKSLPVAVKVLNKDGHQGHRDWLTEVNFLGQLRHPNLVKLIGYCCEDDHRLLVYEFMFRGSLENHLFRKTASPLPWXTRMSIALGAAQGLACLHNAQRPVIYRDFKTSNILLDSDYTAKLSDFGLAKAGPEGDQTHVSTRVMGTYGYAAPEYVMTGHLTARSDVYSFGVVLLELLTGRKSIDKSRPSREQSLVDWALPKLNDKRRLLQIIDPRLEGQYSARAAHKACSLAFYCLSQNPKARPLMSDVVETLEPLQGSGGGDGRGQPSGLPDYRGRRRITGNSVHFRAIPNPKCSPAVPATACRVR

SEQ ID NO: 16833 - protein, 268 aa, Triticum aestivum
  misc_feature (209)..(209): Xaa can be any naturally occurring amino acid
  misc_feature (218)..(218): Xaa can be any naturally occurring amino acid
  misc_feature (228)..(228): Xaa can be any naturally occurring amino acid
  misc_feature (238)..(238): Xaa can be any naturally occurring amino acid
  misc_feature (248)..(248): Xaa can be any naturally occurring amino acid
  misc_feature (255)..(255): Xaa can be any naturally occurring amino acid
  misc_feature (257)..(258): Xaa can be any naturally occurring amino acid
  misc_feature (260)..(260): Xaa can be any naturally occurring amino acid
  misc_feature (262)..(262): Xaa can be any naturally occurring amino acid
  unsure (1)..(268): unsure at all Xaa locations
MQIFVKTLTGKTITLEVESSDTIDNVKAKIQDKEGIPPDQQRLIFAGKQLEDGRTLADYNIQKESTLHLVLRLRGGMQIFVKTLTGKTITLEVESSDTIDNVKAKIQDKEGIPPDQQRLIFAGKQLEDGRTLADYNIQKESTLHLVLRLRGGMQIFVKTLTGKTITLEVESSDTIDNVKAKIQDKEGIPPDQQRLIFAGKQLEDGRTLXADYNIQKEXTLHLVLRLRXGMQIFGKTLXGKNITLEVEXSDTIDNXRXXSXEXEGISPD

SEQ ID NO: 16834 - protein, 676 aa, Methanosarcina mazei Go1
MDMLIYLTPICALIGLIFAGISYKNVRNEGEGNELIKKITAAIHGGAMVYLNRQYRAIAVFVVFIAIVLALVLPNGVLTAACFVFGAVLSATAGYAGMLTATIANGRTTNAATRGIGPAFKVSFASGTVMGMSVVGLGLFGLSLSFIILGNIYTDMDLFTLLNIIAGFSFGASSIALFARVGGGIFTKAADVGADLVGKVEAGIPEDDPRNPAVIADNVGDNVGDIAGMGADLYESYVGSIIATMLLAASTAAATFPGIPVMNVVMVPLVIAAVGILASVIGTFFVRTNKTESSAIHMAFNMGLIAAIVLTVIASYVVTGHLLGGYGLNVFFSTVAGLVAGFLIGQITEHYTSYDKKPTLTVAHSCQTGSATNVITGFAKGMESTLWPAVIISIAIYIAFQLAGLYGIAIAAVGMLATLGISLSVDAYGPVADNAGGIAEMSHQKKEVRQITDTLDAVGNTTAAMGKGFAIGSAALTALSLFASYAIAVGLTSIDVMNPNVFIGLIIGAMLPFLFSSMTILAVGNAAGEVVVEVRRQFKEIKGLMEGKADPDYSKCITISTHSALKEMIPPGILAVIAPILVGLVLGAGALGGLLAGSVVSGFMLAITMSNAGGSWDNAKKFIELGNFGGKGSDAHKAGVTGDTVGDPFKDTAGPAINILIKLMSIVALVFAPLFI

SEQ ID NO: 16835 - protein, 149 aa, Glycine max
QICQFAEMNPDVQFLQVNYEEHKSMCYSLNVHVLPFFRFYRGAHGRLCSFSCTNATIKKFKDALAKHTPDRCSLGPTIGLEEKELEALAANKDLSFTYSPKPLQPSHENEELATETASAPALGSGSLPSPSMTLNAVASNERTLTTSGR

SEQ ID NO: 16836 - protein, 1038 aa, Trichodesmium erythraeum IMS101
MSSLLHSKEITLEPGFKNPKMTASDLFLHNRIKIVENLWESVLRQECGQELVDILQKMRSGHSPEGQASDFLGSEIEQLIEKLELKDAIRAARAFALYFQLINIVEQHYEQKIQQLAYSHNNSLEKLISKDDIAKDHDTRSLRVESIPVWNDNRIKHEGEGTFHYLFPLLQTLNVPSQLIQRLINNLDIRLVFTAHPTEIVRRTIRTKQRRIAKILQQLDQVNESLSESHVDEEQVNSLVSSWKIESLKEQLTEEILLWWRTDELHQFKPSVLDEVETTLHYFNEVLFDATPELHRRFKQALHSSFPYLKPPSYNFCKFGSWVGSDRDGNPFCTPAVTWQTACYQRQIVLEKYLNAIDRLKELLSLSLHWSDVLPELLDSLDRDHIQMSEVYDQWAIRYRQEPYRLKLSYIKKRLENTRDRNARLYNGDEVQRQKKEVLSQRQKQVLSQYQETKSIYHSSADFLAELQLIQRNLKETGLSCSDLENLISQVEIFGFNLARLDIRQESSVHEAAIQEITEYLQILPKSYIEMSEAERTEWLSTELPTRRPLIPTELPFSEKTCEIINTFRMLRELQLEFGEEICQTYIISMSRDVSDLLEVLLLAQEAGLYDPATGASSIHVVPLFETVEDLRSAPRVMHDLFKLSLYRAGLAGGYDKLSKEPINELVNEAPYLQEVMLGYSDSNKDSGFLSSNWEIHKAQKALYKVGEEHGIALRIFHGRGGSVGRGGGPAYKAILAQPGKSISGRIKITEQGEVLASKYSLPHLAMFNLENVTTAVIQASLLHTGFDEIETWNQIMEELAVRSRSHYRNLIYEQEDLVEFFYQVTPMPEISQLQISSRPARRKNDKKKTISGLRAIPWVFSWTQSRFLLPAWYGVGTALQEFVEKEPEEHLKLLQYFYVKWPFFTTAISKVEMTLAKVDLQIAHYYVRELSKPEDRERFETLFEEITIEYHLTRNLVLQISGHQRPLDGDPDLQRSVQLRNATIIPLGMLQVALLKRLRQHDTGTPGVINSRYSKSELLRGALLTLNGIAAGMRNTG

SEQ ID NO: 16837 - protein, 376 aa, Oryza sativa
MEVEARIHLLLIKLVFYRSAEERESASVHINLLPVRELYFDPRKKMDAFSHVPPGFRFHPTDEELVDYYLRKKVALKKIDLDVIKDIDLYKIEPWDLQEQCKIGNEEQNEWYFFSHKDKKYPTGTRTNRATTAGFWKATGRDKPIYVKNCLVGMRKTLVFYRGRAPNGQKSDWIMHEYRLETNEYGAPQEEGWVVCRVFKKRVAAVQRAAGDGGDSPFWFNEHVAFMAPAPGLDSPYHGHRQSHPCKLEVEYHHHLLPQEAAPFMHLPRLESPKLPAADIIVATAASSALQPCGHTTAQQLQLQIEPVYVTADASAADWRDLDKLVASQFGHGDSTAKEPSYCNPVQVFQVEGKQEDSLDYVSTSASCGGEEDLWK

SEQ ID NO: 16838 - protein, 430 aa, Zea mays
MAMLSRAASSAARRPLPPPPRLLAVRAMASSLFGHVEPAPKDPILGVTEAFLADPSSDKVNVGVGAYRDDNGQPVVLSCVREAERRIAGNLNMEYLPMGGSVKMIEESLKLAYGEDSDFIKDKRIAAVQALSGTGACRLFADFQKRFLPDSQIYIPTPTWSNHHNIWRDAQVPQKTFTYYHPESRGLDFSGLMNEIKNAPDGSFFLLHACAHNPTGVDPTEEQWREISHQFKVKKHFPFFDMAYQGFASGDPERDAKAIRIFLEDGHQIGCAQSYAKNMGLYGQRAGCLSILCEDEMQAVAVKSQLQQIARPMYSNPPVHGALVVSIILSDPELKSLWLKEVKGMADRIIGMRKALKENLEKLGSPLSWDHITNQIGMFCYSGMTPEQVDRLTNEYHIYMTRNGRISMAGVTTGNVGYLANAIHEVTKPN

SEQ ID NO: 16839 - protein, 319 aa, Porphyromonas gingivalis W83
MAKILVAFNTVSEGFDRLTARHEVVFPPKGRDFTQEEIAERIVDCDVLCSVFDIPIGRDLIDKGRSLKLIANYAVGYNNIDVTYAASKGIVVTNTPRAVIEPTADLALALLLSCTRRIAEWDRLFRRDGEMVERGRLCRLGVNLYGKTLGIIGFGNIGAAVARRCKAFGMNVLYNKRTRLSEAEEKAQGITFADKDDLIRRADVLSLHTPLTPETKHLIGTAELSMMKPTAILINTARGAVVDERALVEALREKRIAAAGLDVFENNDIPSPELFAMDNVSLTPHVGTQTYDSRVEMVHELCDNVLGFLHGDRPISRVN

SEQ ID NO: 16840 - protein, 217 aa, Glycine max
  misc_feature (111)..(111): Xaa can be any naturally occurring amino acid
  unsure (1)..(217): unsure at all Xaa locations
TQSASRNTIMPGAFTSRLNGLVDHFKMALDCFFAVWFVVGNVWIFGGHTSPSDAPQLYRLCIVFLTFSCIGYAMPFILCATICCCLPCIFAVWGIPEDFSPNGGPTVESAXPLPIFKFKLKNNENGDDQDANSAIDEGGILAAGTEKERMISGEDAVCCICLAKYADDDELRELPCSHVFHVECVDKWLKINATCPLCKNEVGTSNGGSPSAWNSST

SEQ ID NO: 16841 - protein, 237 aa, Brucella melitensis 16M
MERNGMSIERHDFISATELAQSLSEAIANKLATAIAERGQAVLAVSGGTTPLKLFEVLSRKMIDWNLVTITLVDERFVPVENERSNEKLVRDHLLRDHAGVARFVGLYNPAATAETAALAAASRIDALRRPFDVVVLGMGNDGHTASFFPNADRLDQAINPATRALVLPIHAEGAGEKRLTLTLPLIAEAEMLVLHIEGAAKQATLEKALAGDDEREMPVRAVFHHARAPIQLYWAS

SEQ ID NO: 16842 - protein, 244 aa, Triticum aestivum
  misc_feature (164)..(164): Xaa can be any naturally occurring amino acid
  misc_feature (212)..(212): Xaa can be any naturally occurring amino acid
  misc_feature (220)..(220): Xaa can be any naturally occurring amino acid
  misc_feature (233)..(233): Xaa can be any naturally occurring amino acid
  unsure (1)..(244): unsure at all Xaa locations
AGRARALLEQGVIPIVNENDTLAVAEIKFGDNDTLSAITAAMIHADMLFLMTDVDCLYDKNPRTHPDAKPIEVVEDTAALQADVSSAGSSLGTGGMSTKIIAARLGTSAGVTTVITRSSNPGNVLHIVQYLQSIQRGNTPPSPDERAEGLTRSASALSLSASNXNGAPWPPLHTRFVPANNPIRDRHFWLLHTPYPHGTLYIDSGAYKALVXKAGLLPVXVVDVEGTFASREXVRLVTVKRRST

SEQ ID NO: 16843 - protein, 154 aa, Brassica napus
  misc_feature (141)..(142): Xaa can be any naturally occurring amino acid
  misc_feature (151)..(151): Xaa can be any naturally occurring amino acid
  unsure (1)..(154): unsure at all Xaa locations
MERAAPVRSSHTSTADLLAWPQPQGPAPATPSPPRRPGQPSEAIRKVVFGGQVTEEEADSLTKRKPCSAPKWKEMTGSGIFAAGSNGDAGEAAAAAKPARTSSRQASSTVSHISFAEDGTDPPKKPTSVAEVAKQRELSGXXQSEADSKTXKQI

SEQ ID NO: 16844 - protein, 420 aa, Agrobacterium tumefaciens
MSEKRVQPLARDAMAYVLAGGRGSRLKELTDRRAKPAVYFGGKARIIDFALSNALNSGIRRIGVATQYKAHSLIRHLQRGWDFFRPERNESFDILPASQRVSETQWYEGTADAVYQNIDIIEPYAPEYMVILAGDHIYKMDYEYMLQQHVDSGADVTIGCLEVPRMEATGFGVMHVNEKDEIIDFIEKPADPPGIPGNEGFALASMGIYVFHTKFLMEAVRRDAADPTSSRDFGKDIIPYIVEHGKAVAHRFADSCVRSDFEHEPYWRDVGTIDAYWQANIDLTDVVPDLDIYDKSWPIWTYAEITPPAKFVHDDEDRRGSAVSSVVSGDCIISGAALNRSLLFTGVRANSYSRLENAVVLPSVKIGRHAQLSNVVIDHGVVIPEGLIVGEDPELDAKRFRRTESGICLITQSMIDKLDL

SEQ ID NO: 16845 - protein, 427 aa, Streptomyces aureofaciens
MVGVDDGRRRVVVTGIGVVAPGEVGTKAFWELLTAGRTATRTISTFDPSPFRSRVAAECDFDPQAAGLTQRQIRQWDRTAQFAVVAAREALDDSGVSGVNDPIRTGVMAGTACGMTISLDREFAVVSDEGRKRLVDDAHGVPYLYDYFVPSSMATELAWLVEAEGPVGVVSTGCTSGIDVIAHACDLIRDDAADVMLAGASDAAISPITVACFDAIKATTPRNDEPESASRPFDLTRNGFALGEGAAMFVLEEREHAIRRGAHIYAEVTGYAGRCNSYSMTGLRVDGNEMAEAIRVALDRSRMNPEDVGYVNAHGSATKQNDRHETAAFKKSLGDHAYRVPVSSIKSMIGHSLGAVCALEFAASALAIEHSVVPPTANLHVPDPECDLDYVPLVAREQRVRTVLSVASGFGGFQSAIVLAEPEWSRG

SEQ ID NO: 16846 - protein, 332 aa, Symbiobacterium thermophilum IAM 14863
MAKPRVFVTRRIPDEALSILRTACEVHTWDHEDEPVPQDELVRGLQEADGALVVGPHRIDAALMDAAPRCRVYANMAVGYDNIDVAAATARGILITNTPGVLTETTADLAFGLMIAAARRLYEGQRTIVEGRWKGWSPMFMTGQDVYGATLGIVGAGRIGQAVARRARGFDMRILYHNRRPNPAFEAEVGASYRLLDDLLRESDFVVVLVPLTPETRGLIGARELALMKPTAVLVNAARGPVVDERALYEALRDRRIYAAGLDVFDREPIPADHPLLSLPNVTAVPHIGSATVRTRTRMATLAAENLVAALTGKQPPTPVNPEVLRREERQP

SEQ ID NO: 16847 - protein, 581 aa, Thermosynechococcus elongatus BP-1
MLNKRTMQDFGVVIVGGGLAGCRAALEICRLAPETPIALVSKTHPIRSHSVAAQGGIAATLKNVDTEDSWESHAFDTVKGSDFLADQDAVAILAQEAPSVVIDLEHLGVLFSRLPDGRIAQRPFGGHTHPRTCYAADKTGHAILHELYCNLLKYNVTFFSEWYVLRLIVEDQQAKGVVAYHIETGQLDILRAPAILFATGGYGRVFNTTSNDFASTGDGLGMTARAGLPLEDMEFVQFHPTGLYPAGVLISEAVRGEGAYLLNAEGERFMARYAPSRMELAPRDITSRAIAIEIREGRGIHSDGSAGGPFVYLDVRHLGREKIMNRIPFCWEEAHRLAGVDAVVEPIPVRPTVHYSMGGIPVNLNGQVRANATEMVTGFYAAGECACVSVHGANRLGSNSLLECVVYGRRTGAAIAKDLPSLPRPQLDPQFYLQAAAREIQHLFDQGGDLRIAQLRRQVQDCMTQYCGVFRTADFMERGLAELQRLKAAYGRVRLDDRQRYWNTELIEAFELANLLIVAEVILRSALSRQESRGAHFREDYPQRDDVNYLRHTLATYDSDGIRIDYLPVTITLFPPQERNY

SEQ ID NO: 16848 - protein, 401 aa, Streptomyces aureofaciens
MTDVVVTGIGVVAPNGWGVAEYWDATLAGRSGLGPLTRFDSTGYRAHVAGEVNFTPEEHLPGRLLPQTDHMTRLALVAAEEALADAGADPTTMPDFSAGVVTAASAGGFEFGQKELQALWSKGPAYVSAYQSFAWFYPVNTGQISIRHGMRGPGSALVAEQAGGLDALAKARRHVREGTALMLAGAVDGSLCPWSWLCLSRSGTVSPRRDPQRAFLPFDADASGGVPGEGGALLVLETPDGAAERGQHRHYGRIAGYAATFDPRPGSGRPPGLRRAIDTALADAGIGPSDVDVVFADASGVAEQDRAEAEVLGAVFGPRGVPVTAPKTMTGRLLAGGAPLDVAAALLSLRDGVIPPSVHIGRPAHPDLDLVRDRPRPARLGSALVLARGHGGFNSALVLTS

SEQ ID NO: 16849 - protein, 609 aa, Streptomyces aureofaciens
MCGIVGVVDYDAPAEHRRDLLQAMTDTMACRGPDAEGLWFGRAAGLGHRRLSVIDPEHGRQPMTAEHEGRGAAITFSGEIYNFRELRAELTSHGHRFRTSCDTEVVLRGYLQWGAALVERLNGMFAFAVWDEHSEELLLVRDRMGVKPLYYWPTAAGVRFGSEPKAVLADRTLSRRVGPDGLCEVLDMVKTPEAAVFSGLVEVRPGQLVRVGRGGVRRQTYWRLEAREHTDDLPTTIGTVRDLLADTVTRQLVSDVPLGTLLSGGLDSSAVTALAARSGPVRSFSVDFRGAADAFASDAVRREADAPYVRELAGHVGADHLEVLLDSPGLSDPAVRSAVLRATDLPPAYWGDMWPSLYLFFRAVRENVTVALSGEAADELFGGYRWFRNPLALRAATFPWLTPGSARYFGGSSLFQAGLLDKLDLDGYRAARYAEALAEVPVLPGESAPERRMREIGHLNLTRFVQTLLDRKDRMSMAVGLEVRVPFCDHRLVEYVFNVPWEMKSFDGREKSLLRAAVADLLPRSVVERVKTPYPATQDPGYEGALRAELAGVLADPDAPVLPLLDRERALAAAARPTGAVSRPYDRGSLELVLWLNSWLAEYEVTLDL

SEQ ID NO: 16850 - protein, 440 aa, Zea mays
MSFRSMVRDIRESFGNISRRNFEVRIHHRGRSLGSSGDLQDRPAEVQQSRWASLPPELLCDVMKRLEEDDSSWPDRKDVVSCASVCTTWRDMCKDIVRSPEHCAKLTFPVSLKQPGPRDGVIQCFIKRDKSKLTYRLYLSLSSGVLDENGKFLLAAKRSRRMAHTEYAIFMDSRNFSRSSTGYIGKLRSNFLGTKFIIYDTQAPYNGGRVCTQERAPSRRLSSRKVSPRVPSGSYPVAQVNYELNVLGTRGPRRMQCAMHSIPASAVEPGGVVPGQPKELLPRLFDESFRSTATSSFSKYSVADSSMDLGSCPFSEVEVGGGSLREGDESEKERPLVLRNKAPRWHEQLQCWCLNFRGRVTVASVKNFQLIAPAKTQPQPQASGPPPPPPPSSSSYHDPVILQFGKVGRDMFTMDYRYPLSAFQAFAICLTSFDTKLACE

SEQ ID NO: 16851 - protein, 367 aa, Carica papaya
QMGLAENQVSFDLLEEYLEQHSEASTWGKGAPRFRENALFQDYHGLKSFRQAMASFMEQIRGGRAKFDPERIVLTAGATAANELLTFILANPGDALLVPTPYYPGFDRDLRWRTGVKIVPIHCDSSNNFQITPEALESAYNEAESMNMRVRGILITNPSNPLGITIPRHVLEQLLDFVTLKNIHLISDETYSGSVFTSPDFTSVAEILHSRNNVAECAERVHIVYSLSKDLGLPGFRVGTIYSYNDKVVTTARRMSSFTLIFSQTQHLLASMLSNQKFTENYINTNRDRLRRRYEMIVEGLRSAGIECLKGNAGLFCWMNLSSFLDEPTREAELNLWDSILHRVKLNISPGSSCHCSEPGWFRVCFA

SEQ ID NO: 16852 - protein, 81 aa, Triticum aestivum
MALSRRMTASALLLFLLVATEMGTTTVKVAEARNCLSQSHNFKGACLSSSNCAAVCRTENFPDGECHAPHYERKCFCKRPC

SEQ ID NO: 16853 - protein, 269 aa, Photobacterium profundum SS9
MDRYQELFNRLAAKNEGAFVPFVTIGDPTPEQSMKIIDTLVASGADALELGIPFSDPLADGPTIQAATIRALESGTTPIVCFELLTQIRAKYPDMPIGLLMYANLVFTAGIETFYKKCADAGVDSVLIADVPIKESEEFRVAAEKYGIHPIFIAPPNATDETLKSVSELGGGYTYLLSRAGVTGAETKAGKPIRHLVESLTKHNAPPALLGFGISEPAQVKEAIEAGAAGAISGSAVVKIIENNLSDHTAMLDNLGQFIRDMKAASKLS

SEQ ID NO: 16854 - protein, 337 aa, Hordeum vulgare
MGKIKIGINGFGRIGRLVARVALQSDDVELVAVNDPFITTEYMTYMFKYDTVHGHWKHSDIKLKDDKTLLFGEKPVTVFGVRNPEEIPWGEAGADYVVESTGVFTDKDKAAAHLKGGAKKVVISAPSKDAPMFVVGVNEDKYTSDVNIVSNASCTTNCLAPLAKVINDNFGIIEGLMTTVHAITATQKTVDGPSSKDWRGGRAASFNIIPSSTGAAKAVGKVLPELNGKLTGMSFRVPTVDVSVVDLTVRTEKAASYDDIKKAIKAASEGKLKGIMGYVEEDLVSTDFVGDSRSSIFDAKAGIALNDHFVKLVSWYDNEWGYSNRVVDLIRHMAKTQ

SEQ ID NO: 16855 - protein, 326 aa, Zea mays
  misc_feature (160)..(160): Xaa can be any naturally occurring amino acid
  misc_feature (183)..(183): Xaa can be any naturally occurring amino acid
  unsure (1)..(326): unsure at all Xaa locations
MAGETVLVTGASGFIGSTLVRLLLGRGYNVHAGVLNPDDGAETEHLLAMAAGAGEGRLRIFRGDLLDGAALIDAARGCSGVFHLASPCTVDHVSDPQKQLIVPAVEGTLNVLRAAKEAGSVRRVVVTSSSSVIMPSPGWPAGELRDERCWTDIDYCKKKXVWYPVSKTLAEKAAWRFAEENGXHVVVVNPMSVLGQIIPPTINSSMSVLLRLLQGCTEEYKDIWMGAVHVEDVALAHLLVFENPSASGRHICAESISHLSDFAAKLAELYPSYKVPKFPKDTQPGLVRAEAGVASKKLVELGLQFSPLEKIIRDAVESLKSKGYIS

SEQ ID NO: 16856 - protein, 536 aa, Debaryomyces hansenii CBS767
MATEDKELGVVITDVSKLSEKIEEQNNIISKGGSVDDYLYEKRPWWKVNYLVRLNFCIFLITLSSTNNGYDGSMLNGLQSVLYWPEKMGNPQGSVLGALSNGNVFGVVLSFVCASWLADKFGRWRCIFVGQTITILGSILQGVSTNYGFFLASRIILGFGVGIAGVSSPSLISELAYPTHRATATTFYNVCWYLGAIIAAWVTYGTLNIENDYSWRIPSYLQAALPCLQIAFFWMVPESPRYLINKDRISDAEKVLRKFHAGGETHERANDLVSFEIEEIQAALEIEKLSSNSRYSDFITMPTFRKRLFLAVFVAVIMQLSGNGLVSYYLNKVLNSIGITDPHEQLKINGCLMVYNLVISSVVASVAGRFKRRSMFLICTILMLVFYVIWTILSAINQQRNFEQKSLGNGVIAMIFFYYLAYDIGANGLPFLYITEIMPYSHRAKGMNIFTVSQNIIIIFNGFVNPIAMDAIEWKYYIVYCCILAVEVITVLFTFVETSAYTLEEVAKVFGDDPGQTLIHLSSAPPKPEVGHIETV

SEQ ID NO: 16857 - protein, 76 aa, Triticum aestivum
MSCSCGSSCNCGSSCKCGKKYPDLEEKSTAAQATVVLGVAPEKTAAAEFEAAAESGAETSHGCSCGDSCKCNPCNC

SEQ ID NO: 16858 - protein, 553 aa, Bacillus cereus ATCC 10987
MKDWHKSVVYQIYPKSFNSYYNKETGDIKGVTEKLDYLKELGVDYIWLTPIYQSPQNDNGYDVSDYYRIDPSYGTMEEFEELLEEAKARNIEIMLDIVVNHSSTEHKWFKEAKEDKNSPYRNYYIWRDEKNNWQSKFGGSAWKYDEKTEQYYLHLFDETQADLNWENEKLREEVYDMMRFWLDKGVTGFRLDVINLISKDQQFLNDDGSTATSDGRKYYTDGPRVHEYLQEMNRNVFEGKDVITVGEMSSTTIDNCIKYSNPERNELSMTFSFHHLKVDYPNGDKWTKADFDFIKLKEIMSNWQIEMQKGRGWNALFWCNHDQPRIVSRFGDDKEYRNESAKMLATAMHMLQGTPYIYQGEEIGMTNPKFESIEQYRDVESLNIYDIKLEEGLSKEEIIGILKQKSRDNSRTPMQWNEEMNSGFTTSTPWISVAENYKEINVEKALEDKESVFYHYKKLIELRKTYDVITEGEYAILDENDPKIWAYTRTTESEVLLVINNFYGEEITYSVPAHVQLDGMKQEVLLSNYKDSSKDITNLDLRPYESIVYRYTK

SEQ ID NO: 16859 - protein, 377 aa, Bacillus thuringiensis serovar konkukian str. 97-27
MKAVTYQGPNKVQVKQVDDAKLEKKDDIIVKITSTAICGSDLHLYQGNMPLPPGYIIGHEPMGIVEEVGPDVTKVKKGDRVVIPFNVACGHCFYCQHEMESQCDNSNPHYDSGGYFGYTEKFGNHPGGQAEYLKVPFGNFTPFVIPESCELEDESLLFLSDVLPTAYWSVINAGVKRGDTVIVLGCGPVGLMTQKFAWMQGAKRVIAVDYLDYRIHYAKKINNVEVFEFTKFPDMGEHLKEITHGGADVVIDCVGMDGKKSPLEFLEQKLKLQGGTLGPIQIATKAVRKYGTVQMTGVYGGNYNAFPLGAFWVRNINLKMGQAPVIHFMPELFKKITNKEFDPKEIITHKIPLEEASYGYQIFNNREDDCIKVILKP

SEQ ID NO: 16860 - protein, 449 aa, Bacillus thuringiensis serovar konkukian str. 97-27
MKTKQTDELLAKDEQYVWHGMRPFSPNSTMVGAKAEGCWVEDIQGKRYLDGMSGLWCVNSGYGRKELAEAAYKQLQTLSYFPMSQSHEPAIKLAEKLNEWLGGEYVIFFSNSGSEANETAFKIARQYYTQKGEPHRYKFMSRYRGYHGNTMATMAATGQAQRRYQYEPFASGFLHVTPPDCYRMPGIERENIYDVECVKEVDRVMTWELSETIAAFIMEPIITGGGILMPPQDYMKAVHETCQKHGALLISDEVICGFGRTGKAFGFMNYDVKPDIITMAKGITSAYLPLSATAVKKEIYEAFKGKGEYEFFRHINTFGGNPAACALALKNLEIMENENLIERSAQMGSLLLEQLKEEIGEHPLVGDIRGKGLLVGIELVNDKETKEPIDNDKIASVVNACKEKGLIIGRNGMTTAGYNNVLTLAPPLVISSEEIAFVIGTLKTAMERI

SEQ ID NO: 16861 - protein, 477 aa, Methanosarcina mazei Go1
MEIPDHKTKIVCTIGPASSSEEMIRKLMLAGMNVARINFSHGDFESHSRVVRIIRKVADELGRTIAILADLPGPKIRIGKLEKEPVMLHKGNPITLTIDDTPGNEERIPVSYKQLPESVTPGSLIYLSDGFIQLLCKEVTGKDVLCEVLIGGELYSHKGLNLPGAKIFLDAVTEKDFRILEFALEEDIDTFSISFVENAEDIRKVRNFAASRGKQVNIVSKIERRQAVENIGEILDETDALMVARGDLGVEIPIQEVPSVQKELIQRAKLLGVPVITATHMLASMTDNIRPTRAEATDVANAILDGTDAVMLSEETAVGNYPVEAVEMMAKIAKTTENWRSRTKWGLDTMIKSITAREMSVDEVITLQVYEALQKLPVAAVLTPTRSGATPRRISRFNPDPWILAFSRVPKTCRFLSLSYGVYPVAVNESIESWEKETTERTKELGFAKSKDLVIFTQGPASGKPGGTNMLKILTLD

SEQ ID NO: 16862 - protein, 221 aa, Ginkgo biloba
MGRGKIEIKRIENTTNRQVTFCKRRNGLLKKAYELSVLCDAEVALIVFSSRGRLYEFANNSVKRTIDRYKKTCADNSQGGAISECNSQYWQQEAGKLRQQIDILQNANRHLMGDALTSLSVKELKQLEIRLERGISRVRSKKNEMLLEEIEIMQRREHILLAENQFLRTKIAECESSQNANMLPGPEFDALPGFDSRHFLHASIMDAHHYAQQDQTALQLG

SEQ ID NO: 16863 - protein, 551 aa, Oryza sativa
MLTRTITYCMVSVTHRIHHPSIMNKLFSTAWILRHVLRWFKVKMDGNAKGGGHSEALKNYNLGRTLGIGSFGKVKIAEHKLTGHRVAIKILNRRQMRNMEMEEKAKREIKILRLFIHPHIIRLYEVIYTPTDIYVVMEYCKFGELFDYIVEKGRLQEDEARRIFQQIISGVEYCHRNMVVHRDLKPENLLLDSKYNVKLADFGLSNVMHDGHFLKTSCGSPNYAAPEVISGKLYAGPEVDVWSCGVILYALLCGTLPFDDENIPNLFKKIKGGIYTLPSHLSALARDLIPRMLVVDPMKRITIREIREHQWFQIRLPRYLAVPPPDTAQQAKMIDEDTLQDVVNLGYGKDHVCESLRNRLQNEATVAYYLLLDNRFRATSGYLGADYQESLERNFNRFASSESASSNTRHYLPGSSDPHASGLRPHYPVERKWALGLQSRAQPREIMIEVLKALQDLNVSWKKNGQYNMKCRWSVGTQATDMLDVNNSFVDDSIIMDNGDVNGRLPAVIKFEIQLYKTRDEKYLLDMQRVTGPQLLFLDFCADFLTKLRVL

SEQ ID NO: 16864 - protein, 594 aa, Schizosaccharomyces pombe
MTSFTESKKLDEIESPVPEIIVPSTTNGNGTIESYKEKSVGTSFLDFFRSYKLRPDNEFAEVHNSEDFLKPRHLQMIAIGSCIGTGLFVSTGKSLKNAGPGSLMINFIILSAMILALILSLGEMCCFLPNQSSITMYTGRLLNNNIGFAQSWLYFWIWLTVLPSEISAACEVVDFWTTQHLNPAIWVTIFLAYVVLVNAFGARSYGECEFVSSFLKVVIVIIFFFVAIIINCGAAPKGGYIGAHYWHHPGSFRNGFKGFCSVFISSAYSLSGTENIGTAAGNTSNPQRAIPSAVKKVFYRMGFFYIITIFLITLVVPYDNPDLGNVSPFIIAIKNGGIHVLPHITNAVILVSVLSVGNAAVFAASRNAMALVKQGWAPRFLGRVDQKGRPVISYLCSLAMACIAYVNAAPDGSVVFDWLMSVSGGGAFVIWGLSFIDHIRLRYAMKAQKIPDTVLPYKFPGSVYLSYYGVLINFLALCALVYISIFPVTHEKPSAYGFFVSFLGPSVFIAYLLISPIFVKPTFQSLKDVDLTTGRYDLVNSQMYVAESSTSELSEKDLTKPNLQSNDNKNSEDLESNTPPQKKSALQKVADFLC

SEQ ID NO: 16865 - protein, 418 aa, Thermococcus litoralis
VEQDPFEIAVKQLERAAQYMDISEEALEFLKRPQRIVEVSIPVEMDDGSVKVFTGFRVQYNWARGPTKGGIRWHPEETLSTVKALAAWMTWKTAVMDLPYGGGKGGVICNPKEMSDREKERLARGYVRAIYDVISPYTDIPAPDVYTNPQIMAWMMDEYETISRRKDPSFGVITGKPPSVGGIVARMDATARGASYTVREAAKALGMDLKGKTIAIQGYGNAGYYMAKIMSEEYGMKVVAVSDTKGGIYNPDGLNADEVLAWKKKTGSVKDFPGATNITNEELLELEVDVLAPSAIEEVITKKNADNIKAKIVAELANGPTTPEADEILYEKGILIIPDFLCNAGGVTVSYFEWVQNITGDYWTVEETRAKLDKKMTKAFWDVYNTHKEKNINMRDAAYVVAVSRVYQAMKDRGWIKK

SEQ ID NO: 16866 - protein, 214 aa, Geobacter metallireducens GS-15
MKFFIDTADVNEIREAHELGLVDGVTTNPSLIAKSGRKFEEVIKEITGIVDGPISAEVVSLDHDGMIREAEELAAIHKNIVIKLPMTPEGLKACTTLTKKGIKTNVTLIFTAMQALLAAKAGATYVSPFVGRLDDISQDGMGIIDDIKTIFDNYGYTAEIIVASVRNPIHVLNAALIGADIATIPYSVMLQLAKHPLTDAGIERFLKDWEKVPK

SEQ ID NO: 16867 - protein, 518 aa, Polyporus ciliatus
MARFQSLLSFVTLLFAVSAYAAIGPVTDLTVTDANISPDGFNRAAVVVNGVFPAPLITGQKGDRFQLNLVNQMTNHTMLKTTSIHWHGFFQKGTNWADGPAFVNQCPIASGNSFLYDFQVPDQAGTFWYHSHLSTQYCDGLRGPFVVYDPADPHLGLYDVDDDSTVITLADWYHVAAKLGPRFPPSSDSNLINGLGRSPSTPTADLAVISVTQGKRYRFRLVSISCDPNYTFSIDGHQLTVIEADGISTQPVTGIDSIQIFAAQRYSFVLTADQPVDNYWVRANPNFGNTGFAGGINSAILRYDGAPAIEPTTNQTGTNLLLETDLHPFTPTPVPGNPTQGGADFNLNLAFNFNGTDFSINGATFTPPSVPVLLQIISGANSAQDLLPSGSVYALPSNSSIELTFPATAAAPGAPHPFHLHGHAFAVVRSAGSTVYNYDNPVYRDVVSTGTPGDNVTIRFQTDNPGPWFLHCHIDFHLDAGFAVVFAEDIPDVASANPVPQAWFDLCPIYNALDPSDQ

SEQ ID NO: 16868 - protein, 210 aa, Triticum aestivum
TLPDWSTRTLTWTEAVKKLARVPPPEQAIYLHTTAVAPTVMASSGTSVAPFQGLKSTAGLPVSRRSNGASLGSVSNGGRIRCMQVWPIEGIKKCDTLSYLPPLSTEALLKQVDYLIRSKWVPCLEFSKVGFIFREHNASPGYYDGRNWTMWKLPMFGCTDAIQVINEVDEVKKEYPDAYVRIIGFDNMRQVQCVSFIAFKPPGCDESGKA

SEQ ID NO: 16869 - protein, 524 aa, Polyporus ciliatus
MSKFQSLVAFVALTLATSRLAAAAIGPVADLTITNADINPDGFTRAAVLANNVFPGPLITGNKGDNFQLNVVDNLSNDTMLTATTIHWHGFFQKGTNWADGPAFVNQCPISTGNSFLYNFNAPDQAGTFWYHSHLSTQYCDGLRGPMVVYDDADPHASLYDVDDESTVITLADWYHTAARLGPCFPLGSDSTLINGLGRFAGGDADAPLTVISVTSGKRYRFRLISISCDPNFTFTIQGHTMTVIEVDAVNVQPYEVDSIQIFAGQRYSFVLTADQAVDNYWIQAIPSIGTITTDGGVNSAILRYDGADIVEPAAATVTGSNPLVETSLVPLENLAAPGEPTIGGVDYPLNLDFSFDGTNFAINGATFTPPTVPVLLQIMSGAQDVADLLPSGSIYSLPSNATIELSFPITATNAPGAPHPFHLHGHTFYVVRSAGSTEYNYVNPPQRDTVSTGTAGDNVTIRFTTNNPGPWFLHCHIDFHLEAGFAVVFGEDIPSISDANPPSSAWEDLCPTYNSVYPNGDGN

SEQ ID NO: 16870 - protein, 441 aa, Streptococcus agalactiae NEM316
MTLNAKGESNQILVDKEVHSTNLLLDIDEKPELFQGLLLSFQHVFAMFGATILVPLILGMPVSVALFASGCGTLIYQVATKFKVPVYLGSSFAYITAMALAMKQMHGDISAAQTGILFVGLIYVVVATVIKFVGNSWVDKILPPIIIGPMIIVIGLGLANSAVTNAGFVAKGDWRKMLVAVVTFLIAAFINTKGKGFIKIIPFLFAIIGGYILSIILGLVDLSPVEKAAWFELPKFYLPFKTGLFHSYKLYFGPEMLAILPISIVTIAENIGDHTVLGQICGRNFLKKPGLNRLLIGDGLATAFSALIGGPAETTYGENTGVIGMTRIASVTVIRNAAFIAIAFSFFGKFTALISTIPSAVLGGMAILLYGVIASNGLKVLIENRVNFAEVRNLIIASSMLVLGLGGAVLDLGALTLSGTALSAIVGIILNLILPKESMKS

SEQ ID NO: 16871 - protein, 477 aa, Polyporus ciliatus
AVVVNGQFPGPLVTGNKGDNFQINVIDQLTNNTMLKSTTVHWHGFFQKGTNWADGPAFVNQCPISTGNSFLYDFTAADQAGTFWYHSHLSTQYCDGLRGPMVVYDPNDPHASLYDVDDESTVITLSDWYHTAAKLGPAFPLGPDSVLINGLGRFAGGDANADLAVISVTQGKRYRFRLVSISCDPNFVFSIDKHNMTVIEADAVSHEPVTVDSIQIYAGQRYSFVLTADQAIDNYWIRALPSGGTVNFDGGVNSAILRYDGAAEIEPVTNRTMSMAPLVESDLVPLDNPAAPGDASIGGVDYALNMAFSFNGTNFFVNGATFVPPTVPVLLQIMSGAQSATDLLPGGSVYSLPSNATIELSFPITATNAPGAPHPFHLHGHVFSVVRSAGSSEYNYVNPPRRDVVNTGTAGDNVTIRFTTDNPGPWFLHCHIDFHLEAGFAVVFSEDSSSGGDSDLSSNDAWNNLCPTYDALSADDL

SEQ ID NO: 16872 - protein, 637 aa, Adiantum capillus-veneris
MACTIVWFRRDLRVEDNPALVAAVRAGTVVPLFIWTPEEEGQFLPGRVSRWWLKQSLIQLHQSLTSLGSPLIMRRAQSAISVLSQIIKQTGATQVFFNHLYDPVSLVRDHKVKQELLQAGVTVTTFNADLLYEPWEINDEQGRPFTTFAGFWSLCMDMAIEPEAPLLPPKRITKWPGIAATSPIEDLELENESEKGSNDLLARAWAPGWANADRALEAFVSGPLMEYASNRQKVDSATTSLLSPHLHYGELSVRKVFHSVRMKQVLWVKEGNADAEESVNLFLRSIGLREYSRYLCFNFPFTHERSLLSNLKFFPWRNDEGYFKVWRQGRTGYPLVDAGMRELWATGWLHNRIRVIVSSFFVKFLQLPWRWGMKYFWDTLLDADLESDVLGWQYISGSLPDGHELYRIDNPQLEGYRYDPCGEYVRRWLPELSRLPSEWIHHPWDAPPNVLRAAGIELGSNYPRPIVEVAAARERLEQALAEMMEKEAAATRAAFEGSLQGVGLEPSQADNMDIDRGPSDAPGRNLSDRSPHDQMVPSMFMETGRPAADGVGSHASERGANVQEAHDNGSAPVASREGGSCRRNWQPFKVGTVTPTLLRSHHLRTGITLSLPLQVYQLGRAIGHLIQLCIRMTLRYL

SEQ ID NO: 16873 - protein, 679 aa, Adiantum capillus-veneris
MAAHTIVAHTIVWFRRDLRIEDNPALVAAVRAGPVLPVFIWSPEEEGQFLPGRVSRWWLKQSLVHLNESLTILGAPLVMRRASNVLAALLEIKKATGATQVFYNHLYDPVSLVRDHRVKQGLSQAGIIVNSFNADLLYEPWEVNDDNGQAFTTFSGFWAKCMDMPAEPEAQILPPKRILKFPGPSLSCSIEDLDLEDELEKGSNALLARAWQPGWANADRALESFINGSLMEYAANRQKVDSATTSLLSPHLHYGEVSVRKIFHNVRMKQVLWVKEGRVEAEESVNLFLRSIGFREYSRYLSFNFPFTHERSLLYNLKFFPWRVDESYFKAWRQGRTGYPLVDAGMRELWATGWLHNQIRVIVSSFCVKFLQLPWRWGMKYFWDTLLDADLESDVLGWQYISGSLPDGHELDRIDNPQIEGYKFDPYGEYVRRWLPELSRLPTEWIHHPWDAPPSVLRAAGIELGSNYPRPIVEIAAARERLEQALAEMWANEAADKATLANGLEEGLGDTVEVQGMRNGFPANMDIDRGPGEKALLVRSPHDQMVPNVGVRRSTTGAVQGGAANQGSALQAVLREVPANGHVQAVQAQSQRMAAPPMAMQNGYDDTHSTAESTSARHWSLAIGLPVWSQYVPVCLHMRQDDSQVPLVPDLHHGVMSRRLPHAPPMVNFEATKTSSLSV

SEQ ID NO: 16874 - protein, 151 aa, Methanosarcina acetivorans C2A
MNMEQTYVMVKPDGVQRGLVGEVISRIEKRGLKILALRMNVIAEATAKEHYGEHAARPFFPSLIEFITSGPSVSMVVAGKDAIKVMRAINGATNPVDAAPGTIRGDFALDVGRNVVHASDSPEAAAREIAIHFKDSEIGKYSRVDEVCLYE

SEQ ID NO: 16875 - protein, 718 aa, Adiantum capillus-veneris
MAKSCTVVWFRRDLRLEDNPALAAAARAGAVVPVFIWSPDEEGQFRPGRVSRWWLKQSLIQLDISLRSLGVSLVMINANDTVSALLELVKTTGASQVVYNHLYDPVSLVRDHRVKQSLVQNGIQVQSFNGDLLYEPWEVLDDHGKPFTYFESYWAKCLTMPFEPESPLLPPRRLTAAPAGIVHSLTPDELGLEDEADKSSNALLARAWAPGWSNADKALEAFLAGPFLNYSRNRHEIDGPTTSLLSPHLHFGEVSVRKVFHSVRRLQVLWAKDGSMLGEESINYFMRSIGFREYSRYLCFNFPFTHERSLLSNLKSFPWRVDEGLFKAWRQGRTGYPLVDAGMRELWATGWLHNRVRVIVSSFCVKFLQLPWRWGMKYFWDTLLDADLESDILGWQYISGSLPDGHELDRMDNPQTEGYKHDPLGEYVRRWLPELVRLPTEWIHHPWDAPPGVLRAAGVELGSNYPRPVVEVAAARERLRDAVTHMWEQEAALKAAGDKGIEEASVGDSIAKVNCQPEVAAQPCKIPKASVSQATNGDMEVSSAGSSRRDQMVPTFAKELKTQADALCGDYGSIALPLPSQQNLPCPSTNFSAIRGVSKLSPGNRGDMVDTTEALRNTHSEPLPPVSDTNPMTESSSSSSPREQISSIKDDPPMIWVPAIAHQRPSSDFGCVPYAGDAEQLRKHLLILQNARTDDKVEDGVQLNGSQWARGSKRKAKS

SEQ ID NO: 16876 - protein, 224 aa, Nocardia farcinica IFM 10152
MPSKMSEAVPFSTRIRTATERQHAEAENSTFITDMLGGHLGIDSYHRYTGQLWFVYRALEARMDELAADPVAGPFIRPELARTAELERDLTALIGPEWRADLTPLPATAAYAARIEECAREWPAGYVAHHYTRYLGDLSGGQVIRGTAEKLWDLPRRGDGVRFYVFDDIPNPAAFKREYRALLDRLPVDELERRRVLDEGKRAFELNAAVFAELAAEFPVRRPS

SEQ ID NO: 16877 - protein, 220 aa, Zea mays
MPIDYCSKLHSELLKDCISQIVQDAKKNRKFTETVELQISLKNYDPQKDKRFSGSVKLPHIPRPKMKVCMLGDAQHVEEAEKMGLDYMDVEALKKMNKNKKLVKKLAKKYHAFLASETIIKQIPRLLGPGLNKAGKFPTLVTHQESLESKVNETKATVKFQLKKVLCMGVAVGNLSMEEKQIQQNIQMSINFLVSLLKKNWQNVRCLYIKSTMGKPFRIF

SEQ ID NO: 16878 - protein, 247 aa, Methanosarcina barkeri str. fusaro
MEEIEQTGQEENNEQPLPEEDVVAEAKPAPEKEAAAKTESVPVETEGEGPSVKEGSTSLVSIDEYLAAGVHIGTQQKTQDMMRFVYRVRTDGLYVLDIQSTDERIRVAAKLLSHYDPSRILVVSSRQYGQHPARMFSRALSTKSMLGRFIPGLLTNPQIHGFFEPDIVIVTDPAGDAQVLKEASSIGVPIVALCDTNNLTSNVDLVIPTNNKGRKALSLVYWLLAREVSRLNSTPFNYELTDFETPL

SEQ ID NO: 16879 - protein, 355 aa, Rhodopseudomonas palustris CGA009
MHRPDPHDCGIFLISPRYGSNSMSSAQYDVLAIGNAIFDVLVRTEEDFLVKHGMAKGGMALIDEARAAAIYADMGQATEMSGGSAANTIVGLASFGARTAYLGKVKDDQIGKLYTHDIRAAGVTFDTKPATAGPATGCSYILVTPDGQRTMNTYLGAAQDLSPADIDEAKIAASAITYLEGYLWDPPQAKEAFLKASQIAHGAGRKVALTLSDAFCVDRYRGEFLELMRSKTVDLIFANEAELHSLYQTSDFDAALTLLAQDVALGVVTRSEKGCAVVDKDGVTLVPAAAIDQLVDTTGAGDLFAAGFLFGLVRNLGYENAGRLGALAAAEVIQHIGARPQVSLKELAQQHGLAV

SEQ ID NO: 16880 - protein, 542 aa, Methanosarcina barkeri str. fusaro
MLTVIQYLLDRLKQLGIRDIFGVPGDFAFPINNAICDDKELRWIGCCNELNAAYAADGYARVKGMSALSTTFGVGELSTLCGIAGSYAEYNLVFHIVGMPKMQAQKTHAIVHHSLGAGKSSIFMEMATPVVCASTMLTPENCVQEVERVIETALENHRPVYIAIPHDYVNADISSFNSPARKPVKSDPVALEEVVSIIAGKLLNAKQACVIPGFLVDRFGLKDLSMAVITASGLPYVTMALDKSVLDETNPSYLGLYMGQLINPEIRKFVESCDCILAMGTILSDVNTGKFTANLDKSRIINIMPSSVHIGYTDYINVKMLDVLEELTRRLNKRTDISGPVARRPAVPEVNAEDPITADYLYAKYAEFFKPDDIIIADSSSSFYGLIPLLLPKGAKFESQMLWGAIGWATPASFGTALAAPDRRVILITGEGSHQMTAQEISQFYRHGLKPIIFVLNNHGYLIERMLSEKVDYCYNDLVEWQYYKLPDVFGCNDWITSKVTTCGDLDKVMRELDNAKVGAYIEIITPKLSAPQLMETIHKNL

SEQ ID NO: 16881 - protein, 644 aa, Vibrio vulnificus YJ016
MKNNVIFISQGGMSLSAVLLEWYEIPIKRVLAMTLPFLFHAQTPDYFRVENQIAHVTLRTQPEGIQAVYLRHEPDNEEYLVEMQRVSKLGELDGWQASFPLNKDREITQYVFKVITEGATVWLDARGIQKRMPGSEYHFKYNQSHQPPEWVSEQIFYQIFPDRFCNGNPEISVKSGEYSVKNGTRPVVAKEWGAAVDKHNGYGGCEFYGGDLAGIRSKLDYLQTLGVTALYLNPIFSAPSNHKYDTTDYLTIDPHLGSNQEFAELSEALHQRGMKIVLDAVFNHTSCEHPWFDKNGVGEMGAYHHIESPYRHYYFFEDGSQNYIGWKGVDSLPVLNFENAEVRNYIYASEHAAIRHWLKAPYRIDGWRFDVIHMLGEGEGASNNAYYVKQFRNATKQENPQAYVLGEHFFEASKWLQGEQEDGSMNYYGFAHPVRALLAKKDIAYHPIEIDCIDFVDWLNESRAKVPWLNQLSQFNQLDSHDTARFITLLENDQARMNIALGLLFTYVGTPCIYYGSEVGLEGENDPDNRRCFPWERVGHVETFQYHQRLIELRKTSKALQQGAIQFLHVEPTSFSFARQYGEDTLLVMVNLDSKACSMTLPIWQLGKPQGRLVSLLGNESALQVNSKVVVNISSESIQIWKLE

SEQ ID NO: 16882 - protein, 371 aa, Oryza sativa
  misc_feature (222)..(222): Xaa can be any naturally occurring amino acid
  misc_feature (251)..(251): Xaa can be any naturally occurring amino acid
  unsure (1)..(371): unsure at all Xaa locations
MAPRPSMAGSEFSYAFAIVADPICTLMREGDSVGTLAAAKERRSQRESRTQLGEAGKASWEKERRRSEQWRQQQQLCPPLPLFPTSPPINPLLPFLRLPYLLAPPPPPPSHWAANGLMEQYEKEEKIGEGTYGVVYKARDKVTNETIALKKIRLEQEDEGVPSTAIREISLLKEMHHRNIVRLHDVIHSEKRIGLVFEYLDLDLKKFMDSCPEFAKNPTLIXDFGLARAFGIPVRTFTHEVVTLWYRAPEXLLGSRQYSTPVDMWSVGCIFAEMVNQKPLFPGDSEIDELFKIFRVLGTPNEQSWPGVSSLPDYKSAFPKWQAQDLATIVPTLDPAGLDLLSKMLRYEPNKRITARQALEHEYFKDLEMVQ

SEQ ID NO: 16883 - protein, 753 aa, Escherichia coli
MSQHNEKNPHQHQSPLHDSSEAKPGMDSLAPEDGSHRPAAEPTPPGAQPTAPGSLKAPDTRNEKLNSLEDVRKGSENYALTTNQGVRIADDQNSLRAGSRGPTLLEDFILREKITHFDHERIPERIVHARGSAAHGYFQPYKSLSDITKADFLSDPNKITPVFVRFSTCQGGAGSADTVRDIRGFATKFYTEEGIFDLVGNNTPIFFIQDAHKFPDFVHAVKPEPHWAIPQGQSAHDTFWDYVSLQPETLHNVMWAMSDRGIPRSYRTMEGFGIHTFRLINAEGKATFVRFHWKPLAGKASLVWDEAQKLTGRDPDFHRRELWEAIEAGDFPEYELGFQLIPEEDEFKFDFDLLDPTKLIPEELVPVQRVGKMVLNRNPDNFFAENEQAAFHPGHIVPGLDFTNDPLLQGRLFSYTDTQISRLGGPNFHEIPINRPTCPYHNFQRDGMHRMGIDTNPANYEPNSINDNWPRETPPGPKRGGFESYQERVEGNKVRERSPSFGEYYSHPRLFWLSQTPFEQRHIVDGFSFELSKVVRPYIRERVVDQLAHIDLTLAQAVAKNLGIELTDDQLNITPPPDVNGLKKDPSLSLYAIPDGDVKGRVVAILLNDEVRSADLLAILKALKAKGVHAKLLYSRMGEVTADDGTVLPIAATFAGAPSLTVDAVIVPCGNIADIADNGDANYYLMEAYKHLKPIALAGDARKFKATIKIADQGEEGIVEADSADGSFMDELLTLMAAHRVWSRIPKIDKIPA

SEQ ID NO: 16884 - protein, 497 aa, Rhodopseudomonas palustris CGA009
MSPTAAARAADQAASLRDRLKDPSLLREQCYIDGAWSGTSTIAVTNPASGQTIAKVPHLGAAEATQAVEAAAQAFPAWAKLTAKQRSNILRKWFELIIANREDLALILTSEQGKPLTEALGEVDIGAAYVEFFAEEARRVYGETIPTQRADARLIAIKQPIGVCGAITPWNFPSSMITRKVSPALAAGCTVVLKPAEETPLSAFALAALAEKAGVPKRVFNVLTGDAPAIGKVLCEHPAVRFVGFTGSTEVGKILYKQASVGVKKLGLELGGNAPFIVFDDADVDAAVEGAMVSKYRNMGQTCVCANRLYVQDGVYDAFVEKLAAKVKAMKVGDGTEQGVTQGPLINEAAVEKTERHIADALSNGAKIITGGKRHALGGTFFEPTVLADVRPDALVAHEETFGPLAPVFRFKDEAEVIKLANNSPFGLASYFYARDLGRVWRVAEALESGMVGVNTGLITTEVAPFGGVKESGLGREGSHHGIEEYVEIKYVMMAGI

SEQ ID NO: 16885 - protein, 241 aa, Triticum aestivum
  misc_feature (171)..(171): Xaa can be any naturally occurring amino acid
  unsure (1)..(241): unsure at all Xaa locations
MKIQCDSCGVAAATVVCCADEAALCARCDVDIHAANKLASKHQRLPLDALGAKLPRCDICQEKAAFIFCVEDRALFCRDCDEPIHVPGTLSGNHQRYLATGIRVGLGPVSACAAGDHGASHDADHPAPPKLACEPQPPAQPAASAQQVPSPPQFLPQDWGVDELLQFSDYXESSDKLHKDSGSRLQGAGVVTAGMGLFHDHAPKGGRAAMPVPESLASRGAHKLANKGRAESPPPEGWGQI

SEQ ID NO: 16886 - protein, 778 aa, Vibrio vulnificus YJ016
MTTTTHILGYPRIGEKRELKFAQEKYWRGEIDQAELKKVGAELRYKNWQTQASAGLSFAVAGDFAWYDHVLTTTLLLGHVPKRHRHGFPDLDTLFRVGRGQSQSSCACHGAAASDMTKWFNTNYHYIVPEFSKEDTFEVSWPQLFEEVNEAVQAGHKVKPVLLGPLSYLYLGKEIEDGFDRLTLLPRLLTAYQAILAKLAKQGVEWVQIDEPILALELEKPWLDAFKLAYQVIRSDVKVLLTTYFDSVVDSLDRIVELSVDGLHVDLSAAPEQLDAVLAKLPQNWVLSLGVVNGRNVWRSDVKAQLERLQPVKAALGERLWVASSCSLLHSPVDLELEAGLSAEVRSWFAFAKQKVSEVVLLGKALDGDAASIAQCEAYSQPIQARKSAAHVHKATVQSRVNAITAELAQRSVPYAERARHQAEVLQLPLLPTTTIGSFPQTSEIRVQRSAYRSGQLSSAEYEQALKGHIADAVKRQEALDLDVLVHGEAERNDMVEYFAEHLAGFQTTQFGWVQSYGSRCVKPAIVVADIEREQPITVGWSTYAQSLTSKQMKGMLTGPVTILCWTFPREDISRKAIAQQLALALRDEVSDLQDAGINIIQIDEPAIREGLPLKKRDHQNYLDWALEAFRISAASARPETQIHTHMCYSEFNEIIESVAALDADVITIETSRSNMELLKAFEEFNYPNEIGPGVYDIHSPNIPSEEWIVDLVKKAAQKIPVERLWVNPDCGLKTRNWPETEAALANLVSAAKRLRKEFAKETTAVNSDALAKVETEA

SEQ ID NO: 16887 - protein, 473 aa, Bacillus anthracis str. 'Ames Ancestor'
MMNQNQGLKRELKSRHIFMIALGGVIGTGLFLGSGYTIHEAGPGGAIVAYLVGGFVMYLTMLCLGELAVAMPDAGSYQTYATKHISPAAGYVVGWMSWLNWSATIGIELIAVSILMKRWFPDVPSWIWCVVFAVLLFAINALSSRSFAEVEFWFASIKVITIIAFIILGGAAMFGFLDMKGNEPAPMFSSFTDYGGLFPNGLSAILITMIAVNFSFQGTELVGIAAGESENPEKTIPKAINNTVWRILVFFVLSIFILAGLFPWQQAGVIESPFVVVFDKIGIPYAADIINFVIITAVLSVANSGLYATSRMLWSMSNQGMISPIFGKLSKNGVPIYALIVSTIVGCLSLLSGIYAEDTVYLWLLSIAGFGAILVWASIALSNLLARRSYIKQGGDVKDLKFKTPLYPFVPLLALVLNVTVIVGMAFIPEQRMALYCGIPFMIVCLLFYRATRNKAHKVEHIEKTDTTEVDSL

SEQ ID NO: 16888 - protein, 519 aa, Arabidopsis thaliana
  misc_feature (308)..(308): Xaa can be any naturally occurring amino acid
  misc_feature (311)..(311): Xaa can be any naturally occurring amino acid
  unsure (1)..(519): unsure at all Xaa locations
MAFTHVCLWTLVAFVLTWTVFYLTNMKKKATDLADTVAEDQKDGAADVIIVGAGVGGSALAYALAKDGRRVHVIERDMREPERMMGEFMQPGGRLMLSKLGLQDCLEDIDAQKATGLAVYKDGKEADAPFPVDNNNFSYEPSARSFHNGRFVQQLRRKAFSLSNVRLEEGTVKSLLEEKGVVKGVTYKNKEGEETTALAPLTVVCDGCYSNLRRSLNDDNNAEIMSYIVGYISKNCRLEEPEKLHLILSKPSFTMVYQISSTDVRCGFEVLPENFPSIANGEMSTFMKNTIVPQVPPKLRKIFLKGLXDEXGAHIKVVPAKRMTSTLSKKKGVIVLGDAFNMRHPVVASGMMVLLSDILILRRLLQPLSNLGDANKVSEVINSFYDIRKPMSATVNTLGNAFSQVLIGSTDEAKEAMRQGVYDYLCSGGFRTSGMMALLGGMNPRPLSLVYHLCAITLSSIGQLLSPFPSPLRIWHSLKLFGLAMKMLVPNLKAEGVSQMLFPANAAAYHKSYMAATTL

SEQ ID NO: 16889 - protein, 506 aa, Arabidopsis thaliana
MASKYGSGVLPENKKEKGDKETPETSYSSQSVSVNTLADQVSSTLSFAPSSDSKTGGEVKFNEKSDQSGKSNTCRPSTSSDISDESTCSSFSGNNKPHKANDVRWEAIQAVRTKHGVLGLNHFRLLKRLGCGDIGTVHLAELHGTRCFFAMKVMDKGALASRKKLLRAQTEREILQCLDHPFLPTLYSHFETEKFSCLVMEFCPGGDLHTLRQRQPGKRFSEQAAKFYVAEVLLAMEYLHMLGIIYRDLKPENVLVRDDGHVMLSDFDLSLRCTVSPTVVRSTVLASEGQKNSGYCAQPACIQQPSCISAPTTCFSPRYFSSKSKKDKKMKNETGNQVSPLPELVAEPTSARSMSFVGTHEYLAPEIIKGEGHGSAVDWWTFGIFLYELLFGKTPFKGSGNRATLFNVVGQPLRFPESPVVSFAARDLIRSLLVKEPQHRLAYKRGATEMKQHPFFEGVNWALVRCASPPEIPKPVDYESAPATPAAATSTSVKSDQSNYLEFDFF

SEQ ID NO: 16890 - protein, 203 aa, Catharanthus roseus
MSEEIISVSDRFLLSLIEEHLLSDNSDDSSSELTSTEENWEEIFADFLNWSGSEIQKRGSPSSESCQSNSMAESCQEDSVVGTPPEAAAGGGCSKDWNRYKGVRRRPWGKFAAEIRDPKKKGSRIWLGTYETPEDAALAYDAAAFNMRGAKARLNFPHLIGSNISGPVRVNPRKRFPAEPSTTSSSSSSSSSENSGGRKKRRY

SEQ ID NO: 16891 - protein, 137 aa, Arabidopsis thaliana
  misc_feature (2)..(2): Xaa can be any naturally occurring amino acid
  misc_feature (88)..(88): Xaa can be any naturally occurring amino acid
  misc_feature (116)..(116): Xaa can be any naturally occurring amino acid
  misc_feature (118)..(118): Xaa can be any naturally occurring amino acid
  misc_feature (135)..(135): Xaa can be any naturally occurring amino acid
  unsure (1)..(137): unsure at all Xaa locations
RXKMDDKLLEFLPPTKRTTESFAEHFTKAGLTALVEYNERKIFEVKLKEIKAVLTSQVTEEINVDEVTEMVKQQVKDAKLPETEVVHXIWDGIMNAVQWSGENQQQNSNAVLRQVXTXWAPLLNTLCSPGTMVMXPV

SEQ ID NO: 16892 - protein, 386 aa, Agrobacterium tumefaciens str. C58
MKIAIIRKIPTRPEQISRPSHSARAGPETHCSMPCGFAASRKAGRIAVKETIKEIVMGMLVEGVWKDVWYDTKETKGHFKRSASQFRNWVTVDGAVGPSGEGGFEAEKDRYHLYVSFACPWAHRTLIFRKLKKLEDLISVSVVDPLMLENGWEFKPEGERTPGATQDHLFGSSTLWQVYTKADPTYSGRVTVPVLWDKKRGTIVSNESAEIIRMFNVAFNDLTGSDADYYPKALRAEIDALNDVIYDTVNNGVYKAGFATTQDAYQQNAVKVFETLDMLEDRLKDRRFLFGSEQTEADWRLFTTLVRFDPVYVGHFKCNIRRIHDYPHLTGYLRDLYQTPGVPDTVDMRHIKEHYYRSHRTINPTGIVPIGPELDLTMAHGREALS

SEQ ID NO: 16893 - protein, 180 aa, Shewanella oneidensis MR-1
MKILRIIQGVGTQLRSLSMVFSHAWHPRETLNYPEEAVYAAPRYRGRIVLTRDPDGDERCVACNLCAVACPVGCISLQKSERDDGRWYPEFFRINFSRCIFCGLCEEACPTTAIQLTPDFEMGEYRRQDLVYEKEDLLISGPGKYPDYNFYRMSGMAIDGKPKGDAENEAKPIDVKSLLP

SEQ ID NO: 16894 - protein, 444 aa, Xylella fastidiosa Ann-1
MNHSRSHALFVQAQTRIPGGVNSPVRAFRSVGGEPFFVARADGPYLFDVDGHRYIDYVGSWGPMIVGHNHPGVREAVQVAISNGLSYGAPCAAEVTMAETIARLVPSCQMVRMVNSGTEATLSAIRLARGATGRNYIVKFEGCYHGHGDSFLVKGGSGMLTLGLPSSPGVPAELSKLTITLTYNDFDAATALFEEMGHHIAAVIVEPVIGNANCIPPRPGYLQHLRTLCTQYGVLLIFDEVMTGFRVALGGAQALYGVTPDLTTFGKIIGGGMPVGAYGGRRDLMQHIAPAGPIYQAGTLSGNPVAMAAGLAMLELIQAPDFYTHLSNAAAALCTGLQQAASQAGIAMTTQQIGGMFGLFFTDQQVETYAQATACNTDRFNRFFHAMLQRGVFFAPSAYEAGFISSAHSPNIIEATLEAARTAFQTIANEAAILSKSETPIKMR

SEQ ID NO: 16895 - protein, 330 aa, Bacillus cereus E33L
MNSILICGGAGYIGSHAVKKLVDEGLSVVVVDNLQTGHEDAITEGAKFYNGDLRDKAFLRDVFTQENIEAVMHFAADSLVGVSMEKPLQYYNNNVYGALCLLEVMDEFKVDKFIFSSTAATYGEVDVDLITEETMTNPTNTYGETKLAIEKMLHWYSQASNLRYKIFRYFNVAGATPNGIIGEDHRPETHLIPLVLQVALGQREKIMMFGDDYNTPDGTCIRDYIHVEDLVAAHFLGLKDLQNGGESDFYNLGNGNGFSVKEIVDAVREVTNHEIPAEVAPRRAGDPARLVASSQKAKEKLGWDPQYVNVKTIIEHAWNWHQKKPNGYEK

SEQ ID NO: 16896 - protein, 189 aa, Triticum aestivum
  misc_feature (112)..(112): Xaa can be any naturally occurring amino acid
  unsure (1)..(189): unsure at all Xaa locations
KQDKGDTEEAQSECNGDGAAPGQLSSPATVDPKWVKRILANRQSAQRSRVRKLQYISELERSVTSLQTEVSALSPRVAFLDHQRSLLTLGNSHLKQRIAALARDKIFKDAHXGCTEEGDREAEASLPAAEPQERGTPGTRRRPPGPRRQQQRLDRQRGDRRALVIEIRHIGLRTTKCCRCSSCCCYCCC

SEQ ID NO: 16897 - protein, 328 aa, Rhodopseudomonas palustris CGA009
MPGETGASKPIDLLIYGPRKEVIDQGFPAGYVLHKCERADDLEKLSDEARGRIRGIAVTGLVPTGAAMLARFPKLEIVASFGVGYDHVDSAWAAQHGVIVTNTPDVLTEEVADTALGLLIATLREFIRADKYVRAGRWQTQDYPLSTGSLRDRKVGMVGMGRIGQAIARRLDASLVPVVYHSRKPAPGVAYKHYPNLIEMAKEVDTLVVITPGGPTTAKLINAEVLDALGPRGVVINVARGSVIDEAALIEALKSGKILAAGLDVFAAEPTVPEELRAMDNVVLLPHIGSASVVTRNAMNQLVVDNLKAWFSGRPPLTPVAETPVKGR

SEQ ID NO: 16898 - protein, 350 aa, Bacillus thuringiensis serovar konkukian str. 97-27
MKALLWHNQRDVRVEEVPEPTVKPGAVKIKVKWCGICGTDLHEYLAGPIFIPTEEHPLTHVKAPVILGHEFSGEVVEIGEGVTSHKVGDRVVVEPIYSCGKCEACKHGHYNVCEQLVFHGLGGEGGGFSEYTVVPEDMVHHIPDEMTYEQGALVEPAAVAVHAVRQSKLKEGEAVAVFGCGPIGLLVIQAAKAAGATPVIAVELSKERQELAKLAGADYVLNPATQDVLAEIRNLTNGLGVNVSFEVTGVEVVLRQAIESTSFEGQTVIVSVWEKDATITPNNLVLKEKEVVGILGYRHIFPAVIKLISSGQIQAEKLITKKITVDQVVEEGFEALVKDKTQVKILVSPK

SEQ ID NO: 16899 - protein, 486 aa, Kluyveromyces lactis
MGNLPSHSNRPHHKHPSTMSQNVKDVSMVDINEAMNERQDDTSNKVETPGASSNLTQSLSQMNIDDRNELTPQLSSRKSTLIFNDDFDDISNQHKHIEHQNNYDDGRIITDNEDEDEDVVNNIITGPSDGSASSLSADSPAASSHSEDGRHQNSAYTNNSQEQHANKVSGNHYDGNVQHPGPAINQQTQPVPERRPTMVPVEITWQQGGSKVYVTGSFTGWRKMIGLVPVTDKPGVFHIKLQLPPGTHRFRFIVDNELRFSDFLPTATDQMGNFVNYLEIVPPESIEMMNYELDAQQQTQQKQNMQNQQLSDNVSQSQKIRDQTIQSQVRRQPSQSKDGKLSARSQLALHIEEDPDDMGNGYTRFKEEQQLKTDYEYTQDIPAVFTDPSVMEQYYLTLDQQQNNQQNMSWLTPPQLPPQLENVILNNYNKNAEPGSENNSGALPIPNHVVLNHLATSSIKHNTLCVASIVRYKRKYATQILYAPLQ

SEQ ID NO: 16900 - protein, 491 aa, Oryza sativa (indica cultivar-group)
MDPCKFRPSSSFDTKTTTTNAGAPVWNDNEALTVGPRGPILLEDYHLIEKVAHFARERIPERVVHARGASAKGFFECTHDVTDITCADFLRSPGAQTPVIVRFSTVIHERGSQETIRDPRGFAVKFYTREGNWDLLGNNFPVFFIRDGIKFPDVIHAFKPNPRSHVQEYWRVFDFLSHHPESLHTFFFLFDDVGIPTDYRHMDGFGVNTYTFVTRDAKARYVKFHWKPTCGVSCLMDDEATLVGGKNHSHATQDLYDSIAAGNFPEWKLFVQVIDPEEEERFDFDPLDDTKTWPEDEVPLRPVGRLVLNRNVDNFFNENEQLAFGPGLVVPGIYYSDDKMLQCRVFAYADTQRYRLGPNYLMLPVNAPKCAHHNNHYDGAMNFMHRDEEVDYYPSRHAPLRHAPPTPITPRPVVGRRQKATIHKQNDFKQPGERYRSWAPDRQERFIAVRRRVAHPKVSPELRAIWVNYLSQCDESLGVKIANRLNVKPSM

SEQ ID NO: 16901 - protein, 492 aa, Solanum tuberosum
MDPSKYRPSSAYDTPFLTTNAGGPVYNNVSSLTVGPRGPVLLEDYYLIEKLATFDREKTPERVVHARGASAKGFFEVTHDISHLTCADFLRAPGAQTPVICRFSTVVHERGSPESIRDIRGFAVKFYTREGNFDLVGNNVPVFFNRDAKSFPDTIRALKPNPKSHIQENWRILDFFSFLPESLHTFAFFYDDVCLPTDYRHMEGFGVHAYQLINKEGKAHYVKFHWKPTCGVKSMSEEEAIRVGGTNHSHATKDLYDSIAAGNYPEWKLFIQTMDPEDVDKFDFDPLDVTKTWPEDLLPLIPVGRLVLNRNIDNFFAENEQLAFNPGHIVPGIYYSEDKLLQTRIFAYADTQRHRIGPNYMQLPVNAPKCGHHNNHRDGAMNMTHRDEEVDYLPSRFDPCRPAEQYPIPACVLNGRRTNCVIPKENNFKQAGERYRSWESDRQDRYITKWVESLSDPRVTHEIRSIWISYLSQADKSCGQKVASRLTVKPTM

SEQ ID NO: 16902 - protein, 472 aa, Burkholderia pseudomallei K96243
MSYRPSNASAWIQPAAPAHRTSAEYRALDAAHHLHPFSDMGSLNRAGSRVIVKAEGVHLWDSDGNRIIDGMAGLWCVNVGYGRDELIEAGSRQLRELPFYNTFFKTTHPPVIELSALLAQIAPPAFNRFFYCNSGSEGNDTVLRIAHQYWRAQNRPQKKFVISRRNGYHGSTIAGATLGGMSYMHEQMPSKVEHIVHIDQPYYFGEAREGQTPEAFGLERARQLEAKILELGAQNVAAFIGEPFQGAGGVIFPPSTYWPEIERICRQYDVLLVADEVIGGFGRTGEWFAHQHFGFAPDLMTLAKGLTSGYVPMGAVALSDRIADALIAHGEFNHGMTYSGHPVAAAVAIANLKVLRDERIVERVKTDTGPYFQQRLRETFANHPIVGDIAGAGLVAGIQLAREPRTRKRFENGGEVGTICRDYCFNGNLIMRATGDRMLLSPPLVISKPQIDEIVEKAKRAIDATAQQLGLS

SEQ ID NO: 16903 - protein, 477 aa, Magnaporthe grisea 70-15
MCATVRFLDLVKPFVPFLPEVQQPETKIPFNQKLMWTGLTLLIFLVMSQMPLYGIVSSDTSDPLYWLRMMMASNRGTLMELGITPIISSGMVFQLLAGTHMIDVNLDLKSDRELYQTAQKLFAFILSAGTATVYVFTGLYGPPSELGAGIVFLLILQLFIAGMIVILLDELLQKGYGLGSGISLFIATNICESIMWKAFSPTSINTGRGPEYEGAVIALFHLLMTWPNKQRALQEAFYRQNLPNIMNLLATLLVFCAVIYLQGLRVEIPVKSSRQRGARGSYPVRLFYTSNMPIMLQSALSSNIFIISQMLYSRFPENLLVRLFGVWEAKEGSSQLSAISGLTYYMSPPMNFTEALIDPIHTALYIVYMLTACAVFSKTWIEVSGSSPRDVAKQLKDQGLVMAGHRDQSMYKELKRIIPTAAAFGGACIGALSVASDLMGALGSGTGTLLAVTIIYGYFEIAAKEGDLAGMKGMVMG

SEQ ID NO: 16904 - protein, 155 aa, Yarrowia lipolytica CLIB122
MSELHVQNERAFQKQPHIFQNAKSKVNRKTKRWYKEVGLGFKTPSAAITGDYIDKKCPFVGDISIRGKILTGKVVSTKMHRTIIIRREYLHYIPKYNRYEKRHKNLAAHVSPAFRVENGDMVTVGQCRPLSKTVRFNVLRVLPATGKANKAFSKF

SEQ ID NO: 16905 - protein, 534 aa, Mycoplasma hyopneumoniae 232
MAKFIFVTGGVLSGIGKGVSVASVANLLKSCGYSVYILKLDPYLNVDPGVLSPYEHGEVFVTADGGETDLDLGHYERFVAQNFSKDSNHTSGKILLSIIEKERKGFYQGKTVQIIPHVIDEIILRIKNVAKKYKTDFVLVEIGGTVGDMESNPFYFAASQMASESNFKDVFFIHTTYIPFLNASGEFKTKPAQFSIAKLNSRGIRANAIFLRLENDKIDEKIAKKVAKSAFLSLENIIIIPNLQNIYQLPLLLDKTALLKSIFLHFQLEFRQPKLEKWKEFTNLLLKKWEKTVKIGALGKYTEFLDAYKSILEAFKICAAHQKVNLELEFVDTADKNFSLARLKNFQGIIILPGFGFRGFENKVEAAIFTYQNNIPTIGICLGMQVMTVAMARLNGIKNAHSAEFLAEKPDQISVLDYNHQEGSKLQIGGTLRLGEYQVIFAENSKIAKIYGKNSAFERHRHRFEVVKKYSAKIENTDFIFSGKDAKTDLIEVCESKSHIFYIGVQYHPEFITRPLDPHPLFNSFIAAIIENVY

SEQ ID NO: 16906 - protein, 398 aa, Lactococcus lactis
MKLLNNLLTSLTQYENEMIQIRRHLHQYPEISFQEKETFKYIMGFYKELDCEPKLIGKGFGIIVDIEGGKSGKTLALRADFDALAIFEDNDLSFKSVNPGVMHACGHDAHTAYLMVLARELVKIKQELPGRVRIVHQPAEEVSPGGAKSMIKAGALDGVDNMIGVHVMTTIKTGVIAYHNKETQTGRSNFTITIKGNGGHASMPQLSNDAIVAASYFVTELQTVISRRIDPFDMGTVTIGSFDGAGSFNAIQDKVLLKGDVRMMKETTRKVIRDQVKQIAKGVGVTFGVEVIVDYDDNYPVLFNSENLTHFVVDSLKDQNISEVNNIVDLGPQNPSEDFSYYGQVVPSTFFYIGAQPEDGGNYPHHSPLFKMNEKSILIAAKAVATVTINYLFFNKKM

SEQ ID NO: 16907 - protein, 340 aa, Yarrowia lipolytica CLIB122
MRSFRAVRNFSTTAKRLSQAPKASTPNASSGNGFVLAFVAAAAGAGAYYYYANSPAAKVETFNATKADYQKVYDAIADKLIEDDDYDDGSYGPVLLRLAWHSSGTYNKSDNKFGSSGGTMRFKPEASHAANNGLVNARNFLKPIHEKFPWISTGDLYTLGGVTAVQELGGPIIPWKRGRVDEPESASPPDGSLPDASQGATHVRNVFNRQGFNDQEMVALIGAHALGRCHKQNSGFEGPWTFSPTMFTNDFYKLLLDDKWQWKKWDGNPQYEDVKTKSLMMLPTDMALATDKNFKKWATAYAKDQDLFFKDFSAAFSKMLNNGVDFPQGTEIWEFKPKNA

SEQ ID NO: 16908 - protein, 389 aa, Enterococcus faecalis V583
MAAFDYPKNEGVAFVEQEELIAIRRQLHQIPEIGLEEKETQAFLLNEIDKMKQPYLQVRTWQTGILVFIEGKNPQKTIGWRADIDGLPIQEEVVSAFQSKRPGFMHACGHDFHMTIGLGVLKELSQQQPDNNFLFLFQPAEENEAGGMLMYEDHAFGEWLPDEFYALHVNPDLPVGTISTRVGTLFAATCEVNITLKGKGGHAAFPHQANDMVLAATNLIQQAQTIVSRNVDPVVGAVVTFGTFHAGTACNVIAEEATLSGTIRTLTAETNEQTQRRIREISEGIAQSFQCEVTVHLDQKGYLPVVNEPACTTNFIEYMSKQATVQFQQAPVAMTGEDFGYLLSKVPGTMFWLGVASPYSLHSAKFEPNEEALLFGVEAVSGFLKSLDN

SEQ ID NO: 16909 - protein, 274 aa, Enterococcus faecalis V583
MTLDKTKKLANGNEMPRLGLGVWRVEDGSEATNSVKWALEVGYRLIDTAAVYKNEVGVGEGIRQSGIPREEIFVTTKLWNEDQGYENAIKAFDKSLEKLGLDYVDLYLIHWPVAGKYKESWKALEEIYASGRAKAIGVSNFHQHHLEDLLTEANVVPMVDQIELHPTLTQEPLRKYLAENKIAVEAWSPLGQGNLLSEPVLVKIGEKYGKSAAQVIIRWHLQNDIIVIPKSVHEKRIQENFAVFDFELTPEEITAINQLNKDHRFGADPDNFDF

SEQ ID NO: 16910 - protein, 619 aa, Nostoc sp. PCC 7120
MVSLVMSGLTFWAVNTIQQDAQVNDTRFGRDLGLLLAANVAPLVADHNLTEVAQFSQRFYSSTSSVRYMLYADETGKIFFGIPFWEPEVENSLSIERRIQLPEEYPGDGEKPMVRQHMSPDGIVTDVFIPLIVDKKYLGVLAIGINPNQTAVISTNFTRDVTIAVFITIWVMVILAGVVNALTITKPIKELLVGVKQIAAGNFKQRIDLPLGGELGELILNFNEMAERLERYEEQNIEELTAEKAKLETLVSTIADGAVLIDNNMQVILVNPTARHIFGWEGADDVVGSNVLHHLPPAVQMEITRPLYEMAAGECDSAEFRLTLNQPSNRTIRILLTTVLNLQRESIKGIAITVQDITREVELNEAKSQFISNVSHELRTPLFNIKSFIETLHDYGEDLSLEERQEFLQTVNHETDRLTRLVNDVLDLSKLESGRSYSFDGVDLAQAIEQTLRTYQLNARDKGIELIQDVAPGLPLVLGNYDLLLQVLANLVGNALKFTSSGGKIAIRTYVLNTKSNSPNQPAQVRIEVSDTGIGIAQEDQQAIFDRFFRVENRVHTLEGTGLGLSIVRNIVERHRSRVNLVSEVGVGTTFWFDLILFEDEAPKKMVESGEEKAAMPTS

SEQ ID NO: 16911 - protein, 354 aa, Zea mays
MSWRRNQLRAFLVLAVILLITAATYRANAQPAPPADPTPAADTCADPSVEGACRNVPKALRLKLIAIPTILVSSVIGVCLPLLSRSVPALRPDRNLFVIVKAFASGVILATGYMHVLPDSFSNLTSPCLPRKPFYNRRKGGNTSGRRTSGAVADHESPAHEHHWHSHGHGHGHGHAGGIVVADKPEDDEASQVQLRRNRVVVQVLEMGIVVHSVVIGLGMGASQNVCTIRPLVTAMCFHQLFEGMGLGGCILQAEYGAKMKAGLVFFFSTTTPFGIALGLALTKVYRENSPTALIVVGLLNAASAGLLHYMALVELLAADFMGPKLQSSVRLQLLCFLAVLLGAGGMSIMAKWA

SEQ ID NO: 16912 - protein, 223 aa, Bacillus cereus E33L
MKILVVDDESSIRNLIRMQLEMEGYEVLTAADGREALERWNEGPDVLILDVMLPDTDGYELLRLFREKDRDIPVLMLTAKSQMNDKLLGLQLGADDYVTKPFNYAELILRVKNMTRRVKKKEVTVSHEVIEAGEITICPKERKVHVSGQEIQLTYREFNLCQLFVSNPQRVFMRDELLEKVWGFEYIGNTRAVDIMVQRLRKKLGNSGEYIKTIYGVGYKLDC

SEQ ID NO: 16913 - protein, 543 aa, Thermosynechococcus elongatus BP-1
MAKLVAFHEESRRSLERGINALADAVKITLGPKGRNVVLEKKYGAPQIVNDGVTIAKEIELEDAYENTGAQLMREVAAKTNDVVGDGTTTATVLAQALIREGLKNVAAGTNPIALKRGMEKAIKTIVDGIAEVAKPVEGDMIAQVATVSAGNDPEVGAMISEAMAKVGKDGVITIEESKSLQTEMEIVEGMQFDRGYISPYFVTDPERMIVQLNNAYLLLTDKKITSIQDLIPTLERVARSGRPLVIIAEDVEGEALATLVVNKLRGVLNVVAVKAPAFGERRKAMLQDIAILTGGQVISEEVGLTLEDVELTMLGEASSVTVTKDTTILVSEKGNKADIQKRVEQLKQQLAETDSEYDKEKLQERIAKLVGGVAVIKVGAATETELKDRKLRLEDALNATKAAVAEGIVPGGGVTLLHLASRIDALLPSLSPEEQTGARIVASALAAPVAQIADNAGAEGAVVVENVRAGDFNYGFNAATGAYEDLVSAGIIDPAKVVRSALQNAGSIAGMVLTTEALVVEKPEPKPAAPANGGMGGMGGMM

SEQ ID NO: 16914 - protein, 301 aa, Vitis vinifera
MEYGDIYLQAQRNKYDCLLFDLDDTLYPLSSGLAKACRNNIEDYMVEKLGIEKNKIADLGNLLYKNYGTTMAGLRAIGYDFDYDEYHSFVHGRLPYENLKPDPVLRSLLLSLPIRKVIFTNADKVHAAKALSRLGLEDCFEGVICFETLNPSHKSTVSDDEDDIAFVRLTANTATATTTTSSTEIFDIIGHFSQPNAGTALPKTPIVCKPSEAAIERALRIANINPQRTLFFEDSARNIQSGKRVGLHTVLVGTSQRIKGADFALESIHNMREALPELWEGDKKSEVGYAGQVAVETPVTA

SEQ ID NO: 16915 - protein, 396 aa, Escherichia coli
MFENITAAPADPILGLADLFRADERPGKINLGIGLYYDETGKIPVLTSVKKAEQYLLENETTKLYLGIDGIPEFGRCTQELLFGKGSALINDKRARTAQTPGGSGALRVAADFLAKNTSVKRVWVSNPSWPNHKSVFNSAGLEVREYAYYDAENHTLDFDALINSLNEAQAGDVVLFHGCCHNPTGIDPTLEQWQTLAQLSVEKGWLPLFDFAYQGFARGLEEDAEGLRAFAAMHKELIVASSYSKNFGLYNERVGACTLVAADSETVDRAFSQMKAAIRANYSSPPAHGASVVATILSNDALRAIWEQELTDMRQRIQRMRQLFVNTLQEKGANRDFSFIIKQNGMFSFSGLTKEQVLRLREEFGVYAVASGRVNVAGMTPDNMAPLCEAIVAVL

SEQ ID NO: 16916 - protein, 807 aa, Arabidopsis thaliana
MANAERMITRVHSQRERLNETLVSERNEVLALLSRVEAKGKGILQQNQIIAEFEALPEQTQKKLEGGPFFDLLKSTQEAIVLPPWVALAVRPRPGVWEYLRVNLHALLVEELQPAEFLHFKEELVDGVKNGNFTLELDFEPFNASIPRPTLHKYIGNGVDFLNRHLSAKLFHDKESLLPLLKFLRLHSHQGKNLMLSEKIQNLNTLQHTLRKAEEYLAELKPETLYEEFEAKFEEIGLERGWGDNAERVLDMIRLLLDLLEAPDPCTLETFLGRVPMVFNVVILSPHGYFAQDNVLGYPDTGGQVVYILDQVRALEIEMLQRIKQQGLNIKPRILILTRLLPDAVGTTCGERLERVYDSEYCDILRVPFRTEKGIVRKWISRFEVWPYLETYTEDAAVELSKELDGKPDLIIGNYSDGNLVASLLAHKLGVTQQCTIAHALEKTKYPDSDIYWKKLDDKYHFSCQFTADIFAMNHTDFIITSTFQEIAGSKETVGQYESHTAFTLPGLYRVVHGIDVFDPKFNIVSPGADMSIYFPYTEEKRRLTKFHSEIEELLYSDVENKEHLCVLKDKKKPILFTMARLDRVKNLSGLVEWYGKNTRLRELANLVIVGGDRRKESKDNEEKAEMKKMYDLIEEYKLNGQFRWISSQMDRVRNGELYRYICDTKGAFVQPALYEAFGLTVVEAMTCGLPTFATCKGGPAEIIVHGKSGFHIDPYHGDQAADTLADFFTKCKEDPSHWDEISKGGLQRIEDEYTWQIYSQRLLTLTGVYGFWKHVSNLDRLEARRYLEMFYALKYRPLAVPLAQDD

SEQ ID NO: 16917 - protein, 142 aa, Bacteroides thetaiotaomicron VPI-5482
MVPVKTNQNWLPSIFNDFFDNEWMARANATAPAINVIENEKDYKVELAAPGMTKNDFKVSVDESNNLVICMEKKDEKKEEKKDGKYLRREFSYSRFQQSILLPDNVEKDKISAKVEHGVLFIDIPKVVDKKVQETTKTIDVK

SEQ ID NO: 16918 - protein, 666 aa, Xylella fastidiosa 9a5c
MTKPTRRQLANAIRFLAADAVQAAHSGHPGMPMGMADIAEVLWNDFLRHNPNNPNWFNRDRFVLSNGHGSMLQYALLHLSGYDLPLDELKRFRQLHSKTAGHPERSETPGIETTTGPLGQGFANAVGFALAEKLLAQRYNRPEHLIVDHRTWVFMGDGCLMEGISHEAAALAGTWNLGKLICFWDDNNISIDGNTAGWFTEDTPARFEAYGWHVIRDIDGHDAEKIATAIQAAVAQENKPSLLCCRTVIGFGSPNKAGKESSHGAPLGAEELEATRKMLDWPYGPFEIPSEIYDGWRANGTGMLRQAEWEQGFDNYARQYPKEAAELTRRSHAELPTDFLSQLDAYIAKVHAAGPSIASRKASQMAIEAFAPFLPELIGGSADLAHSNLTLWKGSQTVVGDAPNANYAYYGVREFGMSAIANGLALHGGFIPFDATFLVFSDYARNAVRMSALIPAHVIHVYTHDSIGLGEDGPTHQPVEHLAALRYIPNNDVWRPCDAVESAVAWKAAITRKNGPSCLVFSRQNLPHQPRHDAQLEQIARGGYILVDAASSIPDIILIATGSEVSLAIEAKKTLDAMQLKTRVVSMPSTNVFERQDPTYRESVLPSKVHKRVAIEAGVTGFWWQYVGLHGAVIGLDTFGASAPADVLYKHFNITAEHVVEVAKAL

SEQ ID NO: 16919 - protein, 249 aa, Bacteroides thetaiotaomicron VPI-5482
MKRIVLLRHGESLWNKENRFTGWTDVDLSEKGVEEACKAGDALREAGFSFEAAYTSYLKRAVKTLNCVLDRLDKDWIPVEKTWRLNEKHYGMLQGLNKSETAVQYGEEQVHIWRRSYDVAPAPVGKDDPRNPGMDIRYAGVPDSELPRTESLKDTIGRVMPYWKCIIFPALMYKDSLLVVAHGNSLRGIIKHLKGISDTDISNLNLPTAVPYVFEFDDRLVLVKDYYLGNPEEIRKRAEAVAKQGMAKK

SEQ ID NO: 16920 - protein, 545 aa, Streptococcus pyogenes MGAS10394
MNMAKDIKFSADARAAMVRGVDMLADTVKVTLGPKGRNVVLEKAFGSPLITNDGVTIAKEIELEDHFENMGAKLVSEVASKTNDIAGDGTTTATVLTQAIVHEGLKNVTAGANPIGIRRGIETATATAVEALKAIAQPVSGKEAIAQVAAVSSRSEKVGEYISEAMERVGNDGVITIEESRGMETELEVVEGMQFDRGYLSQYMVTDNEKMVADLENPFILITDKKVSNIQDILPLLEEVLKTNRPLLIIADDVDGEALPTLVLNKIRGTFNVVAVKAPGFGDRRKAMLEDIAILTGGTVITEDLGLELKDATMTALGQAAKITVDKDSTVIVEGSGSSEAIANRIALIKSQLETTTSDFDREKLQERLAKLAGGVAVIKVGAPTETALKEMKLRIEDALNATRAAVEEGIVAGGGTALITVIEKVAALELEGDDATGRNIVLRALEEPVRQIALNAGYEGSVVIDKLKNSPAGTGFNAATGEWVDMIKTGIIDPVKVTRSALQNAASVASLILTTEAVVANKPEPAAPAPAMPAGMDPGMMGGF

SEQ ID NO: 16921 - protein, 377 aa, Brassica napus
  misc_feature (325)..(325): Xaa can be any naturally occurring amino acid
  unsure (1)..(377): unsure at all Xaa locations
MLTKEKKKKNCLRYLVLKNNHSPSGIIRVYVTGESALYHATISRPTRPPTRPKVDPEESSESPLVLVHRPPTLAYMDDHLSRNFRLLNAHLSPDPLPVFLSRHAASVTAFVNIGRLKIDAELLSHLPSLQLLVCTSVGTDHVDLAECKRRGIAVTNAGDAFSDDVADCAVGLLLSVLRRIPAGDRYVRSGNWSKPGQFQLGIKVSGKRVGIIGLGSIGSRVAKRLEPFGCIISYNSRTQKQSIPYRYYSDVLSLAADNDVLVLCCSLTDQTMHVVNREVMESLGKEGVIINVGRGGLIDEEEMVKCLVEGVIGGAGLDVFEKEPXVPEELFGMDNVVLSPHAAGATPGALESVAEVAIANLKAFFTNQPLVSPVRLG

SEQ ID NO: 16922 - protein, 587 aa, Cucumis sativus
MAKVADKPFFPKPFLSFLVLSIIFGFGITLSEAGFPKIKHYKWDVEYMFWSPDCVENIVMGINGEFPGPTIRANAGDIVVVELTNKLHTEGVVIHWHGILQRGTPWADGTASISQCAINPGETFTYRFVVDKAGTYFYHGHLGMQRSAGLYGSLIVDPPEGRSEPFHYDEEINLLLSDWWHQSVHKQEVGLSSKPMRWIGEPQSILINGKGQFDCSIAAKYNQGLKQCELSGKEKCAPFILHVQPKKTYRIRIASTTALASLNFAIGNHELLVVEADGNYVQPFVTSDIDIYSGESYSVLITTDQNPLENYWVSIGVRARLPKTPPGLTLLNYLPNSASKLPISPPPETPHWEDFDRSKNFTFRIFAAMGSPKPPVRYNRRLFLLNTQNRINGFMKWAINNVSLALPPTPYLAAMKMRLNTAFNQNPPPETFPLNYDINNPPPNPETTTGNGVYKFNMGETVDVILQNANMLNPNMSEIHPWHLHGHDFWVLGYGEGKFYAPEDEKKLNLKNPPLRNTVVIFPYGWTAIRFVADNPGVWAFHCHIEPHLHMGMGVVFAEGVHMVGMIPPKALACGSTALVKNYPRLP

SEQ ID NO: 16923 - protein, 216 aa, Xylella fastidiosa 9a5c
MVLTIEALKHLWRLDESRVGRSEPLPLDNRHYVKGHPLCDAFTGLAQIQFGLGCFWGAERLFWQLPGVFSTAAGYAGGGVPYPTYREVCSGETGHAEVVLVVYDHTVISFEQLLQTFWESHDPTQGMRQGNDIGTQYRSVIHCTTSKQYAAASTSREVYQQQLNTAGYTAITTEILHPAPPFYYAENEHQQYLAKHPNGYCGLGGTGVTCPIRLQV

SEQ ID NO: 16924 - protein, 353 aa, Candida sp. HA167
MSTPENLSFVLQKPFDVKFEDRPIPKLSDPYSVKIQVKKTGICGSDVHYFTHGAIGDFVVKAPMVLGHESSGVVLEVGSEVKSLKVGDRVAMEPGVPSRHSDEYKSGRYNLCPHMAFAATPPYDGTLCKYYILPEDFCVKLPEHVSLEEGALVEPLSVAVHSSKLGNIKPGSHVAIYGAGPVGLLVAAVASAFGAESVTIIDLVESRLNLAKELGATATVQVDFKDTPKESAAKVVAANNGIAPDVVIDASGAEASINSAINAIRPGGTYVQVGMGKPDVSFPIATLIGKELTVKGSFRYGYGDYPLAVSLLASGKVNVKKLITHEVKFEDAAEAFQLVRDGKAIKCIINGPE

SEQ ID NO: 16925 - protein, 491 aa, Zea mays
MEVVSCSHSCPALHQTPASTWRLRGSALGLGLGHARPSRTRRYTVACVGTTSGASNPGGSGKVHAAQGFHVSDVDAALQGIPSMKAGEAERVMIQGLPEGPDSSPISTGFWEWKPKLTVYYERPGMKNSKAPAVLFLPGFGVGTFHFEKQLRDLGRDHRVWTMDFLGQGMSLPGEDPAPSSIASEEAFWGFGQDSQPWAEELVYSVDLWQNQVQHFIEEVIREPVYIVGNSLGGFVALYFAASSPHLVKGVTLLNATPFWGFFPNPATSPRLSKIFPWAGTFPLPSFVRKITEAVWQKISDPKSIQDILKQVYADHSTNVDKVFSRIVEITQHPAAAASFASIMFAPRGQISFQEAISRCQDQGIPISLMYGREDPWIRPIWGLKVKQQVPEAPYYEISPAGHCPHDEVPEVINYLLRGWLKNLESEGSIDLPFLEEPSYAERGVSRELEFVREGSRKSVSVRLYGTKISLWSQLSSFLNTRVPKSRIVLR

SEQ ID NO: 16926 - protein, 197 aa, Brassica napus
PRFQELTPGKLGKAGMVREKSFGTTKERMLYIEHCANSKAVTIFIRGGNKMMIEETKRSIHDALCVARNLIRNKSIVYGGGAAEIACSLAVDAAADKYPGVEQYAIRAFAEALDSVPMALAENSGLQPIETLSAVKSQQLKENIPFYGIDCNDVGTNDMREQNVFETLIGKQQQILLATQVVKMILKIDDVISNSEY

SEQ ID NO: 16927 - protein, 302 aa, Triticum aestivum
  misc_feature (49)..(49): Xaa can be any naturally occurring amino acid
  unsure (1)..(302): unsure at all Xaa locations
MASTAQLLGHLAGSTATASLSFTPVSGGGKQQGQVPAGDGAEAPRGGAXRAAVSGAEKEKAKPAESGSKEDERVVQVHSAEEFDSALQKAKNRLVVVEFAASHSVNSKRIYPCMVDLSRTCGDVDFLLVMGDESEATRELCQREGITQVPHFSFYKGTEKVHEEEGIGPDQLAGDVLYYGDNHAGVVQLHNRADVEALMAENSGEDGKLLVLDVGLKHCGPCVKVYPTVVKLSRSMADTAVFARMNGDENDACMQFLKDMEVVEVPTFLFIRDAKIVGRYVGSGKGELIGEILRYQGVRVTY

SEQ ID NO: 16928 - protein, 801 aa, Methylobacillus flagellatus KT
MDPIQHNDEFNSWNIEIIPFLIMNTLRYHAAILILMRIMHMATTHNLGFPRIGARRELKFALESYWKGESSRDALKALGATLRQRHWEIQSDLDCVPVGDFSFYDQVLDMSFILGNLPERFRDFRGDPLDNYFRVARGRSAQSAEEYAACCAGVAAGEMTKWFDTNYHYIVPEFDAHTAFTLDAAQLLAQVAEAKAQGVNAKPVIIGPVTYLAIGKAKDNTDKLDLLSRLLPVYAELLQALAAQGVEWVQVDEPILVTELDDAWQEAVETAYNYFKRVNVKLLLATYFGQLRENRALLASLPVAGVHVDAINGRDDVAPLLKLLSADKVLSLGVINGRNIWKTDLNAVLDWIEPLAQQLGERLWIAPSCSLLHVPVDLESEQRLDAEVKSWLAFAVQKLDELKLLAAALRNGRDSVKAALDANQAAIDARRHSKRVHNPAVKAALGELDAKLGQRKSPYAQRAARQAASLKLPLYPTTTIGSFPQTADIRHARSAFKAGRLDEVDYKAAMRKEIERSVHEQEKLGLDVLVHGEAERNDMVEYFGEQLEGYAFSQFGWVQSYGSRCVKPPILFGDISRPQPMTVEWIKYAQSLTSKPMKGMLTGPVTMLNWSFVRDDQPRSVSCYQLALAIRAEVLDLEKAGIHVIQIDEAALREGLPLRKSQWKEYLGWAVESFRITANGVEDDTQIHTHMCYSEFNDIIASIADMDADVITIETSRSDMELLDAFDDFKYPNQIGPGVYDIHSPNIPTLEHIVQLMEKAAERIPAERLWVNPDCGLKTRQWAEVIPALTNMVAAAKTLRA

SEQ ID NO: 16929 - protein, 279 aa, Arabidopsis thaliana
MEFEDNNNNNDEEQEEDMNLHEEEEDDDAVYDSPPLSRVLPKASTESHETTGTTSTGGGGGFMVVHGGGGSRFRFRECLKNQAVNIGGHAVDGCGEFMPAGIEGTIDALKCAACGCHRNFHRKELPYFHHAPPQHQPPPPPPGFYRLPAPVSYRPPPSQAPPLQLALPPPQRERSEDPMETSSAEAGGGIRKRHRTKFTAEQKERMLALAERIGWRIQRQDDEVIQRFCQETGVPRQVLKVWLHNNKHTLGKSPSPLHHHQAPPPPPPQSSFHHEQDQP

SEQ ID NO: 16930 - protein, 824 aa, Saccharomyces cerevisiae
MMNFFTSKSSNQDTGFSSQHQHPNGQNNGNNNSSTAGNDNGYPCKLVSSGPCASSNNGALFTNFTLQTATPTTAISQDLYAMGTTGITSENALFQMKSMNNGISSVNNNNSNTPTIITTSQEETNAGNVHGDTGGNSLQNSEDDNFSSSSTTKCLLSSTSSLSINQREAAAAAYGPDTDIPRGKLEVTIIEARDLVTRSKDSQPYVVCTFESSEFISNGPESLGAINNNNNNNNNNQHNQNQHINNNNENTNPDAASQHHNNNSGWNGSQLPSIKEHLKKKPLYTHRSSSQLDQLNSCSSVTDPSKRSSNSSSGSSNGPKNDSSHPIWHHKTTFDVLGSHSELDISVYDAAHDHMFLGQVRLYPMSHNLAHASQHQWHSLKPRVIDEVVSGDILIKWTYKQTKKRHYGPQDFEVLRLLGKGTFGQVYQVKKKDTQRIYAMKVLSKKVIVKKNEIAHTIGERNILVTTASKSSPFIVGLKFSFQTPTDLYLVTDYMSGGELFWHLQKEGRFSEDRAKFYIAELVLALEHLHDNDIVYRDLKPENILLDANGNIALCDFGLSKADLKDRTNTFCGTTEYLAPELLLDETGYTKMVDFWSLGVLIFEMCCGWSPFFAENNQKMYQKIAFGKVKFPRDVLSQEGRSFVKGLLNRNPKHRLGAIDDGRELRAHPFFADIDWEALKQKKIPPPFKPHLVSETDTSNFDPEFTTASTSYMNKHQPMMTATPLSPAMQAKFAGFTFVDESAIDEHVNNKRKFLQNSYFMEPGSFIPGNPNLPPDEDVIDDDGDEDINDGFNQEKNMNNSHSQMDFDGDQHMDDEFVSGRFEI

SEQ ID NO: 16931 - protein, 492 aa, Arabidopsis thaliana
MSDLQANKDAAAVNRQSSSSAADLNGPSPMRKMISVAPIAAGIQFGWALQLSLLTPYVQLLGVPHKWSSFIWLCGPVSGLLVQPSVGYFSDRCKSRFGRRRPFIATGALLVAVAVVLIGYAADFGHSMGDKVDEPVKMRAVVIFALGFWILDVANNTLQGPCRAFLGDLAAGDATKTRTANAFFSFFMGVGNVLGHAAGSYTNLYKIFPFTMTKACDIYCANLKSCFFLSITLLLVVTIIALWYVEDKQWSPKADSDNEKTPFFGEIFGAFKVMKRPMWMLLIVTALNWIAWFPFLLYDTDWMGREVYGGDSKGDDKMKKLYNQGIHVGGLGLMLNSIVLGCMSLGIEGISRKMGGAKRLWGAVNIILAVCLAMTVLVTKKAGEHRKIAGPMALPTDGIRAGALTLFAFLGIPLVITFSIPFVLAFINSSSSGAGQGLSLGVLNMAIVIPQMVVSFGVGPIDALFGGGNLPGFVVGAITAAISSVVAFSVLP

SEQ ID NO: 16932 - protein, 536 aa, Enterococcus faecalis V583
MTKYIFVTGGVVSSIGKGIVAASLGRLLKNRGLKVTIQKFDPYINVDPGTMSPYQHGEVFVTDDGAETDLDLGHYERFIDINLNKYSNVTTGKIYSEVLRKERKGEYLGATVQVIPHITNEIKEKIMRAAKMTDADVIITEVGGTVGDIESLPFLEALRQMKADMGSDNVMYIHTTLIPYLKAAGEMKTKPTQHSVKELRSLGIQPNILVVRTELPVSQNTKNKLAQFCDVNPEAVIESRDVETLYSIPLALQAQNMDQIVCDHLKLDAPAADMTEWRALEEKVLNLKKKTKIALVGKYVELPDAYISVVEALKHAGFDFDSDIEIDWVDSQELTAENVAERIGSADGILVPGGFGDRGIEGKIEAIRFARENDVPFLGICLGMQMACVEFGRNVVGLEDAGSAETNPDVTNNIIDLMADQENIENLGGTLRLGLYPCKLKKGTKTAAAYGNEDVVQERHRHRYEFNNKYRQLFEENGLVFSGVSPDNRLVEIVEIPEKQFFVACQFHPELISRPNRPQRLIKGFVGAALANKESK

SEQ ID NO: 16933 - protein, 196 aa, Lotus corniculatus var. japonicus
MSTARFIKCVTVGDGAVGKTCMLISYTSNTFPTDYVPTVFDNFSANVVVDGSTVNLGLWDTAGQEDYNRLRPLSYRGADVFLLAFSLLSRASYENISKKWIPELRHYAPTVPIVLVGTKLDLREDRQYLIDHPGATPITTAQGEELKKAIGAAVYLECSSKTQQNVKAVFDAAIKVVLQPPKPKKKRKKTRPCVFL

SEQ ID NO: 16934 - protein, 97 aa, Brassica napus
MGSSMDEKVVAVIMVGGPTKGTRFRPLSLNIPKPLFPIAGQPMVHHPISACKRIPNLAQIYLVGFYEEREFALYVSAISNELKVPVRYLREDKPHGS

SEQ ID NO: 16935 - protein, 447 aa, Vitis vinifera
MGSNLNFKNFGGSQQGDGSGRPPGNMPLVRQGSIYSLTFDEFQSTMGGIGKDFGSMNMDELLKNIWSAEEAQTMAAVAAATAPPISVQEGVVAGGYLQRQGSLTLPRTLSQKTVDEVWKDMSKEYGGGAKDGSGAGGSNLPQRQPTLGEMTLEEFLVRAGVVREDTQLAGKPNNGGFFGDLANLGNGNGLGIAFQQMGQNTGLMGNPRITESNNQISTQSPILPLNVNGVRSTQQQPQQLQQLQQLQQRSSQQQLFPKQAPVTYTTPVSVQSNSQLCNPGIRNGMVGISDSGINGNLVQSSVLHGGGMGMVGLGAGGATIASGSPANQSSDGIGKSNGDTSSVSPVPYAFNGGIRGRKCSGAVEKVIERRQRRMIKNRESAARSRARKQAYTMELEAEVAKLKEKNEELEKKQAEMMEMQKNQVMEMMNLQREVKKRCLRRTLTGPW

SEQ ID NO: 16936 - protein, 95 aa, Arachis hypogaea
ASKQQNRQELDERAKQGETVVPGGTGGKSLEAQEHLAEGRSKGGQTRREQLGTEGYQEMGRKGGFSTMEKSGEERAEEEGVEIDESKFATKNQNK

SEQ ID NO: 16937 - protein, 520 aa, Arabidopsis thaliana
MGCFSSKHRKTQNDGGGERSIPIIPVQTHIVDQVPDHRKPQIPSPSIPISVRDPETILGKPFEDIRKFYSLGRELGRGGLGITYMCKEIGTGNIYACKSILKRKLISELGREDVKTEIQIMQHLSGQPNVVEIKGSYEDRHSVHLVMELCAGGELFDRIIAQGHYSERAAAGTIKSIVDVVQICHLNGVIHRDLKPENFLFSSKEENAMLKVTDFGLSAFIEEGKIYKDVVGSPYYVAPEVLRQSYGKEIDIWSAGVILYILLCGVPPFWADNEEGVFVEILKCKIDFVREPWPSISDSAKDLVEKMLTEDPKRRITAAQVLEHPWIKGGEAPEKPIDSTVLSRMKQFRAMNKLKKLALKVSAVSLSEEEIKGLKTLFANMDTNRSGTITYEQLQTGLSRLRSRLSETEVQQLVEASDVDGNGTIDYYEFISATMHRYKLHHDEHVHKAFQHLDKDKNGHITRDELESAMKEYGMGDEASIKEVISEVDTDNDGKINFEEFRAMMRCGTTQPKGKQYPFH

SEQ ID NO: 16938 - protein, 77 aa, Escherichia coli
AKQDYYEILGVSKTAEEREIRKAYKRLAMKYHPDRNQGDKEAEAKFKEIKEAYEVLTDSQKRAAYDQYGHAAFEQGG

SEQ ID NO: 16939 - protein, 426 aa, Lactobacillus plantarum
MTKKAAFHNDEVVLDIHDRPKLGSWLGLSVQHLFSMFGSTVLVPILVGLNPGIALFSSGVGTLMYILITRGKIPAYMGSSFSFIVVMQSLMKTAGYPAIAQGTVAVGCVYLLVSLLVTLIGSDWIDKALPPIVVGPIVMVIGLSLAGTAAKDATMNGSSYDIKYFGVAMATMLLTVIFNMYLRGFMSLVPILLGIVCGYIIAVLVGIVDFSGVEKAQWFAMPAFQLPFISYHPGIYWGAILSMAPIAFVTMSEHMGHIMVLNKLTKRNFFKNPGLNHTLAGDGTASIIAGFVGGPPVTSYGENIGVLAITRVHSIYVLGGAAFFAIVFSFVGKLSALIESIPSPVIGGVSFLLFGVIASSGMRILIDNKVDFNQKRNLMIASAILVIGIGNAYLQLGSFQFSGLAVATVLGIVMNLVLPKTAVNEK

SEQ ID NO: 16940 - protein, 269 aa, Triticum aestivum
MQILNEQLAAPSTGLMVKESASPGSGSGSAGGAAEKMGRGRIEIKRIENTTNRQVTFCKRRNGLLKKAYELSVLCDAEVALIVFSGRGRLYEYSNNSVKATIERYKKATSDTSSAGTVAEINAQHYQQESAKLKQQITTLQNSNRTLIGDTMATMSHRDLKQLEGRLDKGLGKIRARKNELLCAEIEYMQRREMELQNNNFFLREKVAETERGQQQTLNMMGAASTSNEYEQNMIHCDPRTFLQFNFMQQHPQYCSQQEDRKSFNSVGR

SEQ ID NO: 16941 - protein, 446 aa, Bdellovibrio bacteriovorus HD100
MKIKHLEDLNTLVSLSKRRGFVFQSSEIYGGLGSCWDYGPLGSLMKLNVKRAWWNAMTRRPDIVGLDAAILMHPMVWKASGHVDGFSDPLVDCKECKTRFRADNTDSYINEKKCPNCGSKNLSEERSFNLMFKTHMGPLEDSGSVVYLRPETAQGHFVNFQNCQQASRYKIPFGIAAIGKSFRNEITPGNFIFRTREFEQMEMQYFVEPGTDEQFFKEWKERRWNFYIKFGIKPENLKFKDHDKLAHYAKAAVDVEFKFPMGFSELEGIHNRSDFDLSQHMKFSGKNLEYFDEPNKKKYIPYVIETAVGCDRLFLAFLCDAYREEVTTDEAGKEDVRVVMGLHPEIAPFKVAVLPLSKKEELSSISEKLRDQLAEDFDVNYDESQSIGKRYRRQDEIGTPFCVTVDFDTINDQAVTVRHRDKMTQERVAITQLNAYIAAKLKTFNQ

SEQ ID NO: 16942 - protein, 239 aa, Lactobacillus sakei subsp. sakei 23K
MDASLTTRLAAEFIGTAIMIIFGNGAVANVELKGTKGFSSDWFLIAFGYGCGVMIPAVMFGSISGNHLNPAVTLSFAVMGLFPWENVLPYIIVQFLGAMVGQLLLVAAYKPYYDRTTNQEGILGSFVTIDAAHSRMNGFVNEFLGTLILVFGALAIGAGKFGAAGHIVVGLLVMTLVASLGGPTGPALNPARDLGPRLVHMLTPLKNKGDSQWSYAWVPVVAPIIGAICGAGIYQFIFA

SEQ ID NO: 16943 - protein, 418 aa, Haemophilus somnus 2336
MSLKEMGKNAKQAATILAQLSQQQKNTALQIIAEQLELQSDKILVENAKDIQLAKENGLSDAIIDRLLLTKERINSIAKDVRHIISLSDPIGQIIDGGILESGTKLERVRVPLGVIGVIYEARPNVTVDVATLCLKTSNAVILRGGKETNYSNKILVKVIQDALEQTGLPKNAVQAITDPDRNFVLELLKLDKYVDMIIPRGGAGLHEFCKQNSTIPVIIGGVGVCHVFVEESAEQDKALAVIDNAKTQRPSTCNTLETLLVQESIATEFLPKLVAHLKHKNVKYHADPTALSILEKQNAEVSIVQEQQLRQEWGSLDLNVVIVKDIQQAIAHITEYGTQHSEAILTSSPRLAHQFVSLVDAAAVYVNASTRFTDGGQFGLGAEVAVSTQKLHARGPMGLEALTTYKWVCSGDYTVRQ

SEQ ID NO: 16944 - protein, 633 aa, Saccharomyces cerevisiae
MSSNNNTNTAPANANSSHHHHHHHHHHHHHGHGGSNSTLNNPKSSLADGAHIGNYQIVKTLGEGSFGKVKLAYHTTTGQKVALKIINKKVLAKSDMQGRIEREISYLRLLRHPHIIKLYDVIKSKDEIIMVIEYAGNELFDYIVQRDKMSEQEARRFFQQIISAVEYCHRHKIVHRDLKPENLLLDEHLNVKIADFGLSNIMTDGNFLKTSCGSPNYAAPEVISGKLYAGPEVDVWSCGVILYVMLCRRLPFDDESIPVLFKNISNGVYTLPKFLSPGAAGLIKRMLIVNPLNRISIHEIMQDDWFKVDLPEYLLPPDLKPHPEEENENNDSKKDGSSPDNDEIDDNLVNILSSTMGYEKDEIYESLESSEDTPAFNEIRDAYMLIKENKSLIKDMKANKSVSDELDTFLSQSPPTFQQQSKSHQKSQVDHETAKQHARRMASAITQQRTYHQSPFMDQYKEEDSTVSILPTSLPQIHRANMLAQGSPAASKISPLVTKKSKTRWHFGIRSRSYPLDVMGEIYIALKNLGAEWAKPSEEDLWTIKLRWKYDIGNKTNTNEKIPDLMKMVIQLFQIETNNYLVDFKFDGWESSYGDDTTVSNISEDEMSTFSAYPFLHLTTKLIMELAVNSQSN

SEQ ID NO: 16945 - protein, 630 aa, Vitis vinifera
HQEIDLMKIVKKVSDPKSAGGLGLQLPLIVRLPDVLQNRLESLQSAFDFAIQSQGYESHYQGVFPVKCNQDRFIVEDVVKFGSAFRFGLEAGSKPELLLAMSCLCKGNPEALLVCNGFKDADYIALALVARKLALNTVIVLEQEEELDLVINLSQKLSVRPVIGVRAKLRTKHAGHFGSTSGEKGKFGLTTTQILRVVRKLEQAGMLDSLQLLHFHIGSQIPSTDLLADGVSEAAQIYCELVRLGAHMRVIDIGGGLGIDYDGSKSSESDISVGYGLEEYAMAVVRAVQHVCDRKSVKHPVICSESGRALVSHHSILIFEAVSASVHDSPATSLSLQRFVEGLSEEARVDYQNLAAAAVSGEYETCLRFADQLKQRCVDQFKEGSLGIEQLADVDGLCDLVSKEVGATDPVRTYHVNLSVFTCIPDFWGIGQLFPIVPIHRLDQRPGARGILSDLTCDSDGKIDKFIGGESSLPLHELEGSDVVFGGSGKYYLGMFLGGAYEEALGGLHNLFGGPSVVRVLQSDGPHSFAVTRAMPGPSCGDVLRVMQHEPELMFETLKHRAEECGHEDGMTNGSLASGLALSFHKMPYLVAGSSCCMTNSGYYYGNEDNYSRVADSAAGDDDHWSYCFA

SEQ ID NO: 16946 - protein, 394 aa, Yarrowia lipolytica CLIB122
MLTAARRSTRLTSRLGHQVRAYSIADDADKKCTITLKEDSYTTYMLDSPPPLEFEMTKGELLQMYKDMVTVRRLEMAADALYKAKKIRGFCHLSTGQEAVAVGIEKAIDHDDSVITAYRCHGFAYMRGASVRAIIAELLGKRTGVSYGKGGSMHMFTEGFYGGNGIVGAQVPVGAGLAFAHKYLEQTGKATFALYGDGASNQGQIFEAYNMAKLWDLPCIFACENNKYGMGTAAARSSALTQYYKRGQYIPGLKVNGMDILSVYQGAKFAKEWTTHGKGPLVMEFETYRYGGHSMSDPGTTYRTREEIQYMRSHNDPISGLKAHILELNFATEDELKSVDKAARAMVDKEVALAESDPAPEATAKVLFEDIYVPGTEPPVIRGRIPSEDYYFKN

SEQ ID NO: 16947 - protein, 115 aa, Mycobacterium leprae
MARGAQVQRPLWASTGVKNPDYADTLYVTELVAPNTVNTMPETTIDAVADHGVIRGDTISGTTLSSQKVFDSLVAVGVDLIDVFAVLEHEGVQKFVKSWNELLKETQEQLDSVAK

SEQ ID NO: 16948 - protein, 518 aa, Oryza sativa
MQFMMPLDTNACAQPMRRAGEGAGTERLMERLNIGGMTQEKALRKRCFGDGVTGTARCVFTSDADRDTPHLRTQSSRKNYADASHVSAVILGGGTGVQLFPLTSTRATPAVPVGGCYRLIDIPMSNCFNSGINKIFVMTQFNSASLNRHIHHTYLGGGINFTDGSVQVLAATQMPDEPAGWFQGTADAIRKFMWILEDHYNQNNIEHVVILCGDQLYRMNYMELVQKHVDDNADITISCAPIDGSRASDYGLVKFDDSGRVIQFLEKPEGADLESMKVDTSFLSYAIDDKQKYPYIASMGIYVLKKDVLLDILKSKYAHLQDFGSEILPRAVLEHNVKACVFTEYWEDIGTIKSFFDANLALTEQPPKFEFYDPKTPFFTSPRYLPPARLEKCKIKDAIISDGCSFSECTIEHSVIGISSRVSIGCELKDTMMMGADQYETEEETSKLLFEGKVPIGIGENTKIRNCIIDMNARIGRNVIIANTQGVQESDHPEEGYYIRSGIVVILKNATIKDGTVI

SEQ ID NO: 16949 - protein, 242 aa, Nostoc sp. PCC 7120
MSLKAILFDFNGVIINDERIHLQLIDEILIQENLQPQKVQERQASLGRSDRACFQELLANRGRVVSDDSLTQLLNSKAQAYVLEVEKLEKLPIYPGVEDLIYQARSRHLHLGIVSGAVRQEIELVLNHAKLAEYFTVIVAGDDITTSKPKPDGYLLAVERLNQEYPQLNLLPQECLAIEDTPAGIAAAKRAQMQVVGVANTYPFHMLQRCCNWTVDYLSDLELERVQKIFSGGEFPAIVSEC

SEQ ID NO: 16950 - protein, 391 aa, Thermosynechococcus elongatus BP-1
MPLAKARRSFFMVNTVAKPEFEELRPGIKAPAKETILTPRFYTTDFEAMANMDITENKAELEAILEEFRCDYNRHHFVRDEEFEQSWDHIDGETRRLFIEFLERSCTAEFSGFLLYKELSRRLKDRNPLLAECFALMSRDEARHAGFLNKAMADFNLSLDLGFLTQHRSYTYFEPEFIFYATYLSEKIGYWRYITIYRHLEKHPEHRIYPIFRFFENWCQDENRHGDFFDAVMRAQPQMLDRPRTFWQKIKEIPLSLSGKKWARYFMVCWVPPKLWCRFFLLSVFATMYLNDLQRAKFYTALGLDAREYDREVIAKTNETAGRVFPVILDVDHPEFYQRLERCVENNAKLTEIAKQNGGFLKKLPLYLSNVWQMIKLFLIPAKEPTRVAVR

SEQ ID NO: 16951 - protein, 329 aa, Thermosynechococcus elongatus BP-1
MSQPTVLCAGEVLFDCLEIPPDPPQCFLGGAPANVACGLVKLGVSAAFLGAVGEDPLGERACAELAALGVNIEAVERVAGLPTRQVRVQLVEGDRQFVGFAPAGTSVFADMQFCGQQVSPLLLTGARFFVTGTLGLASEPTATTIAHLVHQLRQKGTLILIDANWRPIFWSDPRVAPERICPFLAQAHFLKLAKEEAELFFSDSDPQVVYRALWGRAPDHGVVITDGDQAIRYFWHENQGELQPPSMSVVDTTGAGDGFVAGWIAQLLQGTPETYRDPAWQVACLEFATVVGALVTTKRGAIAGQPTLAEVRQWLRDHPQRKIQTHSTG

SEQ ID NO: 16952 - protein, 586 aa, Bacillus anthracis str. 'Ames Ancestor'
MQGIKRYLQFVKPYRWLIAITIMIGLVKFGIPLIMPWLLKYIIDDVIQGAGSLQDKTSQLVTAIGIAFFIFAVLRPPIEYYRQYFAQRIANTILYDLRKHIFGHLQKLSLRYYSNTKTGEIISRVIHDVEQTKDFVITGLMNVWLDTATIAIAIIVMFSMNIKLTFVALLILPIYVVAVKYFFGRLRKLTKERSQALATMQGYLHERIQGMQVTRSFALEEYEGKQFEKRNNEFLTKALTHTSWTARTFSAVNTLTDLGPLLVIGFAAYEVIQGQLTLGTMVAFVGYMDSLYSPLRRLVNSSTTLTQSFASMDRVFELLDEKYDIVNVPSAVQTKKLNGEVIFDNVSFRYNADEKEILHNLSLTMLPGEKVALVGASGGGKSSLASLIPRFYDVSSGAVYVDGIDVRKYDMRNLRSHIGIVLQDNLLFSDTIGANILYGNPKATEEEVIAAAKAAQIHDFIIELPDGYDTVVGERGVKLSGGQRQRVAIARVFLKNPSLLILDEATPALDLENERYIQEALQTLAADRTTIIIAHRLATITHVDTIIYIEDGEIKETGSHEELMKKRGYYYNLYQLQHITETAPLA

SEQ ID NO: 16953 - protein, 255 aa, Burkholderia vietnamiensis G4
MNTQDNPLSHLFANNDAWVKRQLAEDPEFFTRLADQQAPEYLWIGCSDSRVPANQIIGLPPGEVFVHRNIANVVVHSDLNCLSVIQFAVDILRVKHIMVVGHYGCSGVNAALHNRRVGLADNWLHHVQDVRERHAALLDEWPVGEARYRRLIELNAIEQVVNVCRATIVNDAWARGQSLTVHALVYGVHDGRMRNLGMSVSRFDALEATYRRCVAALTARGQHAPDNDMVAADAAHLEHVAQAVADTLKPCDDAQ

SEQ ID NO: 16954 - protein, 514 aa, Xylella fastidiosa Ann-1
MNSRIHTRCFGLLAITLPLAACGAQHNNSPTPTAHSTPIVTPSTTPAPQLVAGLPDFTQLVDQVGPGVVNIETVITRKKVGKRRGIPLDNDIPEFFRRFFGPDFQMPNQPRGGQDDEGGIAGRGMGSGFIISKDGYILTNHHVITGASEVTIKLTDRREFKAKVIGSDEQYDVALLKIDAKNLPTVRIGDSSSLKPGQWVVAIGSPFGLDHSVTAGIVSALGRSTSDDQRYVPFIQTDVPINQGNSGGPLLNTRGEVIGINSQIFSASGGYMGISFAIPINLAINAAEQIRKTGKVQRSMLGVEIGPIDALKAQGLGLPDSRGALVNNIPPHSPAAKAGIEVGDVIRSVNGKVISSFSDLPPLIGMMPPGTKATLGIIRDGKSLEIVVTLSALNQDATASEDEDDTAPSKPETSANVELLGLQVENLSAAERERLASSQNAKGGVRITAVTTPWARNANPPLVEGLFILRIGRTPVSNVAELNRVLGNYKKGDVIMLLVTNGRGTFYSALKAGG

SEQ ID NO: 16955 - protein, 542 aa, Streptococcus pyogenes MGAS10394
MTIDKKKVVYQIYPKSYKDTTGNGVGDLRGIIAKLPYLQELGIDMIWLNPFYPSPQRDNGYDVSDYTAVNPDFGTMADFEDLVKAAKEHQIELMLDMVLNHCSTDHEWFQKALAGDPYYQDFFILRDQPTDWVSKFGGNAWAPFGDTGKYYLHLFDVTQADLNWRNPHVREELAKVVNFWRDKGVKGFRFDVINLIGKDEELVDCPVNDGKPAYTDRPITHTYLHDLNQASFGQDDSFMTVGEMSATTIDNCLLYTAPEREELSMAFNFHHLKVDYENGQKWTIMAFDFAALRDLFHAWGEGMSQGNGWNALFYNNHDQPRALNRFVDVTHFRNEGATMLAASIHLSRGTPYIYMGEEIGMLDPDFDSMDDYVDVESLNAYSSLLVSGKSAEEAFAIIKDKSRDNARTPMQWDASEHAGFTTGKPWLEVSKSYRDINVETEKEGRIFPFYQRLIALRKELPIIAEGDYRAAFKDSQSVYAFERHLGDQCLLVLNHFYADEVELELPPRYQHGQVLISNYEKVSICEKVILKPYQTLAILAEN

SEQ ID NO: 16956 - protein, 494 aa, Wolbachia endosymbiont of Onchocerca volvulus
MKSKVLSIFLCFLISFSLYARVFNWSTEKAADINTSIYNCNQGLADLVEELLPAFVSISSEQVIKQGNSNRTRVPLPRNDFFDGFREFFEYFDQFFMDRGPSVNREAVLLGSGFIIDKSGIIVTNYHVIKDAQHITVTMNDDTYFKAEVLGYDAKTDLAVLKIKADKDFSFVTLGNSDEARVGDMVMAIGNPFGLGGPVSTGIISARSRDISIGTTSEFIQTDAAINRGNSGGPLFDLNGKVIGINTAIYSPSESGGNVGIGFAIPSNLAISIIDTLKSGKKIKHGWLGVQVQPITREFAESLGLKDVKGALVANIVKDSPAEKGGIKVGDILLEFDGKKIDRMTHYPKWFQGLNLGKKVQIKLLRKGKEVNVKVVIEESVNAAKIAIQKKNRSISDYITGLTVSNLPKEPKESKNGPPIKGVIVTNVDSNSNATLRGIKKGDIIIQLDGVDIENTENFQKQVDLAIKKSGKDSIMLLIYRNGNQFFTSIKLKK

SEQ ID NO: 16957 - protein, 403 aa, Burkholderia vietnamiensis G4
MKPGAPPIATPLLDTLQRGLAELDAQGLRRVRRTADTACDAHMRVDGRDIVGFASNDYLGLAAHPALVAAFAEGAQRYGSGSGGSHLLGGHSRAHARLEDELAGFAGGFSDAPRALYFSTGYMANLAAMTALTGKQATIFSDALNHASLIDGIRLSRANVQIYPHADMHALGALLDASDAPTKLIVSDTVFSMDGDLAPLAELVALAERHGAWLVVDDAHGFGVLGPQGRGALAAAALRSPNLVYVGTLGKAAGVAGAFVVAHETAIEWMIQRARSYIFTTAAPPAVAHAVSASLKVIGGDEGDARRAHLAALIERTRALLRATRWQPVDSHTAVQPLVIGSNDATLAAMRALDARGLWVPAIRPPTVPAGTSRLRISLSAAHSFDDLARLEAALIAASEASA

SEQ ID NO: 16958 - protein, 253 aa, Silicibacter pomeroyi DSS-3
MADSGYLFSVRGRVACVTGASSGLGRRAATVLAQAGAQVVGVARRADALAEWQAEAGGETHAIPYDLSDRDGLEGLARQVVDPFGAPDILVHAAGINTRQPADEVTPEGWDITLTLNLSVPFFLSQYLVPGMKARGWGRIVNFASLQTTRAFPGGIAYGASKGGVAQMTRAMAEAWSPHGITANALGPGFFRTELTAPVFADPERAARNAAQTCIGRNGEPEDLDGPLLFLCSQASAYVTGQVLMVDGGYTAK

SEQ ID NO: 16959 - protein, 389 aa, Arabidopsis halleri subsp. halleri
MESSSHIVEVNVGKSEEERIIVASKVCGEAPCDFSDSKNASGDAKERSASMRKLSIAVVMCLVFMTVEVVGGIKANSLAILTDAAHLLSDVAAFAISLFSLWAASWEATPTQTYGFFRIEILGALVSIQLIWLLTGILVYEAIIRIVTETSEVNGFLMFLVAVFGLVVNIIMAVLLGHDHGHSHGHGHSHSHGVTDTTHPHDHDHDHDHDHGHSHGEDQHHAHGDVTEQLLDKSKTQVAAKEKRKRNINVQGAYLHVLGDSIQSVGVMIGGAIIWYNPEWKIVDLICTLVFSVIVMGTTINMSRNILEVLMESTPREIDATKLEKGLLEMEEVVAVHELHIWAITVGKVLLACHVNIRPEADADMVLNKVMDYIRREYNISHVTIQIER

SEQ ID NO: 16960 - protein, 509 aa, Bdellovibrio bacteriovorus HD100
MLKGSFKIQERMHDMAQSKKGLTTSAGAPVSDNQNSLTVGPRGPLVLQDVALIEKLAHQNRERVPERTVHAKGSGAFGTLTINGDISKYTRAKFLQPGTKTDLLIRFSTVAGERGAADAERDVRGFALKFYTEEGNFDLVGNNTPVFFVRDPYKFPDFIHTQKRDPRTNLRSPTAMWDFWSLSPESCHQVTILFSDRGLPASYRHMHGFGSHTYSLINSKEDRHWVKFHFKTQQGIKNLTNDEGAELVGRTRESHQEDLYNSIEEKSFPKWRMYVQIMSEEQAKKTWYNPFDLTKVWPHGEFPMIEVGTMELNRNPTNYFAEIEQAAFNPNNMVPGVSWSPDKMLQSRTFAYADAHRYRIGTHYEMLPVNKPKVEVNHYHLDGAMRLDVPEYNHAYYEPNSFGGPAQQEQYREPPLKLDDATMDRFDHHQGNDDYRQAGDLFRLMDADKKRQLLDNIAEHMKRGNVPEEIVRRQIEVFMRCDPAYGSGLAERMGVKVYSDKYESGSAHH

SEQ ID NO: 16961 - protein, 374 aa, Thermoproteus tenax
MQYSPGLEGIIVKESKICLIDVENSKIYYRGYDIEELADKSTFEETAYLLIYGQLPRASELDAFKERLASLRRPPEHVVKLLGLLPKSAEPIDVLRTAVSAMGMGRNLSDRSPEAELERGLEVIASMPFIAANWDRTRRGLEIADPQAEGHAEYFLRALKGDASPRQIKAMDVMLIIYAEHGMNNSAFTAVTVASTLSDMYSVISAAIASLKGPLHGGANIDAAKMIEEVGEPGRVQRWVDEALAAGKRIPGFGHRLYKRGPDPRLRVLRRLARELAEEAGDYKYYEIAERLEEYVHSRLSHKGIYANTDLYAAVIFKYLGLPTDLNLPAFAMSRAAGWVAHAVEYRRNNRLIRPTERYIGPVGLRYIPLEARG

SEQ ID NO: 16962 - protein, 151 aa, Desulfitobacterium hafniense DCB-2
MFDLVPFEGRNSGLPRKSRNLFDIDSIFENFFNDTLFPAFYNQSGQMRVDVRENEKEFIVEAELPGVNKEEIQIDCTEDRLTITVQKTESTEEQKDNYIRKERKASSMARSFAIANIRHEEITAKYENGLLTVTLPKHEKTAPKGKKIDIQ

SEQ ID NO: 16963 - protein, 269 aa, Lycopersicon esculentum
MVFPINQELLVDESSSQLRKTSGGTGGGGRGKIEIKRIENTTNRQVTFCKRRNGLLKKAYELSVLCDAEVSLIVFSSRGRLYEYANNSVRATIDRYKKHHADSTSTGSVSEANTQYYQQEASKLRRQIRDIQTYNRQIVGEALGSLSPRDLKNLEGKLEKAIGRVRSKKNELLFSEIELMQKREIELQNANMYLRAKIAEVERAQEQMNLMPGGGGGGGGGGGGGSDHQYHHQPNYEDARNNSLPVNLLEPNPHYSRRDNGDQTPLQLV

SEQ ID NO: 16964 - protein, 223 aa, Lycopersicon esculentum
MGRGKIEIKRIENNTNRQVTFCKRRNGLLKKAYELSVLCDAEIALIVFSTRGRLYEYSNNNVKATIERYKKATAETSSAYTTQELNAQFYQQESKKLRQQIQMMQNTNRHLVGEGLSSLNVRELKQLENRLERGITRIRSKKHEAILAETEDLHKREIQLEQENAFLRSKIAENERLQELSMMPSGGEEYNAFQQYLARNMLQLNMMETALPSYDPLSPDHKR

SEQ ID NO: 16965 - protein, 342 aa, Vibrio vulnificus YJ016
MRENWPTKENTMIKIAFFSAKSYDEASFNKVNGNKEYEFHYHDFRLRLKTSKMAQGCDVVCAFVNDDLSAPVLEQLALGGTKLIAMRCAGFDKVDLQAAKELGLQVVRVPAYSPEAVAEHAVGMMMCLNRRLHKAYQRTRDANFSLEGLVGFNFYGKTVGVIGTGKIGLATMRILKGLGMEILCYDPYENPLAIEMGARYTTLQEIYQSADVISLHCPMSKENFHLLNEHSFEQMKDGVMIINTSRGELLDSAAAIEALKKGKIGALGLDVYDNEKDLFFQDKSNDVIVDDVFRRLSACHNVLFTGHQAFLTHEALNNIASVTLNNVDAFFAGNTSGNELVE

SEQ ID NO: 16966 - protein, 766 aa, Saccharomyces cerevisiae
MGNRSLTEADHALLSKPLVPTSAEHTQTQEYPRPFVDGSNSQSGSELQASPQGQFGEKALTSTNRFIPLANDDPGMQHEMGLDPSMRRRREEWAERGAAKIVKDVVDPATGELTKHVVKMGIKDFKFGEQLGDGSYSSVVLATARDSGKKYAVKVLSKEYLIRQKKVKYVTVEKLALQKLNGTKGIFKLFFTFQDEASLYFLLEYAPHGDFLGLIKKYGSLNETCARYYASQIIDAVDSLHNIGIIHRDIKPENILLDKNMKVKLTDFGTAKILPEEPSNTADGKPYFDLYAKSKSFVGTAEYVSPELLNDNYTDSRCDIWAFGCILYQMLAGKPPFKAANEYLTFQKVMKIQYAFTAGFPQIVKDLVKKLLVRDPNDRLTIKQIKAHLFFHEVNFEDGSVWDDNPPEIQPYKINAEAMKPLQKVSESDTTVKMANLQLAGNGHADTPLQAPAATSQEHSVISMTAATAAFNKDYTSQPKLGSKSSTSVRSASNNTDREVIQKKVSKNRASVSSPSISTTSRGKDNRSRSSDAFWSRYLQNMDERVLLMKEVALSTRNLEDSPVGLENVALDYKNPLDIEPPTDSAGKFYKKMFLITNLGRALVFVKRRSLSMWEEQEFELQFELELNDVEKIRFISDQVLEIDGSRTIFIGCKERAVLMKLWKLIHNGMTAKPKVVSPKSDHKMFDKFILQKRQNTKKKNQAPPVPQSNRLINGLPDRCILKTPEEGALHTKRPTSLQTRSSSNYSKLLARSTQMRKNMTRTDEK

SEQ ID NO: 16967 - protein, 480 aa, Saccharomyces cerevisiae
MSSNRVLDLFKPFESFLPEVIAPERKVPYNQKLIWTGVSLLIFLILGQIPLYGIVSSETSDPLYWLRAMLASNRGTLLELGVSPIITSSMIFQFLQGTQLLQIRPESKQDRELFQIAQKVCAIILILGQALVVVMTGNYGAPSDLGLPICLLLIFQLMFASLIVMLLDELLSKGYGLGSGISLFTATNIAEQIFWRAFAPTTVNSGRGKEFEGAVIAFFHLLAVRKDKKRALVEAFYRTNLPNMFQVLMTVAIFLFVLYLQGFRYELPIRSTKVRGQIGIYPIKLFYTSNTPIMLQSALTSNIFLISQILFQKYPTNPLIRLIGVWGIRPGTQGPQMALSGLAYYIQPLMSLSEALLDPIKTIVYITFVLGSCAVFSKTWIEISGTSPRDIAKQFKDQGMVINGKRETSIYRELKKIIPTAAAFGGATIGALSVGSDLLGTLGSGASILMATTTIYGYYEAAAKEGGFTKNLVPGFSDLM

SEQ ID NO: 16968 - protein, 272 aa, Synechocystis sp. PCC 6803
MKPYLAAALQMTSRPNLTENLQEAEELIDLAVRQGAELVGLPENFAFLGNETEKLEQATAIATATEKFLQTMAQRFQVTILAGGFPFPVAGEAGKAYNTATLIAPNGQELARYHKVHLFDVNVPDGNTYWESATVMAGQKYPPVYHSDSFGNLGLSICYDVRFPELYRYLSRQGADVLFVPAAFTAYTGKDHWQVLLQARAIENTCYVIAPAQTGCHYERRHTHGHAMIIDPWGVILADAGEKPGLAIAEINPDRLKQVRQQMPSLQHRVFV

SEQ ID NO: 16969 - protein, 217 aa, Chaetomium globosum
MSKITVAGVRQNVAELLEYSNETKKRNFLETVELQIGLKNYDPQRDKRFSGTVKLPSVPRPNMAICILGDQHDIDRAKHGGVDAMSADDLKKLNKNKKLIKKLARKYDAFVASDTLIKQIPRLLGPGLSKAGKFPTPVSHADDLSAKITEVKSTVKFQLKKVLCMGVAVGNVGMTSDQLIANIMLAINYLVSLLKKGWQNVGSLTIKATMSPPKRIY

SEQ ID NO: 16970 - protein, 366 aa, Thermosynechococcus elongatus BP-1
MQGTTIFRGDAFAKVSMKAQVFRGVNQLSYEEIPIPEIAADEVLVRVRVVGLCQSDIKKIRYPLYEPPRIFGHETAGEIAAVGDAVTGWQVGQRVVVMHHIPCMHCAYCLNENYSMCHVYKTVTTTAGFIPSGGGFAEYVKVPGHIVEHGGLIPIPDPISDEEASFVEPTNCCLKAVKKAGIAPGQTVLITGAGPIGLMFIMLVNLFGARAIATDLLPSRIAKAKEVGAAAAFDARDPDLSAKVQALTHGLGVDVSLLAVPSEKAFFQALECTRKGGKILFFAEFPDEVEIPLNPNILYRREIDLMGSYSSSYRLQSLACDIIFNRRIDVKTLVSDRYPLSKLAEAVEQAVHPTPETYKILIYPES

SEQ ID NO: 16971 - protein, 120 aa, Brassica napus
MESLLTVAELSLSLLLIVLWGFISVVVFEAWRRRHSNVSVETVTTLEDPTTLKQVPCPHISDPAEKYLSLIVPAFNEEQRLPAALEETMDYLQGRASRDKSFSYEVVIVDDGSVDGTKRV

SEQ ID NO: 16972 - protein, 447 aa, Penicillium digitatum
MREIVHLQTGQCGNQIGAAFWQTISGEHGLDGDGQYNGTSDLQLERMNVYFNHASGDKYVPRAVLVDLEPGTMDAVRSGPFGKLFRPDNFVFGQSGAGNNWAKGHYTEGAELVDQVLDVVRREAEGCDCLQGFQITHSLGGGTGAGMGTLLISKIREEFPDRMMATFSVVPSPKVSDTVVEPYNATLSVHQLVEHSDETFCIDNEALYDICMRTLKLSQPSYGDLNHLVSAVMSGVTTSLRFPGQLNSDLRKLAVNMVPFPRLHFFMVGFAPLTSRGGSSYRQVSVPELTQQMFDPKNMMAASDFRNGRYLTCSALFRGKISMKEVEDQMRNIQNKNQSYFVEWIPNNVQTALCSVPPRGLKMSSTFVGNSTSIQELFKRVGDQFAAMFRRKAFLHWYTGEGMDEMEFTEAESNMNDLVSEYQQYQEASVSEGEEEYLAEDIVDEEV

SEQ ID NO: 16973 - protein, 94 aa, Thermus thermophilus
MIKPLGDRVVVKRIEEEPKTKGGIVLPDTAKEKPQKGKVIAVGTGRVLENGQRVPLEVKEGDIVVFAKYGGTEIEIDGEEYVILSERDLLAVLQ

SEQ ID NO: 16974 - protein, 220 aa, Arabidopsis thaliana
MSAMVSALTQVVSARSQTEAEGAHSQTEAEGAHSSSSSAGHKRGWLGIDSAPIPSSFARVDSSHNPIEEAREKKRRYRGVRQRPWGKWAAEIRDPHRAARVWLGTFDTAEAAARAYDEAALRFRGNKAKLNFPEDVRILPPPPPLLRSPADTVANKAEEDLINYWSYTKLLQSSGQRSFLERGQEESSNIFEHSPMEQPLPPSSSGPSSSNFPAPSLPNT

SEQ ID NO: 16975 - protein, 195 aa, Zea mays
MLHQHQHHYHGGVASLHSYLSNPDQAFHAHYYHHSNIIATPLPPTPSFHHLWPSTAQTFEQPVVHEAPAAVAAGNSPAGSGSADDGGGGGTAEAERRRRRMASNRESARRSRMRKQRQLTELWAQVVHLRGANRRLLDELNRAVRGCSDMRREKARLQKEKTDLGTKLQRLTQPQNAALPSSSSEPQPQHDAATE

SEQ ID NO: 16976 - protein, 189 aa, Glycine max
  misc_feature (129)..(129): Xaa can be any naturally occurring amino acid
  unsure (1)..(189): unsure at all Xaa locations
GSRKATGKVLATELPKIGNKCTVLYPASAKASNEIEEGLSNRGFEVTRMNTYTTVPVQHVDHTVLKIALAAPVVTVASPSSIRELIMFGFNMSIRCKGDSCVKLDASNDCFILTILGCCFCPFVNQASXGSCAWKNLLSDSEWNNSVACIGETTATMARSLGFTNVYYPAQPGIEGWVESILEALGSYD

SEQ ID NO: 16977 - protein, 661 aa, Silicibacter pomeroyi DSS-3
MSAPQVWPWTNQTPPLKGDPTPEPKPQERPTRLKHPLDAPHSVYGVDKWGKGLIVVTEEGEIGLKNPLRPEADAVSLPGILHDLEQRGIRAPMILRISSYLENEICHINDSFADAIARSGYKGAYRGVFPIKVNQQAQVIDRIVEFGHRYSYGLEAGSKPELVIALAHKLATDALIVCNGVKDAEFVRLAILSRKLGFNTVIVLESPKEADTVIAVYEELGIEPLLGVRVKLTNQISGKWEESSGDRSSFGMNTDQLVRVVDKLRDAGLIHCLKLQHSHLGSQVPDVNDVRRAVGEACRYFTELSAEGVPLTHLDLGGGMGVDYTGEKRATENSINYTVEEYCANVVETVAYAMDEAGIDHPTIVTESGRAVVATSSLLVFNVLESTLYDAPTAPGTEPDDHHLVSDLAAVNGYLTPARLQECWNDATFYRNELRALFRRGYVDLRQMARAERIYLSLMARIKTMVAEVEAETDLDAQMEKIADIYHCNFSLFQSLPDVWAIDQLHPIVPLQMLNEAPDRRAVLSDITCDSDGKVDRFILADGVSPSLPVHSLPEDQDYYLGVFFVGAYQETLGDLHNLFGDTNVVTIDLRADGGFDLLHEQEGDTISEVLSYVEYDPADCVAAFRKLVDGAISNGCLKASERKLIIGAYRDSINGYTYYE

SEQ ID NO: 16978 - protein, 142 aa, Wigglesworthia glossinidia endosymbiont of Glossina brevipalpis
MKIEQTLSIIKPNIISNNFIGNIINRLEQAKLYIIASKMIKLSWKEAVSFYIEHKNKSFFSDLINFMISHPIIVQILEGENAIKRNREIMGNTNPKIALAGTLRSDFSNDIIKNGVHGSDSEESADREIKFFFKKDRIFSRI

SEQ ID NO: 16979 - protein, 153 aa, Capsicum annuum
DLNNNNEEKKKKKKNGSCKTLRSEVVDFAADFQDFNDCFDDDFKDYSFDVKPLVFHASQLSQPAPGSKSLNSVDSNKEIEKSSKRKRKNQYRGIRQRPWGKWAAEIRDPQKGVRVWLGTFSTAEEAARAYDVEARRIRGNKAKVNFPDEAPVP

SEQ ID NO: 16980 - protein, 872 aa, Oryza sativa
  misc_feature (293)..(293): Xaa can be any naturally occurring amino acid
  misc_feature (329)..(329): Xaa can be any naturally occurring amino acid
  unsure (1)..(872): unsure at all Xaa locations
MSFGGMFDGAGSGVFSYDAGGGGGGGGVHNSRLLPTPPVPKPGGGFAAPGLSLGLQTMDGSQLGDVNRSLAMMGNGGSGSGGDGDSLGRGREEENDSRSGSDNLDGASGDELDPDNSNPRKKKKRYHRHTPQQIQELEAVFKECPHPDEKQRMELSRRLNLESRQVKFWFQNRRTQMKQTQIERHENALLRQENDKLRAENMTIREAMRNPMCASCGGAAVLGEVSLEEQHLRIENARLKDELDRVCALAGKFLGRPISSISSPGPPSLQACSGLELGVGSNGGFGLGALGAXAAMQSIPDLMGGSSGLTGGPVGSAAMRLPAGIGGLXGAMHAAAADGGAIDRAVLLELALAAMDELVKVAQMDEPLWLPSLDGGFETLNYDEYHRAFASVVGQCPAGYVSEATRESGIAIISSVDLVDSLMDAPRWSEMFPCVVARASTTDIISSGMGGTRSGSIQLMHAELQVLSPLVPLREVVFLRFCKQHAEGLWAVVDVSVDAVLRPDQNGGGGSSSSSYMGCRLLPTGCIVQDMNNGYSKVTWVVHAEYDETAAHQLYRPLLRSGQALGARRWLASLQRQCQYLAILCSNSLPARDHAAITPVGRRSMLKLAQRMTDNFCAGVCASAAQKWRRLDEWRGEGGGGGGGGGGDGEDKVRMMARHSVGAPGEPPGVVLSATTSVRLPGTLPQRVFDYLRDEQRRGDWDILANGEAMQEMDHIAKGQHHGNAVSLLRPNATSGNQNNMLILQETCTDSSGSLVVYAPVDVQSMHVVMNGGDSAYVSLLPSGFAILPDGHNNGASPSPAEVGSGASPNSAAGGGGGSNNTGSLVTVAFQILVNNLPTAKLTVESVDTVSNLLSCTIQKIKSALQASIISP

SEQ ID NO: 16981 - protein, 489 aa, Rumex palustris
MAEIQANNLLSKIASGDGHGEESAYFDGWKAYDKDPFHSSKNPLGVIQMGLAENQLCVDLVQDWVVKNPSASICTPGGVDGFKEMANFQDYHGLPEFRNAVARFMEKVRGDRVNSDPTRIVMSGGATGAHELMAFCLADPGEAFLVPTPYYPGFDRDLRWRTGIQLLPIETLSSNGFKITKAALEEAYNKAMEAGIRVKGVLITNPSNPLGTVLDKDTLVLLLTFINHYQIHLVCDEIYSATVFSDMPNRFTSIAELLEDGEVPCNRNLIHLVYSLSKDMGFPGFRVGIVYSYNDAVVNCARKMSSFGLVSSQTQHLIASMLSDDQFVDKYLSESKKRLATRYKFFTWGLSMVGISSLKSNGGLFLWMDLRRLLQEPTVEAELSLWRVIINEVKLNVSPGSSFHCSEAGWFRFAFANMDDKTVDVALRRIRSFMVKGEEAAAGDKPTVVAKKKKCWQMDLQLRLSARRLEEVMSPHSPLPLSPLVRTRT

SEQ ID NO: 16982 - protein, 455 aa, Enterobacter cloacae
MKKKNQLLSAIALSVGLSLSASVPVFAAIPSQVPGQAAIPSLAPMLEKVLPAVVSVQVEGTAVQSQRVPEELKKYFGDESPDQQAQPFEGLGSGVIIDAAKGYILTNNHVISQADKISVQLNDGREFDAKLIGGDDQSDIALLQVQNPSNLTQIAIADSDKLRVGDFAVAVGNPFGLGQTATSGIVSALGRSGLNLEGLENFIQTDASINRGNSGGALLNLNGELIGINTAILAPGGGSIGIGFAIPSNMAKTLAQQLIQFGEIKRGLLGIKGMEMSADIAKAFNINVQRGAFVSEVLPNSGSAKAGVKSGDVIVSLNDKPLNSFAELRSRIATTEPGAKVKLGLIRDGKPLDVEVTLDKSTSSSASAELIAPALQGATLSDGQLKDGTKGISIDTVEKSSPAAQAGLHQDDVIIGVNRNRVQSIAELRKVLESKPAVIALQVMRGNESIYILLR

SEQ ID NO: 16983 - protein, 355 aa, Enterobacter cloacae
MLLKLLRSTVIGLIVAGLLLLALPSLRQFNKLSAPQFDSTDETPATYNQAVRRAAPAVVNVYNRGLNTSAHNQLEIRTLGSGVIMDERGYIITNKHVINDADQIIVALQDGRVFEALLVGSDSLTDLAVLKINATGGLPVIPINRKRTPHIGDVVLAIGNPYNLGQTITQGIISATGRIGLNPSGRQNFLQTDASINHGNSGGALVNSLGELMGINTLSFDKSNDGETPEGIGFAIPFQLATKIMDKLIRDGRVIRGYIGIGGREIAPMHTQGGGIDQIQGIVVNEVAPGGPAANAGIQVNDVIVSVNGTPAVSALETMDQVAEIRPGSIIPVEVMRNDKKLTLHVTIQEYPATN

SEQ ID NO: 16984 - protein, 286 aa, Geobacter metallireducens GS-15
MTISMERNIVDSEKIAQLQEKARQLRVDIVKTLHKSQSGHTGGSLSAIDMVTALYFQVMKHNPADPAWPGRDRFVLCKGHAAPALYVALAEAGYFPKEDLMTLRRLGSHLQGHPDSKQTPGVEVCTGSLGQGLSMANGMALGLRLDGSSSRVYALLGDGELQEGQVWEAAMAAGHYKLDNLCALVDVNRLQIDGEVAKVMAVEPVTDKFRAFGWNVIDIDGHDMGAIVTALGQAAEAKGKPTVIVARTVKGKGVSFFENKASYHGVAPSDEELPKALECLGEQCYL

SEQ ID NO: 16985 - protein, 134 aa, Arabidopsis thaliana
QSSDEEGEEKKEKKKKIVEGEEDKKGLVEKIKEKLPGHHDKTAEDDVPVSTTIPVPVSESVVEHDHPEEEKKGLVEKIKEKLPGHHDEKAEDSPAVTSTPLVVTEHPVEPTTELPVEHPEEKKGILEKIIIFLF

SEQ ID NO: 16986 - protein, 314 aa, Geobacter metallireducens GS-15
MSTMIATRDAYGQTLAELGEENSSIVVLDADLSGSTKTSTFAKKFPERFFNMGIAEANMVGTAAGLAAAGKIPFVSTFAIFAVGRAWEQVRQSAAYPKANVKIVATHGGITVGEDGGSHQSVEDIAIMRAVPNMTVIVPADGPETAKAIRAAAAYKGPVYVRLGRNKVPTVTAADAPFEIGKGVQLADGTDLTFVTTGLMTAQALAAAETLKGEGISARVVHLATVKPLDGDILLKAARETGAIVTAEEHSIVGGLGGAVAEFLAENSPVPLKRVGINDRFGTSGKAEELLKYFGLMPIDLVEAARGVVARKGK

SEQ ID NO: 16987 - protein, 350 aa, Mycoplasma hyopneumoniae 232
MKPGRQTGLNVIMKKEFDFILIGRITIDFNPMDYYNNLENSSLFKKYIGGSAANIAIGLSRLKNKVGFFGSVSDDQFGNFVLNVFEKEKIDISHIKKTKDHKLGLTFTEMLSEEKSTILMYRDNVADLQIDVSDIDLDYILRTKILVISGTSLAKSPSREAVLKALFLAKNNGIKVVFDIDYRPYSWKNLDEVSLYYQIVAQNSDLIIGSYEEIQLTSRFCLENPENLIDDDYAKYWLKFVDLIIIKNGKKGSKLYQKDKKLVAKVVPVKMLKGYGGGDAYASLFLDHYLKNESDLENGLALATSAASIMVQSHSSFDLPDYQKILEFKDNALKSDPDLVQKKEWNAFKK

SEQ ID NO: 16988 - protein, 228 aa, Vibrio vulnificus YJ016
MGYRKSQKNKQNNREKVLQEFQVYLFDMDGTLVNSEPLKGQALALACQDYGSVVDFNIYKEVMGESWPVVTGHFFKHANISPELAEFNAHFRAHYERLLSENLELNRGAKAYIEHLNASGKQCAVVSSAATWMVENILNALGLKEAFKVVITQEHVTKHKPDPEAFNLALSKLGVTPEQAIIFEDSHAGVLAGRASGCNVVAIRHEFNGKNDLSGAIARIESFEALLA

SEQ ID NO: 16989 - protein, 611 aa, Yarrowia lipolytica CLIB122
MQSFKHYLQVVFNPQVERAHDEDDTNVTDGVKEMEHLNKIFSKTELVFAWCSLLLVSVCIALESQTVNVYSTFATSHFNELSLLSALAVVKSVMYTASRPTVAKLADVLGRFEALVISVVFFTVGFIMLAACQNIGTYFAAHIFYVSGQVGIQFMEQVFAADTSSLKNRMFFVSLPNFAYLFAPWIAAPITNAITKHSTWRWGYGMWCIVMPVVAIPVCGIMLRLKFKARRLGLEYGKSVRNFKETMRQFDFIGLILFTGGLTLLFLAVTLATGPKSWSQAHILAMIVIGPILLVVFPFWEMVPKYPFMPFYIIKNRTMFTCCFLICCYSIAYFLYGTYYMPWLMVCKNLSVTAATNTSVCFVVASTVSSFVGAAYTKLTNKVKPVVCAGAAIYLLGLGLTYHYRQPHHHLGQFIVAQCVEGVGSGMMQMPMLVMLQSVVSHKNVVSSTAIYLSIMTVGTIIGEAIAGSMYRQSYPKQLAIFAPFLTPAQNHLVANNIGAALKYKWQTPERMMIVTAFNDVYRRMLYPPIIVASFIFVGTLTLPDVNVSLMDDAQNNTDGENAMPHIKGDSESESMDDGMGVHHDSEDIEALAGTTSSEEASFGAEEEKKI

SEQ ID NO: 16990 - protein, 339 aa, Zea mays
MSMSFLSMVEAELPPGFRFHPRDDELICDYLAPKLGAKPGFSGCRPPMVDVDLNKVEPWDLPVAASVGPREWYFFSLKDRKYATGQRTNRATVSGYWKATGKDRPVVAARRGALVGMRKTLVFYQGRAPKGRKTEWVMHEYRMEPAAPLLDHQPSSSNSKQDEDWVLCRVICKKKLAAGGRAGGGSSRSLVASNGGRETAPATPPPPPLPPRMDTDATLAQLQAAMHATAGALEQVPCFSSFNNNTASSRAAAAAAAAQPCYLPSMATGGSHGTTSYYLDHAMLPPELGGCFDPLHGDKKLLKAVLGQLGGDAVAPGLSLQHEMAAGAVVASSAWMNHF

SEQ ID NO: 16991 - protein, 226 aa, Lactobacillus sakei subsp. sakei 23K
MTKKLSLAQKINVMRASVMGANDGILSVAGIVIGVAGATSDHFAIFISGIAGMLAGTISMAMGEYVSVSTQKDAQEMAIFNTQLNLKSNYESQSAFVRQKYIKTGIAPELATKATQEMMTADPLTTVIREKYGFLPNAFTNPYAAAIASFISFPIGSILPLAAITLFPNRISVIATIIAVMIALAITGYSAAALGKANRSKAIIRNVVSGLLTMIVTYAIGTLFKQ

SEQ ID NO: 16992 - protein, 1996 aa, GIBBERELLA ZEAE PH-1
MTTDRHPSHPLNSPLEAQSKQPRVHNNMIGDSTDQSTVSAVKDPGNATETVFAGTNALSPRRAGFGATASQAQVSSQKQLNEYREKLARDLERREMSARGLMVSPNEKIRVSPIPEEGLATSPLQTSTLTTTSTESNTTVRGAPTPGPIAGTPSYPFPRMAPSGFVPPYLHRPFTTLSPTGAPRSFSYGSFEGLGMGAQDKLVSSTSTPASNFTFNPSAMSPHPENPDFPNPNLYDLSLMLAAEPGLDAWWSNVVQIMRDVYKAERVTLAIPADSTDIENVPWGQKATFNQHREDDLSLGYMAAKHSSSIGLSTSDYDRSGPGSITAPSVADDTLHANSATRPGLSSRHSFTTYEEKRETSQTQPNTQARRPAFLARSQSNYPTGRSSREAYADFAKLNKTALDEHDAIEQQIPSWEAPLTGEKDGQGRVLPVLQALDYEADPLIDHSGVMRVLERGRAIALTRSYPYLADEAPAEPSKQSKPAAQETSSNASKNISRPRSDSFSKLSSIFNSAGSSRVPSRSKTHSAADRAKSIASRLEGRLEEDIPRPPTPKYEEFEQAPPSPWSQSPAPSPAMRADPKENPFFTDAMVDEDSFNPDTGTDDYTGIRPPEAIGVDNSWTVLHIPLSHVLLSKPTRTFKLDSTLMEQKSHSRTKSENVSAQSEEGGRNTPDSLKRDKSAPIAIISILSPIIPYPSNLKHSLEHLAPHMATTFSLCRHYSNLETELAGLQRKRPQTAGFGAVAHDGRPLENMAYLTADEIAPHQSLAGSMTSPSDYSGVSKSATGSPLGTPGWDQGSGGFVSEKRPLPTSSPAATPQGEGYFTSRQRPVPTRHETFGGTGTPRIRTSSKESSPAEKRSTRLGGLSLSQEGSDQSLSVDNKTARTSSNESTTDSTKRVSQGDSLDVSKDALQPIDDDNSAQNLADTLKTGRGNRQGHSMLHSYGADFASTFQSLPPSSTLSARPTPVSAPSRSGSLTTTAVDMPPPSDRLKGLILDSLPAHVFVALPQTGEIVWVNSRYLSYRGQTAVDLAADPWGSLHPDDRDEYLKAWGHSIRTGEQFSRTVRIKRFDGAYRWFYARAVASKDKRGVIMQFLGSYMDIHDQHIAELKAARQEEIEASEAKHRLLANLIPQIIFTATEDEGITFANEQWLSYTGQSFSDSLGLGFMDFVHPDDLAKCRIPTTQPPTPGGQRRDGQNSAYQQGSQHSEATSTSTIQASRTRTPQDSPMRGTQQVLSRHNSSSGSSAYEWPTADLTELARKGIIKVATDSAGRVSYTTEVRLLSKTGEYRWHLIRCVEIDTIDFGSGASSYFGSATDINDHKLLETKLKEAMETKGRFLSNMSHEIRTPLIGISGMVSFLQDTTLNEEQLDYTNTIQTSANSLIMIINDILDLSKVDAGMMKLKHEWFHTRSMIEDVNELVSTMAIAKRLELNYLVEADVPAWVKGDKVRIRQVLLNVTGNAIKFTAEGEVFSRCRVYMAEGSSVADNEIMLEFSVIDTGRGFSKEEADLIFKPFSQIDGSSTRQHGGSGLGLVISRQLAELHGGNMTGRATPGKGSTFTFTARFGLPTAEDHPNLPESPPPTGAYTPRPEVVDNVPSSIKPLPPPRHLRSVEVASPGGTTSEFTSPGGLSVGSSNLSVRSTKSQVTDRSSATSVTGGLARFSEAAKASGQDLSQMKLEMPSGRSSPGTHLLPSVGSPEDFRPPMYSILIICPQFHSREATTQHIEMTLPKDVPHQITALASVKEAQTLISGEDPIKFTHIVINLPSPEAIIGLMDDITKTQSIEQTTILVLSDSVQRQAVIKLAAGTKYAQLLSDNLVTFIYKPVKPSRFAVIFDPNKMRDLSIDRNRSTAQQMVENQKASYQEIERRMGNKGYQVLLVEDNPVNQKVLMKFLKKIGVDVEIAVDGAECTTMVLSKPHRHYSLILCDLHMPRKDGYQACREIRQWEAANRYPPMPIIALSANVMSDVQEKCAAAGFSDYVAKPVDFIDLSRAMSTFF

SEQ ID NO: 16993 - protein, 420 aa, Mycobacterium leprae
MTTSPELVTGKAFPNVVVTGIAMTTALATDAETTWKLLLDNQSGIRMLDDPFIEEFNLPVRIGGHLLEEFDHQLTRVELRRMGYLQRMSTVLSRRLWENAGSPEVDTNRLMVSIGTGLGSAEELVFSYDDMRARGMKAVSPLAVQKYMPNGAAAAVGLEHHAKAGVMTPVSACASGSEAIAHAWQQIVLGEADSAICGGVETKIEAVPIAGFSQMRIVMSTKNDNPAGACRPFDRDRDGFVFGEAGALMLIETEDSAKARSANILARIMGASITSDGFHMVAPDPNGERAGHAIARAVHLAGLSPSDIDHVNAHATGTQVGDLAEAKAINKALCNNRPAVYAPKSALGHSVGAVGAVESILTVLALRDQVIPPTLNLVNLDPDIDLDVVAGKPRPGDYRYAVNNSFGFGGHNVAIAFGCY

SEQ ID NO: 16994 - protein, 141 aa, Zea mays
  misc_feature (17)..(17): Xaa can be any naturally occurring amino acid
  misc_feature (50)..(50): Xaa can be any naturally occurring amino acid
  misc_feature (109)..(109): Xaa can be any naturally occurring amino acid
  unsure (1)..(141): unsure at all Xaa locations
GRSAWDRRRRGVDTHRXEKRRLSNRESARGAGLRKQKNLDELEQEVARLXADNARVGARAVDIAYYDTRVEQENTVLRARADELGDRLRFCNEVLRLGEELSGDDMDIXKEMPEDDPVLHTWYLAYPDAVMPIGAQDMLHY

SEQ ID NO: 16995 - protein, 337 aa, Triticum aestivum
  misc_feature (290)..(290): Xaa can be any naturally occurring amino acid
  misc_feature (323)..(323): Xaa can be any naturally occurring amino acid
  unsure (1)..(337): unsure at all Xaa locations
MAGAAPDRAALTVGPGMDMPIMHDSDRYELVRDIGSGNFGVARLMRDRRTMELVAVKYIERGEKIDENVQREIINHRSLKHPNIIRFKEVILTPTHLAIVMEYASGGELFERICKNIRFSEDEARYFFQQLISGVSYCHSMQVCHRDLKLENTLLDGSPAPRLKICDFGYSKSSVLHSQPKSTVGTPAYIAPEVLLKKEYDGKIADVWSCGVTLYVMVVGAYPFEDPEEPKNFRKTIQRILSVQYSIPDNVDISPECRHLISRIFVGDPALRITIPEIRSHNWFLKNLPXADLMDDDSMSSQYEEPEQRMQTMDEIMQILTEXATIPPACSRINHNS

SEQ ID NO: 16996 - protein, 2544 aa, GIBBERELLA ZEAE PH-1
MDSAPLVTDDLLDPPPRIYERLRQIAGYTWDENQRPFHSSYDYWHVVGTRFVSSVPSPSSSHNASSPGSALRLHSGRPSPSEPYVPISNTDGYDTQAITPPASSSSNNPNDAPYIEEKVVARLSYHALREERAFHIARSLIANSDPTGEHIVKPLDLIRLNPLPGDRAQVVVAIYQHPGPNYLLEVLDMGPAFYRARTHGETFTSLRKNEPELHDPISLQYFLDFAIGAAQCLELLHHNLGMIHGEIRGDAFHFNAEKGQVKIMSFGSGVRSFEHGLTSTGWSTLSKELGARNKLLYISPEQTGRMPAEPDSRTDIYSLGVLFWTLLTQRPVFEGDTPLDIVQGVLGRRIPNVSTVRLDVPDVVGRIIQRCTAKSVTDRYHSASGLRYDLAKVQEFLGDGDWLALKEWRIGTRDVSSFFMLPAIMIGRQQEQAELSKVIDRVAKSHAISLKGNTNRFSDGSTLSNDVAAFDDISSEGASSVDGTNYRSGSFTHTAPSETKMPKTSFNPLFSDTQTVSGDTIASSPSGTLPRVARPWERHQSISIETRSLVESSGPDSQTRHSMVESTASSLSRQLGSAKFRRRDYCEVVTIEGAGGLGKSCLVQSVLADARRRGYCATAKFDTARRTAFGPLLKLLSSLFKQVWGERNTETPFHQGLKQFVRPVWPMLHRLLGLPEFLLGPPETTIGRSISSSLQFSSSKGSVRSGLKRRGSSPGGSPKLVARNPSVASQSSSDFLRTGTSTKTMRLMNIFLDVLRVFTAHKFICFCLDDLHFADDESMELISQIIASRMKMVIIMTYRTEEITWEKVQSMIHLPENEEIPRSGSPLVTRISLEPLTEDDIVQYVSTTLCRPKEEVLPLALVLQSKTAGNPFYMREMLSACHRKKCIWYDYRDSQWHYDLDRLFEQFQGEKDYDTLDTAFITHRLSELPAAARTLLAWAALIGNSFSFELICRLMSGEFDYHDDDRGACCATFTHKSYSQGEAVAGLQAAIQAYIIVPSETDDRFRFAHDRYIHASADLQECNSRKMHFIIVQTLQKYHGSEIKQLDNIASHICAAVDIIQRRISNRRQYRKLLTSCAQDAAESGAKPTAAKYYKTAVSLLQDNPWTEDREDVSYDETMQLYLRTAECYLYMGNYMAANDILSTIFANGKSTFDKAPAYVLQSRICGQSGDSVAALKSLNDCLVGLQVIVDDEPSFKKCDDKFEQLSIQIQTMGQEKLLNYKQADDANVASIGAVLSETVSVAWWSDSLRFYHLSLMMVEMHLERGAYPQSGMAFLYLAMIALSRFNMAQFAVDLSNTSQDLLYQSRDPFFLARGLMLYSMCVGHVHLTMPMLCAQMEDAVEYASVAGDRQSIILTYGVSAIFKFFGGENCADLEGFCQYGCEEIPNWYSDSRGGSVLIAVKQLCRALQGKTRTSNALEVMNDETHNAENYKNWLISCNNKGSRSITFYQSFEIIPLFLYGHYERAVEIGSHAIEQLTRAGYLLQKLQLPCSPDETFSSQVEVVIKELRRYAKMMDEWCTLSDINYLSWMKFLQAQIEELSGHYGNAIQNYEHALDHATEHDSIFDEALGNYLMAGMFIRRSARRSARAALLEAVGLFRQMGAVGVSKAVEEEHSLLLHGPTRNQRTTDMGVQTDFVADTASVQYRTVEGEDGGDLARIPSNTMNMPDLNKGERIGAWRGSMNMQAEPGAGLPALDMIDLHAILVSSQVISSVLQVDELLKTMCDVILQTCGGSATLAAIVVQENDMDTWCVAASGDPERGASAHIPGIPISGTSLIAENVVLYSTRFLESVFVPDLVSDERFGNVNDSWLQRNPVGKSIIAIPICHGNKPLLGVLYLEGEPGAFTDRNVTVLQLLVNQIGISYSNALAMKNVEKISAENRSMVAVQKRALAKALEAETKAKNAEAEAKRNVKLAEEAAKAKSIFLANVSHELRTPLNGVIGNSELLRDSELNRDQLEMADSIRVSADLLLTVINDILDFSKMEADKMKLYIIAFNPEDMVREVVRAVSYSNREKTSKKNVKIVQSINLPPMLIYGDPIRLHQVLGNLIGNSLKFTEDGSITIGARLDKETQEHATLTFWVRDTGIGIPPQQLAKLFQPFSQADASTARKYGGSGLGLSICKSLIETMMKGKIRLESEENVGTTAWFTVTFEKAKPDVAAGDVQTKATSSTDRYFAAASPVERAESPNPYLDLSKVPKDEIRICVAEDNPINQKIAIQYVQRLGYKGVQAYDNGLKAVEGLRQKAKEGKPYHVVLMDVQMPVLDGYEATKLIRKDSLDAVRTILVIAMTASAIQGDREKCLAAGMNDYLAKPVRSEILKKKLDAYLCVEHAPPKPEPSPPVPQRSTPSPHTLVGAPTAKPNSSFVLPSPVVKPSVGTKGPSNASLDPMQEEAVFNQPVDHTALQAQDSPVYGKEQREPSPLSIQSSQLPLTNMAAPSRMSSDDRSIDTASIADSSTSQSQKRFPRKLIKQRRSSESNSDRPSLTGFSNDKSRSVLKKPQRQSTTNLVEEGQKAENSSFTPGKDSSKRSSLTSSASSLKDRIFPH

SEQ ID NO: 16997 - protein, 106 aa, Picrophilus torridus DSM 9790
MENIGIDVKKPERTCNDPKCPFHGNLRIHGQIIVGTVVSTKMNGSIVLKRESRRLIKKYERYETKISKFHAHLPGCIDVRPGDRVKIAECRKLAKTISFVVVEKVN

SEQ ID NO: 16998 - protein, 242 aa, Cyanidium caldarium
MFIAYLTAGAPDLNTTKQALLNLANDGADVIEIGVPYSDPLADGMILQKASQQALKNRFRLEQLWHLLAEIELPVPVVILAYYNQIFHYGVEKWVTTLVNLKVKALIVPDLPYEEAAILRAACARHHLHMIWLISPTTPKVRAKQLALACDDWIYLVSRTGVTGVDAHFDNQIPNMIAELKQVTTTPIALGFGIHQKQQLQLVKSWGADGVIIGTACMQILLEKGVDQLTEWISAMKKSSYP

SEQ ID NO: 16999 - protein, 134 aa, Brassica napus
MASSMLSLGSTSLLPREINKDKLKLGTSGSNPFLKAKCFSRVTMSVAVKPSRFEGITMAPPDPILGVSEAFKADTNELKLNLGVGAYRTEELQPYVLNVVKKAENLMLERGDNKELPPFNGAAAELLFGAGHPV

SEQ ID NO: 17000 - protein, 443 aa, Burkholderia vietnamiensis G4
MLTHQENELLCRVEGDAPMGQLMRRHWTPVCLIEEVSEPDGAPVKARVFGEDLVVFRDSEGNVGVLDEYCPHRRASLVYGRNEDSGLRCLYHGWKFDVAGNVLEMVSEPAASSMTDKVKHKAYPVQEWGGMVWAYMGPQDAIPEFVPPAWAPTADTRVSIAKALLPCNWAQILEGAIDSAHSSSLHSSDFVPARVGGAEATDKNWLRPSTDKAPRLQVERTDYGFRYAALRRPIFNANTHDYVRCTVFVAPGTVLIPPNNLYNVANINVPMDDTNTAFYFIAWGDPETTPENETWRKFLRQQVGVDLDQYYRPLRNHDNRFWQDRQAMKAGNFTGISGFPNQDIAMWVTMGPIANRSDERLGGSDLAIVEFRRRMLDAITEFQQGDGTIGTGAKAIPREVCSYQAVVPKEIDWRTYAARYVSKKNPEPADQPSALATDYQVKQ

SEQ ID NO: 17001 - protein, 365 aa, Cryptococcus neoformans var. neoformans
MADFVKLSIFGTVFEVTTRYVDLQPVGMGAFGLVCSAKDQLSGTSVAIKKIMKPFSTPVLSKRTYRELKLLKHLRHENIISLSDIFISPLEDIYFVTELLGTDLHRLLTSRPLEKQFIQYFLYQILRGLKYVHSAGVVHRDLKPSNILVNENCDLKICDFGLARIQDPQMTGYVSTRYYRAPEIMLTWQKYDVAGDIWSTGCIFAEMLEGKPLFPGKDHVNQFSIITELLGTPPDDVIQTIASENTIRFVQSLPKREKVPFSTKFPNADPVSLDLLEKMLVFDPRTRISAAEGLAHEYLAPYHDPTDEPVAAEVFDWSFNDADLPVDTWKVMMYSEILDFHNLGDISQNEAEGPVTGEVPAAPAS

SEQ ID NO: 17002 - protein, 330 aa, Campylobacter jejuni
MMMKILISGGAGYIGSHTLRQFLKTDHEICVLDNLSKGSKIAIEDLQKIRTFKFFEQDLSDFQGVKALFEREKFDAIVHFAASIEVFESMQNPLKYYMNNTVNTTNLIETCLQTGVNKFIFSSTAATYGEPQTPVVSETSPLAPINPYGRSKLMSEEVLRDASMANPEFKHCILRYFNVAGACMDYTLGQRYPKATLLIKVAAECAAEKRNKLFIFGDDYDTKDGTCIRDFIHVDDISSAHLSALDYLKENESNVFNVGYGHGFSVKEVIEAMKKVSGVDFKVELAPRRAGDPSVLISDASKIRNLTSWQPKYDDLGLICKSAFDWEKQC

SEQ ID NO: 17003 - protein, 55 aa, Pinus pinea
ERSGFEGPWTSNPLIFDNSYFIELVTGEKEGLLQLPSDKALLADPSFAVYVQKYA

SEQ ID NO: 17004 - protein, 119 aa, ASPERGILLUS NIDULANS FGSC A4
MGLSYNVYLTSAKIFGCKQCKTHLADYDDIISRNFRGQHGKAYLFNNVVNINTSDAVERSMTTGRHIVRDISCRQCKETVGWKYDKAYESSEKYKEGKFILEEELLTTDFTEARLNPGG

SEQ ID NO: 17005 - protein, 486 aa, Shewanella oneidensis MR-1
MSQQYLTSQSGSPIADDQNSLSAGERGPLLLQDWHLIEKLAHFNRERIPERVVHAKGTGVYGTFTLTKDLSDYTIADHFNGVGKQTETFVRFSTVGGEMGSADAERDPRGFGLRFYTARGNHDIVGNNTPTFFLRDGIKFPDFIHTQKRNPLTNLKDPQAMWDFWSLNPEAMHQVTILMSDRGIPANYRQMHGYGSHTFSFWNAKGERFWVKFHFKSQQGVVNLSNEQADKLKGIDPDSSQRDMVVAITDGNFPRWTVNVQIMPEADANTYHINPFDLTKVWPHGDYPLIEIGVLELNRLPQNYFAEVEQVALAPSNLVPGVGASPDKMLQARLFAYADAQRYRIGANYNQLPVNCPHAAKANHHQRAGAMAGTQCPYHGSQTGGDASANYGPNSTIGALVEPANFAEPPLRLDGETARYSRYNQDDYTQAGNLYRIFSEEEKARLVATISGSLRQASMDVQQRMLAHFQKADADYGQRIKMALGL

SEQ ID NO: 17006 - protein, 130 aa, Pinus pinea
PLQLKWQTCGGAMGACTFEIELNHKANAGLVNALKLLQPIKDKYPNITYADLFQLASATAIEDAGGPEIPMQIWATGCTLNLKIVHQKESSQHAGPPSQLLICVISSYQNWRLDRYYGHCRIYQGRHTFR

SEQ ID NO: 17007 - protein, 207 aa, Malus x domestica
MGRGKIEIKRIENTTNRQVTFCKRRNGLLKKAYELSILCDAEVALIVFSTRGRLYEYSNNNSIRNTIERYKKACSDSTGSSSVTEINAQNSNRHLMGDALSTLTVKELKQVENRLERGITRIRSKKHELLLAEIEYFQKKEIELENENVYFRTKVSEVERLQQANMVSGSEMNAIQALASRHFFSQNMIEGGEATFPQQDKKNLHLG

SEQ ID NO: 17008 - protein, 139 aa, Thermoanaerobacter tengcongensis MB4
MIFMEVTLAIVKPDGVKRGLIGEILKRYENKGLRLKAAKVVTPSIELLEKHYEEHKGKPFFKPLIEYMSSGPVFAMVLEGENAVKLVRMINGATKVEDALPGTIRGDFASSTTYNVVHGSDSVESAKREIALWFPELIL

SEQ ID NO: 17009 - protein, 669 aa, Wigglesworthia glossinidia endosymbiont of Glossina brevipalpis
MKISRKILANAVRILSMDIVENAKSGHPGAPMGMSDIAEVLWRNYFNHNPNNPKWVNRDRFVLSNGHASSLMYSILHLTGYDLSIEDLKKFRKINSKTPGHPEIGVTEGVDMTTGPLGQGISSAVGLAISEKVLSHQFNKPDCEIINHYTYVFLGDGCMMEGVSHESCSLAGTMKLGKLIAFYDSNKISIDGKVQDWFDEDTYNRFTSYGWHVIKDIDGHDHKKIDLAIKEAINKKDKPSLLICNTIIAFGSPNKSGNCISHGSPLGKKEVICTRKELKWKHPPFFIPEKIYEYWNHKYKGNLLENKWKKKFDIYSARYPGLSKDLTRRLNNLLPKDWSKKINNIITSMNLKIKNISTRQASNNLLEKIGPILPELLGGSADLTPSNLTKWSKSISIKSDFSGNYIHYGAREFGMTSIANGIYTHGGFIPYTSTFLVFSEYARSAIRTAALMNSKHIMIYTHDSIGLGEDGPTHQPIEQLSCLRMIPNLSVWRPCDQLETAISWKYAIERNGPTAIILSRQDLVQQNRCIDKIDDICKGGYIIKDCKSIPDLILISTGSEVQIAIDACSILSKNKYKIRVVSMPSSDLFDSQLESYKNFVLPIKVPKIVIEAGSSVFWNKYIGYNDKIIGIDEFGKSGSCEDLFKFFKITKNNVVNKSKDLINKTKIMF

SEQ ID NO: 17010 - protein, 319 aa, Wigglesworthia glossinidia endosymbiont of Glossina brevipalpis
MNQLDYIKKFTNVVIDSGNIKYIKKYSPKDVTTNPSLILRESKSKHYYPLLMDAISYAKKKGGNLNSYIINANDKLLVNIGREILKIIDGRISIEIDVRLSFSYLDLIIRAKKIISLYNSYGIENNRILIKIAATWEGIQAAKFLEKSGINCNLTLIFSLVQAIACAESNVYLISPFVGRVNDWYIKNFKLNKNSKIDPGVKLVYKIFYFYQKYGYKTFVMGASFRNIDQIISIIGCDAITISPDFVNKLNNLKLKKIKNFIRVNLESKIKKNKLLEKEFRWKFNQNFMAVEKLSEGIRLFLRDQKKIDSFFLKKFKSG

SEQ ID NO: 17011 - protein, 182 aa, Mesembryanthemum crystallinum
MASSMVSSAAVATVNRTPAQASMVVPFNGLKSVAAFPVTKKNNDITSVATNGGRVQCMQVWPPLGKKKFETLSYLPPLSEESLMKEVQYLLNNGWVPCLEFEPTHGFVYREHGNTPGYYDGRYWTMWKLPMFGCTDPSQVVAELREAKKAYPEAFIRIIGFDNVRQVQCISFIAYKPASYDA

SEQ ID NO: 17012 - protein, 94 aa, Nicotiana plumbaginifolia
QWREGPLGPKTLCNACGVRYRSGRLFPEYRPAASPTFIPTLHSNSHRKVVEMRKKAIYGETSALEEPHNVIVEGPPMSPAPEFVPMSSYLFDVY

SEQ ID NO: 17013 - protein, 382 aa, Rhodococcus ruber
MDNNASVFRTEETLTKALEDIHALKERYKNITVQDKGKRYNSDLLEAVELGFLLEMAEVTVAGALNRKESRGGHAREDFPKRDDEKFLKHTMAYKEGTELISPIRLDYKPVVQTRYEPMERKYLMTTLEKNEADVSNLPPVPEGATMVTLKIARFNPEDGKGQHWDSFQVPALPSDRMLNLLLYVKGYLDGTLTFRRSCAHGVCGSDAMRINGVNRLACKILMKDMLPKDGKPVTITVEPIRGLPVEKDLVVDMEPFFDAFRAVKPFLIATGNEPTRERIQSQADRARFDDTTKCILCACCTTSCPVYWNDGSYFGPAAIVNAHRFIFDSRDEGAAERLDILNDVEGVWRCRTTFNCTDACPRGIQVTKAIQEVKRALLFAR

SEQ ID NO: 17014 - protein, 549 aa, Lactobacillus sakei subsp. sakei 23K
MKWWQKATVYQIYPRSFQDSNGDGIGDINGIIQRLDYLQDLGIELIWLTPMYVSPGRDNGYDIADYYQIDPIFGDLADFERLLKEAHQRGIKIMMDMVVNHTSDQHRWFQESLKGKDNPYHDYYLWRDPVDGHEPNNWLSKFSGSAWEYVPALNQYYLHLYEKRMPDLNWRNPQLREEIYQMMQFWADLGIDGLRLDVINNISKDKDFPNDTFETPSDDGRNFYTNGPHVHEYIHEMYERVFGPNNFVTVGELSSTPVSEAIRYTNPEREELSMAFTFHHVKVDYTGGKKWTLGQYRLSDLKRILSQWQTEMAAGGGWNALFWSNHDQPRAISRFLDDGQYRDQSAKLLALVEFGLQGTPYIYQGEEIAMKNANFTSIDQYQDAESINAYHQMLADGISEDLAIKILQQKSRENCRIPMQWDMTANHGFTTGMPWLQPVVADDYSVATKAQAPDSVFAFYQQLVALRKTEPVLIEGQYQLLAPEDEAVYTYQRQLGDKKVRVIANFTDQTQQRANAAVKAVMMSNYPDQQLTTDQITLRPYEAVMLEIE

SEQ ID NO: 17015 - protein, 457 aa, Alkaliphilus metalliredigenes QYMF
MTYDVLVLGGGPGGYVAAIKAAHLGGKVALVENGYFGGVCLNWGCIPTKALLKNARVYQDVLMGDFYGIEGIDKSQLSINWPAMLKRKDRIVRQLVGGVKGLLKKNKVDVFDGFGTLIDANHIEVKGQQLEGKKLIIATGTSPMIPDIPGLEASMKAGNILTSKELLSIEALPKSVVILGGGVIAIEFATLLNALDVEVTVIQRSDRILKGVEEEMALTLSKDLIKRKVKIVTNSSVEKIEGTRVFTKINGEEEIFEGDKILLSLGTSPNVKGLEALSLDMDKKGIITNDKMETSITGVYAIGDVNGKYQLAHVASAEGIVAAENAMGGNEELNYNIVPSCIYSFPEIASVGLTEEEARQKDYDVVVSKFPLAANGKAMAEGENIGFVKIIADKKYGEILGTHIMAVHATDMISEAIVSMQLEGTAYDVAKAIHPHPTMSEIVMEAAHGIMDQPIHF

SEQ ID NO: 17016 - protein, 406 aa, Frankia sp. EAN1pec
MAGPEVSISGVGLVTPGGVGVAASWAAVCAGRPTASLDPSLADGLVQIACRVPDFAPDLLLGGQRAHRLDPFVQFALVAAGEAIADAGLDPASWDGARVGVVLGCADGGPGTVEAQHRVLIERGLAQLSPLLLPMQLPNMLAGQAAIEFGATGPNLVVSTACASGATAIGVARDLLAMDRCDVVLAGGSEAMITPLVMAGFARMRALSRRAHDPASASRPFDVDRDGFVAGEGAGVLVLERLADARARGARVRARLVGYGASADAHHITSPHPSGRGIEAAVLAALADADAAPEQVRHVNAHGTGTPLNDLVEGQLLSRLFTSGPLVTSTKGTTGHLLGAAGAVEAVFSTLTVEQGLVPPTTGLRTLDPRLDIDVATVATAAAPDFVLSNSLGFGGQNAVLAIAKA

SEQ ID NO: 17017 - protein, 175 aa, Triticum aestivum
  misc_feature (86)..(86): Xaa can be any naturally occurring amino acid
  unsure (1)..(175): unsure at all Xaa locations
MSLIRRTNVLDPFSLDLWDPFDGFPFGSGGSGSLVPRTSSDTAAFASARIDWKETPEAHVFKADVPGLKKEEVKVEVEDGNILQIXGERNKEQEEKTDTWHRVERSSGKFLRRFRLPENAKAEQVKASMENSVLTVTVPKEEAKKPEVKSIQISGAMRWTAVCRAVVWSFARSSR

SEQ ID NO: 17018 - protein, 513 aa, Arabidopsis thaliana
  misc_feature (261)..(261): Xaa can be any naturally occurring amino acid
  unsure (1)..(513): unsure at all Xaa locations
MEISVASVTVSVAVVVVSWWVWRTLQWVWFKPKMLESYLRRQGLAGTPYTPLVGDLKKNFSMLAEARSKPIKLTDDITPRVVPYPLQMLKTHGRTYFTWFGPIPTITIMDPEQIKEVFNKVYDFQKAHTFPLGRFIATGLVSYDGDKWAKHRRIINPAFHLEKIKNMVPAFHQSCSEIVGEWDKLVSDKESSCEVDVWPGLVSMTADVISRTAFGSSYKEGQRIFELQAELAQLIIQAFRKAFIPGYSYLPTKSNRRMEKXAAREIQVILRGIVNKRLRAREAGEAPSDDLLGILLESNLGQTEGNGMSTEDLMEECKLFYFAGQETTSVLLVWTMVLLSQHQDWQARAREEVKQVFGDKEPDAEGLNQLKVMTMILYEVLRLYPPVTQLTRAIHKELKLGDLTLPGGVQISLPILLVQHDIELWGNDAAEFNPDRFKDGLSKATKSQVSFFPFAWGPRICIGQNFALLEAKMAMALILRRFSFEISPSYVHAPYTVITIHPQFGAQLIMHKL

SEQ ID NO: 17019 - protein, 362 aa, Alkaliphilus metalliredigenes QYMF
MIFEGYHPLDKTMFQVMDEEGNIIKPEYMPDISKEQMMEMYQLMIQTREADLKALMYQRQGRMLTYAPNIGQEAAQVGSAFPLKKEDWMVPAFRELGAWLTRGAKLEMIYLYWYGNEFGSYMPEDLKILPVSVPIASHLNHAAGIAWASKLQGKDEVTITYFGDGATSQGDFHEAMNWAGVYQVPVVFLCQNNQFAISVPRGIQTSSETIAQKALAYGMPGILVDGNDIFAMYAAVKEAFDRARRGEGPTLIEAFTYRIGAHTTSDDPKRYRSDEEVEKWKKKDPIDRMKKYLMSQGILTEEENEKIIEKAGKIAEEAFKYVEASGDTVLEDIFKYHYKEMTPQLTEQLAEYKAYLMERGEA

SEQ ID NO: 17020 - protein, 267 aa, Zea mays
  misc_feature (189)..(189): Xaa can be any naturally occurring amino acid
  misc_feature (228)..(229): Xaa can be any naturally occurring amino acid
  unsure (1)..(267): unsure at all Xaa locations
MAGLARHVDTEELLTTLKDHPMHKAGGRHSENRATSHITPYSSRYAAGTELSKFKIPQDGAPADVVHQLLKDELDLDGRPSLNLASFVGTYMEREGEQLMIENISKNLSDADEYPAMMDMHARCVSIIAHMWGVQKGEKAIGSATTGSSEAIHLGGLAMKRRWQEKRIAEGKDTSKPNIIMGANAQVAXLEKFARYFEVEARILPVSEDSSYRLDPKLVKENIDETLXXVFVILGSHYTGHYEPGEEISEILDEFEKETGVEIPIHV

SEQ ID NO: 17021 - protein, 163 aa, Zea mays subsp. parviglumis
EEGRIIEFAEKPKGEQLKAMMVDTTILGLDDVRAKEMPYIASMGIYVFSKDVMLQLLREQFPEANDFGSEVIPGATSIGKRVQAYLYDGYWEDIGTIAAFYNANLGITKKPIPDFSFYDRFAPIYTQPRHLPPSKVLDADVTDSVIGEGCVIKNCKINHSVVG

SEQ ID NO: 17022 - protein, 428 aa, Colwellia psychrerythraea 34H
MAESKATLSIDGKEIGEFPVLKGTAGTDVIDIRTLGSHGYFTYDPGFLATGSCESSITYIDGGKGVLQHRGYPIDSLAKQADYLEVCYILLNGDAPTQSEYEEFKSIITTHTMVHEKLVHFFHGFLPDAHPMAMLCGVVGAMSSFYHSDLDITDPAQRKRSAHRLIAKMPTIAAMAYKYSVGQPFVYPRNELSYAENFLHMMFSVPAEEYIVSPTVANAMDRIFTLHADHEQNASTSTVRLAGSSGANPYACIAAGVASLWGPAHGGANEACLTMLEQIGSLENVAEYVAKAKDKNDPFRLMGFGHRVYKNFDPRATVMRETCHEVLNELGISDPLLDVAMALEKVALEDPYFIEKKLYPNVDFYSGIILKAIGIPSSMFTVIFAMSRTVGWIAHWDEMLSQPGQKIGRPRQKYTGEINREFVPLNKR

SEQ ID NO: 17023 - protein, 482 aa, Frankia sp. EAN1pec
THGPYEPGPQQGPRPTAPYAQTSGWADPRSTAGAGDSTQRVDQGGPATGQGQQQSGAWWNPGHPGWGAPVPPGAAPGGQAPGGQAPGSPGGSDPYGRFTPAKPNPAPMRRRRMIAAALAIALVSGGIGGGVGALVASDDSPAVVTSSAGLRQSTGTAGVSPAADNTVAAAAQAILPSVVTIAEQSSQESGTGSGTIIRADGYILTNNHVVSGASQGGTLTVTMQDGRTFDAQVKATDPSSDLAVVKIDATGLPAATFGDSDALQVGELVVAVGSPLGLNGTVTSGIVSSLHRPVRTGDATVRDQQNTVLDAIQTDAPINPGNSGGPLVNSKGEIIGVNTAIATVGGSSPFGGSQQSGNIGVGFAIPGNYAEKVAGQLVDNGAAQHPYLGVSASTADENTRSTAASGTGAQIRSLVSGGPADKAGLHVGDVITKVGDRAVTDVDSLIAAVRSYEIGNQVQVTYQRDGSSQTATVTLLEQPPNS

SEQ ID NO: 17024 - protein, 366 aa, Yarrowia lipolytica CLIB122
KRYIVHRVNMSVDLKPKTLKRKNFKKLSLNADAGVAPQATASPPPSQPFTLDKPTLQRAPSAGNLISQMASLELGVEFKIDIRAQDLRTIQELGAGNGGSVSRVEHIPTGAVMAKKVIHIEAKEAVRRQILRELHIMHECDSPYIVSFYGAFINESSGDVVMCMEFMDCGSLDRIYKKAGPLTEEIVGHITVAVVEGLTYLYNEHRIVHRDVKPSNILVNSHGQIKLCDFGVSGELINSIADTFVGTSTYMSPERIQGGNYTVKSDVWSLGISLLELLLGKFPFDMANGAVGPMGILDLLQRIVNEPPPTLPAEDTRFSPVCRRFVDRCLYKEAERPSPQQLINDAFIITSRAKQVDMKAWAMSVQ

SEQ ID NO: 17025 - protein, 190 aa, Brassica napus
MSSLAAAQQKCKACEKTVYPVELLSADGVSYHKSCFKCSHCKSRLQLSRYSSMEGVLYCKPHYEQLFKESGSFTKNFQSPVKPAADKSSPELTRTPSRVAGMFSGTQEKCATCSKTVYPIEKVTVESQTYHKSCFKCSHGGCPISPSNYAALEGILYCKHHFAQLFKEKGSYNHLIKSASIKRSAAAAVA

SEQ ID NO: 17026 - protein, 162 aa, Zea mays subsp. parviglumis
RRRIIEFAEKPKGEQLKAMMVDTTILGLDDVRAKEMPYIASMGIYVFSKDVMLQLLREQFPEANDFGSEVIPGATSIGKRVQAYLYDGYWEDIGTIAAFYNANLGITKKPIPDFSFYDRFAPIYTQPRHLPPSKVLDADVTDSVIGEGCVIKNCKINHSVVG

SEQ ID NO: 17027 - protein, 426 aa, Colwellia psychrerythraea 34H
MEQNIFQLQYALDTFYFLICGALVMWMAAGFSMLEAGLVRAKNTTEILTKNVALYAIACIMYLVVGYDIMYGGGVFLNGIALDGASDAEALVGAVLAESAEAGFDGGAVYSNASDFFFQVVFVATAMSIVSGAVAERMKLWAFLAFTVVLTGFIYPMEGSWTWNGDAVFGLYTLGDLGFSDFAGSGIVHMAGASAALAGVLLLGARKGKYSKDGKVNAIPGANLPMATLGTFILWMGWFGFNGGSVLKLADINSANSVAMVFLNTNAAAAAGAISALIFAKILFKKADLTMTLNGALAGLVAITAEPSTPSPLQATIFGAIAGVIVVMSILALDKVKIDDPVGAISVHGVVGFFGLMIVPITNSSSSFSGQLIGAATIFVWVFVTSFIVWFALKKVIGIRVSAEEEYEGVDISDCGMEAYPEFTRG

SEQ ID NO: 17028 - protein, 448 aa, Pseudomonas putida KT2440
MNQAQTNVGKSLDVQSFINQQPLSRYQWRVVLLCFLIVFLDGLDTAAMGFIAPALSQEWGIDRASLGPVMSAALIGMVFGALGSGPLADRFGRKGVLVGAVLVFGGFSLASAYATNVDQLLVLRFLTGLGLGAGMPNATTLLSEYTPERLKSLLVTSMFCGFNLGMAGGGFISAKMIPAYGWHSLLVIGGVLPLLLALVLMIWLPESARFLVVRNRGTDKVRKTLSPIAPQVVAEAGSFSVPEQKAVAARNVFAVIFSGTYGLGTVLLWLTYFMGLVIVYLLTSWLPTLMRDSGASMEQAAFIGALFQFGGVLSAVGVGWAMDRFNPHKVIGIFYLLAGVFAYAVGQSLGNITLLATLVLVAGMCVNGAQSAMPSLAARFYPTQGRATGVSWMLGIGRFGAILGAWSGATLLGLGWSFEQVLTALLVPAALATVGVVVKGLVSHADAT

SEQ ID NO: 17029 - protein, 181 aa, Triticum aestivum
MAPTVMASSATSVAPFQGLKSTAGLPVSRRSNGASLGSVSNGGRIRCMQVWPIEGIKRFETLSYLPPVSTEALLKQVDYLIRSKWVPCLEYSKVGFIFREHNASPGYYDGRYWTMWKLPMSGCTDATQVINEVEEVKKEYPDAYVRIIGYENMRQVQCVSFIAFKPPGCEESGKAYTAHSR

SEQ ID NO: 17030 - protein, 366 aa, ASPERGILLUS NIDULANS FGSC A4
MTSQRPTSSSSSLLDIVANLASPKSLLFNAHHTNPPPSLPSQRAPTMDKSQQPSSFQQLEKLGEGTYATVFKGRNRQTGELVALKEIHLDSEEGTPSTAIREISLMKELKHESIVSLYDVIHTENKLMLVFEYMDKDLKKYMDTRGDRGQLDQATIKSFMHQLMSGIAFCHDNRVLHRDLKPQNLLINKKGQLKLGDFGLARAFGIPVNTFSNEVVTLWYRAPDVLLGSRTYNTSIDIWSAGCIMAELYTGRPLFPGTTNEDQLQKIFRLMGTPSERSWPGISQLPEYRANFHVYATQDLGLILPQIDPLGLDLLNRMLQLRPEMRIDAHGALQHPWFHDLPQLQAQLQQQQMAGYGGMMPPQQAY

SEQ ID NO: 17031 - protein, 158 aa, Picrophilus torridus DSM 9790
MKVQSVKQIAADEMKVGVSRVWIDTNSIDQVLDATSREDVRKLIDLHIIQKKQKKGNSNYRLKKRIEQLAKGRRRGEGSVRGTKYARFPRKRRWISRIRALRRELRELKTNNKIDKKTYRRYYRIIKSGSFVSRAQLRNHIQAAGLLKGDKNENSTSS

SEQ ID NO: 17032 - protein, 163 aa, Zea mays subsp. parviglumis
EEGRIIEFAEKPKGEQLKAMMVDTTILGLDDVRAKEMPYIASMGIYVFSKDVMLQLLREQFPEANDFGSEVIPGATSIGKRVQAYLYDGYWEDIGTIAAFYNANLGITKKPIPDFSFYDRFAPIYTQPRHLPPSKVLDADVTDSVIGEGCVIKNCKIHHSVVG

SEQ ID NO: 17033 - protein, 402 aa, Bacteroides fragilis NCTC 9343
MEKNIFKLDNEQLKGIAHAFREKVEEGLNKNNAEIQCIPTFILPKATDVKGKALVLDLGGTNYRVAIVDFSTEKPIIYPNNGWKKDMSIMKSPGYTREELFKELADLIVEIKREEEMPIGYCFSYPTESIPGGDARLLRWTKGVDIREMVGQFVGKPLLDYLNEKNKIRFTGVKVLNDTIASLFAGLTDKSYDAYIGLIVGTGTNMATFIPSDKITKLDPECHVQGLIPVNLESGNFYPPFLTAVDDTVDATSDSLGKQRFEKAVSGMYLGDILKAAFPLEEFEEKFDARKLTAMMNYPDIHKDIYVQVAHWIYNRSAQLVAASLAGLIALLKSYNRDIHRVCLIAEGSLFWSESRKDKNYNILVMEKLQELLRELELEDVEVHINSMDNANLIGTGIAALS

SEQ ID NO: 17034 - protein, 221 aa, Enterococcus faecalis V583
MKKAIAECLGTFILVFFGTGTAVLGNGMEGIGTTGIALAFGLTIVAAAYSIGTISGAHLNPAVSIGMWLNKRMTTMELIYYVVGQIVGGLIASFALLSILKGAGKSIENLGQNGVGELSVAGALTVEIILTFIFVLVVMTVTSAKKGNASLAGIVIGLTLTMIHLVGIPLTGTSVNPARSIAPAVFAGGSALSELWIFIVAPLIGGLLAALVAKFVLDTEE

SEQ ID NO: 17035 - protein, 163 aa, Zea mays subsp. parviglumis
EEGRIIEFAEKPKGEQLKATMVDTTILGLDDVRAKEMPYIASMGIYVFSKDVMLQLLREQFPEANDFGSEVIPGATSIGKRVQAYLYDGYWEDIGTIAAFYNANLGITKKPIPDFSFYDRFAPIYTQPRHLPPSKVLDADVTDSVIGEGCVIKNCKIHHSVVG

SEQ ID NO: 17036 - protein, 153 aa, Oryza sativa
MAPKAEKKPAAKKPAEEEPAAEKAEKAPAGKKPKAEKRLPAGKAEKGSGEGRKAGRKKAKKSVETYKIYIFKVLKQVHPDIGISSKAMSIMNSFINDIFEKLAGESAKLARYNKKPTITSREIQTSVRLVLPGELAKHAVSEGTKAVTKFTSA

SEQ ID NO: 17037 - protein, 609 aa, Enterococcus faecalis V583
MKKKVHFFQSVNFKIALSFILLLLIAIQIIGGYFIRELEATTISDFKKNMDSQVVQLSNTLSTQMSNKDLERSDVDANLKKALSDFSNADISEARIVDDKGIIRATNDLNQQNIIGKKNDYRDLNDFTSKKYQALDNDKRVYVNVQPIQSPTGETVIGVLYVKSNLENKYQEITNTASIFFTASIIAAAISIIVTLLIARSITKPIGEMREQAIRIARGDYAGKVEVHGKDELGQLAETFNQLSERIEEAQETMEAERNRLDSVLTHMTDGVIATDRRGKVITINEMALSLLNVKNENVIGTSLLELLDIEEDYTLRKLLEEPDELLIDRSTSDREEDQMIIRVDFTMIRRESGFITGLVCVLHDVTEQEKNERERREFVSNVSHELRTPLTSMRSYIEALSEGAWENPEIAPNFLKVTLEETDRMIRMINDLLNLSRMDSGNTHLQLEYVNFNELINFVLDRFDMMIENEQKNYKICREFTKRDLWVELDTDKVIQVLDNILNNAIKYSPDGGVITCRLVETHNNVVFSISDQGLGIPKKDLGKVFERFYRVDKARARAQGGTGLGLAISKEVIRAHNGSIWVESTEGEGSTFYISLPYEPYEEDWWE

SEQ ID NO: 17038 - protein, 95 aa, Kluyveromyces lactis NRRL Y-1140
MPVLTLFKNLDKVENILKERYKILRPGSSSEEEILKKFYLLGDQLTEADLRLYTTMIRFDPVYAQHFKANLNTVRGGYPYIHLWLRNLYWNGKTY

SEQ ID NO: 17039 - protein, 345 aa, Triticum aestivum
FEGGDISGVLVPWVYVGMCFSSFCWHVEDHHLYSLNYLHWGAPKMWYGVPGKDAVNLESAMRKHLPDLFEEQPDLLHNLVTQFSPSLLKSEGVQAYRCVQREGDFVLTFPRAYHAGFNCGFNCAEAVNVAPIDWLPVGQNAVELYREQARKITVSHDKLLLGAAREAIRAQWDILFLKRNTADNLRWKSVCGPDSTICKSLKARIETELAQRQNLCSPSQSRKMDAEFDSTDRECAFCYYDLHLSASGCPCCPEKYACLLHAKQLCSCDWDKRFFLFRYDVNELNILADALGGKLSAVHRWGVSDLGLSLSSCVKREKVQDSKTVRRATDGPRRSYMSQASTVSL

SEQ ID NO: 17040 - protein, 201 aa, Aspergillus awamori
MNPEYDYLFKLLLIGDSGVGKSCLLLRFADDTYTESYISTIGVDFKIRTIELDGKTMKLQIWDTAGQERFRTITSSYYRGAHGICVVYDVTDMDSFNNVKQWLQEIDRYATEGVNKLLVGNKSDMEDKKVVEYTVAKEFADSLGIPFLETSAKNASNVEQAFLTMARQIKERMGTATVNNKPTVQVGQGQGVQSGSAGGCC

SEQ ID NO: 17041 - protein, 523 aa, Triticum aestivum
  misc_feature (426)..(426): Xaa can be any naturally occurring amino acid
  unsure (1)..(523): unsure at all Xaa locations
MARGGGNGEVELSVGVGGGGAGAGGADAPAVDISLGRLILAGMVAGGVQYGWALQLSLLTPYVQTLGLSHALTSFMWLCGPIAGLVVQPCVGLYSDKCTSRWGRRRPFILTGCILICIAVVVVGFSADIGAALGDSKEECSLYHGPRWHAAIVYVLGFWLLDFSNNTVQGPARALMADLSAQHGPSAANSIFCSWMALGNILGYSSGSTNNWHKWFPFLRTRACCEACANLKGAFLVAVLFLAFCLVITVIFAKEIPYKAIAPLPTKANGQVEVEPTGPLAVFKGFKNLPPGMPSVLLVTGLTWLSWFPFILYDTDWMGREIYHGDPKGTPDEANAFQAGVRAGAFGLLLNSVVLGFSSFLIEPLCKRLGPRVVWVSSNFLVCLSMAAICIISWWATQDLHGYIQHAITASKEIKIVSLALFAFLXGIPLAILYSVPFAVTAQLAANRGGGQGLCTGVLNIAIVIPQVIIAVGAGPWDELFGKGNIPAFGVASAFALIGGIVGIFLLPKISRRQFRAVSGGGH

SEQ ID NO: 17042 - protein, 180 aa, Mesembryanthemum crystallinum
MASMMSNAAVVGRTTPAQASMVAPFTGLKSVSAFPVTKKSNDITSIASNGGRVQCMQVWPPLGKKKFETLSYLPPLSEESLMKEVQYLLNNGWVPCLEFEPTHGFVYREHGNTPGYYDGRYWTMWKLPMFGCTDPSQVVAELEEAKKAYPEAFIRIIGFDNVRQVQCISFIAYKPASYDA

SEQ ID NO: 17043 - protein, 545 aa, Wigglesworthia glossinidia endosymbiont of Glossina brevipalpis
MCSIFGILNIKNNSISLRKKALKCSNLMKHRGPDSNGIYCDEDVILVHERLSIIDVKSGNQPLFNNSKTNVLIMNGEIYNYEEIKKNLIHDYSFNTNSDNEVVLALYKKFGLNFLNKLNGMFAFILYDIEKKIYLIGRDHIGMIPLYMGYDCDNNLYISSEMKALIPVCNYIKEFPIGSYLCNLNKKIIKYYKRNWFEFDSIKNCLLSYKKIKHSLKKSVLNHLKSEVPFGILLSGGLDSSIIASIASKELNYKNLNKKLKSFSIGLENSPDLHSSRICARYLNTDHCEVKFTEQDGLDVIKKVIYYVETYDITTIRASIPMYLISQKIKSSGIKMILSGEGADEIFGGYLYFHNAPSEKDLHDELVRKLKSLHIYDCARANKSMLAFGIEARFPFLDKKFLDVAMRINPKHKMCNKNRIEKYILRKSFINYLPNNILWRQKEQFSDGVGYKWIDSIKNFSKKIISDKKFNNAIHKFPYNTPLSKEEYLYREIFENFFPLPSAAECVPQEKSIACSSEIASKWSKYRNLNFDPSGRSLDIHISKN

SEQ ID NO: 17044 - protein, 183 aa, Mesembryanthemum crystallinum
MASSLMSNAATTMAAATTTAQANMVAPFNGLKSVSAFPVTRKNNDITSVASNGGRVQCMQVWPPLGKKKFETLSYLPPLSEESLIKEVQYLLNNGWVPCLEFEPTHGFVYREHGNTPGYYDGRYWTMWKLPMFGCTDPSQVVAELEEAKKAYPEAFIRIIGFDNVRQVQCISFIAYKPASYDA

SEQ ID NO: 17045 - protein, 503 aa, Zea mays
  misc_feature (48)..(48): Xaa can be any naturally occurring amino acid
  unsure (1)..(503): unsure at all Xaa locations
WTRRRRPCRRAATLPFSSLPSPSPCSSSRRPSGPRGGVPLHRSLAALXAAHGAGGQLAPLLSLRLGARRALVVSERGVAEECFTAHDAALAGRPRVLAGDRLGYGYTMLVWASHGDHWRALRRLLAAEIFSAARVAARAADRRSEVAALVTSLAALHLHCGGGAVSLRPRLFELVLGVMLRALTGERAHGGDVRTFQGIVEETFAVSGAPSVGDFFPALRWVDRLRGVDAALVRLQARRDAFVGGLVQDQRRRRRDAGDGRGRHAAEKQSIVDELLSLQETDPEYYTDTIIKGVVLMLLTAGTDTSALTTEWAMALLLTHPEAMRKARAEIETSVGTARLVEESDIANLPYLQCVVKETLRLRPVGPVIPAHEAMEDCTVGGFHVERGTMVLVNAWAIHQDPKLWDAPEEFRPERFLDAAGTVTAVTTPMLPFGLGRRRCPGEGLALRLISLTLAALVQCFEWDVGEGGVVDMTEGVGLTMPMAMPLAAVCRPREFVKGMLST

SEQ ID NO: 17046 - protein, 702 aa, ASPERGILLUS NIDULANS FGSC A4
MPVQTSPPSLPDSFPSFMSVFGGDPSISLEKEEQPTKVQPLNFPASINGNTRRPLPFQHRESVSSVTSGSADSSPTTTVSTFDSPITTDTSPNSSPESPTSMPLSYSKFMTASRNLENQGLSTAQSNLSKMTSESSTTQKRPDSPGRRDRNLKNLSLRMPPPLNSSRPSISTASIVETNSQHRLSAPPSPISIPPKGIRRKPAGLTIRTPGFDRSFSNNISELAPPTPHGRMSLRHAESSPSLTSVFSPSFGPKGGMQLPRPSTQHGYRRPSAHSEDNLSPVPSVADEGAIAETVLHELAEEDDIPQSRESARRSERGYPNGPIQIYDSGVFLYLEPTADEASRFDVVVNVAKEVMNPFSKTADNSQTVMSTLRNGTVDSKQQSCSTPFSAFSDASFKSALEYLPGNSSDSDSNNEPSSPEYVHVGWDHNSEILQDLYPLCELIESRISQGKKVLVHCQLGASRSASLVIAYGLYKNPQLDFNSMYETVKERSRWVSPNMSLIYQLTDFRSRLLRGSRPSSGDWSLKGSAPPTPLPDEAMSSQTEPSTDANGNPDTETTSSTVPTQGSPSSNSLSVPLTSHTTPVSANNLSFSKSLSKKRSVSPRPLALRQSFFNPESGNRFLEGESGGDSAGRQSRDPLAKNADEPSLFSPRTTGFMSMTRSRPLSGILEDGRSNVASIADPRSPPQGHERLIMRSIDEFL

SEQ ID NO: 17047 - protein, 328 aa, Silicibacter pomeroyi DSS-3
MPRERLSVVVTRRLPEVVETRLSELFNVRLRDDDTPMSRDELAAALREADVLVPTLNDRIDAGLLAQAGERMRLIANYGAGVDHIDVATARQRGILVSNTPGVLTDDTADMTMALILAVTRRIPEGLAVMQKNEWTGWAPTALLGGRVGGRRLGILGMGRIGQAVARRASAFGMQIHYHNRRRLRPEVEDALEATWWDSLDQMIARMDVISVNCPSTPSTFHLMNARRLKLMKPTGVIVNTSRGEVIDENALTRMIRTGEIAGAGLDVYEHGTQVNPRLRELPNVVLLPHMGSATLEGRIEMGEKVIINIKTFADGHRPPDQVVPAML

SEQ ID NO: 17048 - protein, 898 aa, Yersinia pestis KIM
MNIASNPAASNTKDKWVRGHMNEQYSAMRSNVSMLGTLLGDTIKEALGEHILDRVETIRKLSKSSRAGNEASRQELLTTLQNLSNDELLPVARAFSQFLNLTNTAEQYHSISPHGEAASNPEALAQLFTRLKDKKLSDQDMRSAVDDLSIELVLTAHPTEITRRTLIHKLVEVNTCLSQLDHNDLADYERNKIMRRLRQLVAQSWHTDEIRKLRPSPVDEAKWGFAVVENSLWEGVPAFLREFNEQLENSLDYRLPVEAVPIRFTSWMGGDRDGNPNVTAEITRHVLLLSRWKATDLFLRDIQVLVSELSMSECTPELRELAGGEEVLEPYRQLMKNVRTQLTNTQAYLEARLKGERVLPPHDLLVSNDQLWEPLYACYQSLKACGMEIIANGQLLDTLRRVRCFGVPLVRIDVRQESTRHTDAIAELTRYLGLGDYESWSESDKQAFLVRELNSKRPLVPLKWEPSAETQEVLETCRVIAEAPQGSIAAYVISMAKVPSDVLAVHLLLKEAGCPFTLPVAPLFETLDDLNNADDVMTQLLGIDWYRGLIQGKQMVMIGYSDSAKDAGVMAASWAQYRAQDALIKTCEKAGITLTLFHGRGGSIGRGGAPAHAALLSQPPGSLKGGLRVTEQGEMIRFKFGLPEVTISSLALYAGAILEANLLPPPEPKKEWIEVMDLLSDASCDMYRSYVRENPEFVRYFRAATPELELGKLPLGSRPAKRRPDGGVESLRAIPWIFAWTQNRLMLPAWLGAGAGLQRAIDAGKQDVLATMCRDWPFFSTRIGMLEMVFAKADLWLAEYYDQRLVDKSLWPLGQQLRDQLAADIKVVLAIANDDHLMADLPWIAESIALRNVYTDPLNVLQAELLHRSRQQEHPDACVEQALMVTIAGVAAGMRNTG

SEQ ID NO: 17049 - protein, 237 aa, Saururus chinensis
MGRGRVQLKRIENKINRQVTFSKRRTGLLKKAHEISVLCDAEVALIVFSTKGKLYDYSTNAGMARILERYERYCYAEREVAVTSPDSEGSWWLEYGKLKARIEAQQRIQRQLMGEDLDALTPKELQQLENQLESALKHVKSRKNQVIYDSMVELRRKEKLLRDENTMMEKKIQEKKKERVQQAQWEQQIQSQNSPSFLPTLNIGYHQGTATETGEKEEAHPGHNTVMLAWLLRSSNN

SEQ ID NO: 17050 - protein, 301 aa, Asarum caudigerum
AGLSSPPRERKRVRENLIFSLAFKFARFQNFRFSFSFAGGFIFFEFSSLFFFGLQEMGRGRVQLKRIENKINRQVTFSKRRTGLLKKAHEISVLCDADVALIVFSAKGKLYEYATNSSMETILERYERYSFAERELVADPESEGGWCLEYGKLKARVDALQKSHKHIMGEDLDSLSIKELQHLEQQLDVALKHIRSRKNQVMLDTISELQRKEKMLLEQNKALQKTMREKENAMVRQAQWEQDNQPQASRPSFMLSRPLPTLHIGSNYHQTRNTETEKQGDRPHSRSNSGIPAWMLSHMND

SEQ ID NO: 17051 - protein, 75 aa, Phaseolus vulgaris
RVLQISGQRTKEKEDKNEKWHRVERSSGSFLRRFRLPENAKVNEVKAAMETGVLTVTVPKEEVKKRDVKPVQITG

SEQ ID NO: 17052 - protein, 691 aa, Cryptococcus neoformans var. neoformans JEC21
MILSGNGLTSKTDICRQGIVHLVILGAKTLNETLSAWEALGDNVTVGDVETFVEQYFKGEGLELSQVELENFVEDPAILDNITDPVFRAWVKIVNGYWTLLARETNQSALCNGDCESSLIPLNHTVIVPGGRYREIYYWDSFWVLEGLLKSELYDYAWDLLQNFMDLIDIYGYLPNGGRKYYLNRSQPPVFVQMIDAYIKATNSITLLERALPVASSELEWWANNRTSNFTSPFTNQSRTIAQYSVTNSAPRPEGYVEDFETVMGASPALNETEQAELYSELATGAESGWDYSSRWCEQPLLNTTDNNPSLRTLKVKSIIPVDLLSLMAGDHALLANLYELYANSTGGGEGTGNEEMSKRDGESDDAASKIAYHRQMAQEFSDSILDLCWDPEKSWFYDFNVTSNSRSNIFHAGGTWPLWQNITPSEIMGNESAALSLVSGFRFLLGHYSGVPSVATLLFTGLNWDFPNAWPPHAYTAIKAFETLGRVLPNATVLSNLTIPFDSVTENQLGLSESELQPQPQSTIGNVSLNTETSQDKPWPLALSIEFANRYLGAAFCSWYSTGGQISGLLTQLPLSDLNATGTYTSEQSGVMFEKFNVTDTDAAGGGGEYTVQVGFGWTNGVALWAAGEYGQYIPAPTCPLIPIIEVNGTAGSNTSDSSVYKSTDKDGGPTASDTTTSKSLFVGYRIPRE

SEQ ID NO: 17053 - protein, 515 aa, Campylobacter upsaliensis RM3195
MQQEIQKINKAFLGHPKPLFALSATELWERFSFYGIRPLLVLFMTATLLSGGLGMSKEEASAIAGIFGGCIYLAALPGGWIADNYLGQQRAVFIGCVVIALGHLSIGLSYFNTALFFVGLGLIVIGTGLFKTCSSVMVGMMYDKKDPRRDSGFTIFYMGINIGGFIAPLVTGFLQTQYGWHLGFGAGGIGMLIALLIFAFKAVPDFKEFDEKIGMDEAWDKATKYNKNAPYFIAIFFIALAGVVVLSMSGVINLNPVAIAKNMTMVILWCAGFYFLYLFFLSSLTKDERKNLILFVILFFAGAVFWSVFEQQYTTYNFFADKLTDKMVLGYEIPTVWFQSINSLFIILLAPVVGAIWVFLAKRNYELSSLTKFSLGLIGAGVGFLIMAFAASGIISNNGGVENATNAVASGSAILASPWWIVISFLFLTLGELCLSPVSLSIMTKIAPGAIKSQVMGLWFVSISVGNVLAGLIGGHANEENLATLPDLFYQCVWILFAVAAVLLVFKNFVKKLEN

SEQ ID NO: 17054 - protein, 608 aa, Saccharomyces cerevisiae
MKVILLKPVQLPMLLLILLKFIMAAKEGKIHVLEFNASSEYTLDKRRVISINGYSATFGPEIRVKSGDTLNLKLTNWICSEEEASKDSDVWKDYCSTALHFHGVVPLANEFDGIPGLTQPTIGYGESYWYNFTIDQSTCGTFWYHSHSSVQYGDGMRGVLIVECDDYDNHVANTINSVRDIETLDDGVVTMKKDKHTKELTDYEVQERIITLSDWYTNWNLDILNDKVLSSTGGTDPKFDGSLINGKSSDGETIKIGFNTEYLLLRIVNSGMSGTQVFHLDGFQLIVLEADGIMIKPFIVQTINLAVGQRYTILVKLKSDTSFIRMINGCNKMMGYITKQWWFYKEGAHLDLPKNPNDVSIEHLPGFTKAELYRDIEPTQEENKKLRTKADPVAVFEFDYAYYKDESTKQKYGTGMYKVNERTFSEYVKDPVRFGFNETYDIVINSLDHMRHPWHMHGHHFQIISLGNKGDGPFHKDVQEGKAWSRYQNDLRHLARTGKAPMVRDSINIAGNSYAVLRINTEMPGKWLLHCHVEWHMMKGLGIVFEVPTTTEDSTKQATTAVLSYPTKEPDPNTVVHTAALEQNKSKVIAVYILIMCAVDAIFYWLLM

SEQ ID NO: 17055 - protein, 679 aa, Dehalococcoides sp. CBDB1
MSIWIALVVGLVGLAVAGLLAKFVLKQDEGTPKVREIAAAIKEGAMAFITREYTVMAIFVAAVTIILAFLPSLGWPVSVSFLFGALCSGLAGFIGMSIAVRANSRTTTAASHSLNQGLKLSFRAGSVMGMCVVGIGIIGLSIMYFAFGSDVDFIKILPGYGFGASSVAIFARVGGGIFTKAADTGADIVGKVEKGIPEDDPRNAAVVADFVGDNVGDVAGMGADLFESYVDSIIATMALATIGAFSMKLGYALVPSQEAAFFLPMLVAAGGILASVIGIFLVRTGEKLQMKALLAALRKGTLAAAFLSAVFSFLAVWYLQADLGLFFAILAGLVAGVLIGESTNYFTSYVYKPTLGIAASCQTGAATNIISGFSVGLMSVVPPIVLVVIAIVISYAFGDVYGVALAGVGMLATLGIQDATDAYGPVADNAGGIAEMSGLPKEVRERTDALDSLGNTTAAIGKGFAIGSAGLTSLALLLSYTQAVGISASQVSLLDVKVLAGLLLGVMMPAVFCSLTLKAVGVTSFSIVNEVRRQFKEIAGIMEGTAKPEYGKCVDICTRDSIKQMILPGVITVVSPVIVGWLLGPVAVVGFLTGTILCGFILAVTFANAGGAWDNAKKWVETGAYGGKGSDAHKAAVVGDTVGDPMKDTAGPSLNIMIKLVAIIALVMAPILATFNGII

SEQ ID NO: 17056 - protein, 163 aa, Zea mays subsp. parviglumis
EEGRIIEFAEKPKGEQLKAMMVDTTILGLDDVRAKEMPYIASMGIYVFSKDVMLQLLREQFPEANDFGSEVIPGATSIGKRVQAYLYDGYWEDIGTIAAFYNANLGITKKPIPDFSFYDRFAPIYTQPRHLPPSKVLDADVTDSVIGEGCVIENCKIHHAVVG

SEQ ID NO: 17057 - protein, 587 aa, Picrophilus torridus DSM 9790
MTNEIERNKGIAIPVIFVFALYILAFYYFDHYTGFKLFLVALLSSPIFLIAYLVFSYKGPKQSKLYGLENLTAKLPAIKKAKGHVPFKYKLMWTGLIVILYFALTNIYIYGLNVKDTVDVFAAFRAIFAGASGSLMDLGIGPIVTASIVMQLFAGAKIFNLDLTNPDDKAIYQGVQKLLVIIMIFVEAIPQAFGFLVPDASLVANINHVVPGYGEFLAQTIIILQLFFGSYLVFLMDEVVSKYGIGSGISLFIAADVSEQLFIGTFNWLPSTITSPLSLSNPPAGAIPKALYLFWMAPGSYLTNTGMEQILFAQPNPMIALLGTVLIFFIVAYFQSSKIELPIAHERVRGARGRYPLQLLYASNIPVILATALLANISMWTLLFWKSPVLSRIPILGHDKLLGVYPTAAQASALGISSTTPIGGLAYYLYTPNGLSDWLFPILQPSVSQNVLFGHTPLEEVIHVIAFLAFMIIFSIIFAKFWIETTNMGAGAVAKQIQSSGMQIPGFRRDPRVMERVLSKYIPAITVFSGAVVGLLAAAADLIGTVGDTSGTGLLLAVGIVIQFYEAMGREQLMEMHPIIRQFFVGG

SEQ ID NO: 17058 - protein, 1142 aa, Saccharomyces cerevisiae
MAINGNSIPAIKDNTIGPWKLGETLGLGSTGKVQLARNGSTGQEAAVKVISKAVFNTGNVSGTSIVGSTTPDALPYGIEREIIIMKLLNHPNVLRLYDVWETNTDLYLVLEYAEKGELFNLLVERGPLPEHEAIRFFRQIIIGVSYCHALGIVHRDLKPENLLLDHKYNIKIADFGMAALETEGKLLETSCGSPHYAAPEIVSGIPYQGFASDVWSCGVILFALLTGRLPFDEEDGNIRTLLLKVQKGEFEMPSDDEISREAQDLIRKILTVDPERRIKTRDILKHPLLQKYPSIRDSKSIRGLPREDTYLTPLSESNSSIDATILQNLVILWHGRDPEGIKEKLREPGANAEKTLYALLYRFKCDTQKELIKQQQVKKRQSISSVSVSPSKKVSTTPQRRRNRESLISVTSSRKKPISFNKFTASSASSSNLTTPGSSKRLSKNFSSKKKLSTIVNQSSPTPASRNKRASVINVEKNQKRASIFSTTKKNKRSSRSIKRMSLIPSMKRESVTTKLMSTYAKLAEDDDWEYIEKETKRTSSNFATLIDEIFEYEKYEQIRKEKEELERKVREAKAREELERRRRKQEEKERARKLLEKEDLKRKQEELKKQIEIDISDLEQELSKHKEEKLDGNIRSISAPMENEEKNINHLEVDIDNILRRRNFSLQTRPVSRLDPGIMFSSPTEEVSPVEPKRTENERLTTEKKILETIRRSKFLGSSFNIDKELKLSKMEYPSIIAPQRLSEERVVSDSNDGYESLILPKDGNGVSQLKDSTATTAPVSDGRLRKISEIRVPQFTRKSRHFSESNKRLSVLSMYSTKESFTNLVDILKNGNLDVNNQQSQRIPTPRSADDSEFLFETVNEEAEYTGNSSNDERLYDVGDSTIKDKSALKLNFADRFNGSNEAKQTDNLHLPILPPLNGDNELRKQNSQEGDQAHPKIKSMIPESGSSSHTEKEEENEEKEEKKPEQHKQEEDQEKREKVVDDMEPPLNKSVQKIREKNAGSQAKDHSKDHLKEHKQDKNTAIGNGSFFRKFSKSSDKTMELYAKISAKQLFNGLEKLLRGWTQYGLKNIKSHPNNLTLTGKLSSDNIFSLRSTLFEVNIYPRGKMSVVQFKKVSGSFKAVKKLVNEVENVLNKEGVLQK

SEQ ID NO: 17059 - protein, 543 aa, Chlamydia trachomatis
MVAKNIKYNEEARKKIQKGVKTLAEAVKVTLGPKGRHVVIDKSFGSPQVTKDGVTVAKEVELADKHENMGAQMVKEVASKTADKAGDGTTTATVLAEAIYTEGLRNVTAGANPMDLKRGIDKAVKVVVDQIRKISKPVQHHKEIAQVATISANNDAEIGNLIAEAMEKVGKNGSITVEEAKGFETVLDIVEGMNFNRGYLSSYFATNPETQECVLEDALVLIYDKKISGIKDFLPVLQQVAESGRPLLIIAEDIEGEALATLVVNRIRGGFRVCAVKAPGFGDRRKAMLEDIAILTGGQLISEELGMKLENANLAMLGKAKVIVSKEDTTIVEGMGEKEALEARCESIKKQIEDSSSDYDKEKLQERLAKLSGGVAVIRVGAATEIEMKEKKDRVDDAQHATIAAVEEGILPGGGTALIRCIPTLEAFLPMLTNEDEQIGARIVLKALSAPLKQIAANAGKEGAIIFQQVMSRSANEGYDALRDAYTDMLEAGILDPAKVTRSALESAASVAGLLLTTEALIAEIPEEKPAAAPAMPGAGMDY

SEQ ID NO: 17060 - protein, 508 aa, Candida glabrata CBS138
MDSRLHRLINLEVTPGKDVRKTAIIGTIGPKTNNVDTLVALRKAGLNIVRMNFSHGSYEYHQSVIDNARKSEQVYPGRPLAIALDTKGPEIRTGTNVDDVDYPIPPNHEMIFTTDDKYAKACDDKIMYVDYKNITKVIQPGKVIYVDDGVLSFEVLEVVDDKTLKVKSLNAGKISSHKGVNLPGTDVDLPALSEKDKEDLRFGVKNGVHMIFASFIRTAQDVLTIREVLGEEGKDIKVIVKIENQQGVNNFDEILEVAHGVMVARGDLGIEIPAPQVLAVQKKLIAKCNLAGKPVICATQMLESMTFNPRPTRAEVSDVGNAILDGADCVMLSGETAKGNYPINAVTTMAETAIIAERAIAYMPLYDDLRNCTPKPTSTTETVAASAVAAVQEQGAKLILVLSTSGNTARLVSKYRPQCPIVLVTRNPRTARFSHLFRGVFPFVYEKEPLDDWSEDTHARLRFGVDMAKEYGFVKNGDAVISIQGFKGGVGHSNTMRVSIVGGEKEDI

SEQ ID NO: 17061 - protein, 244 aa, Arabidopsis thaliana
MARKNLGRRKIELVKMTNESNLQVTFSKRRSGLFKKGSELCTLCDAEIAIIVFSPSGKAYSFGHPNVNKLLDHSLGRVIRHNNTNFAESRTKLRIQMLNESLTEVMAEKEKEQETKQSIVQNERENKDAEKWWRNSPTELNLAQSTSMKCDLEALKKEVDEKVAQLHHRNLNFYVGSSSNVAAPAAVSGGNISTNHGFFDQNGNSTSAPTLPFGFNVMNRTPAGYNSYQLQNQESIPYKNLSNN

SEQ ID NO: 17062 - protein, 433 aa, Dehalococcoides sp. CBDB1
MDKIVSLARRRGFIFPSSEIYGGLNSCWDYGPLGVELKRNVKEAWWRYMVRDRDDVVGLDASIIMHPRVWEASGHVAGFSDPMVDCKKCKMRWRPTDLAEPKCPACGGELTESRQFNLMFKTFMGPVEEAASIVYLRPETAQGIFVNFENVLNTTRKKLPFGIAQIGKSFRNEITTGNFIFRSREFEQMELEYFVKPGADDACLEEWTQYRLNWYKNLGMNPENLRLRAHRSDELAHYAKGCYDVEYNFPMGWSELEGIANRRDFDLTQHAKYSGKSLEYFDEETKEHFVPYVIEPSAGVERSTLAFLIDAYAEEPDKDEIRTVLHLHPALAPYKIAVLPLSKKEILSDYARKIYADLRKCWMVAYDDSQSIGRRYRRQDEIGTPYCVTVDFQSLEDGMVTVRDRDSMAQIRVKVSELSYILAAKLSGEPFNS

SEQ ID NO: 17063 - protein, 265 aa, Zea mays
  misc_feature (59)..(59): Xaa can be any naturally occurring amino acid
  misc_feature (230)..(230): Xaa can be any naturally occurring amino acid
  misc_feature (247)..(247): Xaa can be any naturally occurring amino acid
  unsure (1)..(265): unsure at all Xaa locations
MASPSVFAGIAQGPEDPILGVTVAYNKDPSPVKVNLGVGAYRTEEVKPMVLNVVRRAEXDFNKLSAKLIFGADSPAIQENRVATVQCLSGTGSLRVGGEFLARHYHERTIYIPQPTWGNHPKVFTLAGLTARSYRYYDPATCGLDFQGLLEDLSSAPSGAIVLLHACAHNPTGVDPTLEQWEQIRQLMRSKALLPFFDSAYQGFASGSLDKDAQSVRMFVADGGELLMAXSYAKNMGLYGKRVGALXIVCGSADIAVKVEKSLKL

SEQ ID NO: 17064 - protein, 382 aa, Clostridium acetobutylicum ATCC 824
MITIEKQEEFLKKLIGYRRELHKHPELSMKEYETTKRIKRWLYENDIKVLDFPIEVGVVAEIEGEHEGKTVAIRADIDALPIEEKTELPFSSVNKGIMHACGHDFHTAAILGTAIILSKRKAEIYGRVRIIFQPGEETGKGSQYIIEEGVLRDVDCIFGMHNKPDLPVGTIGIRSGELMASVDRFEIKVIGSGGHAGIPNKCIDPIVVASQIVASMQTVVSRSISPIESVVISITRFNSGTTWNVISDSAEMEGTVRTFNNNIREEIRNLMERTAKGIARALGGKIEFKWFSYSPVLENDVRFKDLCIEAAEDNGYKYVEAKRNLGGEDFSFYQTVVPSFFVWMGVDGTEEWHKANYNLKEDALMVAANYFSDLALKVLSKK

SEQ ID NO: 17065 - protein, 358 aa, Thunbergia alata
TILREVETANKHFTPPSEVHVQVTHSMPPQKIEIFKSLEDWAADNILVYLKPVEKCWQPQDFLPDPASDGFHDQVKELRERAREIPDDYFVVLVGDMITEEALPTYQTMLDTLDGVRDETGASPTPWAIWTRAWTAEENRHGDLLNKYLYLSGRVDMRQIEKTIQYLIGSGMDPRTENSPYLGFIYTSFQERATFISHGNTARLARQHGDNKLAQICGTIASDEKRHETAYTKIVEKLFEIDPDGTMLSLADMMKKKVSMPAHLMYDGHDENLFENFSAVAQRLGVYTAKDYADILEHLIARWKVSDLTGLSGEGQKAQDYVCRLPPRIRKLEERAQARIKEGPRIPFSWIYNRELLL

SEQ ID NO: 17066 - protein, 384 aa, Thermosynechococcus elongatus BP-1
MQDKSMLMIPGPTPVPESVLLSLSKHPIGHRSGDFSEIMAAVTAGLKWLHQTTNDVLILTASGTGAMEAGIINFLSAGDRVLVGCNGKFGDRWGEVCDAYGLKTERITAPWGQPLNPDDFKAALEADTAKTIKAVIVTHSETSTGVINDLEAINRHVKAHGQALIIVDAVTSLGAVSVPIDEWGLDVVGSGSQKGYMIPPGLAFVSVSAKAWEAYKTATLPKFYLDLGKYRKDAAKNTTPFTPPVNLFFALKTALEMMQAEGLETIFARHRRLMQATRAAMKALNLPLYAPDECASPAITAVAPQGVEAEKIRNLMKKRFDIALAGGQDHLKGQIFRIGHLGFVSDRDILAAVSALEAVLGELGYNNFTPGAGVAAASRVLTAP

SEQ ID NO: 17067 - protein, 390 aa, Thunbergia alata
MALKCSVTPHQVPSFPVNQLRSHRVYMASTLDSASANVGKGKKAFTPPREVKVQLTHPMAPEKREIFHSLHGWAEENLLSLLKPVEKCWQPNDFLPDPSSEGFDEQVRELRLRTKELPDEYFVVLVGDMITEEALPTYQTMINTLDAVRDETGASLTPWAIWTRAWTAEENRHGDLLNKYLYLSGRVDMRQIEKTIQYLIGSGMDPRTDNNPYLGFIYTSFQERATFISHGNTARLAKEHGDLKLAQICGSIAADEKRHETAYTKIIEKLFEIDPDGTVLALADMMRKKVSMPAHLMYDGQDENLFEHFAAVAQRIGVYTAKDYADILEFLVGRWEVEKLTGLSGEGRNAQEYVCGLAPRIRRLEERAQARAKQGAPVPFSWVYGREVKI

SEQ ID NO: 17068 - protein, 176 aa, Brassica napus
MAATQLTASPVTVSARSLASLRASSAKFGTLKPGTLKQSQFRSLVVRAASVVAPKYTSIKPLGDRVLVKIKEAEEKTMGGILLPSTAQSKPQGGEVVAVGEGRTIGKNKIDINVPTGAQIIYSKYAGTEVEFNDVKHLILKEDDIVGPSCGESHWVRSIVIESQQKWRRLNLQHHQ

SEQ ID NO: 17069 - protein, 319 aa, Oryza sativa
MAFMSMERSTWAFTFGILGNLISLMVFLSPLPTFYRVYRKKSTEGFQSTPYVVTLFSCMLWMYYAFVKSGAELLVTINGVGCVIETVYLAMYLAYAPKSARMLTAKMLLGLNIGLFGVIALVTLLLSRGELRVHVLGWICVAVSLSVFAAPLSIIRLVIRTKSVEFMPFSLSFFLVLSAVIWFLYGLLKKDVFVALPNVLGFVFGVAQMALYMAYRSKKPLVASSSSAVVAAGLEIKLPEHVKEVQAVAKGAVAAAPEGRISCGAEVHPIDDVMPSEVVEVKVDDEETNRTDEMAGDGDHAMVRTEQIIKPDMAIVVEV

SEQ ID NO: 17070 - protein, 390 aa, Thunbergia alata
MALKFSITPHKMPSFPDFQLRSHRVCMTSTLYSASVEVGNGKKPFSPPREVNIQVTHPMPPEKREIFNSLHGWAETNLLSLLKPVDKCWQPSDFLPDPSADGFDEQVRELRKRTKELPDEYFIVLIGDMITEEALPTYQTMINTLDAVRDETGASLTPWAIWNRAWTAEENRHGDLLNKYLYLSGRVDMKQVEKTIQYLIGSGMDPHTDNNPYLGFIYTSFQERATFISHGNTARLAKEHGDMKLAQICGTIAADEKRHETAYTKIIEKLFQLDPDGTILALADMMRKKVSMPAHLMFDGKDQNLFEHFSAVAQRIGVYTAKDYADILEYLVARWEVEKLTGLTGEGRKAQEYVCGLAPRIRRLDERAQARAKEAAPVPFTWIFGREVRL

SEQ ID NO: 17071 - protein, 578 aa, Burkholderia sp. 383
MTSRRAASIASRFSSRFSSRLSPPLAPPAPRLRWAAALAVAYLAVAGCAAQADNANQAAQAAAQSSPPATAAIAAPASGTLLPPPSQLYGDLFVAVQTAQIYPDQKTFVDATPDSDPATIVQLYQQQKSQPGFSLKAFVGQHFTPPPEGGVTPPPNQTLRQHIDWLWPQLTRTSATVPPYSSLIPLPKPYVVPGGRFREGYYWDTYFTMLGLQVSGREDLVDNMLDNFAHLIDTIGHIPNGNRTYYASRSQPPFFAYMVTLAAQAEGDKVYQKYLPELRKEHAYWMQGETTTPRGQATRHVVAMPDGTVLNRYWDASDTPRDESYLEDVTTAKSVPARPANEVYRDLRAGAESGWDYSSRWFGDGKTLATIRTTSIVPVDLNSLMFHLETTIVKGCTVTRDVACVTDFSARAARRAAAINRYLWNRRGYYGDYDWQQRKPRDAVTAAALYPLFAGVAWPERAKATAREVRKTLLQPGGLATTTENTGQQWDAPNGWAPLQWIAIDGLRRYGEPALAKDIGTRFLSDVKHVYATEGKLVEKYVVEGAGTGGGGGGEYPLQDGFGWTNGVTLKLLGLYGE

SEQ ID NO: 17072 - protein, 100 aa, Amphicarpaea bracteata
AARKSAPTTGGVKKPHRYRPGTVALREIRKYQKSTELLIRKLPFQRLVREIAQDFKTDLRFQSHAVLALQEAAEAYLVGLFEDTNLCAIHAKRVTIMPKA

SEQ ID NO: 17073 - protein, 188 aa, Vigna radiata var. radiata
MEKEDLGLEITELRLGLPGAGGENNTDKDKNKNKKRVFSDIEGENSSSEEDGKKETKNQVVGWPPVCSYRKKNTVNEPKLYVKVSMDGAPFLRKIDLAMHKGYSDLAFALDKFFGCYGICEALKDAENAEHVPIYEDKDGDWMLVGDVPWEMFRESCKRLRIMKRSDAKGFDLQPKGSLKGFIEGVRK

SEQ ID NO: 17074 - protein, 400 aa, Pseudomonas sp. ADP
MAKMRKVTTVRGYGAFVGANHLEVEETTGTGQEKTGTKKVIAFKRAIIAAGSQAVRLPFMPNDPRVVDSTGALALSGVPKRMLILGGGIIGLEMGTVYSTLGARLDVVEMMDGLMQGADRDLVKIWQKMNAKRFDNIMLKTKTVGAEATPEGIKVTFAPAEEGGTTPEPQVYDLVLQAVGRTPNGKKIAAEKAGVSVTDRGFINVDIQMRTNVPHIFAIGDIVGQPMLAHKAVHEAHVAAEVIAGELQGNKELASAAFNARVIPSVAYTDPEVAWVGLTEDQAKAQGIKVKKGLFPWTASGRAIANGRVEGFTKLLFDDSPEAGSGDGHAGRGHGKILGGGMVGTHAGDMIGEIALAIEMGADAVDIGKTIHPHPTLGESIGMAAEVAHGSCTDVPPARK

SEQ ID NO: 17075 - protein, 193 aa, Vigna radiata var. radiata
MENSLGSYEKELNLKATELRLGLPGSDEPEKRATARSNKRSSPEASDEESISNGSDVTKEDNVVPPAKAQVVGWPPIRSYRKNNVQQKKEEESEGNGMYVKVSMAGAPYLRKIDLKVYKSYPELLKALENMFKCIFGEYSEREGYNGSEYAPTYEDKDGDWMLVGDVPWNMFVSSCKRLRIMKGSEAKGLGCF

SEQ ID NO: 17076 - protein, 37 aa, Clostridium symbiosum
KFLGFEQAFKDSLTTLPMGGAKGGSDFDPNGKSDREV

SEQ ID NO: 17077 - protein, 655 aa, Burkholderia sp. 383
MCGIDGFLNSVAFDEETARGTLARMTASLAHRGPDGQGIWVDPEAGIALGHRRLAIVDLSVHGRQPMASACGRYVMVFNGEIYNHRELRAELERAGRAPAWRGHSDSEVLIAAIVAWGVDATLRRATGMFSIALWNRESRVLTLARDRIGEKPLYYGRIGDALVFASELKALRGYPGFDGAIDRDALCLYLRQSSVPAPHTIYRGIHKLPPGTYIQFEHARDTPRLRAYWTLEQAIEDGRAQPFEGNADEAVSQLDAVLRQAVARQMEADVPLGAFLSGGVDSSTIVALMQAQSSTPVDTFTIGFHEAGYDEAGYAKAVARHLGTRHTELYVTADHALGVVPKLPSIYDEPFSDASQIPTFLVSEMTRRHVKVSLSGDGGDELFGGYTRYFLTPRLWRKLHRVPGAVRARIAAALHALRPDHADQLAAVAQGAWGGVEARESATRIGDRLHKLGHVMTAESRIGLYRLLMSSVHHPERLALSGQEPATPLDTVSAWPAHLSFAEQAMAIDTLTYLPTDILAKVDRAAMAVSLETRMPFLDHHVVEFAWRMPADLRLPEGQSKALLRRLLDRYVPSALIDRPKQGFCAPVDHWLRGSLRDWAEALLRPSRLREEGFFDAAAVERLWRQHVTGRMNWQHQLWTVLMFQAWLEAQRAT

SEQ ID NO: 17078 - protein, 203 aa, Vigna radiata var. radiata
MGSYETELNLRATELRLGLPGSDEPQEKRPCSGSVVRSSNKRSSPELEESRCKSNINSDSSDSTTTSDHNEDSVQPAKVQVVGWPPIRSFRKNSLQQKKVEQGDGTGMYLKVSMAGAPYLRKIDLKVYKSYPELLKALQNLFKCTFGEYSEREGYNGSEYAPTYEDKDGDWMLVGDVPWNMFVSSCKRLRIIKGSEAKGLGCL

SEQ ID NO: 17079 - protein, 334 aa, Xylella fastidiosa Ann-1
MAIKVGINGFGRIGRNILRSAVQNFGSNIDIVAINDLLEPDYLAYMLQYDSVHGRFKGEIAIEGTALILNGKKIRLTAERDPGNLQWADAGAEIVIESTGLFLTQESAGKHLAAGAKKVIISAPSKDETPMFVYGVNHNSYNGEPIVSNASCTTNCLAPLAKVINDKWGITRGLMTTVHAATATQKTVDGPSNKDWRGGRGILENIIPSSTGAAKAVGKVIPSLNGKLTGMSFRVPTSDVSVVDLTVQLNTPATYKEICTEVKQQSEGPLRGILGYTEDKVVATDFRGETCTCVFDADAGIALDPTFIKLIAWYDNEWGYSNKCLEIAKVIAAK

SEQ ID NO: 17080 - protein, 152 aa, Solanum tuberosum
MSSFSEEQEALVVKSWGSMKKDAGEWGLKFFLKIFEIAPSAKKMFSFLKDSNVPLDQNPKLKVHAKSILVMTCEAAVQLRKAGKVVVRDSTLKKIGATHFKYGVADEHFEVTKYALLETIKEASPEMWSVEMKNAWGEAYDQLVSAIKTEMK

SEQ ID NO: 17081 - protein, 183 aa, Marchantia polymorpha
MFSIINGLKNYNQQAIQAARYIGQGFLVTLDHMNRLPTTIQYPYEKLIPSERFRGRIHFEFDKCIACEVCVRVCPINLPVVDWELKKTIKKKQLKNYSIDFGVCIFCGNCVEYCPTNCLSMTEEYELSTYNRHELNYDQIALGRLPISIIEDSTIENIFNLTSLPKGKIEGHIYSRNITNIVN

SEQ ID NO: 17082 - protein, 303 aa, Oryza sativa
MLLNPASREVAALDSIRHHLLEEEEETPATAPAPTRRPVYCRSSSFGSLVADQWSESLPFRPNDAEDMVVYGALRDAFSSGWLPDGSFAAVKPESQDSYDGSSIGSFLASSSSEAGTPGEVTSTEATVTPGIREGEGEAVAVASRGKHYRGVRQRPWGKFAAEIRDPAKNGARVWLGTFDSAEEAAVAYDRAAYRMRGSRALLNFPLRIGSEIAAAAAAAAAGNKRPYPDPASSGSSSPSSSSSSSSSSSSGSPKRRKRGEAAPASMAMALVPPPPPPAQAPVQLALPAQPWFAAGPIQQLVS

SEQ ID NO: 17083 - protein, 183 aa, Huperzia lucidula
MFSMVEGLQVYGQQTIQAAKYIGQGFMVTLDHMNRLPMTVQYPYEKLIPSERFRGRIHFEFDKCIACEVCVRVCPINLPVVDWEFEKNIRKKQLTSYSIDFGVCIFCGNCVEYCPTNCLSMTEEYELSTYDRHELNHDQIALGRLPLSVVEDSTIRVISGLTKLPKGTMDGHSASKNVTNFLH

SEQ ID NO: 17084 - protein, 672 aa, Bradyrhizobium japonicum USDA 110
MNISVHAEADVTAVAHNDLANAVRFLAVDAIETSQSGHPGLPMGMADVATVLFSRFLKFDSAHPSWPDRDRFVLSAGHGSMLLYALLHLTGGAVSLDDIKAFRQWGSKTPGHPEYGHTPGVETTTGPLGQGIATAVGMALAERMANARYGDGLVDHFTYVIAGDGCLMEGISQEAISLAGHLRLGRLIVLFDDNGISIDGPTSLATSDDQLARFAASGWSVRRVDGHDPEAVAQAIAEERETAKPSLIACRTVIGYGAPDRQGTEKAHGAPLGTEQTAAARRTLGWDYQPFVVPIPILKAWRMIGQRGQVERLAWLDRYESATPEQRDLFVEGKVVALPAAYALAAAKLRERFASERPKLATRQASQQVLDGIAGTIPGLVGGSADLTHSNLTHAKPQTPVTRGAFAGDYIHYGIREHGMAAAMNGLALHGGFIPYGGTFLAFSDYSRPAIRLAALMRLRVIHVMTHDSIGLGEDGPTHQPVEHLAALRVIPNLLVFRPADAVETLEAWDCALAAEHRPSVLCLSRQALPTFRSDARGRNRVARGAYLVVSPDGGRDVTLMATGSEVSIALEAARLLATEHIRAAVVSAPCLALFEEQPEDYRATVLGTAPRVGIEAAVLGDWPRWIGADGEFVGMRGFGASAPAPVLYREFGITPQSIAEAARRAIARKSQ

SEQ ID NO: 17085 - protein, 500 aa, Saccharomyces cerevisiae
MSFENLHKVNAEALEDAVVEICSSLQVDAAKLDELTAYFIECMEKGLNNTSVGEEKTVDKGLPMIPTYVTSLPNGTERGVLLAADLGGTHFRVCSVTLNGDGTFDMQQLKSKIPEEYLNDKDVTSEELFSYLGRRTRAFVRKHHPELLKSTGENIKPLKMGFTFSYPVDQTSLSSGTLIRWTKSFKIEDTVGKDVVRLYQEQLDIQGLSMINVVALTNDTVGTFLSHCYTSGSRPSSAGEISEPVIGCIFGTGTNGCYMEDIENIKKLPDELRTRLLHEGKTQMCINIEWGSFDNELKHLSATKYDIDIDQKFSPNPGYHLFEKRISGMYLGELLRNILVDLHARGLILGQYRNYDQLPHRLKTPFQLCSEVLSRIEIDDSTNLRETELSFLQSLRLPTTFEERKAIQNLVRSITRRSAYLAAVPIAAILIKTNALNKRYHGEVEIGFDGYVIEYYPGFRSMLRHALALSPIGTEGERKIHLRLAKDGSGVGAALCALVA

SEQ ID NO: 17086 - protein, 767 aa, Oryza sativa
MAILSALGTEVFIPVAAAVGVAFAVAQWLLVARVKVNPAHAAAAAASGGSKNGGYGDYLIEEEEGLNDHNVVVKCHEIQTAISEGATSFLFTEYQYVGIFMSIFAVVIFLFLGSVEGFSTKSQPCTYSKDKYCKPALFNALFSTASFLLGAITSLVSGYLGMKIATFANARTTLEARKGVGKAFIIAFRSGAVMGFLLASSGLVVLYIAINVFKLYYGDDWEGLFESITGYGLGGSSMALFGRVGGGIYTKAADVGADLVGKVERNIPEDDPRNPAVIADNVGDNVGDIAGMGSDLFGSYAESSCAALVVASISSFGINHDFTGMCYPLLVSSVGIIVCLITTLFATDFFEIKAVKEIEPALKKQLIISTALMTVGIAIISWLALPAKFTIFNFGAQKEVTNWGLFFCVAIGLWAGLIIGFVTEYYTSNAYSPVQDVADSCRTGAATNVIFGLALGYKSVIIPIFAIAVSIYVSFSIAAMYGIAVAALGMLSTIATGLAIDAYGPISDNAGGIAEMAGMSHRIRERTDALDAAGNTTAAIGKGFAIGSAALVSLALFGAFVSRAGVKVVDVLSPKVFIGLIVGAMLPYWFSAMTMKSVGSAALKMVEEVRRQFNSIPGLMEGTGKPDYATCVKISTDASIKEMIPPGALVMLTPLIVGTLFGVETLSGVLAGALVSGVQIAISASNTGGAWDNAKKYIEAGASEHARTLGPKGSDCHKAAVIGDTIGDPLKDTSGPSLNILIKLMAVESLVFAPFFATHGGLLFKWF

SEQ ID NO: 17087 - protein, 526 aa, ASPERGILLUS NIDULANS FGSC A4
MADTQIPVNGTYHSQPGYPDSYNHAHTAVNSVSNFQPAQSSTPSNAPSNDQKNGISKDEVGWYFVEQYYTNMSRSPDKLHLFYSRRSQLVFGTEAESVPVAVGQKAIQEKFKQLDFQDCKVRVLNVDAQASFENILISVIGEISNKQEPSRKFVQTFVLAEQPNGYYVLNDVFRYLVDEEEVAEDAAISSDTVEEPELQAPAQTAAGPITETEESKVDTEEAAAKIDEKLEKAEEAESEAPAAETAPQTNGTEQPEPAAEVVETPAPAAEVVPEKPASPEPSPAPPAEKEAPTKEPAPPAKAVPKTWASIASKTGAAAPVVPAIPVAPVKPAPAAAPASQPAAPAPAPASAAAAAPAAESGPSQPSSNDGSGWQTAGHDHKKSQARASDNQAVLGYIKNVTEKVNADLLKETLERYGKLTHFDVSRQKNCAFIEFADRAGYNAAVAANPHQIGTEQVKVEERRPRGSVYGGNTNYGPGRGGAGRGRGDRAGSQGRGGFQRDGRGGFAPRGRGGNANTKARNQGQAA

SEQ ID NO: 17088 - protein, 294 aa, Glycine max
LRRPPPPKPDMGPKTYIAYGIKEELGRGDSVTKLHCDMSDAVNILTHTAEVILTDEQHFTISKLKEAHRAQNEREQCAQERVADHLEDRPYKDNKEHIENKEVLEAKSMKKQPIEIDGNIFPNNVLERYTSPATENESMETGSALWDIFQREDSEKLETYLRKHSKEFRHTYCSPVEQVVHPIHDQCFYLTWEHKKKLKEELGVEPWTFEQKLGEAVFIPAGCPHQVRNLKSCTKVAVDFVSPENIRECLRLTNEFRQLPKNHKAREDKLEIKKMIVYAVDQAVKDLKDLLKCS

SEQ ID NO: 17089 - protein, 517 aa, Saccharomyces cerevisiae
MQVTTRFISAIVSFCLFASFTLAENSARATPGSDLLVLTEKKFKSFIESHPLVLVEFFAPWCLHSQILRPHLEEAASILKEHNVPVVQIDCEANSMVCLQQTINTYPTLKIFKNGRIFDGQVYRGVKITDEITQYMIQLYEASVIYLNSEDEIQPYLENATLPVVINRGLTGLNETYQEVALDLAEDYVFLSLLDSEDKSLSIHLPNTTEPILFDGNVDSLVGNSVALTQWLKVVILPYFTDIEPDLFPKYISSNLPLAYFFYTSEEELEDYTDLFTQLGKENRGQINFIALNSTMFPHHVRFLNMREQFPLFAIHNMINNLKYGLPQLPEEEYAKLEKPQPLDRDMIVQLVKDYREGTAKPIVKSEEIPKEQKSNVYKIVGKTHDDIVHDDDKDVLVKYYATWCIHSKRFAPIYEEIANVLASDESVRDKILIAEVDSGANDILSFPVTGYPTIALYPAGNNSKPIIFNKIRNLEDVFEFIKESGTHHIDGQAIYDKLHQAKDSEVSTEDTVHDEL

SEQ ID NO: 17090 - protein, 974 aa, Candida glabrata CBS138
MSLRPTVSKDKSRPVLVKRVFSVDDDANEVQNDIRYFENLADGVKIVLPGSENNIQDSAALSTGGNVAVPVPQGLRDEALVPVDSLRSLSTPDLMESITNLQQKLVTPRINGVAAHGNVGSPRFIIHDHTHTHPGDKKSATHHDLYIEELPAQRSNSSQALPAGSVAGGNGTSSLTDIPPVDLEASNLGETERLDPDNASRASSIESYTLRERQDAINETHPFGIRIWKPALYKKKRSVEKAADEDIHETKLKKITWAVKATNWIWVATCGLFLFTVFASASITVLIAGLFTKSARDYSRLMLRLARYLLYPFGKVVYLIQDKQYLEEDRDEGISVQQFYNWVTSYKSRLFFHESQTRPTESDALGNNMHHTSYGSIQKVVGEQTNTESNNPMLDNNGYTELPHSTSFQNPSNDHQNSAATQRRLFGRGKWSLGRIVFYAIFHIVLQPIVLFLSLLTWLAVFTIPMSNILWNLMYHCRRHPLALGFKSIKNSSNQIIEHYDDKNILLCTFRCAGWHYYKFTIDGTNVIVVNLIAMVFFTIFDFYALKEFFNIDLWITSESTVFILCLASIIPLAFYIGQAVASISAQTSMGLGAVINAFFSTIVEIFLYCVALQQKKGLLVEGSMIGSILGAVLLLPGLSMCGGALNRKTQRYNPRSAGVSSALLIFSMIVMFVPTLLYMMYSGYDVICDDLDATLPLDLYSAYKVMSTSKCHFSHPPLKFDKLYTHVIEPMSIVCAFVLFLAYTIGLWFTLRTHAATIWQLPIADPPREIVNTEANGIDGILSHEEDHNDEGGGHDAPNWSRSKSTLILLLATLLYAIIAEILVSCVDSVLEDFPSLSPKFLGLTIFALVPNTTEFLNAISFAMHGNIALSMEIGSAYALQVCLLQIPALVLFSVITAIGVDKALISIRDQMFPLVFPTWDLVASMASIFVFTYLYAEGKSNYFKGSILILLYVIIIMGFYYQGLIAEWGIIT

SEQ ID NO: 17091 - protein, 397 aa, Thermus thermophilus HB27
MREAVIVSAVRSPVARGKKNGALATLHPVDLSAQVMRAAVERVGLDPKELEDVLWGCAMPEAAQGLNIARLALLRAGFPVEVAGATINRFCSSGLQTIAMAAQEVMTGMADAVLAGGVEMMSQVPMSGFHTRLHPDLTPTEWSPETYSTYIGMGFTAERVAERFGISREDQDRWALRSHQKAAQAWAEGRFPEVVPIRVPKVTYRGTKKEVEEVVFDRDETVRPDTSLEALAKLRPAFKKNGTVTAGNSSPYSDGAAAVVVMSREKAEALGLKPLARFVSFAVAGVEPDVMGIGPVKAVPKALQRAGLTLDQIALIEFNEAFAAQVLAVMRALEMPEEKTNVNGGAIALGHPLGATGAKLTAQLLSELSRRGGGYGLVTMCIGGGMGAAGVFEVYPA

SEQ ID NO: 17092 - protein, 601 aa, Candida glabrata CBS138
MKFSSLCMLASVAAHSKAAKNVADLSYVKLDFDKYYGETFETAKRGRSQADIRVNKRANGYEEVQITNQNSFYSVTLEVGTPPQSVVVLVDTGSSDLWITGSDNPYCRGSTGTSGKNMLLEAELKRALEDARDIAKERTTLAPRDDEHNDGLLSWLTGSDGLLGGQGGTTITLTDSAQPTAAGTSNGARATINCAKYGTFDTSKSSTWHSNDTAFMIQYGDSTFASGTWGMDNLHLSDLNVTGLSFAVANRTNSTVGVLGIGLPALEVTYSGRTAVSGQRPYQYDNFPLVLLRNGAIKSNSYSLFLNNASAETGSVLFGAVDHSKYLGDLYTIPMVNTYASQGYKNPIQFEVTLNGLGISSSSDNTTITTTKIPALLDSGTTLTYLPQALVTRIVQKLQATYSNRAGYYVFSCPSQSDDTEVVFDFGGFHINAPITNFIIGSSGDSCILGIMPQSGGGIILGDSFLNSAYVVYDLENYEISMAQANYAGGQEDIEVISSSVPGAVRAPGFSSTWSTLATSFNTQGDIFTVQAAATVSGSATNTGTGRATATGNSNSTRSTTSRSRTSATSTRSDSQKKNDASRTSFTSTLLFVAGLLVSFI

SEQ ID NO: 17093 - protein, 498 aa, Micrococcus luteus
TTPHATGSTRQNGAPAVSDRQSLTVGSEGPIVLHDTHLLETHQHFNRMNIPERRPHAKGSGAFGEFEVTEDVSKYTKALVFQPGTKTETLLRFSTVAGELGSPDTWRDVRGFALRFYTEEGNYDLVGNNTPIFFLRDPMKFTHFIRSQKRLPDSGLRDATMQWDFWTNNPESAHQVTYLMGPRGLPRTWREMNGYGSHTYLWVNAQGEKHWVKYHFISQQGVHNLSNDEATKIAGENADFHRQDLFESIAKGDHPKWDLYIQAIPYEEGKTYRFNPFDLTKTISQKDYPRIKVGTLTLNRNPKNHFAQIESAAFSPSNTVPGIGLSPDRMLLGRAFAYHDAQLYRVGAHVNQLPVNRPKNAVHNYAFEGQMWYDHTGDRSTYVPNSNGDSWSDETGPVDDGWEADGTLTREAQALRADDDDFGQAGTLVREVFSDQERDDFVETVAGALKGVRQDVQARAFEYWKNVDATIGQRIEDEVKRHEGDGIPGVEAGGEARI

SEQ ID NO: 17094 - protein, 153 aa, Cyanidium caldarium
MQIFVKTLTGKTITLEVEPSDTIENVKSKIQDKEGIPPDQQRLIFAGKQLEDGRTLSDYNIQKESTLHLVLRLRGGMQIFVKTLTGKTITLEVEPSDTIENVKSKIQDKEGIPPDQQRLIFAGKQLEDGRTLSDYNIQKESTLHLVLRLRGGC

SEQ ID NO: 17095 - protein, 418 aa, Pseudomonas sp. ADP
MLALRTVTYCTENEETPPWPKCARSPPFAATVPLSAPTTSKWKKPPARARRRRAPRRSSPSSAPSSPLAARPCACRSCPTTQRVVDSTGALALSGVPKRMLILGGGIIGLEMGTVYSTLGARLDVVEMMDGLMQGADRDLVKIWQKMNAKRFDNIMLKTKTVGAEATPEGIKVTFAPAEEGGTTPEPQVYDLVLQAVGRTPNGKKIAAEKAGVSVTDRGFINVDIQMRTNVPHIFGIGDIVGQPMLAHKAVHEAHVAAEVIAGELQGNKELASAAFNARVIPSVAYTDPEVAWVGLTEDQAKAQGIKVKKGLFPWTASGRAIANGRDEGFTKLLFDDSPEAGSGDGHAGRGHGKILGGGMVGTHAGDMIGEIALAIEMGADAVDIGKTIHPHPTLGESIGMAAEVAHGSCTDVPPARK

SEQ ID NO: 17096 - protein, 477 aa, Burkholderia vietnamiensis G4
MTYRNESAWVQPAAPATAPRTTQARTTAEYRALDAAHHIHPFSDMGALNRAGSRVIVKADGVYLWDSDGNKIIDGMAGLWCVNVGYGRKELADAAYRQLQELPFYNTFFKTTHPPVIELSAMLAEVTPAGFNHFFYCNSGSEGNDTVLRLVYQYWRVQGKPQKKYVISRHNGYHGSTIAGATLGGMDYMHEQMPSKVEHIVHIDQPYFFGEAQAGETPEAFGLARAQQLEAKILELGAENVAAFIGEPFQGAGGVIFPPSTYWPEIQRICRKYDILLVADEVIGGFGRTGEWFAHQHFGFEPDLITMAKGLTSGYVPMGAVGIHERVARPIIDNGEFNHGLTYSGHPVAAAVAVANLKLLRDEGIVERVKRDTGPYFQALMRDTFAQHPIVGEVHGQGMVASLQLAQAPAERRRFANGGEVGTICRDFCFNGNLVMRATGDRMLLSPPLVISRQEIDELVSKAKKAVDATAQQLGLS

SEQ ID NO: 17097 - protein, 74 aa, Clostridium symbiosum
SKYVDRVIAEVEKKYADEPEFVQTVEEVLSSLGPVVDAHPEYEEVALLERMVIPERVIEFRVVWEDDNGKVHVN

SEQ ID NO: 17098 - protein, 611 aa, Oryza sativa (japonica cultivar-group)
MKYVLVTGGVVSGLGKGVTASSIGVVLKSCGLRITSIKIDPYLNTDAGTMSPFEHGEVFVLDDGGEVDLDLGNYERFLDIKLTRDNNITTGKIYQSVLEKERKGEYLGKTVQVVPHITNAIQEWIERVAMVPVDGKEGPADVCVIELGGTIGDIESMPFIEALGQFSYRVGPGNFCLVHVSLVPVLNVVGEQKTKPTQHSVRGLRGLGLTPNILACRSTKELEENVKEKLSQFCHVPAANIVTLYDVSNIWRIPLLLRDQKAHEAILKVLNLDSFARGPKLDEWVARATLFDALQDTVRIAMVGKYTGLSDSYLSVLKALLHASVDCRRKLLVDWVASTDLEDSTAIEAPDAYKAAWDLLKGANGVLVPGGFGDRGIQGKILAAKYARENNVPYLGICLGMQLAVVEFARSVMNLPEANSTEFDPNAKTPCVIFMPEGSKTHMGGTMRLGSRRTFFEVADCKSAKLYGNVSYVDERHRHRYEVNPDMVPEFENAGLQFVGKDETGRRMEIIEIPNHRYFVGAQFHPEFKSRPSKPSPLFVGLIAASSGQLDRLLQGSCNGHVVSTKHSLSNGAYTSTVHQNGHAKKLANGRKNVLVLDADCAKDGARSVGF

SEQ ID NO: 17099 - protein, 531 aa, Pseudomonas aeruginosa PAO1
MSAYQNEIKAVAALKEKNGSSWSAINPEYAARMRIQNRFKTGLDIAKYTAAIMRKDMAEYDADSSVYTQSLGCWHGFIGQQKLISIKKHLKTTNKRYLYLSGWMVAALRSDFGPLPDQSMHEKTAVSGLIEELYTFLRQADARELDLLFTGLDAARAAGDKAKEAELLAQIDNFETHVVPIIADIDAGFGNAEATYLLAKKMIEAGACCIQIENQVSDEKQCGHQDGKVTVPHIDFLAKINAVRYAFLELGVDDGVIVARTDSLGAGLTKQIAVTNEPGDLGDLYNSFLDCEEISESELGNGDVVIKREGKLLRPKRLASNLFQFRKGTGEDRCVLDCITSLQNGADLLWIETEKPHVGQIKAMVDRIREVIPNAKLVYNNSPSFNWTLNFRQQVFDAFVAEGKDVSAYDRNKLMSVEYDDTELAKVADEKIRTFQRDGSAHAGIFHHLITLPTYHTAALSTDNLAKGYFADEGMLAYVKGVQRQELRQGIACVKHQNMAGSDIGDNHKEYFAGEAALKASGKDNTMNQFH

SEQ ID NO: 17100 - protein, 379 aa, Oryza sativa
MAPPLAAPRFHAAALPLRLRLRTRPQKLPCWRRAARPNDEDYYLIDAPESIGDGFSFSGGKYTDGPSKSDEWFAQGRMVKAHPVYGNKGKAKDPIFGLTMGAESQSSNDVFRWFCVEAGSSSNPPVLFIHGFPSQAYSYRNVLPVVSDNYHAIAFDWLGFGFSDKPQPDYGFDYTLDEYTSSLESLINAVAPDKLSIVVQGYFAPIVIKYANEHQDKLNHLILVNPPITDKHAKLPSTLACFSNFLLGEIFSQDPLRASDKALTSSGPYMMKEEDAMVYRRPYLVSGSSGFALNAISRAMKKDLKVYIESMRNILSSDSWKTKTTVCWGLRDRWLNYDGVEDFCGSANYKILELPMAGHHVQEDRGEELGKLVKRILSG

SEQ ID NO: 17101 - protein, 298 aa, Silicibacter pomeroyi DSS-3
MTPLPVTVIGGYLGAGKTTLVNHLLRHAAGRRLAVLVNEFGDLPIDADLIEAEEDGMISIAGGCICCSFGSDLIGALNDLAAMEPRPDHILVESSGVAIPGAIVSTMLLADGIRSDGIVVVVDGETVRQRAQDDYVGDTITRQLSDAEIVVVNKTDLLAHAVQTELMEWLAEAAPGAIAIPAERGRVAPGALLGVLPAPGTGQPAHHSDRLFDSLVLAPEGGQPIERLARDLATGPHGVIRAKGYLRDIEGALWLIQTVGRRWEVTPAQGPHQTGLVCIGFRDRLDRSGLAALAGATV

SEQ ID NO: 17102 - protein, 624 aa, Cryptococcus neoformans var. neoformans JEC21
MRGLAKLFFLSCSFVSLVSSEKTDESPTAVSDNYMPKATATIDPSVFALSNDFEITDVPTTREYTFDIANAFASPDGYEREVYVVNNMFPGPVIEANTGDTIIVHVNNHLDEGQSLHWHGLRQLGTAFMDGVPGITQCPIPPGGSFTYNFTVSHQSGTYWWHSHYSNSMADGIWGPLIVHSPNEPLQRGRDYDEDRIVFITDWMHDNSEIIIAALATPEGYKGNIAPPQGDAILINGRGQTNCTATGSSSCFYPPPPEIQVPVNCRVRLRFISATAHPMYRISIDNHPMEVVEADGTAVYGPTVHEISIAPGERYSAIINTNEGKEGDAFWLRTSVALSCMFGAVSQEGLAVVRYTGNGIVSTEEPQTSAWSDLAGVTVPCTGLDQTYTLSPRDSLSAPREPLQSHFFNSERGAFVNVLGNTFQGYGFNNISYQNQIFNPLLSIVQRGGSCENTLVSSRTFPDFGPGNIIINNLDTVIDHPYHLHGNEFQVIGRGTGALSIDNLTNIDFTLDNPVRKDTLWIQGGSWAVLRITADNPGVWALHCHIGWHLTEGKLAVIVVQPSAIGHMESPESWTNLCANTDPNAFGPAKRSSSPSIQSSKTSSFQYLREVKGKVVKRRGAREA

SEQ ID NO: 17103 - protein, 333 aa, Arabidopsis thaliana
MATAMNVFSTKWSSELDIEEYSIIHQFHMNSLVGDVPQSLSSLDDTTTCYNLDASCNKSLVEERPSKILKTTHISPNLHPFSSSNPPPPKHQPSSRILSFEKTGLHVMNHNSPNLIFSPKDEEIGLPEHKKAELIIRGTKRAQSLTRSQSNAQDHILAERKRREKLTQRFVALSALIPGLKKMDKASVLGDAIKHIKYLQESVKEYEEQKKEKTMESVVLVKKSSLVLDENHQPSSSSSSDGNRNSSSSNLPEIEVRVSGKDVLIKILCEKQKGNVIKIMGEIEKLGLSITNSNVLPFGPTFDISIIAQKNNNFDMKIEDVVKNLSFGLSKLT

SEQ ID NO: 17104 - protein, 587 aa, Streptococcus pyogenes MGAS8232
MAVEIIMPKLGVDMQEGEIIEWKKQEGDTVNEGDILLEIMSDKTNMELEAEDSGVLFKITRQAGETVPVTEVIGYIGAEGESVEVSSPAASDVNVARTTEDLEAAGLEVPKAPAQAASAAPKAALADDEYDIIVVGGGPAGYYAAIRGAQLGGKIAIVEKSEFGGTCLNVGCIPTKTYLKNAEILDGIKIAAGRGINLASTNYTIDMDKTVDFKNTVVKTLTGGVQGLLKANKVTIFNGLGQVNPDKTVTIGSQTIKGRNVILATGSKVSRINIPGIDSKLVLTSDDILDLREMPKSLAVMGGGVVGIELGLVWASYGVDVTVIEMADRIIPAMDKEVSLELQKILSKKGMKIKTSVGVSEIVEANNQLTLKLNNGEEVVAEKALLSIGRVPQMNGLENLNLEMDRNRIKVNDYQETSIPGIYAPGDVNGTKMLAHAAYRMGEVAAENAIHGNTTRKANLKYTPAAVYTHPEVAMVGLTEEQAREQYGDVLIGKNSFTGNGRAIASNEAHGFVKVIADAKYHEILGVHIIGPAAAEMINEAATIMESELTVDELLLSIHGHPTFSEVMYEAFADVLGEAIHNPPKRK

SEQ ID NO: 17105 - protein, 598 aa, Parachlamydia sp. UWE25
MALIRTKIVCTIGPACNSLEKIIELINVGMNVARLNFSHGTQEEHLRTINLLKEARCQLNLPLAIMLDTKGPEIRLGKIRDGQIFLTVGQKWRLVKKEVLGDESQVSIFPLNILDQLPVGTTILFDDGYIASRVIENSSEGVLVEINNSGMIRSSKGVNIPNTSLNLPAVTEKDIDDIRFGCSQDIDLIAASFVRSAEHVLEIKRLLADEKKTDILVIAKIENSEGVQNFDSIVQAADGIMIARGDLGVEVPLSHVPRLQKMMIRKSYLAGKPVVTATQMLESMINNPRPTRAETSDVANAIYDSTSAIMLSGETAIGRYPVETVNVMRSIVEEAEADFNYSTFFDQHAPLVYHDVPSAVTLATVKTAYSSSAKAIFAFTKAGTTARLLSRLRPKMPIIAMTAKEKIFHQLAFNWGVIPFLSEPCNSLDKSLKKISDFALGSQHVSYGDLVVITAGTPFGFSGTTNMMIVENIGDVLVRGHSGYGIRVHGNVVIVLAPQSKAPYAVKDQVLVIAKCDESYLSLMKEASAIILQNHINDFASEKYAKKIALSLGKPILLRADAACQILKEGQLVTLDPEKALVYKGVVLDQLLASGEFS

SEQ ID NO: 17106 - protein, 270 aa, Wolbachia endosymbiont of Drosophila ananassae
MNGIKQHIQEDNVQEFKELIKRIQKHEREVSEAKQEMIKANLRLVVSIAKKYSKRGLDLLDLIQEGNIGLMKAVDKFDYKRGYKFSTYGTWWVRQSITRAIPEQSKVVRIPVHMVEIISKINRALRKMTHEMGREPTLEELSVELTMPLERIRKVMKIARDPVSLEAPTGKDDSSTFGDCIEDKRVSRPEDAAILADLRGITTNVLATLTPKEERILRMRFGLGKDGKEHTLEEVGKIFNVTRERIRQIEAKALRKLKHPSRARKLRGFF

SEQ ID NO: 17107 - protein, 232 aa, Bacillus anthracis str. A2012
MGWGLAVAVAAYVVGSISGAHLNPALTIGLAFKGAFPWGDVPGYIAAQMIGAIIGAVIVYLHYLPHWKETEDPGTKLGVFATGPAIPNTFANLLSEMIGTFVLVFGILAIGANKFADGLNPFIVGFLIVSIGLSLGGTTGYAINPARDLGPRIAHFFLPIAGKGGSNWKYAWIPVVGPILGGSLAGLFHQVVFEGKQNAALIYVIIATVIVLAISYMTSKKSGSNTNSRKVA

SEQ ID NO: 17108 - protein, 595 aa, Kluyveromyces lactis NRRL Y-1140
MRVGNSNSIKKNVSECLSPNPVYYRNPITFKKANEFNNGKRERPLALLGDSIHADSKNSRQQLDDTVDNRLVIHWFRGDLRVRDNTGLAYALNQSKSGSVEALYVINEHDWIAHMESGWKLKFQLDALRSLSRELAKLGVRLHVKYFIPESPCLSNSREYAQWFSHIIEEIAASKNYDGNSKDDTKDDTDADEPALKKRKKDNDENQKGGSPNILVTANLQYEVDELYRDLKICRLQTQSSNSANFTLKLFHDMCIIEPGILKTGKGSQYTIFTPWYKKWVSFLEANQKDKHTICIEASIPQSSNREKVNPEEIKYQLPDKFMSEMPEQTLNIPKADEETALKKLTEFISKRASKYNNDKDLLDLTGTSLLSCYVTSGVISARTILNQSYQANNSRLMNKDIKKNNSLETFIKEVAWRDFYKHAISYWPFLSMDLPFKFETLNIKWENDVFLFEKWCYGETGIPIVDAIMLKMLKTGYINNRSRMITASFLAKNLLIDWRWGERWFRKHLIDYDTASNVGGWGFCASTGIDCQPYFRVFNMKLQSEKYDPEGKFIRHWLENDENDSDNVHEPKPNAIVDLRDSRERVLERFREVM

SEQ ID NO: 17109 - protein, 502 aa, Myxococcus xanthus DK 1622
MNGASGNGASDGVGASRRESVLQRRLSLADMLDLPSFVEVVRSFSELYRVGIKVMDTAGDKLADVKVGHGDFCSYVFGFPEGRSRCTATVARVKDGPVALVQGARPARGDGAEAAGIIALPCFTGLRYLVMPVCWEGDTLGRVILGPFTPEELADFPPSLTDISGVDLSRAHELVARVRRVPERTAAQVLVHFGQVLAALVASGQRAFLATQLHIEAMLETHRDLEANNARLAQANIRLKELDRLKSTFLGTVSHELRTPLASIIGYSEMLAEGLAGALNPEQLLYVRTIVEKGESLLNLISSILDLSQIEAGRLRLVMGPVDLGSVIQTAVSSVAPQAQRKGVELEVRLPPLPQPRLAADADKLRQVVVNLLANAVKFTSSGGRVSVVMSEATAQHELAAPGYRVCVEDTGMGIREDQFENIFQSFYQVDGSSTREHGGAGLGLAIVKSLVEGHGGRVSVESEFGRGSRFTVVLPLQPPLSEHGGFSALAPTPSPSGHDRF

SEQ ID NO: 17110 - protein, 474 aa, ASPERGILLUS NIDULANS FGSC A4
MASTLRLSTSALRSSTLAGKPVVQSVAFNGLRCYSTGKTKSLKETFADKLPGELEKVKKLRKEHGNKVIGELTLDQAYGGARGVKCLVWEGSVLDSEEGIRFRGLTIPECQKLLPKAPGGEEPLPEGLFWLLLTGEVPSEQQVRDLSAEWAARSDLPKFIEELIDRCPSTLHPMAQFSLAVTALEHESAFAKAYAKGINKKEYWHYTFEDSMDLIAKLPTIAAKIYRNVFKDGKVAPIQKDKDYSYNLANQLGFADNKDFVELMRLYLTIHSDHEGGNVSAHTTHLVGSALSSPMLSLAAGLNGLAGPLHGLANQEVLNWLTEMKKVVGNDLSDQSIKDYLWSTLNAGRVVPGYGHAVLRKTDPRYTSQREFALRKLPDDPMFKLVSQVYKIAPGVLTEHGKTKNPYPNVDAHSGVLLQYYGLTEANYYTVLFGVSRALGVLPQLIIDRAFGAPIERPKSFSTEAYAKLVGAKL

SEQ ID NO: 17111 - protein, 389 aa, Candida glabrata CBS138
MHNELLGRSVDTCSTENDYNGEQNLRILAVFIVMISSGLGAYFPILSSQYSFIRLPNWCFFVAKFFGSGVIIATAFIHLLQPAAEALTDDCLGGTFEDYPWAFGICLMSLFMLFLAEIVAHHFVDKKFNHSHAETDNANALPDIILKDIQISTDDLSEGMLNCAGHQDSLQDSKKIETGVSTNLKRVDDSGFEGQYEYKRESTDETWIDENTLTTGNSEHKFSADYVSKVFVLCVLEFGIIFHSVFVGLSLAVAGSEFKVLFIVITFHQMFEGLGLGTRIAETEWPPSKWYTPWIMAFAFTITSPIAIAIGIGVRHSWVPGSRKALIANGVFDSISSGILIYTGLIELMAHEFIFSNQFKGEHSLRNMLTAYFIMCCGAALMALLGRWA

SEQ ID NO: 17112 - protein, 409 aa, Arabidopsis thaliana
MGSGRDRDDPLSFTSNPSTASSPVTVSDYLDNFLGEPTSRSGSFQSESLLGGGGGESINDADFGFARPDFRSEQLAGTVQFYERHVFLCYKKPSVWPARIEAAEFDRLPRLLSAAVSARKGSMKKETRLTICEGHDGTETSNGDVLIFPDMIRYRRLTHFDVETFVEEVLVKDGEWLPGNPELLKGSYVFVCSHGSRDRRCGVCGPSLVSRFREELEFHGLQAHQQRRDCRPAMEVRTKFSCSVSFLAVSGLVVIGRFTHDASLIIRGEMGLSEEDQKKTQEGRFQLNGTVHSVKINGKSRAAEPNGCCQQNGNSSSCCQDDTTLMLSLGTSEDNQLESENNTEKLTPGRKIAEKTFFRINSDKGSSTRKVCGIPTWLESWEREDTYAALAVVCAAASVAVAYTCYKQL

SEQ ID NO: 17113 - protein, 371 aa, Nocardioides sp. JS614
MSLRHEVTEAKRIVVKIGSSSLTTAAGGIDPGRVRDLVDVLAKLRAGGSEVVLVSSGAIAAGLAPLGLRRRPRSLPAQQAAASVGQGLLVHRYNEELARHGVVAGQVLLTVDDVTRRSHYRNAYQTFAKLLELGVLPIVNENDTVATSEIRFGDNDRLAALVAHLVHADLLVLLSDVEGLYDADPAAPGSSMLPDVVSVHDLADVRIGKAGAAGLGTGGMHTKIDAARIATGAGIPVVLTSAERAPAALLGEPVGTLFHATGRRRPTRLLWLAHATEPKGTLLLDAGAVRAVVERRASLLAAGITGVEGTFHAGDPVDIAAPDGTPVARGLVNFDAEELPNLLGRSSHELKRELGAGYEREVVHRDDLVLL

SEQ ID NO: 17114 - protein, 662 aa, Clostridium acetobutylicum ATCC 824
MNIDELSINTIRILSAEAIQKANSGHPGTPLGAAPVAYTLWSKYLKHNPSNPKWVNRDRFILSAGHASMLLYSLLHLFGYKISIDDLKNFRQWESITPGHPEYGVTPGVEISTGPLGQGIANGVGMAIAEAHLASKFNKQGFDIVDHYTYVLSGDGCMMEGIASEAASFAGTLGLSKLIVIYDDNDISIEGNTDIAFKENVGERFKAYDWNVINVEDGTDVSSLSKAIEKAKQQNDKPSIIIAKTVIGFGSPNQGTAGVHGSPLGETGVSGLKKNLNWNYEEEFYVPEEVKEHIKKLQKTFEENESNWNELLNKYKEKYPDLFDEFNAWMNGEVKVKLDEIDAFKELEKPMATRDSSGKALNIIANVVPNLIGGSADLAPSNKTYMNDKGDFSSDDRSGSNLHFGVREHAMAAIANGVSAHGGLKIFVSTFFVFSDYMKGAMRMSALMNLPVVYVLTHDSIGVGEDGPTHEPIEQLAALRSIPNLTVLRPCDSKETVEAWKYALEREDGPTALVLTRQKLPLYNETGKGLLKGAYTLKDSKKDVPDMLLMASGSEVELVYEAQEELLNKGIDSRVISVPSFELFDKQDKAYKESVMPSSVRARVAVEAASSFGWHKYTGIDGEIISIDHFGASAPAETLFEVFGFTKENVIKTSEEVLKNNK

SEQ ID NO: 17115 - protein, 292 aa, Triticum aestivum
  misc_feature (165)..(165): Xaa can be any naturally occurring amino acid
  unsure (1)..(292): unsure at all Xaa locations
MMAEAWMDVLPPPAPYFAGQPCWAVQQERRGGGAWTLEENKVFEEALAAIDLDAPDRWEMVALMLPRKTVADVVNHYRALENDVGFIEAGLVPFPHYDSSSPSSGFTLDWDGGAAGAGGFRRGYCLKRGRADQGPQKAVPWTEEEHRLFLEGLKKYGRGDWRNIXRNYVTSRTPTQVASHAQKYFIRLTSGGKDNKRRSSIHDITTVNVPDDDDRDSPSGSPPSVVTTVDTKPSPSYGGQRHAFVPSTLPAGTLGGGHPYGNVKLEHQSSFMSGAGLDLDDSLLLQMQCGQL

SEQ ID NO: 17116 - protein, 571 aa, Arabidopsis thaliana
MNPQANDRKEFQGDCSATGDLTAKHDSAGGNGGGGARYKLMSPAKLPISRSTDITIPPGLSPTSFLESPVFISNIKKTVFFKTSCLLIDQPEPSPTTGSLFKPRPVHISASSSSYTGRGFHQNTFTEQKSSEFEFRPPASNMVYAELGKIRSEPPVHFQGQGHGSSHSPSSISDAAGSSSELSRPTPPCQMTPTSSDIPAGSDQEESIQTSQNDSRGSTPSILADDGYNWRKYGQKHVKGSEFPRSYYKCTHPNCEVKKLFERSHDGQITDIIYKGTHDHPKPQPGRRNSGGMAAQEERLDKYPSSTGRDEKGSGVYNLSNPNEQTGNPEVPPISASDDGGEAAASNRNKDEPDDDDPFSKRRRMEGAMEITPLVKPIREPRVVVQTLSEVDILDDGYRWRKYGQKVVRGNPNPRSYYKCTAHGCPVRKHVERASHDPKAVITTYEGKHDHDVPTSKSSSNHEIQPRFRPDETDTISLNLGVGISSDGPNHASNEHQHQNQQLVNQTHPNGVNFRFVHASPMSSYYASLNSGMNQYGQRETKNETQNGDISSLNNSSYPYPPNMGRVQSGP

SEQ ID NO: 17117 - protein, 297 aa, Crocosphaera watsonii WH 8501
MNTNTNKKADILIAENQIESLKLLSKVLEEQGYKVRQAIDGEMALIAVEAEIPDLILLGMNLDRVDDYQVCKQLKMQDKTTDVPIIFLRDFDELSDKIKAFEIGGTDYIIKPCQQEELLVRIETQLKVSLKLKEVKKENKNLVKKLKIIENSQPVHQQIPLESHLLYQAIAATNNSIVITDATASDYPIIYVNPGFEIMTGYSLQEVTGKNCRFLQGSDDQQPELEQIRDCLQKGESCHVTLRNYRKDGSLFWNEMSLSPIKDESGNILYYLGVQTDVTDKKKLMKPNKDIKHLYRK

SEQ ID NO: 17118 - protein, 252 aa, Pseudomonas putida
MRLKDKVAIVTGAATGIGNAIVRSYLAEGAKVVIADVKGAEAAAAELGEDLALGVFADVSDPDSTKQMAKAALDRFGKIDVLVNNAGIFTGLNYVPMESISVADWDKLYSVNVKGPWLCASAVSAAMREGGGGKIINIASVIAHIGAPFMLHYVSSKGAVAAMTRAMAREFATTKAGISVNSISPGYTHSENALANAQQHEQFEGVSASMRAIDRPQVPADIAGVALWLASDEASYVNGQNIVVDGGIYMSL

SEQ ID NO: 17119 - protein, 308 aa, Triticum aestivum
MEKSKVLVVGGTGYIGRRIVRASLAHGHRTFILMRPEIGLDIDKLQLLLSFKAHGALLVEASMEDHRSLVAAVKQVDVVVSAISGRHFLLQLKLVEAIKEAGNIKRFLPSEFGIDPARMGHALEPGRITFDEKMEIRRAIEEANIPHTYVSANCFAAFFVPNLSQMRTLLPPKEKVHVYGDGNVKVIFMDEDDVATYTIKSIDDPRALNKTIYLRPQENILSQNELIAKWEKLSGKVLKKIPIPSDEFLVSMKGTDLANQVGIGHYYHIFYEGCLTNFDIRDDGEEEASLLYPEVQYTRMDEYMQHYL

SEQ ID NO: 17120 - protein, 337 aa, Lyophyllum shimeji
MVNVGINGFGRIGRIVFRNALLNPKIQVVAINDPFINLEYMVYMFKYDSVHGRFKGTVEAKDGKLWIQGKPVIVYGEKNPSDIKWGAAGRDYVVESTGVFTTVEKAEGHLKGGAKKVIISAPSADAPMFVMGCNLDQYDPKYTVISNASCTTNCLAPLTKVIHDKYGIIEGLMSTIHATTATQKTVDGPSNKDWRGGRAVVNNIIPSSTGAAKAVGKVIPSLNGKLTGLSFRVPTIDVSVIDLVVRLEKPASYEDIKKTVKEASEGAYKGIIEYTEEQVVSADFIGHHASSIFDAQAGIQLNPNFVKLIVWYDNEWGYSARVCDLLVFAAEQDAKQQ

SEQ ID NO: 17121 - protein, 148 aa, Brassica napus
  misc_feature (142)..(142): Xaa can be any naturally occurring amino acid
  unsure (1)..(148): unsure at all Xaa locations
MATSIESSDVEVGFAKLQGEDFEYYMQTYSIVLGRNSKKSTVDVDLSSLGGRMNISRNHARIFYDFTRRRFALEVLGKNGCLVEGVLHLPGNPAVKLDSQDLLQIGDKEFYFLLPVRSILGGPRHVVSGPVGPYNQYPGSGXGKRGGR

SEQ ID NO: 17122 - protein, 451 aa, Burkholderia vietnamiensis G4
MDFDYDLFVIGAGSGGVRLARMSASYGARVAIAEQEQIGGTCVLRGCIPKKLLVYASHYPHELEDAQGFGWRFDAGTHDWPALIAAKDREINRLSDIYINLLRQSGVDMHAGRATLVDAHTVAVGERTFRARHIAIATGSRPSLPPRPGIEHAITSREALSLPALPGRIAVVGGGYIAVEFAGIFNGFGSRVDLFYRGDRILRGFDDDVRQFLTDEMTKQGVAIHAHAVVESIARADDGTLSVQVGDATHGPYDAVLYATGRVPNVDGLGLERAGVLLDARGAIAVDAYSATSVPSIHALGDVTSRPQLTPVATRDGSLLARTLFGGARVATDHEWVPSAVFSQPEVATVGFTEAHARGVYGDLDIYRTSFRALRHTLSGRDERTLMKLVVARDSQRVVGAHMVGRDAGEIIQGIAIAIRAGATKAQFDDTIGIHPTAAEEFVTMRQKVAD

SEQ ID NO: 17123 - protein, 187 aa, Ipomoea batatas
RYDQYKDAWDTCVVVELQVGDRIEPVRFFHSYKRGVDRVFVDHPMFLEKVWGKTGSMLYGPKAGKDYKDNQLRFSLLCQAALEAPRVLNLNSSKYFSGPYGEDVVFVANDWHTALLPCYLKTMYQSRGIYMNAKVAFCIHNIAYQGRFAFSDFSLLNLPDEYKGSFDFIDGYDKPVKGRKINWMKAG

SEQ ID NO: 17124 - protein, 277 aa, Zea mays
MERAAPVRSSHTSTAGLLAWPHPDGAGSLPARRPNQPTEEFRNVVFGGQLTEGADGLNKTKRKTGSSPKGKETTGTGISKAESAAAAVATASRDRQASQITFSQDGTVPTRKATSVAGVARQRELSHTVESEGDSKMKRQVSSTKSKELSGHDIFADHEDPKPNRSRRSDYGSSAAQSPVKNANVSSFSFGEADIDSTVKTAKKKGSSNLSTDLNGKTMPKKDSASAEKQPPNRARPKGMSGSSNFADGKASTSTTGDHEGRRTRQPPGGDSSILLG

SEQ ID NO: 17125 - protein, 408 aa, Pseudomonas syringae pv. phaseolicola 1448A
MKRVVVTGMSGITSVGSDWPTIDASFIANRSGIRRMDEWNRFAELNTRLAGPIDDFAVPAHWTRKQLRSMGRVSRLAVAAAEQALIDAGLLNDPLIRDGRMGTACGSSTGSTDEIKAFGNMLINSVAVGLNANSYVRMMPHTTAANISIFFGLTGRLIPTSSACTSGSQGIGYAYESIKFGRLPLMLAGGAEELCPTEAMVFDALYATSLKNDAPHTTPRPYDSGRDGLVIGEGGGMLVLEELEHAQARGAHIYAEIVGFGSNADGAHSTRPEQATMRRAMELALEDANLPPDAIGYVNGHGTATEQGDIAETLATSSLFGPRMPLSSQKSFLGHTLGACGALESWFSIEMLNSDRYIHTLNLVDIDSQCGELDYIVGEPRRMSNEYVMNNNFAFGGVNTSLIFKRWG

SEQ ID NO: 17126 - protein, 518 aa, Callistephus chinensis
MTILPFIFYTCITALVLYVLLNLLTRNPNRLPPGPTPWPIVGNLPHLGMIPHHSLAALAQKYGPLMHLRLGFVDVVVAASASVAAQFLKTHDANFASRPPNSGAKHIAYNYQDLVFAPYGPRWRMLRKICSVHLFSTKALDDFRHVREEEVAILTRVLVHAGESAVKLGQLLNVCTTNALARVMLGRRVFADGSEGRGVDPKADEFKDMVVELMELAGEFNIGDFIPPLDCLDLQGITKKMKKLHARFDKFLNIILDDHKIEKGAAGRRHSDLLTTLISLKDVDAADDDEEGKLSDIEIKALLLNLFAAGTDTSSSTVEWAVAELIRHPELLKQAREEMDIVVGRDRLVTELDLSRLTFLQAIVKETFRLHPSTPLSLPRMASESCEVDGYYIPKGSTLLVNVWAIARDPKMWTNPLEFRPSRFLPGGEKPDADIKGNDFEVIPFGAGRRICAGMSLGMRMVQLLIATLVQTFDWELANGLDPEKLNMEEAYGLTLQRAEPLMVHPRPRLSPHVYESR

SEQ ID NO: 17127 - protein, 488 aa, Ashbya gossypii ATCC 10895
MSVPNIQYSRLDGDETGKEGTSVQSPFHTVQLNREWGDPSSSNGDRIELIDYPTKSSTLSSGFDLEEDSVLGAIVQESKGKVQYVYGLHEHGEQVSLELVWSGSRLRLKNCGLLGGLVLTMLLTVIVDWTIRLIIINLKLTGKTTYQDTVEFAMGRPGKYAVLFANGMFAFGGCVGFCIIIGDSIPHVLRAFFPNYIEYFNRNMIITIVTIFVSYPLSLNRNISKLSKASMLALVSLLLIVVIIVVRGPTVGNDYRGSFDLEELFVKPRLFQGISVISFALVCLHNTSFIYFSLRKPSLRRFNSLTHISCTISMVVCLIAGYSGFLTFKSKTKGNILNNFPSSDNYINFARFCFGFNMLTTFPLEIFVLRDVIRDLISTETPKGEPLRLSTKRHFIITTALVLSTMGISLTTCNLGALLELVGSTTASLSAYILPPMTNLILTGERRAAKEKLPHYACILFGFSIMVISSTQAIITAIHSDKSSQCDA

SEQ ID NO: 17128 - protein, 335 aa, Schizosaccharomyces pombe
MDIEKSDKWTYVKERKVGEGTYAVVFLGRQKETNRRVAIKKIKVGQFKDGIDISALREIKFLRESRHDNVIELVDVFSTKSNLNIILEFLDSDLEMLIKDKFIVFQPAHIKSWMVMLLRGLHHIHSRFILHRDLKPNNLLISSDGVLKLADFGLSRDFGTPSHMSHQVITRWYRPPELFMGCRSYGTGVDMWSVGCIFAELMLRTPYLPGESDLDQLNVIFRALGTPEPEVIKSMQQLPNYVEMKHIPPPNGGMEALFSAAGHEEIDLLKMMLDYNPYRRPTAQQALEHHYFSALPKPTHPSLLPRKGGEEGIKHVSSDLQRQNNFPMRANIKFV

SEQ ID NO: 17129 - protein, 374 aa, Mycoplasma hyopneumoniae 232
MDKFRYVKPGQIMAKDEEMIRFLDIDGNLLSSTVFGPIDETNDIRLSKQEIKKAYEFMVLSRQQDTYMTQLQRQGRMLTFAPNFGEEALQVASGMALTKDDWFVPAFRSNATMLYLGVPMILQMQYWNGSEKGNVIPENVNVLPINIPIGTQFSHAAGIAYAAKLTGKKIVSMSFIGNGGTAEGEFYEALNIASIWKWPVVFCVNNNQWAISTPNKYENGASTIAAKAMAAGIPGIRVDGNDLLASYEVIKEAVDYARSGNGPVLVEFVTWRQGVHTSSDNPRIYRTVEEEKEHEKWEPMHRIEKYMFDRGILDSAEKQKIWDEALAIVKETYEKSLVGLESTIDEIFDHTYKVLPPELEEQKQEALEFFKGVK

SEQ ID NO: 17130 - protein, 510 aa, Callistephus chinensis
MSILSLLVYFCISLLVIIALVNMFITRHTNRLPPGPAPWPVVGNLPHLGAIPHHTLAALATKYGPLVYLRLGFVHVVVASSPSVAAQFLKVHDLKFASRPPNSGAKHIAYNYQDMVFAPYGPQWTMFRKICKDHLFSSKALDDFRHVRQEEVAILARGLAGAGRSKVNLGQQLNMCTANTLARMMLDKRVFGNESGGDDPKANEFKEMATELMFLAGQFNIGDYIPVLDWLDLQGIVKKMKKLHTRFDKFLDVILDEHKVIASGHIDMLSTLISLKDDTSVDGRKPSDIEIKALLLELFVAGTDTSSNTVEWAIAELIRQPHLLKRAQEEMDSVVGQNRLVTEMDLSQLTFLQAIVKEAFRLHPSTPLSLPRIASESCEVDGYYIPKGSTLLVNIWAIGRHPEVWTDPLEFRPTRFLPGGEKPGIVVKVNDFEVLPFGAGRRICAGMSLALRTVQLLMGTLVQAFDWELANGIKPEKLNMDEAFGLSVQRAEPLVVHPRPRLPPHVYKSG

SEQ ID NO: 17131 - protein, 632 aa, Pseudomonas syringae pv. syringae B728a
MSHQSDLISEDILAYLGQHERKEMLRFLTCGNVDDGKSTLIGRLLHDSKMIYEDHLEAITRDSKKSGTTGDDVDLALLVDGLQAEREQGITIDVAYRYFSTAKRKFIIADTPGHEQYTRNMATGASTCDLAIILVDARYGVQTQTRRHSYIASLLGIKHIVVAINKMDLNGFDESVFESIKADYLKFAEGIAFKPTTMAFVPMSALKGDNVVNKSERSPWYTGQSLMEILETVEIASDRNYADLRFPVQYVNRPNLNFRGFAGTLASGIVHKGDEIVVLPSGKSSRVKSIVTFEGELEQAGPGQAVTLTMEDEIDISRGDLLVHADNVPQVSDAFDAMLVWMAEEPMLPGKKYDIKRATSYVPGSIASITHRVDVNTLQEGPASSLQLNEIGRVKVSLDAPIALDGYSSNRTTGSFIVIDRLTNGTVAAGMIIAKPVSGGGSQHHGERAHVSTEERAQRFGQQPATVLFSGLSGAGKSTLAYAVERKLFDMGRAVYVLDGQNLRHDLNKGLPQDRAGRTENWSRAAHVARQFNEAGLLTLAAFVAPDAEGRERAKALIGKDRLLTVYVQASPAVCRERDPQGLYAADGDNIPGESFPYDVPLNADLVIDTQTLNVEESVRQVLELLRSRGAI

SEQ ID NO: 17132 - protein, 353 aa, Ashbya gossypii ATCC 10895
MSRPVVLKLGNTRFAHKAWDELGRIADVVTVNKAVTRPEFLRMLRDPNSPASRAQVVTRTFASVQQTGLFDRELAEHLPASVVAVCQNGAGYDQIDPESFTKRQIQVANVPGLVNAPTADTHVFLLLAALRNFCHGQLLLRQGRWPDAPVAGTPFGHDPAGKTVGVLGMGGIGRAVVQRLRPFGFERIIYHNRNRLSSELECSCEYVSFEELLAQSDILSVNVPLSSATRHMLDADAIARMKDGVLVVNTARGPIFDEQALIAALQSGKISAAGLDVYENEPHVPQALLELPNVVCLPHMGTHTVESIKKMEEFVVENVHSVLRTGRVKSLIPELRNAPWLASTVPLIPQSDY

SEQ ID NO: 17133 - protein, 511 aa, Lycianthes rantonnei
MVLLLISELCASAIIFIIVHIIISKLIATGWGRRQRLPPGPMGWPVIGALPLLGTMPHVALAKMAKKYGPIMYLKVGTCGMVVASTPNAAKAFLKTLDINFSNRPPNAGATHLAYDAQDMVFAHYGPRWKLLRKLSNLHMLGGKALEDWANVRANELGHMLKSMFDASRVGGRVVVADMLTFAMANMIGQVILSKRVFVEKGAEVNKFKDMVVELMTVAGYFNIGDFIPQLAWMDLQGIEKGMKCLHKKFDDLLTKMFDEHKATTNERKGKPDFLDVVMANRDNSEGERLSTNNIKALLLNLFTAGTDTSSSAIEWALAEMMKNPQILKKVQQEMDQIIGKNRRLIESDIPNLPYLRAVCKETFRKHPSTPLNLPRISNEPCMVDGYYIPKNIRLSVNIWAIGRDPDVWENPLEFNPERFLSGKNVKIDPRGNDFELIPFGAGRRICAGTRMGIVMVEYILGTLVHSFDWKFSNDVKEINMEESFGLALQKAVPLEAMVTPRLPFDVYYTN

SEQ ID NO: 17134 - protein, 657 aa, Rhodobacter sphaeroides
MKDIGAAQETRMANAIRALAMDAVEKAKSGHPGMPMGMADVATVLFNRFLTVDPSAPKWPDRDRFVLSAGHGSMLLYAIHHLLGYADMDMDQIRSFRQLGARTAGHPEYGHAEGIEVTTGPLGQGIATAVGMALAERMKNARYGDDLVDHFTYVIAGDGCLMEGISHEAIDMGGHLGLGRLIVLWDDNRITIDGDSGISTSTDQKAPFAASGWHVLACDGHAPEEIAAAIEAARRDPRPSMIACRTVIGYGAPNKQGGHDVHGAPLGAAEIAAARERLGWDHPPFEIPADLYEAWGRIAARGADARAAWETRLQASPLRAAFETAEAADTSALPPAIAAYKARLSAEAPKVATRKASEMALGVVNEALPFAVGGSADLTGSNLTRSKGMVSVAPGAFAGSYIHYGIREHGMAAAMNGIALHGGLRPYGGTFMAFADYCRPSIRLSALMGVPVTYVMTHDSIGLGEDGPTHQPVEHLASLRAIPNLAVIRPADAVETAEAWEIAMTATSTPTLLVLSRQNLPTVRTEHRDENLTARGAYLLRDPGERQVTLIATGSELELALAAADLLAAEGIAAAVVSAPCFELFAAQPADYRATVLGRAPRVGCEAALRQGWDLFLGPQDGFVGMTGFGASAPAPALYQHFNITAEAIVKSAKERI

SEQ ID NO: 17135 - protein, 750 aa, Ustilago maydis 521
MPSLVSSPGTSTMQTDNVHEPSSAFATPPTQSTSSFASGSNTPSHQIRLNGQSSGIGESPAPHSSRPYHSSSHASQSNGAGTGKDKKWKQMFKFGSIGRKASGNASNDRSWHTDSAESSMHKNGDYFEHVQYTGSQPGSTSFQPISGSTVVNDPASFSNDSYSSEDRNASGSIGDAMTTSASSKLQPPADISDTDSSHPRFTSRLMRRVSSAPDTNKLFKNGQNATQKPNEAASSTKNGYLSPDGAGGQHAQFVSEGGAPFTPSKELANAAFFSNSPVRMDSNATSFSYKDFEKGRSVSAKGSSTPKSGRIVFPGTGRSKSSNGKDKKSQLPPPSSSANLAALAGTASVNRGPGSFRRTYSSNSIKVKEVEVGPNSFSKVKMLGKGDVGKVYLVREKKTDKLYAMKVLSKKEMIKRNKIKRVMAEQEILAASNHPFIVTLYHSFQSEDYLYLCMEYCMGGEFFRALQTRPGKCLPEEDAKFYAAEVIAALEYLHLMGFIYRDLKPENILLHQSGHVMLSDFDLSARATQRGGAPAMIRQATPNSAPLVDTRSCIADLRTNSFVGTEEYIAPEVIKGCGHTSAVDWWTLGILIYEMIFATTPFKGSTRNETFSNVLRNEVQFPDSIPISSFGKSLIRKLLIKDELKRMGSQSGASEVKQHKWFSNISWGLLRNSTPPIVPAYSNGVDAVNFRNVRESRSLNLDDQGNDTRAKPAVIKAVAGQKNVGDEEGDAVVSNPFSGFSSVTLKHDDY

SEQ ID NO: 17136 - protein, 364 aa, Triticum aestivum
  misc_feature (113)..(113): Xaa can be any naturally occurring amino acid
  misc_feature (142)..(142): Xaa can be any naturally occurring amino acid
  misc_feature (152)..(152): Xaa can be any naturally occurring amino acid
  misc_feature (163)..(163): Xaa can be any naturally occurring amino acid
  misc_feature (186)..(186): Xaa can be any naturally occurring amino acid
  unsure (1)..(364): unsure at all Xaa locations
MAGAAPDRAALTVGPGMDMPIMHDSDRYELVRDIGSGNFGVARLMRDRRTMELVAVKYIERGEKIDENVQREIINHRSLKHPNIIRFKEVILTPTHLAIVMEYASGGELFERXCKNIRFSEDAPRYFFQQLISGVSYWHSMXVCHRDLKLEXTLLDGSPAPRXECDFRYSSSSVLHSQPKSTVGTXLYAPEVLLKKEYDGKIADVWSCGVTLYVMVVGAYPFEDPEEPKNFRKTIQRILSVQYSIPDNVDISPECRHLISRIFVGDPALRITIPEIRSHNWFLKNLPADLMDDDSMSSQYEEPEQRMQTMDEIMQILTEATIPPACSRINHILTDGFDMDDDMDDLESDSDLDIDSSGEIVYAM

SEQ ID NO: 17137 - protein, 414 aa, Thermus thermophilus HB27
MDLDAFTLFERHINPGLAGLLRFTGLDRVESHAEGPYVWDTQGKRYLDFLGLYGTLNLGHRHPKVVEAVKRQLDRMPMSVRVLVSEPTARLAAKLAEITPEGLEMVFFGNSGAEAVEAAIKLARAYTGKPGIVTTQGGFHGKTMGALSLTPKPEYQDPARPLLPGVKVVPYGDLKALEAAIDEDTAAVIVEPIQGEGGIRVPPEGYLRGVRELTREKGVLMIADEVQTGLGRTGRLFGVDWEGVAPDLMTLAKALGGGVMPIGACVGRREVFEVFKNNPLFHSSTFGGNPLAAAAALAAIEVTLEEDLPGRALELGRHLMEGLKALKEEHPHLIEDVRGRGLMVGVEFTDADIGALVVAEMAERGVLTAFGLNNPKVVRLEPPLIIGKEHVDEALAVFAEALKATEKALEGLLG

SEQ ID NO: 17138 - protein, 513 aa, Matthiola incana
MTTLILTILLATFLSLFIFFLLRRNRNRNHRLPPGPNPWPIVGNLPHMGPKPHQTLAAMVTTYGPILHLRLGFVNVVVAASKSVAEQFLKIHDANFASRPPNSGAKHIAYNYQDLVFAPYGQRWRMLRKISSVHLFSAKALEDFKHVRQEEIGRLTREVARADTKPVNLGQLVNMCVVNALGREMIGRRLFGDGADHKAEEFRSMVTEMMALAGVFNVGDFVPALDWLDLQGVAGKMKRLHKRFDAFLSSILKEHEINNGGDQKHTDMLTTLISLKGTDFDGDGASITDTEIKALLLNMFTAGTDTSASTVDWAIAELIRHPHIMKRTQEELDAVVGRNRPINESDLSRLPYLQAVIKENFRLHPPTPLSLPHIAAESCEINGYHIPKGSTLLTNIWAIARDPEQWSDPLAFRPERFLPGGEKFGVDVKGSDFELIPFGAGRRICAGLSLGLRTIQLLTATLVHGFEWELAGGVTPEKLNMEETYGITVQRAVPLIVHPKPRLALNVYGVGSG

SEQ ID NO: 17139 - protein, 386 aa, Pseudomonas syringae pv. syringae B728a
MFKALRFFGWPLLAGVLIAMLIIQRYPQWVGLPSLDVNLQQAPQTTNVMQGPSSYADAVIAAAPAVVNLYTTKMVNKGNNPLFEDPQFRRFFGDNTPKQKRMESSLGSGVMMSPEGYILTNNHVTTGADQIVVALKDGRETIARVIGNDPETDLAVLKIDLKNLPAITIARSDSIRIGDVALAIGNPFGVGQTVTMGIISATGRNQLGLNTYEDFIQTDAAINPGNSGGALVDASGNLIGINTAIFSKSGGSQGIGFAIPTKLAMDVMKSIIEHGQVIRGWLGIEVQPLTQELAESFGLKDRPGIVVAGIFRDGPAQKAGLQLGDVILSINGEPAGDGRRSMNQVARTKPKDKIAIDVMRNGKEMRLSAEVGLRPPPAPTPVAAPE

SEQ ID NO: 17140 - protein, 103 aa, Thermosynechococcus elongatus BP-1
MAAVSLSVSTVKPLGDRIFVKVAESEERTAGGILLPDNAREKPQVGEVTAVGPGKLTEDGKRQPMDVKVGDKVLYSKYAGTEVKLAGEDYVLLSEKDILAIVG

SEQ ID NO: 17141 - protein, 503 aa, Ajellomyces capsulatus
MGADDTFNSYRYKDTPTYTDSNGCPVMDPESSQRVGENGPLLLQDFHLIDLLAHFDRERIPERVVHAKGAGAYGEFEVLDDISDITTINMLKGVGKKTKLVTRFSTVGGEKGSADSARDPRGFSTKFYTEEGNWDWVFNNTPVFFLRDPSKFPLFIHTQKRNPQTNLKDATMFWDYLSTHQEAIHQVMHLFSDRGTPYSYRHMNGYSGHTFKWLTPDGGFNYVQIHLKTDQGSKTLTNEEATKLAAENPDWHTEDLFRAIERGEYPSWTCYVQVLSPQQAEKFRWNIFDLTKVWPHSEVPLRRFGRLVLNKNPQNYFAEMEQAAFSPSHLVPGVEPSADPVLQSRLFSYPDTHRHRLGVNYQQIPVNCPLRAFNPYQRDGAMAVNGNYGANPNYPSTFRRMNYMPVKASQEHEKWTGAVLAKQLPVTDEDFVQANGLWQVLGRQPGQQANFVKNVAGHLCNAEQKVRKAAYGMFIRVNKDLGSSIESSTEALVASQAQSQPRL

SEQ ID NO: 17142 - protein, 507 aa, Thermosynechococcus elongatus BP-1
MKLRSILRRGFRLQHPLTQILYLPTRRTLLTFAVMIGVLSATAALGQDTAASAAVPEKVQVALNTLWVILAGVLVFFMNAGFGMLETGFCRAKNAVNLLSKNLIVFALASISYWAIGFALMFGDGNGVLGSSGFFLLGADNSPATGEAYRGVYSSLSWAAVPLSAKFFFQLVFAGTAATIVSGAVAERIKFYAFFIFSLLLVGISYPITGHWIWGGGWLQQLGMWDFAGSTVVHSVGGWAALMGAALLGPRLGRFLPDGSVAAIPGHNFAIATLGCLILWLGWFGFNPGSTMAADPGAIAHIAVTTNMAAAFGGVTATVVSTLYFGKPDLSMIINGILAGLVAITASCAFVTIESAALIGAIAGTIIVFSVVTIDRLKIDDPVGAISVHLVNGVWGTLAVGLFADGPGRFYEAGAGPLKGLLWSGDFTQFGYQLVGVLAVGGFTVAFSTAVWLLLNATIGIRVSPEEEIEGLDIGEHGMEAYAGFLLREEVKGFVDLLKRMSGSGRS

SEQ ID NO: 17143 - protein, 777 aa, Caulobacter crescentus CB15
MTVTIATLGFPRIGPKRELKFALEAYWAGKTDADALLDTARDLRAKTWTRQAALGVAHVPSNDFSLYDHVLDTAVMVGAIPAAYGWSGGTVDLATYFAMARGDQGRPAAEACGPGCGHAPGADGVPALEMTKWFDTNYHYLAPELSPGQAFALTSSKPVDEFLEAKALGVHTRPVLLGPVTFLKLAKTKAEGFSPLSLLSALLPVYGQVLRGLAAAGADWVQIDEPCLALDLTDFERAELRRAYGALTHAAPGVRLMLTSYFGGYGENLATAVNLPVEGLHLDLVRAPDELEAALAASRESLVLSLGVIDGRNVWRADLPALLDRLEPVVARRGSDRVVLAPSCSLLHTPIDLDLETALDPEIRQWLAFAVQKVEALAVLAQALNGGRASVAAALEASAQAARARATSPRIHDPKVAERLAAVTPDMTRRRSPYDQRREAQRARLNLPPLPTTTIGSFPQTTEVRQARAAFAKGQISDATYEAFLRQETARAVAWQETVGLDVLVHGEFERNDMVQYFGEQLAGFAFTQSGWVQSYGSRCVRPPILFGDVSRPAPMTVDWWRYAQGLTRRPMKGMLTGPVTILNWSFVRDDLPRETACRQIALAIRDEVVDLEATGAAIIQIDEAALREGLPLRRGDWDAYLDWAVESFRLAASGVADATQIHTHMCYSEFNDIIAAIGAMDADVISIETARSKMELLDAFVGYAYPAQIGPGVYDIHSPRVPAVEEMTTLLAAARQRLAGEQLWVNPDCGLKTRKWPETQAAIVNMVEAARRARAS

SEQ ID NO: 17144 - protein, 335 aa, Pseudomonas putida
MALSKEVPEFDIDDDVLLMETGIVLETDVVSDEPAVSSVRTRAKSGSSLKQHKYIDYSRALDATQLYLNEIGFSPLLSPEEEVHFAPLVQKGDPAGRKRMMQSNLRLVVKIARRYVNRGLSLLDLIEEGNLGLIRAVEKFDPERGFRFSTYATWWIRQTIERAIMNQTRTIRLPIHVVKELNVYLRAARELTQKLDHEPSPEEIATLLEKPVAEVKRMLGLNERVSSVDVSLGPDSDKTLLDTLTDDRPTDPCELLQDDDLSQSIDQWLGELTDKQREVVVRRFGLRGHESSTLEDVGLEIGLTRERVRQIQVEGLKRLREILEKNGHTSESLFQ

SEQ ID NO: 17145 - protein, 498 aa, Pisum sativum
MARKMLNDGEPDLKKGEEQGKVYDFDLFIIGAGSGGVRAARFSSNFGAKVGICELPFHPISSETIGGVGGTCVIRGCVPKKILVYGASYGGELQDARNFGWELNENVDFNWKKLLQKKTDEINRLNGIYKRLLSNAGVKLFEGEGKIASPNEVEVTQLDGTKLSYSAKHILIATGSRAQRPNIPGQELGITSDEALSLEEFPKRAVILGGGYIAVEFASIWRGMGSSVNLVFRKELPLRGFDDEMRAVVARNLEGRGINLHPRTNLAQLIKTEDGIKVITDHGEELIADVVLFATGRSPNSKRLNLEKVGVEFDKAGAIVVDEYSRTNIPSIWAVGDVTNRLNLTPVALMEASLFAKTVFGGQASKPDYNDIPYAVFCIPPLSVVGLSEEQAVEQTKGDVLIFTSTFNPMKNTISGRQEKTVMKLVVDAQTDKVLGASMCGPDAPEIVQGIAIAIKCGATKAQFDSTVGIHPSSAEEFVTMRSETRRVTGGVKPKTNL

SEQ ID NO: 17146 - protein, 679 aa, Crocosphaera watsonii WH 8501
MFNLLSQIKEILRRWWSEFTLQTKLMAAATLAVSLFMSGLTFWAVNTIQKDAQLNDTRFGRDLGLLLASNVTPLIAEDDLTEVARFSSRFYQSTTSIRYIIYTDKTGNIFFGIPYSSAEVQNSLTIERRIQLPDFPSDDHNLPLVRQHQSPNGEVTDVFVPLRHQGNKLGFLSIGINPNATVVNSSNLTRDVTIAVFVAIWAMVILGAVFNALTITRPIKELLLGVKNIAAGNFKQRINLPFGGELGELIFSFNEMAKRLERYEEQNIDELTSEKAKLDTLVSTIVDGAILLDTNLNLLLVNPTARRMFVWDSKNVIGENILEILPSELTEQLQTPLKQMMEQNTSVSDELESEYQTAEDTPLQPRISPGEYRISISQPISRIVRVLLTQVFDQHRETLKGIAMTVQDITREVELNEAKSQFISNVSHELRTPLFNIKSFIETLSEFGEDLTETERKEFLETANHETDRLTRLVNDVLDLSRLESSKTYHLKGIDLSQLIEQTLRSYQLNAKDKELVLKKEVEPNLPLILGHYDLLLQVMTNLVGNSLKFTPSKGMIVIRAYHFKTKSKQFNNKSCVRVEISDSGIGIAPEDQAAIFDRFFRVENRVHTLEGTGLGLSIVRNIIDKHHSRINLISEVGIGTTFWFDLALYEDNCTPSEGCTNDNILPRTVDVHPNSLLF

SEQ ID NO: 17147 - protein, 619 aa, Kineococcus radiotolerans SRS30216
MSCPTGPRRWPRCWPSTPGPGADPDPRRNRRRRGGRGGPPRPVRSNSVANRSTPESPTQHVFVTGGVASSLGKGLTASSLGRLLRARGLRVAMQKLDPYLNVDPGTMNPFQHGEVFVTDDGAETDLDIGHYERFLDVRFDASANVTTGQVYSSVIAKERRGEYLGDTVQVIPHITNEIVDRMRAQARDDIDIIITEVGGTVGDIESLPFLEAARQVRQRLGRDNVFFVHVSLVPYIGPSGELKTKPTQHSVAQLRNIGIQPDAIVCRADREIPEGVKRKIASMCDVDDEAVIACVDAPSIYDIPKVIHREGLDAYLVRKLGLSFRDVDWSTWDDLLRRVHNPRRRVEIALVGKYIDLPDAYLSVTEALRAGGFAEDAKVDIRWVASDECRTPEGAQKQLHGVDAICVPGGFGVRGIEGKLGALRWARENGVPTLGLCLGLQCMVIEYARNVAGLEDASSTEFEPTSKQPVIATMAEQRDIVSGEGDMGGTMRLGSYEAVLQQGSVVATTYGSERISERHRHRYEVNNSYREQLSAKGLVFSGTSPDRELVEFVELPADVHPYYVGTQAHPEFKSRPTRAHPLFSGLVAAALRRQREGQLIDVEPEPAEATADVLTEATA

SEQ ID NO: 17148 - protein, 492 aa, Yersinia pestis KIM
MANYFNTLNLRQQLAQLGKCRFMARDEFADEAGYLKGKKVVIVGCGAQGLNQGLNMRDSGLDVAYALRKEAIAEKRASWRKATENGFKVGTYEELIPQADLVVNLTPDKQHSAVVKAVQPLMKEGAALGYSHGFNIVEVGEQVRKDITVVMVAPKCPGTEVREEYKRGFGVPTLIAVHPENDPKGEGMAIAKAWAAATGGHRAGVLEFSFVAEVKSDLMGEQTILCGMLQAGSLLCFDKLVSEGTDAAYAEKLIQFGWETITEALKQGGITLMMDRLSNPAKLRAYALSEQLKEIMAPLFQKHMDDIISGAFSSGMMADWANDDVKLLNWREETGRTAFENAPQFEGKISEQEYFDHGVLMIAMVKAGVELAFETMVDSGIIEESAYYESLHELPLIANTIARKRLYEMNVVISDTAEYGNYLFANAAVPLLKEKFMDSLQAGDLGKSIPGSAVDNAQLRDVNEAIRNHPIEAVGHKLRGYMTDMKRIAVAG

SEQ ID NO: 17149 - protein, 131 aa, Brassica napus
  misc_feature (124)..(124): Xaa can be any naturally occurring amino acid
  unsure (1)..(131): unsure at all Xaa locations
MVKGIRVYEHGGPEVLKWEDIEVGEPKDGEIRVKNKAIGLNFIDVYYRKGVYKPASMPFTPGMEAVGEVVAVGSGLTGRKIGDLVAYAGSPMGAYAEEQILPADKVVPVPSSMDPIVAASIMLXGMTAQFL

SEQ ID NO: 17150 - protein, 145 aa, Triticum aestivum
  misc_feature (70)..(70): Xaa can be any naturally occurring amino acid
  misc_feature (74)..(74): Xaa can be any naturally occurring amino acid
  misc_feature (94)..(94): Xaa can be any naturally occurring amino acid
  misc_feature (107)..(107): Xaa can be any naturally occurring amino acid
  misc_feature (109)..(109): Xaa can be any naturally occurring amino acid
  misc_feature (112)..(113): Xaa can be any naturally occurring amino acid
  misc_feature (116)..(116): Xaa can be any naturally occurring amino acid
  misc_feature (127)..(127): Xaa can be any naturally occurring amino acid
  misc_feature (133)..(133): Xaa can be any naturally occurring amino acid
  misc_feature (138)..(138): Xaa can be any naturally occurring amino acid
  unsure (1)..(145): unsure at all Xaa locations
FVKAPGGAPANVAIAVARLGGGAAFVGKLGDDEFGRMLAKILRDNGVDAGGVVFDPGARTALAFVTLRAXGERXSCSNRNPSADMLLTAERVKXRLIKEGCIFHYGXIXLIXXACXTTHLTHEVAKXAGASLXYDPNXRRILASL

SEQ ID NO: 17151 - protein, 286 aa, Hordeum vulgare subsp. vulgare
MAKDIEAAPQGGEFSSKDYSDPPPAPIVDFEELTKWSLYRAVIAEFVATLLFLYITVATVIGYKHQSDPTVNTTDAACSGVGTLGIAWAFGGMIFVLVYCTAGVSGGHINPAVTFGLFLARKVSLIRALLYIIAQCLGAICGVGLVKGFQSSYYVRYGGGANELSAGYSKGTGLAAEIIGTFVLVYTVFSATDPKRNARDSHIPVLAPLPIGFAVFMVHLATIPITGTGINPARSLGAAVIYNTDKAWDDQWIFWVGPLIGAAIAAAYHQYVLRASAAKLGSYRSN

SEQ ID NO: 17152 - protein, 981 aa, Arabidopsis thaliana
MTDTTDDIAEEISFQSFEDDCKLLGSLFHDVLQREVGNPFMEKVERIRILAQSALNLRMAGIEDTANLLEKQLTSEISKMPLEEALTLARTFTHSLNLMGIADTHHSQLLQSGISPDELYKTVCKQEVEIVLTAHPTQINRRTLQYKHIRIAHLLEYNTRSDLSVEDRETLIEDLVREITSLWQTDELRRQKPTPVDEARAGLNIVEQSLWKAVPQYLRRVSNSLKKFTGKPLPLTCTPMKFGSWMGGDRDGNPNVTAKVTKEVSLLSRWMAIDLYIREVDSLRFELSTDRCSDRFSRLADKILEKDFGESRHTKFEIATTDYMPPNLQKQNEQDFSESDWEKIDNGSRSGLTSRGSFSSTSQLLLQRKLFEESQVGKTSFQKLLEPPPLKRAGSAPYRIVLGEVKEKLVKTRRLLELLIEGLPCEYDPKNSYETSDQLLEPLLLCYESLQSSGARVLADGRLADLIRRVSTFGMVLVKLDLRQEAARHSEALDAITTYLDMGTYSEWDEEKKLEFLTRELKGKRPLVPQCIKVGPDVKEVLDTFRVAAELGSESLGAYVISMASNASDVLAVELLQKDARLALTSEHGKPCPGGTLRVVPLFETVNDLRAAGPSIRKLLSIDWYREHIQKNHNGHQEVMVGYSDSGKDAGRFTAAWELYKAQENVVAACNEFGIKITLFHGRGGSIGRGGGPTYLAIQSQPPGSVMGSLRSTEQGEMVQAKFGIPQTAVRQLEVYTTAVLLATLKPPQPPREEKWRNLMEEISGISCQHYRSTVYENPEFLSYFHEATPQAELGFLNIGSRPTRRKSSSGIGHLRAIPWVFAWTQTRFVLPAWLGVGAGLKGVSEKGHADDLKEMYKEWPFFQSTLELIEMVLAKADIPMTKHYDEQLVSEKRRGLGTELRKELMTTEKYVLVISGHEKLLQDNKSLKKLIDSRLPYLNAMNMLQVEILKRLRRDEDNNKLRDALLITINGIAAGMRNTG

SEQ ID NO: 17153 - protein, 543 aa, Arabidopsis thaliana
  misc_feature (535)..(535): Xaa can be any naturally occurring amino acid
  unsure (1)..(543): unsure at all Xaa locations
MTSISDKFILVNGGNCLVREYFNHVLAKFPFEFGISQQDNFSMLQSNSAGGEDNPDFKWGAKRGVGRKDNKVRFYESFTLEGIEYRLFDCAYFYVHGQSETSIGKLVTFTRHQQRFLGEYEPQWDELFLACGDEKGVSNINDVETIMGKCNVVCTSDDRRNPRPGTKELRRAKYIFSRTFDTRLRIISEDFADAIAGIGVDKLFNMRRDKQPVKRLNSSAAAITRASPVKSFRPDLGSTKLGKHDNRDAKLMSRTSSLKKVTFLEDRADHVHVKRNPPVNTETTTRGQIPILKTRAFGELYASGSSVNAKPSKKRKLILNTPETDDSDDQGPQSGEKKLIKNPPLVEKAPSQNIEKKSWYKKLPFEDELKPAIEKGRVLLIENLEPSYTSLEVEFLFRQAFKEGVDAKMIPSSPMSSPHSGRALVIFGTTKAADSAMSRLNEDCLMLSGQRALTGSKNVPVEIGRCRSFTGHFNMVDRSLMTAQKVSCCITLRLFSVVISLVMVTHRKPNSPCQITEYYKLTPLFSLIIVNRPHXFVNFQPHP

SEQ ID NO: 17154 - protein, 540 aa, Arabidopsis thaliana
MMTLWRHKLELLVNDRWLVFVCAMWVQSVAGVGYLFGGSMSPAIKTSLGYNQKQIALLGVAKNLGDAVGFVSGALSEVSPSWVVLLVGATQNLFGYGVVWLVVTGQLPNLPLWMLFVAIFVGTNGETYYNTASLVSCIHNFPESRGPVVGILKGFSGLSGAILTQVYLMFNPSHDSSVILMVALGPPVVVLALLFIVRPVERSCRTNLRSDDLRFLAICGFCVVLAVYLLGLLVLQSVFDMTQTIITTSGAILVIFMVVPVLVPFSSVFISGNNVTSVKPEEGTSNVDQHEARTLIERSDRPPEKKRAPCIGEDFTLLQALGQADFWLIFMSLVLGVGSGITIIDNLGQICYSLGYSNTKIFVSLISISNFLGRVAGGYFSELIIRKLSLPRTLAMSVVQAIMSLGLIYYAIDWPGKIYVVTIVIGMGYGAHWAIAPASVSDIFGLKSFGSLYNFQITALPIGSFVFSGVIASNIYDYYARKQAGPTTETESLVCTGSVCYSVTCSLMSMLCLMAMVLSLSVVYRTRKFYLRLHHRVSKT

SEQ ID NO: 17155 - protein, 237 aa, Raphanus sativus
ETVGGKLIGLVTSREEIPDLLKLDDVIDLVIPRGSNQLVSQIKNTTKIPVLGHADGICHVYVDKACNVDMAKRIVSDAKLDYPAACNAMETLLVHKDLEQNAVLNELIFALQSNGVTLYGGPKASKILNLPEARSFNHEYCSKACTVEVVEDVYGAIDHIHRHGSAHTDCIVTEDPEVAELFLRQVDSAAVFHNASTRFSDGFRFGLGAEVGISTGRIHARGPVGVEGLLTTRWIMR

SEQ ID NO: 17156 - protein, 306 aa, Brassica napus
  misc_feature (267)..(267): Xaa can be any naturally occurring amino acid
  unsure (1)..(306): unsure at all Xaa locations
MQIFVKTLTGKTITLEVESSDTIDNVKAKIQDKEGIPPDQQRLIFAGKQLEDGRTLADYNIQKESTLHLVLRLRGGMQIFVKTLTGKTITLEVESSDTIDNVKAKIQDKEGIPPDQQRLIFAGKQLEDGRTLADYNIQKESTLHLVLRLRGGMQIFVKTLTGKTITLEVESSDTIDNVKAKIQDKEGIPPDQQRLIFAGKQLEDGRTLADYNIQKESTLHLVLRLRGGMQIFVKTLTGKTITLEVESSDTIDNVKAKIQDKEGIPPXDQQRLIFAGKQLEDGRTLADYNIQKESTLHLVLRLRGGF

SEQ ID NO: 17157 - protein, 605 aa, Magnetospirillum magnetotacticum MS-1
MASNGSNGGAPAYAITDHTFDVVIVGAGGAGLRATVGCSQAGLRTACITKVFPTRSHTVAAQGGISASLGNMGPDDWRWHMYDTVKGSDWLGDQDAIEYLVRNAPAAVYELEHWGVPFSRTEEGKIYQRPFGGMTTDYGKGTAQRTCAAADRTGHAMLHTLYGQAVKNKTQFFIEYFALDLIMDEEGRCRGVIAIDQATGEIHRFRAQQTILATGGYGRAYFSATSAHTCTGDGNAMVLRAGLPLQDMEFVQFHPTGIYGAGCLITEGARGEGGYLTNSEGERFMERYAPSAKDLASRDVVSRSMTMEIRDGRGVGKNKDHIFLHLDHLDPKILHERLPGISESAKIFAGVDVTKEPIPVLPTVHYNMGGIPTNYHGEVLTLKNGDPDTVVPGLMALGEAACVSVHGANRLGSNSLIDLVVFGRAAGLRCAEIVEPNARQPELPKDSAEKALSRLDRFRYADGGTPTAQLRDRMQRTMQNNCAVFRTGEVLEEGKGLIHDVWRGVADIKVSDRSLVWNTDLLETLEFDNLIGQAVVTMESAVNRKESRGAHAREDFPDRDDKEWMKHTLAWLDQSKHGVEIDYRPVHTYTMSNEIQYIEPKARVY

SEQ ID NO: 17158 - protein, 223 aa, Raphanus sativus
RSVYEASGLKGMLVYGVEHADDAATCDDNMQHFLRTIEAAKSLPTSHFSSVVVKITAICPISLLKRVSDLLRWEYKSQNFKLSWKLKSFPVFSDSSPLYHTNSEPEPLTAEEERELEAAHVRIQEICRRCQESNVPLLVDAEDTILQPAIDYMAYSSAIIFNTDKDRPIIYNTIQAYLRDAGERLHLAVQEAEREGVPMGFKLVRGAYMSSEATLADSLGHKS

SEQ ID NO: 17159 - protein, 145 aa, Streptococcus pyogenes MGAS8232
METSDELKQRIGDLSYEVTQHAATESPFTGEYDDFFEKGIYIDIVSGEVLFSSLDKFNSGCGWPAFSKPIENRMVTNHDDSSYGMRRVEVKSREAGSHLGHVFSDGPKEAGGLRYCINSAALKFIPYEQMEKEGYAQWLTLFDET

SEQ ID NO: 17160 - protein, 297 aa, Zea mays
  misc_feature (67)..(67): Xaa can be any naturally occurring amino acid
  misc_feature (104)..(104): Xaa can be any naturally occurring amino acid
  unsure (1)..(297): unsure at all Xaa locations
MGRSPCCEKAHTNKGAWTKEEDQRLIAYIRAHGEGSWRSLPKAAGLLRCGKSPTRPRPPASSAAARXCRLRWMNYLRPDLKRGNFTDDDDEVIIKLHALLGNKXALSLSSPPARRYHYFPPPRLNHFPIVGRPVARRWSLIAGQLPGRTDNEIKNYWNTHIKRKLLTRGIDPQTHRPLSAAAALTAGFPSPARPPTVLFARPAPSEDGGHSSGGGSADAPRCPDLNLDLSVGPPCSPPKTPAATASTPTSQQQQRTTTICLCYHLGVRSGEACSCKSPSPAAAGFRFLRPLEEGQYI

SEQ ID NO: 17161 - protein, 606 aa, Candida albicans SC5314
MQSVYPHKTTLHIEPSYYDNGVPVFQPTMHEFRDFYNFNKAINKYGMQSGIVKVIPPTQWVSRVQKCYTESNLEQVSIQNPIVQSINTNAPGIYQSQNIERYKKYSIFQWKEMAKTRKPPRRKQRGKSETETHSKDIPFYNINTSQYTDDRCKELETNYWRSLSYSEPMYGADTMGSVFDKSITAWNVAHLPNLLDLMEEKLPGVNQAYLYAGLWKASFAWHLEDQDLYSINYLHFGAPKQWYSIPQSQHEEFYALMVDLFRDEFKQCSEFLRHKTFMVSPAYLEKHGIRVNHTIHREGEFIITYPYGYHAGFNYDYNLAESVNFALDDWFEFGKRTKKCECISDSVGINIKHLWEKYYGTKYEAVKEEDGRDGGLEADSDGSIEVVKVEKIQRKCRKRKQDNVHITNTHESVSTKRPHKQPDIPRECALCPNTLQQTKYSHSALFELLQADTYGTTPERPRRVHKICASMFPHQLKCDFKTNTVHGLDDITKNQKKLRCGVCRQSEMGACFQCSYKKCTRAFHGSCGLVDGVQYDFDSGEAFCKFHRQGPTSAEFKVGMYVQFLFNHGVYFGQLVNLGDGDVEVEVYPSAQDVIEIPSTSIINVV

SEQ ID NO: 17162 - protein, 376 aa, Arabidopsis thaliana
MSWVRFTIEQKDGNFAYPPPFYKDPILSPPSPPPPSSGNRISPAVLFVIVILAVLFFISGLLHLLVRFLIKHPSATASSRSNRFPEISTSDALQRQLQQLFHLNDSGLDQAFIDALPVFHYKEIVGSAGGGGGNGAAQEPFDCAVCLCEFSEKDKLRLLPMCSHAFHLNCIDTWLQSNSTCPLCRGTLFSPGFSMENPMFDFDDIREDEEGVTENGSQKTMEIQEIVVEKGVLPVRLGKFKRLDNVGNGQGQDVVAGGETSSSNLDARRCFSMGSYQYILGNSELKVPFANDRLPRLKPQDKESEQTGNSSSEDNKKINTVAKGESFSVSKIWLWPKKDKFSSDAQRRLPSSSLNVDDLPKLPWMEEHKKLENDGR

SEQ ID NO: 17163 - protein, 205 aa, Shewanella sp. ANA-3
MSNIVWHQHSVDQAARAKLKGQNPVLLWFTGLSGAGKSTLAGALERALFEAGFHTYLLDGDNVRHGLCKDLGFSVADRDENLRRVGEVAKLMVDAGLVVLSAFISPTREERDSIRARFPEGQFIEVHVSTPLSICEQRDPKGLYVKARRGEISNFTGISSPYEAPLSAELTIDTSKGDLASQVRALIDYLTAIGVINPDKAKALA

SEQ ID NO: 17164 - protein, 332 aa, Dehalococcoides sp. CBDB1
MAVIYYDKDCDLSLIEKKLIGIVGYGAQGHAHAQNLRDSGLKVIVACVEGGRGWKKATADGFEVMCVAEMAKKADIIMMLAPDTSQAKIYKDSIEQGLKPGKMLMFAHGFNIHYGQIVPPSFVDVTMIAPKCPGYMLRQVFTEGAGAPSLIAVEQDASGKAKELALAYAKGIGSNRAGILETTFAEETETDLFGEQAVLCGGTTSLVKAGFETLVEAGYQPEVAYFECLHELKLIVDLMYQGGIAYMRDSISDTAKYGDFTRGPRVINEDTYETMGEILGEIQDGSFAKEWILENQAGRPVYNSLRRMESEHLIEEVGAELRSMMSWLKKKR

SEQ ID NO: 17165 - protein, 332 aa, Candida glabrata CBS138
MALIGEVGILQVAIALGISALVGLYSIIYLFSHNPRQPFAEELRYHTFDDKGGIVRFDVDRVNEGDLHLDDILISVVVPAYNETDRIHVMLDDTIKYLRSQFPNRWEILIVDDGSKDGTTEYCLKLAAEEYKLQPKELRVIKFIENRGKGGAVRQGLLHIRGKYGLFADADGASKFSDISKLIDSIQKLEKSDDEKKPKAAMAIGSRAHMVNTEAVIKRSLLRNCLMYGFHTLVYIFGIRSIKDTQCGFKLFNRPAIDLIFPYMHTEGWIFDVEILLLANKKAIPVSEIPISWHEVDGSKMALALDSIKMAIDLVVIRMAYILGIYNPYKQC

SEQ ID NO: 17166 - protein, 331 aa, Anabaena variabilis ATCC 29413
MARMYYDEDANLDLLAGKTIAIIGYGSQGHAHALNLKDSGLNVIVGLYPGSKSAEKAQAAGLTVKNVADAANVADFIMILLPDEVQKTVYKNEIEPNLQEGNTLAFAHGFNIHFGQVVPPANVDVVMVAPKGPGHLVRRTYEQGQGVPALFAVYQDASGKARDRALSYAKGIGGTRGGVLETTFREETETDLFGEQAVLCGGLSALIKAGFETLVEAGYQPELAYFECLHEVKLIVDLVVEGGLAKMRDSISNTAEYGDYTRGPRIVNEQTKAEMRKVLSEIQSGQFAREFVLENQSGKPGFTAMRRQEAEHPIEEVGKDLRAMFSWLKKV

SEQ ID NO: 17167 - protein, 88 aa, Vigna radiata
MSQELESVEIDSLARFAVEEHNKKQNALLEFGRVVSAQQQVVSGTLYTITLEAKDGGQKKVYEAKVWEKPWLNFKELQEFKLVGEAPA

SEQ ID NO: 17168 - protein, 427 aa, Thermus thermophilus HB27
MEGMERPISEAYFQEAKRHIPGGVSSPVRAFKAVGGTPPFLVRGEGAYVWDADGNRYLDYVMSWGPLILGHAHPKVLARVRETLERGLTFGAPSPLEVALAKKVKRAYPFVDLVRFVNSGTEATMSALRLARGYTNRPYIVKFRGNYHGHADGLLVEAGSGALTLGVPSSAGVPEEYAKLTLVLEYNDPEGLREVLRRRGEEIAAIIFEPVVGNAGVLVPTEDFLKALHEAREFGVLLIADEVMTGFRLAFGGATELLGLKPDLVTLGKVLGGGLPAAAYAGRREIMEKVAPLGPVYQAGTLSGNPLAMAAGLATLELLEENPGYYRYLEDLGARLERGLKEVLAQKGIPHAVNRVGSMVTVFFTEGPVVTFQDAKRTDTELFKRFFHGLLDRGIYWPPSNFEAAFLSVAHTEEDVEKTLEALGEAL

SEQ ID NO: 17169 - protein, 253 aa, Mesorhizobium loti MAFF303099
MAQSRFKQRTVLITGAGTGMGRAAALRLAEEEAHLVLVGRRPEPLERLVSDIEAASGTAMAITCDISRGDAVAAAVEKTIARFGRLDALFANAGVLGEFKPLADTETDDFDGLIATNLRGTFLTIKHCLPFLEGGAVLINASWTASSVMPGAGAYASTKGALLAMMRTLAVEQGPRNIRVNAINPGIILTPMADDVLSPDLAARLAAHTALRRNGTPEDVAGTVAWLLSDDAAFVTGQEIMVDGGYTIGGLRL

SEQ ID NO: 17170 - protein, 278 aa, ASPERGILLUS NIDULANS FGSC A4
MDAIREVKYLQELSHPNVIALHDVFSSKDQNLNLVLEYLPRGDLEMLIKDSDIHYGAADVKAWMGMLIRGVWFCHENFVLHRDIKPNNLLIASDGEVKLADFGLARSFADPYMNMTHQVITRWYRPPELLYGARQYSGAVDIWSVGMVFAELLLRVPFVAGNSDLDQISKICEAFGTPTEESWPGREFFLRQFPTAGPVGADLLMSMCTLDPRRRTTAHQALQHRWWTTEPRPTNKQDLPQKPGGTKKMGDDLTRRGGELDDQFKNAARQLDFGAIKG

SEQ ID NO: 17171 - protein, 469 aa, Candida glabrata CBS138
MLRIYRPRVMAIARRYVSQTAQTSNAMVADTTDPMMNPMQPKLSSHSQLPPSSVAYLKTLSRAEVFSLGMIGLATTSKPVLNLVIKLFPYVPMPLIKMFVSRLYCGGDNINEVKTFGEKLQKRGISNMMLSLTIEDSEGTKNIDINYIVEETIKSVHGVLKPNLVNQLEKCGNDAKKINEIAPGYIALKPSALVSNPHDVLMNFNNPDPHWVAQREKLIDNCSRIAQEIYDLNNDLLKKYPSRTAPFCVATIDAEKYDLQNSGVYELQRILFQKFNKLSSPMVSVIGTWQLYLVDSAAQLAREHARAMKEGYKLGVKLVRGAYIHSETKRDSIIFKTKEGTDENYDAVMTTVIQDLLKNGTKSYYGHLVVASHNYGSQMLATKILKDAPENVGKANIVLGQLLGMSDNVTHDLITKHGAKNIIKYVPWGPPLETKDYLLRRLQENGDAVKSDNGFPLVKAVIKSLFSRA

SEQ ID NO: 17172 - protein, 458 aa, Arabidopsis thaliana
MQVLGMEEKPARRSVVLVPFPAQGHISPMMQLAKTLHLKGFSITVVQTKFNYFSPSDDFTHDFQFVTIPESLPESDFKNLGPIQFLFKLNKECKVSFKDCLGQLVLQQSNEISCVIYDEFMYFAEAAAKECKLPNIIFSTTSATAFACRSVFDKLYANNVQAPLKETKGQQEELVPEFYPLRYKDFPVSRFASLESIMEVYRNTVDKRTASSVIINTASCLESSSLSFLQQQQLQIPVYPIGPLHMVASAPTSLLEENKSCIEWLNKQKVNSVIYISMGSIALMEINEIMEVASGLAASNQHFLWVIRPGSIPGSEWIESMPEEFSKMVLDRGYIVKWAPQKEVLSHPAVGGFWSHCGWNSTLESIGQGVPMICRPFSGDQKVNARYLECVWKIGIQVEGELDRGVVERAVKRLMVDEEGEEMRKRAFSLKEQLRASVKSGGSSHNSLEEFVHFIRTL

SEQ ID NO: 17173 - protein, 487 aa, Nocardioides sp. JS614
MAELLMPWAAGREVNARDRTGTNLVNGNRTFAVEDPATLELIAEVADHGETEARAAVDRAHEAFAGWSGTSPRQRSDVLRRAYELMLRDEGRLSALIARENGKSLADAASEVVYAAEFFRWYAEEVVRTEGSYGEAPAGGVRTIVHHKPVGVAALVIPWNFPAAMATRKIAPALAAGCTVVLKPAAETPLTAIAIADLLAEAGLPAGVVELVTTTHAGAVVTAWLEDDRVRKVSFTGSTGIGRLLLHQAADRVVNTSMELGGNAAFIVTEDADLVDAVAGAMIAKFRNGGQACTAANRIYVHRDVADAFVALVGAQVEKLSVGAANDGNMIGPLISAAAVSRVGAAVDRAIEEGARVAARAQLPDAPGYFYPPTVLTDVPSTSSILAEEIFGPVAPIATWDDEQELLRQVNGTEYGLAAYVYTGHLERGLRLGERIEAGMVGINRGIVSDPSAPFGGVKQSGLGREGAREGLREFQETQYLSISWDD

SEQ ID NO: 17174 - protein, 492 aa, Pseudomonas putida KT2440
MQGSFQTTARCDGSRMSIPRLKSYLMMFAAVLMLGQVVAAQAEEALPDFTTLVEQASPAVVNISTKQKLPDRRIAANQMPDLEGLPPMFREFFERNMPQQPRSPRGDRQREAQSLGSGFIISSDGYVLTNNHVVADADEIIVRLSDRSELQAKLVGTDPRTDVALLKVDGKNLPTVKLGDSEKLKVGEWVLAIGSPFGFDHSVTKGIVSAKGRTLPNDTYVPFIQTDVAINPGNSGGPLFNMKGEVVGINSQIFTRSGGFMGLSFAIPIDVAIDVSNQLKKDGKVSRGWLGVVIQEVNKDLAESFGLDKPAGALVAQVLENGPAAKGGLQVGDVILSMNGQPIVMSADLPHLVGGLKDGEKAKLEIIRNGKRQNLDISVGALPDDDVDIGAGTEGSAERSSNRLGVSVADLTAEQKKSLELKGGVVIKEVQDGPAAMIGLRPGDVISHLNNQAIGSAKEFTEIAKELPKNRSVSMRVLRQGRASFITFKLAE

SEQ ID NO: 17175 - protein, 342 aa, Thermus thermophilus HB27
MVRYLDEGEFPLAEEEALRLYRAMRRARFFDEKALTLQRQGRLGVYAPFMGQEAAQVGVALALEERDWVVPSYRESAMLLAKGLPIHTLILYWRAHPAGWRFPEGVRAVNPYIPIATQIPQAVGLALAGRYRGEDWVVATSIGDGGTSEGDFHEGLNFAAVFGAPVVFLVQNNGYAISVPKSRQMKVDYVARRAEGYGMPGVVVDGNDAFAVYLEAKKAVERARKGEGPTLLEALTYRLAPHTTSDDPSRYRSKEEEEAWRAKDPILRLRKALEGRGLWDEEAEKALLLELEEEFQRELALADEAPEPRPEEIVEHVYAEMGPDQRRAWEALRRGLHVEEVE

SEQ ID NO: 17176 - protein, 718 aa, Glycine max
MENTDPCRHFLKDVKRIIIKVGTAVVTRQDGRLAVGKLGALCEQIKELNSLGYEIILVSSGAVGLGRQRLRYRKLINSSFADLQKPQVELDGKACAAVGQNSLMALYDVLFSQLDVTSAQLLVTDNDFRDKDFRMQLSETMKSLLALKVIPIFNENDAVSTRKAPYEDSSGIFWDNDSLSALLALELKADLLILLSDVEGLYSGPPSDPRSKLIHTYIKEKHQSEITFGDKSRVGRGGMTAKVKASIHAAEAGIPVIITSGYAAENIIKVLQGQRIGTLFHKDAHKWAPVKEVDAREMAVAARDCSRRLQALSSEERKQILLKIADALEAHQNEIRIENEADVADAKEAGYEKSLVARLLASLANNIRIIANMEDPIGRVLKRTELAEGLILEKTSSSLGVLLIVFESRPDALVQIASLAIRSGNGLLLKGGKEAKRSNAILHKVITEAIPDIVGSKLIGLVTSRAEIPELLKLDDVIDLVIPRGSNKLVTQIKSSTKIPVLGHADGICHVYVDKSADLEMARRIVLDAKIDYPAGCNAMETLLVHKDLVEKGWLNSIIIDLRTEGVTLYGGPKASPLLNIPMARMLHHEYNSLACTVEIVDDVYAAIDHINLYGRHATLYFLIIAHTDSVVAEDHEVANVFLRQVDSAAVFHNASTRFSDGARFGLGAEVGISTSRIHARGPVGVDGLLTTRWILKGSGQIVDGDKAVNYTHRDLSI

SEQ ID NO: 17177 - protein, 554 aa, Xanthomonas campestris pv. vesicatoria str. 85-10
MTPLIFVTGGVVSSLGKGIAAASLASILEARGLKVTMMKLDPYINVDPGTMSPFQHGEVYVTDDGAETDLDLGHYERYVRTRLSRKNSVTTGRIYENVIRKERRGDYLGATVQVIPHITDEIRRCIDEATAGFDVALIEIGGTVGDIESLPFLEAIRQVRTERGAEKAMFMHLTLVPYIAAAGELKTKPTQHSVKELRSIGIQPDVLLCRSEQAVPDSERRKIALFTNVSERAVISCPDIDVLYGMPLELLRQGLDELVIEQFKLRDKVAAADLSEWAAVVDAVKHPLDEVNIAVVGKYVDHQDAYKSVAEALRHGGLRQRTKVNLKWLEAQDLEGSDMSALQDIDGILVPGGFGDRGFEGKVQTSKFAREHKVPYFGICYGMQAAVVDYARHVADLDAANSTENDRQSPHPVIGLITEWRTATGEVEKRDEKSDLGGTMRLGLQEQRLKPGTLAREVYGKDVVAERHRHRYEFNNRYRTQLEDAGLVISGKSMDDTLVEVVELPRDMHPWFLACQAHPEFLSTPRDGHPLFIGFVRAAREKKAGGKLLKEARA

SEQ ID NO: 17178 - protein, 459 aa, Arabidopsis thaliana
MLKIKRVPTVVSNYQKDDGAEDPVGCGRNCLGACCLNGTFWKPESSFLIMLPLYACKNLVKSGEKLVISHEAIEPPVAFLESLVLGEWEDRFQRGLFRYDVTACETKVIPGKYGFVAQLNEGRHLKKRPTEFRVDKVLQSFDGSKFNFTKVGQEELLFQFEAGEDAQVQFFPCMPIDPENSPSVVAINVKTLVQRACPIEYGHVLLIPRVLDCLPQRIDHKSLLLAVHMAAEAANPYFRLGYNSLGAFATINHLHFQAYYLAMPFPLEKAPTKKITTTVSGVKISELLSYPVRSLLFEGGSSMQELSDTVSDCCVCLQNNNIPFNILISDCGRQIFLMPQCYAEKQALGEVSPEVLETQVNPAVWEISGHMVLKRKEDYEGASEDNAWRLLAEASLSEERFKEVTALAFEAIGCSNQEEDLEGTIVHQQNSSGNVNQKSNRTHGGPITNGTAAECLVLQ

SEQ ID NO: 17179 - protein, 570 aa, Glycine max
MNLSNGKGSMSTLTASVVMKSGDAVSDQFPAGLRVLVVDDDPTCLMILEKMLRTCLYEVTKCNRAETALSLLRENKNGFDIVISDVHMPDMDGFKLLEHIGLEMDLPVIMMSADDGKSVVMKGVTHGACDYLIKPVRIEALKNIWQHVVRKRKNEWKDAEQSGSAEEGDRQPKASDEADYSSSANEGSWRNSKKRRDEEEEAEDRDDTSTLKKPRVVWSVELHQQFVAAVDQLGIDKAVPKKILELMNVPGLTRENVASHLQKYRLYLRRLSGVSQHQNNMNNSFLSPQEATFGTISSINGIDLQTLAVAGQLPAQSLATLQAAGLGRPTGKAGVPMPLMDQRNLFSFENPRLRFGEGQQQHLSTSKPMNLLHGIPTNMEPKQLANLHQSTQSIGSLNMRVNASATQGSPLLMQMAQSQPRGQMLSENIGPRVPRLPSSLGQPTVSNGISNGLLGRNGIAGNNRGPAYNPVPPSSSLLSFPMNQTSEMSVNNSFPLGSTPGISSITTKGSFQEEVTSGIKGSGGFPSYDIFNELHHQKPHDWEITNPNLTYNASQHANPLQVILMSHHQF

SEQ ID NO: 17180 - protein, 346 aa, Oryza sativa; identical to SEQ ID NO: 1472

SEQ ID NO: 17181 - protein, 350 aa, Coffea canephora
MAEEEACLFAMSLASASVLPMVLKSAIELDLLELIAKAGPGAYVSPSELAAQLPTHNPEAPIMLDRILRLLATYSVLDCKLNNLADGGVERLYGLAPVCKFLTKNADGVSMAPLLLMNQDKVLMESWYHLKDAVLDGGIPFNKAYGMTAFEYHGTDPRFNKVFNQGMSNHSTITMKKILEVYRGFEGLKTVVDVGGGTGATLNMIISKYPTIKGINFELPHVVEDAPSHPGVEHVGGDMFVSVPKGDAIFMKWICHDWSDDHCRKLLRNCYQALPDNGKVILAECVLPEAPDTSLATQNVVHVDVVMLAHNPGGKERTEKEFEALAKGAGFKEFRKVCSAVNTWIMELCK

SEQ ID NO: 17182 - protein, 589 aa, Arabidopsis thaliana
MEAKIVKVLDSSRCEDGFGKKRKRAASYAAYVTGVSCAKLQNVPPPNGQCQIPDKRRRLEGENKLSAYENRSGKALVRYYTYFKKTGIAKRVMMYENGEWNDLPEHVICAIQNELEEKSAAIEFKLCGHSFILDFLHMQRLDMETGAKTPLAWIDNAGKCFFPEIYESDERTNYCHHKCVEDPKQNAPHDIKLRLEIDVNGGETPRLNLEECSDESGDNMMDDVPLAQRSSNEHYDEATEDSCSRKLEAAVSKWDETDAIVVSGAKLTGSEVLDKDAVKKMFAVGTASLGHVPVLDVGRFSSEIAEARLALFQKQVEITKKHRGDANVRYAWLPAKREVLSAVMMQGLGVGGAFIRKSIYGVGIHLTAADCPYFSARYCDVDENGVRYMVLCRVIMGNMELLRGDKAQFFSGGEEYDNGVDDIESPKNYIVWNINMNTHIFPEFVVRFKLSNLPNAEGNLIAKRDNSGVTLEGPKDLPPQLESNQGARGSGSANSVGSSTTRPKSPWMPFPTLFAAISHKVAENDMLLINADYQQLRDKKMTRAEFVRKLRVIVGDDLLRSTITTLQNQPKSKEIPGSIRDHEEGAGGL

SEQ ID NO: 17183 - protein, 350 aa, Coffea canephora
MAEEEACLFAMSLASASVLPMVLKSAIELDLLELIAKAGPGAYVSPSELAAQLPTHNPEAPIMLDRILRLLATYSVLDCKLNNLADGGVERLYGLAPVCKFLTKNADGVSMAPLLLMNQDKVLMESWYHLKDAVLDGGIPFNKAYGMTAFEYHGTDPRFNKVFNQGMSNHSTITMKKILEVYRGFEGLKTVVDVGGGTGATLNMIISKYPTIKGINFELPHVVEDAPSHSGVEHVGGDMFVSVPKGDAIFMKWICHDWSDDHCRKLLKNCYQALPDNGKVILAECVLPEAPDTSLATQNVVHVDVVMLAHNPGGKERTEKEFEALAKGAGFKEFRKVCSAVNTWIMELCK

SEQ ID NO: 17184 - protein, 453 aa, Capsicum chinense
SQLARRLTHTMAISIKHHKPKLVVPSIVTPRETKHLSDIDDQGSARLQIPILMFYKYNSLMEGKDPAKLIKDGLSKTLSFYYPLAGRLIEGPNRKLMVNCNSEGVLFVEADANVELEKLGDSIKPPCPYLDLLLHNVPGSDGIIGCPLLLVQVTRFSCGGFAVGLRLNHTMMDGYGLNMFLNALSELIQGASAPSILPVWERHLLSARSLPSITCTHHEFDEQIESKIAWESMEDKLIQKSFFFGKKEMEAIKNQVSPNCESTKFELLMAFLWKCRTIALGLHPEEIVRLTYLINIRGKLQKFELPAGYYGNAFVTPTAVSKAGLLCSNSLTYAVELVKKVKDHMNEEYIKSLIDLMAIKGRPELTKSWNFIVSDNRSIGLDEVGFGWGRPIFGGVAKAISFISFGVPVKNDKGDKGILIAISLPPMAMKKFEEVVYKVSSKNVEGVDIISKK

SEQ ID NO: 17185 - protein, 648 aa, Zea mays
MNSMDEINLLRQAQRQHQHHLMVRGIGEEIDLEIGPVDDPSFSGASLVAVTSTHDTVVHADDHKSLLIPCSQPGAADGLAPQQHLSQGEEHDGMLRSPSGHTKKKKKVVKKWREEWADTYKWAYVAVHDTTTRIFCSVCKEYGRKHRRNPYGNEGSRNMQMSALEEHNNSLLHKEALRLQMASKEKLQPPEIEGPVYVKALSKTAASILECVLRRDPHEAEYIQSIQEVVHSLEPVLVKNAQYIQILERLLEPERCFIFRVPWIDDRGEAHVNRGFRVQFSQALGPCRGGLRFHPSMSLSVAKFLAFEHTLKNALSLYKLGGAAGGSDFDPKGKSDNEIMRFCQSFMDELYRYLGPDQDFPAEDIGVGPREMGYLFGQYRRLSGHFQGNFTGPKIFWSGSSFRTEATGYGLVFFARLLLAEMNKELKGLRCVISGSGKIAMHVLEKLLPCGAIPITVSDSKGYLLDEDGFDYMKYSLLRDIKAQQKSLKEYLKTYPHAKYIDDAKPWSQQCDVAFPCASHNEIDQGEAVAISNSGCRVLVECSNMSCTVQAVDILRKAKVIVAPAKATAAGGVALGEIELNPEFNLMQLSVEDFENRIQDAIKQTYERSVKAAQDYGIMKESPDFLVHGANICAFLNIAQAMTDQGCV

SEQ ID NO: 17186 - protein, 521 aa, Rigidoporus microporus
MPSFASLKSLVVLSLTSLSLAATVALDLHILNANLDPDGTGARSAVTAEGTTIAPLITGNIDDRFQINVIDQLTDANMRRATSIHWHGFFQAGTTEMDGPAFVNQCPIIPNESFVYDFVVPGQAGTYWYHSHLSTQYCDGLRGAFVVYDPNDPHLSLYDVDDASTVITIADWYHSLSTVLFPNPNKAPPAPDTTLINGLGRNSANPSAGQLAVVSVQSGKRYRFRIVSTSCFPNYAFSIDGHRMTVIEVDGVSHQPLTVDSLTIFAGQRYSVVVEANQAVGNYWIRANPSNGRNGFTGGINSAIFRYQGAAVAEPTTSQNSGTALNEANLIPLINPGAPGNPVPGGADINLNLRIGRNATTADFTINGAPFIPPTVPVLLQILSGVTNPNDLLPGGAVISLPANQVIEISIPGGGNHPFHLHGHNFDVVRTPGSSVYNYVNPVRRDVVSIGGGGDNVTFRFVTDNPGPWFLHCHIDWHLEAGLAVVFAEDIPNIPIANAISPAWDDLCPKYNANNPDSGLA

SEQ ID NO: 17187 - protein, 205 aa, Zea mays
  misc_feature (147)..(147): Xaa can be any naturally occurring amino acid
  unsure (1)..(205): unsure at all Xaa locations
MTSHARVRKLGIRLEGSFPQLLHLASLSGILKCIFRYFKNSTGNLPILNQPVCSIPLGSWVPKIGDPNSRPLAMLRPNASLSSALNMLVQAGVSSIPIVDENDSLLDTYSRSDITALAKDKVYTHVRLDEMTIHQALQLGQDANTPXGFFNGQRCQMCLRSDPLLKVMERLANPGVRRVFIVEAGSKRVEGIISLSDIFKFLLSL

SEQ ID NO: 17188 - protein, 346 aa, Zymomonas mobilis subsp. mobilis ZM4
MGQNPDVISAMEEALNNVGAGSGGTRNISGTTHYHSELEAELAEWHGKEAALTFTSGFVSNEATLSTIAKVLPGCVIFSDELNHASMIAGIRNSRCEKRIYRHNDLAHLEELLAAENPDLPKLIAFESVYSMEGDIAPIAAICDLADKYNAITYLDEVHAVGMYGPRGAGIADREGLADRLTIIEGTLAKAIGVMGGYIAADQLIVDVIRSYAPGFIFSTSLAPVLAAGALASIRHLKISSKERDAQQKHAALLKQMFKDAGLPVMATTTHIVPLFVGDAVKTKRISDILLNEYGAYVQPINFPTVPRGTERLRFTPGPTHNEAMLRELTDSLVAIWHRLDMRFAA

SEQ ID NO: 17189 - protein, 265 aa, Zea mays
  misc_feature (65)..(65): Xaa can be any naturally occurring amino acid
  unsure (1)..(265): unsure at all Xaa locations
MAPLGDGGAVAAAASNNLVVSFGEMLIDFVPDVAGLSLAESGGFVKAPGGAPANVACAIAKLGGXDLGLVRRARVFHYGSISLISEPCRSAHMAAMRAAKAAGVLCSYDPNVRLPLWPSPDAAREGILSIWKEADFIKVSDDEVAFLTRGDANDEKNVLSLWFDGLKLLVVTDGDKGCRYFTKDFKGSVPGFKVDTVDTTGAGDAFVGSLLVNVAKDDSIFHNEEKLREALKFSNACGAICTTKKGAIPALPTVATAQDLIAKAN

SEQ ID NO: 17190 - protein, 613 aa, Thermoanaerobacter tengcongensis MB4
MCGIAGWVNFNMDLSLQNEVIEKMTDTLKKRGPDGSGVWLSKHCVLGHRRLIVIDPQGGIQPMIKKYGEKNFVIIHNGELYNMDELKNELISLGYTFNTRSDTEIILTSYIEWGPLCVKKFNGIFAFAIWDEVQNRLFIARDHLGIKPLFYTIKNGSLIFGSEIKAILAHPHVKPEIDSQGLAEIFVMGPSRTPGCGVFKDIKELKAGHYLIFTKNGVNISKYWSLQSLPHEDSLEKTAEKIRYLLKDSSVRQLVSDVPLCSLLSGGLDSTAVSFFANEELKQKGHKLITYSVDYVGNDKYFTPNEFQPNSDADWVKFVANKLDTDHNYVFIDNEELAHALKPALYARDLPGMADIDSSLYLFLKEVKKGATVALSGEGADEVFGGYPWFRNKESIRSHTFPWTRMVNERMKLLLPEVVNYIRPLEYLNDRYNEALNEVPKLNGEDPYNARMREMFYLNITRFMPMLLDRMDRMSMAVGLEARVPFLDYRLVEYVWNIPWEMKNLNNREKGILRYALKGYIPDEVIERKKSPYPKTHNPVFKNIVKKWLKQIINDSTSPLLQLVDKKAIAELIETDAKAYDPAWFSQLMGSPQLFAYLVQINMWLKDYKISIV

SEQ ID NO: 17191 - protein, 156 aa, Triticum aestivum
  misc_feature (13)..(13): Xaa can be any naturally occurring amino acid
  misc_feature (17)..(17): Xaa can be any naturally occurring amino acid
  misc_feature (40)..(40): Xaa can be any naturally occurring amino acid
  misc_feature (71)..(71): Xaa can be any naturally occurring amino acid
  misc_feature (117)..(117): Xaa can be any naturally occurring amino acid
  unsure (1)..(156): unsure at all Xaa locations
DGAIMQRYDSLAXETSXGLSLERFKKGSHMIHTQYNAHVXIDEYGKAGSSFRKIHLYDAEVPDDLAYKETXFQASSMQTVVAVDSPYGRSVCSAVWHMRSPELGQSRRDQHQAQVVXVPSAFTKVTGEAHWKILIRGIASDTQCYVHSQGHSRRQT

SEQ ID NO: 17192 - protein, 549 aa, Cryptococcus neoformans var. grubii
MSSEKAEFDAEVKAFEAFAKSPRFARTTRPYTAADVVSKRGTLPISYPSDVQAKKLWKILESKARGEGGGCTATYGALDPVQLTQMAKYLETVYVSGWQCSSTASSSLEPGPDLADYPSNTVPNKVAQLFTAQLYHDRKQRYTRSAALANGQDPGERIDYLRPIVADADTGHGGLTAVMRLTKMMVESGAAGIHIEDQAPGTKKCGHMAGKVIVPLSEHINRLVAMRLQCDIMGTTNLVVCRTDSEAATLLSTNIDPRDHSFILGSTNPSLPPLNDLMIAAEMEGKYGQELQKIEDAWTKQAGLKLWPDVLADALSKHGVSSKKITEFREQSIGTSHASTLQLAQSFGLPPSATPYWSWDTPRSREGYYRYQGGTQCAINRAIAFAPYADLLWMETKSPIYAQAKEFAEGVHKVHPGQWLAYNLSPSFNWEKAGLGKKEMKEYVWELGKLGFVFQFITLAGLHSNAYINDLFANAFSKEGMKAYVELIQSREREIGCDVLTHQKWSGADYADAMLMTVTGGVSSTAAMGKGVTENQFVDDKTKDALHKL

SEQ ID NO: 17193 - protein, 362 aa, Escherichia coli
MFRQGITGRSHLMSQNTLKVHDLNEDAEFDENGVEVFDEKPLVEQEPSDNDLAEEELLSQGATQRVLDATQLYLGEIGYSPLLTAEEEVYFARRALRGDVASRRRMIESNLRLVVKIARRYGNRGLALLDLIEEGNLGLIRAVEKFDPERGFRFSTYATWWIRQTIERAIMNQTRTIRLPIHIVKELNVYLRTARELSHKLDHEPSAVEIAEQLDKPVDDVSRMLRLNERITSVDTPLGGDSEKALLDILADEKENGPEDTTQDDDMKQSIVKWLFELNAKQREVLARRFGLLGYEAATLEDVGREIGLTRERVRQIQVEGLRRLREILQTQGLNIEALLPRVSKHLSERPVSSEAGFFCAQ

SEQ ID NO: 17194 - protein, 465 aa, Bradyrhizobium sp. BTAi1
MSKTIDPVDEMLPVPKLLALGLQHVLVMYAGAVAVPLIIGRALKLPPEDVAFLISADLFACGLATLVQCIGFPGVGIRLPVMMGVTFASVGPMLSMAASPDIGLLGIYGSVIAAGLFGIIIAPFISRLLPLFPPVVTGTIILIIGVSLMRVGINWAGGGQPTIIKVVDGVRGNFPNPDYGQLQGLGIALFVLLVILGLIKWGTGFVANVSVLLGIVAGAMLASALGVMHFDKVAAAPWGALVVPFKFGVPQFKPVPIVTMCIVMVVVMIESLGMFLALGEMTGKKVDREALARGLRADGVGTLLGGLFNTFPYTSFSQNVGLVSVTGVRTRWVTVTGGVIMLLLGLLPKMAALVEAVPQVVLGGAGLVMFGMVAATGARILAAVDFKTNRFNLFIVAISVGFGLIPLAAPGFFHNLPKDLQPLLESGILLCALVAVLLNAFFNGLGSSKAAETDAAAAASSAQHV

SEQ ID NO: 17195 - protein, 377 aa, Escherichia coli
MFRQGITGRSHLMSQNTLKVHDLNEDAEFDENGVEVLDEKALVEQEPSDNDLAEEELLSQGATQRVLDATQLYLGEIGYSPLLTAEEEVYFARRALRGDVASRRRMIESNLRLVVKIARRYGNRGLALLDLIEEGNLGLIRAVEKFDPERGFRFSTYATWWIRQTIERAIMNQTRTIRLPIHIVKELNVYLRTARELSHKLDHEPSAEEIAEQLDKPVDDVSRMLRLNERITSVDTPLGGDSEKALLDILADEKENGPEDTTQDDDMKQSIVKWLFELNAKQREVLARRFGLLGYEAATLEDVGREIGLTRERVRQIQVEGLRRLREILQTQGLNIEAPFARNPANAGAEYRSAVPRVSKHLSERPVSSEAGLFCAQ

SEQ ID NO: 17196 - protein, 1142 aa, Ashbya gossypii ATCC 10895
MGDKNNNVTSLRGDRIGPWKLGETLGAGSTGKVLLAQNTETGQIAAVKVISKSVFNAQGSTFVGSNDPDVLPYGIEREIIIMKLLNHPNVLRLYDVWETAQDLYMVLEYVEKGELFNLLVQRGPLPENEAVRFFRQIIIGISYCHALGIVHRDLKPENLLLDHKFNIKLADFGMAALESKDKLLETSCGSPHYAAPEIVSGLPYHGFESDVWSCGVILYALLTGRLPFDEEDGNIRNLLLKVQSGKYEIPGEDEISPEARDLIVQILTVEPEQRIKTREILKHPLLQKYPSIKDSKSIRNLPREDTYLNPLDHNDGTIDQAILQNLVVLWHGRDKNEITMKLKEPGANLEKTFYALLHRFKFENEQQQLKQQQIAKRISSTSSSPQQNIVKSSSRRSINNILSTPKKKRSSAINVSSAHKRPVSIQKLNDCGTLNPTSPSKKRSLSNRKLSAVLAGSNSSSPSRKRMSVGQDAPPVPTAVLRDYNKRASRASKRLSFLPSKRGSITTKIIATYAKLSEDNDWEYIDREAKRTSSDFATLIDNIFEHEKYEQIRREKEELERKVREAKEREERERRARAEAERRKREEEERRRRREVEELIRQRELQKSLEEQVARLKAEVAATKQEKRISLAQEQHVRSISEPMERKGTRPSKRDSFLALQNNINSLLKRRTLSLETRPISRLDPGIRLSEENTILEDDLECNEDRLRVEKNILETIRRSKFLGSQYDIDKELQRVRREKLEKVNMRKSQDRKLEPGLHSRQEQRFVSDGTTVTSSHEDSESIILPKNVTAIGVLKDEESEPRKLSEVKIPQFTRRSKHFSASSKRLSVLSMYSTKVSYTNLADYLNNDVQLKSLQPSAPTSIKIPQEPEFMFESAGQENRYQAAAPTDTYLERPKVGVEGDHEPGEPVELIELDDSEDRSKQYSEEDIAKVKLPILPPLDHLNKPNGLGIYQAPAPPKEPLGQPVMKSMIPDDIKIKCVPNQLSPRRRATERAPEKKLTKTVPERVIAAETFPPPNTKKKPSFFKKFSREKMHSDCDVQLDTTVGDSKMFRALNKLLNGWTSYGLKEVRSMPASYTITGKLSSDNILSLRSTAFEIVILSVADTGSSVKFTKKSGSKKTFTRLVNEIEKILEKESVLVLAS

SEQ ID NO: 17197 - protein, 335 aa, Pyrococcus furiosus DSM 3638
MIGSIFYSKKFNLHRPSEYHPENPKRLEIVLSKVRELGLEERIEEPNPVEETFVEKIHDRDYINFVKEAVEKGITRLDPDTYVSPGTWSAALLALGAARSAALSALHYGGLHMALVRPPGHHAGRRGRAMGAPTLGFCIFNNAASAVVTLKEEGVGKVVVIDFDAHHGNGTQEIFWNDPDVIHIDLHERDIYPGSGDVSEVGGSNAYGSKINLPMPHYSGDGDYIYVWDEIVLPIVEEVKPKVIVISAGFDGFKGDGLTTLRLTESFYSYAGATLNKYPLAFILEGGYGVGLDKGFPAFIMGYEEGKAKAREEPRYETLKLAEEVKDILSPWWSL

SEQ ID NO: 17198 - protein, 405 aa, Kineococcus radiotolerans SRS30216
MKLEQSDKLADVLYDVRGPALRRAQQLEEAGHRILKLNIGNPAPFGFEAPEELLQDMVANLPVAQGYSDSKGVPSARRAVVQSSQLKGVPGVDVNDVYMGNGVSELIVMTMQALLNDGDEVLVPAPDYPLWTAATSLAGGRAVHYLCDESAGWEPDLDHLRAQVTPRTKAMVVINPNNPTGAVYGKAVLEGMLQVAREHGLLVLSDEIYDKILYDDAVHVSTASLAPDLLCITFNGLSKAYRVAGFRSGWMYLSGPKGHAAGFVEGLDLLANMRLCANVPAQHVVQAALSGHQSINDLVLPGGRLAEQSHRTWELLNQIPGVSCVKPRGALYCFPRLDPEVHRVEDDYQLIVDLLESQHVLVVQGTGFNWPKPDHFRIVTLPRVEDLESAVGRIGTFLTGRLAGR

SEQ ID NO: 17199 - protein, 297 aa, Coxiella burnetii RSA 493
MHTHEHHHHKHHTSHRVLGWAILLTLGFALVEALGGYFAHSLALLGDAGHMASDAVALGIAAFASWIALRPPSHKHSYGFGRAEVIAAWASSLLMVIIALAVIVEAIKRIQQPSSVHSVPVMLIAVFGILLNVLLAGLISRSEKTLNIRAVLLHVVSDIVGTCAVLLSGIVIFFSHWALIDPLLSVLIGILIIISSVRLWRESMTVLMEGVPAHLNIKQVSQTMVRFEGVKAVHDVHIWTLSSGVTALSAHVNIKNITSWDDVLLGLKSTLKQQYDIDHITLQPEADNEECTPCYKL

SEQ ID NO: 17200 - protein, 1362 aa, Schizosaccharomyces pombe
MSLHSKKSTSTVKDNEHSLDLSIKSIPSNEKNFSTEKSENEASESHVVDVVKDPFEQYTPEEQEILYKQINDTPAKLSGYPRILSYADKWDIMLQLAGTITGIGAGLGMPLMSLVSGQLAQAFTDLASGKGASSFQHTVDHFCLYFIYIAIGVFGCSYIYTVTFIIAGERIARRIRQDYLHAILSQNIGYFDRLGAGEITTRITTDTNFIQDGLGEKVGLVFFAIATFVSGFVIAFIRHWKFTLILSSMFPAICGGIGLGVPFITKNTKGQIAVVAESSTFVEEVFSNIRNAFAFGTQDILAKLYNKYLITAQRFGINKAIAMGLMVGWMFFVAYGVYGLAFWEGGRLLHAGDLDVSKLIGCFFAVLIASYSLANISPKMQSFVSCASAAKKIFDTIDRVSPINAFTPTGDVVKDIKGEIELKNIRFVYPTRPEVLVLDNFSLVCPSGKITALVGASGSGKSTIIGLVERFYDPIGGQVFLDGKDLRTLNVASLRNQISLVQQEPVLFATTVFENITYGLPDTIKGTLSKEELERRVYDAAKLANAYDFIMTLPEQFSTNVGQRGFLMSGGQKQRIAIARAVISDPKILLLDEATSALDSKSEVLVQKALDNASRSRTTIVIAHRLSTIRNADNIVVVNAGKIVEQGSHNELLDLNGAYARLVEAQKLSGGEKDQEMVEEELEDAPREIPITSFGDDDEDNDMASLEAPMMSHNTDTDTLNNKLNEKDNVVFEDKTLQHVASEIVPNLPPADVGELNEEPKKSKKSKKNNHEINSLTALWFIHSFVRTMIEIICLLIGILASMICGAAYPVQAAVFARFLNIFTDLSSTDFLHKVNVFAVYWLILAIVQFFAYAISNFAMTYAMEAVLQRIRYHLFRTLLRQDVEFFDRSENTVGAITTSLSTKIQSLEGLSGPTLGTFFQILTNIISVTILSLATGWKLGLVTLSTSPVIITAGYYRVRALDQVQEKLSAAYKESAAFACESTSAIRTVASLNREENVFAEYCDSLIKPGRESAIASLKSGLFFSAAQGVTFLINALTFWYGSTLMRKGEYNIVQFYTCFIAIVFGIQQAGQFFGYSADVTKAKAAAGEIKYLSESKPKIDTWSTEGKKVESLQSAAIEFRQVEFSYPTRRHIKVLRGLNLTVKPGQFVAFVGSSGCGKSTTIGLIERFYDCDNGAVLVDGVNVRDYNINDYRKQIALVSQEPTLYQGTVRENIVLGASKDVSEEEMIEACKKANIHEFILGLPNGYNTLCGQKGSSLSGGQKQRIAIARALIRNPKILLLDEATSALDSHSEKVVQEALNAASQGRTTVAIAHRLSSIQDADCIFVFDGGVIAEAGTHAELVKQRGRYYELVVEQGLNKA

SEQ ID NO: 17201 - protein, 290 aa, Oryza sativa
MGRVVDPLALFKRPSPSAGEFCKWVDWELPCYLTSFLTVVILGIRLNAKPNFTLQTRPHQKERQQATATEQQELVSMEAQTERSARLSRHLQDCHNVPIPVAEVVPGINSSRTTCSRASSPAASRCVCKAWRAVIDTRRLLRADLLPLSLAGIYINFHEMHRSVFLSRPSSTRPAISGMFTDYTPNDNLVEDHCNGLLLLKSGVANPATRQWVPSPPAPPQPVWMKDFYRSYPTTCSRTSSRASRRAGSIAASHCVCKAWRAIVDTRRLLRADLLPLSLAGIYLNFSTSG

SEQ ID NO: 17202 - protein, 329 aa, Zymomonas mobilis subsp. mobilis ZM4
MSCHRVAVIQAGTSLFDTEKTLDRMEALCRQAAEQNVELAVFPEAYIGGYPKGLDFGARMGTRTEAGREDFLRYWKAAIDVPGKETARIGSFAAKMKAYLVVGVIERSEATLYCTALFFAPDGTLIGKHRKLMPTATERLVWGQGDGSTIEILDTAVGKLGAAICWENYMPVLRQVMYAGGVNIWCAPTVDQREIWQVSMRHIAYEGRLFVLSACQYMTRADAPADYDCIQGNDPETELIAGGSVIIDPMGNILAGPLYGQEGVLVADIDLSDTIKARYDLDVSGHYGRPDIFEIKVDRQSHQVITDQFSRDQATEKKPVSDSEISQLD

SEQ ID NO: 17203 - protein, 410 aa, Kineococcus radiotolerans SRS30216
MPTVPAPLPPIGSRLAGVRSSPVRDLLALVGNEDVISFAGGLPAPELFDVEGLREAYAQALTGDAARRNLQYAASEGDPALRELVAARLTRRSLPTEPDDLLITTGSQQALSLLTTALLEPGAVVAVEEPSYLAALQSFALAGARVVGIAADEHGVVPASVEEVLREHRPRVLYLVPNFANPTGRTLPAPRRARIAELAAEHGTWVVEDDPYGELRYSGEHVAPLAADPALADRCVHLGSFSKTGAPGLRLGWARVPRSLRPALVVAKQAADLQTSTVDQAAAAVYLARTDLDAHVATVVAAYRERRDAALAALADALPAGSSWSRPEGGMFTWVRLPDPGGTLDTASLLPGALAAGVAFVPGEPFFAGAPDRATLRLSFTTHTPARIHEGVARLGTALEAALGTVPASG

SEQ ID NO: 17204 - protein, 197 aa, Brassica napus
  misc_feature (24)..(24): Xaa can be any naturally occurring amino acid
  unsure (1)..(197): unsure at all Xaa locations
KNKPISPLSLSTLISISRSNSPLXQMPLSRSLLSRRFSISFRESQGGKTPPEADSHQPPPPPTTKMMLPPPPSNGAAGSSWSAMLPELLGEIIRRVEGSEDQWPHRRDVVSCACLSTKWREIAQEMVRSPVNSGTITFPSCLKLPGPREFSNQCLIKRNKKTSTFYLYLPLTPSFTDNGKFLLAARTFTNGAYTEYI

SEQ ID NO: 17205 - protein, 363 aa, Arabidopsis thaliana
MLSDLPKDVAEEVLSKFPVTSLRRVRFTCKKLNTLSKDMSFTRKHIDKEEAKKKQSKEFHVVMMLDFRVSLFSLNLLNPNPIERLGQLVSLDGGAQVDISNIFHCEGFLLCTTKDISRVVVWNPCVGQTIWIKPRNSFNKWDRYALGYDVMKNHKVLRFVDDGEYGRRHLLCEFEIYSFESDSWEVLDVNPDWEIDFVHRGLSIDGNSYWFARDKVVPYGGQDPSYFLLCFDFTTERFRPPLPLPFQPYFGDTVALSSVGDNQIAVLCQRSSSPYTLKIWISSKVEPNAVSWNKLFLKVDMKPLTGNSFSYSGGSFFVDEEKKMAVVLDKNIGGGFDPTRNIAYIIGKEGYFKKVDLGESRHL

SEQ ID NO: 17206 - protein, 149 aa, Oryza sativa (japonica cultivar-group)
MMAGLQRSATTFRRSGSSGLVWDERFLTEDAEAAKAGDGDGGGGTEEPQPELRHSKSVGSIGMMRRVAADDGDDSEKTTKQQRKKKKKKKKDGQKEDDNRSQQVFRTKDIAPDVDPPSPRVSGCILCSIFSGSGSSSSATSRRAKPRKK

SEQ ID NO: 17207 - protein, 230 aa, Zea mays
QFPFPPRPLSSSQRVPTRRRLLPLRLLMASPTQGDAPLAAPAPAADATDAAFAAAAAVPDPGAEFGFQRPELGKEKLVGTVGFHERHVFLCYKGPDLWPSHLEASESDRLPRLLAAAIKARKPNLKKTIKLTICEGEDGTESSNGDVLIFPDMIRYKGLTHFDVDNFVEEVLVKDIDWLPRSPEPMSGSYIFVCSHGSRDKRWLSVHAHTWEVISMQETSSFSVLMPREK

SEQ ID NO: 17208 - protein, 513 aa, Cryptococcus neoformans var. neoformans JEC21
MPRLSNVYCPKSLLQRQTIQIRSFSQTMSPFKPALTLDTINPAVQAVHYAVRGELAIKADKYVQVLADITHKPLPFEKIVTANIGNPQQQGLDQVPLTYWRQIISLLEYPDLMQKHEQLAKQIYPGDVIERARALHNEIGSTGAYTHSKGVLGIRKRVAKFIEERDGYPADPQNIFLTAGASAGVASILGVALRRGDGCMIPIPQYPLYTATLAYLESEPLPYYLSEADDWSMNHDSLLKSVEEGKKKGIPIKALVIINPGNPTGACLSQEAMEAVVHLCYEEGIVLLADEVYQMNVFDPEQRPFISFKKVLMDMPKEIRESVELVSFHSISKGVSGECGRRGGYFECVNIDKDVMDQVYKMASVTLCPPVSGQIGVDLMVSPPKPGDESYPLWKEETDLIQNNLKSRSYLMAEHFNKMEGVSCNNAEGAMYLFPRINIPPKAVEAAKKLGKEPDVMYALDLLDATGICAVAGSGFGQEPGTFHLRVTALCPDTAEFIGRFQKFNKEFMEKYA

SEQ ID NO: 17209 - protein, 65 aa, Pseudomonas syringae pv. phaseolicola 1448A
MANQSQFNQELFMDIIRIIFAILLPPVGVFMQVGFAGAFWLNILLTLLGYIPGIIHAIYIIVSRK

SEQ ID NO: 17210 - protein, 342 aa, Escherichia coli
MFRQGITGRSHLMSQNTLKVHDLNEDAEFDENGVEVLDEKALVEQEPSDNDLAEEELLSQGATQRVLDATQLYLGEIGYSPLLTAEEEVYFARRALRGDVASRRRMIESNLRLVVKIARRYGNRGLALLDLIEEGNLGLIRAVEKFDPERGFRFSTYATWWIRQTIERAIMNQTRTIRLPIHIVKELNVYLRTARELSHKLDHEPSAEEIAEQLDKPVDDVSRMLRLNERITSVDTPLGGDSEKALLDILADEKENGPEDTTQDDDMKQSIVKWLFELNAKQREVLARRFGLLGYEAATLEDVGREIGLTRERVRQIQVEGLRRLREILQTQGLNIEALFRE

SEQ ID NO: 17211 - protein, 398 aa, Escherichia coli
MRGEFYQQLTNDLETARAEGLFKEERIITSAQQADITVADGSQVINFCANNYLGLANHPDLIAAAKAGMDSHGFGMASVRFICGTQDSHKELEQKLAAFLGMEDAILYSSCFDANGGLFETLLGAEDAIISDALNHASIIDGVRLCKAKRYRYANNDMQELEARLKEARERGARHVLIATDGLFSMDGVIANLKGVCDLADKYDALVMVDDSHAVGFVGENGRGSHEYCDVMGRVDIITGTLGKALGGASGGYTAARKEVVEWLRQRSRPYLFSNSLAPAIVAASIKVLEMVEAGSELRDRLWANARQFREQMSAAGFTLAGADHAIIPVMLGDAVVAQKFARELQKEGIYVTGFFYPVVPKGQARIRTQMSAAHTPEQITRAVEAFTRIGKQLGVIA

SEQ ID NO: 17212 - protein, 281 aa, Pseudomonas syringae pv. syringae B728a
MSFAVIQMVSQSDVLANLASARRLLEQAADGGARLAVLPENFVAMGRRDVADIGRAEAQGHGPILPWLKLAARDLKLWIVAGTLPLPPDERPDGKVTACSLLIDEHGEQVARYDKLHLFDVDVADNRGRYRESDDYAHGSRVVVADTPVGRLGLTVCYDLRFPELYTALREAGAELITAPSAFTAVTGAAHWDILIRARAIETQCYVLAAAQGGVHPGPRETYGHAAIVDPWGRVLAEQAQGEAVLLATRDSEEQASIRARMPVSSHRRFFSQDAMRPASE

SEQ ID NO: 17213 - protein, 459 aa, Cryptococcus neoformans var. neoformans JEC21
MTGGAFFAPAADNDEEYDMGPVGEAHAVQWIGTAGVKGPKWARLPLLTVGMLGIQCVWSIEMGYASPYLLELGLSKSFMSLVFMAGPLSGLIVQPLVGIFADRSRSPLGRRRPFMLAGCLICVSAMMLLGWSREVAAIFGGGQWLAITLAVWAIYCIDFSINAVMSTDRALVVDTLPPREQEEGSAWAGRMFGFGSVAGFFVGNLDLAPVLPFLGKTQLQILSFLTSAVLMVTHSFTSWAVSERVLLRDDRPQSKSSLKSNLKSIWENMFSLPPGIRTVCIVQFFASLGWFPILFFTTVWVSEIYKSSVPSDGIDPATFDSRAVRSGARALLLQALVNIITSIGMPFLVAESGVQPSESVDGYEAIEGSSSRRVGLETANGDGRSPQASVATPPNSALWKRAREDLENGTVFRRFLHSVQSMVNNVKKGELGIPIKGLTLVKVWWISQFVFAAAMAGSW

SEQ ID NO: 17214 - protein, 334 aa, Candida tropicalis
SDVPTTLINEGPSYAADIVVGSNQQKQTVVIDTGSSDLWVVDTDAECQVTYSGQTNNFCKQEGTFDPSSSSSAQNLNQDFSIEYGDLTSSQGSFYKDTVGFGGISIKNQQFADVTTTSVDQGIMGIGFTADEAGYNLYDNVPVTLKKQGIINKNAYSLYLNSEDASTGKIIFGGVDNAKYTGTLTALPVTSSVELRVHLGSINFDGTSVSTNADVVLDSGTTITYFSQSTADKFARIVGATWDSRNEIYRLPSCDLSGDAVFNFDQGVKITVPLSELILKDSDSSICYFGISRNDANILGDNFLRRAYIVYDLDDKTISLAQVKYTSSSDISAL

SEQ ID NO: 17215 - protein, 356 aa, Anabaena variabilis ATCC 29413
METNVKAQVFRGVNQLSYEEIPLPTLEPDEVLVQVQVVGLCQSDIKKIRYPLYEPPRIFGHETAGTIAAVGSQVKGWQVGQRVAVMHHIPCMRCAYCMNDNFSMCDVYKNISTTAGFNASGGGFAEYVKVPGHIVENGGLIPIPDEISFEEASFVEPTNCCLKAVKKAQIAPGQTVLVTGAGPIGLMFVMLVKYFGAKAIATDLLPSRIEKALNVGAEAAFDARDPDLPAKIHALTNGLGVDVTLLAVPSEKAFFQALDCTRKGGKILFFAEFPDELEIPINPNILYRREIDLMGSYSSSYRLQNLSADIVFNRRIDVQALISDRYPLKDLSAAVDQAIAPTPETYKILIYPKIGD

SEQ ID NO: 17216 - protein, 51 aa, Schizosaccharomyces pombe
MPSHKSFRTKQKLAKAARQNRPIPQWIRLRTGNTVHYNMKRRHWRRTKLNI

SEQ ID NO: 17217 - protein, 613 aa, Oryza sativa
MKAPARQTSKSANVTIGNTGDGSGYGNLPTVARGSIVLMGNGSHASVHGVGTVVLKFTSGKIVQLKNVQHVPSIDRNLVSGSRLTRDGFKLVFESNKVVVSKHGYFIGKGYECGGLFRFSLSDFCNNSVNHICGSVDDEANVWHSYYWKEAVRSEMDSIIANGTWEVTERPYGCKPVGCKRVFKKKLRPDASHGLLVHQMDVKTVFLNGELDEEIYMDQPDGFVVEVNEADKCVYYRHGGGERVIMCLYVDDILIFGTNLEVINESHYVEKILNRFGYIDNYSIPLAGVHRRSGEQVSGTSAFDVLHREKAAIRFLGSASRDCSLFVHDGSPSSSLACFAPSSTLATASSSCRTTGLSATSKQVAHAPAELNSPRSSAAKPKNPDEILRDFHALHPIEAFSTSFGGGAALACVAGHARNGLSGYERMFCGLDDIYCVFMGRLDNLSSLIRQYGLCSRSTNEALLVIEAYRTLRDRGPYPADQVVKDLSGSFAFVVFDNKSGAVFAALSTDGEVPLYWGIAADGSVVICDEREIVKGGCGKSYAPFPVGCMFHSEGGLKSFEHPMNRLKAMPRVDSEGVMCGATFKVDTFTKINSMPRVGSATNWAATWDDAAA

SEQ ID NO: 17218 - protein, 291 aa, Photobacterium profundum SS9
MEIKKAETQTFDADVIQLYLREIALKPLLTKHEEILYSRKSLTGDKEAKKVMIESNLRLVVSIAKKYRGSGMQLSDLIDEGNIGLITSVEKFDPERGFRFSTYATWWIKQTIERCIHNQARTIRLPVHVSKEINTIIRTHKQLMKKNNQEPTREEVAEKLERSVDDISSVLAYDAPIVSFDQTINDDANSQSISVFIADDSSDKPESQVDKDDIKGLALAMLENLNQRDREILCRRFGLLGYEVQTLQQVANEVGLTRERIRQLQVSSLKKLKNTLERDNYDLELLFAQSA

SEQ ID NO: 17219 - protein, 304 aa, Candida glabrata CBS138
MKVYLLTLLVYIASVFAQDQSFYKDDPNIIELTPSNFDRVVHNTNYTTLVEFYAPWCGYCKQLKNTIHSLGKASDSIFQVAAVNCDKASNKQLCGEYGVEGFPTLKVFKPGKAGKTAVKKHASETYMGERKLAPLINFIKAKIKNHVKKLTSADMVSKLVNSQSSNKYAVVLFSKQSSIPVTYKSIAIDWLDRVKFYCYLNTKKTLVESLKSFESESAEIIGPLVDRIGKLSAGKDKSLLVLIDKENQKISVLEDKITKSNVAKFIIDNTSLKPKEGPYSKRDDYLAKLKLNKKKKTQVQNDEL

SEQ ID NO: 17220 - protein, 464 aa, Rubrivivax gelatinosus PM1
MAAAGQGTAYSGYRLRDLQNAAPTNLEILRTGPGTPMGEYMRRYWQPVCLSQELTDVPKAIRILHEDLVAFRDRQGNVGVLHRKCAHRGASLEFGIVQERGIRCCYHGWHFDVDGKLLEAPAEPPDTKLKETVCQGAYPAFERDGLVFAYMGPADRRPEFPVFDGYVLPKGTRLIPFSNVFDCNWLQVYENQIDHYHTALLHNNMTVAGVDSKLADGATLQGGFGEMPIIDWHPTDDNNGMIFTAGRRLSDDEVWIRISQMGLPNWMQNAAIVAAAPQRHSGPAMSRWQVPVDDEHSIAFGWRHFNDEVDPEHRGREEECGVDKIDFLIGQTRHRPYEERQRVPGDYEAIVSQGPIAVHGLEHPGRSDVGVYMCRSLLRDAVAGKAPPDPVRVKAGSTDGQTLPRYASDSRLRIRRRPSREADSDVIRKAAHQVFAIMKECDELPVVQRRPHVLRRLDEIEASL

SEQ ID NO: 17221 - protein, 440 aa, Sorghum bicolor
MSTTKVKRRVGKYELGRTIGEGTFAKVRFARDTVTGEAVAIKILDKDKVLKHKMVEQIKREISTMKLIKHPNVVRIYEVMGSKTKIYIVLEFATGGELFQRIVNHGRMREDEARRYFQQLINAVDYCHSRGVYHRDLKPENLLLDSYGNLKVSDFGLSALSQQMKDDGLLHTTCGTPNYVAPEVLEDQGYDGAMADLWSCGVILFVLLAGYLPFEDSNLMTLYKKISNAEFTFPPWTSFPAKRLLTRILDPNPMTRITIPEILEDEWFKKGYKRPEFDEKYDTTLDDVDAVFNDSEEHHVTEKKEEEPVALNAFELISMSAGLNLGNLFDSEQEFKRETRFTSKCPPKEIVRKIEEAAKPLGFDVQKKNYKLRLEKVKAGRKGNLNVATEILQVAPSLHMVEVRKAKGDTLEFHKFYKNLSKTLKDVVWKSDDTQMLHAA

SEQ ID NO: 17222 - protein, 258 aa, Lactobacillus plantarum WCFS1
MHVALAQLNIQFGDPDANYEQIEMAIQRAAEQTVDVIVLPEMWNTGYALTRLNVLADDDGQRTLQLLSKLAQQFCVNIVGGSVAVARDGHYYNEMLVVDRQGQLLSRYDKVHRFGLMAEDRYITAGETENVFELDGTVAMGAICYDIRFPEWLRKQAARGPQVIFFSAEWPTVRQMQWRLLLQARAIENQAFVVAVNRVGSDPDNQFGGQSLVIDPLGQIVAIGGAHAQLITAELDLTQVDQVRGQIPVFEDRRPELY

SEQ ID NO: 17223 - protein, 233 aa, Glycine max
  misc_feature (18)..(18): Xaa can be any naturally occurring amino acid
  unsure (1)..(233): unsure at all Xaa locations
GIDHASFLLALQMAAEAXNPYFRLGYNSLGAFATINHLHFQAYYLALPFPIEKAPTKKIAKLSGGVKISKLLNYPVRGLVFEGGHSLEGLANVVSEACICLQHNNIPYNILISDCGRQIFLLPQCYAEKQALGEVSAELLETQVNPAVWEISGHLVLKRKKDYEEASEANACRLLAEVSLSEERFQEVTALVFQAIASVEMNVKPQLLEEVDAVSPSTQRAMVAGSHECLVLQ

SEQ ID NO: 17224 - protein, 440 aa, Sorghum bicolor
MSATKVKRRVGKYELGRTIGEGTFAKVRFAKNTETGEPVAIKILDKEKVLRHKMVEQIKREISTMKLIKHPNVVRIYEVMGSKTKIYIVLEYVTGGELFDTIANHGRMREDEARRYFQQLINAVDYCHSRGVYHRDLKPENLLLDSYGNLKVSDFGLSALSQQIKDDGLLHTTCGTPNYVAPEVLEDQGYDGAMADLWSCGVILFVLLAGYLPFEDSNLMTLYKKISNAEYTFPPWTSFPAKRLLTRFLDPNPMTRITIPEILEDEWFKKGYKRPEFDEKYDTPLDDVDAVFNDSEEHHVTEKKEEEPVVLNAFELISRSAGLNLGNLFDSEQEFKRETRFTSKCPPKEIVRKIEEAAKPLGFGVQKKNYKLRLEKVKAGRKGNLNVATEILQVAPSLHMVEVRKAKGDTLEFQKFYKNLSKTLKDVVWKSEDLQMQPAS

SEQ ID NO: 17225 - protein, 401 aa, Coxiella burnetii RSA 493
MKKTIEQLVPKITTIRREIHAHPELPFKEEKTAALVIKTLRAHGYETIEHFGKTGVVATLDTKRPGKTLAFHANMDALPLAETNTFHHKSKHKNVMHACGYDGHTAILLTIGAALAIHKKNLNGKFKLIFQPAEEIGKGAKAMIKEGALKNSTIDAIFGFHNYPTLAVGKIALRPGAMFAGISRFFIKIKSQGGHGHRPSETCNPIHIGNDMINEITQLSAQLNLSSEELVITINQFHAGKDNNAIPSLASIHGSIRAVNKEIEEKVKSEINELIKKWTAVYDATITLKETFNCIPIINDEDKTAILQQVATEQLGKENVISLKQPLLAYDDFAYFTNKIPPCYFLIGNGENCSMVHTSTYDFCDDAIPIAARILCEVALRMQGPVSKKHDTEIFESLTIS

SEQ ID NO: 17226 - protein, 448 aa, Zymomonas mobilis subsp. mobilis ZM4
MTDYDFDLFVIGAGSGGVRASRIAASHGASVAIAEEYRIGGTCVIRGCVPKKMLYYAADFAADLKKAQRFGWTLPEKKFDWATLRDVVLSDVTRLEGLYTQTLDNNHITHYKEHAVIDSANQIRLASGKKITARYILVAVGAEPAKLDILGAEYAVTSNEMFLLPSLPKRALVVGGGYIANEFAGILNSFGVETTIATHGDRILRGYDEEIAARLVEIGQGHGIDYRFNADIARIDKDSSGRLTTHFKDGSQIESDLVLFAIGRVAKSRDLGLDKADVKTNDRGAILVDEENRTSCPSIYAVGDVTDRVQLTPVAIREGQAFADRVFGHKAASVDYDTIPTAVFSHPPLASAGLTEEEAKKRYKNIKIYKSNFRPMRNALIDSPDRALYKMVVDGDSDKVLGLHLIGQDSPEIIQLAAVAIKAGLTKQAFNDTVALHPSSAEELVLMR

SEQ ID NO: 17227 - protein, 558 aa, Xanthomonas campestris pv. vesicatoria str. 85-10
MWEALGTVRDLGRLQEIASVLIRYGFGDVVRRIGMADVLERAGRLLHWQNAEGRLRMSAAMRVRRALEELGPTFVKLGQVLATRVDLLPPEWIEELSELQNAVPALPFEQIRPQLVAALGMEPETVFARLDEQPLAAASLAQTHRAWLVDGTPVVLKIRRPDIGDTIDADLRLLARLAEIVETRAPDLKRYRPSEVVQQFTVSLRRELDFAAEGRNAERIAANFAHDTQVVVPAVYWEWTCESLNVQEFIDGIPGRDLLAVDAAGLDRRALARAGAGIVLKMVLQDGCFHADPHPGNIFYLRDGRIAVIDFGMVGRVSEQRRFQVAQLLHGMVSYDAEAVIDVLLEWAGTSLEIDEARLQQDIGAFVDEYRGVPLKELRIGAILGDVTSILRDHGLTLPSDLALMIKAFLTLEGMGRQLDPDFDMATEARPYLERVVLQRYAPRAIVRRGRRTVTGAIDLIGDLPRDLKRLLQAARRGKLQLQIETRALREFGEQVDRAANRLTMGIVTAALVIGSSIVMNSVGGSASRWLLALGVGGFIGAALCGIWILFSIWRSRR

SEQ ID NO: 17228 - protein, 150 aa, Brassica napus
  misc_feature (46)..(46): Xaa can be any naturally occurring amino acid
  unsure (1)..(150): unsure at all Xaa locations
AIVIPLTRFLLTQGLVLPLLYCAVTTLLFHISVCWILVFKFGLGSXGAALSISVSFWFYAVILACYVRFSTSCGMTRTFVSDDFVSCVKQFFHYGVPSAAMLCLEWWLFELLILSSGLLPNPKLETSVLSICLTTETLHYVISNGVAAAV

SEQ ID NO: 17229 - protein, 463 aa, Yersinia pestis KIM
MADNAEKKGLHRGLEARHIELIALGGTIGVGLFMGSASTLKWAGPSVLLAYIIAGLFVFFIMRAMGEMLYLEPVAGSFAVYAHKYLSPYFGYLTAWGYWFMWIAVGISEITAIGVYVQFWFPEIPQWLPAIAGVAIVALANLAAVKLYGELEFWFAMIKVTTIIVMILVGLGVIFFGFGNHGQPIGFDNLTAHGGFFAGGWKGFLFALCIVVASYQGVELVGITAGEARNPQVTLRRAINNILWRILIFYVGAIFVIVTIFPWNGIGTEGSPFVLTFAKIGIVAAAGIINFVILTAALSGCNSGMYSGGRMLYALAKNRQLPAGLTKLSASGVPVYCIAITILCLLVGSSLNYIIPNPQQVFVYVYSASVLPGMVPWFVVLVCQLRFRQVHKAALQQHPFKSILFPYVNYLTIAFLICVLVGMGINPDTRLSLLVGAIFLALVTGCYFVLGMHKPKAMEAERL

SEQ ID NO: 17230 - protein, 291 aa, Nicotiana tabacum
MNDDDALTSNWNDIMLDTGIADAEPKMQYQEQKQPSNFPVHQGQPLQQVPTASVETSAIVPASSTASGASSKQRMRWTPELHEAFVEAVNKLGGSERATPKGVLKLMKVEGLTIYHVKSHLQKYRTARYKPEALEGSSEKKESSIGDLSALDLKTGIEITEALRLQMEVQKQLHEQLEIQRNLQLRIEEQGRYLQEMFEKQCKSIPSTDLVKASSSIAEDASAQSTDAVQRSSNKNDPAVPPSNPQEAGDYITQKVGEKQKEQEREDLGNLETNNSSSSNTPPTKRAKLDE

SEQ ID NO: 17231 - protein, 350 aa, Pseudomonas fluorescens
MTVHKKQYKVAAVQAAPAFLDLEAGVAKAIGLIAQAAAEGASLVAFPEAWLPGYPWWIWLDSPAGGMRFVQRNFDNALEVGSEPFERLCRAAAQHKIYVVLGFTERSGGTLYLAQAIIDDCGRVVATRRKLKPTHVERSVYGEGDGSDLAVHDTTLGRLGALCCAEHIQPLSKYAMYAQHEQVHIAAWPSFSVYRGAAFQLSAQANNAASQVYALEGQCFVLAPCAPVSKEMLDELIDSPAKAELLLEGGGFAMIYGPDGAPLCTPLAETEEGILYADIDLGVIGVAKAAYDPVGHYSRPDVLRLLVNREPMTRVHYVQPQSLPETSVLAFGAGADAIRSEENPEEQGDK

SEQ ID NO: 17232 - protein, 324 aa, Pseudomonas aeruginosa PAO1
MPSRITLNANGGPEVLRLEQVQAQQPGPGEVWLEQAAIGVNPLDLGQRSGAVPIPLPSGLGLEGAGVVAALGPGVSGLAPGDRVAYATGPLGAYASARLYPAERLLKLPDTLAFEDAAALLFKGITAHYLLYATYPVGPGTRILLYGAAGAVGQLMAAWARHLGAWVIGVVSKAESVERARAAGCDEVLVFDAASLAAQVAELTAGRKVDVVYDPIGRATFEASLNSLRPRGLLVSFGATSGVPPAVEVATLNAKGSLFLTRPSLAAHTANPEEYRLRAQAVLRAHADGVIQPRVWRRYPLAEAAVAHTDLLEGRSQGALVLLP

SEQ ID NO: 17233 - protein, 434 aa, Fusobacterium nucleatum subsp. vincentii ATCC 49256
MVFKNSIDLYKKAVELVPGGVNSPVRAFKSVNREAPIFVKKGQGAKIWDEDNNEYIDYICSWGPLILGHNHPKVIEEVKKIIENGSSYGLPTKYEVDLAELIVEIVPSVEKVRLTTSGTEATMSAVRLARAYTQRNKILKFEGCYHGHSDALLVKSGSGLLTEGYQDSNGITDGVLKDTLTLPFGDIEKVKEVLKSKDVACVIVEPIPANMGVIETHKRFLQELRKITEETGTILIFDEVISGFRLALGGAQEFFGITPDLTTLGKIIGGGYPVGAFGGKKEIMDLVAPVGRVYHAGTLSGNPIASKAGFATISYLKKNPNIYKELEEKTNYLIDNIEILAKKYSINVCVNSMGSLFTIFFIDIDKVENLKDSLKSNTKNFSIYFNTMLENGIVVPPSQFEAHFLSMAHTKKELNRTLEVIEMAFKKIGEKSGK

SEQ ID NO: 17234 - protein, 623 aa, Bordetella parapertussis 12822
MLAWRPGRPDGCRAAGGRRYNPGHDCIKASVSLNSAARNAPAGSQPVKAELWKRVYSRVGSYWKGLVLAVLLMAGAAATQPTLAVIMKPLLDDGFSGAKPHYVWFLPLAVVGLILLRGICNFFSDYLLAWVANNVLRGIRGEMFERLLGLPDADFKRGDTGRLLNRFTIDAGNVTGYATDVITVLVRETLVVIALIGVLLYMSWALTLIILVMLPVSVGIARAFTRRLRRINRETVNMNAELTRVVSEGIDGQRVIKLFDGYDAERRRFDFVNSRLRRFAMRSATADAALTPLTQVCISVAVGAVIAVALSQANSGALTVGSFASFMAALAQIFDPIKRLTNLAGKMQKMLVAAESVFTLVDQTPEADAGTRALPEPVRGKVEFRAVSHRFPDADRDTVSAVSFLVEPGQTVALVGRSGSGKTTLVNMLPRFVLPDGGDILFDDVPIQDLTLRSLRSHLSLVSQDVVLFDDTIAANVGYGAGGTVDDARVRDALAAANLLEFVDGLPLGIHTPVGQNAARLSGGQRQRLAIARALIKNAPVLILDEATSALDNESERQVQASLERLMRGRTTLVIAHRLSTVQNADRIIVLDAGKIVEHGPHSELLAANGLYASLYNMQFRED

SEQ ID NO: 17235 - protein, 458 aa, Pseudomonas syringae pv. phaseolicola 1448A
MTSQDGLKRGLSARHIRFMALGSAIGTGLFYGSASAIQQAGPAVLLAYLIGGAAVYMVMRALGEMAVHDPVSGSFSHYATRYMGPLAGFVLGWTYAFEMIIVCLADVTAFGIYMGFWFPEVPRWIWVLGIVFLIGALNLCNVKVFGETEFWLSILKVSAIVAMIVAGFGIMIFGIGSSTSGTEIGISNLWAHGGFMPNGVTGLIASFAVVMFAFGGIEIIGITAGEAKDPQRSLPQAINAVPLRILLFYVLTLFVLMCIYPWPQIGTQGSPFVQIFDNLGIASAATILNIVVISAAVSAINSDIFGAGRMMYGLARDGQAPASFARLSRHGVPWMTVLVMGIALLGGVLLNYLIPKDVFLLIASLATFATVWVWLMILLTQVAMRRSMNRDEAAQLKFAVPFWPYGPAAAIVFMLFIFGVLGYFPDNRAALIVGAIWIVLLLIAYGLWVKPKALNNPH

SEQ ID NO: 17236 - protein, 250 aa, Lycopersicon esculentum
MGKSYPTVSAEYLKAVDKCKRKLRALIAEKNCAPIMLRLAWHSAGTYDVCSKTGGPFGTMRFKAEQAHGANNGLDIALRLLEPIREQFPTLSHADFHQLAGVVAVEVTGGPDVPFHPGREDKPEPPVEGRLPDATKGCDHLRDVFVKQMGLSDKDIVALSGAHTLGRCHKERSGFEGPWTANPLIFDNSYFTELLSGEKEGLLQLPSDKALLSDPAFRPLVEKYAADEDAFFADYAKAHLTLSELGFAEA

SEQ ID NO: 17237 - protein, 333 aa, Mesorhizobium loti MAFF303099
MVGKKKPLVVITRKLPDPVETRMRELFDARLNVEDRPMTQPELVAAVKEADVLVPTVTDQIDAALIAQAGDNLKLIANFGNGVDKIDVAAAAKKGITVTNTPNVLTEDTADMTMALMLAVPRRLAEGANVLTGDKKWAGWSPTWMLGRRIWGKRLGIVGMGRIGTAVARRAKAFGLSIHYHNRHRVLPAVEDGLEATYWESLDQMLARMDIISVNCPSTPATFHLLSARRLALLQPTAYVVNTARGDIIDEEALVKLIQDGKIAGAGLDVYEHEPALNAKLLKLAARHKVVLLPHMGSATLEGRIDMGEKVIINIRAFVDGHRPPDRVLPLRT

SEQ ID NO: 17238 - protein, 765 aa, Arabidopsis thaliana
MASHIVGYPRMGPKRELKFALESFWDGKSTAEDLQKVSADLRSSIWKQMSAAGTKFIPSNTFAHYDQVLDTTAMLGAVPPRYGYTGGEIGLDVYFSMARGNASVPAMEMTKWFDTNYHYIVPELGPEVNFSYASHKAVNEYKEAKALGVDTVPVLVGPVSYLLLSKAAKGVDKSFELLSLLPKILPIYKEVITELKAAGATWIQLDEPVLVMDLEGQKLQAFTGAYAELESTLSGLNVLVETYFADIPAEAYKTLTSLKGVTAFGFDLVRGTKTLDLVKAGFPEGKYLFAGVVDRRNIWANDFAASLSTLQALEGIVGKDKLVVSTSCSLLHTAVDLINETKLDDEIKSWLAFAAQKVVEVNALAKALAGQKDEALFSANAAALASRRSSPRVTNEGVQKAAAALKGSDHRRATNVSARLDAQQKKLNLPILPTTTIGSFPRTVELRRVRREYKAKKVSEEDYVKAIKEEIKKVVDLQEELDIDVLVHGEPERNDMVEYFGEQLSGFAFTANGWVQSYGSRCVKPPVIYGDVSRPKAMTVFWSAMAQSMTSRPMKGMLTGPVTILNWSFVRNDQPRHETCYQIALAIKDEVEDLEKGGIGVIQIDEAALREGLPLRKSEHAFYLDWAVHSFRITNCGVQDSTQIHTHMCYSHFNDIIHSIIDMDADVITIENSRSDEKLLSVFREGVKYGAGIGPGVYDIHSPRIPSSEEIADRVNKMLAVLEQNILWVNPDCGLKTRKYTEVKPALKNMVDAAKLIRSQLASAK

SEQ ID NO: 17239 - protein, 226 aa, Zea mays
AAAAAHPPSAFLLLLVLLGCASLAIGGAAMAGHVLGGVKENPAAANSAESDGLGRFAVDEHNRRENALLEFVRVVEAKEQVVAGTLHHLTLEAVEAGRKKLYEAKVWVKPWLDFKELQEFSHKGDATAFTNADLGAKQGGHEPGWREVPVEDPVVKDAAHHAVKSIQERSNSLFPYELLEILRAHAQVVEDFAKFDILMKLKRGSKEEKIKAEVHKSLEGAFVLNQ

SEQ ID NO: 17240 - protein, 191 aa, Zea mays
MGFSEAQEELVLRSWKAMKSDSESTALKFFLRIFEIAPGAKQMFSFLRDAGDAPLEKHPKLKAHAVTVFVMACESATQLRSTGDVKVREATLKRLGATHARAGVADAHFEVVKTALLDTIRDAVPDMWTPEMKAAWEEAYDQLAAVIKEEMKNAAAAEEQTKNAATAAEETTNAAAAEEETTNAAAAVDAS

SEQ ID NO: 17241 - protein, 573 aa, Candida albicans SC5314
MCGIFAAYRQPEVEDFKSKALQYSKLIRHRGPDWSGNVVQNSTILCHERLAIVGLDSGAQPIVSPDGNFTLAVNGEIYNHIQLREQFPDYKFKSLSDCEPIIPLFTKYDIDAPKHLDGMFAWVLYDKKNDRIVAARDPIGITTLYMGKSSKSPKTRYFASELKCLIEECDEIFAFPPGHVYDSNTDEITRYFKPSWWDASKVPEQHVDFKKVRETLELAVRKRLMAEVPYGVLLSGGLDSSLIASIASRETKKAAQASFNPEGIDANKELSGVDDKGSLHSTGVFNQLHSFAIGLPGAPDLLAAEKVAHFIGTIHHSHTFTLEEGLDALDDVIYHLETYDVTTIRASTPMYLLSRKIKAQGVKMVLSGEGSDEIFGGYLYFANAPSAKEFHEECVKRVKNLHYADCLRANKSTMAWGLEARVPFLDKQFLEVCMNINPEDKLIQPGKIEKYILRKAFDTSDEPDVKPYLPEEILWRQKEQFSDGVGYSWIDGLKDTAEKMVSDEEFAHPKPEWGDDIPTTKEAYWYRCKFDKMFNGSKAAASTVMRWIPKAEWGCHADPSGRYAATHDHKVAQ

SEQ ID NO: 17242 - protein, 493 aa, Ashbya gossypii ATCC 10895
MSFEDLHKAQRGKVEEPVDEICKDFEVTEDKLRELTAYFIECMEQGLKNGETDGTYRGLPMIPSYVMGRPNGTEEGTFLAADLGGTNFRVCSVRLNGDHTFKLEQLKSKIPEELLDDDVTSDELFGFIAKRTMAFVKRYHSEVLQSEGGQLKLGFTFSYPVAQTSLSSGTLIRWTKGFNIKDAIGKDVVKMYQEQLDAVGLGSVRVVALANDTVGTFLSHCYNSRNSASLTTGEITEPVIGCIFGTGTNGCYMEKLENIEKLPQELRQKLTAQGKTEMCINIEWGSFDNELKHLPTTKYDLLIDQKFTHNPGFHLFEKRVSGMFLGEVLRNVLVDLHSQGLILRQYPQGQLPHRLLKPFNLSSEILSHIEIDDSSDLRETELSLLQALRLPTTADERRQIQRLVRAISRRSAYLASVPIAAVIIKTGALEKRYHGEVEIGCDGSVFEFYPGFRSMMRHGLALSPLGPDGERKVHLHVAKDGSGVGAALCALVA

SEQ ID NO: 17243 - protein, 330 aa, Candida glabrata CBS138
MLSKLSHKELLKLAQRQCIPPLLSTFHKGQAGGRVCIIGGCEDYTGAPYFSANATALMGCDLTHVICEYNAATVIKSYTPNLMVHPYMRMSNSYLPNGDPVHSDMDKIKNLLQRMHVIVIGPGLGRDKDMLKSIKEIIRFDLEQLGGQLPIVIDADGLFLVSEDHDTRALLKRFPRGRIILTPNVVEMKRIRDSLSKQCSSEIDIVNELKCILVEKGTEDAIYSPGEGNDILKNKQEGSNKRVGGQGDTLTGTIACMLAYCRAIYDFKVYRPDHNSEYLKDWIDYAMLSCYVGCTITRESARLAFKQSGRAMQTTDVNNRVGEVYARLFD

SEQ ID NO: 17244 - protein, 98 aa, Medicago sativa
METLGGVRDVPGNQNSLAIDGLARFAVEEHNKKQNALLEFSRVISAKEQVVAGTIHHITLEVKDGVNKKVYEAKVWEKSWMNFKEVQEFKLVEDAPAQ

SEQ ID NO: 17245 - protein, 519 aa, Ashbya gossypii ATCC 10895
MLFDKRFVLSIAGLLAQFAQAQDATAPEDSAVVKLTGETFGKFLEENPLVMAEFYAPWCGHCKHLAPEYVKAAGELAEKGIKLAQVDCEQELDLCAGQNVRGYPTLKVFHSGASEEGMPYTGARKAEEIVAYMLRQAEPAVTVLEGKEAAQDLEDLLAESKTAVVVDGGVKGLNESFYELANLLRNDFVFVQYPTKKPTLAVHLPGEKEPIVFEGKNTTLPHLVDWISVESLPYFGEVDAITYQKYMTSDLPLAYFFNSSEEEREQYAGLFRKLGKAHRGSLNFAGLDAVKYGQHAENLNMKQQFPLFVIHNATSDLKYGLPQLSDEEVSAGTAVTIKEADIEKFVVDFLDSKIEPIIKSEDVPEVQESSVYKLVATTHDQIVKDEDKDVLVKYYAPWCGHCKKMAPTFEELADVYANDEDAKNKVLIADIDATLNDVHGVVIEGFPTIVLYPAGKDSTPVVYQRSRSLEEFLDFIKEEGTHKVDGQAIHARNAETAADKPAEKAEAEAEDADLERDEL

SEQ ID NO: 17246 - protein, 356 aa, Leptosphaeria maculans
MPLTKYKAAAVTSEPAWFNLEAGVQKTIDFINEAGQAGCKLIAFPEVWIPGYPYWMWKINYQQSLPMLKKYRENSMAVDSDEFRRIRRAARDNQIHVSLGFSEIDHATLYLAQALISPTGEVLNHRRKIKPTHVEKLVYGDGAGDTFTSVVPTELGRLGQLNCWENMNPFLKALNVSAGEQIHIAAWPVYPGKETLKYPDPATNVADPASDLVTPAYAIETGTWTLAPFQRLSAEGLKMNTPEGVEPETDPTTYNGHARIYRPDGSLVVKPDKDFDGLLFVDIDLNECHLTKALADFSGHYMRPDLIRLLVDTRRKELVTEAEGNDGVKAYSTRERLGLNLPLDGSKEDEKVPVAL

SEQ ID NO: 17247 - protein, 164 aa, Zea mays
MPQSVLVDRATSESLIGPDWSLNLEICDVLNHDPSQAKDVVKSIKKRIGHKNSKIQLLALTLLETLIKNCGDFVHMHVAERDILHEMVKIVKKKPDYHVKEKILILIDTWQEAFGGARARYPQYYAAYQELLRAGAVFPQRSESSVPIYTPPQTQPLQNYPPPA

SEQ ID NO: 17248 - protein, 322 aa, Parachlamydia sp. UWE25
MEKNKLDQLKSMTTIVIDTGDIEAIKEYSPTDATTNPSLILSAVEKPAYKPLMEEAYHYSQKAKSSGEQISLFLDKLFVNVGCEILKLIPGRVSTEVDARLSFDVEGSIQKAQSLIALYKEMGIEKERILIKLASTWEGGLAAKQLEKMGIHCNMTLLFSMPQAIHCAEAQATLISPFVGRILDWYKKHDNVPGYAPAEDPGVKSVTTIYHYFKKFSYKTQIMGASFRNKEEILELAGCDLLTISPHFLQELHDASGNVEQKLDAAKSKQLNIEPIKMNEKAFRLALNDDAMATEKLSEGIRNFAKDAQKLEKMLRTTYKIG

SEQ ID NO: 17249 - protein, 128 aa, Neisseria meningitidis Z2491
MAYSDKVIDHYENPRNVGTFDKNDESVGTGMVGAPACGDVMRLQIKVNDEGIIEDAKFKTYGCGSAIASSSLITEWVKGKSLDDALAIKNSEIAEELELPPVKIHCSILAEDAVKAAVADYRKRQENR

SEQ ID NO: 17250 - protein, 346 aa, Vibrio sp. Ex25
MAYDPVKTAVIGYGYSAKTFHLPFIKALPNLTLSAISSRQQEAVQNDWPDAQWFADANTLLDDSDAELVIITAPNDVHYELAKRALNNGKHVIVEKPFVTRIEDGNELIALAEEKGLVLSVFHNRRWDGDFLTVKSLIEQGKLGDVRLFESHFDRYRPEVRQRWREQAQDGGGILFDLAPHLLDQALVLFGLPDAIDAQCRMMRPGATTIDYYNLVLHYPDHIVHLHSNLYSPEPNLRYKVLGTEAKYEKYGLDPQEGYLKEGRLPENDAWSEEDEALYGVRYDEGGAQTIKTERGAYQAYFVGVANAIRLGTDNPVPAVQAVQNIALIEMALESSKTGKTIQVKS

SEQ ID NO: 17251 - protein, 283 aa, Brassica napus
  misc_feature (177)..(177): Xaa can be any naturally occurring amino acid
  unsure (1)..(283): unsure at all Xaa locations
MANSYLFPLFLSLIVISSVSANFQRDVEITWGDGRGQITNNGELLTLSLDKSSGSGFQSKNEYLFGKIDMQMKLVPGNSAGTVTTLYLKSPGTTWDEIDFEFLGNLSGDPYTLHTNVYTQGKGDKEQQFKLWFDPTADFHTYTILWNPQRIIFTVDGTPIREFKNMESIGTLFPQEXPMRMYSSLWNADDWATRGGLVKTDWSKAPFTASYRGFNQEACVWSNGKSSCPDVSKQGTTGSWLSQELDSTAQERMRWVQRNYMIYNYCTDAKRFPQGLPKECLAA

SEQ ID NO: 17252 - protein, 419 aa, Bordetella parapertussis 12822
MSSIETYMQSVGEQTRTASRAMMRATGAAKNQALLAMAEAILAQRAELQAANAKDVAAARANGLEAALLDRLTLSDRSIALMAEGLRQIAALPDPVGSITATSVRPNGMRVAQMRVPLGVIGIIYESRPNVTIDAAALCLKSGNATILRGGSEALHSNVALGRIVQAGLQAAGLPTAAVQVIDTTDRAAVGKLVTMTEHVDVIVPRGGKGLISRLAQEARVPLIKHLDGNCHVYVDAAADLAKAHDIAFNAKTYRYGVCGAMETLLVHADVAQRLLPVLGQALHEHGVELRGCARALQWLPEGKPADDADWATEYLGPILAVRVVDTIDEAMDHIARWGSGHTDAIVTENLSAAQRFQREVDSSSVYVNLPTCFADGFEYGLGAEIGISTNRLHARGPVGLEGLTTLKWVLNGEGQVRG

SEQ ID NO: 17253 - protein, 476 aa, Bacillus cereus G9241
MQNKIIMMFQKDFRLYDNPALFEAAQSGEVVPVYVQDETFSIGSAAKWWLHHAIIDVQKQLKALGATFIIRKGKTQEEILSLIEQLDITAVYWNICYEPDRLQSNQKMKMMLEDKGIICKEFNSHLLLEPWIIKKKDNTEYKVFTPFYNAFQKQAIPKPTSKVQSIKWGSSLPASLSVSELHLLPTIPWTSHMESIWNPTEEGAYKTFKKFFSSKLTFYSEGRDFPNQNVHSMLAPYLSFGQISVKLMFHYLINKSTERQSSLFEKQVNSFIRQLIWREFSYYLLYHYPFTVYKPLNKNFEHFPWDKEEELLRVWQKGETGYPFIDAGMRELWQTGFMHNRARMAVASFLVKHLLIPWQEGAKWFMDTLLDADIANNTMGWQWVAGSGADASPYFRIFNPITQGEKFDKDGEYIRKWVPELRDIPNKYIHKPWEAPEPILQKANIQLGDTYPLPVVDHKAARERALCAYKSMKEFI

SEQ ID NO: 17254 - protein, 741 aa, Pyrus pyrifolia
MLACNCIEPQWPADELLMKYQYISDFFIALAYFSIPLELIYFVKKSAVFPYRWVLVQFGAFIVLCGATHLINLWTFNMHSRTVAIVMTTAKVLTAVVSCATALMLVHIIPDLLSVKTRELFLKNKAAELDREMGLIRTQEETGRHVRMLTHEIRSTLDRHTILKTTLVELGRTLALEECALWMPTRTGLELQLSYTLHQQNPVGYTVPIHLPVVNQVFSSNCAVKISPNSPVARLRQLAGKHIPGEVVAVRVPLLHLSNFQINDWPELSTKRYALMVLMLPSDSARQWHVHELELVEVVADQVAVALSHAAILEESMRARDLLMEQNIALDLASREAETAIRARNDFLAVMNHEMRTPMHAIIALSSLLQETDLTPEQRLMVETILKSSNLLATLINDVLDLSRLEDGSLQLDIATFNLHSIFREVHDLIKPVASVRKLSVALNIAADLPVCAIGDEKRLMQIILNVVGNAVKFSKEGSISITAYVAKSESLRDFRAPDFFPVQSDNHFYLRVQVKDSGSGINPQDIPNLFTKFTQTQTLASQNSGGSGLGLAICKRFVNLMEGHIWIESEGLGKGCTATFIVKLGFPERSNESKQPFAPKLQANHVQTNFPGLKVLVMDDNGVSRSVTKGLLVHLGCDVTTVSSIDEFLHVISQEHKVVFMDVCMPGIDGYELAVRIHERFTKRHERPVLVALTGSIDKMTKENCMRVGMDGVILKPVSVDKMRSVLSELLEHRVLFEAM

SEQ ID NO: 17255 - protein, 681 aa, Candida glabrata CBS138
MTSSNECGSNSPTRTADINKRIIRKHSGSQKKSPSIEASFSRDDFASRRSSTTAALLKDPSENYGTKGIPPVSIDIDIRNPAPKVIDAVTRHLSSTPNHLQMQGADMTRDLYKWAKEHPSSPPPASSENMLASSGNQFTNISTPNEFTNPNAFKRKRSMSFSAVSAHSSAMNSISNYNTNNDFRQVRNELPEIMMSHEDIRAPGGFRRSYLIQKHIEENGEEPPNNFITRNFIEFLTLYGHFAGEDLSESEEESDIEGEYDEEALETESTRLLSTHRSRKHRPAVHGHKSSTTKAVLLLLKSFVGTGVLFLPRAFHNGGWGFSSSVLLICALISYWCFVLLIDTKNHVGLDGYGDMGNHLYGSSMKLAILWSIALSQIGFSSAYTVFTATNLQVFTNNVFKQEYGITIFIIIQVLFFLPLALTRNIAKLSGTALIADLFILLGLVYVYWFSISHVSTHGVASETMLMFNKADWSLFIGTAIFTFEGIGLLIPIQESMKKPEHFHASLSGVMCVVTVVFISCGLICYCAFGADVETVVLLNFPQESIYTRAVQLLYALAILLSTPLQLFPAIKILENWTFSPHSSGKHNPKVKWLKNYFRAAIVCFSALIAWAGANDLDKFVSLVGSFACIPLIYIYPPMLHFKAFKKDKSKLFMASDIFLLFFGIIVMIYTSLQTIGMWLN

SEQ ID NO: 17256 - protein, 767 aa, Pyrus pyrifolia
MLKALASWLSVSLLLFCVSASDNGFPRCNCDDDGSLWSIESILECQRVSDFLIAVAYFSIPIELLYFVSCSNVPFKWVLFQFIAFIVLCGLTHLLNGWTYGPHPFQLMLALTVFKILTALVSCATAITLITLIPLLLKVKVREFMLKKKTWDLGREVGLIMRQTEAGMHVRMLTQEIRKSLDRHTILSTTLFELSETLGLQYCAVWMPNETKTEMILTHELKGRNYSHMYNFCIPISDPDVIHIKGSDGVNILRPDSALVHASGDSGEPGPVAAIRMPMLRVSNFKGGTPELIETCYAILVLVLPGGQPRSWSSQDLEIIKVVADQVAVALSHAAVLEESQLMREKLAEQNRALQQAKMKAMMASHARNAFQKVMSDGMRRPMHSILGLLSLMQDDTLDRDQRVIVDAMVRTSNVLSTLINDVMDNSAKESGRFPLEVRSFGLHGMIKEAACLAKCLCVFRGFGFAIDVNKSLPDHVMGDERRVFQVILHMVGSLLNGNNVGGFVMFRVASEKGSQGRSDQRWAAWRHSSSDGDVCVRFELGISNSGSQSEVTSPAVQLVGRRYTSEGVDEGLSFTICKKLVQMMQGNIWAVPNPQGFAQSMALVLRFQLRPSIAIAISEPGESYEHPHSNSLFKGLQVLLTDDDDVNRVVMRKMLEKLGCIVTAVSSGLECLSTIGTFGPAGSSFQVVLLDLHMPELDGFEVAIRIRKFRSLTWPLIIAVTASADEDVWDRCMQTGINGVIRKPVLLQGIANELRRVLLQANKGMA

SEQ ID NO: 17257 - protein, 506 aa, Bifidobacterium animalis subsp. lactis
MKNKVQLITYADRLGDGNLASMTDILRTRFDGVYEGVHILPFFTPFDGADAGFDPIDHTKVDARLGDWDDIAELAKTHDIMVDAIVNHMSWQSKQFQDVLANGEDSEYYPMFLTMSSVFPDGATEEELAGIYRPRPGLPFTHYSFAGKTRLVWVTFTPQQVDIDTDSAKGWEYLMSIFDQMSKSHVKYIRLDAVGYGAKEAGTSCFMTPKTFELISRLREEGAKRGLEILIEVHSYYKKQVEIAAKVDRVYDFALPPLLLHSLFTGKVDALAHWTEIRPNNAVTVLDTHDGIGVIDIGSDQLDRSLKGLVPDADVDNMVETIAKNTHGESKAATGAAASNLDLYQVNSTYYSALGCNDQHYIAARAVQFFLPGVPQVYYVGALAGENDMELLKRTNVGRDINRHYYTTSEIDKNLERPVVKALNALARFRNELPAFDGDFSYSVGDDESIAFSWNGFGSFPTLTFTPSKGMGVENPQSVATLVWTDSTGEHRTDDLIANPPVMQAS

SEQ ID NO: 17258 - protein, 660 aa, Thermosynechococcus elongatus BP-1
MCGLTGFWQPCGCPTDEVSATIQRMADTLVHRGPDDVGVWVDTEVGIALGHRRLAILDLSPAGHQPMVSATGRYVIAFNGEIYNHLELREELSKVGAGGTAPVWRGHSDTETLLAAFAALGIEKTLKRVVGMFAIALWDRETRTLTLARDRMGEKPLYYGWVRDALVFGSELKALRAYPGFDNAIERRSLALFMRYDYIPAPWSIYENIWKLPPGCFVQFRAASHGGEPLAVGSRGNIKPYWSVRDVAERGLANPFTGREADAVEELERLLRQSIAGQMMADVPLGAFLSGGIDSSTVVALMQAQSSRAVKTFTIGFHEQDYNEAKHAKAVACHLRTNHTELYVTPQEAMAVIPKLPSLYDEPFADSSQIPTFLLAQLARQQVTVSLSGDGGDELFGGYTRYFLTHSLWQRLAWIPLPMRKLAEQGVLAISPQTWNRVFALLAPVLPERLRFRLPGDKLHKAAALFVTRRPEDIYLRFVSHWHDPTSLVIGTEEPRTALTEPATVLEGADFEARMMYLDSITYLPDDILVKVDRAAMGVSLETRVPLLDHRIVEFAWQLPHYFKIRRGQSKWLLRQVLYRYVPKELIERPKMGFGIPLDQWLRGPLREWAEDLLSEERLKREAFLNPELVRQKWQEHLLGRRNWAYHLWNVLMWEAWLAA

SEQ ID NO: 17259 - protein, 293 aa, Populus alba x Populus tremula
MDPDSRDPPIEYREGYALSGKIMLSAILILFFVIIVMVLLHLYARWYLTRARQRQVRRVRNRRTHLVFYVDSPQNPNNVTSHVTRGLEETVKNSLPVFVYPRKTHQDSIECAVCLSEFEENERGRVLPKCNHSFHTECIDMWFHSHSTCPLCRSPVEPVAENPVPEGSNFGISEAGSGLCTSCQHEEDHLGSASTSSFNGGRKPVGLIGVTIDVPRRNGNFEDESNTESPSASHSFRSPMSRMLSFKRMLSRERRGTVSPTVANSVSCGGGSGTTEFDIEQGRDESMPQQTRC

SEQ ID NO: 17260 - protein, 276 aa, Zea mays
MMAEAWTPVPFPPTAPCFWLHDTHSVFWRGGDAWTAAENKLFEKALAQIDRNAPDRWEKVAEVVRTKTVDDVRNHYHDLENDVGFIEAGLVPFPHYSGSVPSFGFTHHEDWDGGFRRGYCLKRARGSDPERKKGVPWTEEEHKLFLMGLKKYGRGDWRNISRKYVTTRTPTQVASHAQKYFIRLNSGGKDKRRSSIHDITTVNLPDEDRGNAPPSAVTTTTNPSVALPDMKPFIAPLQDALGVSHPYGNVKLEPKSSLVAGLGFNDSVLLMHCGQL

SEQ ID NO: 17261 - protein, 469 aa, Photobacterium profundum SS9
MKKLLTLAIPLIISQLVAQLLVFTDVWMMAKMSILAIAGGGLGASVYSFVFIIAGSTVGCVANLIAIAYGKRVRQPDAGNTEIRAAVKGGILLSLLLTVTLQPFFVMLKDWLLMADQDPQAVALAMDYINALKWSMLPTLMLLVLRSLVSAFGDTRSIMVMSVATVILNVPISYVLAFKMDMGIAGLGYGSSLASLIIMVVYGYWVFNRPRYCQFNPFSKLHEYRLGTIKPLLAIGVPIMIATLLEHALFSGGALLAGTLGAVSLAIHQIAMQCLNLSWNIAFGFSQAASILVSQHFGRGEPNMVRQYAKQGLFVVTATSAVIGLFLIIWPEFLTQVFSIEGDVMAQELVAALPAVMIMVALCFIVDAWQLTAISVLRGMKVVIAPTISTVIGYWLIGLPAAWLLMKLMGVKGVWAGFAVGLAATGLMLVILLFKSLTRFEQQIKQQNDEDAHNLNKNDNITPQTITVL

SEQ ID NO: 17262 - protein, 195 aa, Zea mays
MRSPYSDPHEVKNLYEERKEPGREELEEMASAEGERWVGLATDFSQGSREALQWAATNLLRAGDHLLLLHVIKEPDYEQSEAILWESTGSPLIPLSEFSDPIIAKKYGAKPDMETLDLLNTTATQKEIMVVVKVLWGDPREKLCQVIHDTPLSCLVIGSRGLGKLKRVLLGSVSDYVVNNATCPVTVVKSSSTEG

SEQ ID NO: 17263 - protein, 380 aa, Populus alba x Populus tremula
MCGGAIISGFIAPTTTARSSRRLTSGFEWLEPKKPFNNKHLKPVVADPEDDFEADLQEFKDESDVDEDYDVFADAKPFAFSASASEPAKKRGLPRGSTAVKSAGFSGLAKNSAKRKRKNQFRGIRQRPWGKWAAEIRDPRKGVRVWLGTFNTAEEAARAYDSEARRIRGKKAKVNFPDEAPCASARHPIKENSQKRLTKANLSQDFSYLSNPETDYNNMGFVEEKPQVSQFGIMNSIPVNGDSGVTPLTPSDNASMYFNSDKGSNSFDCDFGWGEQGAEILSVLAATPEVDESVFVEANPKKLKSYTEYAVPVEERNGKSLSEELLAFDNQLMNLQMPDLVGNWEASLDSFLNGDTTQDGTNAVDLWSFEDFPSMVGGVY

SEQ ID NO: 17264 - protein, 338 aa, Photobacterium profundum SS9
MRVLVTGGMGYIGSHTCVQMIEAGMTPVIVDNLYNSKETVLARIEALTGVMPAFFQGDIRDRAFLEKVLSENDIDAVIHFAGLKAVGESVVKPLEYYDNNVHGTLVLVEAMRTAGVNSLIFSSSATVYGDPASVPITENFPTSATNPYGRSKLMVEECLTDIQLAYPEMSITLLRYFNPVGSHKSGTMGEDPQGIPNNLMPFISQVAVGRREFLSVFGDDYPTVDGTGVRDYIHVVDLADGHLAALNYKGSEAGLHIYNLGTGNGSSVIQMVDAFSKASGVEVAYKVAPRRPGDIAECWADPAKAKAELHWEAKLSIEDMTTDTWRWQSNNPNGYPDA

SEQ ID NO: 17265 - protein, 168 aa, Avena vaviloviana
VMASSATTVAPFQGLKSTAGLPVSRRSNAGLGSVSNGGRIRCMQVWPIEGIKKFETLSYLPPLSEEALLKQIDFLIRSKWVPCLEFSKVGFIFREHGSTPGYYDGRYWTMWKLPMFGCTDASQVIKEVEEVKKEYPDAYVRIIGFDNIRQVQCVSFIAFKPPGCEESG

SEQ ID NO: 17266 - protein, 399 aa, Arabidopsis thaliana
MAGICCGVVGETEPAAPVDSTSRASLRRRLDLLPSIKIVADSAVAPPLENCRKRQKRETVVLSTLPGNLDLDSNVRSENKKARSAVTNSNSVTEAESFFSDVPKIGTTSVCGRRRDMEDAVSIHPSFLQRNSENHHFYGVFDGHGCSHVAEKCRERLHDIVKKEVEVMASDEWTETMVKSFQKMDKEVSQRECNLVVNGATRSMKNSCRCELQSPQCDAVGSTAVVSVVTPEKIIVSNCGDSRAVLCRNGVAIPLSVDHKPDRPDELIRIQQAGGRVIYWDGARVLGVLAMSRAIGDNYLKPYVIPDPEVTVTDRTDEDECLILASDGLWDVVPNETACGVARMCLRGAGAGDDSDAAHNACSDAALLLTKLALARQSSDNVSVVVVDLRKRRNNQASS

SEQ ID NO: 17267 - protein, 411 aa, Streptococcus thermophilus LMG 18311
MKKFNWKKIVAPIAMLIIGLLGGLLGAFILLTAAGVSFTNTTDTGVKTAKTVYTNITDTTKAVKKVQNAVVSVINYQEGSSSDSLNDLYGRIFGGGDSSDSSQENSKDSDGLQVAGEGSGVIYKKDGKEAYIVTNNHVVDGAKKLEIMLSDGSKITGELVGKDTYSDLAVVKVSSDKITTVAEFADSNSLTVGEKAIAIGSPLGTEYANSVTEGIVSSLSRTITMQNDNGETVSTNAIQTDAAINPGNSGGALVNIEGQVIGINSSKISSTSAVAGSAVEGMGFAIPSNDVVEIINQLEKDGKVTRPALGISIADLNSLSSSATSKLDLPDEVKSGVVVGSVQKGMPADGKLQEYDVITEIDGKKISSKTDIQTNLYSHSIGDTIKVTFYRGKDKKTVDLKLTKSTEDISD

SEQ ID NO: 17268 - protein, 526 aa, Arabidopsis thaliana
MTTISDLPEDVVEEILPRVPLTSLSAVRSICKTWNTLSKNRVLCKAAVKKQFLGFIMMDYRVCSMKFHLRNDEGGDLVDDLSIKQVGILDQIEISEVLHCDGLLLFVTKDNSSLVVWNPYLGQTRLIQPSNNFHCSDRYAIGYDNNRNLKILRNLVIMEALGNTYILAQGKIRVDSRWKIEAILLSFDFTTERFGPRLQLPFGFYYPQDLFSLSCVREEQLVVLHQSWMVSGELEIWITNKIDPGVVSWTKFLRSISCCRISIQAGSFFINEENQVAVVFDLDEYKGSETCRNQTAYIIGQDEYFKSVNIGEAPNLGRPEKYAPHIYCRPLGNTYILAQGKIRVDSRWKIEAILLSFDFTTERFGPRLQLPFGFYYPQDLFSLSCVREEQLVVLHQSWMVSGELEIWITNKIDPGVVSWTKFLRSISCCRISIQAGSFFINEENQVAVVFDLDEYKGSETCRNQTAYIIGQDEYFKSVNIGEAPNLGRPEKYAPHIYCRPLVCSSYVPSLVPLQINQPDTRKESDD

SEQ ID NO: 17269 - protein, 446 aa, Burkholderia sp. 383
MSYNEAKFWHPMVHPNEMKQRKPIRIVRGDGCYVFDEEGRKLVDGVAGLWNVNVGHNRQEVKDAIVRQLDELEYFQLFDGISHPRAEELSKKVIDMLEPEGMRRVLYSSGGSDSIETALKIARQYWKVRGQADRTKFISLKQGYHGTHFGGASVNGNTVFRRNYEPNLPGCFHVETPWLYRNPFTQDPEELGRICAEMLEREIQFQSPDTVAAFIAEPIQGAGGVIVPPANYWPLVREVCDRYGVLLIADEVVTGFGRSGSMFGSRGWGVRPDIMCLAKGISSGYVPLGATVVNARIEDAFAANADFGGAIMHGYTYAGHPVACAAAIASLDIVVKEDLPANAAKQGAYLLEALKPFAERFAAVGEVRGKGLMLALDLVANKDTREPIDPLSGYANAVAEVARENGVLVRPVGTKIILSPPLVIQREQLDRIVDALAAGFEAVPFA

SEQ ID NO: 17270 - protein, 410 aa, Rickettsia sp. IRS 4
DSEFAELKIRGKIFKLPILKASIGEDVIDISRVSAEADCFTYDPGFMSTASCQSTITYIDGDKGILRHRGYDIKDLAEKSDFLEVAYLLIYGELPSSEQYNNFTKQVAHHSLVNERLHYLFQTFCSSSHPMAIMLAAVGSLSAFYPDLLNFKEADYELTAIRMIAKIPTIAAMSYKYSIGQPFIYPDNSLDFTENFLHMMFTTHCTKYKVNPIIKNALNKIFILHADHEQNASTSTVRIAGSSGANPFACISTGIASLWGPAHGGANEAVINMLKEIGSSENIPKYIAKAKDKNDPFRLMGFGHRVYKNYDPRAAVLKETCKEVLKELEQLENNPLLQIAIELEAIALKDEYFIERKLYPNVDFYSGIIYKAMGIPSQMFTVLFAIARTVGWMAQWKEMHEDPEQKISRP

SEQ ID NO: 17271 - protein, 231 aa, Arabidopsis thaliana
MDQQDHGQSGAMNYGTNPYQTNPMSTTAATVAGGAAQPGQLAFHQIHQQQQQQQLAQQLQAFWENQFKEIEKTTDFKNHSLPLARIKKIMKADEDVRMISAEAPVVFARACEMFILELTLRSWNHTEENKRRTLQKNDIAAAVTRTDIFDFLVDIVPREDLRDEVLGSIPRGTVPEAAAAGYPYGYLPAGTAPIGNPGMVMGNPGGAYPPNPYMGQPMWQQQAPDQPDQEN

SEQ ID NO: 17272 - protein, 369 aa, Schizosaccharomyces pombe
MAPIKTAVLGTGMSAFIFHYPFLKALPNHFEVYAAWERRATSTESKARAAFPNVKVYTKLDELLADSNIELVVISLPPNVHYEVVSQALNAGKHVLCEKPFTPTYGEAKELFDLAKSKNLMLTVYQNRRFDGDFLTAKECIENGRLGEVVQFESHIDRFRLFRKGNWKDVPNPGCGLVYDLGSHLIDQAITLFGTPHSVTAKLESQRQIPPLEVEDCFRIVLHYLPQEGRLPLDVIVCSSSISCGLDMRYIIKGTRGSFLKFGIDPQESQLNEGMSPMDPGYGVDSSHHYATLWTLPPDIDVRHPPKPTKSTLMTIAGDYRRFYLEVHEALVTKTFETSVKPHQVLLVEKIIEAAYKSSQSSTSIPLSE

SEQ ID NO: 17273 - protein, 325 aa, Pseudomonas syringae pv. phaseolicola 1448A
MTELQPIPVTVLTGFLGAGKTTLLRHLLKAEHGLKIAVIENEFSDAGIDSQLLGTDPVQIMTLSNGCVCCTIHTDLTKALYLLLERLDSGEIAFDRLVIECTGLADPAPVAQTFFIDEELRERYILDGIITLVDAAHADTHLAQTIAQAQIGFADRLLVSKRDLVDDATFDALSARLTRINRRAPIRIVEHGNIDLAELLDVRGFNLNADLGGGMILRPLAPVGNSGDRITSLVLRSEKPLNLDRLSEFMNELLEDHGKQLLRYKGVLNIKDEPRKMVFQGVLKLYGFDWDTEWAEGEKRESVIVFIADELPEEKIRAGFERVCG

SEQ ID NO: 17274 - protein, 202 aa, Triticum aestivum
  misc_feature (75)..(75): Xaa can be any naturally occurring amino acid
  misc_feature (89)..(89): Xaa can be any naturally occurring amino acid
  misc_feature (99)..(99): Xaa can be any naturally occurring amino acid
  misc_feature (188)..(189): Xaa can be any naturally occurring amino acid
  unsure (1)..(202): unsure at all Xaa locations
MAPLGDTVASVASAAAPGLVVSFGEMLIDFVPDVAGVSLAESGGFVKAPGGAPANVACAISKLGGSSAFVGKFGXDEFGHMLVDILKQXNGVNAEGCLXFDQHARTAPGLPSTLKSHAGREFMFYRNPSADMLLTEAELNLDLIRRARIFHYGSISLITEPCRSAHVAAMRAAKSAGILCSYDPNVRXXLWPSAQAARDGIM

SEQ ID NO: 17275 - protein, 464 aa, Arabidopsis thaliana
MQIFVKTLTGKTITLEVESSDTIDNVKAKIQDKEGIPPDQQRLIFAGKQLEDGRTLADYNIQKESTLHLVLRLRGGMQIFVKTLTGKTITLEVESSDTIDNVKAKIQDKEGIPPDQQRLIFAGKQLEDGRTLADYNIQKESTLHLVLRLRGGMQIFVKTLTGKTITLEVESSDTIDNVKAKIQDKEGIPPDQQRLIFAGKQLEDGRTLADYNIQKESTLHLVLRLRGGMQIFVKTLTGKTITLEVESSDTIDNVKAKIQDKEGIPPDQQRLIFAGKQLEDGRTLADYNIQKESTLHLVLRLRGGMQIFVKTLTGKTITLEVESSDTIDNVKAKIQDKEGIPPDQQRLIFAGKQLEDGRTLADYNIQKESTLHLVLRLRGGMQIFVKTLTGKTITLEVESSDTIDNVKAKIQDKEGIPPDQSVSSSLESSLRMDVLWPTTTSRRSLLFTWSCVFVVVSKSRLCYA

SEQ ID NO: 17276 - protein, 401 aa, Bordetella parapertussis 12822
MKTGGIDIMNEVVVVAAARTAIGDFGGGLKDVAPCDLGATVIREALARAGVAGPEVGHVAVGHVINTEPRDMYLSRVAAINAGIGKETPAFNVNRLCGSGLQAIVSAAQTIMLGDTEIAVGAGAESMSRAPYIAPAQRWGARMGDSAMVDMMTGALSDPFGRMHMGVTAENVAARYSISRADQDALAVESHRRAAAAIDAGRFRDQIVPVTLKTRKGETVFDTDEHVRRDITIEGMAALRPVFQKENGTVTAGNASGLNDGAGAVVLMSAAAAAQRGIAPMARLVAYAHAGVDPEIMGIGPVPATQAALKRAGLTVDQLDVIEANEAFAAQACAVTRQLELDPAKVNPNGSGISLGHPIGATGAIITVKALYELQRVGGRYALVTMCIGGGQGIAAIFERV

SEQ ID NO: 17277 - protein, 184 aa, Thermosynechococcus elongatus BP-1
MFALALWDRLARLLFLARDRIGEQPLYWGWAGRDLVFGSELKALRRYPDFPREIYREALGLYVRYAYVPAPWSIHPGVFKLEPSCILELSGPVTAAPPTAPLRPGGSFEGLSIRRYWSLAHLVAQGAQERFTDEGEVIAAVEAALETAVSRQLIPDVQLGAFLSGGIDSSLVVALMRKVTDVPV

SEQ ID NO: 17278 - protein, 416 aa, Streptomyces avermitilis MA-4680
MAPRRVVVTGLGAVTPLGVGVGELWRGLLEGECGIRELDGEEFEGLPVRVAGTVPVDPATLLPRPQARRMNRAAQFAVLAAREAWRDAGFDGAGTAESGLDPARVGVSVGAILGDASVLVGGDRKLRAKGPRSVSPLTTPMTVPSQAASQVSLALRITGEARTVTSACASGTEAIGLAIDRIRYGHVDIALAGGAEAVVTPAIMASFAAMRALSHHGLTEGSPSRPFAKDRDGFVNGEGAGFLLLETEEHARARGARIYCEAAGWGLSADAHHMAAPDPSGSGVALALRRALKDAGGHVVDVVHVNAHATATVEGDLAEANALRAVLGGPVPVTALKGHLGHLQGAAGGVEAVATALTLHHGLIPPTIGCAIQDDEIGLDVVTHSARPLPAGGDLALSNSFGFGGHNAVLALRRVG

SEQ ID NO: 17279 - protein, 149 aa, Thermosynechococcus elongatus BP-1
MMFQDMRSYLPEDILRKVDRAAMGISLETRTPFLDPGVLKASMQVPTAMKIRNGQGKWILRQMLYRYIPRELIERPKAGFAIPIDEWLRRPLRPWAEDLLSENALGRAGLIKPAPVQGAWQEHCSRRRDWTYQLWVILMLQAWKENLNG

SEQ ID NO: 17280 - protein, 322 aa, Triticum aestivum
  misc_feature (204)..(204): Xaa can be any naturally occurring amino acid
  unsure (1)..(322): unsure at all Xaa locations
NKFVQKSRLVPVRNSRDIVDPRVRLGEERTRKELIPFLSENNDDEEEVLLAMAEKLGVFIPYVGGVEHAHVLLPPLETLSTVEETCVRDKAVESLCRIGAQMKKNDIVDYFIAVVKRLAAGEWFTARVSSCGLFHIAYPSATDPLKTELRTIYGQLCQDDMPMVRRAAASNLGKFAATVEQSHLKTEIMSIFDDLTQDDQDSVXLLAVEGCAALGKLLEPQDCVAHILPVIVNFSQDKSWRVRYMVANQLYELCEAVGPEPTRADLVPAYVRLLRDNEAEVRIAAAGKVTKFCRILSPQLAIQHILPCVFKHNKVGTGGGKG

SEQ ID NO: 17281 - protein, 949 aa, Shigella flexneri 2a str. 301
MKYLASFRTTLKASRYMFRALALVLWLLIAFSSVFYIVNALHQRESEIRQEFNLSSDQAQRFIQRTSDVMKELKYIAENRLSAENGVLSPRGRETQADVPAFEPLFADSDCSAMSNTWRGSLESLAWFMRYWRDNFSAAYDLNRVFLIGSDNLCMANFGLRDMPVERDTALKALHERINKYRNAPQDDSGSNLYWISEGPRPCVGYFYALTPVYLANRLQALLGVEQTIRMENFFLPGTLPMGVTILDENGHTLISLTGPESKIKGDPRWMQERSWFGYTEGFRELVLKKNLPPSSLSIVYSVPVDKVLERIRMLILNAILLNVLAGAALFTLARMYERRIFIPAESDALRLEEHEQFNRKIVASAPVGICILRTADGVNILSNELAHTYLNMLTHEDRQRLTQIICGQQVNFVDVLTSNNTNLQISFVHSRYRNENVAICVLVDVSSRVKMEESLQEMAQAAEQASQSKSMFLATVSHELRTPLYGIIGNLDLLQTKELPKGVDRLVTAMNNSSSLLLKIISDILDFSKIESEQLKIEPREFSPREVMNHITANYLPLVVRKQLGLYCFIEPDVPVALNGDPMRLQQVISNLLSNAIKFTDTGCIVLHVRADGDYLSIRVRDTGVGIPAKEVVRLFDPFFQVGTGVQRNFQGTGLGLAICEKLISMMDGDISVDSEPGMGSQFTVRIPLYGAQYPHNKGVKGLSGKRCCLTVPNASLCQFLETSLQRSGIVVTTYEGQEPTPEDVLITDEVVSKKWQGRAVVTFCRRHIGIPLEKAPGEWVHSVAAPHELPALLARIYLIEMESDDPANALPSTDKAVSDNDDMMILVVDDHPINRRLLADQLGSLGYQCKTANDGVDALNVLSKNHIDIVLSDVNMPNMDGYRLTQRIRQLGLTLPVIGVTANALAEEKQRCLESGMDSCLSKPVTLDVIKQTLTVYAERVRKSRDS

SEQ ID NO: 17282 - protein, 332 aa, Beta vulgaris subsp. vulgaris
MAVEPLRVLVTGAAGQIGYALVPMIARGVMLGANQPVILHMLDIPPAAEALNGVKMELVDAAFPLLKGVVATTDVAEACKGVNVAVMVGGFPRKEGMERKDVMPKNVSIYKSQASALEQYAAPNCKVLVVANPANTNALILKEFAPSIPEKNITCLTRLDHNRALGQISERLNAQVSDVKNVIIWGNHSSSQYPDVNPCTVKTGSGEKAVRELVADDAWLNGEFITTVQQRGAAIIKARKLSSALSAASSACDHIRDWVLGTPEGTWVSMGVYSDGSYNVPAGIIYSFPVTCKDGEWKIVQGLPIDEVSRQKMDATGAELVEEKALAYSCLT

SEQ ID NO: 17283 - protein, 430 aa, Zea mays
MAMLSRAASSAARRPLLPPPRLLAVRAMASSLFGHVEPAPKDPILGVTEAFLADPSSDKVNVGVGAYRDDNGQPVVLSCVREAERRIAGNLNMEYLPMGGSVKMIEESLKLAYGEDSDFIKDKRIAAVQALSGTGACRLFADFQKRFLPDSQIYIPTPTWSNHHNIWRDAQVPQKTFTYYHPESRGLDFSGLMNEIKNAPDGSFFLLHACAHNPTGVDPTEEQWREISHQFKVKKHFPFFDMAYQGFASGDPERDAKAIRIFLEDGHQIGCAQSYAKNMGLYGQRAGCLSILCEDEMQAVAVKSQLQQIARPMYSNPPVHGALVVSIILSDPELKSLWLKEVKGMADRIIGMRKALKENLEKLGSPLSWDHITNQIGMFCYSGMTPEQVDRLTNEYHIYMTRNGRISMAGVTTGNVGYLANAIHEVTKPN

SEQ ID NO: 17284 - protein, 381 aa, Brassica napus
MQIFVKTLTGKTITLEVESSDTIDNVKAKIQDKEGIPPDQQRLIFAGKQLEDGRTLADYNIQKESTLHLVLRLRGGMQIFVKTLTGKTITLEVESSDTIDNVKAKIQDKEGIPPDQQRLIFAGKQLEDGRTLADYNIQKESTLHLVLRLRGGMQIFVKTLTGKTITLEVESSDTIDNVKAKIQDKEGIPPDQQRLIFAGKQLEDGRTLADYNIQKESTLHLVLRLRGGMQIFVKTLTGKTITLEVESSDTIDNVKAKIQDKEGIPPDQQRLIFAGKQLEDGRTLADYNIQKESTLHLVLRLRGGMQIFVKTLTGKTITLEVESSDTIDNVKAKIQDKEGIPPDQQRLIFAGKQLEDGRTLADYNIQKESTLHLVLRLRGGF

SEQ ID NO: 17285 - protein, 298 aa, Streptomyces sp. WA46
MIDVAVAEPGPGQVRIEVRAVGVNPFDHKMYSGAFGTDPANLPMRLGAEAAGVVTAVGADATGPAGPIQIGDEVIAYRAPGAYAAELIVPASSVVPKPAALSWEQAGGLMVTGVTAVHVLEAIGLREKDSVLIHGAAGGVGLMAVQLAVERGATVLGTASPAKHDVLRDLGAIPIAYGPGLADRVRAAAPQGVHAAADLVGTDEAVDVSVELVADRSRIASVAGFERGARAGIKLLGGGPGADPGTEIRTAARLQLTEAAEAGRLRVLIAASHPLREAAAAHRQIMTGHTTGKIVLVP

SEQ ID NO: 17286 - protein, 327 aa, Nostoc punctiforme PCC 73102
MPTVNTQTENLNTRFTADMVRTYLREIGRVPLLTREQEIVYGKQVQQMMTLIDAKEVLAKKLHREPDMSEWADVVQQSETEVQQTVAQGKRAKQKMIEANLRLVVAIAKKYQKRNMEFLDLIQEGTLGLERGVEKFDPMRGYKFSTYAYWWIRQAITRAIAQQGRTIRLPIHITEKLNKIKKVQRELAQTLGRSPTPAEIAKELELEPAQIREYLNMARQPVSLDVKVGDNQDTELQEMLEDSGPSPEYYTNQEFLRQDLNNLLAELTPQQREVLALRFGLEDGNEMSLAKVGERLNLSRERVRQLEHQALAHLRRRRANVQEYVAS

SEQ ID NO: 17287 - protein, 447 aa, Mycosphaerella graminicola
MREIVHLQTGQCGNQIGAAFWQTISGEHGLDGSGVYNGTSDLQLERMNVYFNEASGNKYVPRAVLVDLEPGTMDAVRAGPFGQLFRPDNFVFGQSGAGNNWAKGHYTEGAELVDQVLDVVRREAEGCDCLQGFQITHSLGGGTGAGMGTLLISKIREEFPDRMMATFSVMPSPKVSDTVVEPYNATLSVHQLVENSDATFCIDNEALYDICMRTLKLNNPSYGDLNHLVSAVMSGVTTCLRFPGQLNSDLRKLAVNMVPFPRLHFFMVGFAPLTSRGAHSFRAVTVPELTQQIFDPKNMMAASDFRNGRYLTCSAIYRGKVSMKEVEDQIRNVQNKNTAYFVEWIPNNVQTALCSIPPRGLKMSSTFVGNSTSIQELFKRVGDQFSAMFRRKAFLHWYTGEGMDEMEFTEAESNMNDLVSEYQQYQEASVSDAEEEYDEEAPLEGEE

SEQ ID NO: 17288 - protein, 411 aa, Nostoc punctiforme PCC 73102
MPGGVSSPVRAFKSVGGQPIVFDRVKGAYIWDVDGNQYIDYVGTWGPAICGHAHPEVIAALHEALEKGTSFGAPSTLENVLAEMVIDAVPSIEMVRFVNSGTEACMGVLRLMRAFTNRDKIIKFEGCYHGHADTFLVKAGSGVATLGLPDSPGVPKAATSTTLTAPYNDLESVKALFEENRDEIAGVILEPVVGNAGFIAPDAGFLEGLRELTHEYGALLVFDEVMTGFRIAYGGAQEKFGVTPDLTTLGKVIGGGLPVGAYGGRRDIMSMVAPAGPVYQAGTLSGNPLAMTAGIKTLELLQKPGTYDYLERITKKLADGLLQIAKETGHTACGGQISAMFGLFFTSGPVHNYEDAKKSDTAKFGRFHRGMLERGVYLAPSQFEAGFTSFAHTEEDIDQTLAIARDVMSSL

SEQ ID NO: 17289 - protein, 242 aa, Triticum aestivum
MAKTCFKTEHPLERRQAESARIREKYADRIPVIVEKADKSDVPEIETKIGDTIEQVCTKKQAGTGPEFPGYRRPTRPRDFPPVASAERLPIQSPLDSAGPIASINLVPGCALPSVAAPFRRLEMAKTCFKTEHPLERRQAESARIREKYADRIPVIVEKADKSDVPEIDKKKYLVPADLTVGQFVYVVRKRIKLSPEKAIFVFVNSTLPPTASLMSAIYEENKDEDGFLYMTYSGENTFGSA

SEQ ID NO: 17290 - protein, 290 aa, Streptococcus pneumoniae R6
MKVINQTLLEKVIIERSRSSHKGDYGRLLLLGGTYPYGGAIIMAALAAVKNGAGLVTVGTDRENIPALHSHLPEAMAFALQDKQLLKEQLEKAEVVLLGPGLGDNAFGEDLVKQVFAGLKQNQILIVDGGALTILARTSLSFPSSQLILTPHQKEWEKLSGITIEKQKEDTTASALTSFPKGTILVEKGPATRVWQAGQSDYYQLQVGGPYQATGGMGDTLAGMIAGFVGQFRQASLYERVAVATHLHSAIAQELSQENYVVLPTEISRYLPKIMKIICQQERVSKDKLV

SEQ ID NO: 17291 - protein, 1273 aa, Magnaporthe grisea 70-15
MPSMLLTWLLLLLGSCLAAEFRVHDKTFKPDYVLVATAQNITINCQTRYSIVFNGTSPGPLLTFHENQTTWVRVYNRIKDQNVTVHWHGLSQRTAPFSDGTPLVSQWPVAPDNFFDYEIRPDIGSAGTYFYHSHVEFQAVTAHGALIVEDAVKPPYEYDEDVVVGLGEYYPKTDRQILDGLLAKPFRWSGEPEAILFAGRSGNKSFTEASHDSCKPDLIKVQPDKTYRVRFIGGTAMSLVVMAFEGHDMTIIEADGSYTKPVKTDRMQVGSGQRYSILLRTKSVQEVASTNKTSYWIQYETRGRPTNVTGWALLQYEMPGQPEAMLPATLPSKPVATIPDDPSTWMEFTLQPLQDSVREQFPKLSEVTRTIYIDVKQVVVDGGVVNGTVKGSIEWAQNSLVWQEDSQAAKNRPPVLVGILTTGMSPSIEAALANQNWDPTTQTFPAAVGETLDIVWQGNSGELGGWDVHPMHAHGTHFWDLGSGNGTYDAPAVDAKYYADGNYVPAVRDTTMLYRYAAKGEKNHTAGWRAWRVRVTEDDIGAWVMHCHVLQHMMMGMQTVLGFGRAPGPLGFLGGHRTKTTAAILQKQSNVSEPWALSTGNVKDDIAMDTMHLAPSFAAEVGSKAAGSSEKEQNAKDTSSEARFSEHSHQAQNPRTSCPRPHKLVLCFDGTGNKFRGDESDSNILKIFRMLDRTARDQSGIGTYVVSNNLSHGSIRARFKANMQKAKDSAIGSSFDQHVVGGYRFLMRFYSPGDEIYIFGFSRGAYIARFLAEMLDYVGLLSHGNEEMVAFAWRAFAQWQCRRGAGGEAERDDAEPYTEQQAQIDAEPDEKKKAKLRKNMSNIRKAMDKDRAKVDELYSFLKGFRETFSRPVRRIRFLGLFDTVNSVPRFETAWMERHGSKFPYTARTSAKVIRHAVSIDERRAKFRQDLIYQSRSEDDGDKKEGRLEQKLHHMRDKYRCHHNKLRNVPDPKTSLDGEADPPRGRPISQNLDEQDKNESERPLSSGLSLEQPERYRIRSRSRSRSLAPSMRHHDFANIPDASDIEDGFDSEDETDQDIDEVWFSGGHGDVGGGWSVRPGEGNASHVPLAWMVREAMRAGLSFDMDKVVSMGCAGSNCQKPPQRVPNIRVNSIPQSSITLTDTETAVGHGEHHIAPIHDSLAFNGGLTHMATLSWRLMEWLPFRRMDLQPDGSWQPIRWPLPRGETRDMPADARIHGSVIKRMQADENYRPGNLIVGGGGRGLRTAPKEYGMGEWVCVGDEGDEIGEVWVKKLA

SEQ ID NO: 17292 - protein, 269 aa, Escherichia coli
DAEFDENGVEVFDEKALVEEEPSDNDLAEEELLSQGATQRVLDATQLYLGEIGYSPLLTAEEEVYFARRALRGDVASRRRMIESNLRLVVKIARRYGNRGLALLDLIEEGNLGLIRAVEKFDPERGFRFSTYATWWIRQTIERAIMNQTRTIRLPIHIVKELNVYLRTARELSHKLDHEPSAEEIAEQLDKPVDDVSRMLRLNERITSVDTPLGGDSEKALLDILADEKENGPEDTTQDDDMKQSIVKWLFELNAKQREVLARRFGLLG

SEQ ID NO: 17293 - protein, 544 aa, Staphylococcus aureus subsp. aureus MRSA252
MKGIELLNNPFLNKGTAFTNEERKQLGLEGLLPANVRTLEQQAEQCYEQFKAKQTDFEKRLFLMAIFNRNRTLFYKLTSEHLVEFMPIIYDPVIAQSIEQYNENFSRPQDAVFLSVDRQDQIEQELRNVANGRDIRLIVVTDAEGILGIGDWGVDGVDIAIGKLIVYTAAAGINPAQVLPVSLDVGTNNEQLLNDELYLGNRHKRVDDETYYTFVDKFVSAVRKEYPNALLHWEDFGRGHAKNILDKYEDTLPTFNDDIQGTGIVTLAGVLGALNISKVDYTNQTFLVYGGGTAGMGITNILKDELIKQDVSEDKANQHFYIMDKQGLLFDDMDDLTEAQQVFAKNRNEFSNTVNWKNLKEVIENIKPTVLIGTSTQTGAFTEDAVKEMLKHTERPMIFPLSNPTKLAEATAQDLLKWTNGKALIGTGIPYNDIEYNGVNYSIGQANNALMYPGLGLGLIASKAKKVNQQILSAASHALGGMVNPDEPGAAVLPPVEKIHQCSRAIAKAVAQSVIDQGLNAETIDDIDEAIEAEIWYPEYKSYI

SEQ ID NO: 17294 - protein, 537 aa, Lactobacillus plantarum WCFS1
MTKYIFVTGGVVSSIGKGIVAASLGRLLKNRGLKVTIQKFDPYINVDPGTMSPYQHGEVFVTDDGTETDLDLGHYERFIDINLNKYSNVTTGKIYSEVLQKERRGDYLGATVQVIPHITNAIKEKIMRAGTTTDSDIVITEIGGTVGDIESLPFIEALRQMKSDLGSDNVFYIHTTLIPYLRAAGEMKTKPTQHSVKELRSYGIQPNMLVVRTEQPITREMRNKIASFCDVEPEAVIESLDVKTIYSIPLNVQKQNMDQIVLDHFDVQAPKADMSEWIDLEHHVQNLSRTIKIALVGKYVALQDAYISVTEALKHAGYTDDADIDLKKISAEDVTPENVEELLGDADGILVPGGFGDRGIEGKITAIKYARENDVPFLGICLGMQMASVEFARNVLGLKDANSAEIDPKTPDNIIDLMADQEDVEDMGGTQRLGAYPCKLKPGTVAAKAYHNEEVVMERHRHRYEFNNKYREAMAAKGMVFSGTSPDNRLVEVIELPKKRFFVASQYHPEFLSRPNRPEGLFKAFIDAANQTGKVKA

SEQ ID NO: 17295 - protein, 299 aa, Dianthus caryophyllus
FIVLCGATHLINLWTFRIHTKTVEIVMTTAKLLTAVVSCVTALMLVHIIPDLLSVKTRELFLKNKAAQLDREMGLIRTQEETGRHVRMLTHEIRSTLDRHTILKTTLVELGRTLALEECALWMPTRTGLELQLAYTLRQQYPVDYTVPIQLPVITQVFSTNRAVKISPNSPVARIRPVMGKYMPGEVVAVRVPLLHLSNFQINDWPELSTKRYALMVLMLPSDSARQWHVHELELVEVVADQVAVALSHAAILEESMRAQQQLMEQNVALDLARREAETAIRARNDFLAVMNHEMRTPM

SEQ ID NO: 17296 - protein, 258 aa, Escherichia coli
FDEKALVEEEPSDNDLAEEELLSQGATQRVLDATQLYLGEIGYSPLLTAEEEVYFARRALRGDVASRRRMIESNLRLVVKIARRYGNRGLALLDLIEEGNLGLIRAVEKFDPERGFRFSTYATWWIRQTIERAIMNQTRTIRLPIHIVKELNVYLRTARELSHKLDHEPSAEEIAEQLDKPVDDVSRMLRLNERITSVDTPLGGDSEKALLDILADEKENGPEDTTQDDDMKQSIVKWLFELNAKQREVLARRFGLLG

SEQ ID NO: 17297 - protein, 139 aa, Glycine max
  misc_feature (40)..(40): Xaa can be any naturally occurring amino acid
  misc_feature (91)..(91): Xaa can be any naturally occurring amino acid
  misc_feature (109)..(109): Xaa can be any naturally occurring amino acid
  unsure (1)..(139): unsure at all Xaa locations
LDRRDYDFVGEKKDEENKPHPQAEAIATEFHTVTVSDHGXNQRRLLDKLYRSDSRSSSSCEEEGEDGGKREKKKKEKKGLKERIEEKIEGXHHDDQDEDTGDPAEKADXLMKHAHAAEQTGVLDEITEKLPGHKPTDEA

SEQ ID NO: 17298 - protein, 314 aa, Arabidopsis thaliana
MGVREKDPLAQLSLPPGFRFYPTDEELLVQYLCRKVAGYHFSLQVIGDIDLYKFDPWDLPSKQTCFTFVGEYNCNYLGKALFGEKEWYFFSPRDRKYPNGSRPNRVAGSGYWKATGTDKIITADGRRVGIKKALVFYAGKAPKGTKTNWIMHEYRLIEHSRSHGSSKLDDWVLCRIYKKTSGSQRQAVTPVQACREEHSTNGSSSSSSSQLDDVLDSFPEIKDQSFNLPRMNSLRTILNGNFDWASLAGLNPIPELAPTNGLPSYGGYDAFRAAEGEAESGHVNRQQNSSGLTQSFGYSSSGFGVSGQTFEFRQ

SEQ ID NO: 17299 - protein, 259 aa, Escherichia coli
EVFDEKALVEEEPSDNDLAEEELLSQGATQRVLDATQLYLGEIGYSPLLTAEEVYFARRALRGDVASRRRMIESNLRLVVKIARRYGNRGLALLDLIEEGNLGLIRAVEKFDPERGFRFSTYATWWIRQTIERAIMNQTRTIRLPIHIVKELNVYLRTARELSHKLDHEPSAEEIAEQLDKPVDDVSRMLRLNERITSVDTPLGGDSEKALLDILADEKENGPEDTTQDDDMKQSIVKWLFELNAKQREVLARRFGLLG

SEQ ID NO: 17300 - protein, 475 aa, Xanthomonas campestris pv. vesicatoria str. 85-10
MSSVSIDGAPDAGENTRFIILISCVATIGGFLFGFDSGVINGTVDGLKQTFQSTAAETGFEVASMLLGCAIGAFFAGRLADRWGRRAVLIISAALFLLSAIGAGASHSSGFFIFARVMGGFAVGAASVISPAYIAEVASARYRGRLATMQQIAIISGLFCAFLSNYLLANAAGASTEPLWAGQAAWRWMFWMQAVPSILFLLLLLVIPESPRYLVVKGRREQALVVLKRLYGNAAAQTKLGEISASMAADQHKPKFSDLINKATGKIRPIVWIGIGLAVFQQLVGINVVFYYGAVLWQAVGFSEQDALLINVLSGGLSIGACLVTVMLVDKIGRKPLLWIGSAGMAVSLALVTYAFATASLDPNGKLAMSDAMGMLALVAANVYVVFFNASWGPVMWVMLGEMFPNQIRGSGLAIAGAAQWTSNFAITVSFPILLGSIGLAGAYGIYTVAAFISVFFVLKYVYETKGKELEQMEG

SEQ ID NO: 17301 - protein, 330 aa, Oryza sativa (japonica cultivar-group)
MAMVFLQFGFAGLFLISVASLRQGMSHYVLVVYRNAVAAVVMAPFALWFERPVLDQNFFYMGAKNTSASFSSALTNILPAVTFVNAIILRMERISIKERRSQAKIAGTLITVGGAMLMILFKGPVINFPWTKNANHNISDSSDHNNGHWLMGIFMILLSCFCWSAFFILQSYTLRGYPAELSLTTLICAMGVAQSGAVALVMERDIKAWLIGFDMRLFTAVYSGIMCSGVAYYVQGMVIKERGPVFVTAFSPLCMIIVTILGSFILCEVVTLGRVIGAIIIVVGLYALIWGKNKDHGNQVDQDDNFEKQKTFELPLSTTNVNEARSPNHI

SEQ ID NO: 17302 - protein, 266 aa, Arabidopsis thaliana
MLAIFHEAFAHPPEELNSPASEKCSKQPKLPEETLNDFLLRYPLNTFSMSFGQAAVLAYVRPSASFSIHQRLFCGFDDIYCLFFGSLNNLCQLNKQYGLTKTTNEAMFVIEAYRTLRDRGPYPADQVVKDLDGSFSFVVYDSKAGSVFTALVLIHKISPRLLELNFNGSDGGVKLYWGIAADGSVVISDDLDVIKEGCAKSFAPFPTGCMFHSEGGLMSFEHPMNKIKAMPRVDSEGVLCGANFKVDVYNRVNSIPRRGSEANWSL

SEQ ID NO: 17303 - protein, 419 aa, Chromobacterium violaceum ATCC 12472 [sequence omitted]

SEQ ID NO: 17304 - protein, 512 aa, Arabidopsis thaliana
MDHSSNRFGNNGVESILPNYKLGKTLGIGSFGKVKIAEHVVTGHKVAIKILNRRKIKNMEMEEKVRREIKILRLFMHPHIIRQYEVIETTSDIYVVMEYVKSGELFDYIVEKGRLQEDEARNFFQQIISGVEYCHRNMVVHRDLKPENLLLDSRCNIKIADFGLSNVMRDGHFLKTSCGSPNYAAPEVISGKLYAGPEVDVWSCGVILYALLCGTLPFDDENIPNLFKKIKGGIYTLPSHLSSEARDLIPRMLIVDPVKRITIPEIRQHRWFQTHLPRYLAVSPPDTVEQAKKINEEIVQEVVNMGFDRNQVLESLRNRTQNDATVTYYLLLDNRFRVPSGYLESEFQETTDSGSNPMRTPEAGASPVGHWIPAHVDHYGLGARSQVPVDRKWALGLQSHAHPREIMNEVLKALQELNVCWKKIGHYNMKCRWVPGLADGQNTMVNNQLHFRDESSIIEDDCAMTSPTVIKFELQLYKAREEKYLLDIQRVNGPQFLFLDLCAAFLTELRVI

SEQ ID NO: 17305 - protein, 364 aa, Mycoplasma mycoides subsp. mycoides SC str. PG1
MSKKMNSTPKKDGFWMPGEWEKHDQCWMIWPERSDNWRLGAKPAQRVFVNVANAIAKYEKVTMLVSHQQFENARNLLDQNVRVIEMSNDDSWMRDVGPTIVKNKDGEIRGVDWVFNAWEGFKGGLYFPWDKDDAIARKVCEICNIDYYRTDFVLEGGSIHTDGDGTLYTTEECLLNENRNPDLTKEQIEENLKEYCGVEKVIWLPLGVYNDETNGHVDNLLNVVSPGHVVLTWTDDTTDPQYERSKLAYDILTNTLDAKGRKIKVTKLHQPGPLFITKEEAEGIDVCDTMSREPEQRMPASYANYYIANNAIILPIFGDKYDDLAVKTLQSVYPNHKIETVMAREILLGGGNIHCITQQQPTTK

SEQ ID NO: 17306 - protein, 75 aa, Glycine max
  misc_feature (37)..(37): Xaa can be any naturally occurring amino acid
  misc_feature (57)..(57): Xaa can be any naturally occurring amino acid
  unsure (1)..(75): unsure at all Xaa locations
IYRIESYDVTSIPACIPMYLMSRLIKSLAFNWLISIXGSDKIFGRCVCFLNAPLKEXFHQETCRMIKALHKYDCL

SEQ ID NO: 17307 - protein, 331 aa, Prochlorococcus marinus str. NATL2A
MAKLFYDSDADLGLLQDKTVAIIGYGSQGHAHALNLKDSGIKVVVGLYEGSRSASKATSDGLEVLSVAEASERADWIMILLPDEFQKDVYSKEIAPHLKAGKILSFAHGFNIRFELIKPPEFVDVVMIAPKGPGHTVRWEYQNGQGVPALFAIEQDSSGNARALAMAYAKGIGGTRAGILETNFKEETETDLFGEQAVLCGGLSELVKAGFETLVEAGYQPELAYFECLHEVKLIVDLMVKGGLTAMRDSISNTAEYGDYVSGPRLITKETKEEMKNILADIQDGTFAKNFVKECDEGKPEMKRIRKKDSELPIEKVGKTLRSMFSWLKSD

SEQ ID NO: 17308 - protein, 736 aa, Vibrio cholerae O1 biovar eltor str. N16961
MVMAIRSSLKKKSILALTIYLAFFLAIVGTLSYWGLEVPFRKELKNNLALRAELLATQIREPLNNSIGVLQSLTSIGKSAADKEEQERMLRSLFSVVGGVIISGGLWPEPNLSATDPSLRYDSLFFNKATDGQVDQLSSWNNPKAGGYDRESWYLAAEREAEGLYFWSPVYVDPYTRVEMITVSTPYYRNGQFAGVATVDLSLESLIQFVAATAEQYNLGVNLKDAFGVEVVSHNFRTYDNALVSYYSFGEFNWQIEVVNANQHVDEIIFDLIINIEKGLMPILLLCVMVGYFLISHYWIRPIVLIAKKVSESREGEIIDIRYKSQDEIRHLIDTFNQKTIYLEAEKVKAQASTKAKSAFLATLSHEIRTPMNGVLGTAQILLKDELTSKQRQHLTSLYESGEHMMSLLNEILDYSKIEQGKFELDHSAFPLKSIIGSIKSIYSSLCVEKGLKFQLNSEITDGRWYYGDKARLRQIIFNLLSNAVKFTEAGFVAIGLSEESCDEENYLIIKVQDTGIGIAQESLGRIFRPFEQAESHTTRRFGGTGLGLAIVKQIAELMNGTVLVQSEVGQGSCFKVRVKLAITEPVTEDVKPTKAKTYPGLRVLIVEDNRTNIMILEAFMRNKGFECHSVMDGVQAITALQESSFDLVLMDNHMPLKDGIQATREIRQLPLPQAKILLFGCTADVFKDTRDKMLSAGADDIIAKPIAEHELDMALEQHSERLYQFHREPSLPSVE

SEQ ID NO: 17309 - protein, 457 aa, Salmonella typhimurium
MMDSQQHGEQLKRGLKNRHIQLIALGGAIGTGLFLGSASVIQSAGPGIILGYAIAGFIAFLIMRQLGEMVVEEPVAGSFSHFAYKYWGGFAGFASGWNYWVLYVLVAMAELTAVGKYIQFWYPEIPTWASAAAFFVIINAINLTNVKVFGEMEFWFAIIKVIAVIAMILFGAWLLFSDTAGPQATVRNLWEQGGFLPHGWTGLVMMMAIIMFSFGGLELVGITAAEADNPEQSIPKATNQVIYRILIFYIGSLAVLLSLLPWTRVTADTSPFVLIFHELGDTFVANALNIVVLTAALSVYNSCVYCNSRMLFGLAQQGNAPKALLNVDKRGVPVSSILVSAVVTALCVLLNYLAPESAFGLLMALVVSALVINWAMISLAHMMFRRAKQQQGVKTRFPALFYPFGNVLCLLFMAAVLIIMLMTPGMAISVWLIPVWLLILGVGYLCKEKTAKTVKAH

SEQ ID NO: 17310 - protein, 310 aa, Azospirillum brasilense
MWNYTDKVKEHFFNPKNAGALDEADDVGEVGSITCGDALKLMMKVNPDQPGHRDANFQTFGCGSAIASLRSALTEMIIGKTVDEALGQVTNRDIAEYLGGLPPEKMDCSVMGAEALPAAIANFKGEGLVDDHEEGELVCKCFGIDAAMIERAVTVNSLTTLEEVTHYTKAGGSCQTCHEKIEEVLEAVLAKTGAVGPAQAPSPTPPARSGWTPSSRWPRRPRHAPAKLTNVQRMQKIMFAIEDWRPQIQRDGGDVELVDIDGKDIYVRLTGACSGCSQSAGTMMGVQAKLVEALGEFVRVKPASLLPVGA

SEQ ID NO: 17311 - protein, 806 aa, Zea mays
  misc_feature (664)..(664): Xaa can be any naturally occurring amino acid
  unsure (1)..(806): unsure at all Xaa locations
MDDPSSASNKHKRKRGRKPKASPPFPDRSSPSPSAAPAPAGRRGRKPRRHEAPADADATRPPSPPRRGEPKPVANGGDVVAVAESGPASWDEVVRVVPCMDAVVKVFCVHTEPNFSLPWQRKRQYSSSSSGFIIGGRRVLTNAHSVEHYTQVKLKKRGSDTKYLATVLAIGTECDIALLTVNDDEFWEEVSPIEFGTLPALQDVVTVVGYPIGGDTISVTSGVVSRIEILSYVHGSTELLGLQIDAAINSGNSGGPAFNDRGKCVGIAFQSLKHEDAENIGYVIPTPVITHFIEDYKKSGEYTDYYDSLACPSLLTFFQAAIEYIHSLSRAQPARSLNGAGLCPASRSLSTQAATTSSTPQPPPPPPPPEKTHFGGLKDEDRIFTNLYGLHDPFLKGAMKRGDWYRTKDLVIKGADWIVNEMKKSGLRGRGGAGFPSGLKWSFMPKVSDGRPSYLVVNADESEPGTCKDREIMRQDPHKLLEGCLIAGVGMRASAAYIYIRGEYVNERLNLEKARQEAYAAGLLGKNACGSGYDFDVHIHFGAGAYICGEETALLESLEGKQGKPRLKPPFPANAGLYGCPTTVTNVETVAVSPTILRRGPEWFASFGRKNNSGTKLYCISGHVNKPCTVEEEMSIPLKELLERHCGGVRGGWDNLLAVIPGGXSSVPLLPKHICDDVLMDYDALKAVQSGLGTAAVIVMDKSTDVVDAIARLSYFYKHESCGQCTPCREGTPWLWMIMERLKVGDAKLEEIDMLQEVTKQIEGHTICALGDAAAWPVQGLIRHFRPELERRIRERAERELLAASA

SEQ ID NO: 17312 - protein, 510 aa, Oryza sativa
  misc_feature (309)..(309): Xaa can be any naturally occurring amino acid
  unsure (1)..(510): unsure at all Xaa locations
MGKLLDLKRLMSVPKERNRRRRQRQIRARNGSIDSVAKRKGSLCQQVANSDGERRTRYSGPNLPEDIWCHIHSLMPFKDAARAACVSHAFRRSWQHRPNLIFCIGTLGLDFINKIDRIIKNHSGIGIKSLQLEYDTFCNARRSASISYHLNNWLQIAVTPWIEELILTLSLSSYNVDYNFPCSLLSDGRGSSLRHLYLGSCFFHPTVNLELRNLTRLHLVTVHITGDEFGCLLSNSYALERLELKYCYGIICLKIPCLLQRLSHLEVFECRMLQAIENKAPNLCSFDLGARQVRLLLGESLQMKTLSLXYPSAVYYARAELPSNVPNLEILTICSDHEMVDTPMLPSKFFYLKCLTIDLAWRLSPAYDYFSLISFLDASPSLETFCLEDRMENELIIGDMSHMRQMLEHRHDNLQSVEIIGFCYTKSLIELTCHILDNTTSLKHLKLDTTRDVFSCSTGKHDKCFHMGKDMLTEAKKAVLAIETYIEPKVPSTVMLNVVKPCNRCHVAES

SEQ ID NO: 17313 - protein, 138 aa, Arabidopsis thaliana
  misc_feature (23)..(23): Xaa can be any naturally occurring amino acid
  misc_feature (40)..(40): Xaa can be any naturally occurring amino acid
  misc_feature (59)..(59): Xaa can be any naturally occurring amino acid
  misc_feature (86)..(86): Xaa can be any naturally occurring amino acid
  unsure (1)..(138): unsure at all Xaa locations
MSVIDRSRAFARYAKRLVVKVGXTAVVAGKGRRLSFGRCXDAILRQLAQLSLAGFEVIXVSSGPGGPGRRRIGYRRLVYGIFPELXESQRGRDGKPICDVGQSSLMRCCVSMFGQSDETVAQMLVSHTCTSDRACRDQ

SEQ ID NO: 17314 - protein, 324 aa, Solanum tuberosum
MVFSSFPVYLDHPNLHQLQQPDGHQQGNTGLENPTLQPPPMQVGASPGSIRPGSMVDRARLAKIPLPEAGLKCPRCDSTNTKFCYFNNYNLSQPRHFCKTCRRYWTRGGALRSVPVGGGCRRNKRSKSNNNNNSSKTAGSNVNTNTIASGTSTSASPSSCSTEIMNGRHHFSHEQPPQLTPLMAAFQNLNHHYGGFQPPPLVSTHHGNGTGALGHHHEMGFQIGSSTNTNNLPVPPGGGSDHQWRLPSLAANTNLYPFQHGTDQGIHESSSVNNNNINAHDDQGLNSTKQFLGTMENNTNQYWGGNAWTGFSGLNSSSSASHLL

SEQ ID NO: 17315 - protein, 496 aa, Brassica juncea
MDPYKYRPASSYNSPFFTTNSGAPVWNNNSSMTVGPRGPILLEDYHLVEKLANFDRERIPERVVHARGASAKGFFEVTHDISNLTCADFLRAPGVQTPVIVRFSTVIHERGSPETLRDPRGFAVKFYTREGNFDLVGNNFPVFFIRDGMKFPDMVHALKPNPKSHIQENWRVLDFFSHHPESLNMFTFLFDDIGIPQDYRHMEGSGVNTYMLINKSGKAHYVKFHWKPTCGVKSLLEEDAVRVGGTNHSHATQDLYDSIAAGNYPEWKLFIQVIDPADEDKFDFDPLDVTKTWPENLLPLQPVGRMVLNKNIDNFFAENEQLAFCPAIIVPGIHYSDDKLLQTRVFSYADTQRHRLGPNYLQLPVNAPKCAHHNNHHEGFMNFMHRDEEVNYFPSRYDPVRHAEKYPTPPAVCSGKRERCVIEKENNFKEPGERYRSFTPESFDFRQERFIRRWIEALSDPRITHEIRSIWISYWSQADKTLGQKLASRLNVRPSI

SEQ ID NO: 17316 - protein, 198 aa, Zinnia elegans
MAAAATRFIKCVTVGDGAVGKTCMLISYTSNTFPTDYVPTVFDNFSANVVVGDSTVNLGLWDTAGQEDYNRLRPLSYRGADVFLLAFSLISRPSYENISKKWISELRHYAPDVPIVLVGTKLDLREDKQYLSDHPNVTAITTSQGEELKKSIGAAVYIECSSKTQQNVKAVFDAAIRVVLQPPKLKKKRSKQRLCVYL

SEQ ID NO: 17317 - protein, 492 aa, Brassica juncea
MDPYKYRPASSYNSPFFTTNSGAPVWNNNSSMTVGPRGPILLEDYHLVEKLANFDRERIPERVVHARGASAKGFFEVTHDISNLTCADFLRAPGVQTPVIVRFSTVIHERGSPETLRDPRGFAVKFYTREGNFDLVGNNFPVFFIRDGMKFPDMVHALKPNPKSHIQENWRVLDFFSHHPESLNMFTFLFDDIGIPQDYRHMEGSGVNTYMLINKAGKAHYVKFHWKPTCGVKSLLEEDAIRVGGTNHSHATQDLYDSIAAGNYPEWKLFVQIIDPADEDKFDFDPLDVTKTWPEDILPLQPVGRMVLNKNIDNFFAENEQLAFCPAIIVPGIHYSDDKLLQTRVFSYADTQRHRLGPNYLQLPVNAPKCAHHNNHHEGFMNFMHRDEEVNYFPSRYDPVRHAEKYPTPPAVCSGKRERCIIEKENNFKEPGERYRSFTPERQERFIGRWIDALSDPRITHEIRSIWISYWSQADKSLGQKLASRLNVRPNI

SEQ ID NO: 17318 - protein, 197 aa, Zinnia elegans
MSASRFIKCVTVGDGAVGKTCLLISYTSNTFPTDYVPTVFDNFSANVVVNGSTVNLGLWDTAGQEDYNRLRPLSYRGADVFILAFSLISKASYENVSKKWIPELKHYAPGVPIVLVGTKLDLRDDKQFFVDHPGATPITTAQGEELKKTIGAPEYIECSSKTQLNVKQVFDAAIKVVLAPPKAKKKKGKAQKACSIL

SEQ ID NO: 17319 - protein, 492 aa, Brassica juncea
MDPYKYRPASSYNSPFFTTNSGAPVWNNNSSMTVGPRGPILLEDYHLVEKLANFDRERIPERVVHARGASAKGFFEVTHDISNLTCADFLRAPGVQTPVIVRFSTVIHERGSPETLRDPRGFAVKFYTREGNFDLVGNNFPVFFIRDGMKFPDMVHALKPNPKSHIQENWRVLDFFSHHPESLNMFTFLFDDIGIPQDYRHMEGSGVNTYMLINKSGKAHYVKFHWKPTCGVKSLLEEDAVRVGGTNHSHATQDLYDSIAAGNYPEWKLFIQVIDPADEDKFDFDPLDVTKTWPENLLPLQPVGRMVLNKNIDNFFAENEQLAFCPAIIVPGIHYSDDKLLQTRVFSYADTQRHRLGPNYLQLPVNAPKCAHHNNHHEGFMNFMHRDEEVNYFPSRYDPVRHAEKYPTPPAVCSGKRERCVIEKENNFKEPGERYRSFTPERQERFIRRWIEALSDPRITHEIRSIWISYWSQADKTLGQKLASRLNVRPSI

SEQ ID NO: 17320 - protein, 766 aa, Zea mays
MAAAAIPSKLATQVLIPVAAAVGIAFAVVQWVLVSKVRVTPERRADGGAVKSGPSDYLIEEEEGLNDHNVVVKCAEIQTAISEGATSFLFTEYKYVGLFMGIFAILIFLFLGSVEGFSTKSQPCHYIKDQTCKPALANAIFSTIAFVLGAVTSLVSGFLGMKIATYANARTTLEARKGVGKAFITAFRAGAVMGFLLAASGLLVLYIAINLFGIYYGDDWEGLFEAITGYGLGGSSMALFGRVGGGIYTKAADVGADLVGKVERNIPEDDPRNPAVIADNVGDNVGDIAGMGSDLFGSYAESSCAALVVASISSFGINHEFTPMVYPLLVSSVGIIACLITTLFATDFFEIKAVDEIEPALKKQLIISTIVMTIGIALISWLGLPYTFTIFNFGVQKTVQSWQLFLCVAVGLWAGLVIGFVTEYYTSNAYSPVQDVADSCRTGAATNVIFGLALGYKSVIIPIFAIAFSIFLSFSLAAMYGVAVAALGMLSTIATGLAIDAYGPISDNAGGIAEMAGMSHRIRERTDALDAAGNTTAAIGKGFAIGSAALVSLALFGAFVSRAAISTVDVLTPKVFIGLIVGAMLPYWFSAMTMKSVGSAALKMVEEVRRQFNNIPGLMEGTTKPDYATCVKISTDASIKEMIPPGALVMLTPLIVGILFGVETLSGVLAGALVSGVQIAISASNTGGAWDNAKKYIEAGVSEHARTLGPKGSDPHKAAVIGDTIGDPLKDTSGPSLNILIKLMAVESLVFAPFFAAHGGILFKWL

SEQ ID NO: 17321 - protein, 157 aa, Apium graveolens
ILGFWILDVANNMMQGPCRALLADMSGHNHKKTRTANSYYSFFMAVGNVLGYAAGSYTDLYKVFPFTKTKACDVYCVNLKTCFIFAIILLLVLTTAAMTLVKERPLVLSHQSNADQDEEDEEEVSMPFFGQILSALGNLSRSMWMLIVVTSLNWIAW

SEQ ID NO: 17322 - protein, 492 aa, Brassica juncea
MDPYKYRPASSYNSPFFTTNFGAPVWNNNSSMTVGPRGPILLEDYHLVEKLANFDRERIPERVVHARGASAKGFFEVTHDISNLTCADFLRAPGVQTPVIVRFSTVIHERGSPETLRDPRGFAVKFYTREGNFDLVGNNFPVFFIRDGMKFPDMVHALKPNPKSHIQENWRVLDFFSHHPESLNMFTFLFDDIGIPQDYRHMEGSGVNTYMLINKSGKAHYVKFHWKPTCGVKSLLEEDAIRVGGTNHSHATQDLYDSIAAGNYPEWKLFVQIIDPADEDRFDFDPLDVTKTWPEDILPLQPVGRMVLNKNIDNFFAENEQLAFCPAIIVPGIHYSDDKLLQTRVFSYADTQRHRLGPNYLQLPVNAPKCAHHNNHHEGFMNFMHRDEEVNYFPSRYDPVRHAEKYPTPPAICSGKRERCIIEKENNFKEPGERYRSFTPERQERFIGRWIDALSDPRITHEIRSIWISYWSQADKSLGQKLANRLNVRPSI

SEQ ID NO: 17323 - protein, 372 aa, Magnaporthe grisea 70-15
MTFEKVLHKGSSANTGGIGSMLGKDREASKAAINEYFQHWDGKTAKNETSEVREARKADYATLTRQYYNLATDFYEYGWCQSFHFCRFAHGETFASAIARHEHTLAHRIGIKKDMKVLDVGCGVGGPARQMAKFTGANITGITINEYQVERATRYAELEGLSRQLQFVQGDFMSLPFEEETFDAVYAIEATVHAPVLEDVYRQVYNVLKPGGVFGLYEWVMTDAYDDNNLRHRDIRLGIEQGDGIANMQTAKTAVEAIKAAGFELLEVEDLSQSTDGGNSTRAPWYWPLDGSSWRCANTIGDVLGTFRMTPAGRTVAHAMLTVMEAVGLAPPGTKKTADSLARAADALVAGGKEGLFTPMFLMVARKPFAEE

SEQ ID NO: 17324 - protein, 465 aa, Arabidopsis thaliana
  misc_feature (415)..(415): Xaa can be any naturally occurring amino acid
  unsure (1)..(465): unsure at all Xaa locations
MQIFVKTLTGKTITLEVESSDTIDNVKAKIQDKEGIPPDQQRLIFAGKQLEDGRTLADYNIQKESTLHLVLRLRGGMQIFVKTLTGKTITLEVESSDTIDNVKAKIQDKEGIPPDQQRLIFAGKQLEDGRTLADYNIQKESTLHLVLRLRGGMQIFVKTLTGKTITLEVESSDTIDNVKAKIQDKEGIPPDQQRLIFAGKQLEDGRTLADYNIQKESTLHLVLRLRGGMQIFVKTLTGKTITLEVESSDTIDNVKAKIQDKEGIPPDQQRLIFAGKQLEDGRTLADYNIQKESTLHLVLRLRGGMQIFVKTLTGKTITLEVESSDTIDNVKAKIQDKEGIPPDQQRLIFAGKQLEDGRTLADYNIQKESTLHLVLRLRGGMQIFVKTLTGKTITLEVESSDTIDNVKAKIQDKEXVFLRTSSVSSSLESSLRMDVLWPTTTSRRSLLFTWSCVFVVVSKSRLCYA

SEQ ID NO: 17325 - protein, 315 aa, Thermosynechococcus elongatus BP-1
MDTSKDLVRTYLREIGRVPLLTHEQEVIYGKQVQQLAAMNEIREKLAAELNREPTRAEWAAAANISEGELETIIENGERAKRKMVEANLRLVVSVAKKYIKRNVDLLDLIQEGTIGMQRGVEKFDPTKGYRFSTYAYWWIRQAITRAIAEKGRTIRLPIHITEKLNKIKKAQRQLSQRLGRAATINELAAELELTPAQVREYLERARQPLSLDVRVGDNQDTELGELLEDSSISPEEFATQSLLRSDLERLMAELTPQQRHVLSLRFGLENGQPLTLAKVGELLNISRERVRQIEREALSKLRKRRGDIHEYLAS

SEQ ID NO: 17326 - protein, 79 aa, Brassica napus
MDSSLASAAAIADQRQKIEQYRHILASVLSSSPPDISQAKRFLDHMVSDEVPLVVSRQLLQTFAQDLGKLESDAQKEVA

SEQ ID NO: 17327 - protein, 739 aa, Lycopersicon esculentum
MGGFDDHVAIMGDWMPPSPSPRTFFSSLLGDDGGSRLSFDGTNETSGNLASGPQEHVGNSDGVDTAPAAISEPQPVKLSVPSDQKMNSRGGGLLERIAARAGFNAPKLNTESLRPADLRQNQGVRSPYLTIPPGLSPTTLLESPVFLSNSLVQPSPTTGKFLFSSGIDNRNSALMMEDTDKRKDNALESINSSSFSFKPVPETAPSLFPGTTSRSWLQVNPSNFSQQGFPNIEVSVHSQNSLVSHRVEATQNPTQNGTLQQSSDFPRFSAEKDVMANNVTLDSRTFQTVGSAVDHSPPLDEPQDEDIDQRGGGDPNVAGAPAEDGYNWRKYGQKQVKGSEYPRSYYKCTHPTCPVKKKVERSPEGHITEIIYKGAHNHPKPPPNRRSALGSTNSLGDLQVDGAEQGASGVNGDLGQANFHKAPGGGGGFDWRNNNLDANLGSEHCNRSAPFSAQNNTRLESGDAVDVSSNFSNDEDEDDRGTHGSVSQGYEGEGDESESKRRKLETYSADMTGATRAIREPRVVVQTTSEVDILDDGYRWRKYGQKVVKGNPNPRSYYKCTSAGCNVRKHVERASHDLKSAITTYEGKHNHDVPAARNSSHVNSGASNTHPASVTAPAQNHLHRPEAAQLQNAMARFDRQPSLGSFGLSGRPPQLGPNPGFSYGMNQQGGLSSLAMAGFHPNQNKPGEVPMHPYLGQPRPMHDMGFMFPKEEPKVEPLSDPGPTAYQQFLNSLLLGPQM

SEQ ID NO: 17328 - protein, 223 aa, Brassica napus
MSSGGYGDPSQKIDYVFKLVLIGDSGVGKSQILSRYARNEFSLDSKATIGVEFQTRTLVMDHKSVKAQIWDTAGQERYRAVTSAYYRGAVGAMLVYDVTRRQTFDHIPRWLEELRGHADKNIVIILVGNKSDLEDQRAISTENAKKFAETEGLFFLGTSALNPVNVETAFSPVLTEIFNIVNKKNLVAGEGNGDPGSLAGKKIDIVPGPAQVVPTKSGMCCNS

SEQ ID NO: 17329 - protein, 492 aa, Prunus persica
MGSSSATSNRLLLSKIATSEGHGENPPYFDGWKAYDRNPFHPTKNPEGVIQMGLAENQLSFDLIEDWIKKNPKASICTPEGVEEFKNVAIFQDYHGFPEFRKAVAMFMSKARGGRVTFDPNRVVMSGGATGANELVMFCLADPGDAFLVPSPYYPAFYRDLGWRTGVQIVPVDCDSSNNFQITKEALAAAYEKAQKNNINVKGLIITNPSNPLGTTLDRDTLESLVEFINQKNIHLVCDEIYAATVFSSPTFTCISEVIQNMNCNPNLIHIVYSLSKDMGLPGLRVGIVYSYNDDVVNIGRKMSSFGLVSSQTQHMLASMLLDEEFVARFLETSSKRLAKRHGVFTKGLEEVGINCLKSNAGLFCWMDLRRLLKDQTFDGEMVLWRVIVNEVGLNVSPGSSFKCVEPGWFRVCFANMDDETVEVALKRIRTFVRQGKKAQDQAVQVKSPKRWKSNLRLSFSSSSTRRFDQDSVNVLSPHMMSPHSPLVRAKT

SEQ ID NO: 17330 - protein, 150 aa, Thermosynechococcus elongatus BP-1
MERTFLAIKPDGVQRGLVGTIIQRFEQKGYTLVGLKLMRVSRELAEQHYGEHKDKPFFPGLVNFITSGPVVAMVWEGRGVIANARKLIGATNPLNAEPGTLRGDFAVDVGRNVIHGSDSPENAEREINLWFQTQELVPWEPALTSWVYEM

SEQ ID NO: 17331 - protein, 525 aa, Cucumis melo
MASSMAAVGVLRLPTSSSSSSSSSNGGTNRARRTSLRSLSFGASQISGDKIDFRGFGLGSRRVSGGRVAPSIVSPKAVSDSKNSQTCLDPDASRSVLGIILGGGAGTRLYPLTKKRAKAAVPLGANYRKIDIPVSNCLNSNISKIYVLTQFNSASLNRHLSRAYAVIWWLQNEGFVEVLAAQQSPENPNWFQGTADAVRQYLWLFEEQNVLEYLVLAGDHLYRMDYERFIQAHRETDADITVAALPMDEKRATAFGLMKIDEEGRIIEFAEKPKGEQLKAMKVDTTILGLDDERAKEMPYIASMGIYVISKDVMLNLLRDKFPGANDFGSEVIPGATSIGMRVQAYLYDGYWEDIGTIEAFYNANLGITKKPVPDFTFYDRSSPIYTQPRYLPPSKMLDADITDSVIGEGCVIKNCKIHHSVVGIRTCISEGAIIEDTLLMGADYYETDADRRLLAAKGSVPIGIGRNSHIKRAIIDKNARIGENVKIVNGDNVQEAARETDGYFIKSGIVTVIKDALIPSGTII

SEQ ID NO: 17332 - protein, 328 aa, Escherichia coli
MSQNTLKVHDLNEDAEFDENGVEVFDEKALVEEEPSDNDLAEEELLSQGATQRVLDATQLYLGEIGYSPLLTAEEEVYFARRALRGDVASRRRMIESNLRLVVKIARRYGNRGLALLDLIEEGNLGLIRAVEKFDPERGFRFSTYATWWIRQTIERAIMNQTRTIRLPIHIVKELNVYLRTARELSHKLDHEPSAEEIAEQLDKPVDDVSRMLRLNERITSVDTPLGGDSEKALLDILADEKENGPEDTTQDDDMKQSIVKWLFELNAKQREVLARRFGLLGYEAATLEDVGREIGLTRERVRQIQVEGLRRLREILQTQGLNIEALF

SEQ ID NO: 17333 - protein, 315 aa, Vibrio sp. Ex25
MGKLVEGVWHDVWYDTKSNGGKFVREDAGFRNWVKNEPDAEFKPESGRYHLYVSLACPWAHRTLIFRKLKGLEPHIDVTVVCPDMLSQGWQMGLPEPLFGHTRMHQIYTQAKPDYTGRVTVPVLWDKKTNTIVSNESSEIIRMFNSEFNELTGNHDDYYPEQLKHVIDEWNDFVYPNVNNGVYRCGFATTQEAYEEAFDSLFAALDKIDSHLATHRYLAGNTITEADWRLFTTLIRFDAVYVGHFKCNKLRIADYENIQGYLKELYQVEGVEETTDFYHIKRHYYFSHTGINPTQVVPKGPDLDLISPHGREIIS

SEQ ID NO: 17334 - protein, 505 aa, Vinca major
MAIVDFLAAFLIFILTQKLIQTLFRRTYRRKLPPGPKGWPVIGALPYLGTMPHTSLAYMAKKYGPVMYLKVGTNDMVVVSTPDAARAFLKTLDINFSNRPPNAGATHLAYGAQDMVFAHYGPKWKLLRKLSNLHMRGGKALEDWSNVRISELGHMLETMYESSKKGEAVVVAEMLTYAMANMIGQVILSRRVFVTKGSDSNEFKDMVVELMTSAGLFNIGDFIPSIAWMDLQGIEGGMKRLHKKFDVLLTKLLEEHKESSSKRKGKPDLLDYVLANRDNSEGERLTTTNIKALLLNLFSAGTDTSSSIIEWALSEMLRNPSILKRAQHEMVQVIGRNRRLVESDISRLPYLQAICKETFRKHPSTPLNLPRIATEACEVNGYYIPKGTRLSVNIWAIGRDPDVWENPLEFNPDRFLSGKNAKIDPRGNDFELIPFGAGRRICAGTRMGILLVEYILGTLVHSFDWNLPSSVTKLNMDESFGLALQKVVPLAALVTPRLPINAYSP

SEQ ID NO: 17335 - protein, 525 aa, Cucumis melo
MVAMDSCFVSLKSNTQLMKGNWGGLDRCENGFMVEKVRGGFNENVWIKSLKYEKKALKLTPNVAYAVTPNVSKQPMTIQVPTVPKVKANPKNVASIILGGGAGTHLFPLTKRSATPAVPAGGCYRLIDIPMSNCINSGINKIFVLTQFNSASLNRHISRTYFGNGVTFKEGFVEVLAATQTSGESGMYWFQGTADAVRQFIWVFEDAKNRNVENILILAGDHMYRMGYMDFVQNHIDRNADISISCAAVDDSRASDYGLVKLDSRGRIIQFSEKPKGANLNRMRVDTTSFGLSREESLKSPYIGSMGVYVFKTDVLLNLLKWRYPSSNDFGSEIIPAAIKDHNVQAFMFRDYWEDIGTIKTFYDANLALHGNVSKFEFYDPKTPFYTSPRFLPPTKIDRCQIVDAIISHGCFLRECSIQHSIVGERSRLDYGVELKDTIMMGADNYQTESEITGLLAEGKVPVGIGPNTKIRKCIIDKNAKIGKDVIIMNKDGVQEADRPEQGFYIRSGITIVMEKATIEDGTVI

SEQ ID NO: 17336 - protein, 518 aa, Cucumis melo
MHKISSQEKNQCFGFWGDSSLGRNGRWKQIQRNASSRNNSDSSSSSRARSLHPELLILFSCSEVNEETTTLQAPIFEAPRADPKKVASIILGGGAGTRLFPLTSQRAKPAVPIGGCYRLIDIPMSNCINSGIEKISSNAVNSFSLNRHLARIYNFGNGVNFGDGFVEVLAATQTSGETGKKWFQGTADAVRPFIWLFEDAQTKNVEHTLILSGDHLYRMDYMDFVQRHIDTNADITVSCIPMDDSRASDYGLMKIDDTGRIIHFSEKPKGSDLEEMQVDTAVLGLSDEDARKNPYIASMGVYIFRTDLLLKLLTWSYPACNDFGSEIIPAAVKDYKVQAYLFNDYWEDIGTVKSFFDANLALTEQPPKFEFYDPKTPFYTSPRSCPPSKVEKCRIVDAIISHGCFLRECTVEPLIVGVRSRLEYGVELKDTMMMGAYYYQTESEIASLLAEGKIPIGIGENTKIRNCIIDKNAKIGRNVVIANTDDVQEADRPEEGFYIRSGITVTLKNATIKDGTII

SEQ ID NO: 17337 - protein, 399 aa, Rhodococcus erythropolis
MVDTRLPVTVLSGFLGAGKTTLLNEILRNREGRRVAVIVNDMSEINIDSAEVEREISLSRSEEKLVEMTNGCICCTLREDLLSEISALAAAGRFDYLLIESSGISEPLPVAETFTFIDTDGHALADVARLDTMVTVVDGNSFLRDYTAGGRVEADAPEDERDIADLLVDQIEFADVILVSKADLISHQHLVELTAVLRSLNATAAIVPMTLGRIPLDTILDTGLFSLEKAAQAPGWLQELQGEHTPETEEYGISSVVYRERAPFHPQRLHDFLSSEWTNGKLLRAKGYYWNAGRFTEIGSISQAGHLIRHGYVGRWWKFLPRDEWPADDYRRDGILDKWEEPVGDCRQELVFIGQAIDPSLLHRELDACLLTTAEIELGPDVWTTWSDPLGAGYTDQTV

SEQ ID NO: 17338 - protein, 739 aa, Lycopersicon esculentum
MGGFDDHVAIMGDWMPPSPSPRTFFSSLLGDDGGSRLSFDGTNETSGNLASGPQEHVGNSDGVDTAPAAISEPQPVKLSVPSDQKMNSRGGGLLERIAARAGFNAPKLNTESLRPADLRQNQGVRSPYLTIPPGLSPTTLLESPVFLSNSLVQPSPTTGKFLFSSGIDNRNSALMMEDTDKRKDNALESINSSSFSFKPVPETAPSLFPGTTSRSWLQVNPSNFSQQGFPNIEVSVHSQNSLVSHRVEATQNPTQNGTLQQSSDFPRFSAEKDVMANNVTLDSRTFQTVGSAVDHSPPLDEPQDEDIDQRGGGDPNVAGAPAEDGYNWRKYGQKQVKGSEYPRSYYKCTHPTCPVKKKVERSPEGHITEIIYKGAHNHPKPPPNRRSALGSTNSLGDLQVDGAEQGASGVNGDLGQANFHKAPGGGGGFDWRNNNRDANLGSEHCNRSAPFSAQNNTRLESGDAVDVSSNFSNDEDEDDRGTHGSVSQGYEGEGDESESKRRKLETYSADMTGATRAIREPRVVVQTTSEVDILDDGYRWRKYGQKVVKGNPNPRSYYKCTSAGCNVRKHVERASHDLKSVITTYEGKHNHDVPAARNSSHVNSGASNTHPASVTAPAQNHLHRPEAAQLQNAMARFDRQPSLGSFGLSGRPPQLGPNPGFSYGMNQQGGLSSLAMAGFHPNQNKPGEVPMHPYLGQPRPMHDMGFMFPKEEPKVEPLSDPGPTAYQQFLNSLSLGPQM

SEQ ID NO: 17339 - protein, 250 aa, Glycine max
MGKSYPTVSADYQKAVEKAKKKLRGFIAEKRCAPLMLRLAWHSAGTYDVSSKTGGPFGTIKHPSELAHGANNGLDIAVRLLEPLKAEFPILSYADFYQLAGVVAVEVTGGPEVPFHPGREDKPEPPPEGRLPDATKGSDHLRDVFGKAMGLSDRDIVALSGGHTIGAAHKERSGFEGPWTSNPLIFDNSYFKELLSGEKEGLLQLPSDKALLSDPVFRPLVEKYASDEDAFFADYAEAHQKLSELGFAEA

SEQ ID NO: 17340 - protein, 436 aa, Propionibacterium acnes KPA171202
MTSNAELFSAAQAVIPGGVDSPVRAYGSVGGVPRFIEKAQGPWIWDAEGTRYVDLVCTWGPALLGHARPEVVSAVQVAASKGLSFGAPTRTETELADAIIERMAPVEKVRFVSTGTEATMTAVRLARGATGRDVIVKFAGNYHGHSDVLLAAAGSGVATAGLPGSAGVPAASTADTIVVDYNDVAALDAVFSERGDQIAAVIVESCPANMGVVPPEPGFNAAIRRLTTEHGALMITDEVLTGFRCSPSGFWGLQQQAGEDFAPDIFTFGKVVGGGMPLAALGGHADVMDLLAPTGPVYQAGTLSGNPLATVAGVKTLQLADAEVYQRLDVRSEKWRNELESALDAAGVTYRLQNAGNLFSVFLGVDSPVRNYDNAKSQNAEAYTAFFHAMLDAGVNLPPSCFEAWFLSDAHDDEAFEVFRAALPRAAQAAAQVISA

SEQ ID NO: 17341 - protein, 204 aa, Glycine max
  misc_feature (203)..(203): Xaa can be any naturally occurring amino acid
  unsure (1)..(204): unsure at all Xaa locations
MSKLNEAPQSVALVLGVTGIVGNSLAQILPLSNTRGGPWKVYGVARRTQPSWNAETPVRYIQCDISDQSDAESQLSSLTDVTHVFYVCWARRPTEAQNCQVNGAMLRNVLRAVIPNAPNLRHVSLQTGTKHYLGPFELLGKIEVAHDPPFTEDLPRLDAPNFYYTQEDILFEEVRKKGLTLTWFVNRPHFIFGFSPYSLMNLXG

SEQ ID NO: 17342 - protein, 437 aa, Zea mays
  misc_feature (309)..(309): Xaa can be any naturally occurring amino acid
  unsure (1)..(437): unsure at all Xaa locations
MSFRSIVRDVRDGFGSLSRRGFEVKFLGHRRGRSHGAVHELRDPAPVIQSSCWANLPPELLRDVIERLEASEATWPNRKSVVSCAAVCRTWREICKEIVKNPEFSGKITFPVSLKQPGPRDVTIQCFIKRDKSTQTYYLYLCLSTAVLVESGKFLLCAKRTSRPTCTEYTIFMNSENLSRSSKMYIGKLRSNLLGTKFAIYDTQPPCNAAEPGKTSRRFYSRKVSPKVSSSTYNIAQVSHELNVLGTRGPRRMNCVMHSIPTSCLEAGGSVPSQLDSILARSTDESFGSISFSKSSVVDRSMRFSSSRXSDISMSSSRRIGDTASGDNDECKERPLILRNKAPRWHEQLQCWCLNFRGRVTVASVKNFQLVAATQPAAGAPTPSQATPVPPPEHEKVILQFGKVAKDMFTMDYRYPLSAFQAFAICLSSFDTKLACE

SEQ ID NO: 17343 - protein, 463 aa, Lactobacillus acidophilus NCFM
MGKKNKVPQLSRSMTAGQMEMISLGGAIGVGLFMGSTSTIKWTGPSVLLAYMFVGLILYIVMRALGEMLYINPGTGSFADYATEYVHPLAGYLAEWANVFEYIVVGMSEVVAATEYLKYWWPNISALWSGVIIIAFLLLANLASAKAYASLEFWFAMIKVITIILMIILGFIVIFFGVGNGGKPIGFSNLWAHGGFFTGGVKGFFFSMSIIVGSYEGIELLGISAGEVANPQKAIVKSVKSVLLRILIFYVGAIFVIVTIYPWNKLSSLGSPFVTTFAKVGITAAASIINFVVLTAALSGANSGIYSSSRMLFKLSHDNEAPSVFKHISKRIVPDRAIMGISGGIFIGFILNIIASQFNHSASDLFVIVFSSSVLPGMIPWFVILLAELRFRRHNQDMMKDHPFKLPLYPFSNYFAFLMLLVIVIFMFINPDTRISVITGALVLIVATIVYLVRHKDEFSKNN

SEQ ID NO: 17344 - protein, 441 aa, Pediococcus pentosaceus ATCC 25745
MKTTESSYTEVPVTEIKPQLTEGKAAILGFQHLLAMYSGDVIVPLLIGGFLHFTAAQMTYLVSVDIFMCGIATLLQIKRTPLTGIGLPVVLGCAVQAVQPLQQIGGTLGVTAMYGAIIASGVFVFLVGGLFSKIKGLFPPIVTGSIITVIGFTLIPVAFQDIGGGNVAAKSFGDPRNLLVGLITVLIIVGINVWARGFFRSIAILIGILIGTILASFMGMVSLSPIAEASWFRIPQPFYFGVPTFNLSAILTMIMVTLTTMIESTGVFFALGDLVGKEITQDDLKRGYRSEGIAAILGGIFNTFPYSTFSENVGVLQLSGVKSRKPLYYAAGFLIVLGLLPKAGATATIVPTSVLGGAMLVMFGIVGVQGVRILQQVNFNQTKNILIVSLSVGMGLGSTIYPQLYQALPATIKMLLTNGIVIASITAVVLNLLFNGYDRDM

SEQ ID NO: 17345 - protein, 109 aa, Zea mays
MASETVVLKVAMSCGGCSGAVKRVLTKMEGVESFDIDMEQQKVTVKGNVKPEDVFQTVSKTGKKTAFWEAEATPVPEATPAADAVPAPEATPAADAAPAPEVTPANTVA

SEQ ID NO: 17346 - protein, 895 aa, Candida glabrata CBS138
MEQQGVLAPPSINERNRSLSFSKLLSRSWRKNSTSAVASDNSTDTENNAANPNMIALQKKILSSKTDSWSEAVDDEPVPSGGSQSRFTKLKNIFNNNNSNHNTSNSTRSGSSCASTVSGKSSFEKLPKDISQVRSNSIPSPQKSPYSDKKGHNATSDVEIGLVSPVSDKMNIDLPQVPTSVHASTLTGEHLKELHEYEIAKPKQEAYALNSGKNANRRRSPSTPIKPSPSLVSSQSANGQFSSTNPFNTGTGYANYKERGTVQTTNSYFNYQGLPPHARNENDSNLNAFQNGSKYAAVQEMLSLPTTPSSMNTSLTTHNKEGRNLSNVSLNEIKENEEVSEFYGMDEVPNLDSMGNKKMASSSPLRARSGSPKASNVMDSAQPFPSIVVGYDDADAETDEQSANPSRGSHISSEQKGKPELNPPKNAKFPLRRAASETDAIDLNILKSVKAASGDLSDTTDQHTKLEEIKEPRRSSRLRNKSFSNKFQDITVGPQSFEKIRLLGQGDVGKVYLVKEKRTNRLYALKIFSKSEMIKRKKIKRILAEQEILATSNHPFVVTLYHSFQSEDYLYLCMEYCMGGEFFRALQTRKSKCISEEDAKFYASEVTAALEYLHLLGFIYRDLKPENILLHQSGHIMLSDFDLSIQAKDAKVPVVKGNAQSTVVDTKICSDGFRTNSFVGTEEYIAPEVIRGNGHTAAVDWWTLGILIYEMLFGFTPFKGENTNETFSNILKKDVTFPNNNEVSRNCKDLIKKLLIKNESKRLGSKMGAADIKKHPFFKKVNWTLLRNQEPPLIPVLTENGYDFTKLSSNKNKNRANGTEKDSIDEQERIMFEERVEYDDEVSEDDPFHDFNSMSLMKQDNNSLIYGDNNSYGKIAYTPNANRSRSNSHRAFFKR

SEQ ID NO: 17347 - protein, 204 aa, Triticum aestivum
MFSGTQQKCKVCTKTVYPMDQLSTDGAVFHRACFKCHHCKSTLSFSSYSSFEGVPYCKPHFAQLFKETGSYNKSFQSQSPAKSATEKLTPELTRSPSKAAGMFSGTQDKCATCGKTAYPLEKVTVEEKSYHKSCFKCSHGGCALSPSNYAALEGILYCKHHFSQLFKEKGSYNHLIKCASVKRAAEAQTAQAAAQAAPAAAESS

SEQ ID NO: 17348 - protein, 77 aa, Triticum aestivum
DQVEKASAWLNKYERKLEEKRAKAMEKAQNEVARARRKAEDKRASAEAKRGTKVARVLELANFMRAVGRAPTKRSFF

SEQ ID NO: 17349 - protein, 421 aa, Mesorhizobium loti MAFF303099
MAEQSAEQASVAQAMAIRLWNSRWLLVAGVIGILIAFAFAGISAYVLVPALLLLLAAALLPTTGLRQSGENAAAIEAIGLQRLSGEYLAAAVADPLIIFDRSATIVHANAAAFAAFGGIAPGLSLPLKFRAPEMQTLLDSVLSGTIASDVVDYTEKLPVERAYRVSASSVGHGTDLYVLVFKDQSETRRIDRMRADFIANASHELRTPLASIAGFIETLRGPARNDPAAREQFLQIMQNQTGRMARLIDDLLSLSRLEMKPYLKPGTEVDLRQTVDSVIDSLAPLAHENSVVIERDFAKGPLNVPGDRDELFQVFENLLENACKYGQSGGRVVVSIAHADDGSEPGIDVTIRDFGPGIPEEHIPRITERFYRIDVETSRTQKGTGLGLSIVKHILTRHNARLTIKSEVGKGAAFSVHLPTH

SEQ ID NO: 17350 - protein, 795 aa, Candida albicans SC5314
MVQLALFTNNNHNNNSNSNTPNTLNDDTQYDSTTMNTEDTPIIPDKTDKLNGSDSRSSSRNRTRSISFTRFLFNSNNNNNNNKDHTEQSRCPSNETSDNSVGSPEQQNSGFNKLKKMFKTNSSLTQEDGKNSGRTRSASTPLTPPKVKKETSVPVITTTKAPNKEETTTTKIHSPPESPVVQSNPYFQYQGVPAHTNTSQNPQIETAPGRSDMSVALRHNDSVFSLNENGVLEPPEIHYSELSSSSEDNSDPSSPALPKTPMRDLVEKDELHLKPIEDERDLAIPASPFQRALRRVASAPLVHRLLNEKSPEDANNNNNNNNTGNNLGGPFSTSTQTSPKKDEPFDINKHIGEVKITGRPRTYTQDRTYSNAATRIVDVQVGPNSFEKVRLLGKGDVGKVFLVREKSSNKLYAMKILNKKEMIERNKIKRALAEQEILATSNHPFIVTLYHSFQSKDHLYLCMEYCMGGEFFRALQTRDTKTICEADAKFYAAEVTAALEYLHLMGFIYRDLKPENILLHQSGHIMLSDFDLSKQSERAKNPEISFHKSGMHLSSAGSSNHHNGPAIDTKACIDGFRTNSFVGTEEYIAPEVIRGKGHTSAVDWWTLGIFLYEMLFGTTPFKGQDRKKTFANVLKKDVKFSDTQQSISSNCRNLIKKLLIKDEEKRLGSKTGASEIKNHAFFKDTQWALLRHQKPPMIPVLTKSTSTSNSNKKYEKPMEDTEEIDDVTSISKSINEQIDDPFSQFNSVTLRYGGEFEDLNQSPMYNPDSSAYTSVAYTMTSNNENSFRQKSFLKR

SEQ ID NO: 17351 - protein, 401 aa, Bacillus cereus G9241
MGATGVTSQRKTIEESIERNKEKYIETSHDIHANPEIGNQEFYASRTLSLLLGSAGFQLQHNIAGHETGFIARKSSGKQGPVIAFLAEYDALPGLGHACGHNLIGTISVAAAIALSETLEEIGGEVVVFGTPAEEGGPNGSAKASYVKAGLFKDIDAALMIHPSGKTATTSPSLAVDPLDFHFYGKTAHAAASPEEGINALDAIIQLYNSINALRQQLPSDVKIHGVITEGGKAPNIIPDYAAARFFIRAATRKRCAEVTEKVRNVAQGAALATGTKVKIHQFQNEIDELLVTKTFNDVVAEELELQGEDVNRKERFGIGSTDAGNVSQVVPTIHPYIKIGPDDLIAHTNEFREAARSELGDKALITSAKALANTAYRLITEEGLLEKVKEEFSEVQRNQG

SEQ ID NO: 17352 - protein, 307 aa, Lactobacillus plantarum WCFS1
MADVTVIGSNMIDLTTYIGRMPVEGETIEAPEFNIGYGGKGANQAIAAARLGSDVNFITMVGNDGFGQEQLANYQKNGIRTDGIGIGHQNSGVAPIFVDPSSDNRILIIKGANKELTPAVLDEKQALIKNSKLIVLQQEISLETNYHAIDLAQQFGVPVLLNPAPANKNLNIDYVSKVVFFTPNETELATLTGLPTNNLDEIKVAACDLISRGVENLIITLGHKGALWVTENHAEIVPGMKVKAVDTTGAGDSFIGSFAHYFAQGEAIPDALQHANQYAAMTVMKKGTQKSYPTAAELSDLLAAAVD

SEQ ID NO: 17353 - protein, 462 aa, Magnaporthe grisea 70-15
MSSFVPQDFSWTSIPTELLAAELARRDDVDTKPKCGSKERGHYDTALHVFALGLILLLSTCACAFPLLTNRSGGGRRQTKIVFICQHFGTGVLIATAFVHLLPTAFLSLTDPCLPHVFSKGYTAMAGLVAMTAALVVVSVESYLTTRGGLTHSHSHHHVWDEDDEEGEDGNKTQGINGASSSGGMAARRERRPSNIMLDDIGASEGLMAGASPLPESTPVVASTNGRKHLNGNANDPQERNKHVYQPRDSSSSSRESLDLELNLDELDPVPEHDAQPPAPPSQQRDRMLGQTPAPPPDEQKRLLLQCLLLEAGILFHSVFIGMALSVATGPAFVVFLVAISFHQSFEGLALGSRIAAIHFPRSSLRPWLMVLAYGTTTPIGQAIGLLVHNMYDPRSQAGLLMVGFMNAISAGLLLFAGLVQLLAEDFLSEKSYRVLHGRRRTEAFLAVFGGAGLMAVVGAFA

SEQ ID NO: 17354 - protein, 608 aa, Vibrio sp. Ex25
MNLPFIFHSQTIDGLAFNQEQVTFRLKTETLDFDSVYVRLEPDNEEYLVDMAQIGTAGELLLWEASFRPNRDQDVTHYVFKLLKDGQQYWLDARGVQKRIPPKEFHFKLNVNHQPPSWVQEQVFYQIFPDRFSASKSESDIRKAYAQHDSEAIIKSWGDAVGSHKNTGAREFFGGDLKGVEQRLDYLEQLGVTALYFNPIFSSPSNHKYDTTDYFTVDPMFGTNAQFAELCEKICGKNMKIVLDAVFNHTSVHHPWFDIQQKGEGAYGNPQSKFRDYYFFEDETNHYIGWKGIGNLPVLNFENEQVRDYIYQSEESVIKHWLNPPYSVDGWRFDVIHMLGEGEGAKNNAHYVEAFRHATKSVNPNAYVLGEHFFEATQWLQGDQEDGAMNYYGFAHPVRAFIAQQDIMYEPINIDGLEFKAWLDEARAKIPFSNQLSQLNQLDSHDTARFITLVDGDKRKMNIALALLMTYVGTPCIYYGSEVGLEGGLDPDNRRCFPWNEIENSAWLSIYKQWISIRKQYKSLQSGSIQWLHCDTNVLAYARVLGSEAIVVVMNLSGDECSIDLPLWQLGLEATHLSSLLDVRELIDYKGHLSVNIPAQSFKLWQLK

SEQ ID NO: 17355 - protein, 241 aa, Propionibacterium acnes KPA171202
MTTNPADLVKPPVVVPRDDSHDKFVTTLKQAGYGVIHTALTRTVTLPDAERLTAPDLWQADWLVVTSKTTVGLLPTPLPNPNIKVAAVGAATSAALRTRGIDVDFVPENHSGAGLVAEWPGGVANILLPASQLTADTVPLGLTKVGCTVNRLEIYTTAAVEKLPEVIAQSWPSVGVVVVTASSVGRALVELVEPLGWRRQKLVALGKPTARTLEVLGHPAHAVASSPTPEAVLEAVESLVA

SEQ ID NO: 17356 - protein, 1138 aa, Burkholderia sp. 383
MMKREDSLDDVRRAQFPSLAPGGTPRRRRARRRAPALCADDPLWYKDAIIYQVHVKSFYDSNNDGIGDFPGLIAKLDYIAELGVDTIWLLPFYPSPRRDDGYDIADYRDVHPDYGTLADVRRFIREAHARGIRVITELVINHTSDQHPWFQRARRAKPGSTHRDYYVWSDTDTKYAGTRIIFLDTETSNWAHDPVAGQYYWHRFYSHQPDLNFDNPAVVREVMQVMRFWLDLGIDGLRLDAVPYLVAREGTNNENLPETHAILKRIRATIDAEYPNRMLLAEANQWPEDVQEYFGDEDECHMAFHFPLMPRIYMSIASEDRFPIVDIMRQTPELAPSNQWAVFLRNHDELTLEMVTDSERDLLWQTYASDRRARLNLGIRRRLAPLMERDRRRIELINSLLLSMPGTPVIYYGDELGMGDNIHLGDRDGVRTPMQWSSDRNGGFSRADPELLVLPPVMGSLYGYDAVNVEAQTRDPHSLLNWTRRILSTRRASQAFGRGTIRFLRPENRKVLAYLRELDGDDPVLCVANLSRASQAVELDLSEFAGRVPIEMTSDSPFPPIGQLPYLLTFPPYGFLWFVLAEHGREPSWRQPHAEPLPEYVTLVMRRGDARPDIEQLHVLAHDALPSWLARRRWFASKDRAIGAARLNVVTPVPGEPFQYAEAWVESDEPGDVERYVVPLAAAWGGETSQPLFAQLALARVRRGHSVGYLTDAFALPAFAHGMLRKLRDGATVPTSDDGRLAFLPEDALAALDPGDNADVRWLAAEQSNSSLVIGDAIVLKLVRKVAHGVHPEAEMSRYLTRIGYPNTATLAGEVVHVDPDGTPHTVAILQRYADNQGDAWTRSFDFLRRAVDELALPAADEEEPDDTDEEPDALLGYAAFAGIIGTRLGQLHVALAQPSDDPAFAPEHATPEHVDGWCADAIASFEHALDVLHTRLDALDPATRAAADTLLASRDAAVRALGELVPRTLDAQCIRIHGDFHLGQVLDVQGDALLIDFEGEPARPLERRRAKSHPLRDVAGLLRSLSYVSAIAQFAIEKAPPQAAGRKRALFDRFGQAAADRFVDCYRAAAELAPARFVDPRYAYRLLALFLIDKASYELCYEAANRPDWLSVPVGGLAALVERLLDGGAASDDGDTP

SEQ ID NO: 17357 - protein, 584 aa, Arabidopsis thaliana
MARTTRERVKSFINNRWLVFVAAMWIQSCAGIGYLFGSISPVIKSSLNYNQKQLSRLGVAKDLGDSVGFLAGTLSEILPLWAALLVGSVQNLVGYGWVWLIVTGRAPILPLWAMCILIFVGNNGETYFNTAALVSGVQNFPKSRGPVVGILKGFAGLGGAILSQVYTMIHSSDRASLIFMVAVAPSVVVVPLMFFIRPVGGHRQIRSSDATSFTVIYAVCILLAAYLMAVMLVEDFIDLSHSIIIAFTVVLFAILLVPIFIPIATSCFTASTDPCDTLEEPLLGDQQGQDPGQSTTPDHGPELIFSEVEDEKPKEVDLLPAVERHKRIAQLQAKLMQAAAEGAVRVKRRRGPHRGEDFTLTQALVKADFWLIFFSLLLGSGSGLTVIDNLGQMSQSLGYDNTHVFVSMISIWNFLGRIGGGYFSELIVRDYAYPRPVAIAVAQLVMSVGHIFFAYGWPGAMHIGTLLIGLGYGAHWAIVPATASELFGLKKFGALYNFLTLANPAGSLVFSGLIASSIYDREAERQAQGSLFNPDDVLRCRGSICYFLTSLIMSGFCLIAAALSMILVQRTKPVYTNLYGKTRN

SEQ ID NO: 17358 - protein, 524 aa, Nitrosomonas europaea
DPYINVDPGTMNPFQHGEVFVTDDGAETDLDLGHYERFISTKMTRQNNFTTGQIYESVIRKERRADYLGGTVQVIPHITDEIKLFIRNGVSDAQVAIVEIGGTVGDIESLPFLEAIRQMSVQLPHHDTCFIHLTLLPYISSAGELKTKPTQHSVKELREIGIQPDVLLCRSDRPLPLEERRKIALFTNVREESVISAIDVDNIYKIPALLHEQMLDEIVCHRLDILARPANLTVWKKLVHALEHPEHEVSIALVGKYVDLTESYKSLSEALIHAGIHTRCKINIHYIDSENIEQHGTGCLTNMDAILVPGGFGKRGVEGKIMAISYARNHRIPYLGICLGMQLAVIEFSRNRLQLENAHSTEFDPDTPYPVLGLITEWRDRCGRVEKRSAQTDLGGTMRLGGQECLLKPHTLAHKIYGADKVIDRHRHRYEVNAEFIPQLEQAGMHISGLSAEGDLCEMIELPQSEHPWFVACQFHPEFTSTPRNGHPLFKSYIQAAISFAGQSDRTKLHSRNVQESVTTDSSN

SEQ ID NO: 17359 - protein, 369 aa, Streptococcus pyogenes MGAS10394
MTKQKEITTFNVQVAEFIRHHKKEGTAIDDDVTEKLVIPFALDADQIDDLLERLTDGGISITDKEGNPSSKYIVEEPKPEELTDEELIGSNSAKVNDPVRMYLKEIGVVPLLTSEEEKELAVAVAKGDLMAKQRLAEANLRLVVSIAKRYVGRGMQFLDLIQEGNMGLMKAVDKFDYSKGFKFSTYATWWIRQAITRAIADQARTIRIPVHMVETINKLVREQRNLLQELGQDPTPEQIAERMEMTPDKVREILKIAQEPVSLETPIGEEDDSHLGDFIEDEVIENPVDYTTRVVLREQLDEVLDTLTDREENVLRLRFGLDDGKMRTLEDVGKVFNVTRERIRQIEAKALRKLRHPSRSKQLRDFIED

SEQ ID NO: 17360 - protein, 269 aa, Dechloromonas aromatica RCB
MIKQNCRIAALQMVSGPRVAENLVTAGRLVDQAVEQGAQLVVLPEYFPIIGAADADRVRAREEFGDGPVQEWLAETARRYQLWLFAGSIPLAASTPDKMRNSSLVFNPAGECVRRYDKIHLFGFKKGDESYDEASFIEPGDQPVAVDTPYGRIALSICYDLRFPELYRALAPVDLILVPAAFTETTGRAHWEILLRARAIENQCYLLAVGQGGRHENDRMTHGNSMIIDPWGEILDRKLKGPGVVIADLDHQRIAEIRESLPALAHRKL

SEQ ID NO: 17361 - protein, 115 aa, Campylobacter upsaliensis RM3195
MLSEEEKRIIIDKGTEAPFSGEYNDFFEEGVYLCKQCGAKLYESTHKFKSHCGWPSFDDEINGAIKKEPDKDGVRTEILCANCDAHLGHIFKNEGFTPKNVRHCVNSLSLKFVKK

SEQ ID NO: 17362 - protein, 395 aa, Monascus purpureus
MVVFSKITAVAAGFSTLAAAMPTLNRPNVKSFSLSQSAIPRQQKNFNFAATYAKTLAKYGGQIPASLKAAAEKGSVNTYPEPQDAEYLTAVDVGGTTLNLDFDTGSADLWVFSAELPSSEQSGHAIYKPSGNATKMSGYSWSISYGDGSSASGDVYKDTVTVAGITAPRQAVEAASTISSEFTQDKNNDGLLGLAFSSINTVHPKAQTTWFDTVKEDLDSPLFAVALKHNAPGTFDFGYVDKSKYTGSLTYADVDNSQGFWQFTADSYSVGSQSGSKSIVGIADTGTTLLLLPDDVVEAYYKQVEGAENDSQAGGYVFPCDSQLPSFTAVINGYSAVVPGSLINYASAGDGSNNCLGGIQSDQGIGQAIFGDIFLKSQYVVFDADGPRLGFAPQA

SEQ ID NO: 17363 - protein, 195 aa, Glycine max
MGSHNALAATFGILGNIISVMVYLAPVPTFYRIYKKKCTDGFHSLPYLLSLMSSMLWLYYAFLKIHDGVVPLITINSIGCVIELIYILTYIKYAHKDARNLTYTLFAAMNIGFLALVLSSRFALNGSHRVKVIGWICDAVSLSVFASPLSIMAKVIRTKSVQFMPFYLSFFLTLNAITWFVYGLSMQDKCIYEGQ

SEQ ID NO: 17364 - protein, 703 aa, GIBBERELLA ZEAE PH-1
MSLIPYQPHEGREIVLEDMIIPSAPAKKLMSTPITFACSAPVNSNNDASTDGPPSPVRRIFGSSLGVADGPHQSPSPPAAPEEAEFVSSTPGVAQAEGSRIRRDAFSPNYFNTFFVEERVLGKGGKGVVLLVRHEIDGCALGEFACKRVPVGDDHAWLEKVLIEVELLAKLSHPNLVSYRHVWLEDVRLTRFGPSVACAFILQQYCNGGDLHQYIIGGAPREATKEELKAQMRRRSKGQLETPVDLVNGNRVLPVEEIYSLFKDITSGVAYLHAANYIHRDLKPSNCLMHREGGRTICLISDFGEVQPENVVRKSSGTTGTISYCAPEVLKVDTASGRYANFTTKSDIFALGMILYFMCFGRLPYQNSNALQEELEDVDELREEITHWTGFHERRERPDLPPRLYQLLKRLLSLDPAERPSANEVLKAMKGESLNFENGSSQEPVPNLGIATRIQNLDSPAHPSTPVPGPRHRNQASTQDKFEELGVVARSTARDLSPTKSGQSSRLDPHRQSLSRHRGSHSMVVSRSQESRRSSLVTPAVSVSDASETTEMHERRSSQSPPLLMPPPTTAVDALRQRATVFIFHFMNIAGSHSPLLSYITRLCLFGIKVTTLVRPCWPLMAQLNVAIPLIGVAALDLGLPQVTSHSPMMIQGHGDYFSSGPRAWGLGMSLVLLVLHFTVLWVASGWDTLCLDIQPDIWAGPW

SEQ ID NO: 17365 - protein, 316 aa, Dechloromonas aromatica RCB
MKQPQHDVSRWAHQHQYGTGNAAAERGTRAVMWITIATMLVEIIAGWWFNSMAVLADGWHMSSHALAIGLSAFAYGAARKYASDPSFAFGTWKIEVLASYTSAIFLLGVAGAMVFGSLERLWQPQTIHYPEAMGVAIFGLAVNLVCALILGQAGDHGHHHHDDGHAHHHHHDLNLKAAYIHVITDALTSVLAIAALAGGWFYGWAWLDPAIGLVGAVLVALWAKNLILQSGRVLLDREMDHPVVAEIREVIEQLPLAGSTQLTDLHVWRVGNGAYACALSLLTHDQALTPLQVRSALGVHEEIVHATVEIHRCDLC

SEQ ID NO: 17366 - protein, 335 aa, Photorhabdus luminescens subsp. laumondii TTO1
MNRIIKAAAVQCSPVLYSQAATVKKICGIILELGKQGVQFAVFPETVVPYYPYFSFVQPPFAMGKEHLKLLNESVVVPSEATLAIGQACLEANMVVSIGTNERAGSTIYNAQLLFNADGSIIQHRRKITPTYHERMVWGQGDGSGLRAINSAVGRIGSLACWEHYNPLARFALMADGEQIHAAMFPGSLVGQVFADQIRATIQHHALESGCFVINATAWLHPEQQRQIMQDTGCDIGPISGGCFAAIVSPEGKLLAEPITQGEGYCIADLDFSLIDKRKRMMDSIGHYSRPELLSLMIDRRPTHVLHELKVETSVQSHPEKLSTFNEEHVETILM

SEQ ID NO: 17367 - protein, 308 aa, Pyrus communis
MASKSQILFIGGTGYIGKFIVEASAKAGYPTYVLVREASLSDPAKSKVIENFKALGVNFVLGDLYDHESLVKAIKQVDVVISTVGHGQLADQGKIIAAIKEAGNVKRFFPSEFGNDVDRSHAVEPAKSAFETKAKIRRAVEAEGIPYTYVSSNFFAGYFLPTLNQPGASSAPRDKVVILGDGNPKAIFNKEDDIGTYTIRAVDDPRTLNKVLYIRPPANTISFNELVSLWEKKIGKTLERIYVPEEQLLKNIQEAAVPLNVILSISHAVFVKGDHTNFEIEPSFGVEATALYPDVKYTTVDEYLNQFV

SEQ ID NO: 17368 - protein, 502 aa, Arabidopsis thaliana
MATAAVIGLNTGKRLLSSSFYHSDVTEKFLSVNDHCSSQYHIASTKSGITAKKASNYSPSFPSSNRHTQSAKALKESVDVASTEKPWLPNGTDKELEEECYDDDDLISHSVEAILLLQKSMLEKSWNLSFEKAVSSEYPGKGTIRKKKIPVITCSGISARPRRIGAKKKTNMTHVKAVSDVSSGKQVRGYVKGVISEDVLSHVEVVRLSKKIKSGLRLDDHKSRLKDRLGCEPSDEQLAVSLKISRAELQAWLMECHLAREKLAMSNVRLVMSIAQRYDNLGAEMSDLVQGGLIGLLRGIEKFDSSKGFRISTYVYWWIRQGVSRALVDNSRTLRLPTHLHERLGLIRNAKLRLQEKGITPSIDRIAESLNMSQKKVRNATEAVSKVFSLDRDAFPSLNGLPGETHHSYIADTRLENNPWHGYDDLALKEEVSKLISATLGEREKEIIRLYYGLDKECLTWEDISKRIGLSRERVRQVGLVALEKLKHAARKRKMEAMILKN

SEQ ID NO: 17369 - protein, 453 aa, Staphylococcus epidermidis RP62A
MNDTDRTHKENKLEQDITLPYLKKAVIFSITFGFFGVNMAFALQSAMMGRIFQTLGANPNNLGWFFILPPLVGMIVQPLIGYYSDRTWTRFGRRMPYLLIAGPIGAIVLVLLPNAGSFNFGYASLMALSFGAVMTLLMDLTSNACMQPYKMIIGDMVNEKQRDMAWSWQQIFSNLGGIIATVLPFLLTMLGMSNVAPKGEVPMTVKLAYYIAAAVLLIASIWTVISVREYEPKTYNYYHGINEKNRNNKLNLLQLLKKAPKQFWQISVVQFFNWFALMYLWTYSTGAIAKNVWNVTDPSSAGYQAAGNWYGVLYCIQFLSSVIFGFVIARSKPSQRKFWYSFGLLFGGIGLISIFFIHNQWLLIFSFILIGINNLTMNTQPFTLLTEAIDGENSGAYLGLFNTSICLPQIVASIVSFGLYPLLGSSMPAMLLLAGIMMLLGAVSVKFINAKFE

SEQ ID NO: 17370 - protein, 203 aa, Prochlorococcus marinus str. NATL2A
MISMHKIFRRLIVFSILLQLLIACPLQAFAESEEAIFAGGCFWCLEHDLEKLDGVVSAESGYSGGDLINPTYQDHSGHQEVVKVVFDSDIISYKDLLKQYWVNIDPFDNNGQFCDRGYSYKPVIFTSNQEQKRDAKESQETISVGLNIPLEQLKVDIVESKVFWLAENYHQDFAVKNPLKYNFYRSSCGRDNRLKKVWGEYKY

SEQ ID NO: 17371 - protein, 447 aa, Zea mays
MHAPPLVTFAGGACPTTASASPSPWLASPRDAIFAAPARPLRSRRGTLRLEAKAAWRAAGGGRGPRVPAKGAVLASYMGAEEVVGPSSLLDEEEFISHIRKELDNGKLPADVASNLEELYYNYRNAVLQNGDPNAYEVMLSNMMTLFDRVLLDVQNPFNFPPYHKALREPFDYYMFGQNYIRPLVDFRNSYVGNISLFHDIEENLHQGHNVVLMSNHQSEADPAIIALLLEKTNPWISENIVYVAGDRVVTDPLCKPFSMGRNLICVYSKKHMNDFPELIEMKRRSNTRSLKEMALLLRGGSQLIWIAPSGGRDRPNPSSGEWYPAPFDSSAVDNMRRLLEHAGVPGHIYPLSLLCYEVMPPPQQVEKEIGEQRVISFHGAGLSVTEEINYGDITAHTKNADEGRELFTNTLYNSVVNQYNVLKSAIFRDRGAAVSNNVISLSQPWR

SEQ ID NO: 17372 - protein, 230 aa, Glycine max
  misc_feature (107)..(107): Xaa can be any naturally occurring amino acid
  misc_feature (160)..(160): Xaa can be any naturally occurring amino acid
  unsure (1)..(230): unsure at all Xaa locations
AEEFGDSYQELCQEEKILYKLISGLHSSISIHIAFDYLLDEATNLWGQNLTLMYDRVLRYPDHVRNLYFTFLFVLRAVTKALDYLEQAEYDTGNPNEDLTTQSLIKXLLYNPKLQAACPIPFDEANLWKGQSGPELKQKIQQQFRNISALMDCVGCEKCXLWGRECERVRSELPVDEDNRHQLQLQRNEVIALTNLLNRLSESFKFVHEVGPTVERIMEGGHFSAHTRTD

SEQ ID NO: 17373 - protein, 410 aa, Oryza sativa
MYIIEDKGGAIALMLASLFFLGTWPAVLTLLERRGRLPQHTYLDYSITNLLAAVLIALTFGQLGDSKPNMPNFFTQLSQDNWPSVLFAMAGGVVLSIGNLSTQYAWAYVGLSVTEVISSSMVVVIGTTLNYFLDNRINRAEILFPGVACFLVAVILGSAVHASNAADNEEKLNGSTNIYKLGENGSVEPNKEVIEKDAPKDLENGASATKYVAKAEAGTAEYLIELEERRSIKVFGSSTFIGLGIVFFSGVCFSLFSPAFNLATNDQWHTLKQGVPHLVVYTAFFYFSISCFVIGIGLNILFLYRPMAGVPKSSFKAYLNDWEGRQWALLAGFLCGFGNGFQFMGGQAAGYAAADAVQALPLVSTFWGILLFGEYRKSSRKTYILLGFMLFMFIVAVAVLMASSGHRSTK

SEQ ID NO: 17374 - protein, 1065 aa, Bacillus cereus G9241
MDKKVSGIPQPKTYGPLGNLPLIDKDKPTLSFIKIAEEYGPIFQIQTLSDTIIVVSGHELVAEVCDETRFDKSIEGALAKVRAFAGDGLFTSETHEPNWKKAHNILMPTFSQRAMKDYHAMMVDIAVQLVQKWARLNPNENVDVPGDMTRLTLDTIGLCGFNYRFNSFYRETSHPFITSMTRALDEAMHQLQRLDIEDKLMWRTKRQFQHDIQSMFSLVDNIIAERKSSGNQEENDLLSRMLNVKDPETGEKLDDENIRFQIITFLIAGHETTSGLLSFAIYFLLKNPDKLKKAYEEVDRVLTDPTPTYQQVMKLKYIRMILNESLRLWPTAPAFSLYAKEDTVIGGKYPIKKGEDRISVLIPQLHRDKDAWGDNVEEFQPERFEELDKVPHHAYKPFGNGQRACIGMQFALHEATLVMGMLLQHFEFIDYEDYQLDVKQTLTLKPGDFKIRIVPRNQTISHTTVLAPTEEKLKNHETKQQVQKTPSIIGADNLSLLVLYGSDTGVAEGIARELADTASLEGVQTEVAALNDRIGSLPKEGAVLIVTSSYNGKPPSNAGQFVQWLEELKPDELKGVQYAVFGCGDHNWASTYQRIPRYIDEQMAQKGATRFSKRGEADASGDFEEQLEQWKQSMWSDAMKAFGLELNKNMEKERSTLSLQFVSRLGGSPLARTYEAVYASILENRELQTSSSERSTRHIEVSLPEGATYKEGDHLGVLPINSEKNVNRILKRFGLNGKDQVILSASGRSVNHIPLDSPVRLYDLLSYSVEVQEAATRAQIREMVTFTVCPPHKKELESLLEEGVYQEQILKKRISMLDLLEKYEACEIRFERFLELLPALKPRYYSISSSPLVAQDRLSITVGVVNAPAWSGEGTYEGVASNYLAQRHNKDEIICFIRTPQSNFQLPENPETPIIMVGPGTGIAPFRGFLQARRVQKQKGMNLGEAHLYFGCRHPEKDYLYRTELENDEREGLISLHTAFSRLEGHPKTYVQHVIKEDRIHLISLLDNGAHLYICGDGSKMAPDVEDTLCQAYQEIHEVSEQEARNWLDRVQDEGRYGKDVWAGI

SEQ ID NO: 17375 - protein, 453 aa, Candida albicans SC5314
MIPIRSSITRILPNGFSSKLFLRQLNKKSKPNPHKNKNFDSFNEVFIHKTLLSSINQHNDTDYVRCSIFNANGDMIQHGKEILKSQFIKRYNLTPRDFRKFNWQRSATGTTTSSSSSSSSAGQTSSGTSKSSSLSSSSSSPHSTISALSLSNSSLGSSTNVDIVPNITIRRNSILVQLLNIRALINHDQLIIFDNSSSFQNSHVSSYTHSQFLKDLSQRLKSTNLDGLPFEFKALEGILIYIVSNLNMEMKVHNTVLQNIITGLEDSIDRNKLRYLLIESKKIHQFHRKITLIKNCLEDLLENDDELNDLYITEKFNSEGDGQPRQGTNHEEIEMLLENYYQTIDEIVQIVENLKNQIKTTEDLINVVLDSNRNQLMLLGLKFSTGLLSMGVALYVSALYGMNLENFIEEIDGGFEVVTVVSTIALIALLLFSVKQLKKVEKVTMTSLNDQRK

SEQ ID NO: 17376 - protein, 222 aa, Neisseria meningitidis Z2491
MTTHLSNVAPDLQNYLNAIGEPEHPVLTRLREKTGHHRMGKMAIAREQAAVLVWLAKLIRAEKYLEVGVFTGYSSTALALALPKHGRITACDINVTFTDTARQVWNEAGVAHKISLHLQPALLTLDDLIAQGEAGSYDLALIDADKPPTPQYFERCLKLVRQGGIIAIDNILLNGRVMREAASDAPPSVGILKDFNQNLPNDTRIVPITLPVGDGLTLLLKK

SEQ ID NO: 17377 - protein, 493 aa, Archaeoglobus fulgidus DSM 4304
MDSVIRALQPYFERIPSVERPKGHVHFREKFGWTAAILLLYFILSNVPVFGLSPESIDIFAAYRALFAGSTGSIIALGIGPIVTASIILQLLVGAGIIKLDLTNPEDRAAYQDFQRFLVFVMIAVEAIPQIAGGLLKPDLNLAAQLGVSPGIISFLIFIQLFIGGVLIVYMDEVVSKWGIGSGVSLFILAGIAQSIVVGLFNWVIPPNSAMPAGIIPRWIWIAQNYPLDQLFTGSGLAFLLIQGGILALITTAAIILLVVFFEGTRVEIPLAHAVARGARGRFPIKLIYASVLPMIFVRALQANVVALGQVLHARGVTIFGEFVNGKAVSGLMFFLQPVSSPYDWIPSLVKSQGAAFAAIPDWMIYLHLLIDALILVVGGIIFAWFWVETSGMDARTVASQIAKSGMQVPGFRKSPQVLERVLSRYIPKVTILGGAIIGILTLVANMLGTIGNVSGTGLLLAVSIAYRFYEDLAKEQLTEMHPLIRRMLGEEA

SEQ ID NO: 17378 - protein, 494 aa, GIBBERELLA ZEAE PH-1
MSPQEYENPPQIKFESSPSNSHYRNPSNTSVPNVLQPAGSQRNISNTPLGLADIRPRADSSMSDGTGAAMAYDANNAQPGTSNYLAPWAIYAFDWCKWPAQGNSAGKLAVGSYLEDGHNFIQILDSHITPTPQDIYTPGSSKFSLEFTKAAEATHSYPVTRLLWEPPSSQKQSTDLLATSGDHLRLWSLPSENPSTPSGTIGRRDNVTTKLTPLALLSNSKTPDHTAPLTSLDWNTVSPSLIITSSIDTTCTIWDIPSLTAKTQLIAHDKEVYDVRFCAKSVDVFVSCGQDGSVRMFDLRSLEHSTIIYEPTGKEERDPNGGRVSPTLAQQTMSNPPPLLRLATSPHDTHLLATFAQDSNAIRILDVRQPGQALLELRGHAGNINSIEWSPHRRGMLASGGDDCQVLLWDIYNSGQPINGAPQQDNPRSPVASWQCDYEIGNLGWVPQLPNSEYGEWLGIGAGRGIWGTRVSKAWAGREGGSIERIFHWRLALE

SEQ ID NO: 17379 - protein, 240 aa, Synechocystis sp. PCC 6803
MAPQVDVLINKQILIERALVCVTTRITKAIAERGQGTIALSGGNTPKPLYEALARQALPWEKIHVFWGDERYVSVDHPDSNQRMARLAWLDQVDIPEANIHPMPTAAADPEQDAQTYENELATFFQVEAGHFPAFDLILLGLGDDGHTASLFPHTPALTVGDRLITVGNKDGQPRLTFTIPLINRARSVVFLVAGASKQHALGEIFAPEADPQQYPARFIQPQGELIWLLDQQAGENLRP

SEQ ID NO: 17380 - protein, 540 aa, GIBBERELLA ZEAE PH-1
MPQKSENQNKSVMATTAQDHLEFGGKISWLASLDTAFRPERNYRRSSIICTIGPKTNSVEAINKLRDSGLNVVRMNFSHGSYEYHKSVIDHARESEATHAGRNVAIALDTKGPEIRTGNTPGDEDIPISVGHEMNITTDDAYATASDDKNMYVDYKNITNVIEPGRIIYVDDGVLAFDVLKIVDEKTILVKARNNGAICSKKGVNLPNTDVDLPALSEKDKADLKFGVENNVDMVFASFIRRAQDIYDIRDVLGEQGKRIQIIAKIENRQGLNNFREILEATDGVMVARGDLGIEIPAAEVFAAQKKLIAMCNLAGKPVICATQMLESMIKNPRPTRAEISDVGNAITDGADCVMLSGETAKGSYPSEAVKEMHEACLKAENTIPYVSHFEEMCTLVKRPVSTVESCAMAAVRASLDLGAGGIIVLSTSGESARMLSKYRPVCPIFMVTRSPTTSRFAHLYRGVYPFLFPEQKPDFAQVNWQEDVDRRIKWAVNNALELNVLTPGDTVVVVQGWKGGMGNTNTLRIVKADPEHLGIGQLQ

SEQ ID NO: 17381 - protein, 330 aa, Helicobacter pylori J99
MKRMLAEFEKIQAILMAFPHEFGDWAYCIEEARESFLHIIQTIAKHAKVLVCVHTNDTIGYETLKNLPGVEIARIDTNDTWARDFGAISVENHGVLECLDFGFNGWGLKYPSNLDNQVNFKLKHLGFLKHPLKTMPYILEGGSIESDGAGSILTNTQCLLEKNRNPHLNQNGIETMLKKELGAKQVLWYSYGYLKGDDTDSHTDTLARFLNKDTIVYSACEDENDEHYTALKKMQEELKTFKKLDGTPYKLIPLEIPKAVYNENQQRLPATYVNFLLCNNALIVPTYNDPNDTLILETLRQHTPLEVIGVDCNTLIKQHGSLHCVTMQLY

SEQ ID NO: 17382 - protein, 411 aa, Oryza sativa
MNALAATSRNFRQAARLLGLDSKLEKSLLIPFREIKVECTIPKDDGTLASFIGFRVQHDNARGPMKGGIRYHPEVDPDEVNALAQLMTWKTAVAAIPYGGAKGGIGCAPGELSTSELERLTRVFTQKIHDLIGAHTDVPAPDMGTNSQTMAWILDEYSKFHGHSPAVVTGKPIDLGGSLGRDAATGRGVMYATEALLAEHGKSISGSTFVIQGFGNVGSWAARIIHEKGGKVIALGDVTGSIRNKNGLDIPALMKHRNEGGALKDFHDAEVMDSSELLVHECDVLIPCALGGVLNRENAPDVKAKFIIEAANHPTDPEADEILAKKGVTILPDIYANSGGVIVSYFEWVQNIQGFMWDEEKVNMELHKYMNNSFQHIKAMCKSHDCNLRMGAFTLGVNRVARATLLRGWEA

SEQ ID NO: 17383 - protein, 666 aa, uncultured bacterium 583
MEFDANLIAPALGVLGLLIVFFIYQWIKKQPGGSGAVQKIGEQIHIGSIVFMKREYKMLSMFALVLLVLLYIFLGPASALCFLVGAVASATAGYIGMNTATIANVRTAQAAHEEGSAAALTVAFFGGSVMGLSVAALGLLGLGGLYYFFGEAHSEALHGFAMGASVVALFSRVGGGIFTKSADVGADLVGKLEAGIPEDDPRNPAVIADNVGDNVGDIAGMGSDIFESYCGSMIATIAIASTLSVVALDKLGNQSELMFLPLALASLGLVCSVIGIVFVKMSSNKSPESALRMGTIGSALLFIITSYFLINQLEVSNSIWAAVLMGSVGGIIIGLVTEYYTAGKPIRDIAESGKTGAATVMIKGLAIGMQSVVIPVLMICLIIYVANLFVGLYGVGIAAIGMLATVGMTMAIDAYGPIADNAGGIAEMSGLGEETRKITDSLDELGNTTAAIGKGFAIGAAALAALAIITAYTETVSANSTDFILKLNSAEVLIGLFIGGTIPFLIAALTMTAVGDAAFEMIEEVRRQFKEIKGLLEGTAEPDTAKCIDIATTAALKKMILPGVIAVSAPVLVGFLISPEALGGMLAGALLGCVLMALMMANAGGAWDNAKKHVEKGNFGGKGTDVHTATVVGDTVGDPFKDTSGPSMNILINVMAIVSLVIAPLL

SEQ ID NO: 17384 - protein, 191 aa, uncultured bacterium 583
MEEETSFGKILIIDDEKDNTEIIKDVLEDVNYKTVLARSASEAKALISANTFDLVLMDVWMPGQDGISLLAELVSEGFDTPIVMMSGHAEPSDIVKAMKLGAIDFLKKPLHDFLPILRNIMTSPDLGESDQEVSGIDFSLRLKEARNLFERQYLLHHLALNDNNIAIVAEKAGLERTTLYRKLKDLGIDKK

SEQ ID NO: 17385 - protein, 519 aa, Arabidopsis thaliana
MSGAITCSAADLATLLGPNATAAADYICGQLGTVNNKFTDAAFAIDNTYLLFSAYLVFAMQLGFAMLCAGSVRAKNTMNIMLTNVLDAAAGGLFYYLFGYAFAFGGSSEGFIGRHNFALRDFPTPTADYSFFLYQWAFAIAAAGITSGSIAERTQFVAYLIYSSFLTGFVYPVVSHWFWSPDGWASPFRSADDRLFSTGAIDFAGSGVVHMVGGIAGLWGALIEGPRRGRFEKGGRAIALRGHSASLVVLGTFLLWFGWYGFNPGSFTKILVPYNSGSNYGQWSGIGRTAVNTTLSGCTAALTTLFGKRLLSGHWNVTDVCNGLLGGFAAITAGCSVVEPWAAIVCGFMASVVLIGCNKLAELVQYDDPLEAAQLHGGCGAWGLIFVGLFAKEKYLNEVYGATPGRPYGLFMGGGGKLLGAQLVQILVIVGWVSATMGTLFFILKRLNLLRISEQHEMQGMDMTRHGGFAYIYHDNDDESHRVDPGSPFPRSALLLAFNFQLFGNLLPFKYCLGFGFEI

SEQ ID NO: 17386 - protein, 162 aa, Chlamydomonas reinhardtii
AANTEQLTEEQIAEFKEAFALFDKDGDGTITTKELGTVMRSLGQNPTEAELQDMISEVDADGNGTIDFPEFLMLMARKMKETDHEDELREAFKVFDKDGNGFISAAELRHVMTNLGEKLSEEEVDEMIREADVDGDGQVNYEEFVRMMTSGATDDKDKKGHK

SEQ ID NO: 17387 - protein, 155 aa, Zea mays
MDFHQMVVAHIASGRSATVAAIRQPIGLADQFGVIQVAEDDPTRIDAFLEKPKDAVGLADSPGEILASMGNYVFNADALVDAVLRDGQVETSNHDMGGDIVPDFVNRGDAGVYDLQRNDVPGSNERDRYYWRDVGTIDSFYDAHMDLIGPVPVFN

SEQ ID NO: 17388 - protein, 689 aa, Prochlorococcus marinus str. NATL2A
MKNTNSNQNKNFIASKHDVILDDLTLLEKINLWWSRFNLRSKLLAFGTLVVSFIMTLITFFALSSIQKDAGMNDTRYARDLGLLLSGNVTELVAKNQTRELFNVAEKFWRSSRNLRYIFFTDPDGFVKLGIPVSATASDSDAEGALQLTRKLKLPSELKKQPQFPLVRQHSTPQGQVTDVFVPMLWKGEYLGTLALGVTPNKKALATAALTREITVAVFISIWVLVIIGAVFNALTITRPIRELVIGVREIAKGNFKSRVDLPMSGELGELLTGFNAMASRLEDYDAANIEELKAAQVKQQSLIATMADGALLLDEQGNIVLVNPTARRLFRWEGRNLEGQNLLNQLPDSLVKELETPITSLLNNFGDSDDLRCNLEEPPRTLRIVLKSVRDTTGENIKGIAVTIQDLTREVQLNAAQKRFISNVSHELRTPLFNIKSYVETLYDLGEQLTKDEQKEFLGVANSETDRLTRLVNDVLDLSKLESGRTIQLEALSIKEAMEQTLRNYKLNAEEKNVKLILNVENNLTFVLGNWDMLLQVFDNLVGNALKFSQEGGTINLKAYTWPDICVASPVDLDNKAPHCEILSPMPKIRVEVSDTGYGISEIDQQRIFERFYRVEDSVHTEVGTGLGLSIVKGIVDKHGSEIRMASEPNTGTTFWFELPLEDSDADELLLKSARKNWELENDKTLIK

SEQ ID NO: 17389 - protein, 514 aa, Arabidopsis thaliana
MDTATTTCSAVDLSALLSSSSNSTSSLAAATFLCSQISNISNKLSDTTYAVDNTYLLFSAYLVFAMQLGFAMLCAGSVRAKNTMNIMLTNVLDAAAGAISYYLFGFAFAFGTPSNGFIGRHHSFFALSSYPERPGSDFSFFLYQWAFAIAAAGITSGSIAERTQFVAYLIYSTFLTGFVYPTVSHWFWSSDGWASASGSDNNLLFGSGAIDFAGSGVVHMVGGIAGLCGALVEGPRIGRFDRSGRSVALRGHSASLVVLGTFLLWFGWYGFNPGSFLTILKGYDKSRPYYGQWSAVGRTAVTTTLSGCTSALTTLFSKRLLAGHWNVIDVCNGLLGGFAAITSGCAVVEPWAAIVCGFVASWVLIGFNLLAKKLKYDDPLEAAQLHGGCGAWGLIFTGLFARKEYVNEIYSGDRPYGLFMGGGGKLLAAQIVQIIVIIGWVTVTMGPLFYGLHKMNLLRISAEDEMAGMDMTRHGGFAYAYNDEDDVSTKPWGHFAGRVEPTSRSSTPTPTLTV

SEQ ID NO: 17390 - protein, 214 aa, uncultured bacterium
QTGGSFYEPFNSYNSGLWQKADGYSNGDMFNCTWRANNVSMTSSGEMRLALTSPSYNKFDCGENRSVQTYGYGPYEVRMKPAKNTGIVSSFFTYTGPTEGTPWDEIDIEFLGKDTTKVQFNYYTNGAGNHEKLADLGFDAANAYHTYAFDWQPNSIKWYVDGQLKHTATTQIPAAPGKIMMNLWNGTGVDDWLGSYNGVNPLYAHYDWVRYTKK

SEQ ID NO: 17391 - protein, 131 aa, Triticum aestivum
MVKQKIVLKLALDDERKRRKAFKAAVGMSGVTSATMEGDKIIIVGDGVDPITLTTMLRRSLGYAELLSVSSGDDKKKDGYGAAYGYGGGEKKDGYGAAYGYGGGEKKKDGYGYGGADGGGSGMSFGGKEGG

SEQ ID NO: 17392 - protein, 482 aa, Pseudomonas syringae pv. tomato str. DC3000
MQLIWLRSDLRVHDNTALTAAMQRGPTLAVYLLSPTQWRNHDDADCKVDFWLRNLVELEKALGKLNVPLLIREADTWDQAPEVLATLCKQFKVEGLHLNEEYGINETRRDQAVQQSMQADGVHFTSHLDQLLFKPGSILTKTGNYFQVFTQFKKVCYTRLHQAMPRTVHTPEAQQPLSIKSDAIPDQVKGFSTPSKTLRDLWPAGEVEASRRIEAFAGEQISYYKDERDFPARPGTSQLSAYLAAGVISPRQCLHAALASNQGEFETGDVGTVTWINELLWREFYKHTLVGYPRVSRHRAFRPETEALKWRDAPEELLAWQEARTGLPIIDAAMRQLLETGWMHNRLRMVVAMFLTKNLLIDWREGERFFMRHLIDGDLAANNGGWQWSSSTGTDSAPYFRIFNPLSQSERFDPEGVFIKRWLPELADLNKKQIHDPASVGGLFGVADYPKPIVDLSKSRARALAAFKALPTRQPAAGADNG

SEQ ID NO: 17393 - protein, 188 aa, Fragaria vesca
IMTTSADEGQFLNMLLKLINAKNTMEIGVYTGYSLLATALAIPEDGKILAMDINKENYELGLPVIEKAGVAHKIDFREGPALPVLDQMIEDEKNHGSFDFIFVDADKDNYINYHKRLIDLVKVGGLIGYDNTLWNGSVVAPPDAPLRKYVRYYRDFVLELNKALAADPRIEICMLPVGYGITLCRRIK

SEQ ID NO: 17394 - protein, 268 aa, Erwinia carotovora subsp. atroseptica SCRI1043
MERYQQLFTRLSEKKEGAFVPFVTLGDPSPEQSLKIIDTLIAAGADALELGVPFSDPLADGPTIQDANLRAFAAGVTSGQCFEMLAAIRQKYPEIPIGLLMYANLVFSNGIDEFYQRCAEVGVDSVLVADVPVVESAAFRAAALRHGIAPIFICPPNADDELLREIASYGRGYTYLVSRAGVTGAEKRAQLPLNHLVAKLNEYHAAPPLQGFGISDPAQVRETVASGAAGAISGSAIVRIIEKNLNQPDVMLSELHAFVSEMKAATRS

SEQ ID NO: 17395 - protein, 166 aa, Acanthospermum australe
MFPMVTEFMNYGQQTVRAARYIGQGFTITLSHANRLPVTIQYPYEKLITSERFRGRIHFEFDKCIACEVCVRVCPIDLPVVDWKLETDIRKKRLLNYSIDFGICIFCGNCVEYCPTNCLSMTEEYELSTYDRHELNYNQIALGRLPMSIIDDYTIRTILNLPETKT

SEQ ID NO: 17396 - protein, 243 aa, Triticum aestivum
MLAIFQKQVAHAPQELNSPRGSTAKPKNPDEILRDFHAAHPSDAFSAGYQRMFCGLDDIYCVFMGTLDNLSALMRQYGLTGRSTNEALLVIEAYRTLRDRGPYPADQVVKDLSGSFAFVVFDNRGRSGSGAAVFAAQSTDGGVPLHWGVAADGSVVICDDRGVAKAGCGRSYAPFPPGCMFHSEGGLKSFEHPMNRLKAFPRVDSEGVMCGANFKVDAFTKINSMPRVGSATNWAATWDDAAI

SEQ ID NO: 17397 - protein, 518 aa, Glycine max
  misc_feature (143)..(143): Xaa can be any naturally occurring amino acid
  misc_feature (236)..(236): Xaa can be any naturally occurring amino acid
  unsure (1)..(518): unsure at all Xaa locations
MADRKNSGSIRVESAQEKRRKKLPNFVVSVRLKYVKLGYHYVISNAMYLMLIPLIGTASAHLSTISMKELVRLWENLKFDLVSVTLCSSLMVFLGTLYFMSRPRGVYLVDFACYKPDVDCTCTREIFVERSGLTGSFSEENLXFQKKILERSGLGQKTYLPPAILSLPPRPCMAAAREEAEQVMFGAIDQLLAKTGVKAKDIGILVVNCSLFNPTPSLSAMIVNHYKLRGNVFSYXNLGGMGCSAGLISIDLAKHLLQVHPNSYALVVSMENITLNWYFGNNRSMLVSNCLFRMGGAAILLSNRSGDRHRAKYQLVHTVRTHKGADDKSYGCVFQEEDETKRIGVALSKDLMAVAGEALKTNITTLGPLVLPMSEQLLFFATLVARKVFKMKIKPYIPDFKLAFEHFCIHAGGRAVLDELEKNLELSDWHMEPSRMTLNRFGNTSSSSLWYELAYTEAKGRIKKGDRTWQIAFGSGFKCNSAVWRALRTINPAKENNPWMDEIHDFPVHVPKVAPIAS

SEQ ID NO: 17398 - protein, 70 aa, Shigella flexneri 2a str. 301
MAEPEGRCVRMLSDSWSFPDSRHTLGCSTIGSSEAAMLGRLALKWQWCKKREVQGKSTEPDLRSCANMLA

SEQ ID NO: 17399 - protein, 380 aa, Vibrio parahaemolyticus RIMD 2210633
MPQTVAKKAELGGAGLRGQSAGSTALCTVGKTGTGLTYRGYDITDLANNAQFEEVAHLLLRGHLPSQQELDAYKTHLLSLRGLPTELKQALELIPASAHPMDVMRTGCSVLGNLEQEMSFDEQLQATERMLALFPAIICYWYRFSHDGVRIDTEDQTEDCIGGYFLRLLTDKEPSVLHKQVMHCSLILYAEHEFNASTFAARVCASTLSDIHSCITAAIGTLRGPLHGGANEAAMEMIEDWQTPDEAEANIMQMLANKDKIMGFGHAIYRESDPRNALIKRWSEELSKHVGDTHLYAVSERVESVMKREKGLFCNADFFHASAYHFMDIPTKLFTPIFVMSRLTGWAAHVYEQRANNRIIRPSADYTGPDHQEWVPIENR

SEQ ID NO: 17400 - protein, 406 aa, Candida albicans SC5314
MPQSSSTFINEYTLPDVVENSSSRASKMTIKEYKRIGEGAFGTVVEAMLKYETNSSKGNDGTGSHLLGHFRHHSHSDKDNNNTTNNNNNNNKDGEWLGPFAIKRVPAQTEYKSRELEILRFVSHPNIVSLRFFFDKKSSSDNKVYQNLVMECLPSNLQSEIKYYRQSKYTIPYPHMKAYTFQLARAMLYLHGYGISHRDIKPSNILVDPNTVRLKICDFGSAKKLEPNQPSVSYICSRYYRAPELIVGCSLYTTKIDIWGLGCVIAEMFLGKPIFQGQSPESQLKEIAKLLGPPPNTFFFKSNPQYRGNMYTTRLFNCSIEERFKQIFSNSPSDAIDLLMKILVYDPDVRASPRRVLIHPFFDELKSSQFKVYPRGSSTPIELHLFNFSEYELELLGSLKNEFVKS

SEQ ID NO: 17401 - protein, 149 aa, Archaeoglobus fulgidus DSM 4304
MMVMDLSLQRRLAASVLKCGENRVWFDPAALEDIATAATKQDIRELIEQGVIKRKPVNGVSRARINKRKLQKRKGRRRGHGSRKGAKGARMPRKRMWILRIRALRKALRQMKAEGVVDRRTYRILYRKAKGGEFRSVAHLKIYVEQMKR

SEQ ID NO: 17402 - protein, 667 aa, Shigella flexneri 2a str. 301
MSRKDLANAIRALSMDAVQKANSGHPGAPMGMADIAEVLWNDFLKHNPTDPTWYDRDRFILSNGHASMLLYSLLHLTGYDLPLEELKNFRQLHSKTPGHPEIGYTPGVETTTGPLGQGLANAVGLAIAERTLAAQFNQPDHEIVDHFTYVFMGDGCLMEGISHEVCSLAGTLGLGKLIGFYDHNGISIDGETEGWFTDDTAKRFEAYHWHVIHEIDGHDPQAVKEAILEAQSVKDKPSLIICRTVIGFGSPNKAGKEEAHGAPLGEEEVALARQKLGWHHPPFEIPKEIYHAWDAREKGEKAQQSWNEKFAAYKKAHPQLAEEFPRRMSGGLPKDWEKTTQKYINELQANPAKIATRKASQNTLNAYGPMLPELLGGSADLAPSNLTIWKGSVSLKEDPAGNYIHYGVREFGMTAIANGIAHHGGFVPYTATFLMFVEYARNAARMAALMKARQIMVYTHDSIGLGEDGPTHQAVEQLASLRLTPNFSTWRPCDQMEAAVGWKLAVERHNGPTALILSRQNLAQVERTPDQVKEIARGGYVLKDSGGKPDIILIATGSEMEITLQAAEKLAGEGRNVRVVSLPSTDIFDAQDEEYRESVLPSNVAARVAVEAGIADYWYKYVGLKGAIVGMTGYGESAPADKLFPFFGFTAENIVAKAHKVLGVKGA

SEQ ID NO: 17403 - protein, 309 aa, Polaromonas sp. JS666
MQAIVKIGTFAGELQQTIDREFQCHGPEDIARDDGLRQSIRGLITRSNYQVPLALLELLPALQVISTCGVGYDGIPVAYAQARGIAVTHTPGVLDDAVCELGVGLLLGLLRDIPASDRFVRDGRWSDSAYPLTTSLAGKAVGIVGLGRIGRGIAARLQPFGVALAYSGSPKIDVPYRHVQSVLALAGECSILIVCCKGGSETRHLVNAEILQALGPAGYLVNIARGSVVDEEALVHALTTGGIRAAALDVFEDEPLRNSALTSLPNVLLSPHAGSATREARTAMLRLTLDNLHAVLNGQPALSPTPRIG

SEQ ID NO: 17404 - protein, 331 aa, Vibrio sp. Ex25
MTIKVGINGFGRIGRFVFRAAQERADIEVVGINDLIDVDYMAYMLKYDSTHGRFNGTVEVEGGNLIVNGKTVRVTAERNPADLKWDEIGVDVVAEATGLFLTDETARKHIEAGAKKVVLTGPSKDATPMFVMGVNHATYAGQDIVSNASCTTNCLAPIAKVLNDKFGIESGLMTTVHATTATQKTVDGPSAKDWRGGRGASQNIIPSSTGAAKAVGVVLPELNGKLTGMAFRVPTANVSVVDLTVNLKEGASYEAICAAMKEASEGELKGVLGYTEDAVVSQDFIGEVQTSVFDAKAGIALTDNFVKVVSWYDNEIGYSNKVLDLIAHISK

SEQ ID NO: 17405 - protein, 429 aa, Shigella flexneri 2a str. 301
MTRRAIGVSERPPLLQTIPLSLQHLFAMFGATVLVPVLFHINPATVLLFNGIGTLLYLFICKGKIPAYLGSSFAFISPVLLLLPLGYEVALGGFIMCGVLFCLVSFIVKKAGTGWLDVLFPPAAMGAIVAVIGLELAGVAAGMAGLLPAEGQTPNSKTIIISITTLAVTVLGSVLFRGFLAIIPILIGVLVGYALSFAMGIVDTTPIINAHWFALPTLYTPRFEWFAILTILPAALVVIAEHVGHLVVTANIVKKDLLRDPGLHRSMFANGLSTVISGFFGSTPNTTYGENIGVMAITRVYSTWVIGGAAIFAILLSCVGKLAAAIQMIPLPVMGGVSLLLYGVIGASGIRVLIESKVDYNKAQNLILTSVILIIGVSGAKVNIGAAELKGMALATIVGIGLSLIFKLISVLRPEKVVLDAEDADITDK

SEQ ID NO: 17406 - protein, 676 aa, Escherichia coli O157:H7
MKLAACFLTLLPGFAVAASWTSPGFPAFSEQGTGTFVSHAQLPKGTRPLTLNFDQQCWQPADAIKLNQMLSLQPCSNTPPQWRLFRDGKYTLQIDTRSGTPTLMISIQNAAEPVANLVRECPKWDGLPLTLDVSATFPEGAAVRDYYSQQIAIVKNGQITLQPAATSNGLLLLERAETDASAPFDWHNATVYFVLTDRFENGDPSNDQSYGRHKDGMAEIGTFHGGDLRGLTNKLDYLQQLGVNALWISAPFEQIHGWVGGGTKGDFPHYAYHGYYTQDWTNLDANMGNEADLRTLVDSAHQRGIRILFDVVMNHTGYATLADMQEYQFGALYLSGDEVKKTLGERWSDWKPAAGQTWHSFNDYINFSDKTGWDKWWGKNWIRTDIGDYDNPGFDDLTMSLAFLPDIKTESTTASGLPVFYKNKTDTHAKAIDGFTPRDYLTHWLSQWVRDYGIDGFRVDTAKHVELPAWQQLKTEASAALREWKKANPDKALDDKPFWMTGEAWGHGVMQSDYYRHGFDAMINFDYQEQAAKAVDCIAQMDTTWQQMAEKLQGFNVLSYLSSHDTRLFREGGDKAAELLLLAPGAVQIFYGDESSRPFGPTGSDPLQGTRSDMNWQDVSGKSAANVAHWQKISQFRARHPAIGAGKQTTLSLKQGYGFVREHGDDKVLVIWAGQQ

SEQ ID NO: 17407 - protein, 310 aa, Zea mays
  misc_feature (265)..(265): Xaa can be any naturally occurring amino acid
  unsure (1)..(310): unsure at all Xaa locations
MKRSWNLGRHMVHLIRQVKPSMSEPISQPGNPPTPGNESASPSPSLRSQPEPARRDFHRNPSLLAATSPDRFRHSWWPEKQSLVLCLRSSSDMSLLSKLRLVTVDVTGTLLAYKGRLGDYYCMAAKAAGKPCPDYDRMHEGFKLAYTEMARKYPCFGFAAKMPTIEWWRICVKDSFVKAGYDYDDETFDKVFKRIYSAFGSSAPYSVFPDAQPFMRGLREKGITVGIVSNAEYRYKEVILPALGLNQGSEWDFGVFSGIVGVEKXDPKIYKIALEMAGNVAPEEALHIGDSYRKDYVPARSIGMHALLLD

SEQ ID NO: 17408 - protein, 162 aa, Burkholderia fungorum LB400
MTAIQNFFKTFFLTELLKGLALTGRYTFQRKVTVQFPEEKTPISPRFRGLHALRRYENGEERCIACKLCEAVCPALAITIESETRADNTRRTTRYDIDLTKCIFCGFCEESCPVDSIVETHILEYHGEKRGDLYFTKDMLLAVGDRYETEIAANKAADAPYR

SEQ ID NO: 17409 - protein, 332 aa, Nostoc punctiforme PCC 73102
MSSGKPTILVTGGAGYIGSHTVLALKQAGYNVVILDNLVYGHRDLVEKILQVELVVGDTGDRALLDHLFKTRDIAAVMHFSAYAYVGESVTDPAKYYRNNVVGTLTLLEAMLTASVKKFVFSSTCATYGVPEFVPIPENHPQNPINPYGATKLMVERILSDFDVAYGFQSVRFRYFNAAGANPNGLLGEDHNPETHLIPLVLMTALGKRKSISIFGTDYPTPDGTCIRDYIHVNDLADAHILGLEYLLKGGDSEVFNLGNGSGFSVREVIAAAEQVTGTSIPVEEHDRRPGDPPILIGTSEKARTILGWQPQYPSIEDIVAHAWQWHQKRHK

SEQ ID NO: 17410 - protein, 331 aa, Azoarcus sp. EbN1
MARVVRFHEFGAPEVLKIEDLEVGEPGPGEMRIRVQVIGLNRAEAAFRAGQYIEKAQLPARLGYEAAGTVDALGQGVGGFEIGEAVCVIPEFSMNRYGVYAEQAIVPAAAVVKRPPGLSTAEAAAVWMPYLTAYGALIDVVRLGQGDAVVITAASSSVGLAAIQIANSVGAVPIAVTRTEAKRAELQAAGAAHVIVSQAQDIAAEVMRITGGDGARMVFDPVGGPSILPLVSALACQGTLVLYGNLSGEAHQTPFPFGLAVGRGLSLRGYLVFEIIHDPARLARAEAFIREGLRSGVLKPKIDRTFSLEKIVEAHRYLEGNQQLGKVVVTV

SEQ ID NO: 17411 - protein, 548 aa, Pediococcus pentosaceus ATCC 25745
MNFKNKVIYQIYPKSFYDSNNDGIGDLQGIIKKIPYIDKLNIDMIWFNPFFVSPQYDNGYDIANFYEIDPVFGTMSAFEELVRKLKEIHVGVMLDMVLNHISTEHEWFQKALAGDEHYQKYFYIRDPKPNGDLPNNWTSKFGGPAWAKFGDTGKYFLHLYDEHQADLDWHNPEVRQELFKVINFWHAKGVKGFRFDVINVTGKDVELTDAPEGVESKFMYTDTPIVQSYLKEMHQAALQDPEVITVGEFSSASVENGVKYTRPEEHELTMAFTFHHLKVDYDHGQKWTKVPFDFAALKKTINTWQVGMDEGDGWNALFWNNHDQPWALNRFGDSGKYRAKSAEMLATTMHLLRGTPYIYQGEEIGMVDPDYQNIDEYVDVEALNAYQRLLKENKSPQDALEIVKSKARDNSRVPMHWDDSKYAGFSEVQPWLKPTKQTEINVANELEHGEIFAYYQKLIQLRREFSIISEGDYQSFELNHPSVFAYIRTYQDQSLLVLNNFYGNDATISIPSKYTTETAKILINNYETNPELTTTLKLKPYQSIAILI

SEQ ID NO: 17412 - protein, 377 aa, Streptococcus mutans UA159
MKIDKYSAILGSAIGFPEMEGLTDTRPLANLPFDGKYRLIDFQLSNLANAGIRSVYGIFRGQNIRSIFDHIRSGREWGLNTLLSHYFLGFYNTPEDSIYADKDYYDQILTYLKRSGSDQTIYMSCDILCNIDLQQVIHLHNANKRNITVVYKKLPINAISAANDILEIDETDTVTGRRDSQSGNETEKMSAGIYIVNTSWLIEQMEKENQKEEPINLRFLLRDLTVAEKALAFEYTGYLANISSIQSYYNANMDMLESQKFYSLLYSNQKVYTKVKNEEATYFAVDSTVKNAQFASGSIIKGTVDHSIISRNCHIANHSRVVNSVVFPKVSIGDGAVVENAILDKNVKIAPGVIIRGTGDKPIVIAKASEVVEDIIQ

SEQ ID NO: 17413 - protein, 406 aa, Pseudomonas syringae pv. tomato str. DC3000
MLFVAFGALVLMPLITGLDPNVALFTAGLGTLLFQIVTGRQVPVFLASSFAFITPIILAKGQFGLAATMGGVMAAGFVYTFLGLAVKIKGTGFIDRLLPPVVIGPVIISIGLAMAPIAANMAMGKTGDGAVLIPYQTAMLISMPALLTTLIVAVFGKGIFRLVPIISGVLVGFALSFYFGVVDTKKIADAAWLAIPHFTAPEFNWQAILFIVPVALAPAIEHIGGVIAVGSVTGRDYLKKPGLHRTLFGDGIATTAAGLFGGPPNTTYAEVTGAVMLTKNYNPQIMIWASFFAITLAFIGKFGALLQSIPVPVMGGILCLLFGSIAAVGMNTLIRHKIDLAEARNLVIVSVTLVFGIGGVLIGTGNGPNDFGLKGIALCAITAIILNLILPGHDSWKHNRPDDQLL

SEQ ID NO: 17414 - protein, 932 aa, Clostridium thermocellum ATCC 27405
MPSDELDFCAFFDIEEHLYWQGDAMKSKRMIKQSTLSAIILAIFFFIAVMLIWSILYMNSCIRAEQNAERRRTEFKQLGIDLADASDYLTDEARKFAVTRKIVHLERYWEEINVTRTRDKVISRLQELDSPKEELELLAKAKKYSDALVETERRSMRLVLEALGVDESDMVPEVASFKLSEGDQRLSREDKLLKAIEIMYDARYDSDKKNIMDPIAKFQRIMNQRLESELEAARRGTAGATVLQIILAFVIILAIAVLIRILFTQVTYPIRDYILKLKDFSFDDEEFRLVPKGTVELNMLAENFNELYRSFHNELVRRKKAEETMKAARDEADKANRAKSEFLASMSHEIRTPINSIIGYQYLLKNSVLSPKQREYVENIGLAAKNLLAIINQILDFSKIEAGRMVLEEVDFNIDDVLNELMIIVGMEAKRKGIELRIKVDEDVPRFLKGDITRLKQVVMNLVSNGIKFTHEGYISIRVELVEKNEENACIKFSVTDTGIGISDEQKKLLFQAFTQGDASTSRKYGGTGLGLAICKRLVELMKGEINVESEVGKGSTFSFSLRLKIASCNENRNGKSKSVDTEEQYKNVKILLVEDSSVNLQMTKEILENMGIDTDTAQSGEEAVKKAESNEYELILMDIRMPGMDGYEATRRIRKLERGSMPIVALTADAVEGVAQKAKEAGMNGYLTKPLEPEKLLEVIRSMTNGGGKFKEEKSKSCAKAAEAENPYYEHKYETLDFDGAVNRLGGKRDKYIGILKSFVELHKDDGVKIRELAASGKRDELRRFLHSLKGSAANIGALRLKDLLARLEESCIPQNCEKNAKWMNDLEKEFERLIEEIMQYIRAFDSYKGSSPENHENNNVREDLEMLCKLLLTGDSEAKSFFEEKLAYLGNVLRPEDYHDLKKKISCYEFQKALAIVDKLKQDFSGKLTK

SEQ ID NO: 17415 - protein, 381 aa, Streptococcus mutans UA159
MHMKNEMLALILAGGQGTRLGKLTQSIAKPAVQFGGRYRIIDFALSNCANSGINNVGIITQYQPLALNSHIGNGSSWGLDGINSGATILQPYSATEGNRWFQGTSHAIYQNIDYIDSINPEYVLILSGDHIYKMDYDDMLQTHKDNMASLTVAVIDVPLKEASRFGIMNTDSNDRIVEFEEKPEQPKSTKASMGIYIFNWDRLRTMLVDAEKNNIDMSDFGKNVIPAYLESGERVYTYNFNGYWKDVGTIESLWEANMEYIGEDNDLHSRDRSWKIYSKNLIAPPNFITEEAHVKDSLVVDGCFVSGKVEHSILSTNVQVKEGAQIKDSFIMSGAVIGEGAKITRAIVGEGAKIGEDVEIDGTEEVQVIGYNEVVGVPNED

SEQ ID NO: 17416 - protein, 562 aa, Arabidopsis thaliana
MADLSLPPDSLFLGFDSSTQSMKATVLDSNLNIIKTELVHFDSDLPQYKTKDGVYRDTTVNGRIVSPTLMWVEAFDLILQKLSNANFDFAKVIAVSGSGQQHGSVYWSKGSSEVLRSLDSKRSLKEQLENAFSVKESPIWMDSSTTLQCKEIENAVGGAMELSKITGSRAYERFTGPQIRKLFMTQGEVYKSTERISLVSSFMASLLVGDYACIDETDAAGMNLMDIEKRCWSKAALEATATGLEEKLGKLAPAYATAGSISQYFVQRFGFEKNCVVVQWSGDNPNSLAGLTLSTPGDLAISLGTSDTARLLILVELAKLQPSLEGHVLPNPVDPESYMVMLVYKNASLTREEIRDRCAEGSWDVFNKYLQQTQPLNNGKLGFYYTENEILPPLPVGSHRYILENFSGESLEGVKEQEVGEFDPPSEVRALIEGQFLSKRAHTERFGMPSPPLRIIATGGASANENILSLISAIFGCDVYTVQRPDSASLGAALRAAHGWLCNKKGSFVPISNLYEGKLETTSLNCKLKVKAGDANIASTYGLLMKKRMEIENKLVEKLGHF

SEQ ID NO: 17417 - protein, 231 aa, Triticum aestivum
ADSLTKRKPCSAPKWKEMTGSGIFAAGSNGDAGEAAAAAAKPARTASRQAISTVSHISFAEDGTDPPKKPTSVAEVAKQRELSGTLQSEADSKMKKQISNAKSKELSGHDIFADTPDSRSNRARNSSNGSTASHTPVKNTNASTFSFGEANTDSAPKTAKKITGKKVNDLTGNDIFKGDAPPASAEKHLSTAKLKEITGSNIFADGGKEPIRERVGGNRKPPGGESSIALI

SEQ ID NO: 17418 - protein, 615 aa, Pediococcus pentosaceus ATCC 25745
MNKRTNFFKSINFKIALVFAMLLVVTLEVVGVIFVRQLETQNLNQFKTQVQLQPYVENEISTQLERANTKSANSQISDIIGNINNQNITEIRVIDAKGVIRGTSNSTNQNIVGQKTTDRNVKDVIYNTRTYQQVSYNKTTNTRYFVSIVPLINTAGATNNLTGVVYIRANLESVYQNVNNITLIFVVAALIAITIGLILAVLISRAITRPIEEMRQRTIQIARGDYSGQVQIYGDDELGQLAEAVNELSVRVEESQESTESERRRLDSVLGYMTDGVLATDRRGRITIVNEMATDFLNLENDQIVGKSILDILDLRGTFTLRDLLENQEQVVLDLSDDDQDLILHASFALIQRESGFISGLVCVLHDVTEQQKIDQDRKRFVSNVSHELRTPLTSMKSYIEALVEGAWKDPEVAPNFLKVTQEETDRMMRMINDLLNLSRMDLGTARLEREYVNLNELFNHILDRFDMILKNSDKPDKNYSIKRDFTRRDIWVEVDTDKIQQVLDNIMNNAIKYSPDGGIITCRLLETHNHVIMSITDQGLGIPKDSISHIFDRFYRVDKARSRAQGGTGLGLAISKEVIQLHGGRIWVESREGEGSTFYISLPYEPFEEGDTWE

SEQ ID NO: 17419 - protein, 492 aa, Glycine max
MDPYKNRPSSAFNSPFWTTNSGAPIWNNNSSLTVGSRGPILLEDYHLVEKLANFDRERIPERVVHARGASAKGFFEVTHDISHLTCADFLRAPGVQTPLIVRFSTVIHERGSPETLRDPRGFAVKFYTREGNFDLVGNNFPVFFVRDGLKFPDMVHALKPNPKSHIQENWRILDFFSHHPESLHMFSFLFDDVGIPQDYRHMDGFGVNTYTLINKAGKAVYVKFHWKTTCGEKCLLDDEAIRVGGSNHSHATQDLYDSIAAGNYPEWKLYIQTLDPENEDRLDFDPLDVTKTWPEDVLPLQPVGRMVLNKNIDNFFAENEQLAFCPAIIVPGVYYSDDKLLQTRIFSYADTQRHRLGPNYLQLPANSPKCAHHNNHHDGFMNFMHRDEEVNYFPSRYDPVRHAERVPVPPRTLGGKREKCMIEKENNFKQPGERYRSWPSDRQERFVRRWVDALSDPRVTHEIRSIWISYWSQADRSLGQKIASHLNLKPSI

SEQ ID NO: 17420 - protein, 166 aa, Ambrosia trifida
MFPMVTEFMNYGQQTVRAARYIGQGFMITLSHANRLPVTIQYPYEKLITSERFRGRIHFEFDKCIACEVCVRVCPIDLPVVDWKLETDIRKKRLLNYSIDFGICIFCGNCVEYCPTNCLSMTEEYELSTYDRHELNYNQIALGRVPMSIIDDYTIRTILNLPEIKT

SEQ ID NO: 17421 - protein, 1083 aa, Magnaporthe grisea 70-15
MATSDDQTVPIPEPQGLPLLGNIGAIDNEFPLGSLLSMASKYGEIWRMRFPGRSLVFVSTQALVNEVCDEKRFYKSINPTLKEVRGGTHDGLFTAYPDEENWGIAHRILMPAFGPLSIRSMYDEMHDIASQLALKWARYGSNSPIMVTDDFTRLTLDTLALCSMGFRFNSYYSTEMHPFIDAMADFLVECGTRGRRPPLPSIFYRTQDQKFDSDIEILRKTAREVLEARKAGEGADRRDLLHAMLSGVDSKTGKKMTDESIMDNLITFLIAGHETTSGLLSFVFYELMKHPEFYEKAQREVDEVCGKGPITVEHMSKLPYLNAVLRETLRVHATIPNITVAAREDDVLGGKYKVSKDEVIVLLLAKSQVDPRVWGKDADEFVPERMLDENFERITKEFPNSWKPFGNGMRACIGRPFAWQEALLVMAMLLQNFNFVLAPNYQYALKQTLTLKPKDLYMRAILRDGLNPTTLERRLQGLSQGDSASTKQASGAGAGAAPADATGVPLTVLYGSNSGTCEALARRIATDAPSHGFYAATVDCMDSAKGKLPTDQAVVIITASYEGQPPDNAGHFVAWLEGSDKAAKPCKDVSYAVFGCGHKDWAQTFHRVPRLVDDSLQELGASRLVEPGLSDVSTGAVFSDFESWEDDKLWPALAARYQVNSEAAAAENGAEASVKVHVSNPRINTLRQDVKEARVIEAKVLTSRPESTSEGGRQFKRHLEIELPEGMEYSAGDYLAVLPVNPIDTVLRTLHRFGLARDAHVTIEMASSQSTALPTNTSVPAFELLSSYVELSQPATKRDAASDEETKSQLGKLSGDDFADEVGAKRVSVLDLLERFPAIDLPIGSFLSMMPPMRVRQYSISSSPLVNPSRVTLSFSVLDAPSLSGQGRHIGVASNYLSSLNAGDSLHVSVRPSHAAFSLPSDQERTPLICAAAGTGLAPFRGFAQERAAMISAGRKLAPALLYFGCRDPDFDDLYRDEFDEWEKLGAVEVRRTYSRKPEASDGCKHVQDRIVADADRLLGLWMEGAKLYVCGSRGVSQSVMDAMTRIKMDKDRELHGKETTVEEARQYFDDLRNVRYATDVFD

SEQ ID NO: 17422 - protein, 574 aa, Brassica juncea
WWIVAVAILAHTASASVREYHWEVEYKFGFPDCKEGMVMAINGKFPGPTIHALAGDTIVVHLTNKLATEGLVIHWHGIRQLGSPWADGAAGVTQCAITPGETFTYRFTVEKPGTHFYHGHYGMQRSAGLYGSLIIDAAKGKREPLRYDGEFNLLLSDWWHESILSQELGLSAKPMRWIGEAQSILINGRGQFNCSLAAQFSNATAQFSNTSLPMCKFKKGDQCAPQRLHVQPNKTYRIRLASTTGLASLNFAVQGHKLMVVEADGNYITPFATSEIDIYSGESYSVLLTTDQDPSQNYWISVGVRGRKPKTPPALTVLHYVTAPSSQPHSSPPPETPRWNDFDRSKSFSRKILAAMGSPPPPRKFKKRLILLNTQNTIDGATKWALNNVSLVVPATPYLGSGKYRLRRGFDRKSPPTTFPVDYDIMNPPRNRNTTKGNGIYVFPFNVTVDVILQNANGLDANASEIHPWHLHGHDFWVLGYGEGKFRPGVDEKTYNLKNPPLKNTVALFPYGWTALRFVTDNPGVWFFHCHIEPHLHMGMGVVFAEGLNRIGKIPDEALGCGLTKQFLMNRNNP

SEQ ID NO: 17423 - protein, 166 aa, Aphanactis jamesoniana
MFPMVTEFMNYGQQTVRATRYIGQGFMITLSHANRLPVTIQYPYEKLITSERFRGRIHFEFDKCIACEVCVRVCPIDLPVVDWKLETDIRKKRLLNYSIDFGICIFCGNCVEYCPTNCLSMTEEYELSTYDRHELNYNQIALGRLPMSIIDDYTIRTILNLPEIKT

SEQ ID NO: 17424 - protein, 744 aa, Trichodesmium erythraeum IMS101
MSISTSTLGYPRIGKNREVKKALESFWQQKISADELLKIVREIEEASWQTQTKAGIERIGIGDATLYDQILDWSFRFGIIPKRFQQFQNLECYFAMARGKDGILALEMTKWFDTNYHYLVPEITPDITPKADFSDFLETVKRAKKIIGKSAVPIIISPITFIRLSRLESVEFDNILAQLLPLYSDLLTKLKKLGISEIQLHEPALVFGDSSNLKKQFEMAYAELAKVGLNIHLVTYFDDLGETYPWVMKLPVTSISLDLTRGQNLELIKSYGFPADKTLGAGVVDARNIWRIRTQEVTSLLEELKGIIPNISVQPSASLQFVPYDVRREVKLPEALRNVLSFAEQKLEETVLLSKALTGKSNKSEIENIEIYWQEFYKFSPANEKVKSQIKALKETDFRRSMSYLERLDNQIKLPAFPTTTIGSFPQTKQVRKLRARYKKGELTQAEYLAQIDANIAYCIGLQEGMGMDVLVHGEFERSDMVEYFGEQLDGYTFTTHGWVQSYGSRYVRPPIIFGDIYRPHAMTIREFEVAQSLTEKPVKGMLTGPVTMLNWSYPRTDISRQEQAFQLALAIREELKDLEKAGAAFIQVDEPAMREGLPLKQQRWHEYLNWAVDAFRLSTAIARPETQVHTHMCYSEFGDIMESIKQLDADVISIEDSRSNNETLMQLTDADYPAQVGPGVYDVHSPSIPTTEYLRESLYKCIQYLPVTQIWVNPDCGLKTRRWEEAIPATRNMVQAAISLRQE

SEQ ID NO: 17425 - protein, 573 aa, Brassica juncea
WIVAVAILAHTASASVREYHWEVEYKFGFPDCKEGMVMAINGKFPGPTIHALAGDTIVVHLTNKLTTEGLVIHWHGIRQLGSPWADGAAGVTQCAITPGETFTYRFTVEKPGTHFYHGHYGMQRSAGLYGSLIIDAAKGKREPLRYDGEFNLLLSDWWHESILSQELGLSAKPMRWIGEAQSILINGRGQFNCSLAAQFSNATAQFSNTSLPMCKFKKGDQCAPQRLHVQPNKTYRIRLASTTGLASLNFAVQGHKLMVVEADGNYITPFATSDIDIYSGESYSVLLTTDQDPSQNYWISVGVRGRKPKTPPALTVLHYVTAPSSQPPSSPPPETPRWNDFDRSKSFSRKILAAMGSPPPPRKFKKRLILLNTQNTIDGATKWALNIVSLVVPATPYLGSVKYRLRRGFDRKSPPTTFPVDYDIMNPPRNRNTTKGNGIYVFPFNVTVDVILQNANGLDANASEIHPWHLHGHDFWVLGYGEGKFRPGVDEKTYNLKNPPLKNTVALFPYGWTALRFVTDNPGVWFFHCHIEPHLHMGMGVVFAEGLNRIGKIPDEALGCGLTKQFLMNRNNP

SEQ ID NO: 17426 - protein, 601 aa, Rhodoferax fermentans
MTATSKLTTRKFDVVIVGAGGSGMSASLRLSNAGLNVAVLTKVFPTRSHTVAAQGGIGASLGNMAEDNWHYHFYDTIKGSDWLGDQDAIEFMCRERTQVVYELEHFGMPFDRNADGTIYQRPFGGHTANYGEKPVQRACAAADRTGHAMLHTLYQQNVKARTNFFVEWMALDLIRDAEGDVVGVTALEMETGEIHVLRAKSVLLATGGAGRIFAASTNAFINTGDGLGIAARAGIPLQDMEFWQFHPTGVAGAGVLLTEGCRGEGAILRNSAGERFMERYAPTLKDLAPRDFVSRCMDQEIKEGRGCGPNKNYINLDMTHLGAETIAKRLPSVFEIGHNFANVDITKESIPVVPTIHYQMGGIPTNIYGQVVTPDGSGSQKVVKGLYAVGECACVSVHGANRLGTNSLLDIVVFGRAAGKHIVQFNNESDTHKPVPENGADISLDRLNRLDNSTSGEYAQVVRDDIRNTMQTHASVFRTQASMDEGVIKIAAMRERVKNITLADKSKIFNTARIEALEVDNMIEAAQATMVSAAARRECRGAHTVLDYDRPADDATCPLGRDDVNWMKHTLWDRDTNSLSYKPVNLKPLTVASVPPKVRTF

SEQ ID NO: 17427 - protein, 518 aa, Schizophyllum commune
MRVSLIIALVYVPISLALGPVGNLPIVNKEIAPDGFSRPTVLANGKFPGELIKGTKGNTFKINVQDQLNDTRMLRSTTIHWHGFFQKNSNWADGPAGVTQCPIATGDSFVYEFGVPDQAGTFWYHSHLSTQYCDGLRGAMVVYDPADPHRSRYDVDDDNTVITLADWYHALAPTIIGVGTPDSTLINGKGRYNGGSLTNLTRINVVRGLRYRLRIVSLSCDPSFTFAIHGHNMTIIEADGVNTQPLVVDSLEVFAGQRYSVVVHANQRIGNYWIRANPSFGTIGFAGGLNSAVLHYIGASSSEPAEVDTEPVSSSPFVETALRPLENPGAPGLPQQGGADVNINLAIDLTLDPFQFTVNGAPFIPPSLPVLLQVMSGARTAQELLPEGSVYTLPPNQTVEISIPGGSAGAPHPFHLHGHTFDVVRSAGSTDYNYANPIRRDVVNTGLAGDNTTIRFRTDNSGPWILHCHIDWHLDIGLAVVMAEDTDGMAQSVQPTAYSDLCPKYDALSDEELGGLVD

SEQ ID NO: 17428 - protein, 480 aa, Pseudomonas putida KT2440
MQLKDAQLFRQQAYINGEWLDADNGQTIKVTNPATGEVIGTVPKMGTAETRRAIEAADKALPAWRALTAKERSAKLRRWFELMIENQDDLARLMTTEQGKPLAEAKGEIAYAASFIEWFAEEAKRIYGDTIPGHQPDKRLIVIKQPIGVTAAITPWNFPAAMITRKAGPALAAGCTMVLKPASQTPYSALALVELAHRAGIPAGVLSVVTGSAGEVGGELTGNSLVRKLSFTGSTEIGRQLMEECAKDIKKVSLELGGNAPFIVFDDADLDKAVEGAIISKYRNNGQTCVCANRIYVQDGVYDAFAEKLAAAVAKLKIGNGLEEGTTTGPLIDGKAVAKVQEHIEDAVSKGAKVLSGGKLIEGNFFEPTILVDVPKTAAVAKEETFGPLAPLFRFKDEAEVIAMSNDTEFGLASYFYARDMSRVFRVAEALEYGMVGINTGLISNEVAPFGGIKASGLGREGSKYGIEDYLEIKYLCISV

SEQ ID NO: 17429 - protein, 453 aa, Streptococcus pyogenes MGAS10394
MIKMVIPYDYIVIGGGSAGIASANRAAMHGAKVLLAEGKEIGGTCVNLGCVPKKVMWYGAQVADILGTYAKDYGFDFKEKAFDFKQLKANRQAYIDRIHASYERGFEQNGVDRIYDYAVFKDAHTVEIAGQLYTAPHILIATGGHPVFPDIEGAQYGISSDGFFALDEVPKRTAVVGAGYIAVELAGVLHALGSKTDLFIRHDRPLRSFDKTIVDVLVDEMAVNGPRLHTHAEVAKVVKNTDESLTLYLKDGQEVEVDQLIWAIGRKPNLEVFSLDKTGVTLNDKGYIETDAYENTSVKGIYAVGDVNGKLALTPVAVAAGRRLSERLFNSKTDEKLDYQNVATVIFSHPVIGSVGLSEEAAVKQYGQEAVKTYQSRFTSMFTAITNHRQPCLMKLVTVGDTEKIVGLHGIGYGVDEMIQGFVVAIKMGATKADFDNTVAIHPTGSEEFVTMR

SEQ ID NO: 17430 - protein, 226 aa, Chlamydia muridarum Nigg
MTLLILLRHGQSVWNQKNLFTGWVDIPLSQQGIQEALTAGEAIKNLPIDCIFTSTLVRSLMTALLAMTNHSSKKIPYIIHEERPDMSRIHSEKELEQMIPLFQSSALNERMYGELQGKNKQEVAEQFGEEQVRLWRRSYKIAPPQGESLFDTAQRTLPYFQKRIFPLIQQGKNIFISAHGNSLRSLIMDLEKLTEEEVLSLELPTGKPIVYEWTEQKFTKSALSFG

SEQ ID NO: 17431 - protein, 154 aa, Staphylococcus aureus subsp. aureus MRSA252
MNFNNLDQLYRSVIMDHYKNPRNKGVLDNGSMTVDMNNPTCGDRIRLTFDIEDGIIKDAKFEGEGCSISMASASMMTQAVKGHSLGEAMQMSQEFTKMMLGEDYVITEEMGDIEALQGVSQFPARIKCATLAWKALEKGTVAKEGKAEGTTEEE

SEQ ID NO: 17432 - protein, 377 aa, Oryza sativa
  misc_feature (131)..(131): Xaa can be any naturally occurring amino acid
  unsure (1)..(377): unsure at all Xaa locations
AAARALLPVGGAAAVAVPRRLRSGEASSTSLSGPVSDGARLVRRMQLRPAPLLGSSTCALPSLRGKRLIRTPAASSSSSSLDSTGEAKPVGFAERYPALVTGFFFFMWYFLNVIFNILNKKIFDYFPYPYXINSTVLKLLFPVAVCHAIGHVTSTVSFAAVAVSFAHTIKALEPFFNAAASQFILGQQVPLTLWLSLAPVVIGVSMASLTELSFNWTGFVNAMISNISFTLRSVYSKKVMTDMDSTNLYAYISIIALLVCIPPAIIIEGPQLVQHGFKDAIAKVGLAKLVSNLLVVGLFYHLYNQVATNTLERVTPLTHAVGNVLKRVFVIGFSIIAFGNKITTQTGIGTCIAIAGVALYSYIKAKIEEEKTQMKSA

SEQ ID NO: 17433 - protein, 574 aa, Desulfovibrio vulgaris subsp. vulgaris str. Hildenborough
MFTPLPTPEEMSAWDAATIRLGLPAMVLMENAAREALDVLRTSCGPLRHRRVILFMGGGNNGGDAAAVARGLHDLGACTLLVHTRPLRAYRGETAAHLRLALRCGVPAIDASSWLKLAVRANAPFAPWHNAMAAARKQKAQTAHDGAQGNPPARLYGTVQDDTAPAPPRRRDATIDYTQAPLPPVIVDGLLGTGLRGPVRERERALIRAINALRDEGAHVFSLDIPSGVDGLTGRPAPEAVHAHVTVTFEAPKTGIVLPEARCHVGALHVRPIGIPRTVRSTPTRFRLMTDDCTKVMPVPRDDMHKGTAGHVLIIGGSPGLTGAPHLAARAALRGGAGFATIATPGSLATEAKCASPDVMTLPLGVAATWPDTPDEALMSLIRRCSVLVVGPGMGRTPQAAAFASRLLAVRHRPPAIVDADALHALATGGIALDLIAETDIVTPHPGEAALLLGWETADIQRDRPAALAALMSRLHCTVILKGACTLTGSPGLPVTVSPRMASTLAVAGSGDVLAGLAGALVAQGATSPIAACLSVNIHGKAGEMLLEGHPQRGCLASDIADALPRARKELCHA

SEQ ID NO: 17434 - protein, 469 aa, Mycoplasma mycoides subsp. mycoides SC str. PG1
MFGSMTDFNNLVNQAKKRNIYIMMDMIFNHCSTEHEWFLKALTNKKYQKRFIFVDNKNKLPNNWTSKLGGSVWEYNKTLDKYYLHLFDKTQADLNWKNKALRNDIFKIINYWLDKGVKGLRFDVINLISKPKTFKDDLIGDGRKYYTDRPLVHKYIKEMASKTYSLKSDVITVGELSSTSLKQAILYTKKESKELDMAFLFHHLKVDYLNNDKWQLDKYDPKKLVKVLKTQQIAFQKNNAWCANFLNNHDQPRAISRFGDYKNYYYQSATSLASVVLLLKGTPYLYQGEEFGMLNNNYSNINQLKDVESINYYKILKNKGLEKEEILNIISNRSRDNARTVMQWDDSLYAGFSSHKPWIDVNNNYLDINFKKDYSKSQSIFKAYQKLIRLRKKHLAFSYGDIEFINLNPNVLSFYRTYLNEKYLVIINLSDLKISSNKLNQFKNLRIVFNNYKNFKQIQPYQTLVLKCN

SEQ ID NO: 17435 - protein, 424 aa, Arabidopsis thaliana
MASQGCVDWQFSGSDAAEKAAQASLGTYSSEIFSLCDPQGKPILPPLSEEAETSHTAEKAVVKAVLCGTGNAYAPSIGLPVAKRAVAEYLNRDLDNKLTGDDVYMTVGCKQAIELAVSILAKPKANILLPRPGFPWDMVHSIYKHLEVRRYEFIPERDFEIDFNSVREMVDENTFAIFIINPHNPNGNYYTEAHLKQLATLARELGIMVVSDEVYRWSVFGSNPFVPMGKFSSIVPVITLGSISKGWIVPGWRTGWLALHDLNGVFRSTKVLKAAKEFLEITSKPPTVIQAAIPTILEKTPQDFFEKRGIFLKDKVDFGYSKLKNIPTLTCYMKPESCTFLWTKLDPLHFVDIEDDHDFCRKLAKEENLVVLPGIAFGQNNWLRHSIDMETPRLEDAFERLKSFCERHSVIVEASSLKDVNGVN

SEQ ID NO: 17436 - protein, 452 aa, Dechloromonas aromatica RCB
MRQSRPMFATAVRGLIAHAFPILIAQLSSIGMMVVDTAVLGHVSSLDLAAVAIGGGIHVSVVFALVGILQAVAPVVAHLHGAKRDDEVAGILQQGFWLALLLSVPGILFLTHPGVALGMADMDAAVEAKVRQYLGLLAWSLPASLCYRTFWAFCNALGKPRVLMGIGFFSLCLHAVLAWGLALQGWLGEPLGVVGCALSNVLIGWLACLSGGAYLAFGPLGKRYQPFADWQSPRWPIWRELLRIGVPMGLSNLVEITSFTLIALFVASLGAPVVAGHRIVANISALIYMLPLSLAIATMAALGQAVGARDPLRARATIRAGLVLAACSSSMLGLLLWLGAQPLINAYTDDPAVRSVALGLVAYIAIYQFFDALQTIAGHCLRAYRVTFFPMLVQTFCFWGIGLLGGAWLCYRWQPPLGVAGFWLASVISLVFAAVMLLPLLGKAIQAAESTP

SEQ ID NO: 17437 - protein, 544 aa, ASPERGILLUS NIDULANS FGSC A4
MASAARSASRAFLRSSLRPAVRSSRFALPTQGLRVASRRGYSSEASSGKSSNTLLWAGVALAGGAGAYFYLQGGDVGASTKVFTPTKEDYQKVYNAIAERLANETDYDDGSYGPVLVRLAWHASGTYDAETGTGGSNGATMRFAPESDHGANAGLKYARDFLEPIKAKFPWITYSDLWTLAGACAIQELGGPDIPWRPGRQDKDVSGCTPDGRLPDATKNQDHIRAIFGRMGFDDREMVALIGAHALGRAHTDRSGFDGPWNFSPTVFTNEFFRLLVEEKWQPRKWNGPKQFTDNTTKTLMMFPTDLALVQDKGFRKHVERYAKDSDAFFKEFSEVFVKLLELGVPFNSKVEDRYVFKRIISAPTTTPSFYEILNLPFPSTGLSKQQLKIAYHKALLKHHPDKAVAVAKENLPSSNHGPAQPPSNQKITIDAITTAYKTLSDPVQRAEYDRVLRLDRNRVNGAGDKNGNGTVFHTGLEVVDLEDLDCDEGGDEAMWYMACRCGDERGFSLSESDLEREADSGEIVVGCRGCSLYTKVLFAVQDD

SEQ ID NO: 17438 - protein, 416 aa, Pediococcus pentosaceus ATCC 25745
MKTNKLVIVAAIAGLLGGGVAYGGASFIHNQMESSSTAVPTGSNTTGTTKTSNVKVNVSSQSSKAFSTIKDSVVSVINLQKANTNDSDSIISSIFGNESSSSSKSSSSSSELETASEGSGVIYKKSGDTAYIVTNNHVVSGSSSLEIIMSNGKKLPAKIVGTDSVTDLAVLKINSSAVTTVASFGNSDNIKVGETALAIGSPLGSEYATSLTQGIISAKKRTVETTTENGQNNGEATVIQTDAAINAGNSGGPLINLAGQVIGINSMKLSASGSDSTTVEGMGFAIPSNEVVTIIDQLVKNGKITRPALGVALVDLTQVSSTQQKSILKLPSNVTDGTVLMQVNNGPAKTAGLKKYDVITKIDDKAITDTAGLREALYKHKINDKITVGYYRDGKYKTTVVTLTKTSTTTSSTTTK

SEQ ID NO: 17439 - protein, 376 aa, Thermus thermophilus HB27
MEFFGLPLRVEEGVLIPRPETEGLVELALGLPLPPAPRIARQVAALREEGREVVLVSSGAVAAGMRRLGLKERPKDMPKKQALAALGQPLLMAFWQEAFAPFGLPVAQVLLTAEDLSSRSRYLNAKATLRALLDLGAIPVINENDTVAFEEIRFGDNDQLSARVAALVEAGLLALLSDVDALYEEDPKKNPQARPIPEVESVEAVLAHAGEENPLGSGGMKSKLLAARIAGRVGIPTLLLPGKRPGVLLQALSGAPLGTYFHARRRYRGEKAWLFGLLRPKGELVLDRGAVRALKERGASLLPAGVKEVRGRFSRGEAVRLLSEEGEEVGVGLANYASEEIARIKGRRSAEIEAVLGYRYTEEVVHRDHLALKEEA

SEQ ID NO: 17440 - protein, 294 aa, Vigna aconitifolia
MEQYEKVEKIGEGTYGVVYKARDRVTNETIALKKIRLEQEDEGVPSTAIREISLLKEMQHRNIVRLQDVVHSEKRLYLVFEYLDLDLKKHMDSSPEFVKDPRQVKMFLYQILCGIAYCHSHRVLHRDLKPQNLLIDRRTNSLKLADFGLARAFGIPVRTFTHEVVTLWYRAPEILLGSRHYSTPVDVWSVGCIFAEMVNRRPLFPGDSEIDELFKIFRILGTPNEETWPGVTALPDFKSTFPKWPPKDLATVVPNLDAAGLNLLSSMLCLDPSKRITARIAVEHEYFKDIKFVP

SEQ ID NO: 17441 - protein, 444 aa, Thermus thermophilus HB27
MTATSLWELAERARKRLSEIAKGNRDRALLAMADLLEARWEEVLRANREDLEEAERTGLPKAKLDRLALKEKDLKTLTEGLRQIARLPDPLGRIEGLAKRPNGLRVGRMRVPLGLIGFIYEARPGATVEAVSVALKAGNAMLLRGGKEAFRSNRALVALWHEALEEAGLPEEAVTLVPTTDREAVLEMCRLELLDLLIPRGGEELIRLVQQEARVPVLAHAKGVNHLYVDEKADLSMALRLALNGKTQRPAVCNALEAVLVHEKVAEAFLPRLEKAMREKGVELRACPRALPLLKEAVPAREDEWDREYLDLVLRVKVVSGLEEALAHIARYGSRHTEAICTEDPKAAWRFLEEVDASLVLWNASTRFNDGFELGLGAEIGISTSKLHPTAPWGPWSSPPSSGWPWGRGRSAREAGRPRGPGLGPHGGRSLQGSGSPPPGGTFA

SEQ ID NO: 17442 - protein, 873 aa, Zea mays
MDTAIGSVPAASDAARHPAPSASAPRDATLGRHLARRLAEVGARDVFTVPGDFNLTLLDELEAEPGGVRLVGCCNELNAAYAADGYARARAGGVGACAVTFTVGGLSAINGVAGAFSENLPVVCIVGGPNSNDYGSNRILHHTIGLPDFTQELRCFQNVTCYQVGAVVNNLEDAHEQIDTAISTAIKESKPVYISISCNLPSIPHPTFSRHPVPFFLSPRLSNQMNLEAAVEAAAAFLNKAVKPVLVGGPKMRVSKAWEALAELADACGYPVAVMPSAKGLVPVHHSRFIGTYWGAVSTPFCAEIVESADAYLFAGPVFNDYSSVGYSLLLKKEKAIIVQPERVVVGHGPAFGCVLMKDFLHALATRLKKNTVAYENYRRIYVPPGEPLSSEPGEPLRVNVLFKHIQAMLSGDMAVIAETGDSWFNCQKLKLPEGCGHLLLSPITRYEFQMQYGSIGWSVGATLGYAQAAKDKRVIACIGDGSFQVTAQEVSTMLRWGQNSIIFLINNGGYTIEVEIHDGPYNVIKNWNYTGLVEAFHNGEGACYTAKVRTEEELTEALEAALGPKKDCLCFIEVIVHKDDTSKALLEWGSRLVTPISTKLQRPDGAACAAPTAEPLDRVRLTATKSSPRRHGKLRSARPQGSDSGSAPEDDELRSARPQGSDSGSAPEDDELRSARPQGRTRAPPRKTTNSAPPDPRARTRAQPRKTTNSAPPDPRARTRAQPREDDELRFARPQASDSGSAPEDDELRSAQPQGSDSGSAPEDDELRFARPQGSDSGSAPKDDELRFARPQGSDSALASADGLRLARPRGSDSTSALEDRLDLDLGGASTSPNPGHGPTTSTGGAIITLPQADSGYGEQDRRPIWLAPLYE

SEQ ID NO: 17443 - protein, 596 aa, Arabidopsis thaliana
MDSAKGWFQKRQMRGGSRYKGASGGAGGGGSNGSADEHNVETDEEAVSNTTKQKVAAAKQYIENHYKEQMKILQERKERRSMLEQKLADADVSEEDQNNLLKFLEKKETEYMRLQRHKLGVADFDLLTMIGKGAFGEVRVCREKTTGQVYAMKKLKKAEMLRRGQVEHVRAERNLLAEVDSNYIVKLYCSFQDDDHLYLVMEYLPGGDMMTLLMRKDTLTEEEAKFYVAETVLAIESIHRHNYIHRDIKPDNLLLDRYGHLRLSDFGLCKPLDCSAIGENDFSNNSNGSTEQEAGSTAPKRTQQEQLEHWQRNRRTLAYSTVGTPDYIAPEVLLKKGYGMECDWWSLGAIMYEMLVGYPPFYSDDPMSTCRKIVNWKSHLKFPEEAILSREAKDLINSLLCSVRRRLGSKGADELKAHTWFETVDWDTIFDMDAAFVPEVNDDLDTQNFEKFDESESETQTSSKSGPWRKMLSSKDINFVGYTYKNFEIVNDYQVPGMGTHLLDHCGVEEEEKVDATNGQVTLRYPTTSFTGPKFGYFHVNLEYNGSSETSDSSETTSRPPCDRPPPAPPVVQGSFLKLLPPELEVRPKQEGSEAC

SEQ ID NO: 17444 - protein, 308 aa, Brassica napus
  misc_feature (284)..(284): Xaa can be any naturally occurring amino acid
  unsure (1)..(308): unsure at all Xaa locations
MEIISQNFLPHCSVVTWGSKPDKNRLVPNRSNILVSSCGLRKSRLVVRNGTSDGYVVGENDDLGSISTRRGDSKSKVLIPGLPEEAAAQITPSHCEWKPNLTVHYEKSGCGNVEAPAVLFLPGFGVGSFHYEKQLTDLGRDYRVWAVDFVGQGLSLPTQDPTTISKETSGLQNSEPFWGFGDEAEPWADQLVYSLDLWRDQVQYIVQEVIGEPVYIAGNSLGGYVALYFAATHPHLVKGVTLLNATPFWGFFPNPVKSPKLARLFPWSGTFPLPPRVKKLTELXVGKRISDPESIAEILKQVYKDHST

SEQ ID NO: 17445 - protein, 221 aa, Triticum aestivum
PAGPEFPRGTVEEYANALNRGPKDGGVAAVVDEMPCVEIFLSTHCNFRIVGQEFTKEGWGFAFQRDSPLAADLSTAILQLSESGQLQRIHDEWLTDPTCGDDDSGLGAVRLGLGSFWGLFLLCALICVFALMVYFARICWQYSRYSSSEPPSEPSDSAAAVTAATIAQIRPEKPKPTRLGSFKELIQFADTKEEEIKKVMKRRLSEKDTRATGSAHSVSSA

SEQ ID NO: 17446 - protein, 473 aa, Bacillus cereus ATCC 10987
MQQQTNEKLHRTMKSRHLFMIALGGVIGTGFFLGSGYTINQAGPGGAILSYLVGGFIMYLTMLCLGELTVAMPVSGSFQKYATKFIGPGTGFMIGWLYWLGWAVTVGLELTSIGLMMKRWFPNADVWVWCLVFGVILYASNAISAKSYAELEFWFSSIKVITILAFVVLGGSALLGFISYDGKEAAPLFSNFVSEGGLFPNGLAAVLLTMITVNFSFQGTELIGIAAGESEEPEKTIPRAIRNTVWRIMLFFILTMTILVGLISWKEAGVIESPFVVVFDKIGIPYAADIMNFVIITALLSVANSGLYAATRILWSLANEGMAPKSFQKVNKRGIPITALVVTIAVAALSLLTSFLAEDTVYMYLLSIAGLSAVSSWIIIALSQLRFRSQYIKGGGKLEDLKYKTPLYPIVPILALITNSIVVISLAFIPEQRMALYCGIPFIIFCYIYYYINKKRQKPMKVETTNETNHQTR

SEQ ID NO: 17447 - protein, 269 aa, Actinobacillus pleuropneumoniae serovar 1 str. 4074
MSRFDTLFANLKAKNEGAFVPFVTLCDPDFDCSFEIIETLIANGADALELGFPFSDPLLDGPVIQAANKRALDGGYSTDACFEMIAKIRSKYPEIPIGLLLCANLVFVPTQDVFFKRCAETGVDAVLIADVPVLAAEEFTQAAKKHGIQSVFICPPNADQATIERIARLTEGYTYLVSRAGVTSAENQAHAKNLDNLIESLKRSNSAPILQGFGIAKPEQVKEALVLGCDGAISGSAIVKIIERNLDSQTQLLSELAKFVSVMKAATKS

SEQ ID NO: 17448 - protein, 338 aa, Zygosaccharomyces rouxii
MTKVFVTGANGFVAQHVVHQLLEKNYTVVGSVRSTEKGDKLAKLLNNPKFSYEIIKDMVNSRDEFDKALQKHSDVEIVLHTASPVFPGGIKDVEKEMIQPAVNGTRNVLLSIKDNLPNVKRFVYTSSLAAVRTEGAGYSADEVVTEDSWNNIALKDATKDEGTAYEASKTYGEKEVWNFFEKTKNVNFDFAIINPVYVFGPQLFEEYVTDKLNFSSEIINSIIKGEKKEIEGYEIDVRDIARAHISAVENPATTRQRLIPAVAPYNQQTILDVLNENFPELKGKIDVGKPGSQNEFIKKYYKLDNSKTKKVLGFEFISQEQTIKDAAAQILSVKNGKK

SEQ ID NO: 17449 - protein, 166 aa, Calea megacephala
MFPMVTEFMNYGQQTVRAARYIGQGFIITLSHANRLPVTIQYPYEKLITSERFRGRIHFEFDKCIACEVCVRVCPIDLPVVDWKLETDIRKKRLLNYSIDFGICIFCGNCVEYCPTNCLSMTEEYELSTYDRHELNYNQIALGRLPMSIIDDYTIRTIFNLPEIKT

SEQ ID NO: 17450 - protein, 454 aa, Burkholderia pseudomallei K96243
MKNLQRHLSARHIRFLALGSAIGTGLFYGSASAIRLAGPAVILAYIVGGAAVYMVMRALGEMAVREPVPGSFGHYATENLGPFAGFVTGWTYTLEMVIVAIADITAFGIYMGFWFPHVPQWIWVLAIVAIICGLNLCHVKVFGELEFWLSIVKVGAIVAMIGGGAAILFTGMRLGSGGAPSLANLWSHGGFLPNGVGGLVASLSVVIFAYGGIEVIGMSAGEAKEPERAIPRAINAVPMRILLFYVLTMIVLMSIFPWTGVGANGSPFVQIFSALGVRSAAEILNLVVISAAISAINSDIFGAGRMMYAMALQGQAPRALAAMSARGVPWVTVLVMAGALLVGVVLNYLMPKDVFLMVAASATFATVWVWLMILLSQIAMRRRLGAAEVAALKFKVPFWPVGPALTIAFMAFVIAMLGYFDDTRVALFVGAAWLAILALVFYTRIRPRLAAVAR

SEQ ID NO: 17451 - protein, 232 aa, Vibrio sp. Ex25
MNKYLAEAFGTFWLVLGGCGSAVLAAGFPDVGIGLLGVALAFGLTVLTMAFAIGHISGCHLNPAVTVGLWAGGRFETKDVAPYIIAQVLGGLIAGGILYVIATGQAGFDVVGSGFAANGYGEHSPGQYSMLAALVSEVVMTMMFLIVIMGATDKRAPQGFAPIAIGLCLTLIHLISIPVTNTSVNPARSTAVAMYVGDWAVSQLWLFWIAPILGGVLGAVIYKNLLGKESND

SEQ ID NO: 17452 - protein, 177 aa, Glycine max
  misc_feature (17)..(17): Xaa can be any naturally occurring amino acid
  misc_feature (49)..(49): Xaa can be any naturally occurring amino acid
  misc_feature (65)..(65): Xaa can be any naturally occurring amino acid
  misc_feature (75)..(75): Xaa can be any naturally occurring amino acid
  misc_feature (92)..(92): Xaa can be any naturally occurring amino acid
  misc_feature (114)..(114): Xaa can be any naturally occurring amino acid
  misc_feature (168)..(168): Xaa can be any naturally occurring amino acid
  unsure (1)..(177): unsure at all Xaa locations
DSRPLVVFYAAWCGHLXKLAPKYHKLGSIFKKSKYDLIGNVYCDEHKNXCPMYEASGYPTFQWFXKDLLKLYSLXGPRTAESLVEFVNSEGXTNVKIATVPSTVEVLTSENFNXFCLDEAKYVLVLNAMHHRCGHCLMLASTYERVTSAFKSEEDVLLVYLDADEYMXLARKYDMSG

SEQ ID NO: 17453 - protein, 166 aa, Chaenactis santolinoides
MFPMVTEFMNYGQQTVRATRYIGQGFMITLSHANRLPVTVQYPYEKLITSERFRGRIHFEFDKCIACEVCVRVCPIDLPVVDWKLETDIRKKRLLNYSIDFGICIFCGNCVEYCPTNCLSMTEEYELSTYDRHELNYNQIALGRLPMSIIDDYTIRTILNLPEIKT

SEQ ID NO: 17454 - protein, 451 aa, Triticum aestivum
  misc_feature (159)..(159): Xaa can be any naturally occurring amino acid
  unsure (1)..(451): unsure at all Xaa locations
MATPPAEKVIVVDANPSKNGHGDKLDDLPVADETSHQIGVDPWYQVAFVLTTGVNSAYVLGYSGSLMVPLGWVGGTVGLLLAAAVSMYANALLGRLHLLGGKRHIRYRDLAGHIYGPKMYKITWAMQYINLFMINTGFIIIAGQALKALYLLVSADGAXMKLPYCIAVSGFVCALFAFGIPYLSALRIWLGFSTIFSLTYIFAACVLSLKDGFRTPPRDYSIQGDPSSRVFTTIGAAASLVFAYNTGMLPEIQATVQAPVVKNMEKALWFQFTAGSLPLYAIIVIGYWAYGNQTTTYLLNNVTGPLWIKAVANLAAFLQTVIALHIFASPMYEYLDTRFGSKVGGPFAMHNVIFRVGVRGGYLAVNTLMAAALPFLGDFMSLTGALSTFPLTFVLANHMYLVANRQRLSSLQKSWHWLNIVFFTVLSITAAIAALRLIARDSKTYHIFADV

SEQ ID NO: 17455 - protein, 383 aa, Dechloromonas aromatica RCB
MQRLWQIFAQTVTVALAILFVVSTLKPEWLPQRQGVVALQEAPTTGDEIKSTPGSYRDAARAALPSVVHIYTTQEIKQQRHPLFDDPIFRHFFGDRPEGQPQRNSGLGSGVIVSPNGYILTNYHVIEGADDIQVSLNDTKTYKAKIVGSDPESDLAILQIKADKLPAITFGQMDNLRVGDVVLAIGNPFGVGQTVTMGIVSALGRSHLGINTFENFIQTDAAINPGNSGGALVDIHGNLVGINSAIYSRTGGSLGIGFAIPVSSARSIMEQIIRTGTVTRGWIGVEAQEITQELAESFGLPDNEGALIAGVVRSSPADTAGIRPGDVLLSVDGKPVQDPQVMLDLIAALTPEERSAFRLRRGKNIVEVQVRIGKRPAMRAEQE

SEQ ID NO: 17456 - protein, 256 aa, Arabidopsis thaliana
MLFPHERKKEKERSQGFYLVTRLRIRMGRGKIEIKRIENSTNRQVTFCKRRNGLLKKAYELSVLCDAEVALIVFSTRGRLYEYANNNIRSTIERYKKACSDSTNTSTVQEINAAYYQQESAKLRQQIQTIQNSNRNLMGDSLSSLSVKELKQVENRLEKAISRIRSKKHELLLVEIENAQKREIELDNENIYLRTKVAEVERYQQHHHQMVSGSEINAIEALASRNYFAHSIMTAGSGSGNGGSYSDPDKKILHLG

SEQ ID NO: 17457 - protein, 112 aa, Magnetospirillum magnetotacticum MS-1
MLREHGTERAHTSPLNAEKRPGRFVCAGCDLPLFSSRTKFESGTGWPSFFEPLPDAVGTQVDTAYGMRRTEVHCRRCGGHLGHVFEDGPKPTGLRYCMNGVSLRFEPAAGPA

SEQ ID NO: 17458 - protein, 211 aa, Burkholderia fungorum LB400
MNRPKRLLVANVAWAHETAVRNPAFFRDLVRGQNPHVLWIGCSDSRVPAETITHCEPGDLFVHRNIANLFQAGDDNSASVLEYAVKVLKVGHVIVCGHYGCGGVRAALLPPEPGLPHVNRRIAPLCALARAHHEELDGHANERQRIDRLAELNVLEQVRGLRAHPVVRDADPAPLVHGWIFALEDGRIKVLSSGYEADDAMTCTTAAHSAA

SEQ ID NO: 17459 - protein, 935 aa, Oryza sativa (japonica cultivar-group)
MTTNTKRAYKLQEFVAHSSNVNCLKIGRKTSRVLVTGGDDHKVNLWAIGKPNSILSLSGHTSAVESVNFDSTEVFVAAGAASGTIKLWDLEEAKIVRTLTGHRSNCMSVDFHPFGEFFASGSLDTNLKIWDIRRKGCIHTYKGHTRGVNAIRFTPDGRWVVSGGEDNVVKLWDLTAGKLLHDFKCHEGQIQCIDFHPHEFLLATGSSDKTVKFWDLETFELIGSTGPETTGVRSMTFNPDGRSLLCGLHESLKVFSWEPIRCHDTVDVGWSRLSDLNVHEGKLLGCSFNQSCVGIWVVDLTRLEPYATGTSTKLNGHSELKSSSSSTMPLQNDSGSRANIGRLSVLQNSENNIKSSTGRLSVSQNSDSALKETKSTTSSGLVPVTPQRAGNGSSTKTVGNSTFASSGTNLKRGSLKSNNSSSLQNFSKIDVVPVIIPRTSSGPELATDSRSDAADVGPVLSKSGRRIEIANDSRKESSDVAAAVVPRTNSRTEMASDSAPVVGPRANLRMEVSADSAPIVPKSGRRLESSVESRKESTDVASAAAPKTSSRMEVAPDSAPLLSKAGRRVESATDSRKESADVAPVVPRTTSRMEMAPDSRREISAGRMSPFRVQSRYSELRKLNNAKADADKVDAGSKNSETDDFTCQIYLPRRNGVVQSGISEETREDAKPGVIDRMGFPSSAEPNTHRNVSRMRKPRDNCYIEVSRAGRTRPTASNWESRDQSPGNEEPTTSNSSSMAPTGRLYSSRGSSQAAETPTIASDEDVLSVLMEQHELFLSSTRSRLTKLQIVHQMWQRNDIRGIIAAMEKMSDHAVSADVASVLMEKSETITLDLCTVILPVLTDLLESKTDRHLGVSLELLVKLVRTFGSVIHSTVSAGPSSVGVDLQAEQRRERCNLCFIELEKVKNKLPFLSRRKGAVANTAQELSLVFQEVM

SEQ ID NO: 17460 - protein, 225 aa, Polaromonas sp. JS666
MNAVAASTPNASLKALPAQPIKLYRVAISGHAHRVELFLSLLGLPFERVEIDLAAKAHKTPEFLAMNAFGQVPVIQDGDVTLADSNAILVYLARRYAQDADAWMPTEPVAAAAVQRWLSVAAGPLAFGPAAARVIQLFKRPDSPDAAIARAHALFAVMEQQLGQSAFLAGNTPTLADIANYSYTAHAPEGNVSLEPYPRLRAWLARIEALPRFVPMVKTPTGLAA

SEQ ID NO: 17461 - protein, 207 aa, Arabidopsis thaliana
MVESLFPSIENTGESSRRKKPRISETAEAEIEARRVNEESLKRWKTNRVQQIYACKLVEALRRVRQRSSTTSNNETDKLVSGAAREIRDTADRVLAASARGTTRWSRAILASRVRAKLKKHRKAKKSTGNCKSRKGLTETNRIKLPAVERKLKILGRLVPGCRKVSVPNLLDEATDYIAALEMQVRAMEALAELLTAAAPRTTLTGT

SEQ ID NO: 17462 - protein, 1538 aa, Rhizobium sp. NGR234
MSVDRVQRRIAAILAADVVGYSRLMGKDEEATLAILKAHREIVDTLIAEHSGRIFGSAGDSVVAEFASPVEAVRCATEIQLALDRQNKEMPEQSRMRLRIGINLGDVVIDGDNLMGDGVNVAARLETLAPPGGICISEAIHTQVRDRLSLDFLDMGEYKVKNIVRPVRVYRVPLASEERIRSPFRGLDAFDFEHAELFFGRARAIATCTERLEQLAASGRAFLLIYGMSGSGKSSLLRAGLLPAITKAGATPGIALWRRCVIRPSQGPSAVASLAAGLLRKEALPELAEEKSAAELADLLRSAPERAVALVRAALGRAANAAGIAPSQCRLALAVDQLEELFTTEAEPASRALLVRLLMAFAGSGLVWVIGTIRSDFYHRCSDVPGFSVLKDGLGSYELLPPTSAEIAQMIREPARSAGLRFEESADHGRLDDVLQGAATADPGSLPLLQFMLDALYEAGRDRRLLTFAAYRALGGLEGAIARRADEVIDGLPLEIEEALPVVLRGLSTVRLGDETVAARPAPLADLASSPAQATLAEALIAARLLVSDEDAEGHAIIRVAHEALLSRWPRARDIVNANRTFLETRARVQADAHRWLLDNRNPDLLLPAGKRLAEAEELLQSRREEVDGQVISYVDASMLAHEVRLEKERQAERARIETEEATKRERLEHEAARQRLEAEAATRLARRTRIGAAVALVLAVGAAAGAVVGLRGQSEAIRQAERAEGNAREAKAAEMQARAAEAQAREAKDQALRNQSLSLAFLSHTTETAGDTEAAILLALEALPKDMAAPSRPYLPEAEAALYQALLQHRQTAVFRHDDGVTDAAFSPTGDRIVTSSYDKTTRIWNVEDSFQIAILKGHEGPVERASFSPDGSRVATAGRDGTARIWDAASGGQLYLLPQPGNVNTAMFNAAGTRLLTGSDMRAPAVWDTQTGKKVAAAEGDWTTSAMFSPDGLSFAAGYGEERLVRIWSAEDGRPIREIYNRSWPDEVIFSPDGSKLVANAWRTLTWNAVPRLWDVPSGSEVATFGDHASDTQGTTFSHDGRLIATVSLDGTARLWDGVSGKERGVLGRETAGLKRDQAGVPGPEIDKEMNCAFSPDDKLLATASLGNLVRLWDVESDSEFAVIAGHRGLVEHVAFSPDGTRLLTASHDETARLWDIDGVLTTSMRHRRPPTFAAFSPDGTRVITGGGDDTANIWDVASGREVVRLEPNSGFIGDATFSPDGHLVATASSYGRIVLWDAKSGHEALRLNSGKAAVVNLQFSPGSDLIASASDDGAARLWNTSTGVQIAVLTTGGNLRKVLFSPDGELVLTALKDYTARLWKRDGTEVRVLAGHEKRITAAAFSPNGRLVATSSLDGTARVWSIEDGSVVATMRRPGEALTDVAFSPDSKSVVTASRDGSARIWDVADGAEQAALRGHKGFVREATFSPSGLYVVTASPQDGTVRLWSASSGREIAILTGLETVGNVEPASTLAVFNSEGTRMAGVFGDKVARIIRVFPTPQDMIDYARTVVPRELTPCERQRFFLPVEGDIGECPN

SEQ ID NO: 17463 - protein, 338 aa, Burkholderia fungorum LB400
MKVFYDKDADLSLIKGKQVTIIGYGSQGHAHALNLKESGVNITVGLRKGGASWSKAENAGLQVKEVAEAVKGADVVMMLLPDEQIAEVYAKEVHANIKQGAALAFAHGFNVHYGQVIPRADLDVIMIAPKAPGHTVRGTYSQGGGVPHLIAVAQDKSGAARDIALSYAAANGGGRAGIIETNFREETETDLFGEQAVLCGGTVDLIKAGFETLVEAGYAPEMAYFECLHELKLIVDLIYEGGIANMNYSISNNAEYGEYVTGPRIVTAETKKAMKAVLTDIQTGEYAKSFILENKAGAPTLQSRRRLTAEHQIEQVGSKLRAMMPWIAKNKLVDQSKN

SEQ ID NO: 17464 - protein, 763 aa, Cryptococcus neoformans var. neoformans JEC21
MSNYPHSAAIASSLSTSPYGKFPIPAPATSLTPRPAALQSNLENLISRSRTHPHPHRVAGEHSPPHHNNYAQQPSPSHPHPAEGSDDDLDKSTTGHTLAAHHAPGVGTIQEASLDEPLIFQDDEDSINTDRQRGERTSLLNHDWKRRVSRTARRSYGAASAPLGAYEGSRRVSSVDGLGAGNSRSRSKARTPPRRESEHGRKNRDGDVAQPHGVPAQYSSDEDSTSTHRGRFQGQRPLSYTSSPYSSPTSPFRSKTVRVADESSDEDEGGDLARGLLATSGTGVFAGSGRVGDAGLMDLDPVEELDAEDLELPVGEDGTEVRDRTKAIKAELPIILRSALPVFFTQAAEWSLVLASVVSIGHLGTTELAASSLASMTASVSCFSILQGLATALDTLLPAAWTSSDPSRVGLWTQRMFIVMGFSMIPMYLLWWNISPILVVLGQGYGGNVLVKKENSADFARKVWGPEPVRLGFPGGAFATAMSYNLAFVISSLWAVFCGPREAFHPIRFKYAFSKLGTVTSLGLAGTIMLSSEWWAWEACALAASLLGPTTLAAQSVLLSTASTFFQVPASLGIASAVRVGNLLGAGRDWEAKWASRTCLFLSVTFALVNSTICIIFRTNWGYLFNNDPEVVALVASVMPYIALFQIADGIAATSGSILRSLGLHTTGALINLTSYYIIGLPFGLWLAFTPTFSLGLIGLWLGLSVALGYASVLSAVLVWKANWVRAVERVRERLGLGVHGVVGIDGKWDVREQAIEERQELP

SEQ ID NO: 17465 - protein, 383 aa, Nicotiana sylvestris
MKKATVGAAVVGAATVCAVAAFIVNHRMRKSSKWARAMAILREFEEKCGTPDAKLKQVADAMTVEMHAGLASEGGSKLKMLITYVDNLPTGDEAGVFYALDLGGTNFRVLRVQLGGKDGGIVHQEFAEASIPPNLMVGTSEALFDYIAAELAKFVAEEEEKFQQPPGKQRELGFTFSFPVMQTSINSGTIMRWTKGFSIDDAVGQDVVGELTKAMKRKGVDMRVSALVNDTVGTLAGGKYTHNDVAVAVILGTGTNAAYVERVQAIPKWHGPVPKSGEMVINMEWGNFRSSHLPLTQYDHALDTNSLNPGDQIFEKMTSGMYLGEILRRVLLRVAEDAGIFGDEVPPKLKSPFVLRTPDMSAMHHDISSDLRVVGDKLKDILE

SEQ ID NO: 17466 - protein, 190 aa, Triticum aestivum
  misc_feature (23)..(23): Xaa can be any naturally occurring amino acid
  misc_feature (87)..(87): Xaa can be any naturally occurring amino acid
  misc_feature (114)..(114): Xaa can be any naturally occurring amino acid
  misc_feature (133)..(133): Xaa can be any naturally occurring amino acid
  misc_feature (155)..(155): Xaa can be any naturally occurring amino acid
  unsure (1)..(190): unsure at all Xaa locations
MFSGTQQKCKVCTKTVYPMDQLXFDGAVFHRACFKCHHCKSTLSFSSYSSFEGVPYCKPHFAQLFKETGSYNKSFQSQSPAKSATEXKLTPELTRSPSKAAVMFSGTQDKCATXGKTAYPLEKVTVENNPYHXSCYQCSHGGWALSPTNYPDFEXLPYRKPPFLPPFHGTRGSFNHLTQCPNPANAQEEG

SEQ ID NO: 17467 - protein, 722 aa, Oryza sativa (japonica cultivar-group)
MAGPTSRRLLLLVARRAGHLCRHHHHHHHRDGLVLARSLQAAAAAAASSPPPLPASPPARSFSSAFSSVHGERPSSEYAKIRKESLESQFGRILGSSSRTLFADRGFGPFLAMYRAAIISFHVMKLTIWHLLLSDVHKRAEKFQETLIRLGPFYIKLGQALSTRPDILPNAYCQELSKLQDQIPPFPTRIAIRTIESQLGSRISDLFADISPEPVAAASLGQVYKAHLHSGELVAVKVQRPGMTPLLTLDALLFHMIGGQLKRFAKARKDLLVAVNEIVRHMFDEIDYVLEGRNAERFARLYSHDLGGNSSGDGTSIKVPKVYWNFTRKSILTLEWIDGIKLTDAERIGKANLNRKRMIDEGLYCSLRQLLEEGFFHADPHPGNLVATEGGSLAYFDFGMMGDIPRHYRVGLIQMLVHYVNRDSLGLANDFHSLGFVPEGTDLHGVADALRVSFGDGRRQSNDFQGVMSHLYDVMYEFNFSLPPDYALVIRALGSLEGTAKALDPDFKVIESAYPFVIGRLLEDPSPDMRKILRQLLICDDGSIRWNRLERLIAAISEQSESSNKSEDRSGENAANKPGWRSFDMHSVVAATEDLFHFILSRKGWRVRVFLVQDIVKASDAFLQEATFPGIFDEEGTTGELHPERSKMIRRVVHGVQSFRQAISLAPDAWTAMLFRTLLKPESQKFILDVFLALAMHSCYKIPETSWICMSRFLNYLDRQGR

SEQ ID NO: 17468 - protein, 92 aa, Cytophaga hutchinsonii
MSNVNIKPLADRVLIEPAVAESKTASGIIIPDTAKEKPLKGIVVAVGSGKKDEPMTVKVGDSVLYGKYSSTEISVDGKDYLIMKESEIYAIL

SEQ ID NO: 17469 - protein, 542 aa, Cytophaga hutchinsonii
MAKQILFDRDAREKLKKGVDALADAVKVTLGPKGRNVILDKKFGSPAITKDGVSVAKDIELKDAIENMGAQLVKEVASKTADQAGDGTTTATVLTQAIFNAGLKNVAAGANPMDLKRGIDKAVSAIIADLKVQSKKISNSNEIAQVATISANNDHEIGKMIAHAMDKVGKDGVITVEEAKGTETEVKTVEGMQFDRGYLSPYFVTNTDKMEVELDRPYILIYDKKVSSMKELLPILEQVVQSGRPLLIIAEDVDGEALATLVVNKIRGALKIAAVKAPGFGDRRKAMLEDIAILTGGTVISEESGYKLENATLEYLGTAEKINIDKDNTTVVNGSGLKDNIVARVNQIKSQMENTTSDYDREKLQERLAKLSGGVAIMYIGAATEVEMKEKKDRVDDALHATRAAVEEGIVPGGGVALIRAGAALDNVAFHNEDEKTGIQIIRTAIESPLRAIVYNAGLEGSVIVQKVKEGTGDYGYNAREDRYEAMIAAGIIDPTKVTRLALENAASVASLLLTTECVVADEPEEKSAMPPMGGGGMGGMM

SEQ ID NO: 17470 - protein, 469 aa, Fragaria x ananassa
MAFFRTVTKLRSRLGQPPSLRDSVRCLQTQASSDLDLHSQLKELIPEQQERLKKLKKEHGKVQLGTITVDMVIGGMRGMTGLLWETSLLDPDEGIRFRGLSIPECQKVLPGATPGGEPLPEGLLWLLLTGKVPSRSKNMHYPVNNGVVPKFQIMCSRPLMLCLLEHIPMTQFTTGVMALQVQSEFQKAYDKGIPKSRYWEPTYEDSLSLIAQLPVVASYVYRRIYKGGRMIPVDDSLDYGGNFSHLLGFDDHKMQELMRLYVTIHSDHEGGNVSAHTGHLVASALSDPFLSFAAALNGLAGPLHGLANQEVLLWIKSVVDECGENITKDQLKDYVWKTLNSGKVVPGFGHGVLRKTDPRYTCQREFALKHLPDDPLFRLVSKLYDVVPPILTELGKVKNPWPNVDAHSGVLLNHFGLTEARYFTVLFGVSRSIGIGSQLIWDRALGLPLERPKSVTMESLESFCKKAAS

SEQ ID NO: 17471 - protein, 280 aa, Zea mays
MAVARLRAVAAAVLQPALAAGGRGERRPLGTAAEVAAGAGPGAARWELMGARDYYDYRRAMYGDITHKAILVDAAGTLLAPTEPMAQVYRTIGQKYGVNYSEDEILMRYRLAYAQPWGRSRLRYVDDGRPFWQHIVSSSTGCSDLQYFEELYQYYTTEKAWRLCDPDAGRVFEALRRAGVKTAIVSNFDTRLRPLLQALKCDGWFDAVAVSAEVAAEKPNPTIFLKACELLGVKPEEAVHIGDDRRNDLWGARDAGCDAWLWGSDVYSFKEIAERIGVEV

SEQ ID NO: 17472 - protein, 151 aa, Daucus carota
MKRLSSSDSLGALMSICPTTEEGSPGNNHVYSREFQSMLEGLDEEGCVEEMGQISEKKRRLSINQVKALEKNFEVENKLEPERKVKLAQELGLQPRQVAVWFQNRRARWKTKQLERDYGVLKANYDSLKLKNDTLQQENQSLLKEIRELNS

SEQ ID NO: 17473 - protein, 155 aa, Ipomoea nil
MDLRLMGFDHPLFHHIMDYAGDDKSSNSSAPSRTFMLDAKAMAATPADVKEYPNSYVFIIDMPGLKSGDIKVQVDGDNVLSISGERKREAEEKEGAKYVRMERRVGKLMRKFVLPENANKEKITAVCQDGVLTVTVENVPPPEPKKPRTIEVKIG

SEQ ID NO: 17474 - protein, 589 aa, Lactobacillus acidophilus NCFM
MKKTKIVSTLGPASNDIETITALANAGANVFRFNFSHGDHEEHRSRMNMVREVEKNTGKLLGIALDTKGAEIRTTEQEGGKFTINTGDTIRISMDDTKKGNKDMIHVTYDGLYDDTHVGGHVLIDDGLVDLLIKEKDDAKRELVCEAQNTGLIGSKKGVNAPGVEIRLPGITQKDTDDINFGLKEGINFIFASFARKAQDILDIRKLCEAAGADYVKIFPKIESQEGIDNADEILQVSDGLMVARGDMGVEIPFMEVPFVQKNLIRKANALGKPVITATQMLDSMQENPRPTRAEVSDVANAVLDGTDATMLSGESANGLYPVNAVKAMAEIDERTEKQMLKRNTLALQRFEAYKGSNVTEAIGESVVRTAQELGVKTIIAATNSGYTARMISKYRPNADIVAMTFDEKIQHSLAVVWGVQPVLTDKPKSTDDMFEKAAEVAKEKGYVKDGDLVIIVAGVPVGDSGTTNLMKLQIIGNKLVQGLGVGNGSVIGKAVVANSAEEANSKVKEGDILVAKTTDPDYNPAIKKASGLVVEASGLTSHAAVIGLSLGIPVVVGATDATEKISDGSTITVDARRGAIYQGEISNL

SEQ ID NO: 17475 - protein, 167 aa, Ipomoea nil
MDLRNFGLSNFGLEPQLLSTIQDMLDFADDHDRAGRAPPEQPIRAYVRDAKAMAATPADVKEYPNSYVFIADMPGVKAAEIKVQVEDDNVLVVSGERTEREKDEKDGVKYLRMERRVGKFMRKFVLPENANVEAINAVYQDGVLQVTVEKLPPPEPKKPKTVEVKVA

SEQ ID NO: 17476 - protein, 442 aa, Arabidopsis thaliana
AVFNCFIYIERPKILGFALVLFCLNRILKGLCRDCRLQLFYIYREAEEICNHRQRKNKNKMYNLPRDLPEEVLCRIPLTSLRPVRSTCKKWSTLSKCGSFAKKHLAQAKVLADAKEFMVVLMMNFRVYLMRVNLQNNVVESSSSSSSSSSSCIKREAKLISLGDEEADISQVFHCDGLLLCISITESKTRLVVWNPYWGHTRLFEPTHQFNKFDSYSYALGYDKSRKSHKILRGITCLDPFKIYDFNSDLWRDLDVTPEWHLWQMLHGVSLKGNAYWFARENYTETMDTDHFFLLCFDFTSETFGPPLPLPFEFAVSEDTMSVSSVREEQLVVLYQPWDYLQLDIWVTSKIEPNAVSWNSKVFLSVSLKQLVSPQFQLTFGSFFIDEEKKVAVVFDKDYDNKRNIAYIFGVDGSFKAVDLGDSDRKCFPLVCSYVPSLVQLN

SEQ ID NO: 17477 - protein, 203 aa, Glycine max
MQIFVKTLTGKTITLEVESSDTIDNVKAKIQDKEGIPPDQQRLIFAGKQLEDGRTLADYNIQKESTLHLVLRLRGGMQIFVKTLTGKTITLEGESLDTIDNVKAKIQDKEGIPPDQQRLIFAGKQLEDGRTLADYNIQKESTLHLVLRLRGGMQIFVKTLTGKTITLEVESSDGIEYGECKIQDKEVIPLVQHRHISFGKSLE

SEQ ID NO: 17478 - protein, 225 aa, Bacillus cereus ATCC 10987
MIDILLVDDEPRMLELLTLYLTPIGYNCICAQSGEEAISHIENQNFKFILLDIMMPKMDGWETCKKIRSFSNVPIIMVTARDQTIDVVQGLKLGADDYVTKPFHEEELFARIKAVLRRTNQHAQIQYDGILWDEAKHFVSVHNEELLLTPIEFSLLGLFLRHVNYVLSRDQLIERIWGLNTNTEDRTVDSHIRNLRDKLRKVNFPIDNHLKTVYGVGYRWVDTLD

SEQ ID NO: 17479 - protein, 261 aa, Zea mays
MITFVDSAAMELERESGRCLVDPQLWHACAGGMVQMPPVHSRVYYFPQGHAEHAQGHAHADLPAGRVPALVLCRVDAVRFLADPDTDEVLARVRLAPVRPNEPDHADAAAPGAREDKPASFAKTLTQSDANNGGGFSVPRYCAETIFPRLDYSADPPVQTVLAKDVHGVVWKFRHIYRGTPRRHLLTTGWSAFVNQKRLVAGDSIVFMRTGNGDLCVGIRRAKKGGIGGGPEFPHHQPPDGGGYGYGYAGFSTFLRGEEDD

SEQ ID NO: 17480 - protein, 166 aa, Chaetymenia peduncularis
MFPMVTEFMNYGQQTVRAARYIGQGFMITLSHANRLPVTIQYPYEKLITSERFRGRIHFEFDKCIACEVCVRVCPIDLPVVDWKLETDIRKKRLLNYSIDFGICIFCGNCVEYCPTNCLSMTEEYELSTYDRHELNYNQIALGRLPMSILDDYTIRTILNLPERKT

SEQ ID NO: 17481 - protein, 474 aa, Trichodesmium erythraeum IMS101
MSNLILFWHRRDLRISDNVGLTQASQEGQTVVGIFCLDENILKRDDIASARVTYMIGCLQHLQKRYKQIGSQLLIMSGKPIEAIPKLATFLEAKAVYWNLDVEPYSRKRDRQVKENLEAANIQVKTFWEQLLHSPEEIFTSTKKPYSVYTPFWKNWQGKKKSNPLNTPVLKGLTEDQLQYTKKIGVIDLPTAKQLGFNWDNKLILEPGETAALEKLEKFSNGAISSYQEQRNFPSLDGTSQLSVALKFGTIGIRTVWAKTQELIENCYSSEVFENIETWQKEIAWREFYQYVMYHYPELETGPYREHWKNFPWKNNKAHFQAWCEGNTGYPIVDAAMRQLNETGWMHNRCRMIVASFLTKDLIINWQWGEKYFMQNLIDGDLCANNGGWQWSASSGMDPKPLRIFNPVSQTQKYDPEGEYIRQWVCELRSVDTQYLVTGKIPAEEREAIGYPLPIVDHKKQQQLFKDLYREQKN

SEQ ID NO: 17482 - protein, 166 aa, Chamaechaenactis scaposa
MFPMVTEFMNYGQQTVRAARYIGQGFMITLSHANRLPVTIQYPYEKLIISERFRGRIHFEFDKCIACEVCVRVCPIDLPVVDWKLETDIRKKRLLNYSIDFGICIFCGNCVEYCPTNCLSMTEEYELSTYDRHELNYNQIALGRLPMSIIDDYTIRTILNLPEIKT

SEQ ID NO: 17483 - protein, 491 aa, Candida glabrata CBS138
MKPELKNPDLIKGLGYINGEWVKDSNEFFEVDDPSTGEIIAKLPEHDIAVVDRAVDAAYDAFQKYKNTLPRQRATWLRNLFNLMTENAEDLAKIITWENGKSLPDSRAEIKYAASYYEWYAEEAPRIYGATIQPSIPNNRVITKRQPVGVCGIICPWNFPSAMITRKVGAALAAGCTVVVKPDSHTPLSALAMTVLVEKAGFPKGVFNVVLSQHNTPKLGKRLCEHPKVKKVTFTGSTRIGKTLMEQASSTLKKCSFELGGNAPFIVFDDADLDLAVDQAIASKFRGMGQTCVCTNRFYVQDTIADEFAEKLVTKVKQFKIGDGMKEGVTHGCLTNAKQADKVDEHKKDAIEKGAKVLLEGGRMPDLGKNFYAPVVLKNVPQSAMVAKEETFGPLCPIFTFKTVEEVLGYANDTELGLASYVFTKNVNTLFTVSEALEAGMVSCNTGLFSDSSVPFGGVKESGFGREGSLYGIDDYTTVKSIIIGNLPDSL

SEQ ID NO: 17484 - protein, 501 aa, Streptococcus pneumoniae R6
MNKRVKIVATLGPAVEIRGGKKFGEDGYWGEKLDVEASAKNIAKLIEAGANTFRFNFSHGDHQEQGERMATVKLAEKIAGKKVGFLLDTKGPEIRTELFEGEAKEYSYKTGEKIRVATKQGIKSTREVIALNVAGALDIYDDVEVGRQVLVDDGKLGLRVVAKDDATREFEVEVENDGIIAKQKGVNIPNTKIPFPALAERDNDDIRFGLEQGINFIAISFVRTAKDVNEVRAICEETGNGHVQLFAKIENQQGIDNLDEIIEAADGIMIARGDMGIEVPFEMVPVYQKMIIKKVNAAGKVVITATNMLETMTEKPRATRSEVSDVFNAVIDGTDATMLSGESANGKYPLESVTTMATIDKNAQALLNEYGRLDSDSFERNSKTEVMASAVKDATSSMDIKLVVTLTKTGHTARLISKYRPNADILALTFDELTERGLMLNWGVIPMLTDAPSSTDDMFEIAERKAVEAGLVESGDDIVIVAGVPVGEAVRTNTMRIRTVR

SEQ ID NO: 17485 - protein, 319 aa, Staphylococcus aureus subsp. aureus MRSA252
MVKIVVSRKIPDKFYQQLSKLGDVVMWQKSLVPMPKDQFVTALRDADACFITLSEQIDAEILAQSPNLKVIANMAVGYDNIDVESATANNVVVTNTPNVLTETTAELGFTLMLATARRIVEAEKYVEADAWQSWGPYLLSGKDVFNSTVGIYGMGDIGKAFARRLQGFNTKILYHNRSRHKDAEADFNATYVSFETLLAESDFIICTAPLTKETHHKFNAEAFEQMKNDAIFINIGRGQIVDETALIDALDNKEILACGLDVLANEPIDHTHPLMGRDNVLITPHIGSASVTTRDNMIQLCINNIEAVMTNQVPHNPVN

SEQ ID NO: 17486 - protein, 375 aa, Aquifex aeolicus
MKKVKLIGTLDYGKYRYPKNHPLKIPRVSLLLRFKDAMNLIDEKELIKSRPATKEELLLFHTEDYINTLMEAERCQCVPKGAREKYNIGGYENPVSYAMFTGSSLATGSTVQAIEEFLKGNVAFNPAGGMHHAFKSRANGFCYINNPAVGIEYLRKKGFKRILYIDLDAHHCDGVQEAFYDTDQVFVLSLHQSPEYAFPFEKGFLEEIGEGKGKGYNLNIPLPKGLNDNEFLFALEKSLEIVKEVFEPEVYLLQLGTDPLLEDYLSKFNLSNVAFLKAFNIVREVFGEGVYLGGGGYHPYALARAWTLIWCELSGREVPEKLNNKAKELLKSIDFEEFDDEVDRSYMLETLKDPWRGGEVRKEVKDTLEKAKASS

SEQ ID NO: 17487 - protein, 742 aa, Magnaporthe grisea 70-15
MSRTRNDSLNPENEQDDRRTSILSMFSFRERHGSILSGITDIIPENLPLPSSFVPTAPIVQEILSRDIAECSDEDHDNEDGDDNHVHEHRSGSISHSQTPPLDIGAGPSHHHHTQTTSQDAKLAFHPNGVAYGLSGFSAVSIQGVDRPVPNPQELQQSLAAEVDLLRDNDLIPSHSSEQRRRSSATFSGRVYRRFLSTRVRDHDRPVDIFSSDVFRSSSQSVLPDERAPLLPGRRRPSTDTEETLGESDGDSEAVSDSEDESVPTPPADEVHQKWDSAVAAQVLRTTWQREAKTLVQYSAPLIVTFLLHYSVTVASVLTVGRLGMVELAAVNLATMTASITCYVPVQGLATCLDTLCAQAYGSGHKHLVGLQAQRMTWFLWILMVPIAVLWWFSGPIIEKLVPGEETAGLSSLYLRVLILGMPGVAALESGKRFVQAQGLFHATTYVLLITAPLSFFLNWLFVFRFGWGFAGSASAMAIVQNLIPILLVLYVVFFEGRECWSGFSWKAFRNWGPMIKLALPGMIMIEAQFSVLEILTIAAGQLGTAHLAAQSVLVTVTSTSFNIPFPLAIATSTRVANLIGANLGDAARTTTKVAIFAALAVGVFNMIMLISLRRVLPAVFTDDERVIDIASKTMIVCGIMQIFDALAAVSHGILRGVGRQAVGGYANLFSYYFVALPVSLSTAFALGWKLSGLWAGLVSGLAVVSALELLYLYNSDWESAIAQAAARMRSEEVEIVEPKAS

SEQ ID NO: 17488 - protein, 375 aa, Aquifex aeolicus
MKKVKLIGTLDYGKYRYPKNHPLKIPRVSLLLRFKDAMNLIDEKELIKSRPATKEELLLFHTEDYINTLMEAERSQSVPKGAREKYNIGGYENPVSYAMFTGSSLATGSTVQAIEEFLKGNVAFNPAGGMHHAFKSRANGFCYINNPAVGIEYLRKKGFKRILYIDLDAHHCDGVQEAFYDTDQVFVLSLHQSPEYAFPFEKGFLEEIGEGKGKGYNLNIPLPKGLNDNEFLFALEKSLEIVKEVFEPEVYLLQLGTDPLLEDYLSKFNLSNVAFLKAFNIVREVFGEGVYLGGGGYHPYALARAWTLIWCELSGREVPEKLNNKAKELLKSIDFEEFDDEVDRSYMLETLKDPWRGGEVRKEVKDTLEKAKASS

SEQ ID NO: 17489 - protein, 166 aa, Coreopsis petrophiloides
MFPMVTEFMNYGQQTVRAARYIGQGFMITLSHANRLPVTIQYPYEKLITSERFRGRIHFEFDKCIACEVCVRVCPIDLPVVDWQLETDIRKKRLVNYSIDFGICIFCGNCVEYCPTNCLSMTEEYELSTYDRHELNYNQIALGRLPMSIIDDYTIRTILNLPERKT

SEQ ID NO: 17490 - protein, 284 aa, Glycine max
MERSTPVRKPHTSTADLLTWPETPISHSPTHPSSVVRSHQPSDGIRKVVFGGQVTDEEVESLNKRKPCSDYKMKEITGSGIFVANGEDDALEDGSANPNKTGVRMYQQAISGISHISFGEEENVSPKKPTSLPEVAKQRELSGTLESEDSILKKQLSDAKCKELSGHDIFAPPPEIKPRPITPRILELKGSIDIGERHADGDQGDTNSAGKTAKKIYDKKFAELSGNDIFKGDAPPSSADKSLSGAKLREMSGSNIFADGKVEARDYLGGVRKPPGGESSIALV

SEQ ID NO: 17491 - protein, 211 aa, Triticum aestivum
PRVRDYSKHISEASKARNPSAIRALMPYLNRKDMISLGAGQPNPATFPFASLTLTLKTGEKIEIDDQLFDRSLSYDLTSGQPLLNQWLTELQKIEHAPPVDFDVSIGSGSQDLLTKALEMMINPGDAVMVEEPTYTGALAFLETMPCTLAHIATDEFGIVPESLENMLAHWPESNPSGKKDQPRPHVLYTIPSGGNPTGISATYERKQAVY

SEQ ID NO: 17492 - protein, 312 aa, Escherichia coli
FGRIGRIVFRAAQKRSDIEIVAINDLLDADYMAYMLKYDSTHGRFDGTVEVKDGHLIVNGKKIRVTAERDPANLKWDEVGVDVVAEATGLFLTDETARKHITAGAKKVVMTGPSKDNTPMFVKGANFDKYAGQDIVSNASCTTNCLAPLAKVINDNFGIIEGLMTTVHATTATQKTVDGPSHKDWRGGRGASQNIIPSSTGAAKAVGKVLPELNGKLTGMAFRVPTPNVSVVDLTVRLEKAATYEQIKAAVKAAAEGEMKGVLGYTEDDVVSTDFNGEVCTSVFDAKAGIALNDNFVKLVSWYDNETGYSNK

SEQ ID NO: 17493 - protein, 1150 aa, GIBBERELLA ZEAE PH-1
MGTRTASSAVADASLRGPGRTHSTRSSRSSRVPSFPPPSPSASAAPAAPAPATSTGTGANYNQSHTRQLSHSHSQSQSRSQSQSLSQAQSQAYASRSHSHSHSHSHSRSASNAANSHPPPHHSQHQRTSSSARTTSQNDHESSRLAANPKHHRTSSKDDRHPPPTRGPDPSRAHRRSSSSRSKNNNHNPPPEMAPSASAPSNGTSHASAAPPTNHADAPPRASTSKHARSRTVIPTQSGKWMLGKTIGAGSMGKVKLARKEDGSEQVACKIIPRGSTDDGHQSRADKERADQSKEIRTAREAAISTLLNHPHICALHDVVRTNHHWYMLFEYVNGGQMLDYIISHGKLKEKQARKFSRQIASALDYLHRNSIVHRDLKIENILISKTGDIKIIDFGLSNLFAPRGHLKTFCGSLYFAAPELLQARAYTGPEVDVWSFGIVLYVLVCGKVPFDDQSMPALHAKIKRGLVDYPAWLSSECKHLLSRMLVTDPKQRATMQEVLTHPWMAKGFNGPPDNYLPNREPLTTPLEPEVILAMQGFNFGTPESINAQLTKIIESDEYQRAIKLYQREKELPQPTKDAEKKRAFGFDFYKRRNSGNSRDTLSAPSSEALQMGNDPMNAFSPLLSVYYLVKEKQDRDHADMVPPAASQSREKEKEKEREREREREEKREREREREKEREREREREREAREKEKAREPELPEIAAPQAAHTNSSAYEMPGEKPTGGRSRPRARTHGEDDMPELPKQTPAPPPEPRVEQIQKKEGTAAGILRRFSTRKRREPERLDRDRSHPPVVQVHSPAEPSPLAPRKSFSIRRGRRDREDASDTQIRSSSNQGQHGELLSPPMSSGGNREGRRGSALGRSTSVNSAEMRRRKDHPATNESDQSVGNEESSSSRRAHGHSRSVSLRAKSIGHARRESIQQRRQRRDAAQEANVPEETDQELEQSGVSTERLDDTELSKPVFLKGLFSVSTTSGKSVPAIRTDIKRVLKQLNVDYTEIKGGFRCRHSPSIDLNKVQDPPMSPGNTPGHKRRFSFGGLIRGDDRDRDDFRDSDRPPTTPRTPGRSDRDRSFSNSETSFDSNSGRNAGPSRQVPGETSTQVQSDLGGSMVLEFEIFIVKVPLLSLHGIQFKRMAGNTWQYKSMADHILRELRL

SEQ ID NO: 17494 - protein, 402 aa, Colwellia psychrerythraea 34H
MLHKNKLPVTVLSGFLGAGKTTVLSHILNNRQGKKVAVIVNDMSEVNIDSATVANEVSLNRSDEKLVEMSNGCICCTLREDLLLEVTKLAQDGRFDYLVIESTGISEPLPIAETFTFSDEDGISLSDVATLDTMVTVVDAVNFLKDYEEASSLQEVGESLGEEDERSVSDLLVDQVEFADVILISKTDLVDISDIDRLIAILKTLNTHARISPITQGQVDIDAVLSTGLFDFERAQSAPGWLKEMRGEHIPETEEYGISSFSFLARRPFHPEKFYHFLHDTEKFGKLIRSKGYFWLATRPQFSGQWNQAGGIAHYGFAAMFWKSVPKKDWPIDEESLNAIEKQWVEPFGDMRQELVFIGQQLDQGAMTNALNECLLTDDELLKGKNYWATLSDPFPEWSESA

SEQ ID NO: 17495 - protein, 681 aa, Helicobacter pylori J99
MKKKANEEKAPKRAKQEAKTEATQENKAKESNKENKNNKAKEGKIKEAKTKESKVKETAKEPIPVKKLSFNEALEELFANSLSDCVSYESIIQISAKVPTLAQIKKIKELCQKYQKKLVSSSEYAKKLNAIDKIKNTEEKQKVLDEELEDGYDFLKEKDFLEWSRSDSPVRMYLREMGDIKLLSKDEEIELSKQIRLGEDIILDAICSVPYLIDFIYAYKDALINRERRVKELFRSFDDDDENSVSDPKKDDDSEEDEENEERKKVVSEKDKKRVEKVQESFKALDKAKKEWLKALEAPIDEKEDELVRSLTLAYKRQTLKDRLYDLEPTSKLINELVKTMETTLKSGDGFEKELKRLEYKLPLFNDTLIANHKKILANITNMTKEDIIAQVPEATMVSVYMDLKKLFLTKEASEEGFDLAPNKLKEILEQIKRGKLISDRAKNKMAKSNLRLVVSIAKRFTSRGLPFLDLIQEGNIGLMKAVDKFEHEKGFKFSTYATWWIKQAISRAIADQARTIRIPIHMIDTINRINKVMRKHIQETGKEPDLEVVAEEVGLSLDKVKNVIKVTKEPISLETPVGNDDDGKFGDFVEDKNIVSSIDHIMREDLKAQIESVLDQLNEREKAVIRMRFGLLDDESDRTLEEIGKELNVTRERVRQIESSAIKKLRSPQYGRILRNYLRI

SEQ ID NO: 17496 - protein, 322 aa, Candida tenuis
MSASIPDIKLSSGHLMPSIGFGCWKLANATAGEQVYQAIKAGYRLFDGAEDYGNEKEVGDGVKRAIDEGLVKREEIFLTSKLWNNYHDPKNVETALNKTLADLKVDYVDLFLIHFPIAFKFVPIEEKYPPGFYCGDGNNFVYEDVPILETWKALEKLVAAGKIKSIGVSNFPGALLLDLLRGATIKPAVLQVEHHPYLQQPKLIEFAQKAGVTITAYSSFGPQSFVEMNQGRALNTPTLFAHDTIKAIAAKYNKTPAEVLLRWAAQRGIAVIPKSNLPERLVQNRSFNTFDLTKEDFEEIAKLDIGLRFNDPWDWDNIPIFV

SEQ ID NO: 17497 - protein, 769 aa, Arabidopsis thaliana
MESSEEDDEYPFIESITPQSKIDSVHQSLTEKGIRKLCCELMDLKDAVENMCGDMRTKYLAFLRISEEAVEMEHELVELRKHISSQGILVQDLMAGVCREMDDWNRLPGDVHDAEVEEDPLPNEVTDPKSEFLEKIDLLLAEHKVDEALEAMDAEERSSPDLKGSVEMSSYKSAFMERKAVLEDQLLRIAKQPSICVAELKHALIGLIRLGKGPSAHQLLLKFYATSLRRRIEAFLPSCLTCPNTFPATLSKLVFSNISVATKESAAMFGDDDNPAYSNKVVQWAEREVEYLVRLVKENASPSETASALRAASICLQDCLNYCKVLEPQGLFLSKLFLVLFRPYVEEVLELNFRRARRVIFDLNETDEGLESPSDFVTILSEFAIASDTMMTDCSIRFMQIVQDILEQLTHLVVLHFGESVLTRILQLYDKYIDFLIKALPGHSDEDGLPELQDNTVLARAETDSEQLALLGAAFTILDELLPRSLVKVWKLQIENGGGEGENSAALNSSAAPELKEWKRHMVQAFDKLRNYFCLQFVLSFIYSREGLTRLDALIYLTETPDDLHLPSLPFQALFSKLQQLAIIAGDVLLGKEKLQKILLARLTETVIIWLSNEQEFWSAFEDESNPLQPSGLQQLILDMNFTVEIARFAGYPFKVVQNHASVVINRAINIFSERGINPQSSLPKTEWFTEAAKSAINRLLMGSEDASEPEEYECEEEEEDDHHIVLPEMDDDSDSEDTSSLSTVDSFESFASASMADLESPSFTDSES

SEQ ID NO: 17498 - protein, 309 aa, Mycoplasma mycoides subsp. mycoides SC str. PG1
MNKVIYLAGGCFWGVEAYFSKLKGVIDAENGYANGISEKTKYYSLAKTLHAETVKVTYDPNQISLEELLVHYFRIIHPDSLNKQGNDVGTQYRTGVYYTDINDKKVIELVFLEYKKQYDEFYVELEELKNYMTAEDYHQDYLDKNPTGYCHVNLNVDFNLTDKEQELIKLIRKELSLDELSLNVLKYSATEKPHTSEFNDEHRKGIYVEKITKEVLFASNTKFNAGCGWPSFANPINSKAVEYKADYSHNMHRVEVRSKTGDNHLGHVFNDGPKEMGGLRYCINGAALEFIPYEEMDEKGYSEYKKFLD

SEQ ID NO: 17499 - protein, 456 aa, Zea mays
MDGPKRSQLRVRLRVTARRRGADGDGAGGAAGPGGRKRRMEAPVRNSVAKLQRREIGGRQLAARGGGPAAAVPERFRNMQLQEEFDTYDENAHLFVKLQFLKRRSKIIEIVAAKDIIFALANSGLCAAFDRVTNKRIAFLNLSPDEVIRSLFYNKNNDSLITVSVYAADKFSTLKCRTTPIEYIRRNQLDAGFPLFESESLKWPGFVEFDDVNGKVLTYSAQDGPGIMLLIYDRTPSYVPLKILSIEDGKQLKSFKHLLHRNKKIDFIEQFNEKFLVKQENENFQIFDVRSSELIEVSVSKFMTPSAFIFLYENNLFLTFRNRTVAVWDFRGELVTSFEDHLLWHNDCSTNNIYITSDQDLIISYCKSEAVAEDGTVVPVGSINISEIMTGRCIAKITANDPSLSVPGRRNGYSKRSSDWSTVPEALEDVTALFYDEDRNEIYTGNSHGLVHVWSN

SEQ ID NO: 17500 - protein, 365 aa, Triticum aestivum
MGKGGKGEAAAAVAGEGENMAAWLVAKNTLKIMPFKLPPLGPYDVRVRMKAVGICGSDVHYLKEMRIAHFVVKEPMVIGHECAGIIEEVGDGVKHLAVGDRVALEPGISCWRCRHCKGGRYNLCDDMKFFATPPYHGSLADQIVHPGDLCFKLPDNVSLEEGAMCEPLSVGVHACRRADVGAEKSVLIMGAGPIGLVTMLSARAFGAPRIVIADVDDHRLSVAKSLGADAVVKVSGNTEDLAGEIERIQAAMGGDIDVSLDCAGFSKTMSTALEATRPGGRVCLVGMGHNEMTVPLTSAAIREVDVVGIFRYKDTWPLCLEFLRSGKIDVKPLITHRFGFSQGEVEEAFEVSARGRDAIKVMFNL

SEQ ID NO: 17501 - protein, 498 aa, Citrus sinensis
MGKVTVAATVVCAAAVCAAAALVVRRRMKSTGRWARAVAILKEMEEKCGTPIGKLRQVADAMTVEMHAGLASEGGSKLKMLISYVDNLPTGDEKGLFYALDLGGTNFRVLRVQLGGREGRVVKQEFEEVSIPPHLMTGSSHELFDYIAAALAKFVATEGEGFHVSPGRQRELGFTFSFPVRQTSIASGDLIKWTKGFSIEDTVGEDVVGELTKAMERIGLDMRVAALVNDTIGTLAGGRYHNKDAIAAVILGTGTNAAYVERAHAIPKWHGLLPKSGEMVINMEWGNFRSSHLPLTEYDEALDTESLNPGEQIFEKIISGMYLGEIVRRVLCRMAEEANFFGDTVPPKLKIPFILRTPHMSAMHHDTSPDLRVVGKKLKDILEISNTSLKMRKLVVELCDIVATRGARLSAAGIVGILKKLGRDTVRDGEKQKSVIALDGGLFEHYTKFSACMQSTVKELLGEEVSETVVIEHSNDGSGIGAALLAASHSQYLEVEES

SEQ ID NO: 17502 - protein, 372 aa, Pediococcus pentosaceus ATCC 25745
MAVKDDNKQVLDFNLQMEKQTDSFPMLQVLNNDGEIVDEDALKEAGLSDDQLVELMKQMVFSRVLHERSTKLAKQGRLGFYAPTIGEEASQIASNYAFEKGDWLFPGYRDIPQLVMKGWPIYKAFLWSRGHYEGNEFDDVNGWMPQIIIGAQYVEAAGAALGLKMRKQPNVAYAYTGDGGTSQGDFYEGMNFAGAYNAPAVFFSQNNEYAISTPRKLQTKAPHLAAKGWAAGLPSLVVDGMDPIAMYLASKKARQWAVDGNGPVFIETITNRLGAHSMSGDDPLRYRTQEEIDEWTKKEPLIRFRKYLEGLGFWSEEIENDWTEVVNEQIDDGVKQADGIDKQKISDFIEQTLEVPGQAAQEQINKFRGEGK

SEQ ID NO: 17503 - protein, 619 aa, Emericella nidulans
MRSIDQPLLTRLPSSGRAQTSQLPLTMYNAHRGMVPAPNSRLNELLDQLRQEFENQSRSTGEFEHQLTGQLQEMEMIRQKVYQLEQAQLKMKQDYEAEIRMLRHELESRGVQPVASHVAVPAQHGGPSQAPPPALGHGPSNLFGGIMANQGGSGPGLAPPPPQDQQPSQHTLQQPAAAAQPGAPQPPQSSFGGYQPWRCCYGPPPPPTASPGPGKRPRAPPGPATPQQAHQLAYPESRVSPQLARPTPPNQPVVRDRPGNMLANWNPEDLPPSQKKEGVDWYAVFNPEVQRVLDVELVHHLVHDSVVCCVRFSRDGKYLATGCNRSAQIFDVTLGQNVAVLQDESVDKSGDLYIRSVCFSPDGKYLATGAEDKQIRVWDIATRTIKHIFSGHEQDIYSLDFAGNGRYIASGSGDKTVRLWDIAEGKLVYTLSIEDGVTTVAMSPDGLYVAAGSLDKTVRVWDTTTGYLVERLENPDGHKDSVYSVAFAPNGKELVSGSLDKTIKLWELNLPRQQYNSAGKGGKCHRTFEGHKDFVLSVCLTPDGHWVMSGSKDRGVQFWDPITGNAQMMLQGHKNSVISVAPSPTGNLFATGSGDMRARIWRYASFPNPISLPKIWMLG

SEQ ID NO: 17504 - protein, 468 aa, Pediococcus pentosaceus ATCC 25745
MVVGTQAINVDTLIIGSGPGGYVAAIRAAELGQKVVIVERDYIGGVCLNVGCIPSKALIQAGHLYSTLQHGNPFGVSVSESKIDFTKTQEWKQNQVVNKLTGGVELLLKKHKVAIVRGEAYFNDNETVNVINGDDSHVYRFKRALIATGSRPVEIPHFKFSGRVIDSTGALNLKDVPEHLIIIGGGVIGAELAGAYMNLGSKITIIEGLDHILNGFDGELIQPVLNNFKKNGVEIVTEATAVEANQTDKDVTVTYEADGTTKTVNGDYCLVSVGRRPNTDQLGLNNTNIKLSKRGLIEVNDSMQTSVKHIYAIGDVVAGPALAHKASFEAKVAAAAMGGEDAHDTHYVLPAVAYTNIELATVGETPQSIAEKKLDAKSSKFPFAASGRAMTMDQTEGFIRLITDNPTGGIIGAQIVGPEASNLISELTLAIENGLTIKDIELTIHPHPTLGEEIMDAAELAAGLPIHV

SEQ ID NO: 17505 - protein, 318 aa, Streptomyces griseus subsp. griseus
MSDGNGDGPVRDETIRSGVVRPAGIPEQQARPHPVDGADGAESIDVAVEQQSQAGRAGQMSEHGHHDPHDRSGARALFFELRELPDGSAEKAELRNRLVRMHLPLVEHLARRFRNRGEPLDDLTQVATIGLIKSVDRFDPDRGVEFSTYATPTVVGEIKRHFRDKGWAVRVPRRLQELRLSLTTATAELSQQHGRSPTVHELAERLGISEEEVLEGLESANAYSTLSLDVPDTDDESPAVADTLGSEDEALEGVEYRESLKPLLEALPPREKRILLLRFFGNMTQSQIAQEVGISQMHVSRLLARTLAQLRERLLVEE

SEQ ID NO: 17506 - protein, 554 aa, Zea mays
  misc_feature (520)..(520): Xaa can be any naturally occurring amino acid
  unsure (1)..(554): unsure at all Xaa locations
MGEVEDMYTQDGTVDMKGNPAVKKGTGNWRACPYILANECCERLAYYGMSTNLVNYMKTRLGQVNSVASNNVTNWQGTCYITPLIGAFFADAYMGRFWTIAIFMIIYIFVPTSCGDKDVCHPTDAQTSVVFVALYLIALGTGGIKPCVSSFGPDQFDEIDEREKKSKSSFFNWFYFSINIGALVASTVLVYVQTHVGWGWGFGIPAVVMAIAVGSFFVGTPLYRHQKPGGSPLTRIAQVLVACARKWNVAVPADKSRLHETVDGESVIEGSRKLEHSEQLACLDRAAVVTAEDGAEASPWRLCSVTQVEELKSVIRLLPIWASGIVFAAVYSQMSTMFVLQGNTLDQSMGPRFKIPSATLSMVDTISVIVWVPVYDRAIVPLVRSYTGRPRGFTQLQRMGIGLVVSIFSMVAAGVLDIVRLRAIARHGLYGEDDIVPISIFWQIPQYFIIGCAEVFTFVGQLEFFYDQAPDAMRSMCSALSLTTVALGNYLSTVLVTIVTHITTRHGRIGWIPENLNRGXHLDYFFWLLAVLSLLNFLAYLVIASWYKYKKTAD

SEQ ID NO: 17507 - protein, 332 aa, Arabidopsis thaliana
MAANGVATAGRQVSEKEADIQMMLSADVHLGTKNCNYQMERYVFKRRDDGIYIINLGKTWDKLQMAARVIVAIENPKDIIVQSARPYGQRAVLKFAQYTGVNAIAGRHTPGTFTNQMQTSFSEPRLLILTDPRTDHQPIKEGALGNIPTIAFCDTDSPMGFVDIGIPANNKGKHSIGCLFWLLARMVLQMRGTILAAQKWDVMVNSRNTIRTCVSPTPDKDLDLFLLCRWICFSTGSPKKQSKRVMKKLKYRPIMEWLVVTSGPLLKYLMLHGLVKSNSQFLLHLQLALPLLLDGRLLLFQLLVGSKSSLISLARTRLDVDLIFLFSRFGED

SEQ ID NO: 17508 - protein, 268 aa, Oryza sativa
RTVALGIVAMACLVAIAHGGNFFQDAEVSWGQGRGKIVDGGRGLDLTLDRSSGSGFQSKSEYLFGKIDMQIKFVPGNSAGTVTTFYLSSQGSTHDEIDFEFLGNVTGEPYTLHTNVFTQGQGQREQQFRLWFDPTQSFHTYSIIWNPQHVIFAVDGTPIRDFKNHEARGVAFPKSQPMRVYASLWNADDWATQGGRVKADWSKAPFVASFRDFNADACVWSNGGWWNQELSDMSYRRMRWVQRKFMIYNYCTDAKRFPQGTPAECKLR

SEQ ID NO: 17509 - protein, 346 aa, Bacillus licheniformis ATCC 14580
MDGNMKALIKKPGEPGASFELVPIPKIDKHEVLIKVKAASICGTDVHIYNWDEWAKSRVKPPYVFGHEFSGEVVQVGENVTTVKEGEYVSAETHIVCGKCLPCLTGKEHVCKKTLILGVDTDGCFAEYVKMPAANIWKNPAGMPEDLASIQEPLGNAVHTVLTGMTAGVKVAVVGCGPIGLMAVAVAKASGAAQVIAIDKNEYRLDLALQMGATDIISVEKEDPLKNVSALTNGEGADLVCEMSGHPTAIRQSLKMAANGGRVHVLSLPEHPVCIDMTNDIVFKGLTVQGITGRKMFETWRQVSGLLQSGTIQIKPVITHRFPMEEFEKGFELMRKGQCGKVVLIP

SEQ ID NO: 17510 - protein, 139 aa, Erwinia carotovora subsp. atroseptica SCRI1043
MTNDSASHTPSDNTEMTEMQRYVTQQRGTEPAFSGKLLHNKRTGAYHCLCCQAPLFYSDSKYDSGCGWPSFDQPVSSEAVRYLEDESHNMRRIEIRCGQCDAHLGHVFPDGPKTTGERYCVNSASLSFIDDVDGERVDG

SEQ ID NO: 17511 - protein, 391 aa, Bacillus licheniformis ATCC 14580
MKEFNFLASELNTMKENGTFQELPIIESMQGSTVKMKGKDIIQLSSNNYLGLTSHPRLQKAAEEAVKRYGAGTGSVRTIAGTFTMHDELEKKLASFKNTEAALVFQSGFTANQGILSSILTKDDLVISDELNHASIIDGIRLTKAGKKVYQHADMEDLEKILKKSMNYRMRLIVTDGVFSMDGDIAPLPEIVRLAEQYDAFVMVDDAHASGVLGENGRGTVHHFGLDGKVHIQVGTLSKAIGVLGGYAAGSKVLIDYLKHKGRPFLFSTSHPPAVTAACIEAVNVLMEEPSLIKKLWDNTAYFKKELEKIGLPLIKSETPITPILIGDEAEACRFSNTLFELGLFAQAIVFPTVPKGKARIRTIMTAQHSKEELDKALEIIQTGAKKAGLL

SEQ ID NO: 17512 - protein, 334 aa, Erwinia carotovora subsp. atroseptica SCRI1043
MEYMTIKVGINGFGRIGRIVFRAAQERSDIEIVAINDLLDAEYMAYMLKYDSTHGRFNGTVEVKDGHLVVNGKTIRVTAERDPSNLKWNEVNVDVVAEATGLFLTDETARKHIAAGAKKVVLTGPSKDDTPMFVMGVNHKTYAGQEIVSNASCTTNCLAPLAKVINDNFGIVEALMTTVHATTATQKTVDGPSHKDWRGGRGASQNIIPSSTGAAKAVGKVIPELNGKLTGMAFRVPTPNVSVVDLTARLEKPASYKEVCAAIKAAAEGELKGVLGYTEDDVVSTDFNGEKLTSVFDAKAGIALNDNFVKLVSWYDNETGYSNKVLDLIAHISK

SEQ ID NO: 17513 - protein, 358 aa, Oryza sativa (japonica cultivar-group)
MSAYCGKYKDELIKNAAYIGTPGKGILAADESTGTIGKRFASINVENVEENRRSLRELLFCTPGALQYLSGVILFEETLYQKTKDGKPFVDVLKEGGVLPGIKVDKGTIEVAGTEKETTTQGHDDLGKRCAKYYEAGARFAKWRAVLKIGPNEPSQLAIHLNAQGLARYAIICQENGLVPIVEPEILVDGPHDIDPCAYVSEVVLAACYKALNEHHVLLEGTLLKPNMVTPGSDAKKVSPEVIAEYTVRTLQRTVPAAVPAIVFLSGGQSKEEATRNLNAMNKLSTKKPWSLSFSFGRALQQSTLKAWSGKAANIEKARAAFLTRCKANSEATLGTYKGDAVLGEGASESLHVKDYKY

SEQ ID NO: 17514 - protein, 348 aa, Lotus corniculatus var. japonicus
MGRTPCCDEIGLKKGPWTPEEDAILVDYIQKHGHGSWRALPKLAGLNRCGKSCRLRWTNYLRPDIKRGKFTEEEEQLIINLHAVLGNKWSAIAGHLPGRTDNEIKNFWNTHLKKKLLQMGLDPVTHRPRLDHLNLLSNLQQFLAATNMVTSFTNTLDSNAALRLQSDATQLAKLQLLQNILQVLGTNPASNLELLNQLGPSSSISDTFLHEALGLNQSKLQELYKSSIGFPSHQNLSNLQTLEVPHHLQQHYMNGGSTINSCMQSRKVVDEQLDATNSSSTIPLNSLPNLVSASPQCSTVKEMENKVNPNECSNPSSTSTTFEMWGDFMCEEVNDDYWKDLIDQESNR

SEQ ID NO: 17515 - protein, 298 aa, Bacillus cereus ATCC 10987
MPNIAVVGSISMDLVAVSKKRPKAGETVIGEAFHTIPGGKGANQAVAAARLGANVAMVGAVGDDNYGTVVRKNLENERVFIDYVVPVTDTATGIAHIVLAEEDNSIVVVQGANALVNESVVNRSKDLLTKADMVVLQLEIPLETVKYVLAICEEHKIPVMLNPAPAQVLSEDILEKATYITPNEHECRIVLDDFTSPIEELLAKYPNKLLMTEGSNGVRFHNGTEIVHVPSIAVDVVDTTGAGDTFNGALAVALSEGETLQKAIRFANIAGGLSVTKLGAQGGMPTRDKVREVQVIVG

SEQ ID NO: 17516 - protein, 195 aa, Candida glabrata CBS138
MSDKSATEQKPPSSSVFSMFGGKKAEEPKKEEAVEKKEEEEKKEEKKDDEEEPESPEVHFEPIVHLEKVDVKTNEENEDVLFKVRAKLFRFDADAKEWKERGTGDCKFLQNKETKKVRLLMRRDKTLKVCANHLIAPEYVLKPNVGSDRSWVYACTADIAEGEAEAFTFAIRFGNKENADKFKEEFEKAQEINKK

SEQ ID NO: 17517 - protein, 249 aa, Geobacillus thermoleovorans
MSIEQKTAIVTGGANGIGKAIARAFAKQGANVVIIDRDIQNGEAFAAQLQSDGFEAIFVAADVRKVDDIERFVQEAAGRFGRIDYLINNAGVSRWKSPYELTVEEWDDVLSTNLRSAFFASREAAKYMRRNAKGGAIVNIASTRALMSEPNSEAYAASKGGLVAMTHALAVSFADDRIRVNCISPGWIETGDYGQLRDIDHRQHPAGRVGKPDDIARACLYLCDEENDFITGVNLVIDGGMTRKMIYIE

SEQ ID NO: 17518 - protein, 403 aa, Vibrio sp. Ex25
MKRVVITGMGIVSSIGNNVEEVLASLKAGKSGITASEQFKEHGLRSQVWGDLKINPAEHIDRKQMRFMGDAAAYAYLSMEQAIADAGLTEDQVSNDRTGIVAGSGGASAYNQTVATDTMRAKGVKRVGPYMVPRTMSSTVSACLATPFKIRGVNYSMSSACATSAHCIGHAMELIQLGKQDIVFAGGGEELDWSQTMMFDAMGALSTKYNDTPDKASRTYDADRDGFVISGGGGMLVIEELEHALARGAKIYGEIVGYGATSDGYDMVAPSGEGAIRCMKMAMQDVDGVDYINTHGTSTPVGDVKELGAIQQLFGENSPAISATKAMTGHALGAAGVHEAIYSTLMLDKNFIAPSINIENLDEAAQGLDIVTEARDAELTTVMSNSFGFGGTNATLVIKKYQG

SEQ ID NO: 17519 - protein, 130 aa, Pinus thunbergii
MSKTIKRIGSRRNEHRVLKGVIYVQASFNNTIVTATDVRGQVLSWSSAGACGFKGTRRGTPFAAQTAAENVIRALMDRGMERVEVMISGPGRGRDTALRTIRRSGILLSFVRDVTPMPHNGCRPPKKRRV

SEQ ID NO: 17520 - protein, 528 aa, Arabidopsis thaliana
MVTNSLPLSLSSLGGKMEISVASVTISVVLAVVSWWIWRTLQWVWFKPKMLEHYLRRQGLAGTPYTPLVGDLKKNFTMLSEARSKPLKLTDDISPRVVPYPLQMFKTYGRTYFTWFGPIPTITIMDPEQIKEVFNKVYDFQKPHTFPLATIIAKGLANYDGDKWAKHRRIINPAFHIEKIKNMVPAFHQSCREVVGEWDQLVSDKGSSCEVDVWPGLVSMTADVISRTAFGSSYKEGQRIFELQAELAQLIIQAFRKAFIPGYSYLPTKSNRRMKAAAREIQVILRGIVNKRLRAREAGEAPSDDLLGILLESNLRQTEGNGMSTEDLMEECKLFYFAGQETTSVLLVWTMVLLSQHQDWQARAREEVKQVFGDKEPDAEGLNQLKVMTMILYEVLRLYPPVTQLTRAIHKELKLGDLTLPGGVQISLPILLVQHDIELWGNDAAEFNPDRFKDGLSKATKSQVSFFPFAWGPRICIGQNFALLEAKMAMALILRRFSFEISPSYVHAPYTVITIHPQFGAQLIMHKL

SEQ ID NO: 17521 - protein, 164 aa, Ralstonia eutropha JMP134
MSNVYQFEAKSLAGQPVPLSQFRGKVLLIVNTASECGFTPQYAGLQALHDAYAARGLEVLGFPCNQFGKQEPGDAQQIGQFCESRFSVKFPMFAKIDVKGPDAHPLYQWLTSAKRGVLGTQAIKWNFTKFLLRRDGTVYKRYGSITKPEEIRADIETLLADPAA

SEQ ID NO: 17522 - protein, 341 aa, Escherichia coli O157:H7
MKALSKLKAEEGIWMTDVPVPELGHNDLLIKIRKTAICGTDVHIYNWDEWSQKNIPVPMVVGHEYVGEVVGIGQEVKGFKIGDRVSGEGHITCGHCRNCRGGRTHLCRNTIGVGVNRPGCFAEYLVIPAFNAFKIPDNISDDLASIFDPFGNAVHTALSFDLVGEDVLVSGAGPIGIMAAAVAKHVGARNVVITDVNEYRLELARKMGITRAVNVAKENLNDVMAELGMTEGFDVGLEMSGAPPAFRTMLDTMNHGGRIAMLGIPPSDMSIDWTKVIFKGLFIKGIYGREMFETWYKMAALIQSGLDLSPIITHRFSIDDFQKGFDAMCSGQSGKVILSWD

SEQ ID NO: 17523 - protein, 142 aa, Zea mays
  misc_feature (94)..(94): Xaa can be any naturally occurring amino acid
  misc_feature (99)..(99): Xaa can be any naturally occurring amino acid
  misc_feature (114)..(114): Xaa can be any naturally occurring amino acid
  misc_feature (133)..(133): Xaa can be any naturally occurring amino acid
  misc_feature (137)..(137): Xaa can be any naturally occurring amino acid
  unsure (1)..(142): unsure at all Xaa locations
MSSSSLSPTAGRTSGSDGDSAADTHRREKRRLSNRESARRSRLRKQQHLDELVQEVARLQADNARVAARAADIASQYTRVEQENTVLRARAAEXLGDRXRSVKRGAPPSSKEFXGVAMEIQGRKIAGRKNRCXVPWXLALRV

SEQ ID NO: 17524 - protein, 375 aa, Oryza sativa
MAVGEVLTERRRETLTTDLVLIPICRQEPKISSIVPEEAAAGEYLAIISASYVTNRNWTVLPVQTKQVSDLQQQEAKLCKQSYIRVTCITYSETDLSCGPSSMTELTAAAAPAGSGSSAAVAAGSSEKMGRGKIEIKRIENTTNRQVTFCKRRNGLLKKAYELSVLCDAEVALIVFSSRGRLYEYANNSVKSTVERYKKANSDTSNSGTVAEVNAQHYQQESSKLRQQISSLQNANSRTIVGDSINTMSLRDLKQVENRLEKGIAKIRARKNELLYAEVEYMQKREVELQNDNMYLRSKVVENERGQQPLNMMGAASTSEYDHMVNNPYDSRNFLQVNIMQQPQHYAHQLQPTTLQLGSRPSISFGVDTVRTHVR

SEQ ID NO: 17525 - protein, 666 aa, Chlamydia muridarum Nigg
MAGNSELDIDILEKIAGTIKQLSIESIQKASSGHPGMPLGCAEIAAYLYGCVLRYNSKDSQWMNRDRFVLSAGHGSALLYSCLHLAGFNVRLEDLQQFRQLHSQTPGHPEFRETDGVEATTGPLGQGIGNAVGMALSLKMLGSRFNQSSTSIFDAKVYCLAGDGCFMEGVSHEACSFAGSLGLDNLILIYDYNEIILDGTLQDVSVEDTKQRFLAYGWDVFEANGHDFEDLHRVFSQIKKGQQKPTLIIAHTIIGHGSPKEGTNKAHGSPLGEDGVAQTKSFWHLPEEKFFVPSSVKMFFAAKQQEGQKLQEEWQERFRVWSKRFPEQHQEYLKLTQEISIQDLEVLLNLIDMPESIAGRAASNKVIQVLAENIPSLIGGSADLSSSDGTWIAKETAVNASHFQGRNIRYGVREFGMGTIMNGLAYSQVFRPFGGTFLVFSDYLRAAIRLAALSKLPVIYQFTHDSIFVGEDGPTHQPIEQIMSLRAIPGLRVVRPADAHEVKGAWLSALENSGPTALILSRQNLPTLKETKRSFRDGVGRGAYILVKEEGGSPDYTLCASGSEVHLAMEVAQSLMALDKRVRVISFPCWELFERQDPEYRESVIGGDLGLRVSIEAGSALGWYKYIGSNGLSIAMDVFGMSGAPHEVAETCGFTVDSIVQRILSV

SEQ ID NO: 17526 - protein, 796 aa, GIBBERELLA ZEAE PH-1
MKNTINLMVDRLGTFAVEVSKVAREVGTDGTLGGQAQVANVEGKWRDLTENVNTMASNLTAQVRSISTVTQAIANGDMSQKIKVEANGEIQVLKETINNMVDRLSSFCYEVQRVAKDVGVDGKMGAQADVGGLDGRWKEITTDVNTMASNLTTQVRAFSDITNLATDGDFTKLVDVEASGEMDELKRKINQMISNLRDSIQRNTQAREAAELANKTKSEFLANMSHEIRTPMNGIIGMTQLTLDTDLTQYQREMLNIVNNLANSLLTIIDDILDLSKIEARRMVIEEIPYTLRGTVFNALKTLAVKANEKFLDLTYMVDSSVPDYVIGDSFRLRQIILNLVGNAIKFTEHGEVSLTIKESMGQSHVRPGEYAVEFVVQDTGIGIAQDKLDLIFDTFQQADGSMTRKFGGTGLGLSISKRLVNLMGGDLWVNSQHGKGSEFHFTCLVKLAPDDAALIEQQIRPYRGHQVLFVDKAQSQNAASIKPMLEKIGLKPVVVDSEKSPALARLHTGGSLPYDAILVDSIDTARRLRAVDDFKYLPIVLLAPVVHVSLKSCLDLGITSYMTTPCKLIDLGNGMIPALENRATPSLADNTKSFEILLAEDNTVNQRLAVKILEKYHHVVTVVGNGWEAVKAVQSKKFDVILMDVQMPIMGGFEATGKIREYERGIGSHRTPIIALTAHAMMGDREKCIQAQMDEYLSKPLQQNHLIQTILKCATLGGPLLEKNRERELALHAETKSKHKEGGQGLLRPTLESRAFTSREPLLGNGKESPAIIATDEDPMARARLDLSDMRSLTN

SEQ ID NO: 17527 - protein, 131 aa, Triticum aestivum
  misc_feature (82)..(82): Xaa can be any naturally occurring amino acid
  unsure (1)..(131): unsure at all Xaa locations
VLSCQALPCGRVPPVSRRRPRGPRYTPTCPPRRVSILQGAAAVLAFSRTAEFLADGLRSYVREEDGAVILRMIGGLGIAIFXCLEWVALALAFVLRYYAYVDRECGGNPMRRSAKVGGEDGAGNWPWPFQV

SEQ ID NO: 17528 - protein, 616 aa, Thermobifida fusca YX
MCRNAREGTAAQYYGGPPASGGIGTEPGAGHRPPDSPDRRVQQSRHTSVREVFVSPASSTRSKQQPEALQEPVIQQLIERGRSQGYLEPEDVRRAFEEAEIPMSQAQAVLRTLTKEGVTLIVNAAESAPPRRKSTRRKTTSASRAAAQTSTTRAKRTAAAQEKPEAATAVKKSTEDAEETTTASKKRTTKAASTKSKTTAKRSTAKKTTTKSTTKKTAKTATKKKTAATAATPAVEEELGLEATDLLEDNFEETGADLELVDDTDDEVVELEETTPAKRSRDLPEKADADDDDSFVLYDDDDDAPAAQVVAAGATADPVKDYLKQIGKVPLLNAEQEVELAKRIEAGLFAEEKLSKKGHELTPEEREELEWIAEDGKRAKKHLLEANLRLVVSLAKRYTGRGMLFLDLIQEGNLGLIRAVEKFDYTKGYKFSTYATWWIRQAITRAMADQARTIRIPVHMVEVINKLARVQRQMLQDLGREPTPEELAKELDMTPEKVVEVQKYGREPISLHTPLGEDGDSEFGDLIEDSEAIQPGEAVSFTLLQEQLHSVLDTLSEREAGVVSMRFGLTDGQPKTLDEIGKVYGVTRERIRQIESKTMSKLRHPSRSQVLRDYLD

SEQ ID NO: 17529 - protein, 146 aa, Azoarcus sp. EbN1
MSRKVDKPEAEWRAQLTPAQFQVTREKGTERAFTGEYWDCWDKGEYHCIGCGAPLFSSEHKFDAGCGWPSFWTAAAPENVETAEDRSHFMQRTEVLCHECGAHLGHVFEDGPQPTGLRYCINSASIRLEPEASANDGQPRGPQSTG

SEQ ID NO: 17530 - protein, 292 aa, Debaryomyces hansenii CBS767
MSAVQSVGATTKLNQHEILPAPSDVGALANRINHETKALHNNINKLITLKLVLAYRDSRIYRQGLQSFYHVFATVERSLMKQFEKDDEWTELLKQVWKPEMGRTDKAEQDLMFYYDDRREKFESPIMSEQIKFVEHIQKVTAEKPYLFIAYLHVMYLGLFAGGRIMRSSISRATGLFPQKDGLKHEDIIRLGANFYTFDVADEDAFRLIYKRDYELVTRSALTEEQKVEIIEESKYIFAQNAKCVSEIEQHNIARMSKKWAYIAATKGYYVVLALAALLVLFYIRRIILHLL

SEQ ID NO: 17531 - protein, 443 aa, Rhizobium sp. NGR234
MYRTNTPNLENYWMPFTANRQFKAAPRLLASAEGVYYRDIDGNQVLDGTAGLWCVNAGHARKEISQAVERQLNTLDFAPSFQMGHPIAFQFAEKLAEIAPGEPGKKLDRIFYTGSGSESVDTALKIAIAYQRAIGQGTRTRLIGRERGYHGVGFGGISVGGLVNNRRVFPQVPGADHLRHTHDLARNPFTKGGLPEHGAELADDLERLVALHGAETIAAVIVEPVAGSTGVLLPPKGYLERLRATADKHGILLIFDEVISGFGRLGAPFAVDYFGVTPDIITTAKGLTNGVVPMGAVFTSSKVHDALMHGPEAQIELFHGYTYSGHPVACAAGLAAMEIYEKEALLTRASELATYWEDAVHGLRSRKNVIDIRTIGLVAGIELASRSEAAGARAYDVFVDCFKRGLLIRVTGDIIALSPPLTIEREQVDELMSILADALDRAD

SEQ ID NO: 17532 - protein, 162 aa, Pseudomonas syringae pv. tomato str. DC3000
MSAFHDIRLKALGGQELPLADFKNKVVLVVNVASKCGLTPQYAALENLYQQYRDKGLVILGLPCNQFAGQEPGTEQEIAEFCQLNYGVTFPLGEKLDVNGPNRHSLYRLLAGEGAEFPGDITWNFEKFLVGKNGGVSARFSPRTAPDDPAVIQAIEKALAHN

SEQ ID NO: 17533 - protein, 292 aa, Glycine max
MASLHSITFSTKTVLYVFVLASSIAASAGNFYQDFDVTWGDGRAKILNNGDLLTLSLDKASGSGFQSKNEYLFGKIDMQLKLVPGNSAGTVTAYYLSSKGSNWDEIDFEFLGNLSGDPYILHTNVFSQGKGSREQQFYLWFDPTADFHTYSILWNPQRIIFSVDGTPIREFKNMESKGVAFPKEQPMRIYSSLWNADDWATRGGLVKTDWTQAPFTASYRNFNANACVHSGSSSSSSSCTANSSSSNAWFSQQLDSTSQDRLSWVQKNYMIYNYCTDTKRFPQGLPPECQTS

SEQ ID NO: 17534 - protein, 750 aa, Candida glabrata CBS138
MPTLTFYLGADDAVDGGVKSKSMAFSDPFHKNVKVQSPEPEPVDAKEKKKLNRTRTMSVFYNVADFKDDEEIRKHKLKRRASEDDTYISSKGTRRLFVKDVDWTLKELLQNEDTDQNFQITVEDTGPKVIKLGTANSAGYNHIDIRGTYMLSNLLQELTIAHNFGQRQLYLPESRLNENPVHRLKRVIETHFWDGLTRRLDLNTIGEAAQEKKIDTPEAKNPRVYVPYDCPEMYEYFIQASQMNPSVKLEVEYLPKDITPEYVQSLNETPGLLAIAMDKHVNPTTGETSLVGFPYVFPGGRFNELYGWDSYLITLGLLASKRTDLARGMVEHFIFEIEHYGKILNANRTYYLCRSQPPFLTDMANVTFNGMGGNKNPIAVDLLRRAFRAAIKEYKTVWMAKPRLDEKTGLSCYHPDGVGIPPETEPEHFDTKLRPYAKKYNVTIPEFRRMYNAKEVHEPELDEFFLHDRGVRESGHDTTYRLEGVCAYLATIDLNSLLYKYEVDIANFIKEFCNDKYVDPYDKSVTTSEDWMNLANKRKERIKFYMWDEEAGFFFDYNVKTEKRTSYESATTFWAMWAGVASPQEAEIMVKKAVPKLETLGGIVACTESSRGPIAIDRPYRQWDYPFGWAPHQILAWKGFSNYGYDNIARRLVYRWLYMMTKAFVDYNGIVVEKYDVTKVTDPHKITAEYGNQGVDFKGYAREGFGWVNSSFLLGLQYLDNHAIRALGACIPPKPFLNGLRAKEKARYGL

SEQ ID NO: 17535 - protein, 140 aa, Oryza sativa
MRKYRLAGLVAALLVLHSLATPSAQAEAHRAGGEGEEKMSSDGGPVLGGVEPVGNENDLHLVDLARFAVTEHNKKANSLLEFEKLVSVKQQVVAGTLYYFTIEVKEGDAKKLYEAKVWEKPWMDFKELQEFKPVDASANA

SEQ ID NO: 17536 - protein, 328 aa, Bacillus licheniformis ATCC 14580
MPITKKKIPVAILTGYLGAGKTTLLNRILTEKHNQKIAVIVNEYGEVGIDNQLVVDSEEEILEMNNGCICCTVRGDLIRILRTLVFSMDQGKVAFDRVLIETTGLADPAPVAQTFFMDELLSEIFEVDSIVTVVDSKHVTRHLDDQDEAQEQIAFADVIILNKTDLVSNNELKSLEQRLVNINPTAKRLYARDCKVNLRDILGINTFDVNRKIEIDPHFLEDHHHHHHDDKVSSIAFREEKPLDLAKVDHWMSYLVREKGEDLLRYKGILYIKGEEYRIVFQGLHMLFSGRPDRKWNENEKKQSELVFIGKDLDKEELERQFKNCIAK

SEQ ID NO: 17537 - protein, 166 aa, Dimeresia howellii
MFPMVTEFINYGQQTVRATRYIGQGFMITLSHVNRLPVTIQYPYEKLITSERFRGRIHFEFDKCIACEVCVRVCPIDLPVVDWKLETDIRKKRLLNYSIDFGICIFCGNCVEYCPTNCLSMTEEYELSTYDRHELNYNQIALGRLPMSIIDDYTIRTILNLPEIKT

SEQ ID NO: 17538 - protein, 151 aa, Brassica napus
  misc_feature (137)..(137): Xaa can be any naturally occurring amino acid
  unsure (1)..(151): unsure at all Xaa locations
MAFPIDHSLADLTKLNLLPKPHGHASDMFPFRLSVFPRVHLSLRTSTSRVLSSLGSKVDPNGSVLIETTTPPEPSPDVTGGVQDVYGEDAATEDMPITPWSLSVASGYTLLRDPHHNKGLAFSQRERDAHYLRGLLXPTVISQDLQVKKMM

SEQ ID NO: 17539 - protein, 350 aa, Bacillus cereus ATCC 10987
MKALLWHNQRDVRVEEVPEPTVKPGAVKIKVKWCGICGTDLHEYLAGPIFIPKEEHPLTHVKAPVILGHEFSGEVVEIGEGVTSHKVGDRVVVEPIYSCGKCEACKHGHYNVCEQLVFHGLGGEGGGFSEYTVVPEDMVHHIPDEMTYEQGALVEPAAVAVHAVRQSKLKEGEAVAVFGCGPIGLLVIQAAKAAGATPVIAVELSKERQELAKLAGADYVLNPATQDVLAEIRNLTNGLGVNVSFEVTGVEVVLRQAIESTSFEGQTVIVSVWEKDATITPNNLVLKEKEVVGILGYRHIFPAVIKLISSGQIQAEKLITKKITVDQVVEEGFEALVKDKTQVKILVSPK

SEQ ID NO: 17540 - protein, 310 aa, Zea mays
MAAAAGGGAVRALSQKEQDIQMMLAADVHLGTKNCDFQMERYAFKRRTDGIYIINLGKTWEKLQLAARVIVAIENPQDIIVQSARPYGQRAVLKFAQYTGAHAIAGRHTPGTFTNQLQTSFSEPRLLILTDPRTDHQPIKESALGNIPTIAFCDTDSPMRYVDIGIPANNKGRNSIGCLFWLLARMVLQMRGTILPGHKWEVMVDLFFYRDPEEAKEQEEEAAVAPEFAAITDYQGADQWGGDQWTSDVTAPPVAPTGADWGAAPAPVPTGDGWDQAGAPAPVVDGTVPPLVAPTGWDQAAPPPTAQGWE

SEQ ID NO: 17541 - protein, 568 aa, Vibrio sp. Ex25
MESLKMNQPNLNSAAGCALPPPNEMILKWAQERPNEVYLKQIINRQFVEYTFADVADQALKLVSALRNLGVQPGDKVALVSKNCAEWFICDLAMMLGDYVSVPIFPTAGADTIEYCVTHSESKALIGGKLDDPKATQQVIDAMPELISIALPYDTAPKCQYEYQALIADAMPSEERPQHYDDKLMSLVYTSGTSGLPKGAMLTYGAFNWSVQQLINHIGIQENDRLFSYLPLAHITERVYIFGSSIMGGVPTAFPESLDTFIEDVKMHRPTLFISVPRLWTLFQQRIQDKLPQKKLNILLKIPFVNSLIKKKLAEGLGLDQARVLGCGSAPVSPALLEWYHSVGLNITEAWGMTESFAYSTLNYPFRADKIGSVGNAGPGIELKIADDDEIMVRGKGLFSGYYKNDIATQESFDSEGWLHTGDIGSIDSDGYLTIQGRKKDNFKTAKGKFVSPVPIEKKLFEYSRVEMMCLIGLGLPAPILLVVPHDFPNFDRERYARTTRKVIAKMNQELASHEQIKGVLMIKEPWSIENGVLTPTLKIKRHVLEQKYHEIGHNWPKGELVVWEEDL

SEQ ID NO: 17542 - protein, 239 aa, Zea mays
  misc_feature (151)..(151): Xaa can be any naturally occurring amino acid
  unsure (1)..(239): unsure at all Xaa locations
MAGADVDVGTELRLGLPGGGADAAKAAKRGFEDTIDLKLKLPTAGMEEAAAAAAAAAKPEPAAEKAKRPAEAPAADAEKPPAPKAQAVGWPPVRSYRRNVMTVQSVKSKKEEEPEKQQSAANAGGNGSAFVKVSMDGAPYLRKVDLKMYNXYTELSVALKKMFSTFTTSGNNMNEGKLVDPVSGADVVTTYEDKDGDWMLVGDVPWEMFVESCRRLRIMKSSEAIGLAPRTKDKCKNRS

SEQ ID NO: 17543 - protein, 493 aa, Colwellia psychrerythraea 34H
MSNYFNTLSLREKLGQLGKCRFMKREEFNDGCNFIKDWNIVIVGCGAQGLNQGLNMRDSGLNISYTLRDAAISEKRQSWQWATENGFTVGSYAELIPQADLVLNLTPDKQHTSAVTAVMPLMKQGATLAYSHGFNIVEEGMQIRSDITVVMVAPKCPGTEVREEYKRGFGVPTLIAVHPENDPQGNGLAIAKAYASATGGDRAGVLESSFIAEVKSDLMGEQTILCGMLQTAAVLGHKQLIAQGMDAAYARKLLQYGLETTTEGLKHGGITNMMDRLSNPAKILAFDMAEELKVILRPLFQKHMDDIIEGRFSATMMADWANDDVNLLTWRAETAETSFEKSPECDTEISEQEYYDKGIFVVAMIKAGVELAFDAMVDSGIINASAYYESLHETPLIANCIARNMLHEMNVVISDTAEYGNYLFTHAAVPLLADYTASLTLEQLGEGLKESSNNVDNARLIEVNEAIRSHGVEVIGKELRGYMTDMKKIASAK

SEQ ID NO: 17544 - protein, 430 aa, Clostridium acetobutylicum ATCC 824
MKNFIDVEEKLPIGKTIPLSFQHLFAMVGATILVPILTHMNPSIGLFCSGVGTILYILCTKAKLPAYIGSSFAFITPMVTASQNYGPNAMLSGVISAGIVYIIVSTIIRYTGVNWLNKILSPVVVGSVVIVIGLSLASSAIGWAGLDPHQAITSGASRTSWIVVSMVTLAVGVIGSMYFKGFLGVIPILIAIICGYVLALLLGVVPDKTIHTILSAKLFEIPPFMTPKFNINAMIIMAPVSFVTIAEHIGHVYVTNNVVGRDFTKEPGIHRSMLGDGVATIFAGLVGGPPNTTYGENIGVMAITKVYSVWVIGIAAVIAIILSFIGPVASVIANMPRPVMGGVSILLFGIIASSGYRMFVDGKIDFSLKKNLIVTSVIIVLGIGGASINFKFNGSPVVISGVALATIVGIVLNLILPEKSLSERQEEKTA

SEQ ID NO: 17545 - protein, 1583 aa, Oryza sativa
MRRREVRHRLGGVVSGRCGGGAADRRGGVRQSVWEALAAGSGFPEARSGVRRSRGGRVRWPGRGSTSPDLVEAGSGGGGGGRVRQSVWEALAAGRRPGCVSTSPDLVEAGSGGGGGGGVRQSMGEALSAGSGVRWPGAGEAWEMEATGAMFSGTDSSSPELSLCSPYEPWTQGRGPTEEMGLALLECAAHVETGPMEKATRCLARATGLAAAAAAGDGPQKRLAEAMVDCLARRLLRPVQAITDALIDPSVYLDRRSVRAARRGFFELSPFPKVAFVVGNRAIVEAVENESLVHVVGMSGPFTQPCQWIQLLHELRRRPEGPPRVVRLTVVHDDGELLAKMAEVLSDEAEELDMEFQFHGVVGQLEDLDFSNLRDVLEIKSGEALVVSCTLQLHRLLAADDDAMYSSRSAHLNQMASIAQLQQMAVSSCPPSTGGGGSVQYKDDDDDPYRSPATPLTFVSPPASTPHLQMPAALANFLSAVRALSPKIVVVAEQDADHNGVSFRKRFCEALHHYAAVFDSLDDAAAATTSAASHLWSPDERAQVERVVVGEEIKGVLLRDGAHRRERHDRLRQWAARMEMAGFTGVPLSYAAIRKGNDMHSGFRVTDTAAPAYFPFRTPDQGRSENKMMHGLWVQDQGMVDHLAQLVPLLHECASHVTEGSFEKADFSFKKIRMLTIADGPLQHLSKIIVDSLDHRLLSSIQGLYGALINPSDYFEKSTLPGCPAHNFFKLNPYLSTGFVTINRAIMEAMEDEKVVHIVDLSCSAAHPWQWLKLLDDFHGRPGGAPELYLTVLHDDNDFLAEMQSLLSKKAESLEVSFRFISVIGRLETLDFSNLRSTFQIKFGVAVAISCALQMHRLLLVDDNLSSTSIAQLQKMANFTQPKQMASSVCSPASTLNYLQTPSPRTPKLLARLLSAIRALKPNIMVIMEQDADHNALLFRDRFNEVLNYYAALFDCFHAVAAANPGRTDERLRVERMILREEIKNILVCEGVHRHERHERLDQWAMHMEESGFHNVQLSFSAIREGKENLLSFGLKNCQNKEDRGCLLLSWGSTNLYSISSSRLHPNFPLWVLCSAYVWQLKLRLCCTDRGMFQDDMLSSATSSPASSVYSPSPSPSNGSWVQELSHDQQSVRLIGLLYQCAAEVSAGSFDRANLCLEHITQLASLDAPHALQRLAAVFADALARKLLNLIPGLSRALLSSANSADAHLVPVARRHMFDVLPFLKLAYLTTNHAILEAMEGERFVHVVDFSGPAANPVQWIALFHAFRGRREGPPHLRITAVHDSKEFLANMAAVLSKEAEAFDIAFQFNAVEAKLDEMDFDALRHDLGVRSGEALAVSVVLQLHRLLAVDDGRRHAATGCLTPVQIIARSSPRSFGELLERELNTRLQLSPDASVVSSLSPHSPAAATAAHPTTSTPKLGSFLSAVRSLSPKIMVMTEQEANHNGGAFQERFDEALNYYASLFDCLQRSAAAAAERARVERVLLGEEIRGVVACEGAERTERHERARQWAARMEAAGMESVGLSYSGAMEARKLLQSCGWVGPYEVRHDAGGHGFFFCWHKRPLYAVTAWRPAASRRGHTRS

SEQ ID NO: 17546 - protein, 325 aa, Burkholderia fungorum LB400
MMVKAIRFDKTGGPEVMKWVDVEVGEPGAGEIRVRQTAVGLNYIDVYFRTGLYPLPLPGGLGMEAAGEVTALGSGVSGLKVGDRIAYVARPPGAYAQERVLQAAQVVKVPDALTDEQAASVMLQGLTAQYLLRRTYPVKAGDTILIQAAAGGVGLLVCQWAKALGATVIGTVGSDEKAEIATAHGCDHAIVYTRENFTRRVREITNGAGVPVVYDSIGKDTFTGSLDCLAPLGMFVSFGNASGPLPPIDSSEFAGRGSLFFTRPTLFTYIAKRSDYEAMSTELFDVLVSGKVKTSINQRYALADVGRAHADLEGRRTTGSTVLLP

SEQ ID NO: 17547 - protein, 487 aa, Medicago truncatula
MGLVSMDQPQLLSKIATGDGHGETSSYFDGWKAYDKNPFHPTKNPQGVIQMGLAENQLTADLVQNWIMSNPEASICTLEGVHNFKEMANFQDYHGLPEFRNAVAKFMSRTRGNRVTFDPDRIVMSGGATGAHEATAFCLADPGDAFLVPTPYYPGFDRDLRWRTGVKLVPVICESANNFKLTKQALEEAYEKATEDNIRIKGLLITNPSNPLGTVMDRNTLRTVVNFINEKRIHLISDEIYAATVFSHPSFISIAEILEHDTDIECDRNLVHIVYSLSKDMGFPGFRVGIIYSYNDTVVNCARKMSSFGLVSTQTQYLMAKMLSDDEFVKKFLTESAKRLAQRYRIFTSGLTKVGINCLQSNGGLFVWMDLRGLLKEATLESELELWRVIIHEVKINVSPGVSFHCSEPGWFRVCYANMDDRDVQIALQRIRSFVVQNNKEVMVSEKNTKPCWHSNLRLSLKTRRFDDIVMSPHSPFPQSPLVKATT

SEQ ID NO: 17548 - protein, 752 aa, Glycine max
MAGICCGVVGEGDTPAPLEPTPRPSRRRSLDILPLKYIADMPMPPPEALRKRPKLNLRDCDNAIENCDESTGHKVTKKESKVDYDDDVVSETKNVTVSEVEEESPKFGVTSVCGRRRDMEDSVSVRPCFTQGFHYFGVFDGHGCSHVATMCKERLHEIVNEEIESARENLEWKLTMENGFARMDDEVHRRSQSNQTFTCRCELQTPHCDAVGSTAAVAVVTPDKIVVSNCGDSRAVLCRNGVAIPLSSDHKPDRPDELLRVQSKGGRVIYWDGPRVLGVLAMSRAIGDNYLKPYVISEPEVMVTERTEEDECLILASDGLWDVVSNETACGVVRMCLKAQKPPGSPGSDVAADGSDRACSDASILLTKLALARHSSDNVSVVVVDLRRDQRQSSNYNDDFVKDGKTKSEGGGAWFSISSDKSAIYSVGIRPHELSHIQQLTGFSLGDFPFRYLDVSLLSSRLNVCHYAPLLSKITGLIQGWSKKSLSYAADIGKNKPLVAWSVVCSPKKEGGLGLFNLKDWNLALLSRILWDFHCKKDSLWVRWVHHYYFRGSDVWNYNSSSSDSVLIKKIIQIRDFIISKELSTEEAKKRIQSWSTNEQFLIDKVYEYIRGVKPTVNWSSVIWNPAIPPKMSFILWFVKRNQLLTLDKVAFLNKSSLCPLCSNEYESNAHLFFSCRKSLQVLAHIRDLAPFRKRFISLQRITDSLIRDISTSGLFSAAQILASWTSSASLVFHSLLMRMLSFQLKVLDLAF

SEQ ID NO: 17549 - protein, 424 aa, Methanosarcina barkeri str. fusaro
MTSEATLEKSRQMYEKAKTLIPGGVSSPVRAIKPYPFYTASANGSKIKDLDGNEYIDYCLAYGPALLGHNHPVIKEAIKAQLDKGWLYGTPTELEVNLAEKIAGYYPSIDMLRFVSTGTESTMSALRLARGFTGRNKFIKIEGGFHGAHDAVLVKAGSGATTLGEPDSLGIPADFTKYTLQAPYNDIEAMTGLVEKNRDELAAVIIEPVLGNIGPITPLPGYLEELRKLTLENDVLLIFDEVITGFRLAMGGAQEYFGIVPDMTTLGKIVGGGLPIGVFGGKREIMEMISPSGPVYQAGTFSGSPCSIAAGIAVLDYLEQEKIHEKVNSKGDYIRAVLTEIVEDEGIDYSVCGIASMFKIFFGAEPHNYQEALKCDKEGYLAFFHRMLASGIFLPPSQFETNFVSAAHSEEDIEKTLKAYTENL

SEQ ID NO: 17550 - protein, 454 aa, Arabidopsis thaliana
MSSISTESSSNLSLLENGGGGSDKPTAETSRRVRRTVSASSLIRKRSDLKLISRVRWEFMRRILTNLQEVLLGTKLFILFPAVPLAVVAHRYDCPRAWVFALSLLGLTPLAERISFLTEQIAFHTGPTVGGLMNATCGNATEMIIAILAVGQRKMRIVKLSLLGSILSNLLFVLGTSLFLGGISNLRKHQSFDPRQGDMNSMLLYLALLCQTLPMIMRFTMEAEEYDGSDVVVLSRASSFVMLIAYLAFLIFHLFSSHLSPPPPPLPQREDVHDDDVSDKEEEGAVIGMWSAIFWLIIMTLLVALLSDYLVSTIQDAADSWGLSVGFIGIILLPIVGNAAEHAGAVIFAFRNKLDITLGIALGSATQIALFVVPVTVLVAWTMGIEMDLNFNLLETACFALSILVTSLVLQDGTSNYMKGLVLLLCYVVIAACFFVSNSPSTETNTTNHTITKR

SEQ ID NO: 17551 - protein, 200 aa, Glycine max
  misc_feature (199)..(199): Xaa can be any naturally occurring amino acid
  unsure (1)..(200): unsure at all Xaa locations
YDIVKFCKNEGLVLLADEVYQENIYADNKKFHSFKKIVRSLGYGEEDLPLVSYQSVSKGYYGECGKRGGYMEITGFSAPVREQIYKIASVNLCSNITGQILASLVMNPPKASDESYASYKAEKDGILASLARRAKALEVAFSKLEGITCNKAEGAMYLFPQICLPQKAIEAAKAANKAPDAFYALRLLESTGIVVVPGXG

SEQ ID NO: 17552 - protein, 102 aa, Lactococcus lactis
MLYGKENRDEAEFLEPIFGSESEQVDLPKYKLAQQSIEPRVAYQLVQDEMLDEGNARLNLATFCQTYMEPEAVKLMSQTLEKMRLINRNIQEQLKLKTVAST

SEQ ID NO: 17553 - protein, 490 aa, Nicotiana tabacum
MQTQSEKGLHQSSDFPRFSAEKGVRSSNVTPESRNFQSVGSNMEHSPPLDEPQDEEIDQRVGGDPNVVGAPAEDGYNWRKYGQKQVKGSEYPRSYYKCTHPNCPVKKKVERSHEGHITEIIYKGAHNHPKPPPNRRSALGSTNSLGELQLDGAEQGVSGSNGDLGRANIQKAPDAGGLDWRNNNLDVTSSAHLGSAYCNGSASFPVQNNTQLESGGAVDVSSTFSNDEDEDDRGTHGSVSQGYDGEGDESESKRRKLETYSTDMSGATRAIREPRVVVQTTSEVDILDDGYRWRKYGQKVVKGNPNPRSYYKCTSAGCNVRKHVERASHDLKSVITTYEGKHNHDVPAARNSSHVNSGASNTLPAPVTAPPAQSHLHRPEPAQLQNAMARFDRQPSLGSFGPTPGYSYGINQQGLASLAMAGFHPNQSKSQQQIPVHSYLGQPRPMHDEGFMFPKEEPKAEPMSDPGLDLSNGSSIYQQFMSRSPLGPQM

SEQ ID NO: 17554 - protein, 276 aa, Candida glabrata CBS138
MEEAAADAYKLSYKVGVAENKNAKFRRTMEDVHTYVKNFASRLDWGYFAIFDGHAGIQASKWCGSNLHTIIENKLMADETKDVRDVLNESFVMIDKQINKDLQGNSGCTAAVCVLRWELPDGCTEQEEMDLTKHKRKLYTANVGDSRIVLFRNGQSIRLTYDHKASDPLEMQRVEKAGGLIMKSRVNGMLAVTRSLGDKFFDSLVVGSPFTTSVEITPADQFLIIACDGLWDVIDDQEACEMIQDIEDPHEAARALVRNALERGTTDNVTVMVVTL

SEQ ID NO: 17555 - protein, 159 aa, Mycobacterium leprae
MTSKIQNPNLAALSAAGVSVWLDDLSRDRLQSGNLQKLIDTKSVVGVTTNPSIFQKAFANGHAYDAQIAELAKRGANVDVTVRTVTTDDVRHACDVLACEWEASHGKDGRVSIEVDPRLAHDTDKTIAQAVELWRIVDHPNLFIKIPATKAGLPASPPF

SEQ ID NO: 17556 - protein, 218 aa, Ehrlichia ruminantium str. Gardel
MRSKILNKKSQYIHDLFSVTDTELISINKSINEDISSMQLSPTEGQILQLLIKMNNVTSIVEIGTFIGFSAMCMAKVLPKNGHIYTIENNSINAQQAQNNFNKYNLSNKITIINNTAIVALNQLTSMSPFDMIFIDAKKSEYCDYLDWAEINIKKNGIIVADNTLLFGNVYADNITKKVSKNTIDNMCNFNKRLSNKNKYLTTLLPTEEGMTIALKLF

SEQ ID NO: 17557 - protein, 166 aa, Eatonella nivea
MFPMVTEFMNYGQQTVRAARYIGQGFMITLSHANRLPVTIQYPYEKLITSERFRGRIHFEFDKCIACEVCVRVCPIDLPVVDWKLETNIRKKRLLNYSIDFGICIFCGNCVEYCPTNCLSMTEEYELSTYDRHELNYNQIALGRLPMSIIDDYTIRTVLNLPEIKT

SEQ ID NO: 17558 - protein, 105 aa, Lactococcus lactis
MLYGKENRDEAEFLEPIFGSESEQVDLPKYKLAQQSIEPRVAYQLVQDEMLDEGNARLNLATFCQTYMEPEAVKLMSQTLEKNAIDKSEYPRTTEIENRCVNMIA

SEQ ID NO: 17559 - protein, 226 aa, Petroselinum crispum
MVKIAIGSIGDSFTHGSLKCYLAEFIATLLFVFAGVGSAIAFNNLTADAGLDPAGLVAIAVAHAFALFVGVSIAANISGGHLNPAVTFGLAVGGHITLITGFFYWIAQLLGATVASFLLIFVNGGKAVPIHGVGAGLGAAEGVVFEIIITFALVYTFYATAADPKKGSLGTIAPIAIGFIVGANILAAGPFSGGSMNPARHSGQLLLAETFLDTGSTGLVLSLEEA

SEQ ID NO: 17560 - protein, 157 aa, Lactococcus lactis
FVDPELEWDFRLKNVISINTSGHKYGLVYTGVGWVLWRDKKYLPEELIFKVSYLGGELPTMAINFSHSASQLIGQYYNFVRYGFDGYKAIHERTHKVAMYLAEEIEKTGMFEIMNDGSQLPIVCYKLKENSNLGWNLYDLADRLFNEGMASACLSTS

SEQ ID NO: 17561 - protein, 166 aa, Encelia californica
MFPMVTEFMNYGQQTVRAARYIGQGFMITLSHANRLPVTIQYPYEKLITSERFRGRIHFEFDKCIACEVCVRVCPIDLPVVDWKLETDIRKKRLLNYSIDFGICIFCGNCVEYCPTNCLSMTEEYELSTYDRHELNYNQIALGRLPMSIIDDYTIRTILNLPERKT

SEQ ID NO: 17562 - protein, 238 aa, Vibrio parahaemolyticus RIMD 2210633
MINHKIYQTAEQVVESLANDMKAFSEMGRPVHISLSGGSTPKMLFKLLASEAYATSIQWQNLHFWWGDERCVAPDDAESNYGEANTLLFSQVNIPAENIHRIRGEDEPKAEAERFAKEMAEVIPTENGTPVFDWILLGVGADGHTASLFPGQTNYDDANLSLVAAHPESGQLRVSKTARVLEAAKRISYLVLGAGKADIVEEINSSPANVLPYPAAKIHAKSGLTEWYLDLDAAAKIA

SEQ ID NO: 17563 - protein, 166 aa, Enydra sessilis
MFPMVTEFMNYGQQTVRAARYIGQGFMITLSHANRLPVTIQYPYEKLITSERFRGRIHFEFDKCIACEVCVRVCPIDLPVVDWKLETDIRKKRLLNYSIDFGVCIFCGNCVEYCPTNCLSMTEEYELSTYDRHELNYNQIALGRLPMSIIDDYTIRTILNLPEIKT

SEQ ID NO: 17564 - protein, 419 aa, Desulfovibrio vulgaris subsp. vulgaris str. Hildenborough
MNIASQIEDMGRRARAAGRRLAAASPAAKAGALDHLATLLEQRQDAILAANAADLAAAAEAGMDAPRMDRLRLTPATIAEMAAACRHVAALPDPVGAIETQWQRPNGLLVGKMRIPLGVIAMIYESRPNVTIDSAILCLKAGNAVILRGGSEAIHSNLALAALITEALSSVGLPAEAVQVVSTTDRAVIAELCKLEEHIDVIIPRGGETLIRAVVDMARMPVLKHYKGVCHAYIDSGADLAQAVEIIHNAKVQRPGVCNALEGLLVHRDEAAAFLPAIAERLGNDGVEFRACPASLPLLGDSAIPMKDEDNGQEFHDLILLVRIVDDMDEALAHIAAYGSNHTEIICTRDHGNAMRFLREADASMVAVNASSRFNDGGQLGLGAEIGISTSKLHSYGPMGVQELTTTKFVVFGAGQIRQ

SEQ ID NO: 17565 - protein, 301 aa, Glycine max
SARAVSDVAAYIKAGFYDIGIGAGLESMTVDRVNRLPNINPKVETFAEARDCLLPMGITSENVAQRYGVTRLEQDQAAVESHKRAAAATAAGKFKEEIIPVSTKFVDPKTGVEKKIIVSVDDGIRPNTNLADLAKLKPAFQKDGTTTAGNASQISDGAAAVLLMKRRVAVQKGLPILGIFRSFAAVGVDPAVMGVGPAVAIPAAVKSAGLELGNIDLFEINEAFASQYVYCLKKLGLDPRKVNVNGGAIALGHPLGVTGARCVATLLNEMKRGGKDCRFGVISMCIGSGMGAAAVFERGDF

SEQ ID NO: 17566 - protein, 271 aa, Gloeobacter violaceus PCC 7421
MFPVLADKRSDEPISPQPSEAAVSRPASAPARAPSGSDTPVESTWPRRELLAEAVGTFVLVFAGTGAVVVNAVSGGALTHLGISFVFGAVVAALIYTLGHISGAHINPAVTLTLWALGRFPARRVVPYMLVQLAGAAAASVAVLVCFGNQAKLGATLPLAGNWAQAFAVELLLTFILMLVICGSALDARAPRGFAGLAIGLTVGLEAGFGGPISGASMNPARSFGPALVAGAWEAHWVYWLAPIAGALLAGWVWHQMRDPLEETSSRLDGG

SEQ ID NO: 17567 - protein, 634 aa, Brucella melitensis 16M
MSKRLDLITIGRSSVDLYGAQIGGLLEDMASFNKYVGGSPTNIATGTARLGLRSALITRVGDEHMGRFLLRELEREGVDTRGIVTDPERLTALVILGIRDQQHFPLIFYRENCADMALCEDDIDPDFIAEARCVLATGTHLSHPRTEAAVLKALRLARENGSRTALDIDYRPNLWGLSGHGDGENRFIESAAVTAKLQSTLHLFDLIVGTEEEFHIAGGSTDTLEALKAVRRVTKAALVCKRGPMGAVVFEGDIPDDLDKGQSGQGFPIEVFNVLGAGDGFMSGLLRGWLKGEDWPTSLKFANACGAFAVSRHGCTPAYPSWEELQFFLQRGIRNKALRKDAELEQVHWSTNRNGTWPHMRVFAFDHRIQLEEMAAEAGASTDKIGEFKQLCLDAALKVAGGAQGYGILCDGRLGRDALYRAAGTGLWIGRPAEWPGSRPLKLEPELGPDCGGLMEWPVEHVVKLLCFYHPDDPAEMRAGQEETVQRLFTAARRNRLEFLLEIIPSKAGPVDDMTTARVIERFYEIGVYPDWWKLEPLKTKAAWANACDAITRNDPHTRGIVVLGLDAPAEELEQSLGIAAGFDLVKGFAVGRTIFAEAARKWLSGTIDDAQAIAEMAARYQSLCDVWDKAHAY

SEQ ID NO: 17568 - protein, 439 aa, Enterococcus faecalis V583
MNEKKEQALFEYDAKLSISEAIPMGLQHVVAAVVGIVTPGIMIAKVCQLSPSDTTILIQTSLIFSAVATLIQLFPIFGKVGSRLPVMMGASFAYVPILMAIGADFGIAAIFGSQLVGSILVIIVGLFIKKIRVLFPPLVTGTVILSIGLSLFPVAIKYMAGGAGSADFGSARNWLVALLTFAIVFYFNYFAKGFLKLSAILNGMVIGYLISLALGMVSFEPVQNAKIVQVITPFHFGLDFQLVPIFTLVVMFIVDAVQAIGQFTATTVGAMDRDATDEELSGGIMGSGFTNFIGSLFGSIPVATFGQNVGLVTVTKVINKYVLVFASVILLIAGFVPKVAALLTTIPYAVIGGATISVFASISMTGIRMIASQEMTPRNTGVVGTALAFGIGVTLSTGSLAGFPTWVTTIFGNSEVILTTLVAVLLNVILKPKKRVALE

SEQ ID NO: 17569 - protein, 242 aa, Zea mays
MRVAATRPASSAPVALLAALALLFLVGSASLAIGAMASHVLGGKSENPAAANSLETDGLARFAVDEHNKRENALLEFVRVVEAKEQTVAGTVHHLTLEALEAGRKKVYEAKVWVKPWLDFKELQEFRHTGDATSFTISDLGAKRGGHEPGWRDVPVHDPVVKDAASHAVKSIQQRSNSLLPYELVEIVRAKAEVVEDFAKFDILMKLKRGTKEEKMKAEVHKNLEGAFVLNQMQPEHDESSS

SEQ ID NO: 17570 - protein, 529 aa, Oryza sativa
MGCSTRAAGLLLSSSLSLSRRVGFDELVTTGCGGEAGIRTPRRRAVVVVRYLEKMAGGFRVLHLVRPFLAFLPEVQSADRKIPFREKVIYTVISLFIFLVCSQLPLYGIHSTTGADPFYWMRVILASNRGTVMELGITPIVTSGMVMQLLVGSKIIEVDNSVREDRALLNGAQKLLGILIAIGEAVAYVLSGMYGSVSQLGTGNAILIILQLFFAGIIVICLDELLQKGYGLGSGISLFIATNICENIIWKAFSPTTINSGRGAEFEGAVIALFHLLITRTDKVRALREAFYRQNLPNVTNLLATVLVFLIVIYFQGFRVVLPVRSKNARGQQGSYPIKLFYTSNMPIILHSALITNLYFISQLLYRRYSGNFLVNLIGKWKESEYSGHSVPVGGLAYYVTAPSSLADVLANPFHALFYVVFMLSACALFSKTWIEVSGSSAKDVAKQLKEQQMVMPGHRESNLQKELNRYIPTAAAFGGVCIGALTVLADFMGAIGSGTGILLAVTIIYQYFETFEKERATELGFFGF

SEQ ID NO: 17571 - protein, 418 aa, Chlamydia muridarum Nigg
MNKKRVVVTGMGIVSCLGNEVESFYDSLLAGISGVRTITSFPCDDYATRFAGWIEEFNSEPYLDKKQARRVDPFITYAVVAAKKAIAMSRWDQETLPANPHRCGVIIGSGMGGLRTLDEGIEKLSAGNRKLSPFFIPYIITNMAPALIAMDYGLMGPNYSISTACATANYCIDAAYQHLVEGRADVIVCGGTEAAINRVGLAGFIANRALSERNDAPEQASRPWDRDRDGFVLGEGAGVLVLETLDNALKRGAPIFAEVLGTYTTCDAFHITAPRDDGEGITACILGALNKAGIPKERVNYINAHGTSTPLGDLSEVLALKKAFGSHIKNLRMNSTKSLIGHCLGAAGGVEAVATIQAIQTGKLHPTINIENPIAEIEEFDVVANKSQDWDVDVAMSNSFGFGGHNSTILFSRYEPSL

SEQ ID NO: 17572 - protein, 359 aa, Oryza sativa
  misc_feature (267)..(267): Xaa can be any naturally occurring amino acid
  unsure (1)..(359): unsure at all Xaa locations
MSAYCGKYKDELIKNAAYIGTPGKGILAADESTGTIGKRFASINVENVEENRRSLRELLFCTPGALQYLSGVILFEETLYQKTKDGKPFVDVLKEGGVLPGIKVDKGTIEVAGTEKETTTQGHDDLGKRCAKYYEAGARFAKWRAVLKIGPNEPSQLAIHLNAQGLARYAIICQENGLVPIVEPEILVDGPHDIDPCAYVSEVVLAACYKALNEHHVLLEGTLLKPNMVTPGSDAKKVSPEVIAEYTVRTLQRTVPAAVPAIVFLSXGGQSKEEATRNLNAMNKLSTKKPWSLSFSFGRALQQSTLKAWSGKAANIEKARAAFLTRCKANSEATLGTYKGDAVLGEGASESLHVKDYKY

SEQ ID NO: 17573 - protein, 545 aa, Volvariella volvacea
MAFSSSRMQSLLNTLTVMITLMGLGVSYAAAQQSFHTLELTNDEVNPDGFQRDAVLVNGGLFGAVITGQKGDGFVIEVDNQLTDSLLRKSTSIHWHGLFQRDSAWADGPAFVTQCPIAPGHTFTYRFTATEEAGTFWYHSHLDAQYCDGLRGPFIIYGPNDPHLGLYDVDNEDTIITLADWYHTPAELLSGGISPQSTLINGLGRSSSDFTAPLAVVNVQQGLKYRMRLISISCDPNWIFSIEGHELTVIEADGISVQPVTVTSLQIFVGQRYSFVLHANQPVGNYWIRANPNKGPTGFGNNINSAILRYQGAPIADPTGAGLQDALNRLAEPNLHPVVNPGAPGLAQINGADIDIVINIGFSGGLFNIAGTSYTSPDVPSLLQILSGTPPSKCIRSRVLNDAHRGIRLAHAQRILYRVPGNKVVQLSFPVIAGQGSAIGAPHPIHLHGHAFDVIRSAGSNVYNYVDPPRRDVVSIGRAGDNVTIRFVTDNAGPWYLHCHIEWHLRSGLGVIIAEDSQGVVNGPQPPPEWEELCDIYDALIPEDQ

SEQ ID NO: 17574 - protein, 533 aa, Volvariella volvacea
MLSPTLVALSVLFATTAFAIGPVTELQIVNDEIAPDGFSRGSVLANGAYPGPLITGSKGDRFLINVINELTDTTMLRATSIHWHGFFQNHTAWADGVASVTQCPIVPSESFLYNFTVPDQAGTLWYHSHLSTQYCDGLRGPLVVYDPDDPHRHLYDIDDGAIMMWLNQCHPDSYVAIESTIITLSDWYHVKAPVAGLQPTPMSTLINGRGRYAGGPNVPLEVINVVPGIRYRFRLVSMVCDPNYIFSIDGHELTIIEADGVNTKPLTVDSIQIFAGQRYSFILNANQPVDNYWIRANPNLGTTGFTNGINSAILRYEGAPLQDPTTPLVSSVNPLVESNLRNLIENAVPGQPFPGGADININLFTDFDWDMLHFTVNGSPYIPPNAPVLLQILSGTYNAQDLMPAGSIIELPSNKVIEISMPGGSPGSPHPFHLHGHTFDVIRSTDTQEYNFVDPVRRDVVNTGFETDNVTIRFTTDNPGPWILHCHIDWHLEVGLAVVFAEDIPRISTPAPPPSWDELCPEYDRFPVETFDQ

SEQ ID NO: 17575 - protein, 180 aa, Polaromonas sp. JS666
MPSSPQTITLGGGCFWCTEAVYVKVRGVTDVESGYSNGQAERPSYDDVCTGRTGCNEVVKLTYDPEEISLREILEIFFVIHDPTSLNRQGNDAGTQYRSGIYYSTPEQKQVADDFIRQASQDKLFGNPIVTEVLPLANYWPAEAYHQDYFENNPNQGYCAFVVGPKVEKFRKTFASRVKD

SEQ ID NO: 17576 - protein, 533 aa, Volvariella volvacea
MAYSARLGSALSTLAIMLLVLALGVGHATAQASPPQSVHTLNLTNANVSPDGYNRSAILVNGNLLNEAIVGNKGDQFVITVENNLDNPLLRKSASIHWHGLFQRGTQWADGPAFVTQCPIAPEHSFTYQFTAGHEAGTFWYHSHLDAQYCDGLRGPFIIYDPADPHLSLYGVDDNSTIITLADWYHEPASQLSGIVIPKSTLINGLGRANTTTDAPLAVIHVEQGVKYRFRPVALSCDPNWVFSIEGHELTVIESDGVSVQPVTVTSLQIFAGQRYSFVLHANQAVDNYWIRANPNLGPTGFADGINSAILRYNGAPDEEPTGSGLQDPSNRLHEPDLHPVANPGAPGFDEIDGVDVNLVINIGFAAGRFSMAGASFEPPSLPALLQILSGTTDVADLLPAGSYIELPANKVVQISFPVISGGGAATGAPHPIHLHGHTFDVIRSAGSSTYNFVDPPRRDVVSIGTPGDNVTIRFVTDNAGPWFLHCHIEWHLRSGLGVILAEDIPGIVSGPQPPAAWEELCDIYNDLDEEDR

SEQ ID NO: 17577 - protein, 562 aa, Volvariella volvacea
MLFFSSRVKYLLGHLAVITAVVGGDVGNPGDHSGGYPGGHSEDHHGGPSGGHSGSHSDHSGSHRSFHTLKLTNGRVSPDGFQRNAVLVNGGLFQTAITGNKGDEFAIKIDNKLTNSLSHKSTSIHWHGLFQHGTPWADGPAFVSQCPIAPGHQYTYRFSSADQAGTFWYHSHLDAQYCDGLRGPFIIYDPGDPHRSLYDIDNKDTIITLADWYHRDSNLLSGIVIPNSTLINGLGRTAQSPNTPLAVVNVKQGLRYRMRLVAISCDPNWIFSIEGHKLTVIEADGVSVQPVTVTSLQIFVAQRYSFVLHANQPVGNYWIRANPNIGPTGFDSNINSAILRYKGAPIAEPRGLGLQNSDNRLREPDLHPLFNPGAPGLAHVDGADINMVINIGFIQSAGRFTIDGTSYVPPDVPTLLQILSGTPASSLLPSGSYIALPPNKVVQLSFPVFDGQGSALGGPHPIHLHGHTFDVIRSAGSSEYNFVNPPRRDVVAIGTPGDNVTIRFATDNAGPWYLHCHIEWHLRAGLGVVIAEDAPGLANGPEPPEEWKQLCPIYNALDPDDK

SEQ ID NO: 17578 - protein, 169 aa, Oryza sativa
MALVEGNNGVSGGAVSFSEEQEALVLKSWAIMKKDSANIGLRFFLKIFEVAPSASQMFSFLRNSDVPLEKNPKLKTHAMSVFVMTCEAAAQLRKAGKVTVRDTTLKRLGATHFKYGVGDAHFEVTRFALLETIKEAVPVDMWSPAMKSAWSEAYNQLVAAIKQEMKPAE

SEQ ID NO: 17579 - protein, 554 aa, Bifidobacterium longum DJO10A
MQLELNRRSKVPMYRQLAAELREQIVSGAMAEGYRLPPERELSSRLEVNRTTVLQAYQQLKDEGLIASKVGKGTFVLPAASASRTSHTSNSDFGNAITRTTRSSAEMGTSQASSSGDVERATSTDFLTTDQGSSSAAVHTIRESRSVQGPEPTVVRPPWSVLFSDYSNRFTYHDIASAERAQRGDTIIDFATGSPNPADIPDDLLRKVSIEAFESREFDGQPESPIEGFEELRALLAEHMRARGVQCGVRNVMVLSGSEQGIDLIVRAFINPGDCVLVEQSTFFPALQTFRSADARIIGVPVDEHGMRTDLLDGYCARFRPKLIYTVPTFQNPTGTTLSPERRSELIDVARRYQCLIVEDDAYGDLWYGGESSDAHRPIPLKGMENAGYVMYLSTFSKTVTSGLRTGWVVADPHVINRLAALRRMVDQHTSTSSQRICLELLKEGRIAEHLRGLIKAYRIRRDAAIAALERYAPDEVYWTVPAGGYYIWVSLPDGVRSLDVLESCRSQGVTFMPGSVFDVDEMDDSHIRLNFVRPDAADIDTGIRIIGETIAQM

SEQ ID NO: 17580 - protein, 508 aa, Volvariella volvacea
MGLGVGFVAAGTASHTLTLTNGVVSPDGHSREVVLVNGALFGKLITGRKGDDFEIEVDNQLTNSLLRKSTSIHWHGLFQRGSAWADGPAFVTQCPIAPGNTFTYSFTPTDEVGTFWYHSHLDAQYCDGLRGPFVIYDRFDPHRHRYDVDNKDTIITLADWYHTPAAQLSGVITPNSALINGRGRTATTTTAPLSVIRVRRGRKYRMRLISMSCDPNYIFSIEGHEMTVIEADGISVEPVTVTSLQIFVGQRYSFVLHANQPVGNYWIRANPNKGPTGFVDGINSAILRYHGAPNAEPTGAGLQDALNRLAEPDLHPIVNPGAPGLATPDGVDIDIVVNIGFAAGLFNIDGTSYVSPDIPTLLQILNGVPVGSLMPSGSYIALPANKVVQISFPVVSGQGSAIGAPHPIHLHGHAFDVVRSAGSATYNYADPPRRDVVSIGTPGDNVTIRFVTDNAGPWYLHCHIEWHLRAGLGVILAEDAPGVLTGPAPPSEWDDLCDIYDGLDEEDQ

SEQ ID NO: 17581 - protein, 181 aa, Secale cereale
MSSTGAAGPDADAPAGEGLELAQFGAGCFWSVELAYQRLPGVARTEVGYSQGHLDGPTYRDVCGGGTGHAEVVRVHYDPKECSYAVLLDVFWAKHNPTTLNKQGNDVGTQYRSGIYYYTAEQERQARESLAEKQQEWKEKIVTEVLPARKFYPAEDYHQQYLEKGGQSAKKRCSDPIRCYG

SEQ ID NO: 17582 - protein, 545 aa, Actinobacillus pleuropneumoniae serovar 1 str. 4074
MATNYIFVTGGVVSSLGKGIAAASLASILEARGLNVTIMKLDPYINVDPGTMSPTQHGEVFVTQDGAETDLDLGHYERFIRSKMSKANNFTSGKIYSEVLRKERRGDYLGATIQVIPHITNEIKERVIEGGKGRDVVIVEVGGTVGDIESLPFLEALRQLAVDVGREKTLFMHLTLVPYIPTAGEVKTKPTQHSVKELLSIGIQPDVLICRSDRAIPSNERKKIALFCNVPERAVISLKDVDSIYRIPELLKSQGLDTFVCDRFRLDCPEADLSEWEQVLYRQANPTGEVTIGMVGKYVELPDAYKSVNEALKHAGLTNRLTVNIKYIDSQDIETKGVELLHGLDAILVPGGFGYRGVEGKIRTAQYARENKIPYLGICLGMQIALIEYARNVAGLTQANSSEFDKDCPQPVVGLITEWQDESGNVETRSDESDLGGTMRLGAQQCHLIEGTKAREVYGAETIVERHRHRYEVNNTLLPQIEAAGLKVSSLSADRKLVEIIEIPNHPWFIAAQFHPEFTSTPRDGHPLFAGFVAAAKAYQDSHKA

SEQ ID NO: 17583 - protein, 157 aa, Secale cereale
MSSSSLSPGGGRLSGSDGDSGATFVAGDNRREKRRLSNRESARRSRLRKQQHLDELVQEVARLKAENARVLARANDITSQFVRVDQENTVLRARAAELGDRLRSVNQVLRVVEEFSGVAMDIQEECPPDDPLLRPWQIPYPATAMPIAATATHMLQY

SEQ ID NO: 17584 - protein, 328 aa, Salmonella enterica subsp. enterica serovar Typhi Ty2
MTKTNLITGFLGSGKTTSILHLLAHKDPAEKWAVLVNEFGEVGIDGALLADSGALLKEIPGGCMCCVNGLPMQVGLNTLLRQGKPDRLLIEPTGLGHPKQILDLLTAPVYEPWIDLRATLCILDPRLLLDQQSVANENFRDQLASADIIIANKTDRATAQSDAALQQWWRQYGGDRQLIHAEHGQIDGKLLDLPRQNLAELPASAAHSHTHASKKGLAALNLPAQQRWRRSLNSGQGHQACGWIFDADTVFDTIGLLEWARLAPVGRVKGVMRIQEGLVRINRQGDDLHIETQSVAPPDSRVELISNTETDWNTLQTALLKLRLATHA

SEQ ID NO: 17585 - protein, 137 aa, Ehrlichia ruminantium
MSYSESLLEHYKNPKNVGTLPKEDYNVGTGLVGAPSCGDVMKLQIKVDDNGKIIDAKFKTFGCGAAIAASSLATELIKGKTVDEAHELKNTVLAKELSLPPVKIHCSLLAEDAVKAAINDYHMKQANKKNATKDPNE

SEQ ID NO: 17586 - protein, 463 aa, Bacillus cereus ATCC 10987
  misc_feature (244)..(244): Xaa can be any naturally occurring amino acid
  misc_feature (260)..(260): Xaa can be any naturally occurring amino acid
  misc_feature (276)..(276): Xaa can be any naturally occurring amino acid
  unsure (1)..(463): unsure at all Xaa locations
MQHTNKSGTLNRGLKERHITLMSLGSAIGVGLFLGSASAIKLAGPSILLGYMIAGLVIFFIMRALGEMAIEQPVAGSFSKYAYDYLGPLAGYITGWNYWFLWVVTCMAEITAAGIYMQYWFPDIPRWTWALLALLLMSAFNFLSVKVFGELEFWFALIKIVTIICMIVVGAGIILFGFGNGGIATGISNLWSHGGWFPNGFSGLLLSMQMVLFAYLGVELIGVTAGEAQNPKKTLAKAIDNVFXRILLFYVGALFVMMAXYPWNELGEKGSPFVLXFQQIGIAKAAGIINFVVLTAALSSCNGGLFSTGRMLYTLAQQKKAPERFGRLNKNGIPSQGIVATAIVLLVGVILNYLVPAKVFTWLTSISTFGAIWTWGIILVAQIKFRKSLPTQNKQKLSYKMPLYPLSSYFSLAFLALVLCIMAYSEDTRIALIVGPIWLIGLAVVYYMKGFHKIDETPNSKIS

SEQ ID NO: 17587 - protein, 445 aa, Zea mays
NRAAMNRVLACASSLLTCREVLQEQVSSTRSRLGMFVIEDKGGAIALMLASLLFLGTWPAVLTLLERRGRLPQHTYLDYSITNLLAAVLIALTFGQLGDSRRGMPNFFTQLGQDNWPSVLFAMAGGVVLSVGNLSTQYAWAYVGLSVTEVISSSMVVVIGTTLNYFLDNRINRAEILFPGVACFLVAVILGSAVHSSNAADNEQKLGASTNAYKLGTSGTVEPSKQAVDRDAPKDLEESGASGIRQPDKAEAGTAEYLIELEERRSIKVFGSNTFIGLGIVFFAGVCFSLFSPAFNLATNDQWHTLRDGVPHLVVYTAFFYFSISCFVVGVGLNVLFLYRPMAGVPRSSFGAYLRDWDGRQWALLAGLLCGFGNGFQFMGGQAAGYAAADAVQALPLVSTFWGVLLFGEYRKSSRKTYVLLGFMLFMFVAAVAVLMASSGHRSTE

SEQ ID NO: 17588 - protein, 166 aa, Coespeletia timotensis
MFPMVTEFMNYGQQTVRAARYIGQGFMITLSHANRLPVTIQYPYEKLITSERFRGRIHFEFDKCIACEVCVRVCPIDLPVVDWKLETDIRKKRLLNYSIDFGICIFCGNCVEYCPTNCLSMTEEYELSTYDRHELNYNQIALGRLPMSIIDDYTIRTILNLPEIKI

SEQ ID NO: 17589 - protein, 435 aa, Triticum aestivum
  misc_feature (250)..(250): Xaa can be any naturally occurring amino acid
  misc_feature (276)..(276): Xaa can be any naturally occurring amino acid
  misc_feature (324)..(324): Xaa can be any naturally occurring amino acid
  misc_feature (359)..(359): Xaa can be any naturally occurring amino acid
  unsure (1)..(435): unsure at all Xaa locations
MMGRKALDYEELNENVKKVQYAVRGELYLRASELQKEGKRIIFTNVGNPHALGQKPLTFPRQVVALCQAPFLLDDPNVGLIFPADAIARAKHYLSLAPGGLGAYSDSRGIPGVRQEVAEFIQRRDGYPSDPELIYLTDGASKGVMQMLNAIIRNERDGILVPVPQYPLYSAAISLFGGSLVPYYLEEEANWGLDLVSTRQSVAEARSKGITVRAMVIINPGNPTGQCLSEANIRELLNFCYQENLVLRAXEVYHPNVYQDEPPFISARKVMFDLGXPPVSREVQLISFHTVSKGYWGECGQRGGYFEMTNIPSKTVDEIYKESXWTLSPNVPGHIFMGLMINPSKTVYILYLTNSIQAXTFLQSAMTTAQIMTDCFHRVLMLLFYSSKRAVIISLFLKLQDLLMKTNFPMKDIFSISITIIPCTSNHQRLLHNAS

SEQ ID NO: 17590 - protein, 303 aa, Colwellia psychrerythraea 34H
MENDSSIQWEHSHDFGLDNKLHENKVKTVFWLTTVIMVLEIGAGTWSGSMALLADGWHMGTHSAAFLIAIFAYSYAKKHANNKDFSFGTGKVNSLGGFASAIALAIVALMMIVESVQRLLEPQSIHFNEAIVVAIIGLVVNVASVFILHDDHHHHGEHHHDHDHNMKAAYFHVLADTLTSLLAIVALLIGKYVGLIWMDPLMGIVGAIVILRWSYGLIKDSSNVLLDKSVKKSTLEQISKALSKKNTVINDIHVWTIATAHQAAILKVTSAQPLNSDEYEGILREILPQLSHISIEIRHDYSL

SEQ ID NO: 17591 - protein, 220 aa, Nocardia farcinica IFM 10152
MTTADWADVDGYLVSHLVRDPASTATLEANAAAGLPPIDVSAAQAKFLYLLGKSLGVRRVLEIGTLGGFSTLWLARAVGEQGRVVTLEYQERHARVAGENLARAGVAGRVEIRVGAAMETLPALAQERPEPFDLVFIDADKENNPNYVDWAVRLGRPGTVIVVDNVVRHGALIDEASTDSAVRASRELVELLDQDPRLDATVLQTVGAKGWDGFAFAVVD

SEQ ID NO: 17592 - protein, 375 aa, Chlamydia muridarum Nigg
MKGSRSIDFITNDFLGFSRLEGLSDAVEARYQRYCISEPYARLGYGGSRSILGPSELLNELEQGIAHFHGVAEALVLPSGFVANTTVCAHLSSAADYVLWDEQAHISVSYNMALFMPEKQKSFRHNDLNHLESLLASCQKQGFKRVFILVCSVYSFKGSFAPLKQIVALAQRYHAQLIVDEAHAVGLFGESGRGFCSSIGYENVYAVLVTFGKALGSVGAALLSSYDRKQDFIKEPMASLSTGMPPHSLISIQVAYEFLSKEGEFARTRLRQIREYFAQKVSSAAPGFVQPISSPSVPSQVLHQQLTEAGVRVGITRFPAKGSLRANLHAFNTKEEVDILVSILSQVSDQKNVVMGSMSTMHRTLEESLAAENAS

SEQ ID NO: 17593 - protein, 232 aa, Medicago truncatula
MALEALNSPTSTTPKFTFDEPNLPWTKRKRSKRSRSCTEEEYLALCLIMLARGHTNRHDFNPLNPPPTTIDNNNNNTKLSYKCSVCNKEFSSYQALGGHKASHRKNSVGGGGDDHPSTSSAATTSSANTNGGGVRSHECSICHRSFPTGQALGGHKRCHYEGVVGGGASAVTVSEGMGSTHSHQRDFDLNIPAFPEFANKVGEDEVESPHPVMMKKKARVFVVPKIEIPNFQ

SEQ ID NO: 17594 - protein, 268 aa, Pseudomonas aeruginosa
MSRLQTRFAQLKQENRAALVTFVTAGDPDYASSLEILKGLPGAGADVIELGMPFTDPMADGPAIQLANIRALEGGQTLARTLQMVREFRSGDSETPLVLMGYFNPIHHYGVERFIAEAKEVGVDGLIVVDLPPEHNEDLCHPAQAAGLDFIRLTTPTTGDQRLPTVLEGSSGFVYYVSVAGVTGANAATLEHVEEAVARLRRHTDLPIGIGFGIRSAEHAAAVARLADGVVVGSALIDRIAKARDNAQAVKDVLALCGELAEGVRNAR

SEQ ID NO: 17595 - protein, 326 aa, Triticum aestivum
  misc_feature (255)..(255): Xaa can be any naturally occurring amino acid
  misc_feature (263)..(263): Xaa can be any naturally occurring amino acid
  misc_feature (266)..(266): Xaa can be any naturally occurring amino acid
  misc_feature (270)..(270): Xaa can be any naturally occurring amino acid
  misc_feature (286)..(286): Xaa can be any naturally occurring amino acid
  misc_feature (290)..(290): Xaa can be any naturally occurring amino acid
  misc_feature (301)..(301): Xaa can be any naturally occurring amino acid
  unsure (1)..(326): unsure at all Xaa locations
MGVAHASSSAGEAVYSTFSSRYVREELPRYRMPEGSIPKEAAYQIISDELMLDGNPRLNLASFVTTWMEPECGKLMMDSVNKNYVDMDEYPVTTELQNRCVNMIAHLFNAPIGEDETAIGVSTVGSSEAIMLAGLAFKRKWANKMKEQGKPCDKPNIVTGANVQVCWEKFARYFEVELKEVKLTEGYYVMDPKKAVEMVDENTICVAAILGSTLTGEYEDVKMLNDLLVAKNKETGWDVPIHVDAASGRFIAPFXQPELEWDXRLXLVRXHVSGHSMACVPGVGWXIWRXKPNLPETYFHXNYLGTIAHGHTNFPGGYQNMAQIIT

SEQ ID NO: 17596 - protein, 465 aa, Glycine max
  misc_feature (390)..(390): Xaa can be any naturally occurring amino acid
  unsure (1)..(465): unsure at all Xaa locations
MGSRSRTVNVNTKDTNKVLNGMPSYAPPLPSSNSIAMEATNVHPSRISEFGTLEQSLGFRVEDTINLSRNPMFNQMKSNSQALGADIQFGALNKMQSIATSDINLSAAIAGSQALVLQKDSQPTLASTSAGRENWGETNLADASPRTDTSTDDTEDKNQRPERGESSGSKDKSDQKTLRRLAQNREAARKSRLRKKAYVQQLESSRLKLTQLEQELQRSRQQGIFISSTGDQAQSMSGNGAMAFDVEYARWLEEHNRQTNELRAAINSHAGDIELRTIVDNFMTQFDDIFRLKGIAAKADVFHILSGMWKTPAERCFMWIGGFRSSELLPREKFLLSIQLEPLAEQQLMGIYNLQQSSQQTEDALSQGMDALQQSLSETLANGSPSSSGXSGNVANYMGQMAMAMGKLGTLEGFLHQADNLRQQTLQQMLRILTTRQSARALLAISDYFSRLRALSSLWLARPRE

SEQ ID NO: 17597 - protein, 287 aa, Hordeum vulgare subsp. vulgare
RHNPLENAPDDPDALVLLPGLPHRVELRRSQMMDPAKMAWQWEYFKGVNAADQRGFGEVFNSFHDLEPDYVEHFQKTLGRRVWLVGPVALASKDMAVRGTDAPSPDADSCLRWLDAKPAGSVVYVSFGTLTKFAPAELHQLARALDLSGVNFVWVIGAAAGQDSAEWMPEAFAELIARGDRGFMVRGWAPQMLILSHAALGGFVTHCGWNSVLEAVSAGVPMVTWPRYADQFNNEKLVVELLKVGVSIGAKDYASGVEAHEVIAGEVIAESIQRLMESDHSHDAMES

SEQ ID NO: 17598 - protein, 486 aa, Bacillus firmus
MNSGVHVGNSDSLKAVWFRRDFRLHDHTALKHAIEAIEKHGGKWLAFFYLDPKTASVEPVHHDYFFQTVMQFKQMLKTNGGDLYIITGTIEGGQLSKLLQAFPEIDAVYANDDRVGDGRLRDEAAEHFLAKQSIPFYTFEDAYLTEPDQVLKKDGTPYKVFTPYYKAWAKERKRTPAVIKRDVLLGSVHKGTAPDREAETLFNNLIKKCSYDWSAIGEEHAIKRLQMFTKKRLSGYKANRDFPSITGTSRLSPYIKTGAVSSRSIYYHILNAEADSYSAETFLKELAWRDFYRMVHFYEPDCKDREIMEGYRELNWSHDQDDLTSWKRGETGFPIVDAGMRQLLNEGWMHNRLRMITASFLTKDLLIDWRLGERYFERMLIDYDPSSNIGGWQWAASVGTDAVPYFRIFNPVTQSKRFDENGTYIRTYIPELNHVPDHYIHEPWKMSEEEQVKYKCRLDEDYPLPIVDHSKQRKKALSFFKGDDEE

SEQ ID NO: 17599 - protein, 328 aa, Burkholderia sp. 383
MAKPAKRVAVTGAAGQIAYSLLFRIANGDLLGKDQPVILQLLDLPQAQGAVKGVVMELDDCAFPLLSGVVITDDPKVAFKDADVALLVGARPRSKGMERKDLLSANAEIFTVQGAALNEVASRDVKVLVVGNPANTNAYIAMKSAPDLPKKNFTAMLRLDHNRALSQLAAKSGKPVASIEKLAVWGNHSPTMYPDFRFATAEGESLLKLINDDVWNRDTFIPTVGKRGAAIIEARGLSSAASAANAAIDHVRDWVLGTNGKWVTMGIPSDGSYGIPEDIIYGVPVVCENGEYKRIEGLEIDAFSREKMDGTLAELLEERDGVAHLLKN

SEQ ID NO: 17600 - protein, 257 aa, Glycine max
MTSWLLGRSSRILIHQQQLHKKYLALLLGPFLNYNSSCSSFRSTEPFRCRDAFPGKNSAPTLVRFSRHESTKAEAQLELEQDVATEDDPNQVIDCPGGKVGFTSDMRFISESPQKRVPCYRVPDGNGEILKYSDYVQVGEEMGVKMYSDMVTLQTMDRLFYGVQRQGRISFYLTQMGEEAVNIASAAALAPDDIILPQYREPGVLLWRGFTLQQFVHQCFGNTHDLEKQADPIHYGSTTHYFQCIPMHTLPLWTAIP

SEQ ID NO: 17601 - protein, 381 aa, Methylobacillus flagellatus KT
MKHSQLAQDSCGLHSIRQPLATPDHALRPAQAANKTQLGDLASQPSRAGRQCNLAGELCQPLYIINKGAAVALTQRDFKKNNGHAVAIFGEVLADVFPDGSVLGGAPFNVARHLQAFGLHPVMITRVGQDDLGRELLEEMQRLGMDTSGVQIDPVHPTGQVKVHLSPSGHQFEILPAQAYDYIHAGVTHMVTMATKPDLVYFGTLAQRNMESRLALDNFLNYGTSPRFLDINLRDPWYDKHTVRRSLLRADLVKLNDEELAILVKMLRLPGRSPQEHAAALIKRFNLDLLLVTEGDKGSWLMNAAGQVEAVEGAEPPQTFVDTVGAGDAFASAFILGILKGWPADVTLARANQFAAALCSVRGAAPSSLAFYVPYKQEWQL

SEQ ID NO: 17602 - protein, 520 aa, Ostreococcus tauri
MVKTASSSSGRFESRASASMTSRAREMEQTLEVQAEGEGVEDEMREIAVDARAPRVRRDRAKTASRELKRRFQSRDARCVILAGGADETNPLTRRRARSAVHLAGTYRVIDFPMTNLINSGMRQLYVLTQFNSHSLVTHVNKAFPSELFGGEVNGFVEVLPTSQTREHGETWSLGSADCVARHLSSGSLTKYTYEMRMEDECLRQLGSLDECLMSELDGTTIILSAEALYSMNFAELLEQHFLKGADVTIATCNQISSDQANAFGILDVDEMTAQVNCFIEKPTKAQLEEFMQCTTEELESCKLDANMGVYVFNNSALLELLTASKSGVAPGGPTRVRLGYDVKAFRHSDYWKPLRSLRDLYEANISIAVGGDAASLLTHGRQVYTKPNFLPPTTFHGSVYTEKTIFSDGCLVQDGSRIVNSVIGACTSIDKNVDLEGVVVVGRDEIMKRSGGVNSVPDIGANTIIRKCIIDSDATIGANVRIVNAAGIEELDRTDEGYVITEGIVTILGGAIIPDGFVI

SEQ ID NO: 17603 - protein, 725 aa, Methylobacillus flagellatus KT
MSTPDERPIYIMMISMHGLIRAENLELGRDADTGGQITYVVELARALGKHPMVEKVDLITRRIEDENVSKDYSVPEEQLEQNARIIRLPCGPRRYLRKESLWPHLDQMVDQCLHFLRSQGGRLPDLLHTHYADAGYVGRQLSLLLGIPQVHTGHSLGHPKRQRLLAAGRKASSIERQFNFERRIAAEESILEHASMIVTSTQQEIDEQYSMYRHFDYQRFRVIPPGTDTTRFSPPGRRKISSELQAQIDRFFSNPDKPLILTICRPEVRKNLKGLIAAFGESTELQQQANLLIVAGARDDIRQLEESQQQVMLELLLDIDRYDLWGKVAIPKHVSQDNIPELYRLAARRRGVFVNAALTEPFGLTLIEAAASGLPFVAPDDGGPRDIVQNCRSGLLANTLDSNAIASALLDLLSDKKRWRTWAKNGLAGIRRHYNWPAHVNTYMKQVSQVLRRDRKRWRRQLVITLDSGKSYMPLVNSALISDIDNTLLGDKRSLRQLVHWLKERKGKFAFGIATGRTIESAVNILRQWQVPIPEVLITSVGSEIHYGARLIPDTGWANHIRHKWRRDALEEAMKYFPGLTLQAEENQREFKLSYIVDPDKMPPLEEINLHLRSQQLFAQLIYSHNEFLDLLPIRASKGHAIRYLAYKWGVPVRHFLVAGDSGNDHEMLVGDTLGVVVGNHSQELEQLRGMEQVYFAKGHYAAGILEGIAHYRFDEIEPSPVSEH

SEQ ID NO: 17604 - protein, 650 aa, Methylobacillus flagellatus KT
MYEQVSHSLLNDILIGLDPKVGCEDLKHFYIRLGANFYAIHSLFHQLYGDRQDFRLQMHKLVAVMAKQYVSRPQELRHRDLAREKDHNWFLSQKLAGYALYCQEFAQSLKGMHEKLDYLQELGINLIHIMPILDGPKGRNDGGYAVRDFRKIDEKYGTLEDLDTLSAELRSRDMLLVLDVVVNHTSDEHEWALKAQQGNKKYQEYYYTYPDRKIPDLFEQTMPEVFPDTAPGNFTWNEKMGRWVMTVFNNFQWDLNYRNPSVFIEMIDIILFWANHGADVIRLDAVAFLWKKIGSPCQNEREAHLILQLMKDCCQVTAPGTLFIAEAIVAPLEIIKYFGEDAVNAKECEIAYNATYMALLWDAVATKKTLLLNRGLRSLPTKLDGATWLNYVRCHDDIGLGFDDNDIRASGYDPQAHRRFLVDYYTGAYQGSTATGVAFGVNPKTGDARISGSLASLAGLETALLRNDAQAIDTSIRTIILLHSMIASFGGIPLIYYGDSIGTLNDNTYLDDENKHHDSRWVHRPSLDWNKAARRHEPGTVENRIFTAIQRILAVRKQIPAFADLNNREIFETSNPHLFTFLRFTSQGMHSRVLVIANFDASPQYMNLRELDSVNLFRHVEVKDLYSGETLSTKHGTLEIPPLGFYWLQL

SEQ ID NO: 17605 - protein, 489 aa, Salmonella enterica subsp. enterica serovar Typhi Ty2
MGSKTKTTEAPALRRELKARHLTMIAIGGSIGTGLFVASGATISLAGPGGALFSYILIGLMVYFLMTSLGELAAYMPVSGSFATYGQNYVEEGFGFALGWNYWYNWAVTIAVDLVAAQLVMGWWFPDTPGWIWSALFLCVIFLLNYISVRGFGEAEYWFSLIKVATVIIFIIVGVAMIIGIFKGVEPVGWSNWTTGDAPFAGGFAAMIGVAMIVGFSFQGTELIGIAAGESENPEKNIPRAVRQVFWRILLFYVFAILIISLIIPYTDPNLLRNDVKDISVSPFTLVFQHAGLLSAAAIMNAVILTAVLSAGNSGMYASTRMLYTLACDGKAPRIFAKLSRGGVPRNALYATTVIAGLCFLTSMFGNQTVYLWLLNTSGMTGFIAWLGIAISHYRFRRGYVLQGYDVNDLPYRSGFFPLGPIFAFVLCLIITLGQNYEAFLKDTIDWGGVAATYIGIPLFLLIWFGYKLIKGTHFVRYSEMHFPERVKK

SEQ ID NO: 17606 - protein, 452 aa, Ostreococcus tauri
MAGTNTPVTAALGAAAANDGMDNVLSIILGGGAGTRLYPLTKKRAKPAVPLGANYRLIDIPVSNCINSDINKVYCLTQFNSASLNRHLAQAYNTNIGTHTRQGFVEVLAAQQSPVNKAWFQGTADAVRQYLWLFEESKCEEYLILSGDHLYRMDYRPFIMKHRETEAAITVAALPCDEKRASSFGLMKIDNTGRVIEFAEKPKGAELQAMKVDTTVLGLDADKAQEMPFIASMGIYVFDAKKMRECLLENFKEADDFGGEIIPMAAQMGLKVQAFLYEGYWEDIGTVDAFFHANLSCNDPNPAFNFHEMNAPIYTQSRFLPPSKVQDCEIERSTIGDGCFITKAKLKNVMVGLRSTVNANCDLEDTLVMGADYYETYDEAKTSALPGGVPIGIGAGTKIRKAIIDKNARIGENCQILNEAGVMDKDCENEGYIIRDGIIVVIKDAVIKPGTV

SEQ ID NO: 17607 - protein, 139 aa, Oryza sativa (indica cultivar-group)
MSTQLVKIGTWGGNGGGRVDLSVLPRSLKSVTIRSGAAIDAIAFTYIGTDGKEHLAGPWGGGGGNPTTITLGSQEFVKGISGTFTNVVTNLKIVTNVTTYNFGQGGGTAFSLPLQSGSVVGFFGRAGALVDSIGVYVHI

SEQ ID NO: 17608 - protein, 471 aa, Bacillus cereus ATCC 10987
MNQQVEQTDLKRTMKSRHLFMIALGGVIGTGLFMGSGQIVHNAGPGGAILAFLVGGFVMYLTMLCLGELSVAMPEAGSFQSYASKFISPGFGFVVGWMYWLNWAVTVGVELTTVSILMKRWFPDVSSWIWCVTFAAALFLVNALSAKAYAEAEFWFASVKVATIVIFIVLGGAVMFGLLDFNGKPAPMLHNFTENGGLFPNGALAVLLTMITVNYSFQGTELIGIASGESENPEKTIPKAIKNTIWRTLFFFVLAISVVVGLLPWQEANLVESPFVLVFDVAGIPYAADIMNFVIITAVLSVANSGLYANSRMLWAMAKQGMASPAFTKLTKKGVPLNALIFSLIFASLSLLTSIFAADTVFLVLTSIAAMAAVVVWMSIAASQFFFRRNFVKNGGDINDLKYRTPLYPLVPIVAFSLNFITFVSLAFIPDQRIALYCGIPFMVICYILYQVKYKKIVTFEQQISLKKEVN

SEQ ID NO: 17609 - protein, 453 aa, Pseudomonas stutzeri
MSILNDYKRKTEGSVFWAQRARSVMPDGVTADTRVFDPHGLFISDAQGVHKTDVDGNVYLDFFGGHGALVLGHGHPRVNAAIAEALSHGVQYAASHPLEVRWAERIVAAFPSIRKLRFTGSGTETTLLALRVARAFTGRRMILRIATHYHGWHDFSASGYNSHFDGQPAPGVLPEIAKNTLLIRPDDIEGMREVFAQHGSDIAAFIAEPVGSHFGVTPVSDSFLREGAELARQYGALFILDEVISGFRVGNHGMQALLDVQPDLTCLAKASAGGLPGGILGGREDVMGVLSRGSDRKVLHQGTFTGNPITAAAAIAAIDTILEDDVCAKINDLGQFAREAMNHLFARKGLNWLAYGRFSGFHLMPGLPPNTTDTGSITRAEVARPDVKMIAAMRMALILEGVDIGGRGSVFLSAQHEREHVEHLVTTFDRVLDRLADENLLSWQPTNLSGNQS

SEQ ID NO: 17610 - protein, 347 aa, Anthurium andraeanum
MMHKGTVCVTGAAGFVGSWLIMRLLEQGYSVKATVRDPSNMKKVKHLLDLPGAANRLTLWKADLVDEGSFDEPIQGCTGVFHVATPMDFESKDPESEMIKPTIEGMLNVLRSCARASSTVRRVVFTSSAGTVSIHEGRRHLYDETSWSDVDFCRAKKMTGWMYFVSKTLAEKAAWDFAEKNNIDFISIIPTLVNGPFVMPTMPPSMLSALALITRNEPHYSILNPVQFVHLDDLCNAHIFLFECPDAKGRYICSSHDVTIAGLAQILRQRYPEFDVPTEFGEMEVFDIISYSSKKLTDLGFEFKYSLEDMFDGAIQSCREKGLLPPATKEPSYATEQLIATGQDNGH

SEQ ID NO: 17611 - protein, 290 aa, Oryza sativa
MAKDIEAAAAAEGGEYMAKDYSDPPPAPLIDAEELTKWSLYRAVIAEFVATLLFLYITVATVIGYKHQSDPGANAADAACSGVGILGIAWAFGGMIFILVYCTAGVSGGHINPAVTFGLFLARKVSLVRAVLYIVAQSLGAICGVGLVKGFQSAFYVRYGGGANELSDGYSKGTGLAAEIIGTFVLVYTVFSATDPKRNARDSHVPVLAPLPIGFPVFMVHLATIPITGTGINPARSLGAAVIYNQHKAWHDHWIFWVGPLIGAAIAAAYHQYVLRASAAKLGSSSSFRG

SEQ ID NO: 17612 - protein, 181 aa, Arabidopsis thaliana
MADQLTDDQISEFKEAFSLFDKDGDGCITTKELGTVMRSLGQNPTEAELQDMINEVDADGNGTIDFPEFLNLMARKMKDTDSEEELKEAFRVFDKDQNGFISAAELRHVMTNLGEKLTDEEVDEMIKEADVDGDGQINYEEFVKVMMAKRRGKRVMAAKRSSNSAEYKEKNGRRKSHCRIL

SEQ ID NO: 17613 - protein, 317 aa, Arabidopsis thaliana
MGIQETDPLTQLSLPPGFRFYPTDEELMVQYLCRKAAGYDFSLQLIAEIDLYKFDPWVLPNKALFGEKEWYFFSPRDRKYPNGSRPNRVAGSGYWKATGTDKIISTEGQRVGIKKALVFYIGKAPKGTKTNWIMHEYRLIEPSRRNGSTKLDDWVLCRIYKKQSSAQKQVYDNGIANAREFSNNGTSSTTSSSSHFEDVLDSFHQEIDNRNFQFSNPNRISSLRPDLTEQKTGFHGLADTSNFDWASFAGNVEHNNSVPELGMSHVVPNLEYNCGYLKTEEEVESSHGFNNSGELAQKGYGVDSFGYSGQVGGFGFM

SEQ ID NO: 17614 - protein, 219 aa, Brassica napus
  misc_feature (198)..(198): Xaa can be any naturally occurring amino acid
  unsure (1)..(219): unsure at all Xaa locations
RPTRPVENGKFLLSAKRTRRTTRTEYIISMDAENISRSSNSYLGKLRSNFLGTKFLVYDTQPPPDTSSSSSSALITDRTSRSRFHSRRVSPKVPSGSYNIAQITYELNVLGTRGPRRMHCIMNSIPTSSLEPGGSVPNQPEKLLPPPPRSFDDSFRSNISFSKSSFDHRSVDFSSSRFSEMGVSCEEDQGETSFKPLXLKSRQPRWHEQLQCWCLNFRG

SEQ ID NO: 17615 - protein, 413 aa, Arabidopsis thaliana
MGLEEQGRAREDTPLLGKGRPLSGKFKTFANVFIAIVGAGVLGLPYAFKRTGWLMGLLTLFSVAALINHCMMLLVHIRRKLGVSNIGSFGDLGFAACGNLGRFVVDILIILSQAGFCVGYLIFIGNTLANLSKPTKSTTLMSLRHLMGVSPKSLYIWGCFPFQLGLNSIKTLTHLAPLSIFADVVDLGAMAVVIVEDIKITVVQRPQVVAFGGMSVFFYGMGVAVYAFEGVGMVLPLESETKDKDKFGKVLALSMLFIAVMYGSFGVLGYMAFGDDTMDIITANLGAGVVSSLVQLGLCINLFFTFPLMMNPVFEIVERRFWSGMYCVWLRWLLVLAVTLVALLVPNFADFLSLVGSSVCCALGFVLPSLFHLMVFKDEMEWKQRALDVGILLLGVILGVSGTWSSLTEIFQE

SEQ ID NO: 17616 - protein, 535 aa, Arabidopsis thaliana
MALAFDEFGRPFIILREQDQETRLRGIDAQRANIAAGKAVARVLRSSLGPKGMDKMLQGPDGDITITNDGATILEQMDVDNQIARLMVELSRSQDYEIGDGTTGVVVMAGALLEQAERQLDRGIHPIRIAEGYEMASRVAVEHLERIAQKFEFDVNNYEPLVQTCMTTLSSKIVNRCKRSLAEIAVKAVLAVADLERRDVNLDLIKVEGKVGGKLEDTELIYGILIDKDMSHPQMPKQIEDAHIAILTCPFEPPKPKTKHKVDIDTVEKFETLRKQEQQYFDEMVQKCKDVGATLVICQWGFDDEANHLLMHRNLPAVRWVGGVELELIAIATGGRIVPRFQELTPEKLGKAGVVREKSFGTTKERMLYIEHCANSKAVTVFIRGGNKMMIEETKRSIHDALCVARNLIRNKSIVYGGGAAEIACSLAVDAAADKYPGVEQYAIRAFAEALDSVPMALAENSGLQPIETLSAVKSQQIKENIPFYGIDCNDVGTNDMREQNVFETLIGKQQQILLATQVVKMILKIDDVISNSEY

SEQ ID NO: 17617 - protein, 547 aa, Desulfovibrio vulgaris subsp. vulgaris str. Hildenborough
MASKEILFDTKAREKLSRGVDKLANAVKVTLGPKGRNVVIEKSFGSPVITKDGVSVAKEIELEDKFENMGAQMVKEVASKTSDIAGDGTTTATILAQAIYREGVKLVAAGRNPMAIKRGVDKAVESLVRELGNLAKPTRDQKEIAQVGTISANSDSTIGNIIAEAMSKVGKEGVITVEEAKGLETTLEVVEGMQFDRGYLSPYFVTDPEKMVCELDEPFILCNEKKISTMKDMLPVLEQVAKMQRPLVIIAEDVDGEALATLVVNKLRGALQVVAIKAPGFGERRKAMLQDIAVLTGGQVVSEDMGIKLENISVADLGTAKRVVIDKENTTIVDGAGKGDDIKARVKQIRAQIEETTSDYDREKLQERLAKLVGGVAVIHVGAATETEMKEKKDRVEDALNATRAAVEEGIVPGGGTALVRVAKVLDDIKPADDDETAGVNIIRRAIEEPLRQIASNAGFEGSIVVERVREGKDGFGFNAATGEYEDLIGVGVIDPKKVTRIALQNAASVASLLLTTECAIAEKPEPKKDMPMPGGMGGMGGMGGMY

SEQ ID NO: 17618 - protein, 196 aa, Zea mays
EELRTSLKELLFKEGSFRWNRLENLLRNAKNSPGFDFDYVLNEATEFLLSDRGQFIRDRLVAELVNSIDQLGRNTWQQVSHNIQERISFLGDLGNGNGKAHQTKTIKVVPQPAIAQQEETWQHLQNLWQILKETPGFDPLKFVPVLSQIIVNPTSRRMGQQVAEGLLQKAIARVIRQWALALESQPNPAIKIRNAA

SEQ ID NO: 17619 - protein, 95 aa, Desulfovibrio vulgaris subsp. vulgaris str. Hildenborough
MNLKPLNDRVLVKRLESEEKTAGGLYIPDTAKEKPSRGEVVAAGPGKTADDGKLVAMTVKAGDMVLFNKYAGTEIKIDGVEHLVMREDDILAIIE

SEQ ID NO: 17620 - protein, 360 aa, Gloeobacter violaceus PCC 7421
MRGALCCERCGFCLTVKGSCAVLNNFWYGLAHSPAITSIPRQVVVMGRPLVLYRTVGGRVVALEDRCAHRDTALSGGWVEGNCLRCPYHGWRYAPDGGCTEIPANQPGVAISRLAKVETFPVQERHGLVWVFLGELPEAQRPELPSLPEYAAPGWRAVRGEFTWSGHYTRVIANTVDMSHAPFVHAAAFGRKEAPRIQTYHIESERWRGSASIQFKTKPAYFLKLVLGKTPPDGSITSTFHLPNVTQVHHRFGRIQFILFLVHVPVDERTTHTCWLHLRNFVTHAWADPFMHRDVVRTFRQDDSVVRLQPPGPVPEQLNAEVHAPSDGLEVAYRRLRRLCGRLEWASPTQNPRITEGASP

SEQ ID NO: 17621 - protein, 463 aa, Thermobifida fusca YX
MCVGRRNTSGPHRLRRWAPIRGADRRYPRRPKRCVGQPTAESEDTMTDIERDVRKVAERARDAAADLAPLSRDAKDEALTAVADALRERTEEIVAANAKDVAQARENGISEAMIDRLTLTPARITAIADAVHEIVELPDPVGEVVRGKTLPNGLELRQIRVPLGVIGIIYEGRPNVTVDAAALCLKSGNAVLLRGSSSAYSSNTVLTDVIRQALASTRVPVDAVQMVPGKSRESVKHLMRARGLVDVLIPRGGASLIQTVVNESTIPVIETGTGNCHVYVDEAADLDQALKIVLNSKTQRCSVCNASETLLVHAGIADAFLPRALAELREAGVTIHGDERVRSYDSSVVPATEEDWATEYLSLDLAVRVVDSLDEAVAHIRAYSSAHTEAIITDSQAAARRFVSLVDSAAVMVNASTRFTDGGEFGFGAEIGISTQKLHARGPMGLPELTTTKYVVTGEGHVR

SEQ ID NO: 17622 - protein, 312 aa, Magnaporthe grisea 70-15
MADKDFTLNTGAKIPAFGLGTWQGDKGVIKEAVLTAIKSGYRLIDGAYVYGNEEEVGQGIREAISSGIVKREDLFVVSKCWATYTTRCELGLDQSLKLLGLDYVDLYLVHWPILMNPEGNDEKFPKHADGSRDIIHTHNHVDTWKLMEKLPATGKTKAVGVSNYSKAWLEQLLPHATTVPAVNQVENHPQLPQQELVDFCKEKGIHIMAYSPLGSTGGPLLTAEPVVKIAEKHSISPAAVLLGYQIARGITVIPKSVNPDRIKANAQLKDLDAEDMKLLNDYSEQLAKDGKLNRYVFPPFGTDFGFPDKVGQ

SEQ ID NO: 17623 - protein, 588 aa, Legionella pneumophila str. Paris
MKNNLPIKSRLLYKRLLSYVKPFWPVLLLGVLANILYSGIDAGFTYMTKLFLDKSFITIDLDFVKQIPLIVLIGITLRGLVSSLGSYCMTWVARSVVKVLRQTVFSHIIHLPADYYDEATSGQLLSKILYDVEQVAQVSADALTDFIQNICLVIGLLTVMMVICWQLSLMFLLTIPFVGIIVNYTNKRVRRISHKVQKTMGEVTEIASEAIEGYRVVRIFGGERYEITKFNKATEYSRKNDMKVAISKAINVSGVQLVIAIGIAMIIMAAIHLSTVITISAGSFLAIIAAMLQLIKPMKTLTTLNATIQRGLAGAESVFNLLDLPLERNNGLILKEKVRGEIEFKHVYHAYRQSQNILHDVNFVIEAGTSVALVGHSGSGKTTIASLLPRFYELSQGMITLDGMPIQQLSLESLRKQISLVSQNVTLFNDTLANNIAYGRFDASREQIITAAKLAYADEFIKQLPDGYDTRVGENGVLLSGGQRQRIAIARAILKDAPILILDEATSALDSESEHYIQAALEQVMKGRTTLIIAHRLSTIKHAHKIIVLQHGRIVEQGSHQELLDMDGHYAQLYKVQQFGRINEEVVV

SEQ ID NO: 17624 - protein, 453 aa, Xylella fastidiosa Ann-1
MAVSFVISRFGSEVRPTLLLALPLVLGHVSTGLIGFVLNVIAGHHSTVTLAASTIGTALLWLPMLVPMGTLISLTVLVSQLHGAERERDIGPLFRQALWLAMLLGLVMFTFLSVVPALLPLFGIVPDIVPGAAKFLHVVRWGSLAFPLYFCMRYFCEGMHCTFPTMLLGFGGLLVLVPLSYALTYGRFGFAEYGVEGLGIATVTVMWLQAVVFALYLWRSRRFAHLQLFAHLELPCWAPIRDLLNIGLPIGISILMEGGLFIVTTLLIGRFGTDEIAAHQIALSVAQLCFMIPMGVAEATTVRIGHAVGRCDLLVMRRVAWAGYAIVIGTQTLSASVLLLGYDVIVAAYTDDLVVASLASKLLLFAAIFQFPDGLQMLSSGVLRGMKDTRVPMLLAMISYWGLGMPLGLGLGFALEWNSRGMWIGLIIGLTAAAVLLGWRFRVVSERMFAGIP

SEQ ID NO: 17625 - protein, 388 aa, Thermobifida fusca YX
MGTGVGQTRAEIAQARRVVVKVGSSSLTTPQGGLDHERIRDLTDVLAERRKAGTEVVLVSSGAVAAGMAPLGLTQRPRDLATQQAAASVGQGLLLARYTAEFARHSLTAAQILLTADDLMRRAQYRNAQRAMSRLLEIGAVPIVNENDTVATHEIRFGDNDRLAALVAHLLRADVLVLLTDVDALYDGNPSLPTSTRITQVNGPEDLVGVDLGSANKRGVGTGGMITKVESARIATEAGVATVLTSAANARAALRGDPVGTFFVPAKHRRPSSRQLWLAHATAGRGSVFLDPGAVHAVVTEKASLLPAGVIKVEGDFNAGDPVDLRDENGVLVARGLVNYDSAEIPDLMGRSTRWLARELGAEYSREIVHRDDLVVLRNGSTSDREAC

SEQ ID NO: 17626 - protein, 266 aa, Glycine max
  misc_feature (86)..(86): Xaa can be any naturally occurring amino acid
  unsure (1)..(266): unsure at all Xaa locations
MGSVDCYPSRVDDAAVVSLDSLPLGFRFRPTDEELVNYYLRQKINGNGREVWVIREIDVCKWEPWDMPGLSVVQTKDPEWFFFCPXDRKYPNGHRLNRATNNGYWKATGKDRRIKSGKDLIGMKKTLVFYTGRAPKGNRTNWVMHEYRPTLKELDGSNPGQNPYVLCRLFKKHDESLEVSHCDEAEQTASTPVAYSTEEIQSDLAVVAGSPSQVTEDDKHQAMIPAHSEEAISNVVTPVVCRSDRYDACHAPNQIVLPTAEVRWNN

SEQ ID NO: 17627 - protein, 447 aa, Galactomyces geotrichum
MREIIHVSAGQCGNQIGAAFWETISGEHGINPSAIYEGTDPLQLERLSVYYNEAGNGKYVPRAVLVDLEPGVMDAVRSGTYGNLFRPDNFIFGQSGAGNNWAKGHYTEGAELVDSVLDIVRREAENSDSLQGFQISHSLGGGTGSGMGTLLISKIREEYPDRMMATFSVVPSPKVSDTIVEPYNATLSVHQLIENADETFCIDNEALYDICQHTLKLKQPTHADLNQLVSGVMSGITTCLRFPGQLNSDLRKLAVNLVPFPRLHFFMVGYAPLSAPGQQSFRSLTVPELTQQLFDSKNMMAASDPKRGRYLTVAAFFRGKVSIKEVEDQMRSVQERNSAYFVEWIPNNVQTAICSVPPKDVKMSATFIANSTSIQELFKRVGDQFSAMFRRKAFLHWYTNEGMDITEFAEAESNMNDLVSEYQQYQNATVDDEDMEYEDELPLEDEM

SEQ ID NO: 17628 - protein, 487 aa, Mesorhizobium sp. BNC1
MAESYDVIIIGSGPGGYVTAVRSAQLGLKTAIVEREHLGGICLNWGCIPTKALLRSAEILHYAQHAKDYGLKLDGSIAPDTAAVVDRSRKVSARLNTGVGFLMKKNKVDVIWGEAKISKAAKANEPGEIVVSKPSKKAMEPQHPAPKNTLGEGTYKAKHIILATGARPRVLPGIEPDGKLIWTYFEAMVPKEMPKSLIVMGSGAIGIEFASFYRTMGADVTVIELLPQILPVEDAEVSKFARRQLEKQGMKFHVEAKVTKVEKGANQITAHVEMKDGKVEKITADRLISAVGVQGNVENLGLEALGVKVERGTVAVDGYGRTNVPGIYAIGDVAGPPMLAHKAEHEGVICVEKIAGVPGVHALDKSKIPGCTYCQPQVASVGLTEEKAKEAGRDIRVGRFQFGANGKAIALGEDQGFIKTILDKKTGELLGAHMVGAEVTELIQGFVVAMNLETTEEELMHTIFPHPTLSEMMKESVLDAYGRSLNA

SEQ ID NO: 17629 - protein, 112 aa, Glycine max
  misc_feature (68)..(68): Xaa can be any naturally occurring amino acid
  unsure (1)..(112): unsure at all Xaa locations
ARVPFVDKEFIRVAGNIDPEGKMINKDEGRIEIWTLQMTFDDEDHPYMAKHILYNHNEQSSDGVGYGXIDGLKAYDEQHATDRFMLNTGHTITCNTYTANELYHYRMISERV

SEQ ID NO: 17630 - protein, 545 aa, Candida albicans SC5314
MVEDKDIDLNINNLKIHDAPTRTPPVSSPPALPTPPTPSGISLNTTMQAKLMAFQQQRSKAAAAAAAAASVSSSSSGTQASSSSISASTSESSVSTIPANINRTVSGKKKPKPNLKLSDLPLSRNNSLHRSNTSASDSSVTTPEADTPTGKISNEPQPQGLFANYSDYVDIKSGQLNFAGKASLHSKGIDFSSGSSFRVSLDEFEYLEELGRGNYGSVSKVLHKPTGVLMAMKEVRLELDENKFTQILMELDILHKCDSPYIVDFYGAFFVEGAVYMCIEYMDGGSLDRIFGNDVGVKDEYELAYITESVILGLKELKDKHNIIHRDVKPTNILVNTQGKVKLCDFGVSGNLVASLAKTNIGCQSYMAPERINTMRPDDATYSVQSDVWSLGLTILELAVGHYPYPAETYDNIFSQLSAIVDGEPPKLYPKVYSKEAQIFVKSCLAKNPDLRPSYAALLNNPWLIKNRGKETNLAQTVKDRVEEIAKLEKNKSVSRSNSMNKSAAAVPPPRNVESVQSLLRNKVKAPALHRGGLQKVNRSFLNNH

SEQ ID NO: 17631 - protein, 391 aa, Bacillus cereus ATCC 10987
MDVAKELVLSKDQLVEWRRHFHKYPELSFQEEKTSQFVFDILREIPCLEVSRPTKYSVMARLIGKQPGKIVAVRADMDALPIHEENEFDFISTYPGVMHACGHDGHIAILLGVVHKLVEAREKIKGEIRFLFQHAEENFPGGAEEMVAAGVMEGIDYIIGAHLWASLEVGKVGVIYGPAMAAPDVFKIIIEGKGGHAGIPHETVDSIAIGTQVVSQLQQIVSRLTNPLDSLVVSVTQFHAGTTHNVIPEQAEIEGTVRSLRHELREETEKRIEQIVKHVTEAYGAKYTFSYEYGYRPVVNDYEVTEIIEQTALQLYGRERVTRLQPTMAGEDFSAFLQKAPGTFFFIGAGNKEKGIIYPHHHPRFTIDEDALPIGVQVFVSSIMNFISKGE

SEQ ID NO: 17632 - protein, 146 aa, Brassica napus
MKRIVRISVTDAEATDSSSDEDTEEPCRETTTTAQVRRRSGKRLVKEIVIDPPDSDDNRDACKTRFKIRIPAEFLKATAEGGKKKFRGVRQRPWGKWAAEIRCGRALKGRRDRLWLGTFDTAEEAALAYDNAAVQLIGPHAPTNFS

SEQ ID NO: 17633 - protein, 166 aa, Guardiola tulocarpus
MFPMVTEFMNYGQQTVRAARYIGQGFMITLSHANRLPVTIQYPYEKLITSERFRGRIHFEFDKCIACEVCVRVCPIDLPVVDWKLETDIRKKRLLNYSIDFGICIFCGNCVEYCPTNCLSMTEEYELSTYDRHELNYNQIALGRLPMSIIDNYTIRTILNLPEIKT

SEQ ID NO: 17634 - protein, 335 aa, Nepenthes alata
YQWAFAIAAAGITSGSIAERTQFVAYLIYSSFLTGFVYPIVSHWFWSVDGWASASRASNLLLGSGVTDFAGSGVVHMVGGVSGLWGALIEGPRIGRFDRSGRSVILRGHSGSLVVLGTFLLWFGWYGFNPGSFLTILKAYGNNGGYFGQWSAVGRTAVTTTLAGSTAALTTLFGKRLLVGHWNVTDVCNGLLGGFAAITSGCSVVDPWAAIICGFVSSWVLIGFNKLAEKVKYDDPLEAAQLHGGCGMWGLIFTGLFATKKYVSEVYGGSPDRPHGLFMGGGGKLLAAQLIQIVVIFGWVTATMGPLFYGLKWLKLLRVKSEHEMAGMDMTSHGG

SEQ ID NO: 17635 - protein, 139 aa, Craterostigma plantagineum
MATNPRSTSPLSDIDGERQRKRKLSNRESARRSRMRKQQRLDELTAQATQLKEENKKLREMIDGSNQLYLSAASENSVLRAQAAELADRLKSLNTLLRIASDVSGLAFDIPDVPDALAEPWQMPCAVLPVAASADMFQY

SEQ ID NO: 17636 - protein, 166 aa, Hofmeisteria fasciculata
MFPMVTEFMNYGQQTVRAARYIGQGFIITLSHANRLPVTIQYPYEKLITSERFRGRIHFEFDKCIACEVCVRVCPIDLPVVDWKLETDIRKKRLLNYSIDFGICIFCGNCVEYCPTNCLSMTEEYELSTYHRHELNYNQIALGRLPMSIIDDYTIRTILNLPEIKT

SEQ ID NO: 17637 - protein, 433 aa, Synechocystis sp. PCC 6803 [sequence omitted]

SEQ ID NO: 17638 - protein, 139 aa, Craterostigma plantagineum
MATNPRSTSPLSDIDGERQRKRKLSNRESARRSRMRKQQRLDELTAQATQLKEENKKLREMIDGSNQLYLSVASENSVLRAQATELADRLKSLNALLRVASDVSGLAFDIPDVPDALAEPLQMPCSVLPITASADMFQY

SEQ ID NO: 17639 - protein, 251 aa, Desulfovibrio desulfuricans G20
MKELSLGKELVSEFMGTLVLILFGTGTVAMTVLFGEALNITWANITLGWGLAVLLGVMAGLPSGAHINPAVTLGLAVTGRFPWRKVVPFTLAQTAGAFVGAALVFIDFKAKWLLVDPNLASTAGIFCTFPAIPDSFMPGFIDQIIGTAILLFGILAAGDFAAKNNAGWSVPFIVALLVTVIGMALGAMNGYAINPARDFGPRLFALVAGFTQANLMDISIVLTPIIGPFIGGAVGAVVYDWTTGAVHKAQN

SEQ ID NO: 17640 - protein, 166 aa, Hulsea algida
MFPMVTQFMNYGQQTVRAARYIGQGLIITLSHANRLPVTIQYPYEKLITSERFRGRIHFEFDKCIACEVCVRVCPIDLPVVDWKLETDIRKKRLLNYSIDFGICIFCGNCVEYCPTNCLSMTEEYELSTYDRHELNYNQIALGRLPMSIIDDYTIRTILNLPEIKT

SEQ ID NO: 17641 - protein, 373 aa, Colwellia psychrerythraea 34H
MTIQSFFPPQRTLMGPGPSDVSPRVLSALARPTIGHLDPCFVAMMDEVKELLQYAFQTTNKFTMAVSAPGSAGMEACFVNLITPDDTVVVCVNGVFGMRMIENVNRIGAKLVVVEGEWGRAVDPQALEASLKENPQANFVAFVHAETSTGALSDAKTLCAIAKNHDCLTIVDAVTSLGGVELRVDEWQIDAVYSGSQKCLSCVPGLSPVSFSDRAAEVIQNRGIAVQSWFLDQSLVMGYWSGEGKRSYHHTAPVNSLYALHESLVMLQNEGLENSWARHKTMHDKLSTGLAELGLDFIVPADERLPQLNAVYIPEGIDDAKVRNFLLNEYNLEIGAGLGAFAGKAWRIGLMGYAARNENVTLCLAALKEALKQ

SEQ ID NO: 17642 - protein, 169 aa, Mycobacterium leprae
MAVGQTPVSAPATTMRGYGRMPNHLIIRSVRGKPWTDRQVPVGTCVPNPLPTQSGTQVPGPIEIVEGSNRGEGEDQATRGQDSRTGRRGETMTPSGLVIPENAKEKPQEGTVVAVGPGRWDEDGAKRIPVDVSEGDIVIYSKYGGTEIKYNGEEYLILSARDVLAVVSK

SEQ ID NO: 17643 - protein, 208 aa, Desulfovibrio vulgaris subsp. vulgaris str. Hildenborough
MTAIETLLLTGLLLATALLPPALAHAAQPAPPPPAGMQVAVFAGGCFWCMEKPFDAVEGVLETTSGYTGGTVESPTYEQVSNGGTGHAEALRVVYDPAKVSYTALLDTFWHNVDPFDAGGQFCDRGSQYRSAIFPQDASQRADAESSLKALEERFGRPVATRIEPAGAFWPAEEYHQDYYKKNPLRYSFYRSNCGRDRKLKEVWGSPK

SEQ ID NO: 17644 - protein, 896 aa, Saccharomyces cerevisiae
MTTTAQDNSPKKRQRIINCVTQLPYKIQLGESNDDWKISATTGNSALYSSLEYLQFDSTEYEQHVVGWTGEITRTERNLFTREAKEKPQDLDDDPLYLTKEQINGLTTTLQDHMKSDKEAKTDTTQTAPVTNNVHPVWLLRKNQSRWRNYAEKVIWPTFHYILNPSNEGEQEKNWWYDYVKFNEAYAQKIGEVYRKGDIIWIHDYYLLLLPQLLRMKFNDESIIIGYFHHAPWPSNEYFRCLPRRKQILDGLVGANRICFQNESFSRHFVSSCKRLLDATAKKSKNSSDSDQYQVSVYGGDVLVDSLPIGVNTTQILKDAFTKDIDSKVLSIKQAYQNKKIIIGRDRLDSVRGVVQKLRAFETFLAMYPEWRDQVVLIQVSSPTANRNSPQTIRLEQQVNELVNSINSEYGNLNFSPVQHYYMRIPKDVYLSLLRVADLCLITSVRDGMNTTALEYVTVKSHMSNFLCYGNPLILSEFSGSSNVLKDAIVVNPWDSVAVAKSINMALKLDKEEKSNLESKLWKEVPTIQDWTNKFLSSLKEKASSDDDVERKMTPALNRPVLLENYKQAKRRLFLFDYDGTLTPIVKDPAAAIPSARLYTILQKLCADPHNQIWIISGRDQKFLNKWLGGKLPQLGLSAEHGCFMKDVSCQDWVNLTEKVDMSWQVRVNEVMEEFTTRTPGSFIERKKVALTWHYRRTVPELGEFHAKELKEKLLSFTDDFDLEVMDGKANIEVRPRFVNKGEIVKRLVWHQHGKPQDMLKGISEKLPKDEMPDFVLCLGDDFTDEDMFRQLNTIETCWKEKYPDQKNQWGNYGFYPVTVGSASKKTVAKAHLTDPQQVLETLGLLVGDVSLFQSAGTVDLDSRGHVKNSESSLKSKLASKAYVMKRSASYTGAKV

SEQ ID NO: 17645 - protein, 692 aa, Gloeobacter violaceus PCC 7421
MREALALSTAQICINNYQNFAVDPLLRRQPPVQVLRVLSSAELEACFSRSPWKFVAAVPIFCNGTLAGNLWICDEQERLLSAAQSALLEHAAGLVGERLEAEERLDEIHQRNLMYEKYIEMAPDQIGLLDSELRTLTVNAALSRFSGMPKEWILGKSLWEMGIPESILAQMADWEQLIRRVFETGEPGTTSFAYSVGDASCKLYCYSLAVPQFNCRGEVVAVLNITYDRAALEMPFNPEDWAGMGEQLMREVAAHRVTQEELARLNAELEERVRERTVRYKLLNQKLRAEIGERQRIEVELQAAQARAEAAARAKSDFLAAASHELRTPMHGIISMTDLLLESDLGAEQRELAAIIGYCGETMLSLINNILDISKIEAGRMELDVVPFELPRLIDSVVAMFAEQLRSKDLRLQVLIDPEVPAQLEGDPVRLAQVLTNLVGNSLKFTPRGQIAIRVHPAAQGGDDLRLRFEVVDTGIGMAPETTGRLFQSFFQADTSTTRKYGGTGLGLAISRQLVELMGGQIGVESRLEQGSTFWFVLPLKVSAPVEPPPPSAPMTVRLPQYGPILIVEDNAVNQKVLLRHLERLGCGAEVAETGAEALTVLASRSFALVLMDCQMPVMDGFQATAEIRRREDSARRTPIVGITANASAGVYDLCLAAGMDDCLIKPVRRDQLTAAIERWALPVVGTEWATG

SEQ ID NO: 17646 - protein, 286 aa, Nonomuraea sp. ATCC 39727
MTRHTTVQIQGLPVFYREAGDPANPTLVLLHGFPSSSAMFRNLIADLADSYHLIAPDHVGFGQSAAPSVEEFPYSFDKLTEITLELLDTLNIDRFALYIHDYGAPIGLRIASRHPERVSAIITQSGNAYLDGFTPFWEVLFAHAKDRATHEPAVRELLTADATRWQYTHGVPADLLERVSPDSWVLDQAYLDRPGNKEVQLQLFWDYQFNLDGYPAFQEYFRTHRPPVLVAWGANDEIFGAAGAEAYARDLPDAEIHLLDAGHFALETHGREIAGLIRDFLRRRLP

SEQ ID NO: 17647 - protein, 596 aa, Symbiobacterium thermophilum IAM 14863
MDVVFRSIQGKLVVVYLLLIVVAMELASLYLMRELERSYIGKVQDDLHQSAQLLAGQLTNFFAGDRLDPEAVDQYMERWPGEVLVLDANGVVIGATARLSNREELLGLKFSHDDVSPAFFGNTNRRIGKEGSQRMAYEAVPITVADNVVGVIYLKDSLEEAYARLQDLRDILLVATLVAMASTVVLGVALARTITGPIRELTRTAALIAGGNFDQKIPVRSGDEIGQLAEMFNRMSRQLKETMSEIQDEKSQAEAILTHMADGLMALNRARRIIRLNPAAQRMFQIQELQALGRRPGELAEGSGLEEALEEAWDRNSALTRQIRLKDRVLQAYITPLTGEGRHSGGTVVVFHDITELERLESMRREFVANVSHELKTPLTTVKSYVETLLDGAADDPEVRDRFLRVVDGETERMARLVRDLLRLTQMDEGTLRWNVRPQDVGELVAETVGRLRVQADRKRLTVLCEVDPETPPALCDYDKIQQVVINLLANAIEFTPNGGQIRVSVAPEGADAVRVTIADTGIGIPAQDLPRIFERFYRVDKARSRSMGGTGLGLSIAKQIVELSGGAIAIASEVDRGTTVTFTLPAARTAEVRPS

SEQ ID NO: 17648 - protein, 447 aa, Actinidia deliciosa
MGKEKVHINIVVIGHVDSGKSTTTGHLIYKLGGIDKRVIERFEKEAAEMNKRSFKYAWVLDKLKAERERGITIDIALWKFETTKYYCTVIDAPGHRDFIKNMITGTSQADCAVLIIDSTTGGFEAGISKDGQTREHALLAFTLGVKQMICCCNKMDATTPKYSKARYDEIVKEVSSYLKKVGYNPDKIPFVPISGFEGDNMIERSTNLDWYKGPTLLDALDLISEPKRPSDKPLRLPLQDVYKIGGIGTVPVGRVETGVIKPGMVVTFGPTGLTTEVKSVEMHHEALLEASPGDNVGFNVKNVAVKDLKRGFVASNSKDDPAKEAANFTSQVIIMNHPGQIGNGYAPVLDCHTSHIAVKFAELLTKIDRRSGKELEKEPKFLKNGDSGMVKMIPTKPMVVETFSEYPPLGRFAVRDMRQTVAVGVIKSVEKKDPTGAKVTKAALKKK

SEQ ID NO: 17649 - protein, 446 aa, Streptococcus agalactiae NEM316
MYQTQTNKEKFVLFLKLFIPVLIYQFANFSATFIDSVMTGQYSQLHLAGVSTASNLWTPFFALLVGMISALVPVVGQHLGRGNKEQIRTEFHQFLYLGLILSLILFLIMQFIAQPVLGSLGLEDEVLAVGRGYLNYMLIGIMPLVLFSICRSFFDALGLTRLSMYLMLLILPFNSFFNYMLIYGKFGMPRLGGAGAGLGTSLTYWAIFIVIIIVMSLHPQIKTYHIWTLERIKAPLIIEDIRLGLPIGLQIFAEVAIFAVVGLFMAKFSSIIIAAHQAAMNFSSLMYAFPLSISTALAITISFEVGAERIQDANTYSRIGRLTAVGITSGTLLFLFLFRENVAAMYNSDPHFVAITAQFLTYSLFFQFADAYAAPVQGILRGYKDTTKPFMIGAGSYWLCALPLAVILEKNSQLGPFAYWIGLITGIFVCGLFLNQRLQKIKKLYY

SEQ ID NO: 17650 - protein, 280 aa, Cytophaga hutchinsonii
MSEYTELQKVSSQVRRDIVRMVHGAKGGHPGGALGCTDLLVLLYFKLMKHDKNFNMDGIGEDIFYLSNGHISAVLYSVLARSGYFPVDELVSHRKINSRLQGHPTPHSHLPGVRMASGSLGQGLSVGCGTAQAKKLNKDERFVYVLMGDGEQQEGQVWEAAMYAPHNKLDNLIGFVDYNGQQIDGPCDKVLSLGDLEGKYKAFGWNVITCDGHDFACLEETILKAQANKGTGIPTMILMKTEMGYGVDYMMGSHKWHGTAPNDAELASALGQLEATLGDY

SEQ ID NO: 17651 - protein, 332 aa, Cytophaga hutchinsonii
MAIINPLLKKDITTMKKYPFTEKKDTRSGFGDGMTELGKTNPNVVALCADLTPSLKLNDFEKQNPERFFQIGIAEANMISMAAGMTIGGKIPFTATFANFSTGRVYDQIRQSVAYSDKNVKICASHAGLTLGEDGATHQILEDIGLMKMLPGMTVINPCDYNQTKAATIAIADHKGPVYLRFGRPALPVFTDPNQKFEIGKAWMVNEGTDVTIIATGHMVWEAILAGQQLEELGISAEIINIHTIKPIDEEAILKSVGKTGCVVTAEEHNILGGLGESVARVLASNLPTPIEFVAVKDTFGESGTPDELMEKYGLKDRHIVEAVQRVIKKKK

SEQ ID NO: 17652 - protein, 518 aa, Lentinula edodes
MFYFSSFLLLGPIGGALAAIGPVTDLHIVNSFIQPDGFNRSGVLAEGVFPGPLITGNKGDNFQINVIDELTNGTMLLSTSIHWHGLFQKTTNWADGPAFVNQCPIAANDSFLYNFNVPDQAGTFWYHSHLSTQYCDGLRGPLVVYDPQDPYADLYDVDDDSTVITLADWYHVPAPQAGAVPTSDATLINGLGRSVNGPADAPFAVVNVVQGSRYRFRLVSISCDPNFLFSIDGHTFTVIEADGVNHEPIVADSIQIFAAQRYSFILTANQTADNYWIRANPNNGHTGFAGGINSAILRYSGAPVADPVTTQTSANLLQETSLVPRENPGAPGNATANGVDVDLNLVLSFVGGRFEINGVSFVPPTVPVLLQILSGATTAAELLPSGSVYTLPLNSVIQLSFNTVAVAAVGGPHPFHLHGHTFDVVRSAGSTEYNYINPPRRDVVSTGAATDNVTIRFTTDNAGPWFLHCHIDWHLEAGFAIVFAEDAPDVAAVNPVPDAWNQLCPTYDALTPAQLGGN

SEQ ID NO: 17653 - protein, 135 aa, Thermobifida fusca YX
MERTLVLIKPDGVRRNIIGEVISRIERKGLKIVAMELRTLDEETAKAHYEEHVEKPFFSSLVEFITGGPLVAMVVEGNRAIEAFRSLAGATDPVLAAPGTIRGDYGLDVQANIVHGSDSTYSAEREIKLFFPDLA

SEQ ID NO: 17654 - protein, 533 aa, Lentinula edodes
MLPFVSLLAAELVCLVYGAEVIRDTTTYGQTVSENLFIVNKQLAPDGFQRSTVLAGLTPSTGSFPGPLISGNKGVRFNLNVTDQLTDPSMVRSTTVHWHGLFQKTTNYADGVAFVSQCPIAANHSFLYDFQVPDQAGTFWYHSHISVQYCDGLRGPLVIYDPQDPQAYLYDVDDETTVLTIADWFHNTSTELIAAAVAPPADATLINGKGRYLGGPAVPLAVINVQQGKRYRFRMISIACDAYHNFSIDGHRLTVIEVDGENHEPATVDNIQIFPGQRYSFVLSATQPVDNYWVRALSSSGVGFSGFTGGLNSGILRYQGAPDADPTTTNSTGVVLTESMLHPLENPGAPGLPFPGGADEVLNLTLGFNLPATFFMNDTQYIPPTVPVLLQILSGAQSPQDLMPPGSVYTLPINKTIEINFFGNATPGGPHPFHLHGHSFDVVRSADNTTYNYKNPVRRDVTAVAIGNQTTIRFVTDNPGPWFLHCHIDLHLEFGLAVVMAEAPSLVKATDVTTPAWDELCPIYDSLTPAQLP

SEQ ID NO: 17655 - protein, 545 aa, Mesorhizobium sp. BNC1
MSPMARYVFITGGVVSSLGKGIASAALGALLQARGYRVRLRKLDPYLNVDPGTMSPYQHGEVFVTDDGAETDLDLGHYERFTGRSANKRDNITTGRIYQNIIEKERRGDYLGATVQVIPHVTDEIKQFVLEGNEEFDFVLCEIGGTVGDIEAMPFLEAIRQLGNELPRGNAVYIHLTLMPWIPAAGELKTKPTQHSVKELRSIGIAPDILLVRADRPVPPEERRKLSLFCNVRESAVIQALDVAHIYDVPMAYHKEGLDSEVLAAFGIDPAPKPRMERWEEVSNRIHNPEGEVTIAIVGKYTGLKDAYKSLNEALTHGGIANRVRVKLDWIESEIFEKEDPAPWLEKVHGILVPGGFGERGSEGKILAAKFARERKVPYFGICFGMQMACIEAARSLAGIEKASSTEFGPTKEPVVGLMTEWLRGNMLEKRTAAGDLGGTMRLGAYEARLQPGSKIAEIYGSEEISERHRHRYEVNIGYREKLEACGLVFAGLSPDGVLPETIEYPDHPWFVGVQYHPELKSRPFEPHPLFASFIAAAVEQSRLV

SEQ ID NO: 17656 - protein, 221 aa, Castanea sativa
DEARYFFQQLISGVCYCHSMQICHRNLKLENTLLDGSPAPRLKICDFGYSKSSLLHSRPKPTVGTPAYIAPEVLSRREYDGKMADVWSCGVTLYVMLVGAYPFEDPADPKNFRKTINRIMAVQYKIPDYVHISQECRHLLSRIFVASSLKEGITIKEIKSHPWFLKTLPRELTEPAQQCTTRKENPSFSLQEFRIYKNGEEAKFLPTSKRGGFGWGGKKKG

SEQ ID NO: 17657 - protein, 505 aa, Lentinula edodes
MLPFVSLLAAELVCLVYGAEVIRDTTSYGQTVSENLFIVNKQLAPDGFQRSTVLAGLTPSTGSFPGPLISGNKGVRFNLNVTDQLTDPSMVRSTTVHWHGLFQKTTNYADGVAFVSQCPIAANHSFLYDFQVPDQAGTFWYHSHISVQYCDGLRGPLVIYDPQDPQAYLYDVDDETTVLTIADWFHNTSTELIAAAVAPPADATLINGKGRYLGGPAVPLAVINVQQGKRYRFRMISIACDANHNFSIDGHRLTVIEVDGENHEPATVDNIQIFPGQRYSFVLDATQPVDNYWVRALSSSGVGTSGFIGGLNSGILRYQGAPDADPTTTNSTGVVLTESMLHPLENPGAPGLPFPGGADEVLNLTLGFNLPATFFMNDTQYIPPTVPVLLQILSGAQSPQDLLPPGSVYTLPINKTIEINFFGNATPGGPHPFHLHGHSFDVVRSADNTTYNYENPVRRDVTSVAIGNQTTIRFVTDNPGPWFLHCLLLKPYRPSFGIRTCRRNG

SEQ ID NO: 17658 - protein, 578 aa, Arabidopsis thaliana
MCGILAVLGCVDNSQAKRSRIIELSRRLRHRGPDWSGLHCYEDCYLAHERLAIVDPTSGDQPLYNEDKTIAVTVNGEIYNHKALRENLKSHQFRTGSDCEVIAHLYEEHGEEFVDMLDGMFAFVLLDTRDKSFIAARDAIGITPLYIGWGLDGSVWFASEMKALSDDCEQFMCFPPGHIYSSKQGGLRRWYNPPWFSEVVPSTPYDPLVVRNTFEKAVIKRLMTDVPFGVLLSGGLDSSLVASVALRHLEKSEAACQWGSKLHTFCIGLKGSPDLKAGREVADYLGTRHHELHFTVQDGIDAIEEVIYHVETYDVTTIRASTPMFLMSRKIKSLGVKMVLSGEGSDEIFGGYLYFHKAPNKKEFHEETCRKIKALHQYDCLRANKSTSAWGVEARVPFLDKEFINVAMSIDPEWKMIRPDLGRIEKWVLRNAFDDEKNPYLPKHILYRQKEQFSDGVGYSWIDGLKDHANKHVSETMLMNASFVFPDNTPLTKEAYYYRTIFEKFFPKSAARATVPGGPSVACSTAKAVEWDAAWSQNLDPSGRAALGVHVSAYGEDKTEDSRPEKLQKLAEKTPAIV

SEQ ID NO: 17659 - protein, 180 aa, Oryza sativa
  misc_feature (22)..(22): Xaa can be any naturally occurring amino acid
  misc_feature (43)..(43): Xaa can be any naturally occurring amino acid
  misc_feature (71)..(72): Xaa can be any naturally occurring amino acid
  unsure (1)..(180): unsure at all Xaa locations
KKTLGILGMGGIGQAVAHRAKXFGMKIQYHNRSQLPPNEENGXRYVSFEELLKTSDVLSLNLALNPKTKHXXGKAQFDQMKDGVIIVNTARGALIDEAALVDALKSGKVWTCGLDVFEEEPKIHPGLLECENAVLLPHVGTATYETQRDMEILVLDNMKSAITKDKLLTQVPEQVSKANM

SEQ ID NO: 17660 - protein, 377 aa, Nepenthes alata
AVIGSGVLSLAWAIAQLGWIAGPAVMLLFSFVIYYTSILLADCYRVDDPIFGNRNYTYMDAVRSNLGGVKVKVCGLIQYLNLIGVAIGYTIAASISMMAIRRSNCFHNSGAKKPCHMSSNPYMIMFGILEIILSQIPDFDQIWWLSIVAAVMSFTYSTIGLSLGIAQVAANKAFKGSLTGISIGAVTQTQKIWRSFQALGDIAFAYSYSIILIEIQDTVKSPPSEAKTMKKASLISIVVTTAFYMLCGCMGYAAFGDIAPGNLLTGFGFYNPFWLLDIANAAIVVHLVGAYQVYCQPLFAFVEKSASGKWPKNAFINKGIKIQIPGFGAYDLNIFRLAWRTAFVITTTIISMLLPFFNDIVGILGAFGFWPFTVYFP

SEQ ID NO: 17661 - protein, 376 aa, Nepenthes alata
AVIGSGVLSLAWATAQLGWIAGPTAMLLFSFITFYTSRLLADCCRSGDSFTGERNPTYMDAVRSNLGGIQVKICGLVQYANLFGVSIGYTIAASISMMAIKRSNCFHASDDKNPCQYPASPFMIIFGLTEIIFAQIPDFHRLWWLSIVAAVMSFTYSTVGVSLGIAQVAENGKIKRSLTGISIGTVSQAQRIWRRFQALGDIAFAYSYSLVLVEIQDTIKSPPSEIKTMKKATVMSIAVTTLIYLLCGCMGYAAFGDLAPGNLLTGFGFYNPYWLLDLANAAIVVHLLGAYQVCCQPIFAFIETTASNAFPDNEFITKEVEIPIPGFKPYKLNLFRLVWRTSFVGVTTTISILLPFSNGVVGLLGALAFWPLTVYY

SEQ ID NO: 17662 - protein, 297 aa, Nepenthes alata
DQFDDTDPREKIKKGSFFNWFYFSVNIGALISSSLIVWVQENLGWALGFGIPAISMGIAIASFFSGTALYRLQKPGGSPLTRMCQVLVASFRKSKLALPEDSNLLYETSDENSVIEGGRKLEHTNDLKCLDKAAVVSDKEIKCEDFSNPWRLCTVTQIEELKILIRMFPIWATGIVFSAIYAQMSTMFVEQGEVMDRTIGSFTIPAASLSMFDTISVIFWVPVYDKILVPLARKSTGKQRGFSELQRMGIGLFISILSMAAAALVEMKRLQLAKELGLVDEDVAVPLSIFWQIPPYF

SEQ ID NO: 17663 - protein, 574 aa, Ostreococcus tauri
MSRTAFEAKTNARRAGRAGVRARAKESTTTIAEIAKSTRPMKIVFVSAECSPWSKTGGLGDVVGSLPVELAKRGHKVMTVSPRYDQYAGAWDTSVHVEALGKSVGFFHEKKQGVDRIFVDHPDFLAKVWGKTGSKLYGEKSGHDFADNQERFAMFCHAALKAPMALTDLGYGEDVIFVANDWHSALVPVILNKVLKPAGMFAKAKCAMTIHNIAFQGRFFPQPMSKYGLPEDAADDFFFEDGYSKVYDENTPAKEQGKEDFDGKIYRKVNWLKAGFMNSDRNLTVSENYAKEIASSKAKGVELDHVIREFGMEGIVNGMDPAEWNPAKDKFIDVPYDKTTVVEGKAAAKQALQAEVGLPLDPTAPVFGYIGRLEEQKGCDIMFEAVPKLLKAVPNAQVVILGTGKKVMETALEKLDAAEPNCAGVVKFSAPLAHFINAGADFLMVPSRFEPCGLIQLHAMQYGTVPIVSSTGGLVDTVKEGVTGYHMGAMDADDLLPADVDAMVETCASAAADFSTPLYKKMSATCISQDLTWAEPAKKWEGVLEEMYFGTPETTKKAEVVVPIAKADALAAQT

SEQ ID NO: 17664 - protein, 567 aa, Oryza sativa (japonica cultivar-group)
MDSARSWLQKLQPRDKDRGKPASPTAARKDGAAAMAEDGEEAISSTTATKVAAAKQFIENHYKDQMRSLEERKERRRMLESKLADPDVSEEEQNNILKDFENREREIMRSRRHKMGVDDFELLTIIGRGAFGEVRLCREKATSNVYAMKKLKKSEMLRRGQVEHVRAERNLLAEVDSAYIVKLYCSFQDEEFLYLVMEYLPGGDMMTLLMRKDTLTDDESRFYVAETILAIESIHKHNYIHRDIKPDNLLLDRTGHLKLSDFGLCKPLDSSSFPNLSEFDYAVGKNINPSMDGDKLLSSSAAPRRTQQEQLLHWQKNRRMLAYSTVGTPDYIAPEVLLKKGYGMECDLWSLGAIMYEMLVGYPPFYSEDPMSTCRKIVNWRSHLKFPEEAKLSPEAKDLISKLLCNADLRLGTKGAHEIKAHPWFKGLEWEKLYQMEAAFIPEVNDELDTQNFEKFEEIAPMQTSSKAGPWRKMLSSKDTNFLNFTYKNLELSDDPEHPGIAQVKKKNNKPTRRTFKSILHEFADTEEEPQSSSLNSTPSQLDQLPESLEPSPHSSISSEDSQSRHR

SEQ ID NO: 17665 - protein, 475 aa, Ostreococcus tauri
MSERRIARGRDARARVVTRMDASAAEAPMRSPNAIANTKTVAAVILGGGAGTRLYPLTKSRAKPAVPIGGAYRLIDVPMSNCLNSGISKVYILTQFNSASLNRHLARTYNFGNGIMYGGNGFVEVLAATQTPGQGGKEWFQGTADAVRQYSWLFNDVKNKDVEDIVILAGDHLYRMDYMKFVEAHRESNADISVGTLPIDEARASDFGLMKIDSTGRIVEFTEKPKGDALQAMKVDTTVLGLTADEAKEKPFIASMGIYVFKKSALVKFLEKDYPEDNDFGGEIIPRAAADGAKVQAYLFNDYWEDIGTMKSFFEANLNLAKDPPNFEFYNAEAPIYTSPRFLPPAKVERCHVKESIISHGASLADCQVEESIIGLRSVVNKGCRIKRAMIIGADFYESDEKKASLLASGEVPVGIGEGTIIENAIIDKNARVGKNCVITNAAGVEDLADEERGVFIRNGIITILRNCTIPDGTI

SEQ ID NO: 17666 - protein, 95 aa, Protea effusa
LYAGINISGTNGEVMPGQWEYQVGPSVGIEAGDHIWCSRYLLERITEQAGVVLTLDPKPIEGDWNGAGCHTNYSTKSMREDGGFEVIKKAILNLS

SEQ ID NO: 17667 - protein, 461 aa, Zea mays
MAPANVRAAQAQAQAPSADRRLSTLVGHLLPSSPRRAAADTSATSTLESFPTMASQGSSVFAALEQAPEDPILGVTVGYNKDPSPVKVNLGVGAYRTEEGKPLVLNVVRRAEQMLINNPSRVKEYLPITGLAEFNKLSAKLIFGADSPAIQENRVATVQCLSGTGSLRVGGEFLARHYHERTIYIPQPTWGNHPKVFTLSGLNVRSYRYYDPATCSLHFEGLLEDLGSAPSGSIVLLHACAHNPTGVDPTIEQWEQIRQLMRSKSLLPFFDSAYQGFASGSLDKDAQSVRMFVADGGELLMAQSYAKNMGLYGERVGALSIVCKSADVAVRVESQLKLVIRPMYSNPPLHGASIVATILRDSEMFNEWTLELKAMADRIINMRQQLFNALKSRGTPGDWSHIIKQIGMFTFTGLNSEQVAFMRQEYHIYMTSDGRISMAGLSMRTVPHLADAIHAAVTQLK

SEQ ID NO: 17668 - protein, 466 aa, Vitis vinifera
MALATRRFFNTICRGTRSFGALPEGIPSSSQHLINLEYEYSAHNYHPIPIVFSQAKGSTIWDPEGKKYLDFLSAYSAVNQGHCHPKVLKALVEQAERLTLSSRAFYNDRFPIFAERLMNMFGYDMVLPMNTGAEGVETALKLARKWGYEKKKIPKDQAIIVSCCGLLHGRTLAVISMSCDNEATRGFGPLLPGHLKVDFGDEVALEKIFEENGDRIAGFLFEPIQGEAGVIIPPDGYLKAVRELCSKFNILMIADEIQSGLGRSGRMLACDWAEVRPDVVILGKALGGGVIAVSAVLADKDVMLSIQPGEHGSTFGVNPLASAVAVASLDVITEEGLSERSDQMGQELRNQLMKIHQLFPNLIKEVRGKGLFNAVELNSKALFPVSAYDICLKLKERGVLAKPTHDTIIRLTPPLSISLDELQEGSNALRDVMEFDVPKMQKAKHKRVPQTTTNICDRCGRNMDDS

SEQ ID NO: 17669 - protein, 265 aa, Oryza sativa
MAQLPPKIPVAAPGHHQHWASAGGAGDAAWADEFAEFAASRRGAHRRSLSDSVAFVEVAPAGCGAGGEFDRLDDDQLMSMFPDEGGSSAPGSDNGGSDSDGGGDKHAAAQSDDGQHAAGEPTQEQAAATSPTELIRDPKRVKRILANRQSAQRSRVRKLQYISELERSVTTLQNEVSVLSPRVAFLDQQRTILTVGNSHLKQRIAALAQDKIFKDAHQEALRKEIERLRQVYQQQNTKLSGGLAADHAHVHGGPPPVRAEKELMS

SEQ ID NO: 17670 - protein, 426 aa, Zea mays
GLAGTQASCPTAARVLLRRNARSRFLHFPNPTQPCTSRRRRRRRRAAVSGKMRPILMKGHERPLTFLKYNRDGDLLFSCAKDHTPTVWYADNGDRLGTYRGHNGAVWSCDVSRHSARLITGSADQTAKLWDVKTGKELFTFRFDAPARSVDLAIGDHLAVITTDSFMGNMPTAQVKRIAEDLQDQTEESALVISGITGRINRAVWGPGNRTIITAGEDATIRIWDSETGKLLKESDKEVGHQKAISSLSKSLDWSHFLTGSLDKSAKLWDARTLTLIKTYVTERPVNAVDISPTLDHVVIGGGQDAMECYYDRIACLENLRPNFSTKILKKKIGGGKGHFGTIHGINILSLRGRSFFRGGGRRGNWGGLPPLFGPCRIFPTSPKNGKPFIKIFLHRGVANLEKKNPPPQTTPPGREKKKKYNSFFF

SEQ ID NO: 17671 - protein, 130 aa, Arabidopsis thaliana; identical to SEQ ID NO: 1444

SEQ ID NO: 17672 - protein, 107 aa, Castanea sativa
NPTEAELRDMINEVDADGNGTIGFPEFLNLMARKMKDTDSEEELKEAFRVFDKDQNGFISAAELRHVMTNLGEKLTDEEVDEMIREADVDGDGQINYEEFVKVMMAK

SEQ ID NO: 17673 - protein, 425 aa, Bacillus subtilis
MSAKQVSKDEEKEALNLFLSTQTIIKEALRKLGYPGDMYELMKEPQRMLTVRIPVKMDNGSVKVFTGYRSQHNDAVGPTKGGVRFHPEVNEEEVKALSIWMTLKCGIANLPYGGGKGGIICDPRTMSFGELERLSRGYVRAISQIVGPTKDIPAPDVYTNSQIMAWMMDEYSRLREFDSPGFITGKPLVLGGSQGRETATAQGVTICIEEAVKKKGIKLQNARIIIQGFGNAGSFLAKFMHDAGAKVIGISDANGGLYNPDGLDIPYLLDKRDSFGMVTNLFTDVITNEELLEKDCDILVPAAISNQITAKNAHNIQASIVVERANGPTTIDATKILNERGVLLVPDILASAGGVTVSYFEWVQNNQGYYWSEEEVAEKLRSVMVSSFETIYQTAATHKVDMRLAAYMTGIRKSAEASFPRMGLI

SEQ ID NO: 17674 - protein, 268 aa, Xylella fastidiosa Ann-1
MHRIDETFRRLRAQSRKALIPFITAGDPSLEAAVPVMHALVRAGADVIELGVPFSDPMADGPVIQHSSERALQRGVGLAYVLQTVDVFRQSDAVTPVVLMGYLNPLEIYGIARFTQQALASGVDGVLLVDLPPEEADEIRAIFSAAGLALIVLASPTTSASRLATLSEVAQGYLYYVSFAGVTGADRLDAQSAGDRLRGLRAQTQVPVVVGFGIRDAASATVVAVDADGVVVGSALVTALSDAPDVDTACRRADAFLAPLRQALDAVK

SEQ ID NO: 17675 - protein, 148 aa, Castanea sativa
MAGQLTGQIAEFKGIFSLFDKDGDGCITTKELGTVMRSLGQNPTEAELQDMINEVDADQNGTIDFSEFLNLMARKMKDTDSEEELKEAFKVFDKDQNGFISAAELRHVMTNLGEKLTDEEVDEMIQKADLDGDGQVNYQEFVRMMLAK

SEQ ID NO: 17676 - protein, 616 aa, Debaryomyces hansenii CBS767
MVLFRTINRFANPNGGLGLPVGGRRRRLFIPPSTNQPLFSYGGGEDQRSFLSLGESGSVLTHTENEISDTASVSTSRSLPSTLKSTNEDQESFHSWLLEEHQRRYSAANSEDDENDEDGWSRGSGRSRSLLNSSSRNSHSTGKSSYNELEDFANLQTTFAIEMKMLIRYAFPLIITFLLEHFFSIVCLLVVGHIGKNELAAVSLATMSSTITFAIFEGIATALDTLCPQAYGAGNYELVGIHVQRCIMFSLVVYIPCGLLWWYSASVLKFIIDSEEVLRLTSSFLRILILGAPAYIIFENSKRFLQAQGIFEAGTGILVISLPINVLLSTFLVWNKNFGLGFIGAPIATVINFWFIDFLLIMYVMFVDGDKCWYGIAPMKEIFQQWGSLSHLAIPGIVMIESEYMAYEIMTLFASYFGTTELAAQSAVLSIASLSYMVPFAISIAASTRIANFIGGQNMASAKMATKASLTLSVIAGNINFLILFTFKRQIAKLFTKDEGVTELIVALFNPLVAVLEIFDGIASVANGVLRAQGLQKIGGIINFFVYYAFAIPLAIVLSRVADLKLLGLWLGLGSGMILIGLSETLVIFNSDWDKILMNAGLMNEAYLDVEESIED

SEQ ID NO: 17677 - protein, 334 aa, Debaryomyces hansenii CBS767
MIPLRSKKIRFSSALLSFRRSVQSSSDPLLSDPFHDHKKMVRGSNKQFPKPHFISFDVFGTLYTPKAPIAQQYHVVAMEEFGINKSLESIEKEFPKIYSEIYERYPNYGKRSSDIKNCDEWWLEIIVKLFDLPHYTKDETSAKLCRRLLTYFTGREAYMVYDDVIPTLTKLKENNINLVVSSNSDLRVMEILKNLGLMDFFAKDHIYLSYDLDASKPDKKFFDSVYQRFLASTLETPSDVSKQLYLENCWHIGDSEDKDFLGPVRSGWNAVLLDRENTSQFLIHSHSPQKPITKSLFAEHSDEGINSPELKVIANNRVVLRNLDQLLAIFGLHD

SEQ ID NO: 17678 - protein, 332 aa, Arabidopsis thaliana
MAANGVATAGRQVSEKEADIQIMLSADVHLGTKNCNYQMERYVFKRRDDGIYIINLGKTWDKLQMAARVIVAIENPKDIIVQSARPYGQRAVLKFAQYTGVNAIAGRHTPGTFTNQMQTSFSEPRLLILTDPRTDHQPIKEGALGNIPTIAFCDTDSPMGFVDIGIPANNKGKHSIGCLFWLLARMVLQMRGTILAAQKWDVMVNSRNTIRTCVSPTPDKDLDLFLLCRWICFFTGSPKKQSKRVMKKLKYRPIMEWLVVTSGPLLKYLMLHGLVKSNSQFLLHLQLALPLLLDGRLLLFQLLVGSKSSLISLARTRLDVDLIFLFSRFGED

SEQ ID NO: 17679 - protein, 526 aa, ASPERGILLUS NIDULANS FGSC A4
MAASSSLDHLSNRMKLEWHSKLNTEMVPAKNFRRTSIICTIGPKTNSVEKINALRRAGLNVVRMNFSHGSYEYHQSVIDHAREAEKQQAGRPVAIALDTKGPEIRTGNTVGDKDIPIKAGHEMNISTDEQYATASDDQNMYVDYKNITKVISAGKLIYVDDGILSFEVLEVVDDKTLRVRCLNNGNISSRKGVNLPGTDVDLPALSEKDISDLKFGVKNKVDMVFASFIRRGSDIRHIREVLGEEGREIQIIAKIENQQGVNNFDEILEETDGVMVARGDLGIEIPAPKVFIAQKMMIAKCNIKGKPVICATQMLESMTYNPRPTRAEVSDVANAVLDGADCVMLSGETAKGNYPCEAVTMMSETCLLAEVAIPHFNVFDELRNLAPRPTDTVESIAMAAVSASLELNAGAIVVLTTSGNTARMISKYRPVCPIIMVSRNPAATRYSHLYRGVWPFYFPEKKPDFNVKIWQEDVDRRLKWGINHGLKLGIINKGDNIVCVQGWRGGMGHTNTVRVVPAEENLGLSE

SEQ ID NO: 17680 - protein, 429 aa, Mesorhizobium sp. BNC1
MANSTVTLELGGNSSEYPVRQASIGPGVFDISSLYKQTGMFTYDPGFTSTASCESKITYIDGDEGLLLHRGYPIDQLAEQGDFLEVCYLLLYGELPTKAQKEDFDLRVTRHTMIHEQMSRFFTGFRRDAHPMAVMCGVVGALSAFYHDSTDISDPHQRMVASIRMIAKMPTIAAMAYKYHIGQPFMYPRNELSYAANFLHMCFAVPCEEYKVNPVLARAMDRIFILHADHEQNASTSTVRLAGSSGANPFACIAAGIACLWGPAHGGANEAALNMLAEIGSVDRIPEYIARAKDKNDPFRLMGFGHRVYKNYDPRAKIMQKTCHEVLSELGIKDDPQLDIAMELERIALTDEYFIEKKLYPNIDFYSGITLKALGFPTTMFTVLFAVARTVGWIAQWKEMIEDPQQKIGRPRQLYTGAPQRDYVPIAKR

SEQ ID NO: 17681 - protein, 594 aa, Emericella nidulans
MGFLRRRSMMQALLLTIIFSAYAYGAKVKQQGKWFFPINLTWSDISLWDSRKMILANGQFPAPALRLKQGDDVEFLVNNEMPFSTTVHFHGTPWSDGVPGLSQRPIPPGESFLYKWRATNYGSYFYHAHSRGQQEDGLYGAIHILADDSIERPFALISEDEQEIQSMRRAESESIPIMLSDVRSLTSAEIWDAEKAMGRDALCANALLVNGKGSVTCLGQQTIDEYTSVAQRGVLGNQSLTDIGCLPPDNLLAQGPWSHNLSAIPPTVFSDCIPSHGLTERFYPDATNRYASFDLVSAALVSTITFSIDEHPMYVYAIDGSYINPIEADGITITNGARYSVLVKLDKPRGDYTIRVVNTGLNQILHGNALMTYHNGIGPIQQHPSTPSIDLVGTPTSNHTLLNESMIIPFAAQDVSRVDVAQTLTLTLERYNASYTWTMGDSSFPLQLEEESPLLFYPQTASKNFTATSKNGTWVDVVFDVANAIQPPHPIHKHSNKFYVLGGGNGKWNYTSVAEAAKHMPESFNFETPQIRDTFATLPAATGPTWLALRYHVVNPGPFLLHCHIQIHQSGGMALALLDGIDEWPEIPEEYQLA

SEQ ID NO: 17682 - protein, 429 aa, uncultured bacterium pCosAS1
MTTDDLAFDRQHIWHPYTSMTQPLPVYPVVEAHGCELTLASGEQLVDGMSSWWAAIHGYNHPRLNAAMKAQIDRMSHVMFGGITHQPAVDLCRRLVAMTPETLECVFPADSGSVAVEVAMKMALQYWHAKGESRQRFITFRNGYHGDTFGAMSVCDPDNSMHSLWKGYLPENLFAPAPQSRFDGAWDEMDMVGLAPLMAAHRHEIAAVILEPIVQGAGGMRMYHPEWLKRIRRMCDREGILLIADEIATGFGRTGKLFACEHAGITPDILCLGKALTGGTMTMSATLTTRQVAETISNGEAGCFMHGPTFMGNPLACAVASESLALLESGEWQDQVAAIESQLQEELAVARDSEFVADVRVLGAIGVVETTHPVNMAALQRFFVARGVWVRPFGKLIYLMPPYVIRPDQLSKLTRAVVDAVQAPAHFTR

SEQ ID NO: 17683 - protein, 85 aa, Lactobacillus delbrueckii subsp. lactis
PQDTSRQSSTEMMTARGKIDLLIPRGGRGLIRAVVDNAKVPVIETGTGICHIYVNKAANLDEAVKITANAKMSRPSVCNAAEVCL

SEQ ID NO: 17684 - protein, 492 aa, Mesorhizobium sp. BNC1
MKVRFFVLRVLFVLCALSLPAHAQDRPAESLLDPLRQLLRGGEDASKPTTGEAQRRVPFSQQEIQLSFAPLVRQVAPAVVNVYASTRVQARSPFMGDPFFERFFDFPQMPPRVQSSLGSGVLVDASGIVVTNYHVIREADEVKVALADGREFESTILLKDEGLDLAVLKVEGSDPFPAAALGDSEALEVGDLVLAIGNPFGVGQTTTSGIVSAVARSLGGVSDFGFFIQTDAAINPGNSGGALINMAGEVIGINTAIYSRSGGSIGIGFAIPANIVRAVVESAKNGKDFFERPYLGASFDRVTPNIAEALGMARPAGALVTNIAPDSPAAKAGLKSGDVVVAVDGRPVDTPEALDYRLATVPIGETAQVEVLRNGEEMALSMPVERAPEGDGRELEIGGVGPFAGARVAEVSPALAQRLRLPVTGKGVVITDLARNSPAASIGLRPGDIVRELNGEEVTDAAQMKALAEADGRWWRFTIDRGGQIIRQTMRF

SEQ ID NO: 17685 - protein, 385 aa, uncultured bacterium pCosAS1
MTWQQRIDAALDARRAADALRVRTPVENGAGRFLIREQRRYCNFSGNDYLGLSQHPEIIRAWQQGAEQYGVGSGGSGHVSGYTHAHQALEEHLAGWLGYPRALLFISGFAANQALIAALTDKEDRIVADRLSHASLLEAASHSPAQLRRFAHNDVAQLDSLLDKPCHGQQLVVTEGIFSMDGDSAPLGVIHAAAQRQGSWLLVDDAHGIGVTGPEGRGSAASQGVKPELLVVTFGKGVGVSGAAVLCSDAVADYLLQFARHLIYSTSMPPAQAVALLAAFNVIRSDEDNARRQRLAALIDQFRAGVRDLPVQITASQSAIQPLIVGENARALHLAQRLRERGIWVTAIRPPTVPAGTARLRLTLTAAHQPADITALVEALHVAGE

SEQ ID NO: 17686 - protein, 311 aa, Arabidopsis thaliana
MAAPIRFFELNTGAKLPCVGLGTYAMVATAIEQAIKIGYRHIDCASIYGNEKEIGGVLKKLIGDGFVKREELFITSKLWSNDHLPEDVPKALEKTLQDLQIDYVDLYLIHWPASLKKESLMPTPEMLTKPDITSTWKAMEALYDSGKARAIGVSNFSSKKLTDLLNVARVTPAVNQVECHPVWQQQGLHELCKSKGVHLSGYSPLGSQSKGEVRLKVLQNPIVTEVAEKLGKTTAQVALRWGLQTGHSVLPKSSSGARLKENLDVFDWSIPEDLFTKFSNIPQEKFCRATEFAHETHGFYKTIEELWDGEI

SEQ ID NO: 17687 - protein, 566 aa, Candida albicans SC5314
MLRVNSKSSIKTFVRHLSHKELKFGVEGRAALLKGVNTLADAVSVTLGPKGRNVLIEQQFGAPKITKDGVTVAKAITLEDKFEDLGAKLLQEVASKTNESAGDGTTSATVLGRSIFTESVKNVAAGCNPMDLRRGSQAAVEAVIEFLQKNKKEITTSEEIAQVATISANGDKHIGDLLANAMEKVGKEGVITVKEGKTLEDELEVTEGMKFDRGFISPYFITNTKTGKVEFENPLILLSEKKISSIQDILPSLELSNQTRRPLLIIAEDVDGEALAACILNKLRGQVQVCAVKAPGFGDNRKNTLGDIAILSGGTVFTEELDIKPENATIEQLGSAGAVTITKEDTVLLNGEGSKDNLEARCEQIRSVIADVHTTEYEKEKLQERLAKLSGGVAVIKVGGASEVEVGEKKDRYEDALNATRAAVEEGILPGGGTALIKATKILDEVKEKAVNFDQKLGVDTIRAAITKPAKRIIENAGEEGAVIVGKIYDEPEFNKGYDSQKGEFTDMIAAGIIDPFKVVKNGLVDASGVASLLATTECAIVDAPQPKGSPAAPPAPGMGGMPGMF

SEQ ID NO: 17688 - protein, 185 aa, Arabidopsis thaliana
  misc_feature (7)..(7): Xaa can be any naturally occurring amino acid
  unsure (1)..(185): unsure at all Xaa locations
QETNKDXDADAEIKVKWKQDAEFKVNWKRVAITSMFGFGFVGPVGHFWYEGLDKFIKLKLRYVPKSTRFVAAKVAMDGLIFGPVDLLVFFTYMGFATGKNTAEVKEGLKRDFLPALALEGGAWPLLQIANFRYVPVQYQLLYVNIFCLVDSAFLSWVEQQKDAAWKQWFTSSFQPLKERGGQGGV

SEQ ID NO: 17689 - protein, 238 aa, Frankia sp. EAN1pec
DRGIAAMRAMVAAGVDVVEVGLPYSDPTMDGPVIQDAADTALRGGVTTRDVLRTVEAVAETGAPTLVMTYWNPVERYGMEAFAADLAAAGGAGAITPDLPPEEAGPWLAASATHGLDPVFLVAPSSTTERLRLVTAHSGGFVYAASTMGVTGARAAVGVKAAGLVARVREVTDLPVAVGLGVSTGAQASEVAGFADGVIVGSALVRALAADARDGADGVGAIERLAAELAAGVRSATA

SEQ ID NO: 17690 - protein, 336 aa, Alkaliphilus metalliredigenes QYMF
AGVNFFSNFTNLAVLIGGGIFIYQGQMTTGDLFAFLLYVSMFMQPIRRLTTLVENYQKGMAGFSRFVEVLELDPEIVDSENAKEMGRAEGRINFQHVTFSYNNQQNVLQDITMEVKTGETVAFVGPSGGGKTTLCSLIPRFYEVEQGSIQIDGVDIKEITQSSLRENIGIVQQDVFLFSGTVKENIAYGKQNPTDEEVMEAAKKANAHEFIMKLENGYDTYIGERGVKLSGGQKQRLSIARIFLKNPPILILDEATSALDNETEKIIQQSLFSLSENRTTLVIAHRLATIRNADRIMVLTDEGIAEEGSHEELLQQEGIYARLYKAQFDGFIPDVA

SEQ ID NO: 17691 - protein, 527 aa, Zea mays
  misc_feature (82)..(82): Xaa can be any naturally occurring amino acid
  unsure (1)..(527): unsure at all Xaa locations
MAFLAPPQFKWPLSTRAAAVFREPTGGAGSRPSRINCSFSSTAVVDAECLSVGPPPSPHRTLPGCFGEALLNKEAVVAAAAXKPSLWLAQAEVAGEVARMAQNDHPAALPPRDDTVDSFLSREVLRSEVGLDARRAGLVEMLEGEEHSSIFSDESEDDDDGGHSIAVTVKSARRSERRARRVRAAMKTAKCSSSMKPVGASSTRRKRLKGCLTPLGCLYKMTGPRLLTAEQEVEFSEGIQDLLKLEAIQKEVAQYNAGEPTFSQWAAAAGTDENTLRRRLNHGVYCKNRMVKSNVRLVISIAKEHEGPGMEFSDLIQDGMQGLIRGAEKFDASKGFRFSTYSHWWIKQAIRKSVLEQTQIIRLPAHMAEASSRVKECCRRLGRELKRLPSNEEIAVDTGMTIRRVEAAMSLPKYSVSFTSKVGCTDVTYQEIMPDTSAETAEETLHRWLMKKDVNTALDSLSPRKKQVMRYRFGIEGGRARTLHDIGQLMGVSRERIRQIELGAFRKLRSKNRLQSLQHYLRPAESW

SEQ ID NO: 17692 - protein, 128 aa, Oryza sativa (japonica cultivar-group)
MQVWPIEGIKKFETLSYLPPLTVEDLLKQIEYLLRSKWVPCLEFSKVGFVYRENHRSPGYYDGRYWTMWKLPMFGCTDATQVLKELEEAKKAYPDAFVRIIGFDNVRQVQLISFIAYKPPGCEESGGN

SEQ ID NO: 17693 - protein, 165 aa, Triticum aestivum
VAGSAQGGYLKDLSAPSGFKYVEGSRPWKLVERVDVALPSATQNELDEEDAKALVAAGCGFVAEGANMPCTLEAINVFEAARKEKGSKGVWYGPGKAANCGGVAVSGLEMAQNSARLQWTEEEVDAKLKNIMQTAFKTCYETAQEFAGEGELPSLVSGANIAGFL

SEQ ID NO: 17694 - protein, 404 aa, Synechocystis sp. PCC 6803
MTKPSNDEPPLTNVRDLEAMLPLEEEDLTADSQDLEYTAVAHRQQFSTDLVRLYLQDIGRIPLLKRDEEVHIAQQVQSYLRLVEIQNRAAESDAAIDQYQTAIAVHDQLLVQLGHRPSYERWAKILGQTVATLKQTLKSGKKRWAELAGLTVEELENIEKQGITAKAHMIKANLRLVVSVAKKYQNRGLELLDLIQEGTLGLERAVEKFDPTKGYRFSTYSYWWIRQGITRAIATQSRMIRLPVHITEKLNKIKRAQRKISQEKGHTPKIDEVAEELGMTPEQVREVLTQVPRSVSLELKVGQDKDTELMDLLETDTQSPEDELMREALQNDMQEILLDLTPREQEVIALRFGFQDGVAHSLSEIGRILNLSRERVRQIEAKALQKLRHPRRRDRIRDYYENLG

SEQ ID NO: 17695 - protein, 348 aa, GIBBERELLA ZEAE PH-1
MPSAYPKSILPPSLVAVTGANGFIAQHCIALLLSKGYRVVGTVRSATKAEQVFDLHHKNPNLSVRVVEDITSTASYLSAFGPTGPDAILHLAAPFNYDATDLEDELMIPAVKGSTAILTAARQLGSVKRIVHTNSFAGIYDASKGLQPGKIYTAKDWSPLTYEDGVTAPNAAVAYRASKTVAEQVAWKWMNDNPSAQFDLVSLNPAMVFGPWLEGAIPGSPKQLNTSNKIVYGIISAGEEGPIPPTRGPVWVSVEDVALAHLRAIQVPEAGGERYLLAAGVYCNQEIADIARKIAGKYKNKIPRGSPGLREATTHFGVDASETQKGLGIEWQSLESSTNIKPLITQVP

SEQ ID NO: 17696 - protein, 88 aa, Arabidopsis thaliana
  misc_feature (58)..(58): Xaa can be any naturally occurring amino acid
  unsure (1)..(88): unsure at all Xaa locations
MDSVFSNVARAPEDPILGVTAAYNNDPSPVKINLGVGGYRTEEGKSLVLDVARKAQQXLLNDPSRVKEYIPLAGISDFSKFSAKLIVR

SEQ ID NO: 17697 - protein, 223 aa, Picrophilus torridus DSM 9790
MKIFLDTANIDEIKDAIEYGLIDGVTTNPTLISREQKEGRGFSDIVKDILKTVDGPVSIEVVATDYQGMIDQATKIHNLGPNAVIKIPMTLAGLRAMKTLSEKHIPVNCTLVFNAIQATLAARNGAEYVSPFVGRLDDIGEDGMEIINQIRTIYNNYSFKTKILVASVRNPVHVLRSMIIGADVITMPYDVIKKLAMHPKTDEGLSKFLSDWKKVSPDGSFPI

SEQ ID NO: 17698 - protein, 624 aa, Methylococcus capsulatus str. Bath
MCGISGLVQLEGVADTSAMRRSVETMVKALAHRGPDDSGVAGDGSAVFGMARLAIRGCHDGRQPMVDAETGVMMVCNGEIDNHAELRGWLAERGRAVEHATDVAVIPGLYLELGDGFVERLVGAFALAVWDPRRGRLLLARDRAGERPLFYACRDGRVSFASQAAALVAGSPEPYPADEAAVQAFLKAGYFEAPASPFAGMRKVLPGERIAIDVKGVERSRYWRLNFTRGPARKNPLDEFDAVFREAVRRQSEVEVDFGAFLSGGVDSSLVTAVMRSVHPDRKLKAFGLRFSESSYDEGVFAERVAESLGVDYTPIWVRPEDFPETLADLVRQSGEPLADPAWVPTALLARRASDEVRVALVGEGADELFGGYPTYFGARLAERYSRLPGGLRALIRKAVEAWPVSDKKVTVSFLLKRFVQGDELDFLARHVLWTSSIPPALLRRLGVTPPETPHVAGPQETMLDRLQQHDLETSLAEGLLTKADRASMRSALELRAPFLDKDVIEFAATLPERERVQGLETKVFLKRVALRYLPKDIVYRKKRGLSVPLSAWLRGPLHDWAEARISSPRLEELGINRAAALELLREHERRSADHARALWTLIVVSEWLEWKAGMEAHPAAFTA

SEQ ID NO: 17699 - protein, 149 aa, Vitis vinifera
MADQLTDDQISEFKEAFSLFDKDGDGCIATKELGTVMRSLGQNPTEAELQDMINEVDADGNGTIDFPESLNLMARKMKDTDSEEELKKSFRVFDKDQNGFISAAELRHVMTNLGEKLTDEEVDEMIREADVDGDGQINYEEFVKVMMAK

SEQ ID NO: 17700 - protein, 1243 aa, Agrobacterium tumefaciens str. C58
MRRHPEIFDSTGMDCRGVEYRLTEGCGLLEKACRAVAALELPACIKDGELRYVVVNEAYGRVMGRAPSAFEGQTSLSLSGDIRDAEREDRERRSLVFATDEAIACHAALSAQSHMLRCERFIGDDGSLFLFEVFEEMPSAVSRKSAAVGGASDILFSSGVMDFIDAGIVVYDRDNQLVYCNARFAEFYSDLDIELKPGIRLEALMKTLYSSSVYRCAKNDGPSFEDWMQKQLHDFSLPYLERVEQFADGRWVRMVNKRLENGMLVGLRVDVTEFKAHETLLSTQIRETWLLRAALEQLPVGVFLRDQDRRLTYANAAYNTFLGGNLADHIGKTETEMFPQNGPRFRQENERILQTGEAIERTGNMPWRDGGAVPVITRLGRVATPDDEYYLVGSVTDVSLLQDREKALIAAQAEAEALHRQLQAVLRALPVGVLLLNADLVIEYVNPFFYQVWGEIGGEKSLVGKSYREFMEMNFDSGLYDYGDRPFDDVYEERVQRLLKADAFAPREVRSKSGKVTVISKTRLEGGKILSTYADVTDVRMRDAEISKARAELERVGEYMQGATRAMAQGLVLVEQGTIIMSNEAMARMFDVPPHLLEKGRNWAGFFAHCAGRGDFGTAAEAGETLRIWRENIAANRPFSWLVHVAGKSWLNLEATNSSGNYWLIIVTDVTEMKVREEELQRLLSRAEAADRAKSEFLANMSHEIRTPMNGVLGMAELLAKSKLDTRQKTFTDIIVKSGNALLTIINDILDFSKIEAGQMKLRSVPFDPAEAVEDVVSLLSSAALEKDIELIVRIDASVSGKVIGDAGRFRQIVTNIVGNAVKFTETGHVLVELSAQSAEASESIFSLRVEDSGIGIPVDKLETIFDKFSQVDGSATRRHEGTGLGLAITVGLVGLFDGKINVVSEVGRGSAFEVDIPFQVMERRRDVPLLSVAIDDIRVLVIDDNDVNRRILTEQLRSWGIDGHAVENGPSGIAVLQEAASLGFAIDAIILDYHMPVMNGLDVVERIRADKRFDDIAIVFLTSMDVVGDETLFTDLSVQAHLMKPARARLLRSTLFDVVRDVRLKRIRQHPLAQGTGGEKARPESRPAEKKQRAEAPATVPERSRPCLLDVLVAEDNDVNQIVFSQILQQAGLRFLIVGNGKRAVQAWEEYNPALILMDVSMPVMNGHQATQAIRAAEQAAGDSRHVPVIGVTAHTQEADRERCLEAGMDDYLSKPISPESLEDKIAQWLGENVLRRDAPGV

SEQ ID NO: 17701 - protein, 251 aa, Glycine max
IFRKKNTIVLSLPTKALKFLSSSLHSRKKHDELRRLPEGNRGALRGNSRCFRGVSLGLGLFLFCFSKDDAEALLSQVTLIDPHARQGSKVVPVALNKVLPLSLSVSVLYFSLAFGLLCFLLQVFQLKVNSVAFRLIPEFSQVKNALKEREKSGFASSGFSGVPVFQSRNLILKSQSKRFRPLFSRKEDLENTLKSAAREQNKLNSTMRKGDIQVATLEDVIKEMKENSTSNWDDVIFIPPGFDVSDDSNEQ

SEQ ID NO: 17702 - protein, 142 aa, Photobacterium profundum SS9
MSVSAKMDKIGFKMTDKTDAYWRKKLTEDQYHICREKGTEASFSGTLLHNRETGLYSCTCCEAPLFVSDNKYDSGCGWPSFDAPVNKEAVRYIEDNSHGMLRTEIRCANCDSHLGHVFPDGPNTTGERYCVNSVSLVFNTEE

SEQ ID NO: 17703 - protein, 366 aa, Photobacterium profundum SS9
MTLSNLSSFFTCRVTKDSVILPPVIFHNKLSRGATVMTIKVGINGFGRIGRFVFRASVERNDIEVVGINDLIDVEYMAYMLKYDSTHGRFNGTVEVVDGNLVVNGNTVRVTAVRNPEELKWDEIGVDVVAEATGLFLTDETARKHITAGAKKVVLTGPSGDVPMFVMGVNSADYAGQDIVSNASCTTNCLAPIAKVINDKWGIESGLMTTVHATTATQKTVDGPSMKDWRGGRGASQNIIPSSTGAAKAVGKVIPELNGLLTGMAFRVPTANVSVVDLTVNLKTAATYEEICAEMKRASENEFAGVLGYTEDAVVSQDFIGEVQTSVFDAKAGVALTDKFVKLVSWYDNEIGYSNKVLDLIAHVSK

SEQ ID NO: 17704 - protein, 492 aa, Zantedeschia aethiopica
MDPYRQRPSSAFNSPFWTTNSGAPVWNNNNSLTVGARGPILLEDYHLLEKLAQFDRERIPERVVHARGASAKGFFEVTHDVSHLTCADFLRAPGVQTPVIVRFSTVIHERGSPETLRDPRGFAVKFYTREGNFDLVGNNFPVFFIRDGIKFPDMVHALKPNPKTHIQENWRILDFFSHHPESLHMFTFLFDDIGIPTDYRHMDGSGVHTYTLVSKEGKAHYVKFHWKPTCGVKSLLDDEAVVVGGANHSHATKDLTDAIAAGNYPEWKLYIQIMDPDHEDRFDFDPLDVTKTWPEDILPLQPVGRMVLNKNIDNFFAENEQLAFCPAIIVPGIYYSDDKLLQTRIFSYADTQRHRLGPNYLMLPANAPKCAHHNNHHEGFMNFMHRDEEVNYFPSRYDPVRHAEQFPIPPRILNGGREKCCIQKENNFKQPGEKYRSWAPDRQERFIKRWIDALSDPRVTHEIRTIWITYWSQCDKFLGQKLASRLNIKPTL

SEQ ID NO: 17705 - protein, 146 aa, Brassica napus
LKEDAVKFYAAQVVVALEYLHCQGIIYRDLKPENVLIQGNGDISLTDFDLSCLTSCRPQLLIPSIDEKKKKKQQKSQQSPVFMAEPMRASNSFVGTEEYIAPEIITGAGHTCAVDWWALGILMYEMLYGYTPFRGKTRQKTFANVL

SEQ ID NO: 17706 - protein, 511 aa, Burkholderia sp. 383
MSSTSHRVLRHAVAAICVALSASPHAAELTRDTGAPVGDNENSQTAGPAGPVLLQDSALIEKLQRFDRERIPERVVHARGTGAFGEFVPTADISNLTKAKVFTPGTRTPVFVRFSTVMGYRGSPEQARDPRGFAVKFYTQQGNWDMVGINWPVFFIRDGIKFPDFVHANKPSAVTGVQDPNLAFDFFANTPEATNMLTMLYTNAGMPDSYRHMDGFAVHAFKFVNAHGDVHYVKFHWKSQQGVHGLRPQDIDASIGRDWNMMTNDLYGALKQGDFPKWDLYVQVLTPQDLNRFDFDALDDTKVWTGVPERKIGTMTLNRVPDNYFQSTEESAFAPSRLVPGIEPSEDRMLQDRLFAYADTQMYRLGANYMDLPINRPVVPVVNNNQDGKMNAGDRKGEVNYEPSTLHELAPNPQYKSVRMALGGTTQQEAIHKKLRFRQAGEYYRGLSQQDRDDLITALSGDLGKVTNAHNQYAMLSYFYKADADYGTRLAQAVHADVGQVQALAAKLSEN

SEQ ID NO: 17707 - protein, 385 aa, Methanosarcina mazei Go1
MTEREQFFRDVNKIVIKIGTSSITRKGCDHTRENCNIDPAFMESIAFQVSELRKQGKEVIIVSSGAIGVGLNELGIAPKPREIPIRQAAAAVGQSMLMQDWSRAFSRYGMKVAQILLTYEFYSDRVTYLNLRNSISTLLEYGVVPIINENDCTCTNEIEAIFGDNDKLSAMVASKIDADLLIILSDIDGLFDRNPKTHIDAKLLTIVKKITPEIESYGGDPTSFKGVGGMRTKIKAAKICSMAGCYVVIANSDVEDVILKIASGEEIGTLFLAERHIQKNRARWIILARASGTVRVDAGAKAAVLGKNSLLPAGVVDVEGTFDRGDVVKLECDGKIFAKGITDYTSEELIKIKGVHTDQIENVLGYSNYNNVIKKENIGILEELN

SEQ ID NO: 17708 - protein, 447 aa, Methanosarcina mazei Go1
MANDIESKVIKAKKASIELASVSSEVKNRALEAMAEALDKERKIILEANLKDLEYAAQLKKAGKLTQALVDRLKVTDSKVDGMIAGIRDVIKLKDPVGETLSTLELDDDLILYQVSCPIGLIGVIFESRPDVVPQVMSLCLKSGNATIFKGGSEARESNRTIFDILVRAIESTGGMPEGAFQLMETREEIMSLLSLDAYVDLLIPRGSNEFVKFIQDNTKIPVLGHTSGICHIYVDEFADPDTAWQVCFDAKVQYPAVCNAIETLLVNRNIAEVFLPKMAEMYLKAGVELRCDEGSYSLLSEKGLSPLSRATDEDWSLEYNDLILSIKLVDTIKEAVDHINTFGSHHTDGIITENASRRKEFIGLVDSSSVMVNASTRFADGYRYGKGAEVGISTNKIHSRGPVGMEGLLIYKYILMGKGQVVADYAGKNAKPYTHRKLDLKFEDVN

SEQ ID NO: 17709 - protein, 417 aa, Meiothermus ruber [sequence omitted]

SEQ ID NO: 17710 - protein, 222 aa, Yarrowia lipolytica CLIB122
MAQKPLFRFGATDSLATLLERNEKWANRVSSVRPSLFPTNAQGQAPKILWIGCSDSRAGEGCLDLLPGEVFVHRNIANLLPDSDFSSLSVIQFAVQVLKVRHIIVCGHYDCGGVWSSLTSKKLGIIDHWLRPIRDTKVRHKAMLDAIEDPKDKCARLVELNVCAQVNNLKRNTVIIEAQGERDLQIHGVVYDPGSGLLKEIMVPEDEYAEDYFVSDAGELVH

SEQ ID NO: 17711 - protein, 63 aa, Protea piscina
  misc_feature (40)..(46): Xaa can be any naturally occurring amino acid
  unsure (1)..(63): unsure at all Xaa locations
MPGQWEYQVGPSVGIEAGDHIWCSRYLLERITEQAGVVLXXXXXXXEGDWNGAGCHTNYSTKS

SEQ ID NO: 17712 - protein, 316 aa, Picrophilus torridus DSM 9790
MQAEILESLREAYGDELARLGSKNRNIVVLDADLSSSTKTEIFWKSFPDRFFNMGISEQSMVTTAAGLALSGKKVFASTFAVFLSRTYEQLRQSICYNNAPVNFVVTHSGISVGEDGPTHQMLEDVGIMSGLPNMHVIVPADSVETRKVIDYLADYGDSPHYVRLTREKFPVIYSNDYEFIEGKASTLNDGNDITIIAYGIMVSFALRAADLLKENNISARVINMSSIKPIDRDVIIKAARETGRIITAEEHSIYNGLGSRVAEIIAENQYARLKRFGMNDTFGKSGKGMELFDYFHIGYKDLFNTAMNMVNGDKR

SEQ ID NO: 17713 - protein, 143 aa, Oryza sativa (japonica cultivar-group)
MPVPLAPYPTPPVPFTPPNGAQSQLVCSGCRNLLMYPAGATSVCCAVCSTVTAVPAPGTEMAQLVCGGCHTLLMYIRGATSVQCSCCHTVNLAMEANQVAHVNCGNCRMLLMYQYGARSVKCAVCNFVTSVGASPGIDQKPSS

SEQ ID NO: 17714 - protein, 169 aa, Oryza sativa (japonica cultivar-group)
MAEGSDACRYQKRYVSISPSKCSLFIYIKCWPDSIICINSFNQVWPIEGIKKFETLSYLPPLTVEDLLKQIEYLLRSKWVPCLEFSKVGFVYRENHRSPGYYDGRYWTMWKLPMFGCTDATQVLKELEEAKKAYPDAFVRIIGFDNVRQVQLISFIAYKPPGCEESGGN

SEQ ID NO: 17715 - protein, 302 aa, Picrophilus torridus DSM 9790
MFLSDNIYFYFHYICIKTFLNILLMHNTMEEYAIGDLKAVSKELRKKIIEMVYTAKSGHPGGSLSIADVLTVLYFKEMNIDPRNPYKKDRDILVMSKGHASPALYGILAMRGFFDESLLSGFRSINSDLEGHVHRGIPGVETSTGSLGQGLGVAVGFAIASKMDRIKNHVYAILGDGEMEEGSTWESVMAAYKFGLNNLIAILDRNRIQLDGFTEDIMPLNDIGKKVRSFGWHVYDIDGHDFNEIEAAIEDAKQNNDAPSFIVAHTVKGRGVSYMENNPKYHGAPPKNDDEFKRAIDDIEAM

SEQ ID NO: 17716 - protein, 267 aa, Mycobacterium leprae
MMRVKARMNNECSRLIIDCHITSMARFTVMDDRRVADIKRGQAARNAKLASIPVGLAGRAVLGLGKRLTGKSKDEVNTKLIEKTAHQLFSVLGELKGGAMKVGQALSVMEAAIPEEYGEPYREALTKLQKDAPPLPVNKVHRVLDAQLGTKWRDRFSSFNDTPVASASIGQVHKAVWSYGREVAVKIQYPGADEALRADLKTMQRMVGILKQLSPGADIQGVVDELVERTEMELDYRLEADNQRAFARRIRATRALWCQTWWQAHRK

SEQ ID NO: 17717 - protein, 648 aa, Nonomuraea sp. ATCC 39727
MAIVSPFGGLLKGDGEDDPAPSRIRPGTLRRVLGYFRPHVGKVALFVLVTALDSIFVVASPLMLKDLVDKGVLGNDLELVILLACLAAGFAVMSTLLQLVSAYISGRIGQGVSYDLRVQALDHVQRLPIAFFTRTQTGVLVGRLHTELVMTQMAFTQMLTAAASAVTVLLVLAELFYLSWIVALLTLVLIPVFLVPWSYVGRRMQRYTRGLMEENAGLAGLLQERFNVQGAMLSKLFGRPAEEMAEYESRAGRIRGLAVSVTLYGRMAPAIFALMAALATALVYGVGGGLVLSQAFQLGTLVALATLLGRLFGPITQLASIQENALTVLVSFERIFELLDLKPLIEERPDAVALKAGKASDVQFENVSFRYPSADEVSLPSLEQNVRTGQERGEATPEVLRDVSLHVPAGTLTALVGPSGAGKSTLTHLVSRLYDPTSGTVRVGGHDLRDLTFDSLRETVGVVSQDTYLFHDTIRANLLYARPDATEDELVEACRGAQIWDLIASLPRGLDTVVGDRGYRLSGGEKQRLAIARLLLKAPSVVVLDEATAHLDSESEAAVQRALTTALRSRTSLVIAHRLSTIREADHILVIDDGRVRERGTHEELLAEGGLYADLYHTQFAKSGVNGTRPGQGDGAEPVQEVVGGGER

SEQ ID NO: 17718 - protein, 425 aa, Zea mays
HASAHASADAWADAWADAWVVRRAAASNLGKFAATVEQNHLKTEIMSIFDDLTQDDQDSVRLLAVEGCAALGKLLEPQDCVAHILPVIVNFSQDKSWRVRYMVANQLYELCEAVGPEPTRADLVPAYVRLLRDNEAEVRIAAAGKVTKFCRILNPQLSIQHILPCVKELSSDSSQHVRSALASVIMGMAPVLGKDATMEQLLPIFLSLLKDEFPDVRLNIISKLDQVNQVIGIDFLSQTLLPAIVELAEDRHWRVRLAIIEYIPLLASQLGVGFFDDKLGALCMQWLEDKVFSIRDAAANNLKRLAEEFGPEWAMQHIIPQVLEKINNPHYLYRMTILQAISLLAPVMGAEITCQKLLPVVINSSKDRVPNIKFNVAKVLKSLVPILDQSTVKPCLVELSEDPDVDVRYYANQALQACDQMMVSS

SEQ ID NO: 17719 - protein, 448 aa, Prosthecochloris aestuarii DSM 271
MSTTAYCLEPFMEWIQTKNPAEPEFHQAVFEVARSIIPFVNEHQKYQQACILERMCEPDRIISFRVVWEDDKGNIRMNRGHRVQFNNSIGPYKGGLRFHPSVNTGILKFLGFEQTFKNSLTTLPMGSAKGGSDFDPKGKSDREIMRFCQSFMTELSHYIGHFTDIPAGDIGVGAKEISYLFGEYKRLSHQFTGVLTGKSLEYGGSLIRKEATGYGCVYFMEEMLHEKGESIRGKTCTVSGSGNVALYCAQKINHLGGKVVTLSDSDGFIHIPQGISDEELDAIIELKTFKRGRLAEYAEKTACSYFAAEKPWGIECDLAFPCATENEITKSDAALLAGGGCIALAEGANMPTTQDALEVLRNSGILTAPGKAANAGGVAVSGLEMAQNSMRMAWTTQDLDSRLQAIMKSIHQQCTTYGRTNGYIDYVKGANIAGFIKVADAMLAYGIL

SEQ ID NO: 17720 - protein, 683 aa, Nostoc sp. PCC 7120
MEKRYSNVVAELIKKKQFIPFEVCFMTNSQPGYSLLSDITKEQSKEIQRLVDYTNVESLPEIWPIAGKKFGETLALYNPHAKPEVKITYQQLADKIQLFASGLQALGVQAGDRISLIADNSPRWFIADQGIMTAGAVDAVRSSQAEKEELLYIVAHSGSTALVVEDLKTFNKLQDRLHDLPIQVVVILTDETPPTEQSLKVLNFLQLIEVGKNHTFVPVKRKRNELATLIYTSGTTGKPKGVMLSYSNLLHQVTTFRVVVQPKVGDTALSILPSWHSYERTVEYYLLSQGCTQIYTNLRSVKADLKQYKPNYMVAVPRLWESIYEGVQKQFREQPANKQRLIKFLLGMSEKYIKAQRIAQGTSLDHLHASSLERLIAKVLEFAFLPFHVLGQKLVYGKVKEATGGRFKQVISGGGALPKHIDTFFEIIGVQILQGYGLTETSPVTNVRRPWRNFIGTSGQPIPGTEVKIVDPETRQPLPVGKRGLVLLKGPQVMQGYYQNPEATAKAIDPQGWFDSGDLGWVTPDNELVLTGRAKDTIVLSNGENIEPQPIEDACLRSPYIDQIMLVGQDQRSIGALIVPNVEALAKWAESQNLVLSVEDDNLTSSSSQKINLESKMIQGLFRQELNREVQNRPGYRPDDRVGPFKLILEPFSIENGLMTQTLKLRRHVVTERYRDIINAMFA

SEQ ID NO: 17721 - protein, 253 aa, Arabidopsis thaliana
  misc_feature (80)..(80): Xaa can be any naturally occurring amino acid
  misc_feature (102)..(102): Xaa can be any naturally occurring amino acid
  misc_feature (131)..(131): Xaa can be any naturally occurring amino acid
  unsure (1)..(253): unsure at all Xaa locations
MTKNYPTVSEDYKKAVEKCRRKLRGLIAEKNCAPIMVRLAWHSAGTFDCQSRTGGPFGTMRFDAEQAHGANSGIHIALRXLLDPIREQFPTISFADFHQLAXGVVAVEVTGGPDIPFHPGREDKPQPPPEXGRLPDATKGCDHLRDVFAKQMGLSDKDIVALSGAHTLGRCHKDRSGFEGAWTSNPLIFDNSYFKELLSGEKEGLLQLVSDKALLDDPVFRPLVEKYAADEDAFFADYAEAHMKLSELGFADA

SEQ ID NO: 17722 - protein, 118 aa, Thermosynechococcus elongatus BP-1
MKTLPKERRYETFSYLPPLSDAQIARQIQYAIDQGYHPCVEFNETSNAEIRYWTMWKLPLFNCTNAQDVLNEVQQCRSEYPNCFIRVVAFDNIKQCQVMSFIVYKPNQANSGYSGYRY

SEQ ID NO: 17723 - protein, 214 aa, Elaeis guineensis
MVRGKTEMKLIENATSRQVTFSKRRNGLLKKAFELSVLCDAEVAVIVFSPRGKLYEFSSTSMEKTIDRYRRHAKSGINNNEVTQQWKFEAASMSRKIESLEVSKRKLLGENLESCSAEELHEIEGKIEQSLCHVRGKKNQLLEEQIATLKEQEQTLMEENALLREKCKLQSQLRPAAAPEETVPCSQDGENMEVETELYIGWPGRGRTNCRSQG

SEQ ID NO: 17724 - protein, 139 aa, Brassica rapa subsp. pekinensis
MRKGRGSSAVPPALHGSVKEPRYRGVRKRPWGRFAAEIRDPLKKSRVWLGTFDSAVEAARAYGAAARNLRGSKAKTNFPIDCSPSSPLQPPNYQNHHRNLAPNQNQMDPFMDHRLYGGGGGSFPEQQQVISRPASSSLS

SEQ ID NO: 17725 - protein, 372 aa, Shewanella oneidensis MR-1
MNLSEIAYRRVVVKLGTSVLTSGSKQLDKAHMVELARQMAALMRSGVEVVLCTSGAIAAGREHLQYPALPDTMANKQLLAAVGQSQLILAWAQLFSIYGLHVGQLLLTRADLHDRERYLNARDTLNALLANNIIPIINENDAVATNEIKVGDNDNLSARAALLCDADLLILLTDQKGLFDADPRTNPNAKLISQVEKIDDSLRLLAGGSVSGLGTGGMSTKLEAADIARRAGIEVVIASGHHPDVIKKVVAKESIGTHFSAIENPLESRKQWILAGPAAQGSLVLDAGAVKAVTEKGRSLLSKGIIGVKGEFERGATLQLVDQNGKIIARGITRYCGEALGLIAGKHSDEIESVLGYDYGDAIVHRNDMVVL

SEQ ID NO: 17726 - protein, 248 aa, Zea mays
MVARGQGGDRAEEEAAARWESEKEAEIDYVFKVVVVGDAAVGKTQLLARFARDEFALDSKPTIGVEFQTRTLTLHRKRVKTQIWDTAGQERYRAVTSAYYRGALGAMVVYDVTRRATFEHVARWVEELRAHADGSTVVALIGNKADMPAARREVPADEAARLAEDQGLFFSEASALTGDNVERAFLTLLEEVFAAVSRRALELDEARRMRGDQGDSGGEVLSLKGTAVDVGSIMETSAMKRSSQCACS

SEQ ID NO: 17727 - protein, 479 aa, Corynebacterium efficiens YS-314
MLCRTRIVEIVTEHYDVVVLGAGPGGYVSAIRAAQLGKKVAVIEKQYWGGVCLNVGCIPSKALIKNAEIAHIFNHEKKTFGINGEVTFNYEDAHKRSRGVSDKIVGGVHYLMKKNKITEIDGFGTFKDAKTIEVTDGKDAGKTVTFDDCIIATGSVVNSLRGVEFSENVVSYEEQILNPVAPKKMVIVGGGAIGMEFAYVLGNYGVDVTLIEFMDRVLPNEDPEVSKVIAKAYKKMGIKLLPGHATTAVRDNGDSVEVDYQKKGSDKTETITVDRVLISVGFRPRVEGFGLENTGVKLTERGAIDIDEHMRTNVDGIYAIGDVTAKLQLAHVAEAQGIVAAETLAGAETQTLGDYMMMPRATFCNPQVASFGYTEEQAKEKWPDREIKVSSFPFSANGKAVGLAETDGFAKIVADAEFGELLGGHIVGANASELLNELVLAQNWDLTTEEISRSVHIHPTLSEAVKEAAHGVNGHMINF

SEQ ID NO: 17728 - protein, 425 aa, Shewanella oneidensis MR-1 [sequence omitted]

SEQ ID NO: 17729 - protein, 465 aa, Silicibacter pomeroyi DSS-3
MDGTFNENDLSRVVEADRAHIWHHLIQHKPFETNDPRIIVEGKGMRVWDQNGKEHLDAVSGGVWTVNVGYGRESICKAVYDQLMKLCYFANSAGSIPGALYAEKLISKMPGMSRVYYTNSGSEANEKAFKMVRQIAHKKYGGKKTKILYRDRDYHGSTLAAMSAGGQDERNAQYGPFAPDFVKVPHCMEYRKEELGLGHLSGAEFGRAAADLIEEVILREGPETVGALCLEPVTAGGGVITPPEGYWERVQEICKQYDVLLHIDEVVCGIGRTGTWFGYQQYGIKPDFVTMAKGVASGYAAIACMVTTEEVFDLFKDNTDDPLNYFRDISTFGGCTAGPAAALENMRIIEDEDLLGNCTAMGERMLGNLHALMEKHAVIGDVRGKGLFLGAELVANRETKEPVSEKQAQAVVADCMAQGVIIGVTNRSIPGRNNTLCFSPALIATAEDIDAITDAVDQALTRVFG

SEQ ID NO: 17730 - protein, 808 aa, Burkholderia sp. 383
MAKTTGGKKAAGKGSTEPTKKVTAAKSASSTRTTSSATSAPAGKKTVAGTAQAAPAPAARTRAAARPDSGPAKPAAKRASAKSARDTTAAADETAVRTTHAPTVQPAVVQQPRVDIAGTANSMTKKLNEVSVEDDANQSDEQPAAAPAAPGKSKVRDRRAKEKALLKEAFATSTPGTAEELEERRVKLRALIKLGKERGFLTYAEINDHLPDNFTETEALEGIIGTFNDMGVAVYEQAPDAETLLLNDNAPAASSDDEVEEEAEVALSTVDSEFGRTTDPVRMYMREMGTVELLTREGEIEIAKRIEDGLRHMVMAISACPTTIADILAMAERVANEEIRVDELVDGLLDPNASDSADTDGFSAKEAEAIENEDEEAEEEEEEEEEEEEEDDGAAQASANAAQLEALKRASLEKFSQISEWFDKMRRAFEKEGYKSKAYLKAQETIQTELMTIRFTARTVERLCDTLRAQVDEVRQVERQILHIVVDKCGMPRSEFIARFPGSETDLDWSEKIMAEGHSYSAVLSRNVPAIREQQQRLLDLQARVVLPLKDLKETNRQMAAGELKARQAKREMTEANLRLVISIAKKYTNRGLQFLDLIQEGNIGLMKAVDKFEYRRGYKFSTYATWWIRQAITRSIADQARTIRIPVHMIETINKMNRISRQILQETGLEPDPATLAEKMEMPEDKIRKIMKIAKEPISMETPIGDDDDSHLGDFIEDTNTVAPADAALHASMRDVVKDVLDSLTPREAKVLRMRFGIEMSTDHTLEEVGKQFDVTRERIRQIEAKALRKLRHPSRSDKLKSFLEGN

SEQ ID NO: 17731 - protein, 552 aa, Coxiella burnetii RSA 493
MAAKVLKFSHEVLHAMSRGVEVLANAVKVTLGPKGRNVVLDKSFGAPTITKDGVSVAKEIELEDKFENMGAQMVKEVASRTSDDAGDGTTTATVLAQAILVEGIKAVIAGMNPMDLKRGIDKAVTAAVAELKKISKPCKDQKAIAQVGTISANSDKSIGDIIAEAMEKVGKEGVITVEDGSGLENALEVVEGMQFDRGYLSPYFINNQQNMSAELENPFILLVDKKISNIRELIPLLENVAKSGRPLLVIAEDIEGEALATLVVNNIRGVVKVAAVKAPGFGDRRKAMLQDIAVLTGGKVISEEVGLSLEAASLDDLGSAKRVVVTKDDTTIIDGSGDAGDIKNRVEQIRKEIENSSSDYDKEKLQERLAKLAGGVAVIKVGAATEVEMKEKKARVEDALHATRAAVEEGVVPGGGVALIRVLKSLDSVEVENEDQRVGVEIARRAMAYPLSQIVKNTGVQAAVVADKVLNHKDVNYGYNAATGEYGDMIEMGILDPTKVTRTALQNAASIAGLMITTECMVTEAPKKKEESMPGGGDMGGMGGMGGMGGMM

SEQ ID NO: 17732 - protein, 96 aa, Coxiella burnetii RSA 493
MKIRPLHDRVVVRRLEEERTSAGGIVIPDSAAEKPSRGEVISVGPGKPLDNGEVRSLDVKVGDQILFGKYAGTEVKLAGDEYIVMREDDIMGVIEK

SEQ ID NO: 17733 - protein, 570 aa, Arabidopsis thaliana
MEDDKDIYTKDGTLDIHKKPANKNKTGTWKACRFILGTECCERLAYYGMSTNLINYLEKQMNMENVSASKSVSNWSGTCYATPLIGAFIADAYLGRYWTIASFVVIYIAGMTLLTISASVPGLTPTCSGETCHATAGQTAITFIALYLIALGTGGIKPCVSSFGADQFDDTDEKEKESKSSFFNWFYFVINVGAMIASSVLVWIQMNVGWGWGLGVPTVAMAIAVVFFFAGSNFYRLQKPGGSPLTRMLQVIVASCRKSKVKIPEDESLLYENQDAESSIIGSRKLEHTKILTFFDKAAVEAESDNKGAAKSSSWKLCTVTQVEELKALIRLLPIWATGIVFASVYSQMGTVFVLQGNTLDQHMGPNFKIPSASLSLFDTLSVLFWAPVYDKLIVPFARKYTGHERGFTQLQRIGIGLVISIFSMVSAGILEVARLNYVQTHNLYNEETIPMTIFWQVPQYFLVGCAEVFTFIGQLEFFYDQAPDAMRSLCSALSLTAIAFGNYLSTFLVTLVTKVTRSGGRPGWIAKNLNNGHLDYFFWLLAGLSFLNFLVYLWIAKWYTYKKTTGHAL

SEQ ID NO: 17734 - protein, 428 aa, Methylobacillus flagellatus KT
MSRNQQLFEQSQTLIPGGVNSPVRAFGSVGGTPVFFKRGLGARLWDEDGKEYIDYVGSWGPMILGHAQPDVIAAVQATAANSLSFGAPTALELEMAQLITQLVPSMEQVRLVSSGTEATMSAIRLARGFTSRSKILKFEGCYHGHADSLLVKAGSGALTFGQPSSAGVPPELAAHTLTLPYNDVQALEHLFEELGKEIACVILEPVAGNMNLVRPTPEFLGALRSLCTHSGTLLIFDEVMTGFRVALGGAQQLFGIKPDLTTLGKVIGGGLPVGAFGGRADVMAFLAPLGPVYQAGTLSGNPVAVAAGLATLKQLQRPGFHEELALKTRQLTDGLARAARDAGVTFSAQSVGGMFGLYFSAECPASFAEVMQSDKQAFNRFFHGMLEAGVYLAPSAFEAGFVSIAHSEADISQTIVSAQGVFSRINDQ

SEQ ID NO: 17735 - protein, 559 aa, Vibrio vulnificus YJ016
MSKKMFIRQAGNTLLNTPLLNKGSAFTLEERKNFNLIGLLPANIETIDEQVSRAYEQFSLFNSAMEKHIYLRNIQDTNETLYFRLINQHIEEMMPIIYTPTVGEACQKFSQIYRRNRGLFLSFEDQDELEAILNNAPNTHVKVIVITDGERILGLGDQGIGGMGIPIGKLALYTACGGISPEHTLPIVLDVGTNNSALLSDPMYMGWRHPRITGDQYDDFVDDCLKAIRRRWPNALIQFEDFAQANAMPLLMRYQNQFCCFNDDIQGTASVTVGTLLAAAHATGKKLSAQKVLFAGAGSAGCGIAEAIVAQMVSEGISVQQARSQVFMVDRWGMLEQEMPNLLPFQKPLAQPASLRTEWQIEANREISLLDVIQHAHPDVLIGVTGVPGLFNQEIIEAMAEDCERPVVMPLSNPTSRVEAKPEDILMWTQGQAIVATGSPFPDVVLAGKRYPIAQCNNSYIFPGVGLGVISANAHRVTNEMLQQASITLASLSPMLNGGNMLLPPLSEIQNVSRKIALEVAKKAVEQGKASHRTEERLLERIDEEFWYAQYCEYRRIAS

SEQ ID NO: 17736 - protein, 319 aa, Lycopersicon pimpinellifolium
MGSKYSKATNSISDASNSRYGVPFENYRVPLVDLEEATNNFDDNFFIAEGGFGKVYRGVLRDGTKVALKRHNCDSQQSIEEFRTEIEILSRRSHPHLVSLIGYCDGRNEMILIYDYMENGNLKSHLYGSDLPSMSWEQRLEICIGAARGLHYLHTNGVMHRDVKSSNILLDENFVPKITDFGLSKTRPQLYQTHVSTDVKGTFGYIDPEYFIKGRLTEKSDVYSFGVVLFEVLCARSAIVQSLPSEMVNLAEWAVESHNNGQLEQIIDPNLAAKIRPESLRKFGETAVKCLALSSEDRPSMGDVLWKLEYALRLQESVI

SEQ ID NO: 17737 - protein, 272 aa, Bradyrhizobium japonicum USDA 110
MDNLKTQGISMPKLGLGTFRMQGDACRAAVESALSIGYRHIDTAEMYANEEPIGAALAAARLPRGELHVTTKVWHENLAPDAIRRAFDASLKKLRLDHVDLYLVHWPSRSANWGAVFETLMKLKEEGRTRAIGVANFTTALLKIAVEDIKAPIACNQIEYHAMLDQSKVLAYLNARSIPLVAYCPLAQGRVASDPVLAEIGARHNATAAQVALKWLLDQGGVAAIPKASRRESQQANLDALKIMLDDADRNKIAALPKDRRCVNPGFAPAWD

SEQ ID NO: 17738 - protein, 523 aa, Candida albicans SC5314
MSDPTHLISKRAAGRTSVHFTNAPSDKPPANFKPHEKPLALSYGMPNHGFFPIDSIDVNLVDYPFQKITTPSTTSSTAEEEPPSSSLNGSENGHQTKTPPSSIHTPQSTVHISRHTTDPKLIDLARGLQYAAVEGHAPLLQFARDFIIRTHKPNYDDWNVFITTGASDGLNKAADVFLDDGDVILVEEFTFSPFLRFSDNAGAKAVPVKINFDNDSDGIDLTQFVDLLENWEKHYPNLPKPKALYTIATGQNPTGFTQSLEFRKKIYDLAVKYDFAIIEDDPYGYLTLPKYEKPNIGGSGSGNNELKNDLEIDDYLKNHLTPSYLELDTTGRVLRVETFSKLFAPGLRLGFIVGHKKVIDAVKNYSDVVNRGASGLTQTIVNNVIQENFKGVDGWLEWILKMRLNYSYRKDLLLYSIFESQAYKKGYVDVIDPKAGMFVTFKINLPKDVDVLQKMKLLLWKLISYGILVVPGYNMTVDLEFSKDRSNFFRLCYALANNDEEILESGKRLTDAVYEFFSNGLEF

SEQ ID NO: 17739 - protein, 481 aa, Arabidopsis thaliana
MMIHFYSSSLHSSKFLDGFRYHSLSVIRSEARSFNVTTTRKEVVVAAAPLLSLPENRVIPLSNLDLLIPPVDINVCFFYKKPLYGIIGDALKTAMAEALVSYYVLSGEVSINPTNGENEILCSNGGVEFVEAAADVELRELNLYEPYQSIAKFVPMKKHGVFAIQVTELKCGSVVVGCTFDHRIADAYSMNMFLVSWAEISRSDIPISYVPLLKRSLLKPRRPLIIDSSIDKLYMPITSLTVPQEITNQDNILTSRIYYIKADVLEKFQTLATNGKRTKLESFSAFLWKLLAKHAATESVLPTKTSKLGIVVDGRKKLMEQENCNYFGNVLSVPFGERRIDDLIHKPLSWVTDEVHKLLESTMTKDHFLNLIDWVETSRPIPVISRIYSTGSNDGPAFVVSSGKSFPVARIDFGWGSPVFGSYHLPPGSRAGYVMTMPSPVENGGSGDWTVYLHLTKGQLRFIEQEASHVFNPVDNDYLKI

SEQ ID NO: 17740 - protein, 410 aa, Bradyrhizobium japonicum USDA 110
MTSSFDFAPLFPAGLPAPSARWTGLAKYSFVGGNNDSEQVPLDELIEAANLALQREGRSLATYGLAHGPQGYLPLREFLVTKLKRDAGINCTVDDLLIVSGSLQALDLVNNTLLARGDTVIFEQDSYQGSLNRLARLGVNVAGIPLDADGMRMDVLATTLADLKSRGIRPKYIYTIPTVQNPTGSIMPESRRAELVRLAAEYGVPIFEDDCYADLVWSGQRPPAIYAMSPNGGVIHIGSFSKSIAPALRVGFIVAPWDVMSRMLSLKTDAGSGALEQMVLAAYCKPHFASHVPALTKTLRTKLDTLMEALNEQFGTAAEFEEPKGGIFLWVKLPDQVDTLKLYQAALAAGVSINPGPEWSTSKSHSSSRLRLCFASPTHQQIREGVAVLAEVCRKEFGVPARSANVEKRA

SEQ ID NO: 17741 - protein, 361 aa, Picrophilus torridus DSM 9790
MSLKAVVMAGGKGTRLRPITYSIPKPLVPIAGKPCVSYLMDSFYDAGIKDAIVTTGYKFESLINGIIEAKKPDQNVLFSVEREPAGTAGSVKLISNFIDDTIVVGSGDILYDFDIKSIIDFHKKKNASVTIVLTRVDDPSQFGIVDLKDDVITRFLEKPAAGEAFSNIVNAGIYVIEPEVLKYIDKIPFDFAKELFPRLMRHGTPIYGYLGNGTWLDTGRPNDLIKGNQIMVNKYGFKYDSKNITGKNIIKTTSDLSDDIIDSSYIGTNLQIGKNTVIKGSAIYNGVVLGNNVHIEDSIIMDASRIMDNTVIKKSVIMRNCVIGEDSEIIESVISPDLDLHGKSRVYNVSLASKIITDEQV

SEQ ID NO: 17742 - protein, 395 aa, Yarrowia lipolytica CLIB122
MSPEITDQLVRLLTRDDDADAAPVVCDSGNEYDGRMGARISSIFVILICGTFGALFPVLCSKYSQIKVPPVFFFCAKYFGSGVIIATSLLHLLQPANEALSQECLGHWNDYPYAFGICLFMVFFMFAVELVCFNMFGHQGHSHGPVGLASSKDVEISGVHEHTHEGHSHDDHSSDDIVKENEKPREHSSVPVSMPNPIANHDPLTPKDHYGHCEEHTDPNDVDLENDMGLETYSAQLVSIFVLEFGIIFHSVFIGLTLAVSGDEFKDLYIVLVFHQMFEGFGLGTRLATAPWPKKKVWTPWILGLAFGLTTPIAIAIGLGVRKTYPPGGKTASITNGIFDSVSSGILLYTGLVELMAHEFLFSSEFKHANNWRIFWAFAWMCAGAGLMALLAKWA

SEQ ID NO: 17743 - protein, 206 aa, Triticum aestivum
KESRHPLHIAAAMATANQDCAATQFHDHRGGTAATELHGRTISSEQEHGIIVAALRHVVFGYTTAPPEVVEAVACGRCGIDGCLGCDFFGATEPEAEAAAVPVGGVQMNRPTKKEEDAYRGERQRPRKKRAAEIRDPRRAVRKWLGTFDTAEDAARTYDLAALEFRGPRARLNFPCSDETLRGHGSAHGADDEAGTSPQNETLTPP

SEQ ID NO: 17744 - protein, 512 aa, GIBBERELLA ZEAE PH-1
MISHAPAAVNIVRGFQTTPATSGDEDSDPGHNEVPTPRRKTAGRTIVNDVVSANCSPIIRASSPAVSGIAKLRMQMEPLSLDGGSPYSMSRSTSQQGIALDFRKQMISRTHSREDVRSEAGSEISDTSISYEVNLEHDFADESVRERNGYLGTLEGGLAPNRKMTSEDFEQLRCLGKGTYGTVLLVKQRATGRLYAQKQFKKASLVVHKKLIEQTKTERQILESVNRHPFVVKLFYAFQDHEQLYLILEYGQGGELFTHLDTEKMFSEDVAAFYMAEMLLAISHLHNDLGVVYRDLKPENCLLDAEGHLLLTDFGLSKVSIDETDACNSMLGTVEYMAPEVVLGKKYGKAVDWWSFGALGYDLMTGNPPFRGQNHAKIQDNIVKQKLVLPYFLSADAKDLLTRLLRKDPKKRLGAVMPNDLATMKKHRFFRKIDWKKLAAREVEPPIQPMITDPELAENFAPEFTELAISPVLPNKDAWPRSLPKDELFGGFSFVASSSLLNEDRFAAYAQT

SEQ ID NO: 17745 - protein, 490 aa, Xanthomonas campestris pv. campestris str. 8004
MPRFPDQLLYIGGRYVPARGGHTFEVVNPATGEVLANVHNADADDLDAAVDSAKAGQRHWAALTVVERSRILLRAVALLRERNDALAELETLNTGKPLSETRSVDIVTGADVLEYYAGVAQALQGVQVPLREGSFFYTRHEPLGVVGAIGAWNYPIQIALWKAAPALAAGNAMIFKPSEVTPLTALKLAEIFTEAGLPDGVFNVLPGDGASVGHALTEHPEIEKISFTGGTATGRKVMASASSSSLKDVTMELGGKSPLIVCADADLDLAADIAMMANFYSSGQVCTNGTRVFVPRALRTAFEARLLARVQRIHIGDPLDERTTFGPMVSAAHMQRVLEHIEQGKAEGARLLCGGERLRDGALAQGCYVAPTIFSDCTDVMTIVREEIFGPVLSLLTYDDEDEAITRANATSYGLAAGVVTPDLSRAHRLIHRLEAGICWINTWGESPAPMPVGGYKQSGVGRENGLATLQAYTRTKSVQVELERYASVF

SEQ ID NO: 17746 - protein, 319 aa, Zea mays
  misc_feature (160)..(160): Xaa can be any naturally occurring amino acid
  unsure (1)..(319): unsure at all Xaa locations
GCWRFNSLPFQFPHTHVSAHSLLQFRQLVIINRTQSSRFHSRMLLNPASETSVLDTIRQHLLEEPAAAEARPADESFGSLVADQWSGSLPFRTDDADDMVVFGALQDAFAYGWLPDGSFVHVKPEPVRSPDSSSYHPCSYDGSPCFGLLDPEPPLTPGSXTPGRGQEEAAAAMARGKHYRGVRQRPWGKFAAEIRDPARNGARVWLGTYDTAEDAALAYDRAAYRMRGSRALLNFPLRIGSGDKRPSPAPPEPTTSSDSSSSSASGSHKRRKRGEAAAANMAMALVPSPSQLNRPAQPWFPAAPVEQAAMAPRVEQIVV

SEQ ID NO: 17747 - protein, 461 aa, Synechocystis sp. PCC 6803
MTDISMRFGMQAEAREFLKLAVPLAGAQMAQAATGFVDTVMMGWLGQDVLAAGGLATMIFMAFMMTGVGLISGVSPLVAEAYGAGQTRRIGQLTRQGLWIVLLLSIPGMLFITHLNGVMHWSGQADTTIILSDSYLNVMAWGLFPAIAFATLRGCIIALSQARPIMLIVIAATLFNILGNYGLGFGKWGFPALGITGLAIASISAHWIMFLSLLVYMLWHKPLHQYSLFDSLHHLKPRILQQLLWVGGPIGIAAVLEYGLYLTASFFMGALGTPILAAHQVVSQTVLVLFMVPLAMSYAATVRVGQWFGQQHWPQIRQAALVSIGLAVLFMLTAGIALLAYPQQIIGLYLDLNDPANGEALNVGISIMKIAAFGLVLDGLQRTANGVLQGLQDTRIPMVLGTIAYWGIGLTASYLLGFYTPLSGAGVWIGTYIGLAAASIAYLWRFQKVMVRKKSLPVARS

SEQ ID NO: 17748 - protein, 225 aa, Brassica napus
  misc_feature (176)..(176): Xaa can be any naturally occurring amino acid
  misc_feature (188)..(188): Xaa can be any naturally occurring amino acid
  unsure (1)..(225): unsure at all Xaa locations
MASASPPTLPISNPQTVPSAAAAPSSLESHQPPLATPAFRAFINRISETASNGLSQRRPWAELADRSALSKPESISDAAARIRKNYSYFKVNYLAVATAIVGFSLVTHPFSLAFLLCLLASWLFLYLFRPSDQPIVLLGRTFSDRETLGCLILFSIFVVFLTDVGSVLVSAVMVGXVALICAHGAFRXAPEDLFLDEQEPAATGFLSFLGGAASSAAPAVIAARG

SEQ ID NO: 17749 - protein, 827 aa, Propionibacterium acnes KPA171202
MKRLRGCALPILLTTLALAGCSSGRQTKGGGGGEANLKLPPLNEHVGNVSGTALLWIGLVICLFGLGFGLVTYSKLEKLPVHEAMHEVSELIYETCKTYLKQQAKFLMLLWAFIAAIIVVYFLLLEHMGAKVLIILLFSLVGMAGSFGVAWYGIRVNTFANSRTAHASLRGSPWATFDIPMRSGMSIGMVLISVELTLMLFIMLVLPGDLAGPCFIGFAIGESLGAACLRIAGGIFTKIADVGADLMKIAFHIKEDDARNPGVIADCTGDNAGDSVGPSADGFETYGVTGVALITFVLGAVPDQTEQVQLLVWIFVVRVVMLIASFVSYLINNAVAKARYGTVSEMDFEKPLSSLVWITSVMSILLTVLTTRWMLGSMGDGTMWWKLSIIISCGTLAGALIPELVKAFTSTNSRHVREVVTSAREGGASLDILSGLVAGNFSGFWLGIIIVALMGASFLVSGTGSGLGDMGTMSEVKWAVFAFGLVAFGFLGMGAVTIAVDSYGPVTDNAQSVYELSTIEDIPNVSDEFEKHYGFAPRWDIAKRILEAQDGAGNTFKATAKPVLIGTAVVGATTMIFSIIMMLTEGLSNAAEVNKLGLAHAPFLLGLITGGAVIYWFSGASMQAVTTGAYRAVEFIKNNMQLDQNATKASSKDSKKVVQICTEYAQKGMLNIFLGVFFAALGFAFVDPYFFIGYLISIAIFGLYQAIFMANAGGAWDNAKKIVEVDLDAKGTELHDASVVGDTVGDPFKDTSSVALNPVIKFTTLFGLLAVELAVSIGVGLLTYILAAVFILVACVFVYRSFYGMRIDSTKDPEEFGVVAKEAGSGS

SEQ ID NO: 17750 - protein, 482 aa, Zea mays
  misc_feature (249)..(249): Xaa can be any naturally occurring amino acid
  unsure (1)..(482): unsure at all Xaa locations
MVSSEITSVTVTRAQGSKLFRGKILLPGGSSDVVPSENVEFDFSDVFGPSAVHTHTEVSILTPGSPAPVAESNDEVYNDPDVIVKRSHSLVGPSSLVSQSLPFSKLTLHKKDSSLEISECPSKEKQINQGSLSDDEFDDVKKENEGVGLDDFEVLKLVGRGAFGKVYQVRKKGTSEIYAMKVMRKDKVVEKNHTEYMKAERDILTKVDHPFVVQLRYSFQTKYRLYLVLDFINGGHLFFQLYHQGLFRXEELARIYAAEIVSAVAHLHANGIMHRDLKPENILLDADGHAMLTDFGVAKEFDENTRSNSMCGTVEYMAPEIVQGRGHDKAADWWSVGVLLFEMLTGKPPFVGGNRDKIQQKIVKEKIKLPTYLSSEVHSMLKGLLHKEAGRRLGSGPGGSDEIKNHKWFKSVNWKRLEARQIEPSFRPNVAGKTCIANFDECWTNMPVLDSPVASPVAANSNFVGFSYVRPAPFLQKPSPLG

SEQ ID NO: 17751 - protein, 504 aa, Zea mays
MAVGGDDDSMERDFAARLRLAHSPSPATPAAAASSSPTAAGGIAFRAPQEQFTADDFVLGKIYGVGSYSKVVRAKKKDTGRVYALKIMDKKFITKENKISYVKMERIVLDQLDHPGVIRLFFTFQDTYSLYMALESCEGGELFDQIVRKGRLSEDDARFYAAEIVDILEYLHGLGLIHRDVKPENLLLTSDGHIKIADFGSVKPTRDTPIKVLPNSTTERACTFVGTAAYVPPEVLNSAPATFGNDLWALGCTLYQMLSGSSPFKDASEWLIFQRIIARDLKFPEYFSAEARDLVDKLLDVDPGKRPGAGPDGYSSLKEHPFFRGIDWKNLRKTRPPKLAIDANANEDEDSQDSNWLAHMGSVAVNQQSNTVGNNGAPSSSEVRSHISKLASIDSFDSKWQEFLDPGESVVLISKLKKINKLANKKIQLILTDKPQLICVDPSKMVAKGNIIWSDDPSELSVQVSDSSHFRICTPKKVSTFEDAKQRAWQWKKAIEDLQRCQRN

SEQ ID NO: 17752 - protein, 599 aa, Coxiella burnetii RSA 493
MMNNITDSANLLEALEKTGKKYPQQIALTIQRDDQQVNYGYQRLLEKVDEFAARFKSANIQSGQRVVIISQNHPEAIVAYFAILKCQATAALIDINLPKKDIVQLIQAAKPSALVFSEELANLLSHTAATGYPAFDHYNNAALHVNFAKEAPLSEDETSDVATLLFTSGTTGNYKGVMLTHQNLLSQIESCRQALKITCNDRFLSVLPLHHVFPFVSSLLTPLIIGCSTMQISKIEGSFLLTAIQVHKPTILVVVPSILELFYQRIRGKINQLDSKQQKFISWLEKINQTSLNLLKLNLGKIFFRKIQNNFGGKLRYIVSGGATLDGQLHLALARLGFLILEGYGLTEVSGPCTVNRIDNNLLAAVYTLSALSRATMQWQQHPHFSGPLSITCKIFGPEFLGFGVDRLVQLLGGRGYIESNQVPQLFRDARLLRIFEGPTEMLLMYLGMFAVNFYSQLRELIQQLSPRLEISTKIAPPIKDLPGLIAKNFPQLNDEQQKQLYYLLLGKLTGFVILMACADFTEKDTQHYTLIKAWLNHQLKSATLPMAQFSPHIGISLCSDILLTEQEIAVQVDNFKQDVGDIYQGLPSEQWKLDDYLK

SEQ ID NO: 17753 - protein, 234 aa, Brassica napus
GYKKTRSFNYGRGYSEEKADRLNELCRGPRSSEGLYSTTKQDAPVVESFPETLVNAKFFVIKSYSEDDVHNSIKYGMWSSTPTGNKKLNAAYQESSQECPVYLLFSVNASGQFVGVAEMIGAVDFNKTMEYWQQDKWIGCFPVKWRIIKDVPNSLLRHITLANNENKPVTNSRDTQEVKLEDGIKIIKIFKEYTSKTCILDDFKFYETRQKIIRDKKIKQKKQVLDGATVETIH

SEQ ID NO: 17754 - protein, 221 aa, Triticum aestivum
MASAPTQPPLLPVTNPTAAGSAPAAGGGGGGLDAPIATPAFRLFMSRISESARRSLSDRRPWAEMVDRSAFSRPDSLSDATSRLRRNLTYFRVNYTAVVAFALAASLLAHPFSLLILLGVLAAWCFLYIFRASDQPVALFGRTFSDRETLLGLVVASIVAFFFTPVASLIISGMLVGGAIVAAHGAFRMPEDLFLDDADAASGNSAAQGLLSFLGAPGSRV

SEQ ID NO: 17755 - protein, 536 aa, Methanosarcina barkeri str. fusaro
MASKQIMFDENARKALLNGVDKVANTVKITLGPKGRYVVLDKSTKPVVTNDGVTIAKEIELHDKFENMGAKLVKEVASKTQDNTGDGTTTATLLAQSMIREGLKNISAGANPIDVKKGIEMATENVVGYLKSKSSEVKGKEKIVQVATVSANNDEEIGNLIADAMERVGYNGVITVEDSKTMETNLDVVEGMQFDRGFVSPYMATDSEKMVCEFEDPYILITDKKINSMKQIVPVLEKVASEGRSLLIIAEDVDGDAQAALILNIIRGALRVCAVKAPGFGNERKEMLEDIAVLTGGQVISEDKGMKLEEFDDYMLGSARKVTIDNNKTIIVEGKGDKAKIKERVSLIEAQINIADVEYKKTELKKRQAKLGGGVAVIKVGAATETELKEKKMRIDDALNATKAAVEEGVVIGGGISLFRAAAILDSLKLEGDREIGVKIVQRAIEEPVRQIAENAGKEGAEVVATIRAEPRELFGYNAKKDVFEDLFEAGVIDPTKVVRSGLQNAASIAGMVLTTEALVTDFNDEKDEKAATIII

SEQ ID NO: 17756 - protein, 404 aa, Photobacterium profundum SS9
MHNIGMSSKLNNVCYDIRGPVLKHAKRMEEEGHKILKLNIGNPAPFGFDAPDEILVDVIRNLPTSQGYCDSKGIYPARKAIVQHYQKRGLLDLDVEDVYIGNGVSELIVMAMQALLDNNDEILVPSPDYPLWTAAVSLSGGNPVHYICDEESDWYPDLDDIKKKITPNTRGIVLINPNNPTGAVYSRDFLLEIVEIARKHKLIIFADEIYDKILYEGAQHTSIAPLAPDVFCITFNGLSKSYRVCGFRAGWMVLSGPKHEAKGYIEGLEMLSSMRLCANVPMQHAIQTAIGGYQSINELILPGGRLLEQRDKAYDLITQIPGVSCVKPKGALYLFPKLDQKKFNIVDDQRMALDFLQQEKVLIVHGTGFNWEKPDHFRIVTLPRVDDLEMAIGRLERFLHNYRQ

SEQ ID NO: 17757 - protein, 244 aa, Propionibacterium acnes KPA171202
MTSRRLMRYQSAQGLAEGVAHRLVQTIVRIQAAQERIDLCLTGGRIANIVYAAMEDVPECAKIRPDQLHVWWGDDRFVPTGHPDRNSLQALSLLSSAIRLDPSKTHVMPAADGKADPDEAAYSYAQELGGVVFDICLLGMGTDGHVASLFPGHPSFNPTTAALAVGVTDAPKPPPDRLSVTMPVINRSKRVWFLVSGPEKAEAVEKVFAGDESLPATWANGTIETSWMVDHDASIGLPRYNCSL

SEQ ID NO: 17758 - protein, 479 aa, Methanosarcina mazei Go1
MVAMKMQINGKAAGSCGGECFDVRNPATCELLEQVPRGTEEDVALAVEAALSAFEGWASISPQQRGMVFYRAAGLVRQRKEELAALLTQEQGKPLAEARNELEGFSHVLEYYCGLAGSLRGDFIPVTGNGYSFTVKKPLGVCAAIIPWNMPALIMGWKIAPALISGNTFVLKPASSTPLTNLTLASILNEAGLPAGVLNVVTGSGEIAGESLVRSPDVRKISFTGESGTGKRISELAASGMKRVTLELGGSDPMIVCDDANLESAVAGAIRGRFYNCGQTCTAVKRLYVFESVAREFIRKLEEGVKRLKVGNGLDKDTDMGPLNNHSQFEYIKELVAGIEEKGEGRIIAGGKAPSFKGMGKGYFFEPTLVSDVPGDSRLLKEEVFGPLLPIVTVRNLDEAIEEANRSIYGLGASIWTKDLDRIRMGCEQLNAGIIWVNQHLKVAPEVPFGGVKESGFGRENGPDILSEYLETRTIMLKT

SEQ ID NO: 17759 - protein, 982 aa, Bdellovibrio bacteriovorus HD100
MNDIQSQIVSRGEEILKRMESQSKASIFSKDFWYGSIMEWSMKNEKFKTNMFRFVDVLPSINSGDEVARHLKEYFSEDGGTLPPVFNVGLGLGSLAPGLMAGAIKKNVMGMAKMFITGESPDEALPVLKKARKNKMTFTVDILGEATLSEKEAQDYSNKYMELVTWLAKDAEKWDEVPQIDRDHEGALPKVNVSVKMTALYSQIKDAAWDESKKILKDRLRPVFRLGMEKGVFVNLDMEQYSVKHLTLEVFTELINEPEFKNYKFFGIVIQAYLRDSFEDVKSLTEFAQKRGTPFWVRLVKGAYWDYETIEAEQRGWPVPVYTNKAESDANYELCAKYLLENIKFIRPAFASHNVRTLAACMLYAEKLNIPKEALEFQMLYGMAEPIKKTIVDMGYRMREYAPVGELIPGMAYLVRRLLENTSNESWLRGKFADNKSMAELLKDPAQGLTPTSPVIPKKPGKFYNEPLLDFAVKADREKMLKALAEAKASLPVNVNIVINNKELQSGKIFDRVNPSQSDQIVGKIQMATTEQAEQAMQAAQTAYKTWKNVPCEQRAALVDKLADIMTRDRFKLIATQVLEVGKPWAEADGDIGEAIDFCRYYARHMRELQKPLRVGGLPGELSHYIYKSRGVTAVIAPWNFPLAILAGMVTAAAVAGNTVVMKPAEQSTVVAWGLMKMIQEAGFPQGVINFLPGYGEEVGEYIVNHKYTTTIAFTGSKAVGLHIMNRAAVVQPGQQHVKRCIIEMGGKNAVIIDNDADLDEAVDGVIYSAFGFSGQKCSAASRVIVLDEVYDRFVDRLVETAKSIEIHPAENPKAYMGPVVDKEAYDRILGTIAEAEKNHKLLFKGSVPGGGFFAPPTIFGDVPGDAKLAQAEIFGPVVAVIRAKNLDQALDIANSTEYALTGGVFSRSPANINRVKEELEVGNLYVNRGITGAMVDRHPFGGFKMSGIGSKTGGPDYLKQYMEPACVTENTLRRGFAPAEE

SEQ ID NO: 17760 - protein, 741 aa, Malus x domestica
  misc_feature (699)..(699): Xaa can be any naturally occurring amino acid
  misc_feature (702)..(702): Xaa can be any naturally occurring amino acid
  misc_feature (728)..(728): Xaa can be any naturally occurring amino acid
  misc_feature (738)..(738): Xaa can be any naturally occurring amino acid
  unsure (1)..(741): unsure at all Xaa locations
MEACNCIEPQWPADELLMKYQYISDFFIALAYFSIPLELIYFVKKSAVFPYRWVLVQFGAFIVLCGATHLINLWTFNMHSRTVAIVMTTAKVLTAVVSCATALMLVHIIPDLLSVKTRELFLKNKAAELDREMGLIRTQEETGRHVRMLTHEIRSTLDRHTILKTTLVELGRTLALEECALWMPTRTGLELQLSYTLRQQNPVGYTVPIHLPVVNQVFSSNCAVKISPNSPVARLRQLAGKHIPGEVVAVRVPLLHLSNFQINDWPELSTKRYALMVLMLPSDSARQWHVHELELVEVVADQVAVALSHAAILEESMRARDLLMEQNIALDLARREAETAIRARNDFLAVMNHEMRTPMHAIIALSSLLQETELTPEQRLMVETILKSSNLLATLINDVLDLSRLEDGSLQLDIATFNLHSIFREVHNLIKPVASVKKLSVALNIATDLPVYAIGDEKRLMQIILNVVGNAVKFSKEGSISITAYVAKSESLRDFRAPDFFPVQSDNHFYLRVQVKDSGLGINPQDIPNLFTKFAQTQTSASQNSGGSGLGLAICKRFVNLMEGHIWIESEGLGKGCTATFIVKLGFPERSNEFKQPFAPKLQANHVQTNFPGLKVLVMDDNGVSRSVTKGLLVHLGCDVTTVSNLDEFLHVISQEHKVVFVDVCMPGIDGYELAVRIHEKFAKRHERPVLVALTGSIXKMXKENCMRVGMDGVILKPVSVDKMRSVXSELLEHRVLXEAM

SEQ ID NO: 17761 - protein, 472 aa, Candida albicans SC5314
MSLSPKLEEIVSSIEKSFEIKDDFLVKATEYFIESMNVGLESPKPSKDVMPMIPTYVTSIPTGKEVGLYLAADLGGTNFRVCSIDLKGDHTFSMKQSKYRIPVDLMKAEKSNDLFGFLAKKVQSFLLENHSEACTAKNTEPLKLGFTFSFPVNQTALNRGTLIRWTKGFDIPDTVDRDVVELLQANLTILEVNVKVVAIANDTVGTLLTAAYSNDSAKTNRNTIIGCIFGTGTNGAYFESKIPKLSSSTGKSQGMVINTEWGSFDNGLKILPSTEFDEIVDSETANPGYHLFEKRISGMFLGEILRVALIHLFKKGLIFQELYKARGGSLPHRIEEPWLLDAEVLSYLQIDDSTDLKTSGLILQNVLRLETNKEEREVIQRLTRAISQRAAHLSAIPIAAIAKKVKDQYKDDDRDFEVGCDGSVIEFYPGFRQAVLESIEKINPLKGTNKKIHLKIAKDGSGVGAALCASTA

SEQ ID NO: 17762 - protein, 896 aa, GIBBERELLA ZEAE PH-1
MNGVINQNVRSVADEDNVDHIGVDTPRSGVATPQPDLQDKRLPSIMSYFGQVRNNPSAPSSDPNSSESDTALDGILVQPAPPTDLQLQVHPEGSTRGCDSSASDRSPLQHESLDRMPSTTQRDEHNLSNPYPTPPTSQPSSSEGSISQDMISADSGAHGRAAVEPKSLTQQTQSKKPTASPFITTHFQTSNDPSLPELDSSKIAAHTEDSIQPSHPEPGAADSDTSEVAAPGKWNILNGLKELTRMTFKSGNSTPTRAMSAARPSASERAPSSGRTSHDSAEVSGAHTPRSSGGAQAPAAKGKLTIKINEARGLRKSRDPYVVVVFQRSELISGGPHSLDEEDNLSIDPPPAHGGIAIQRSGSDSGRPLAIPMRSRQSSNTSIHDHGGSVRNRPGPLSFTNPKWDAEAEFDVVDYDMLVDVSVYDHGASGDEFLGHVDFQASKDPGTPVEGWFQLQGHADTMAEKAPTGEIFLEAIYHRAEKKQFGPQDFDILKLIGKGTFGQVYQVRKKDTQRIYAMKVLQKKVIVQKKEVAHTVGERNILVRTAMSDSPFIVGLKFSFQTPSELYLVTDYMSGGELFWHLQKEGRFDEKRAKFYIAELILAIQHLHNNDIVYRDLKPENILLDANGHIALCDFGLSKANLTKNDTTNTFCGTTEYLAPEVLLDESGYTKMVDFWSLGVLVFEMCCGWSPFYAEDTQQMYKNIAFGKVRFPRDTLSQEGRNFVKGLLNRNPKHRLGATDDAEELKRHPFFGDVDWTLLTKKLITPPFKPKLKSETDVSYFDPEFTTALDQNGSLNERAAALARGYAASTPLSPSVQANFQGFTFVDESALEDHMRDRAGLVDEDMDDGNGHGRRHRDNDDWDNLDDIDLRKANRMSGIMKTGHDEHMVGGSHFDV

SEQ ID NO: 17763 - protein, 517 aa, Ipomoea batatas
MEFCATLKSSAHLPRETEFFGGRIRGSLNNNVLLSQSRKSLRLDGNKRKIKPGVAFSVLTRENGTETLTVEAPILERRRANPKNVAAIILPGGAGTHLFPLTNRAATPAVPLGGCYRLIDIPMSNCINSGVNKIFVLTQFNSASLNRHISRTVFGNGVSFGDGFVEVLAATQTQGETGMKWFQGTADAVRQFSWVFEDAKNKDIDNIVILSGDQLYRMDYMDLVQNHIERNSDITLSCATVGDSRASDFGLVKIDRRGRVVQFCEKPKGTEHKAMQVDTTLLGLPRQDARLNPYIACMGVYVFKTDVLLRLLRWRYPTSNDFGSEILPAAVMEHNVQAYIFRDYWEDIGTIKSFYDANLALTEEFPKFEFYDPKTPFYTSPRFLPPTKIDNCKIKDAIISHGCFLRECTVEHSIIGERSRLDCGVELKDTLMMGADTYETESEIASLLADGKVPIGVGENTKIRNAIIDKNVRIGKHVVITNKDGVQESDRPDEGFYIRSGITIIMEKATIRDGTVV

SEQ ID NO: 17764 - protein, 300 aa, Colwellia psychrerythraea 34H
MMTPLVFHPIYSQLELPIRHRFPIEKYVGIRNALVANGVPNNWFKKPTPVNPDNVKTVYDPTYIHQLINNQLDSKAMRRIGFPWSQQLIERTLTAVGGTIMTAQLALEYGKSLNLTGGYHHAFANFGSGFCMINDLYLAALTMLQNDNISKVLIFDADVHQGDGTAKLASNNQNVFTVSIHGEKNFPHRKQVSNLDFALPKGTTDSLYLETVDNALNKAFSSFKPDAVIYDAGVDIHCNDDLGHLDISTQGVLARDKLVFDYCKLKGIPIAAVIGGGYQRDIEALVNVHLQLFVAAGVIT

SEQ ID NO: 17765 - protein, 501 aa, Zea mays
MWKQLLSKLPRKSPACGDSGQCSNGTGIQRTSSCGSIPPGRPASAIRRMSSAVFPSSVVAGIEPLVSFKDVPNSEKQNLFVSKLSLCCVVFGPSYPGRPTRPKDIKRQALLDLIEFVESTNARFSEAAIAACSRMCAINLFRAFPPSCRSGSSGGGEGDEEEPMFDPAWCHLQLVYELLLKFIGSSSLDAKVGKKHFDHSFIVKLLNLLDSEDPRERDCLKTILHRVYGKFMVHRPFIRKAVSNIFYQFVFETDRHNGIAELLEVFGSVISGFALPLKEEHKIFLWRVLIPLHKPKSVGVYLQQLTYCVTQFLEKDPKLASSVIIGLLRYWPITNCQKEVMFLSEIEEILESTSQAEFQKCMVPLFRRIAHCITSSHFQVAERALFVWNNDHIISLIAQNRQVIMPLVIPALEQNIQNHWNQAVLNLTVNVKKMLSEMDDDLFSSCLAKYKDEEEKRVSLEAKRRLTWEKLESAAAFQPVTGHTAVLVGHRPSANLIATMI

SEQ ID NO: 17766 - protein, 410 aa, Brassica napus
  misc_feature (64)..(64): Xaa can be any naturally occurring amino acid
  misc_feature (106)..(106): Xaa can be any naturally occurring amino acid
  misc_feature (159)..(159): Xaa can be any naturally occurring amino acid
  misc_feature (210)..(210): Xaa can be any naturally occurring amino acid
  unsure (1)..(410): unsure at all Xaa locations
MDLLKLSFSLLLLSFLLVSVSSSSDGDDAVIRQVVDGAAEPNVLSSEDHFSLFKSKFGKVYASXREHDYRILRLSKPSLRRAKGATMKMDPSARHGVTQFSDLTRXSEFRKKHLGVKGGFKLPKDANKAPILPTENLPEEFDWRDHGAVTPVKNQGPCXAPGGRQQGSDPPYRESPGGVRLERARRSYSRQKSRSCGSCWSFSATGALEXGADFLATGKLASLSEQQLVDCDHECDPEEAGSCDSGCNGGLMNSAFEYTLKTGGLMREEDYPYTGKDGPTCKLDKSKIVASVSNFSVISIDEEQIAANLVKNGPLAVAINAAYMQTYIGGVSACPYICMRRLNHGVLLVGYGSAGYAPARFKEKPYWIIKNSWGETWGENGFYKICRGRNVCGVDMLVSTVTATVSPAAH

SEQ ID NO: 17767 - protein, 630 aa, Shigella dysenteriae
MCGLAGFLESNLNDNNSAKVLHSMGESIYRRGPDGTGIWFENIENKINVGFVHTRLAIIDLSDAGQQPMHSHCGRYVIAFNGEIYNHLELRYLLESNNHISWRGHSDTETLLACFGIWGIDKTLQACVGMFAIALWDKKEHRLTLARDRVGEKPLYWGWQDDALLFGSELKALKTHPAFSAEINRDALCLLLRHNYIPAPHTIYRGIQKLQPGHYLSVELSNDERKETLHQYWSYEKVVQEGLVNPFMGSPIQAVEHLESLIAQSINGQLISDVPLGAFLSGGIDSSLIVSIMQSLSSSPVKTFSIGFDDKKYDEAIFAVEVARHLGTDHTEMYVNDKDIQDVIPLLPEVYCEPFADSSQLPTFLVSKMAQQHVTVALSGDAGDELFGGYTPYSFTPKYWNYARNIPLQIRKFASRYIDKLPVNPKFKKLIECMAVQNPQLFYRNIISHWLNPEELVKNSSEPSTAFSSSTTFPVNGGYVDWMMSVDAQVYMTDDILVKVDRAAMYNSLETRVPLLDHRIIEFAWQLPVSLKINNGVGKWPLREILYKRVPKSMIERPKKGFSVPLSSWLRGPLRDWAEELIAYKRLADEGYFNVAAVRSCWNLHIQGQADYSRKLWSILMFQSWLENQK

SEQ ID NO: 17768 - protein, 469 aa, Prosthecochloris aestuarii DSM 271
MEEHDMHTQSDFDLAVIGSGPGGFEAAVRAARKGLTVCVIERGALGGVCVNWGCIPTKALLRSAEIFRLAGESSAFGLDIEASSIDLARAVKRSRKVVLLASKGVESALKKNKVTVFQGEATFVDERTLRVSRDGQEDERLTAKHIIIASGARPREIPVLPVDGRHIMTSREALALKSAPERMIVVGGGAIGLEMAWYYHSAGTKVTVLEMLPRLLPLEDKEVSEGLERLLKKAGISIHCEAAVVSASAGDDGIVDAVVRMKDGSEQKMQGECLLVAAGVVPNSGGLQLDAAGVILERGFIATDAQCRTNVDHIYAIGDVRGGMQLAHKASAEAVIAVESITGGNPMPIDDAMVPRCVYVEPAVAAIGASQEDAAAEGREVMVGRAMFAASGKASAYGFRDGFVKLIFDAGSGVMIGGHVLGHGAVELIGELSLAMRLGATADQIASTIHAHPTLSETVREAAENAVVA

SEQ ID NO: 17769 - protein, 492 aa, Arabidopsis thaliana
MDPYKYRPASSYNSPFFTTNSGAPVWNNNSSMTVGPRGPILLEDYHLVEKLANFDRERIPERVVHARGASAKGFFEVTHDISNLTCADFLRAPGVQTPVIVRFSTVIHERGSPETLRDPRGFAVKFYTREGNFDLVGNNFPVFFIRDGMKFPDMVHALKPNPKSHIQENWRILDFFSHHPESLNMFTFLFDDIGIPQDYRHMDGSGVNTYMLINKAGKAHYVKFHWKPTCGVKSLLEEDAILVGGTNHSHATQDLYDSIAAGNYPEWKLFIQIIDPADEDKFDFDPLDVTKTWPEDILPLQPVGRMVLNKNIDNFFAENEQLAFCPAIIVPGIHYSDDKLLQTRVFSYADTQRHRLGPNYLQLPVNAPKCAHHNNHHEGFMNFMHRDEEVNYFPSRYDQVRHAEKYPTPPAVCSGKRERCIIEKENNFKEPGERYRTFTPERQERFIQRWIDALSDPRITHEIRSIWISYWSQADKSLGQKLASRLNVRPSI

SEQ ID NO: 17770 - protein, 176 aa, Picrophilus torridus DSM 9790
MVTKPARMYTRITGPAYTRKEFMGGVPYPKITTFIQGNQKKDFEIEMMLVAEEACQIRHTALEAARVSVNRKLLDAAGSDNYFLQIRPYPHQVIREHKMATGAGADRISSGMRAAFGRPVGTAARVYPGQIIMVGRVDRNNAKLLKDALHKASIKLPTPCKVVVTKGSKITESLGI

SEQ ID NO: 17771 - protein, 252 aa, Saccharomyces cerevisiae
MSLPATFDLTPEDAQLLLAANTHLGARNVQVHQEPYVFNARPDGVHVINVGKTWEKLVLAARIIAAIPNPEDVVAISSRTYGQRAVLKFAAHTGATPIAGRFTPGSFTNYITRSFKEPRLVIVTDPRLDAQAIKEASYVNIPVIALTDLDSPSEFVDVAIPCNNRGKHSIGLIWYLLAREVLRLRGALVDRTQPWSIMPDLYFYRNPEEVEQVAEEAAAAEEGEEEEVKEEVTEGQAEATEWAEENADNVEW

SEQ ID NO: 17772 - protein, 344 aa, Bacteroides fragilis NCTC 9343
MKERILVTGGTGYIGSHTVVELQNSGYEVIIIDNLSNSNADVVDNIEKVSGIRPVFEKLDCLDFDGLDAVFNKYKGIKAIIHFAASKAVGESVEKPLLYYRNNLVSLINLLELMPKHGIEGIVFSSSCTVYGEPDELPVTENAPIKKATSPYGNTKQINEEIVRDTVASGAPINAILLRYFNPIGAHPTALLGELPNGVPQNLIPYLTQTAIGIREKLSVFGDDYDTPDGSCIRDFINVVDLAKAHVIAIARILEKKQKDKVETFNIGTGRGVSVLELINGFEKATGVKLNYQIVGRRAGDIEKVWANPDYANNELGWKAQETLEDTLRSAWAWQLKLRERGIQ

SEQ ID NO: 17773 - protein, 314 aa, Glycine max
MYPRLIHPHDGIVTQDELQGGAASNLSHAHKGDPCLVLTADPKPRLRWTQDLHERFVDAVTQLGGASKATPKAIMRTMNVKGLTLFHLKSHLQKYRLGKQSGKDVGEGCKDGSYLLESPGADNTSPKLPTPDTNEGYEIKEALRAQMEVQSKLHLQVEAEKHLQIRQDAERRYMAMLERACKMLADQFISATVIDTDSQKFQGIGSKAPRGTLVDPLGFYSLPSTEVAGVNVPEEEILPSLPPQRADCSTESCLTSHESSGGLALEGSPGEGKRRMLGMDSMAAPLIWSEAKMRTQAINVAQGNHPQGITRYGM

SEQ ID NO: 17774 - protein, 327 aa, ASPERGILLUS NIDULANS FGSC A4
MRHLLLTLDAFNTLFHPRLPIPTQYAHSASAFNIRISPSALQPAFGASYKALSASHPNYGRELALRGDYAGPRQWWEDVIRGCFERALAANPTANSARGNRVPDGLIQDLLERFASARGYKLYDDVVPFLKEVRAQRMKTSQGGGRKVIIGVVSNSDDRISSVLESLGVSVRETRAGEEKTRSGGDLPGFEEEREKEKTANLPQDQKQKDIDFVLTSYQVGAEKPDPLIWNVATRTALQLTGESDAANDEAGGWERIHIGDDYGKDYRGAVDAGWGAYYLAREAEAAAQAPEGTKVITSLLDLLPNIPINSQHASVPSPCYPITPAN

SEQ ID NO: 17775 - protein, 510 aa, Legionella pneumophila str. Paris
MRRILIYIIFFSYFKLGFTHPQMEFQSNMQEINQYIEKTWSILTRDNTNLLADSDEKLPHTQSIIYLPPEENLNKIKNKVTQNWPEWKKKKVIFKYLPRDISTIKQHGLLYLPHPYIVPGGRFNEMYGWDSYFIELGLIEHNRLTMARNMIDNLIYEIGHYGTILNANRTYYLQRSQPPLLTAMILAYYEKTQDKKWLASTLPAIKKLHTYWTTPPHLIPDLGLSRYYAGGQGKPPEESTVYYEKVLNYFKTHDISDYDKSLFYTETSNQLTELFYIADRTVRESGFDITAKFGPFSAGILDYAPVDLNVLIYQMENDLGIIYKILGNKENATIWTQKAEARAALINHYLWDDKAGYYFDYNFKTKQLKPYIYATTFYPLWAGIASKDQAQSLVNNLPVLLTRGGLLTSCYIQGVQWDAPFGWAPLQYFAVLGLNRYGYKELALDIANRFVNTIHIGFQEAHTLFEKYDVQNMSIHTENKIQYSYNTNVVGFGWTNGVYLVFNRLINANN

SEQ ID NO: 17776 - protein, 270 aa, Zea mays
TRPRTWRTRGGRVIQFSEKPKGAALEEMKVDTSFLNFAIDSPAEYPYIASMGVYVFKRDVLLDLLKSRYAELHDFGSEILPKALHEHNVQAYVFTDYWEDIGTIRSFFDANMALCEQPPKFEFYDPKTPFFTSPRYLPPTKSDKCRIKDAIISHGCFLRECAIDHSIVGVRSRLNSGCELKNTMMMGADLYETEDEISRLLAEGKVPIGVGENTKISNCIIDMNARVGRNVSITNKEGVQEADRPDEGYYIRSGIVVVLKNATIKDGTVI

SEQ ID NO: 17777 - protein, 229 aa, Bacteroides thetaiotaomicron VPI-5482
METARSLIFHLVDIMNAEPDKTFNIAVSGGSTPALMFDLWANEYADITPWKRMKLYWVDERCVPPEDSDSNYGMMRSLLLGIVPIPYENVFRIRGEVKPAKEAVRYSELVSQQVPKKNGWPEFDIVLLGAGDDGHTSSIFPGQEALLSSDQIYVTSTHPRNGQKRIAMTGFPILTARLVIFLITGKAKAEVVEEICHSGDTGPAAYIAHHAENVELFMDAGAAMYVRND

SEQ ID NO: 17778 - protein, 363 aa, Legionella pneumophila subsp. pneumophila str. Philadelphia 1
MEMMRQQRNLLLIPFILCFILARPVFSLNLDALLPDERNTVEVFQKASSKVVYVHRLANATVQRRYSLQKTHIPDGAGSGIIWDNKGHVVTNFHVINGADDIAITLGNMTVPAKVIGSEPRKDIAVLEIKSPKALNYLKSFQPFEIVSLNDLIVGQKAIAIGNPFGLDHSLSKGVISALGRKVPGIGGVTIYDMIQTDTPINPGNSGGPLLNSAGQLIGMNTMIYSRSGSSAGIGFAVPAEDIQKIASQIINHGRVVLSGIGIQRVEPHLAERLGVKKGILIADVVPGTPADKLKLRGTHRNQWGRIVLGDVIVGVNAHPVPNYDALYNLLTEIKVGEQITVSIIRNGKKMDVKMKTIDIAAL

SEQ ID NO: 17779 - protein, 63 aa, Protea aurea subsp. aurea
  misc_feature (30)..(31): Xaa can be any naturally occurring amino acid
  misc_feature (40)..(47): Xaa can be any naturally occurring amino acid
  unsure (1)..(63): unsure at all Xaa locations
MPGQWEYQVGPSVGIEAGDHIWCSRYLLEXXTEQAGVVLXXXXXXXXGDWNGAGCHTNYSTKS

SEQ ID NO: 17780 - protein, 475 aa, Arabidopsis thaliana
MVGGFRVIHLVRPFLAFLPEVQSPERKIPFREKVIYTVISLFIFLVCSQLPLYGIHSTTGADPFYWMRVILASSRGTVMELGITPIVTSGMVMQLLAGSKIIEIDNNVREDRALLNGAQKLLGILIAVGQAVAYVLSGMYGSVGELGVGNAILIIVQLCFAAIIVLCLDELLQKGYGLGSGISLFIATNICESIIWKAFSPTTINSGRGAQFEGAVIALFHLLITRTDKVRALREAFFRQNLPNVTNLHATVLIFLIVIYFQGFRVVLPVRSKNARGQRGSYPIKLFYTSNMPIILQSALVSNIYFISQILYRKFGGNFLVNLIGTWKESEYSGQSIPVGGIAYYITAPSSLAEMATHPFHALFYLVFMLAACALFSKTWIEVSGSSAKDVARQLREQQMVMPGHRDSNLQKELNRYIPTAAAFGGLCIGALTVLADLMGAIGSGTGILLAVTIIYQYFETFEKEKASELGFFGL

SEQ ID NO: 17781 - protein, 89 aa, Brassica napus
VVERRQRRMIKNRESAARSRARKQAYTVELEAELNQLKEENAQLKHALGELERKRKQQYFESLKTRAQPKLPKASGRLRTLVRNPSCPL

SEQ ID NO: 17782 - protein, 511 aa, Pelargonium x hortorum
MYNMSLYLLLGSSALAFAAYLVLFSFSKSRRRLPPGPKAWPIVGNLPHMGSMPHQNLAAMARTYGPLVYLRLGFVDVVVALSASMASQFLKTHDSNFSSRPPNAGAKHIAYNYHDLVFAPYGPRWRLFRKITSIHLFSGKALDDYRHVRQEEVGVLASNLARAVSTIVNLGQLLNICATNALGRAVIGKKVFKDGTDDVDPKADEFKSMVVELMVLAGVFNIGDFIPPLDCLDLQGVASKMKNLHKRFDAFLSAILQEHNINSAASATPSMLTTLISLKDSVEDSEGGKLTDTEIKALLLNMFTAGTDTTSSTVEWAIAELIRQPEILIRAQKEIDSVVGRDRLVTELDLSKLPYLQAIVKETFRLHSSTPLSLPRIATQSCEINGYHIPKGATLLVNVWAIARDPDVWADPLSFRPERFLPGSEKENVDVKGNDFELIPFGAGRRICAGMSLGLRMVQLLTATLLHAFNWDLPQGQIPQELNMDEAYGLTLQRASPLHVRPRPRLPSHLY
